United States Patent Application Publication US 2022/0186216 A1 - sequence listing, part 2

SEQ ID NO: 15307 - DNA, 24 bp, Artificial Sequence
  Synthetic: FXN 3 forward 9:69041605-69041633; AsCpf1-2
ggtcctgattcactcttcaagtgc

SEQ ID NO: 15308 - DNA, 25 bp, Artificial Sequence
  Synthetic: FXN 3 forward 9:69041605-69041634; AsCpf1-2
ggtcctgattcactcttcaagtgct

SEQ ID NO: 15309 - DNA, 18 bp, Artificial Sequence
  Synthetic: FXN 3 forward 9:69041786-69041808; AsCpf1-2
taatatttcctcaaatgc

SEQ ID NO: 15310 - DNA, 19 bp, Artificial Sequence
  Synthetic: FXN 3 forward 9:69041786-69041809; AsCpf1-2
taatatttcctcaaatgca

SEQ ID NO: 15311 - DNA, 20 bp, Artificial Sequence
  Synthetic: FXN 3 forward 9:69041786-69041810; AsCpf1-2
taatatttcctcaaatgcat

SEQ ID NO: 15312 - DNA, 21 bp, Artificial Sequence
  Synthetic: FXN 3 forward 9:69041786-69041811; AsCpf1-2
taatatttcctcaaatgcatc

SEQ ID NO: 15313 - DNA, 22 bp, Artificial Sequence
  Synthetic: FXN 3 forward 9:69041786-69041812; AsCpf1-2
taatatttcctcaaatgcatcc

SEQ ID NO: 15314 - DNA, 23 bp, Artificial Sequence
  Synthetic: FXN 3 forward 9:69041786-69041813; AsCpf1-2
taatatttcctcaaatgcatccc

SEQ ID NO: 15315 - DNA, 24 bp, Artificial Sequence
  Synthetic: FXN 3 forward 9:69041786-69041814; AsCpf1-2
taatatttcctcaaatgcatccca

SEQ ID NO: 15316 - DNA, 25 bp, Artificial Sequence
  Synthetic: FXN 3 forward 9:69041786-69041815; AsCpf1-2
taatatttcctcaaatgcatcccat

SEQ ID NO: 15317 - DNA, 18 bp, Artificial Sequence
  Synthetic: FXN 3 forward 9:69042270-69042292; AsCpf1-2
accttgacctccaagctt

SEQ ID NO: 15318 - DNA, 19 bp, Artificial Sequence
  Synthetic: FXN 3 forward 9:69042270-69042293; AsCpf1-2
accttgacctccaagcttt

SEQ ID NO: 15319 - DNA, 20 bp, Artificial Sequence
  Synthetic: FXN 3 forward 9:69042270-69042294; AsCpf1-2
accttgacctccaagctttg

SEQ ID NO: 15320 - DNA, 21 bp, Artificial Sequence
  Synthetic: FXN 3 forward 9:69042270-69042295; AsCpf1-2
accttgacctccaagctttgc

SEQ ID NO: 15321 - DNA, 22 bp, Artificial Sequence
  Synthetic: FXN 3 forward 9:69042270-69042296; AsCpf1-2
accttgacctccaagctttgcc

SEQ ID NO: 15322 - DNA, 23 bp, Artificial Sequence
  Synthetic: FXN 3 forward 9:69042270-69042297; AsCpf1-2
accttgacctccaagctttgcct

SEQ ID NO: 15323 - DNA, 24 bp, Artificial Sequence
  Synthetic: FXN 3 forward 9:69042270-69042298; AsCpf1-2
accttgacctccaagctttgcctc

SEQ ID NO: 15324 - DNA, 25 bp, Artificial Sequence
  Synthetic: FXN 3 forward 9:69042270-69042299; AsCpf1-2
accttgacctccaagctttgcctcc

SEQ ID NO: 15325 - DNA, 18 bp, Artificial Sequence
  Synthetic: FXN 3 forward 9:69042430-69042452; AsCpf1-2
ctcacggttgtgaggttt

SEQ ID NO: 15326 - DNA, 19 bp, Artificial Sequence
  Synthetic: FXN 3 forward 9:69042430-69042453; AsCpf1-2
ctcacggttgtgaggtttg

SEQ ID NO: 15327 - DNA, 20 bp, Artificial Sequence
  Synthetic: FXN 3 forward 9:69042430-69042454; AsCpf1-2
ctcacggttgtgaggtttgt

SEQ ID NO: 15328 - DNA, 21 bp, Artificial Sequence
  Synthetic: FXN 3 forward 9:69042430-69042455; AsCpf1-2
ctcacggttgtgaggtttgtt

SEQ ID NO: 15329 - DNA, 22 bp, Artificial Sequence
  Synthetic: FXN 3 forward 9:69042430-69042456; AsCpf1-2
ctcacggttgtgaggtttgttg

SEQ ID NO: 15330 - DNA, 23 bp, Artificial Sequence
  Synthetic: FXN 3 forward 9:69042430-69042457; AsCpf1-2
ctcacggttgtgaggtttgttgt

SEQ ID NO: 15331 - DNA, 24 bp, Artificial Sequence
  Synthetic: FXN 3 forward 9:69042430-69042458; AsCpf1-2
ctcacggttgtgaggtttgttgtg

SEQ ID NO: 15332 - DNA, 25 bp, Artificial Sequence
  Synthetic: FXN 3 forward 9:69042430-69042459; AsCpf1-2
ctcacggttgtgaggtttgttgtga

SEQ ID NO: 15333 - DNA, 18 bp, Artificial Sequence
  Synthetic: FXN 3 reverse 9:69042527-69042549; AsCpf1-2
ttctacctgcttttgcca

SEQ ID NO: 15334 - DNA, 19 bp, Artificial Sequence
  Synthetic: FXN 3 reverse 9:69042527-69042550; AsCpf1-2
ttctacctgcttttgccaa

SEQ ID NO: 15335 - DNA, 20 bp, Artificial Sequence
  Synthetic: FXN 3 reverse 9:69042527-69042551; AsCpf1-2
ttctacctgcttttgccaat

SEQ ID NO: 15336 - DNA, 21 bp, Artificial Sequence
  Synthetic: FXN 3 reverse 9:69042527-69042552; AsCpf1-2
ttctacctgcttttgccaatt

SEQ ID NO: 15337 - DNA, 22 bp, Artificial Sequence
  Synthetic: FXN 3 reverse 9:69042527-69042553; AsCpf1-2
ttctacctgcttttgccaattt

SEQ ID NO: 15338 - DNA, 23 bp, Artificial Sequence
  Synthetic: FXN 3 reverse 9:69042527-69042554; AsCpf1-2
ttctacctgcttttgccaattta

SEQ ID NO: 15339 - DNA, 24 bp, Artificial Sequence
  Synthetic: FXN 3 reverse 9:69042527-69042555; AsCpf1-2
ttctacctgcttttgccaatttaa

SEQ ID NO: 15340 - DNA, 25 bp, Artificial Sequence
  Synthetic: FXN 3 reverse 9:69042527-69042556; AsCpf1-2
ttctacctgcttttgccaatttaat

SEQ ID NO: 15341 - DNA, 18 bp, Artificial Sequence
  Synthetic: FXN 3 forward 9:69042552-69042574; AsCpf1-2
aagcaaggagtatttggc

SEQ ID NO: 15342 - DNA, 19 bp, Artificial Sequence
  Synthetic: FXN 3 forward 9:69042552-69042575; AsCpf1-2
aagcaaggagtatttggca

SEQ ID NO: 15343 - DNA, 20 bp, Artificial Sequence
  Synthetic: FXN 3 forward 9:69042552-69042576; AsCpf1-2
aagcaaggagtatttggcaa

SEQ ID NO: 15344 - DNA, 21 bp, Artificial Sequence
  Synthetic: FXN 3 forward 9:69042552-69042577; AsCpf1-2
aagcaaggagtatttggcaac

SEQ ID NO: 15345 - DNA, 22 bp, Artificial Sequence
  Synthetic: FXN 3 forward 9:69042552-69042578; AsCpf1-2
aagcaaggagtatttggcaacg

SEQ ID NO: 15346 - DNA, 23 bp, Artificial Sequence
  Synthetic: FXN 3 forward 9:69042552-69042579; AsCpf1-2
aagcaaggagtatttggcaacgg

SEQ ID NO: 15347 - DNA, 24 bp, Artificial Sequence
  Synthetic: FXN 3 forward 9:69042552-69042580; AsCpf1-2
aagcaaggagtatttggcaacggt

SEQ ID NO: 15348 - DNA, 25 bp, Artificial Sequence
  Synthetic: FXN 3 forward 9:69042552-69042581; AsCpf1-2
aagcaaggagtatttggcaacggtt

SEQ ID NO: 15349 - DNA, 18 bp, Artificial Sequence
  Synthetic: FXN 3 forward 9:69042587-69042609; AsCpf1-2
attaaaaacagccgaaga

SEQ ID NO: 15350 - DNA, 19 bp, Artificial Sequence
  Synthetic: FXN 3 forward 9:69042587-69042610; AsCpf1-2
attaaaaacagccgaagaa

SEQ ID NO: 15351 - DNA, 20 bp, Artificial Sequence
  Synthetic: FXN 3 forward 9:69042587-69042611; AsCpf1-2
attaaaaacagccgaagaaa

SEQ ID NO: 15352 - DNA, 21 bp, Artificial Sequence
  Synthetic: FXN 3 forward 9:69042587-69042612; AsCpf1-2
attaaaaacagccgaagaaag

SEQ ID NO: 15353 - DNA, 22 bp, Artificial Sequence
  Synthetic: FXN 3 forward 9:69042587-69042613; AsCpf1-2
attaaaaacagccgaagaaaga

SEQ ID NO: 15354 - DNA, 23 bp, Artificial Sequence
  Synthetic: FXN 3 forward 9:69042587-69042614; AsCpf1-2
attaaaaacagccgaagaaagac

SEQ ID NO: 15355 - DNA, 24 bp, Artificial Sequence
  Synthetic: FXN 3 forward 9:69042587-69042615; AsCpf1-2
attaaaaacagccgaagaaagact

SEQ ID NO: 15356 - DNA, 25 bp, Artificial Sequence
  Synthetic: FXN 3 forward 9:69042587-69042616; AsCpf1-2
attaaaaacagccgaagaaagactt

SEQ ID NO: 15357 - DNA, 18 bp, Artificial Sequence
  Synthetic: FXN 3 forward 9:69042729-69042751; AsCpf1-2
agcgactaagacaactaa

SEQ ID NO: 15358 - DNA, 19 bp, Artificial Sequence
  Synthetic: FXN 3 forward 9:69042729-69042752; AsCpf1-2
agcgactaagacaactaag

SEQ ID NO: 15359 - DNA, 20 bp, Artificial Sequence
  Synthetic: FXN 3 forward 9:69042729-69042753; AsCpf1-2
agcgactaagacaactaagg

SEQ ID NO: 15360 - DNA, 21 bp, Artificial Sequence
  Synthetic: FXN 3 forward 9:69042729-69042754; AsCpf1-2
agcgactaagacaactaaggt

SEQ ID NO: 15361 - DNA, 22 bp, Artificial Sequence
  Synthetic: FXN 3 forward 9:69042729-69042755; AsCpf1-2
agcgactaagacaactaaggtt

SEQ ID NO: 15362 - DNA, 23 bp, Artificial Sequence
  Synthetic: FXN 3 forward 9:69042729-69042756; AsCpf1-2
agcgactaagacaactaaggttt

SEQ ID NO: 15363 - DNA, 24 bp, Artificial Sequence
  Synthetic: FXN 3 forward 9:69042729-69042757; AsCpf1-2
agcgactaagacaactaaggtttg

SEQ ID NO: 15364 - DNA, 25 bp, Artificial Sequence
  Synthetic: FXN 3 forward 9:69042729-69042758; AsCpf1-2
agcgactaagacaactaaggtttga

SEQ ID NO: 15365 - DNA, 18 bp, Artificial Sequence
  Synthetic: FXN 3 forward 9:69042938-69042960; AsCpf1-2
tgtgtaggcaagttaccc

SEQ ID NO: 15366 - DNA, 19 bp, Artificial Sequence
  Synthetic: FXN 3 forward 9:69042938-69042961; AsCpf1-2
tgtgtaggcaagttaccct

SEQ ID NO: 15367 - DNA, 20 bp, Artificial Sequence
  Synthetic: FXN 3 forward 9:69042938-69042962; AsCpf1-2
tgtgtaggcaagttaccctt

SEQ ID NO: 15368 - DNA, 21 bp, Artificial Sequence
  Synthetic: FXN 3 forward 9:69042938-69042963; AsCpf1-2
tgtgtaggcaagttacccttt

SEQ ID NO: 15369 - DNA, 22 bp, Artificial Sequence
  Synthetic: FXN 3 forward 9:69042938-69042964; AsCpf1-2
tgtgtaggcaagttaccctttg

SEQ ID NO: 15370 - DNA, 23 bp, Artificial Sequence
  Synthetic: FXN 3 forward 9:69042938-69042965; AsCpf1-2
tgtgtaggcaagttaccctttgg

SEQ ID NO: 15371 - DNA, 24 bp, Artificial Sequence
  Synthetic: FXN 3 forward 9:69042938-69042966; AsCpf1-2
tgtgtaggcaagttaccctttggt

SEQ ID NO: 15372 - DNA, 25 bp, Artificial Sequence
  Synthetic: FXN 3 forward 9:69042938-69042967; AsCpf1-2
tgtgtaggcaagttaccctttggtg

SEQ ID NO: 15373 - DNA, 18 bp, Artificial Sequence
  Synthetic: FXN 3 reverse 9:69042971-69042993; AsCpf1-2
gttgtgttttacagatga

SEQ ID NO: 15374 - DNA, 19 bp, Artificial Sequence
  Synthetic: FXN 3 reverse 9:69042971-69042994; AsCpf1-2
gttgtgttttacagatgag

SEQ ID NO: 15375 - DNA, 20 bp, Artificial Sequence
  Synthetic: FXN 3 reverse 9:69042971-69042995; AsCpf1-2
gttgtgttttacagatgagg

SEQ ID NO: 15376 - DNA, 21 bp, Artificial Sequence
  Synthetic: FXN 3 reverse 9:69042971-69042996; AsCpf1-2
gttgtgttttacagatgagga

SEQ ID NO: 15377 - DNA, 22 bp, Artificial Sequence
  Synthetic: FXN 3 reverse 9:69042971-69042997; AsCpf1-2
gttgtgttttacagatgaggaa

SEQ ID NO: 15378 - DNA, 23 bp, Artificial Sequence
  Synthetic: FXN 3 reverse 9:69042971-69042998; AsCpf1-2
gttgtgttttacagatgaggaaa

SEQ ID NO: 15379 - DNA, 24 bp, Artificial Sequence
  Synthetic: FXN 3 reverse 9:69042971-69042999; AsCpf1-2
gttgtgttttacagatgaggaaac

SEQ ID NO: 15380 - DNA, 25 bp, Artificial Sequence
  Synthetic: FXN 3 reverse 9:69042971-69043000; AsCpf1-2
gttgtgttttacagatgaggaaact

SEQ ID NO: 15381 - DNA, 18 bp, Artificial Sequence
  Synthetic: FXN 3 forward 9:69042996-69043018; AsCpf1-2
gttgatcctcattcgtta

SEQ ID NO: 15382 - DNA, 19 bp, Artificial Sequence
  Synthetic: FXN 3 forward 9:69042996-69043019; AsCpf1-2
gttgatcctcattcgttaa

SEQ ID NO: 15383 - DNA, 20 bp, Artificial Sequence
  Synthetic: FXN 3 forward 9:69042996-69043020; AsCpf1-2
gttgatcctcattcgttaag

SEQ ID NO: 15384 - DNA, 21 bp, Artificial Sequence
  Synthetic: FXN 3 forward 9:69042996-69043021; AsCpf1-2
gttgatcctcattcgttaaga

SEQ ID NO: 15385 - DNA, 22 bp, Artificial Sequence
  Synthetic: FXN 3 forward 9:69042996-69043022; AsCpf1-2
gttgatcctcattcgttaagag

SEQ ID NO: 15386 - DNA, 23 bp, Artificial Sequence
  Synthetic: FXN 3 forward 9:69042996-69043023; AsCpf1-2
gttgatcctcattcgttaagagt

SEQ ID NO: 15387 - DNA, 24 bp, Artificial Sequence
  Synthetic: FXN 3 forward 9:69042996-69043024; AsCpf1-2
gttgatcctcattcgttaagagtc

SEQ ID NO: 15388 - DNA, 25 bp, Artificial Sequence
  Synthetic: FXN 3 forward 9:69042996-69043025; AsCpf1-2
gttgatcctcattcgttaagagtct

SEQ ID NO: 15389 - DNA, 18 bp, Artificial Sequence
  Synthetic: FXN 3 reverse 9:69043174-69043196; AsCpf1-2
acagctgaaataagaagg

SEQ ID NO: 15390 - DNA, 19 bp, Artificial Sequence
  Synthetic: FXN 3 reverse 9:69043174-69043197; AsCpf1-2
acagctgaaataagaaggc

SEQ ID NO: 15391 - DNA, 20 bp, Artificial Sequence
  Synthetic: FXN 3 reverse 9:69043174-69043198; AsCpf1-2
acagctgaaataagaaggca

SEQ ID NO: 15392 - DNA, 21 bp, Artificial Sequence
  Synthetic: FXN 3 reverse 9:69043174-69043199; AsCpf1-2
acagctgaaataagaaggcag

SEQ ID NO: 15393 - DNA, 22 bp, Artificial Sequence
  Synthetic: FXN 3 reverse 9:69043174-69043200; AsCpf1-2
acagctgaaataagaaggcagg

SEQ ID NO: 15394 - DNA, 23 bp, Artificial Sequence
  Synthetic: FXN 3 reverse 9:69043174-69043201; AsCpf1-2
acagctgaaataagaaggcaggg

SEQ ID NO: 15395 - DNA, 24 bp, Artificial Sequence
  Synthetic: FXN 3 reverse 9:69043174-69043202; AsCpf1-2
acagctgaaataagaaggcagggc

SEQ ID NO: 15396 - DNA, 25 bp, Artificial Sequence
  Synthetic: FXN 3 reverse 9:69043174-69043203; AsCpf1-2
acagctgaaataagaaggcagggca

SEQ ID NO: 15397 - DNA, 18 bp, Artificial Sequence
  Synthetic: FXN 3 forward 9:69043256-69043278; AsCpf1-2
cttttttcttggttattt

SEQ ID NO: 15398 - DNA, 19 bp, Artificial Sequence
  Synthetic: FXN 3 forward 9:69043256-69043279; AsCpf1-2
cttttttcttggttatttc

SEQ ID NO: 15399 - DNA, 20 bp, Artificial Sequence
  Synthetic: FXN 3 forward 9:69043256-69043280; AsCpf1-2
cttttttcttggttatttct

SEQ ID NO: 15400 - DNA, 21 bp, Artificial Sequence
  Synthetic: FXN 3 forward 9:69043256-69043281; AsCpf1-2
cttttttcttggttatttctc

SEQ ID NO: 15401 - DNA, 22 bp, Artificial Sequence
  Synthetic: FXN 3 forward 9:69043256-69043282; AsCpf1-2
cttttttcttggttatttctct

SEQ ID NO: 15402 - DNA, 23 bp, Artificial Sequence
  Synthetic: FXN 3 forward 9:69043256-69043283; AsCpf1-2
cttttttcttggttatttctctg

SEQ ID NO: 15403 - DNA, 24 bp, Artificial Sequence
  Synthetic: FXN 3 forward 9:69043256-69043284; AsCpf1-2
cttttttcttggttatttctctgt

SEQ ID NO: 15404 - DNA, 25 bp, Artificial Sequence
  Synthetic: FXN 3 forward 9:69043256-69043285; AsCpf1-2
cttttttcttggttatttctctgtt

SEQ ID NO: 15405 - DNA, 18 bp, Artificial Sequence
  Synthetic: FXN 3 reverse 9:69043459-69043481; AsCpf1-2
attacaccattgcactcc

SEQ ID NO: 15406 - DNA, 19 bp, Artificial Sequence
  Synthetic: FXN 3 reverse 9:69043459-69043482; AsCpf1-2
attacaccattgcactcca

SEQ ID NO: 15407 - DNA, 20 bp, Artificial Sequence
  Synthetic: FXN 3 reverse 9:69043459-69043483; AsCpf1-2
attacaccattgcactccag

SEQ ID NO: 15408 - DNA, 21 bp, Artificial Sequence
  Synthetic: FXN 3 reverse 9:69043459-69043484; AsCpf1-2
attacaccattgcactccagc

SEQ ID NO: 15409 - DNA, 22 bp, Artificial Sequence
  Synthetic: FXN 3 reverse 9:69043459-69043485; AsCpf1-2
attacaccattgcactccagca

SEQ ID NO: 15410 - DNA, 23 bp, Artificial Sequence
  Synthetic: FXN 3 reverse 9:69043459-69043486; AsCpf1-2
attacaccattgcactccagcag

SEQ ID NO: 15411 - DNA, 24 bp, Artificial Sequence
  Synthetic: FXN 3 reverse 9:69043459-69043487; AsCpf1-2
attacaccattgcactccagcagc

SEQ ID NO: 15412 - DNA, 25 bp, Artificial Sequence
  Synthetic: FXN 3 reverse 9:69043459-69043488; AsCpf1-2
attacaccattgcactccagcagcc

SEQ ID NO: 15413 - DNA, 18 bp, Artificial Sequence
  Synthetic: FXN 3 reverse 9:69043555-69043577; AsCpf1-2
tgggtgtggtggggtgta

SEQ ID NO: 15414 - DNA, 19 bp, Artificial Sequence
  Synthetic: FXN 3 reverse 9:69043555-69043578; AsCpf1-2
tgggtgtggtggggtgtac

SEQ ID NO: 15415 - DNA, 20 bp, Artificial Sequence
  Synthetic: FXN 3 reverse 9:69043555-69043579; AsCpf1-2
tgggtgtggtggggtgtacc

SEQ ID NO: 15416 - DNA, 21 bp, Artificial Sequence
  Synthetic: FXN 3 reverse 9:69043555-69043580; AsCpf1-2
tgggtgtggtggggtgtacct

SEQ ID NO: 15417 - DNA, 22 bp, Artificial Sequence
  Synthetic: FXN 3 reverse 9:69043555-69043581; AsCpf1-2
tgggtgtggtggggtgtacctg

SEQ ID NO: 15418 - DNA, 23 bp, Artificial Sequence
  Synthetic: FXN 3 reverse 9:69043555-69043582; AsCpf1-2
tgggtgtggtggggtgtacctgt

SEQ ID NO: 15419 - DNA, 24 bp, Artificial Sequence
  Synthetic: FXN 3 reverse 9:69043555-69043583; AsCpf1-2
tgggtgtggtggggtgtacctgta

SEQ ID NO: 15420 - DNA, 25 bp, Artificial Sequence
  Synthetic: FXN 3 reverse 9:69043555-69043584; AsCpf1-2
tgggtgtggtggggtgtacctgtag

SEQ ID NO: 15421 - DNA, 18 bp, Artificial Sequence
  Synthetic: FXN 3 reverse 9:69043567-69043589; AsCpf1-2
aaaaacattatctgggtg

SEQ ID NO: 15422 - DNA, 19 bp, Artificial Sequence
  Synthetic: FXN 3 reverse 9:69043567-69043590; AsCpf1-2
aaaaacattatctgggtgt

SEQ ID NO: 15423 - DNA, 20 bp, Artificial Sequence
  Synthetic: FXN 3 reverse 9:69043567-69043591; AsCpf1-2
aaaaacattatctgggtgtg

SEQ ID NO: 15424 - DNA, 21 bp, Artificial Sequence
  Synthetic: FXN 3 reverse 9:69043567-69043592; AsCpf1-2
aaaaacattatctgggtgtgg

SEQ ID NO: 15425 - DNA, 22 bp, Artificial Sequence
  Synthetic: FXN 3 reverse 9:69043567-69043593; AsCpf1-2
aaaaacattatctgggtgtggt

SEQ ID NO: 15426 - DNA, 23 bp, Artificial Sequence
  Synthetic: FXN 3 reverse 9:69043567-69043594; AsCpf1-2
aaaaacattatctgggtgtggtg

SEQ ID NO: 15427 - DNA, 24 bp, Artificial Sequence
  Synthetic: FXN 3 reverse 9:69043567-69043595; AsCpf1-2
aaaaacattatctgggtgtggtgg

SEQ ID NO: 15428 - DNA, 25 bp, Artificial Sequence
  Synthetic: FXN 3 reverse 9:69043567-69043596; AsCpf1-2
aaaaacattatctgggtgtggtggg

SEQ ID NO: 15429 - DNA, 18 bp, Artificial Sequence
  Synthetic: FXN 3 reverse 9:69043831-69043853; AsCpf1-2
atctctgcagtttgggag

SEQ ID NO: 15430 - DNA, 19 bp, Artificial Sequence
  Synthetic: FXN 3 reverse 9:69043831-69043854; AsCpf1-2
atctctgcagtttgggagg

SEQ ID NO: 15431 - DNA, 20 bp, Artificial Sequence
  Synthetic: FXN 3 reverse 9:69043831-69043855; AsCpf1-2
atctctgcagtttgggaggc

SEQ ID NO: 15432 - DNA, 21 bp, Artificial Sequence
  Synthetic: FXN 3 reverse 9:69043831-69043856; AsCpf1-2
atctctgcagtttgggaggcg

SEQ ID NO: 15433 - DNA, 22 bp, Artificial Sequence
  Synthetic: FXN 3 reverse 9:69043831-69043857; AsCpf1-2
atctctgcagtttgggaggcgg

SEQ ID NO: 15434 - DNA, 23 bp, Artificial Sequence
  Synthetic: FXN 3 reverse 9:69043831-69043858; AsCpf1-2
atctctgcagtttgggaggcgga

SEQ ID NO: 15435 - DNA, 24 bp, Artificial Sequence
  Synthetic: FXN 3 reverse 9:69043831-69043859; AsCpf1-2
atctctgcagtttgggaggcggag

SEQ ID NO: 15436 - DNA, 25 bp, Artificial Sequence
  Synthetic: FXN 3 reverse 9:69043831-69043860; AsCpf1-2
atctctgcagtttgggaggcggagg

SEQ ID NO: 15437 - DNA, 18 bp, Artificial Sequence
  Synthetic: FXN 3 forward 9:69043856-69043878; AsCpf1-2
ggcacgaaccacaatgcc

SEQ ID NO: 15438 - DNA, 19 bp, Artificial Sequence
  Synthetic: FXN 3 forward 9:69043856-69043879; AsCpf1-2
ggcacgaaccacaatgccc

SEQ ID NO: 15439 - DNA, 20 bp, Artificial Sequence
  Synthetic: FXN 3 forward 9:69043856-69043880; AsCpf1-2
ggcacgaaccacaatgcccg

SEQ ID NO: 15440 - DNA, 21 bp, Artificial Sequence
  Synthetic: FXN 3 forward 9:69043856-69043881; AsCpf1-2
ggcacgaaccacaatgcccgg

SEQ ID NO: 15441 - DNA, 22 bp, Artificial Sequence
  Synthetic: FXN 3 forward 9:69043856-69043882; AsCpf1-2
ggcacgaaccacaatgcccggc

SEQ ID NO: 15442 - DNA, 23 bp, Artificial Sequence
  Synthetic: FXN 3 forward 9:69043856-69043883; AsCpf1-2
ggcacgaaccacaatgcccggcc

SEQ ID NO: 15443 - DNA, 24 bp, Artificial Sequence
  Synthetic: FXN 3 forward 9:69043856-69043884; AsCpf1-2
ggcacgaaccacaatgcccggcct

SEQ ID NO: 15444 - DNA, 25 bp, Artificial Sequence
  Synthetic: FXN 3 forward 9:69043856-69043885; AsCpf1-2
ggcacgaaccacaatgcccggcctc

SEQ ID NO: 15445 - DNA, 18 bp, Artificial Sequence
  Synthetic: FXN 3 forward 9:69043921-69043943; AsCpf1-2
ttgcccaggttggtctca

SEQ ID NO: 15446 - DNA, 19 bp, Artificial Sequence
  Synthetic: FXN 3 forward 9:69043921-69043944; AsCpf1-2
ttgcccaggttggtctcaa

SEQ ID NO: 15447 - DNA, 20 bp, Artificial Sequence
  Synthetic: FXN 3 forward 9:69043921-69043945; AsCpf1-2
ttgcccaggttggtctcaaa

SEQ ID NO: 15448 - DNA, 21 bp, Artificial Sequence
  Synthetic: FXN 3 forward 9:69043921-69043946; AsCpf1-2
ttgcccaggttggtctcaaac

SEQ ID NO: 15449 - DNA, 22 bp, Artificial Sequence
  Synthetic: FXN 3 forward 9:69043921-69043947; AsCpf1-2
ttgcccaggttggtctcaaact

SEQ ID NO: 15450 - DNA, 23 bp, Artificial Sequence
  Synthetic: FXN 3 forward 9:69043921-69043948; AsCpf1-2
ttgcccaggttggtctcaaactc

SEQ ID NO: 15451 - DNA, 24 bp, Artificial Sequence
  Synthetic: FXN 3 forward 9:69043921-69043949; AsCpf1-2
ttgcccaggttggtctcaaactct

SEQ ID NO: 15452 - DNA, 25 bp, Artificial Sequence
  Synthetic: FXN 3 forward 9:69043921-69043950; AsCpf1-2
ttgcccaggttggtctcaaactctt

SEQ ID NO: 15453 - DNA, 18 bp, Artificial Sequence
  Synthetic: FXN 3 reverse 9:69044020-69044042; AsCpf1-2
gttgattcattaacactg

SEQ ID NO: 15454 - DNA, 19 bp, Artificial Sequence
  Synthetic: FXN 3 reverse 9:69044020-69044043; AsCpf1-2
gttgattcattaacactga

SEQ ID NO: 15455 - DNA, 20 bp, Artificial Sequence
  Synthetic: FXN 3 reverse 9:69044020-69044044; AsCpf1-2
gttgattcattaacactgat

SEQ ID NO: 15456 - DNA, 21 bp, Artificial Sequence
  Synthetic: FXN 3 reverse 9:69044020-69044045; AsCpf1-2
gttgattcattaacactgatc

SEQ ID NO: 15457 - DNA, 22 bp, Artificial Sequence
  Synthetic: FXN 3 reverse 9:69044020-69044046; AsCpf1-2
gttgattcattaacactgatct

SEQ ID NO: 15458 - DNA, 23 bp, Artificial Sequence
  Synthetic: FXN 3 reverse 9:69044020-69044047; AsCpf1-2
gttgattcattaacactgatctt

SEQ ID NO: 15459 - DNA, 24 bp, Artificial Sequence
  Synthetic: FXN 3 reverse 9:69044020-69044048; AsCpf1-2
gttgattcattaacactgatcttg

SEQ ID NO: 15460 - DNA, 25 bp, Artificial Sequence
  Synthetic: FXN 3 reverse 9:69044020-69044049; AsCpf1-2
gttgattcattaacactgatcttgg

SEQ ID NO: 15461 - DNA, 18 bp, Artificial Sequence
  Synthetic: FXN 3 reverse 9:69044022-69044044; AsCpf1-2
tagttgattcattaacac

SEQ ID NO: 15462 - DNA, 19 bp, Artificial Sequence
  Synthetic: FXN 3 reverse 9:69044022-69044045; AsCpf1-2
tagttgattcattaacact

SEQ ID NO: 15463 - DNA, 20 bp, Artificial Sequence
  Synthetic: FXN 3 reverse 9:69044022-69044046; AsCpf1-2
tagttgattcattaacactg

SEQ ID NO: 15464 - DNA, 21 bp, Artificial Sequence
  Synthetic: FXN 3 reverse 9:69044022-69044047; AsCpf1-2
tagttgattcattaacactga

SEQ ID NO: 15465 - DNA, 22 bp, Artificial Sequence
  Synthetic: FXN 3 reverse 9:69044022-69044048; AsCpf1-2
tagttgattcattaacactgat

SEQ ID NO: 15466 - DNA, 23 bp, Artificial Sequence
  Synthetic: FXN 3 reverse 9:69044022-69044049; AsCpf1-2
tagttgattcattaacactgatc

SEQ ID NO: 15467 - DNA, 24 bp, Artificial Sequence
  Synthetic: FXN 3 reverse 9:69044022-69044050; AsCpf1-2
tagttgattcattaacactgatct

SEQ ID NO: 15468 - DNA, 25 bp, Artificial Sequence
  Synthetic: FXN 3 reverse 9:69044022-69044051; AsCpf1-2
tagttgattcattaacactgatctt

SEQ ID NO: 15469 - DNA, 18 bp, Artificial Sequence
  Synthetic: FXN 3 reverse 9:69044024-69044046; AsCpf1-2
tatagttgattcattaac

SEQ ID NO: 15470 - DNA, 19 bp, Artificial Sequence
  Synthetic: FXN 3 reverse 9:69044024-69044047; AsCpf1-2
tatagttgattcattaaca

SEQ ID NO: 15471 - DNA, 20 bp, Artificial Sequence
  Synthetic: FXN 3 reverse 9:69044024-69044048; AsCpf1-2
tatagttgattcattaacac

SEQ ID NO: 15472 - DNA, 21 bp, Artificial Sequence
  Synthetic: FXN 3 reverse 9:69044024-69044049; AsCpf1-2
tatagttgattcattaacact

SEQ ID NO: 15473 - DNA, 22 bp, Artificial Sequence
  Synthetic: FXN 3 reverse 9:69044024-69044050; AsCpf1-2
tatagttgattcattaacactg

SEQ ID NO: 15474 - DNA, 23 bp, Artificial Sequence
  Synthetic: FXN 3 reverse 9:69044024-69044051; AsCpf1-2
tatagttgattcattaacactga

SEQ ID NO: 15475 - DNA, 24 bp, Artificial Sequence
  Synthetic: FXN 3 reverse 9:69044024-69044052; AsCpf1-2
tatagttgattcattaacactgat

SEQ ID NO: 15476 - DNA, 25 bp, Artificial Sequence
  Synthetic: FXN 3 reverse 9:69044024-69044053; AsCpf1-2
tatagttgattcattaacactgatc

SEQ ID NO: 15477 - DNA, 18 bp, Artificial Sequence
  Synthetic: FXN 3 reverse 9:69044031-69044053; AsCpf1-2
taatatatatagttgatt

SEQ ID NO: 15478 - DNA, 19 bp, Artificial Sequence
  Synthetic: FXN 3 reverse 9:69044031-69044054; AsCpf1-2
taatatatatagttgattc

SEQ ID NO: 15479 - DNA, 20 bp, Artificial Sequence
  Synthetic: FXN 3 reverse 9:69044031-69044055; AsCpf1-2
taatatatatagttgattca

SEQ ID NO: 15480 - DNA, 21 bp, Artificial Sequence
  Synthetic: FXN 3 reverse 9:69044031-69044056; AsCpf1-2
taatatatatagttgattcat

SEQ ID NO: 15481 - DNA, 22 bp, Artificial Sequence
  Synthetic: FXN 3 reverse 9:69044031-69044057; AsCpf1-2
taatatatatagttgattcatt

SEQ ID NO: 15482 - DNA, 23 bp, Artificial Sequence
  Synthetic: FXN 3 reverse 9:69044031-69044058; AsCpf1-2
taatatatatagttgattcatta

SEQ ID NO: 15483 - DNA, 24 bp, Artificial Sequence
  Synthetic: FXN 3 reverse 9:69044031-69044059; AsCpf1-2
taatatatatagttgattcattaa

SEQ ID NO: 15484 - DNA, 25 bp, Artificial Sequence
  Synthetic: FXN 3 reverse 9:69044031-69044060; AsCpf1-2
taatatatatagttgattcattaac

SEQ ID NO: 15485 - DNA, 18 bp, Artificial Sequence
  Synthetic: FXN 3 forward 9:69044045-69044067; AsCpf1-2
tatattacataaggtgtc

SEQ ID NO: 15486 - DNA, 19 bp, Artificial Sequence
  Synthetic: FXN 3 forward 9:69044045-69044068; AsCpf1-2
tatattacataaggtgtct

SEQ ID NO: 15487 - DNA, 20 bp, Artificial Sequence
  Synthetic: FXN 3 forward 9:69044045-69044069; AsCpf1-2
tatattacataaggtgtctt

SEQ ID NO: 15488 - DNA, 21 bp, Artificial Sequence
  Synthetic: FXN 3 forward 9:69044045-69044070; AsCpf1-2
tatattacataaggtgtcttt

SEQ ID NO: 15489 - DNA, 22 bp, Artificial Sequence
  Synthetic: FXN 3 forward 9:69044045-69044071; AsCpf1-2
tatattacataaggtgtcttta

SEQ ID NO: 15490 - DNA, 23 bp, Artificial Sequence
  Synthetic: FXN 3 forward 9:69044045-69044072; AsCpf1-2
tatattacataaggtgtctttaa

SEQ ID NO: 15491 - DNA, 24 bp, Artificial Sequence
  Synthetic: FXN 3 forward 9:69044045-69044073; AsCpf1-2
tatattacataaggtgtctttaaa

SEQ ID NO: 15492 - DNA, 25 bp, Artificial Sequence
  Synthetic: FXN 3 forward 9:69044045-69044074; AsCpf1-2
tatattacataaggtgtctttaaac

SEQ ID NO: 15493 - DNA, 18 bp, Artificial Sequence
  Synthetic: FXN 3 forward 9:69044047-69044069; AsCpf1-2
tattacataaggtgtctt

SEQ ID NO: 15494 - DNA, 19 bp, Artificial Sequence
  Synthetic: FXN 3 forward 9:69044047-69044070; AsCpf1-2
tattacataaggtgtcttt

SEQ ID NO: 15495 - DNA, 20 bp, Artificial Sequence
  Synthetic: FXN 3 forward 9:69044047-69044071; AsCpf1-2
tattacataaggtgtcttta

SEQ ID NO: 15496 - DNA, 21 bp, Artificial Sequence
  Synthetic: FXN 3 forward 9:69044047-69044072; AsCpf1-2
tattacataaggtgtctttaa

SEQ ID NO: 15497 - DNA, 22 bp, Artificial Sequence
  Synthetic: FXN 3 forward 9:69044047-69044073; AsCpf1-2
tattacataaggtgtctttaaa

SEQ ID NO: 15498 - DNA, 23 bp, Artificial Sequence
  Synthetic: FXN 3 forward 9:69044047-69044074; AsCpf1-2
tattacataaggtgtctttaaac

SEQ ID NO: 15499 - DNA, 24 bp, Artificial Sequence
  Synthetic: FXN 3 forward 9:69044047-69044075; AsCpf1-2
tattacataaggtgtctttaaaca

SEQ ID NO: 15500 - DNA, 25 bp, Artificial Sequence
  Synthetic: FXN 3 forward 9:69044047-69044076; AsCpf1-2
tattacataaggtgtctttaaacag

SEQ ID NO: 15501 - DNA, 18 bp, Artificial Sequence
  Synthetic: FXN 3 forward 9:69044049-69044071; AsCpf1-2
ttacataaggtgtcttta

SEQ ID NO: 15502 - DNA, 19 bp, Artificial Sequence
  Synthetic: FXN 3 forward 9:69044049-69044072; AsCpf1-2
ttacataaggtgtctttaa

SEQ ID NO: 15503 - DNA, 20 bp, Artificial Sequence
  Synthetic: FXN 3 forward 9:69044049-69044073; AsCpf1-2
ttacataaggtgtctttaaa

SEQ ID NO: 15504 - DNA, 21 bp, Artificial Sequence
  Synthetic: FXN 3 forward 9:69044049-69044074; AsCpf1-2
ttacataaggtgtctttaaac

SEQ ID NO: 15505 - DNA, 22 bp, Artificial Sequence
  Synthetic: FXN 3 forward 9:69044049-69044075; AsCpf1-2
ttacataaggtgtctttaaaca

SEQ ID NO: 15506 - DNA, 23 bp, Artificial Sequence
  Synthetic: FXN 3 forward 9:69044049-69044076; AsCpf1-2
ttacataaggtgtctttaaacag

SEQ ID NO: 15507 - DNA, 24 bp, Artificial Sequence
  Synthetic: FXN 3 forward 9:69044049-69044077; AsCpf1-2
ttacataaggtgtctttaaacaga

SEQ ID NO: 15508 - DNA, 25 bp, Artificial Sequence
  Synthetic: FXN 3 forward 9:69044049-69044078; AsCpf1-2
ttacataaggtgtctttaaacagaa

SEQ ID NO: 15509 - DNA, 18 bp, Artificial Sequence
  Synthetic: FXN 3 reverse 9:69044060-69044082; AsCpf1-2
accttatttctgtttaaa

SEQ ID NO: 15510 - DNA, 19 bp, Artificial Sequence
  Synthetic: FXN 3 reverse 9:69044060-69044083; AsCpf1-2
accttatttctgtttaaag

SEQ ID NO: 15511 - DNA, 20 bp, Artificial Sequence
  Synthetic: FXN 3 reverse 9:69044060-69044084; AsCpf1-2
accttatttctgtttaaaga

SEQ ID NO: 15512 - DNA, 21 bp, Artificial Sequence
  Synthetic: FXN 3 reverse 9:69044060-69044085; AsCpf1-2
accttatttctgtttaaagac

SEQ ID NO: 15513 - DNA, 22 bp, Artificial Sequence
  Synthetic: FXN 3 reverse 9:69044060-69044086; AsCpf1-2
accttatttctgtttaaagaca

SEQ ID NO: 15514 - DNA, 23 bp, Artificial Sequence
  Synthetic: FXN 3 reverse 9:69044060-69044087; AsCpf1-2
accttatttctgtttaaagacac

SEQ ID NO: 15515 - DNA, 24 bp, Artificial Sequence
  Synthetic: FXN 3 reverse 9:69044060-69044088; AsCpf1-2
accttatttctgtttaaagacacc

SEQ ID NO: 15516 - DNA, 25 bp, Artificial Sequence
  Synthetic: FXN 3 reverse 9:69044060-69044089; AsCpf1-2
accttatttctgtttaaagacacct

SEQ ID NO: 15517 - DNA, 18 bp, Artificial Sequence
  Synthetic: FXN 3 reverse 9:69044062-69044084; AsCpf1-2
taaccttatttctgttta

SEQ ID NO: 15518 - DNA, 19 bp, Artificial Sequence
  Synthetic: FXN 3 reverse 9:69044062-69044085; AsCpf1-2
taaccttatttctgtttaa

SEQ ID NO: 15519 - DNA, 20 bp, Artificial Sequence
  Synthetic: FXN 3 reverse 9:69044062-69044086; AsCpf1-2
taaccttatttctgtttaaa

SEQ ID NO: 15520 - DNA, 21 bp, Artificial Sequence
  Synthetic: FXN 3 reverse 9:69044062-69044087; AsCpf1-2
taaccttatttctgtttaaag

SEQ ID NO: 15521 - DNA, 22 bp, Artificial Sequence
  Synthetic: FXN 3 reverse 9:69044062-69044088; AsCpf1-2
taaccttatttctgtttaaaga

SEQ ID NO: 15522 - DNA, 23 bp, Artificial Sequence
  Synthetic: FXN 3 reverse 9:69044062-69044089; AsCpf1-2
taaccttatttctgtttaaagac

SEQ ID NO: 15523 - DNA, 24 bp, Artificial Sequence
  Synthetic: FXN 3 reverse 9:69044062-69044090; AsCpf1-2
taaccttatttctgtttaaagaca

SEQ ID NO: 15524 - DNA, 25 bp, Artificial Sequence
  Synthetic: FXN 3 reverse 9:69044062-69044091; AsCpf1-2
taaccttatttctgtttaaagacac

SEQ ID NO: 15525 - DNA, 18 bp, Artificial Sequence
  Synthetic: FXN 3 forward 9:69044085-69044107; AsCpf1-2
tattgatcgattggtaac

SEQ ID NO: 15526 - DNA, 19 bp, Artificial Sequence
  Synthetic: FXN 3 forward 9:69044085-69044108; AsCpf1-2
tattgatcgattggtaaca

SEQ ID NO: 15527 - DNA, 20 bp, Artificial Sequence
  Synthetic: FXN 3 forward 9:69044085-69044109; AsCpf1-2
tattgatcgattggtaacaa

SEQ ID NO: 15528 - DNA, 21 bp, Artificial Sequence
  Synthetic: FXN 3 forward 9:69044085-69044110; AsCpf1-2
tattgatcgattggtaacaat

SEQ ID NO: 15529 - DNA, 22 bp, Artificial Sequence
  Synthetic: FXN 3 forward 9:69044085-69044111; AsCpf1-2
tattgatcgattggtaacaatg

SEQ ID NO: 15530 - DNA, 23 bp, Artificial Sequence
  Synthetic: FXN 3 forward 9:69044085-69044112; AsCpf1-2
tattgatcgattggtaacaatgt

SEQ ID NO: 15531 - DNA, 24 bp, Artificial Sequence
  Synthetic: FXN 3 forward 9:69044085-69044113; AsCpf1-2
tattgatcgattggtaacaatgtt

SEQ ID NO: 15532 - DNA, 25 bp, Artificial Sequence
  Synthetic: FXN 3 forward 9:69044085-69044114; AsCpf1-2
tattgatcgattggtaacaatgttg

SEQ ID NO: 15533 - DNA, 18 bp, Artificial Sequence
  Synthetic: FXN 3 forward 9:69044087-69044109; AsCpf1-2
ttgatcgattggtaacaa

SEQ ID NO: 15534 - DNA, 19 bp, Artificial Sequence
  Synthetic: FXN 3 forward 9:69044087-69044110; AsCpf1-2
ttgatcgattggtaacaat

SEQ ID NO: 15535 - DNA, 20 bp, Artificial Sequence
  Synthetic: FXN 3 forward 9:69044087-69044111; AsCpf1-2
ttgatcgattggtaacaatg

SEQ ID NO: 15536 - DNA, 21 bp, Artificial Sequence
  Synthetic: FXN 3 forward 9:69044087-69044112; AsCpf1-2
ttgatcgattggtaacaatgt

SEQ ID NO: 15537 - DNA, 22 bp, Artificial Sequence
  Synthetic: FXN 3 forward 9:69044087-69044113; AsCpf1-2
ttgatcgattggtaacaatgtt

SEQ ID NO: 15538 - DNA, 23 bp, Artificial Sequence
  Synthetic: FXN 3 forward 9:69044087-69044114; AsCpf1-2
ttgatcgattggtaacaatgttg

SEQ ID NO: 15539 - DNA, 24 bp, Artificial Sequence
  Synthetic: FXN 3 forward 9:69044087-69044115; AsCpf1-2
ttgatcgattggtaacaatgttgt

SEQ ID NO: 15540 - DNA, 25 bp, Artificial Sequence
  Synthetic: FXN 3 forward 9:69044087-69044116; AsCpf1-2
ttgatcgattggtaacaatgttgtg

SEQ ID NO: 15541 - DNA, 18 bp, Artificial Sequence
  Synthetic: FXN 3 reverse 9:69044129-69044151; AsCpf1-2
ggagaaatacaaggctag

SEQ ID NO: 15542 - DNA, 19 bp, Artificial Sequence
  Synthetic: FXN 3 reverse 9:69044129-69044152; AsCpf1-2
ggagaaatacaaggctagg

SEQ ID NO: 15543 - DNA, 20 bp, Artificial Sequence
  Synthetic: FXN 3 reverse 9:69044129-69044153; AsCpf1-2
ggagaaatacaaggctaggt

SEQ ID NO: 15544 - DNA, 21 bp, Artificial Sequence
  Synthetic: FXN 3 reverse 9:69044129-69044154; AsCpf1-2
ggagaaatacaaggctaggta

SEQ ID NO: 15545 - DNA, 22 bp, Artificial Sequence
  Synthetic: FXN 3 reverse 9:69044129-69044155; AsCpf1-2
ggagaaatacaaggctaggtac

SEQ ID NO: 15546 - DNA, 23 bp, Artificial Sequence
  Synthetic: FXN 3 reverse 9:69044129-69044156; AsCpf1-2
ggagaaatacaaggctaggtacc

SEQ ID NO: 15547 - DNA, 24 bp, Artificial Sequence
  Synthetic: FXN 3 reverse 9:69044129-69044157; AsCpf1-2
ggagaaatacaaggctaggtaccc

SEQ ID NO: 15548 - DNA, 25 bp, Artificial Sequence
  Synthetic: FXN 3 reverse 9:69044129-69044158; AsCpf1-2
ggagaaatacaaggctaggtaccct

SEQ ID NO: 15549 - DNA, 18 bp, Artificial Sequence
  Synthetic: FXN 3 forward 9:69044154-69044176; AsCpf1-2
aataatttgctcgttgag

SEQ ID NO: 15550 - DNA, 19 bp, Artificial Sequence
  Synthetic: FXN 3 forward 9:69044154-69044177; AsCpf1-2
aataatttgctcgttgagt

SEQ ID NO: 15551 - DNA, 20 bp, Artificial Sequence
  Synthetic: FXN 3 forward 9:69044154-69044178; AsCpf1-2
aataatttgctcgttgagtg

SEQ ID NO: 15552 - DNA, 21 bp, Artificial Sequence
  Synthetic: FXN 3 forward 9:69044154-69044179; AsCpf1-2
aataatttgctcgttgagtgt

SEQ ID NO: 15553 - DNA, 22 bp, Artificial Sequence
  Synthetic: FXN 3 forward 9:69044154-69044180; AsCpf1-2
aataatttgctcgttgagtgtt

SEQ ID NO: 15554 - DNA, 23 bp, Artificial Sequence
  Synthetic: FXN 3 forward 9:69044154-69044181; AsCpf1-2
aataatttgctcgttgagtgttt

SEQ ID NO: 15555 - DNA, 24 bp, Artificial Sequence
  Synthetic: FXN 3 forward 9:69044154-69044182; AsCpf1-2
aataatttgctcgttgagtgtttg

SEQ ID NO: 15556 - DNA, 25 bp, Artificial Sequence
  Synthetic: FXN 3 forward 9:69044154-69044183; AsCpf1-2
aataatttgctcgttgagtgtttgt

SEQ ID NO: 15557 - DNA, 18 bp, Artificial Sequence
  Synthetic: FXN 3 reverse 9:69044173-69044195; AsCpf1-2
tgctacaaagttgccaca

SEQ ID NO: 15558 - DNA, 19 bp, Artificial Sequence
  Synthetic: FXN 3 reverse 9:69044173-69044196; AsCpf1-2
tgctacaaagttgccacaa

SEQ ID NO: 15559 - DNA, 20 bp, Artificial Sequence
  Synthetic: FXN 3 reverse 9:69044173-69044197; AsCpf1-2
tgctacaaagttgccacaaa

SEQ ID NO: 15560 - DNA, 21 bp, Artificial Sequence
  Synthetic: FXN 3 reverse 9:69044173-69044198; AsCpf1-2
tgctacaaagttgccacaaac

SEQ ID NO: 15561 - DNA, 22 bp, Artificial Sequence
  Synthetic: FXN 3 reverse 9:69044173-69044199; AsCpf1-2
tgctacaaagttgccacaaaca

SEQ ID NO: 15562 - DNA, 23 bp, Artificial Sequence
  Synthetic: FXN 3 reverse 9:69044173-69044200; AsCpf1-2
tgctacaaagttgccacaaacac

SEQ ID NO: 15563 - DNA, 24 bp, Artificial Sequence
  Synthetic: FXN 3 reverse 9:69044173-69044201; AsCpf1-2
tgctacaaagttgccacaaacact

SEQ ID NO: 15564 - DNA, 25 bp, Artificial Sequence
  Synthetic: FXN 3 reverse 9:69044173-69044202; AsCpf1-2
tgctacaaagttgccacaaacactc

SEQ ID NO: 15565 - DNA, 18 bp, Artificial Sequence
  Synthetic: FXN 3 reverse 9:69044247-69044269; AsCpf1-2
taaatggactcagtcttc

SEQ ID NO: 15566 - DNA, 19 bp, Artificial Sequence
  Synthetic: FXN 3 reverse 9:69044247-69044270; AsCpf1-2
taaatggactcagtcttca

SEQ ID NO: 15567 - DNA, 20 bp, Artificial Sequence
  Synthetic: FXN 3 reverse 9:69044247-69044271; AsCpf1-2
taaatggactcagtcttcat

SEQ ID NO: 15568 - DNA, 21 bp, Artificial Sequence
  Synthetic: FXN 3 reverse 9:69044247-69044272; AsCpf1-2
taaatggactcagtcttcatt

SEQ ID NO: 15569 - DNA, 22 bp, Artificial Sequence
  Synthetic: FXN 3 reverse 9:69044247-69044273; AsCpf1-2
taaatggactcagtcttcatta

SEQ ID NO: 15570 - DNA, 23 bp, Artificial Sequence
  Synthetic: FXN 3 reverse 9:69044247-69044274; AsCpf1-2
taaatggactcagtcttcattac

SEQ ID NO: 15571 - DNA, 24 bp, Artificial Sequence
  Synthetic: FXN 3 reverse 9:69044247-69044275; AsCpf1-2
taaatggactcagtcttcattaca

SEQ ID NO: 15572 - DNA, 25 bp, Artificial Sequence
  Synthetic: FXN 3 reverse 9:69044247-69044276; AsCpf1-2
taaatggactcagtcttcattacaa

SEQ ID NO: 15573 - DNA, 18 bp, Artificial Sequence
  Synthetic: FXN 3 reverse 9:69044298-69044320; AsCpf1-2
gcacattctacagtgttc

SEQ ID NO: 15574 - DNA, 19 bp, Artificial Sequence
  Synthetic: FXN 3 reverse 9:69044298-69044321; AsCpf1-2
gcacattctacagtgttct

SEQ ID NO: 15575 - DNA, 20 bp, Artificial Sequence
  Synthetic: FXN 3 reverse 9:69044298-69044322; AsCpf1-2
gcacattctacagtgttctc

SEQ ID NO: 15576 - DNA, 21 bp, Artificial Sequence
  Synthetic: FXN 3 reverse 9:69044298-69044323; AsCpf1-2
gcacattctacagtgttctcc

SEQ ID NO: 15577 - DNA, 22 bp, Artificial Sequence
  Synthetic: FXN 3 reverse 9:69044298-69044324; AsCpf1-2
gcacattctacagtgttctcca

SEQ ID NO: 15578 - DNA, 23 bp, Artificial Sequence
  Synthetic: FXN 3 reverse 9:69044298-69044325; AsCpf1-2
gcacattctacagtgttctccat

SEQ ID NO: 15579 - DNA, 24 bp, Artificial Sequence
  Synthetic: FXN 3 reverse 9:69044298-69044326; AsCpf1-2
gcacattctacagtgttctccatc

SEQ ID NO: 15580 - DNA, 25 bp, Artificial Sequence
  Synthetic: FXN 3 reverse 9:69044298-69044327; AsCpf1-2
gcacattctacagtgttctccatct

SEQ ID NO: 15581 - DNA, 18 bp, Artificial Sequence
  Synthetic: FXN 3 forward 9:69044341-69044363; AsCpf1-2
atggctgccctctcactt

SEQ ID NO: 15582 - DNA, 19 bp, Artificial Sequence
  Synthetic: FXN 3 forward 9:69044341-69044364; AsCpf1-2
atggctgccctctcacttc

SEQ ID NO: 15583 - DNA, 20 bp, Artificial Sequence
  Synthetic: FXN 3 forward 9:69044341-69044365; AsCpf1-2
atggctgccctctcacttct

SEQ ID NO: 15584 - DNA, 21 bp, Artificial Sequence
  Synthetic: FXN 3 forward 9:69044341-69044366; AsCpf1-2
atggctgccctctcacttctt

SEQ ID NO: 15585 - DNA, 22 bp, Artificial Sequence
  Synthetic: FXN 3 forward 9:69044341-69044367; AsCpf1-2
atggctgccctctcacttcttc

SEQ ID NO: 15586 - DNA, 23 bp, Artificial Sequence
  Synthetic: FXN 3 forward 9:69044341-69044368; AsCpf1-2
atggctgccctctcacttcttca

SEQ ID NO: 15587 - DNA, 24 bp, Artificial Sequence
  Synthetic: FXN 3 forward 9:69044341-69044369; AsCpf1-2
atggctgccctctcacttcttcag

SEQ ID NO: 15588 - DNA, 25 bp, Artificial Sequence
  Synthetic: FXN 3 forward 9:69044341-69044370; AsCpf1-2
atggctgccctctcacttcttcaga

SEQ ID NO: 15589 - DNA, 18 bp, Artificial Sequence
  Synthetic: FXN 3 forward 9:69044579-69044601; AsCpf1-2
accaatctcttaaagccc

SEQ ID NO: 15590 - DNA, 19 bp, Artificial Sequence
  Synthetic: FXN 3 forward 9:69044579-69044602; AsCpf1-2
accaatctcttaaagccct

SEQ ID NO: 15591 - DNA, 20 bp, Artificial Sequence
  Synthetic: FXN 3 forward 9:69044579-69044603; AsCpf1-2
accaatctcttaaagccctt

SEQ ID NO: 15592 - DNA, 21 bp, Artificial Sequence
  Synthetic: FXN 3 forward 9:69044579-69044604; AsCpf1-2
accaatctcttaaagcccttc

SEQ ID NO: 15593 - DNA, 22 bp, Artificial Sequence
  Synthetic: FXN 3 forward 9:69044579-69044605; AsCpf1-2
accaatctcttaaagcccttcg

SEQ ID NO: 15594 - DNA, 23 bp, Artificial Sequence
  Synthetic: FXN 3 forward 9:69044579-69044606; AsCpf1-2
accaatctcttaaagcccttcgg

SEQ ID NO: 15595 - DNA, 24 bp, Artificial Sequence
  Synthetic: FXN 3 forward 9:69044579-69044607; AsCpf1-2
accaatctcttaaagcccttcggt

SEQ ID NO: 15596 - DNA, 25 bp, Artificial Sequence
  Synthetic: FXN 3 forward 9:69044579-69044608; AsCpf1-2
accaatctcttaaagcccttcggtg

SEQ ID NO: 15597 - DNA, 18 bp, Artificial Sequence
  Synthetic: FXN 3 reverse 9:69044849-69044871; AsCpf1-2
atgatctgcaggacagaa

SEQ ID NO: 15598 - DNA, 19 bp, Artificial Sequence
  Synthetic: FXN 3 reverse 9:69044849-69044872; AsCpf1-2
atgatctgcaggacagaat

SEQ ID NO: 15599 - DNA, 20 bp, Artificial Sequence
  Synthetic: FXN 3 reverse 9:69044849-69044873; AsCpf1-2
atgatctgcaggacagaatg

SEQ ID NO: 15600 - DNA, 21 bp, Artificial Sequence
  Synthetic: FXN 3 reverse 9:69044849-69044874; AsCpf1-2
atgatctgcaggacagaatgt

SEQ ID NO: 15601 - DNA, 22 bp, Artificial Sequence
  Synthetic: FXN 3 reverse 9:69044849-69044875; AsCpf1-2
atgatctgcaggacagaatgtg

SEQ ID NO: 15602 - DNA, 23 bp, Artificial Sequence
  Synthetic: FXN 3 reverse 9:69044849-69044876; AsCpf1-2
atgatctgcaggacagaatgtga

SEQ ID NO: 15603 - DNA, 24 bp, Artificial Sequence
  Synthetic: FXN 3 reverse 9:69044849-69044877; AsCpf1-2
atgatctgcaggacagaatgtgac

SEQ ID NO: 15604 - DNA, 25 bp, Artificial Sequence
  Synthetic: FXN 3 reverse 9:69044849-69044878; AsCpf1-2
atgatctgcaggacagaatgtgacc

SEQ ID NO: 15605 - DNA, 18 bp, Artificial Sequence
  Synthetic: FXN 3 reverse 9:69045129-69045151; AsCpf1-2
aagtcagctcctcaactg

SEQ ID NO: 15606 - DNA, 19 bp, Artificial Sequence
  Synthetic: FXN 3 reverse 9:69045129-69045152; AsCpf1-2
aagtcagctcctcaactgc

SEQ ID NO: 15607 - DNA, 20 bp, Artificial Sequence
  Synthetic: FXN 3 reverse 9:69045129-69045153; AsCpf1-2
aagtcagctcctcaactgca

SEQ ID NO: 15608 - DNA, 21 bp, Artificial Sequence
  Synthetic: FXN 3 reverse 9:69045129-69045154; AsCpf1-2
aagtcagctcctcaactgcac

SEQ ID NO: 15609 - DNA, 22 bp, Artificial Sequence
  Synthetic: FXN 3 reverse 9:69045129-69045155; AsCpf1-2
aagtcagctcctcaactgcacc

SEQ ID NO: 15610 - DNA, 23 bp, Artificial Sequence
  Synthetic: FXN 3 reverse 9:69045129-69045156; AsCpf1-2
aagtcagctcctcaactgcacca

SEQ ID NO: 15611 - DNA, 24 bp, Artificial Sequence
  Synthetic: FXN 3 reverse 9:69045129-69045157; AsCpf1-2
aagtcagctcctcaactgcaccac

SEQ ID NO: 15612 - DNA, 25 bp, Artificial Sequence
  Synthetic: FXN 3 reverse 9:69045129-69045158; AsCpf1-2
aagtcagctcctcaactgcaccacc

SEQ ID NO: 15613 - DNA, 18 bp, Artificial Sequence
  Synthetic: FXN 3 forward 9:69045154-69045176; AsCpf1-2
ttttatctcattaaattt

SEQ ID NO: 15614 - DNA, 19 bp, Artificial Sequence
  Synthetic: FXN 3 forward 9:69045154-69045177; AsCpf1-2
ttttatctcattaaattta

SEQ ID NO: 15615 - DNA, 20 bp, Artificial Sequence
  Synthetic: FXN 3 forward 9:69045154-69045178; AsCpf1-2
ttttatctcattaaatttaa

SEQ ID NO: 15616 - DNA, 21 bp, Artificial Sequence
  Synthetic: FXN 3 forward 9:69045154-69045179; AsCpf1-2
ttttatctcattaaatttaaa

SEQ ID NO: 15617 - DNA, 22 bp, Artificial Sequence
  Synthetic: FXN 3 forward 9:69045154-69045180; AsCpf1-2
ttttatctcattaaatttaaat

SEQ ID NO: 15618 - DNA, 23 bp, Artificial Sequence
  Synthetic: FXN 3 forward 9:69045154-69045181; AsCpf1-2
ttttatctcattaaatttaaatg

SEQ ID NO: 15619 - DNA, 24 bp, Artificial Sequence
  Synthetic: FXN 3 forward 9:69045154-69045182; AsCpf1-2
ttttatctcattaaatttaaatgt

SEQ ID NO: 15620 - DNA, 25 bp, Artificial Sequence
  Synthetic: FXN 3 forward 9:69045154-69045183; AsCpf1-2
ttttatctcattaaatttaaatgta

SEQ ID NO: 15621 - DNA, 18 bp, Artificial Sequence
  Synthetic: FXN 3 forward 9:69045161-69045183; AsCpf1-2
tcattaaatttaaatgta

SEQ ID NO: 15622 - DNA, 19 bp, Artificial Sequence
  Synthetic: FXN 3 forward 9:69045161-69045184; AsCpf1-2
tcattaaatttaaatgtaa

SEQ ID NO: 15623 - DNA, 20 bp, Artificial Sequence
  Synthetic: FXN 3 forward 9:69045161-69045185; AsCpf1-2
tcattaaatttaaatgtaaa

SEQ ID NO: 15624 - DNA, 21 bp, Artificial Sequence
  Synthetic: FXN 3 forward 9:69045161-69045186; AsCpf1-2
tcattaaatttaaatgtaaat

SEQ ID NO: 15625 - DNA, 22 bp, Artificial Sequence
  Synthetic: FXN 3 forward 9:69045161-69045187; AsCpf1-2
tcattaaatttaaatgtaaata

SEQ ID NO: 15626 - DNA, 23 bp, Artificial Sequence
  Synthetic: FXN 3 forward 9:69045161-69045188; AsCpf1-2
tcattaaatttaaatgtaaatag

SEQ ID NO: 15627 - DNA, 24 bp, Artificial Sequence
  Synthetic: FXN 3 forward 9:69045161-69045189; AsCpf1-2
tcattaaatttaaatgtaaatagc

SEQ ID NO: 15628 - DNA, 25 bp, Artificial Sequence
  Synthetic: FXN 3 forward 9:69045161-69045190; AsCpf1-2
tcattaaatttaaatgtaaatagct

SEQ ID NO: 15629 - DNA, 18 bp, Artificial Sequence
  Synthetic: FXN 3 reverse 9:69045291-69045313; AsCpf1-2
ttaaagtattttaggaat

SEQ ID NO: 15630 - DNA, 19 bp, Artificial Sequence
  Synthetic: FXN 3 reverse 9:69045291-69045314; AsCpf1-2
ttaaagtattttaggaata

SEQ ID NO: 15631 - DNA, 20 bp, Artificial Sequence
  Synthetic: FXN 3 reverse 9:69045291-69045315; AsCpf1-2
ttaaagtattttaggaatat

SEQ ID NO: 15632 - DNA, 21 bp, Artificial Sequence
  Synthetic: FXN 3 reverse 9:69045291-69045316; AsCpf1-2
ttaaagtattttaggaatatt

SEQ ID NO: 15633 - DNA, 22 bp, Artificial Sequence
  Synthetic: FXN 3 reverse 9:69045291-69045317; AsCpf1-2
ttaaagtattttaggaatattt

SEQ ID NO: 15634 - DNA, 23 bp, Artificial Sequence
  Synthetic: FXN 3 reverse 9:69045291-69045318; AsCpf1-2
ttaaagtattttaggaatatttc

SEQ ID NO: 15635 - DNA, 24 bp, Artificial Sequence
  Synthetic: FXN 3 reverse 9:69045291-69045319; AsCpf1-2
ttaaagtattttaggaatatttct

SEQ ID NO: 15636 - DNA, 25 bp, Artificial Sequence
  Synthetic: FXN 3 reverse 9:69045291-69045320; AsCpf1-2
ttaaagtattttaggaatatttctt

SEQ ID NO: 15637 - DNA, 18 bp, Artificial Sequence
  Synthetic: FXN 3 forward 9:69045316-69045338; AsCpf1-2
gggctgggtgcggtggct

SEQ ID NO: 15638 - DNA, 19 bp, Artificial Sequence
  Synthetic: FXN 3 forward 9:69045316-69045339; AsCpf1-2
gggctgggtgcggtggctc

SEQ ID NO: 15639 - DNA, 20 bp, Artificial Sequence
  Synthetic: FXN 3 forward 9:69045316-69045340; AsCpf1-2
gggctgggtgcggtggctca

SEQ ID NO: 15640 - DNA, 21 bp, Artificial Sequence
  Synthetic: FXN 3 forward 9:69045316-69045341; AsCpf1-2
gggctgggtgcggtggctcac

SEQ ID NO: 15641 - DNA, 22 bp, Artificial Sequence
  Synthetic: FXN 3 forward 9:69045316-69045342; AsCpf1-2
gggctgggtgcggtggctcaca

SEQ ID NO: 15642 - DNA, 23 bp, Artificial Sequence
  Synthetic: FXN 3 forward 9:69045316-69045343; AsCpf1-2
gggctgggtgcggtggctcacat

SEQ ID NO: 15643 - DNA, 24 bp, Artificial Sequence
  Synthetic: FXN 3 forward 9:69045316-69045344; AsCpf1-2
gggctgggtgcggtggctcacatc

SEQ ID NO: 15644 - DNA, 25 bp, Artificial Sequence
  Synthetic: FXN 3 forward 9:69045316-69045345; AsCpf1-2
gggctgggtgcggtggctcacatcc

SEQ ID NO: 15645 - DNA, 18 bp, Artificial Sequence
  Synthetic: FXN 3 reverse 9:69045786-69045808; AsCpf1-2
aaagtgtccactttctac

SEQ ID NO: 15646 - DNA, 19 bp, Artificial Sequence
  Synthetic: FXN 3 reverse 9:69045786-69045809; AsCpf1-2
aaagtgtccactttctact

SEQ ID NO: 15647 - DNA, 20 bp, Artificial Sequence
  Synthetic: FXN 3 reverse 9:69045786-69045810; AsCpf1-2
aaagtgtccactttctactt

SEQ ID NO: 15648 - DNA, 21 bp, Artificial Sequence
  Synthetic: FXN 3 reverse 9:69045786-69045811; AsCpf1-2
aaagtgtccactttctacttc

SEQ ID NO: 15649 - DNA, 22 bp, Artificial Sequence
  Synthetic: FXN 3 reverse 9:69045786-69045812; AsCpf1-2
aaagtgtccactttctacttcc

SEQ ID NO: 15650 - DNA, 23 bp, Artificial Sequence
  Synthetic: FXN 3 reverse 9:69045786-69045813; AsCpf1-2
aaagtgtccactttctacttcca

SEQ ID NO: 15651 - DNA, 24 bp, Artificial Sequence
  Synthetic: FXN 3 reverse 9:69045786-69045814; AsCpf1-2
aaagtgtccactttctacttccaa

SEQ ID NO: 15652 - DNA, 25 bp, Artificial Sequence
  Synthetic: FXN 3 reverse 9:69045786-69045815; AsCpf1-2
aaagtgtccactttctacttccaag

SEQ ID NO: 15653 - DNA, 18 bp, Artificial Sequence
  Synthetic: FXN 3 forward 9:69045811-69045833; AsCpf1-2
aggtaaggggggaagtgt

SEQ ID NO: 15654 - DNA, 19 bp, Artificial Sequence
  Synthetic: FXN 3 forward 9:69045811-69045834; AsCpf1-2
aggtaaggggggaagtgtg

SEQ ID NO: 15655 - DNA, 20 bp, Artificial Sequence
  Synthetic: FXN 3 forward 9:69045811-69045835; AsCpf1-2
aggtaaggggggaagtgtgc

SEQ ID NO: 15656 - DNA, 21 bp, Artificial Sequence
  Synthetic: FXN 3 forward 9:69045811-69045836; AsCpf1-2
aggtaaggggggaagtgtgca

SEQ ID NO: 15657 - DNA, 22 bp, Artificial Sequence
  Synthetic: FXN 3 forward 9:69045811-69045837; AsCpf1-2
aggtaaggggggaagtgtgcaa

SEQ ID NO: 15658 - DNA, 23 bp, Artificial Sequence
  Synthetic: FXN 3 forward 9:69045811-69045838; AsCpf1-2
aggtaaggggggaagtgtgcaag

SEQ ID NO: 15659 - DNA, 24 bp, Artificial Sequence
  Synthetic: FXN 3 forward 9:69045811-69045839; AsCpf1-2
aggtaaggggggaagtgtgcaagg

SEQ ID NO: 15660 - DNA, 25 bp, Artificial Sequence
  Synthetic: FXN 3 forward 9:69045811-69045840; AsCpf1-2
aggtaaggggggaagtgtgcaaggg

SEQ ID NO: 15661 - DNA, 18 bp, Artificial Sequence
  Synthetic: FXN 3 reverse 9:69045846-69045868; AsCpf1-2
cacggaactagcagaggg

SEQ ID NO: 15662 - DNA, 19 bp, Artificial Sequence
  Synthetic: FXN 3 reverse 9:69045846-69045869; AsCpf1-2
cacggaactagcagaggga

SEQ ID NO: 15663 - DNA, 20 bp, Artificial Sequence
  Synthetic: FXN 3 reverse 9:69045846-69045870; AsCpf1-2
cacggaactagcagagggac

SEQ ID NO: 15664 - DNA, 21 bp, Artificial Sequence
  Synthetic: FXN 3 reverse 9:69045846-69045871; AsCpf1-2
cacggaactagcagagggacc

SEQ ID NO: 15665 - DNA, 22 bp, Artificial Sequence
  Synthetic: FXN 3 reverse 9:69045846-69045872; AsCpf1-2
cacggaactagcagagggaccc

SEQ ID NO: 15666 - DNA, 23 bp, Artificial Sequence
  Synthetic: FXN 3 reverse 9:69045846-69045873; AsCpf1-2
cacggaactagcagagggacccc

SEQ ID NO: 15667 - DNA, 24 bp, Artificial Sequence
  Synthetic: FXN 3 reverse 9:69045846-69045874; AsCpf1-2
cacggaactagcagagggaccccc

SEQ ID NO: 15668 - DNA, 25 bp, Artificial Sequence
  Synthetic: FXN 3 reverse 9:69045846-69045875; AsCpf1-2
cacggaactagcagagggacccccc

SEQ ID NO: 15669 - DNA, 18 bp, Artificial Sequence
  Synthetic: FXN 3 forward 9:69045951-69045973; AsCpf1-2
ccctcccagtgaatgaaa

SEQ ID NO: 15670 - DNA, 19 bp, Artificial Sequence
  Synthetic: FXN 3 forward 9:69045951-69045974; AsCpf1-2
ccctcccagtgaatgaaag

SEQ ID NO: 15671 - DNA, 20 bp, Artificial Sequence
  Synthetic: FXN 3 forward 9:69045951-69045975; AsCpf1-2
ccctcccagtgaatgaaagt

SEQ ID NO: 15672 - DNA, 21 bp, Artificial Sequence
  Synthetic: FXN 3 forward 9:69045951-69045976; AsCpf1-2
ccctcccagtgaatgaaagtc

SEQ ID NO: 15673 - DNA, 22 bp, Artificial Sequence
  Synthetic: FXN 3 forward 9:69045951-69045977; AsCpf1-2
ccctcccagtgaatgaaagtcc

SEQ ID NO: 15674 - DNA, 23 bp, Artificial Sequence
  Synthetic: FXN 3 forward 9:69045951-69045978; AsCpf1-2
ccctcccagtgaatgaaagtcct

SEQ ID NO: 15675 - DNA, 24 bp, Artificial Sequence
  Synthetic: FXN 3 forward 9:69045951-69045979; AsCpf1-2
ccctcccagtgaatgaaagtcctg

SEQ ID NO: 15676 - DNA, 25 bp, Artificial Sequence
  Synthetic: FXN 3 forward 9:69045951-69045980; AsCpf1-2
ccctcccagtgaatgaaagtcctga

SEQ ID NO: 15677 - DNA, 18 bp, Artificial Sequence
  Synthetic: FXN 3 reverse 9:69046073-69046095; AsCpf1-2
ctcttccagagcacagat

SEQ ID NO: 15678 - DNA, 19 bp, Artificial Sequence
  Synthetic: FXN 3 reverse 9:69046073-69046096; AsCpf1-2
ctcttccagagcacagatc

SEQ ID NO: 15679 - DNA, 20 bp, Artificial Sequence
  Synthetic: FXN 3 reverse 9:69046073-69046097; AsCpf1-2
ctcttccagagcacagatct

SEQ ID NO: 15680 - DNA, 21 bp, Artificial Sequence
  Synthetic: FXN 3 reverse 9:69046073-69046098; AsCpf1-2
ctcttccagagcacagatctc

SEQ ID NO: 15681 - DNA, 22 bp, Artificial Sequence
  Synthetic: FXN 3 reverse 9:69046073-69046099; AsCpf1-2
ctcttccagagcacagatctct

SEQ ID NO: 15682 - DNA, 23 bp, Artificial Sequence
  Synthetic: FXN 3 reverse 9:69046073-69046100; AsCpf1-2
ctcttccagagcacagatctctc

SEQ ID NO: 15683 - DNA, 24 bp, Artificial Sequence
  Synthetic: FXN 3 reverse 9:69046073-69046101; AsCpf1-2
ctcttccagagcacagatctctcc

SEQ ID NO: 15684 - DNA, 25 bp, Artificial Sequence
  Synthetic: FXN 3 reverse 9:69046073-69046102; AsCpf1-2
ctcttccagagcacagatctctcca

SEQ ID NO: 15685 - DNA, 18 bp, Artificial Sequence
  Synthetic: FXN 3 reverse 9:69046131-69046153; AsCpf1-2
acctttcacctccccttc

SEQ ID NO: 15686 - DNA, 19 bp, Artificial Sequence
  Synthetic: FXN 3 reverse 9:69046131-69046154; AsCpf1-2
acctttcacctccccttca

SEQ ID NO: 15687 - DNA, 20 bp, Artificial Sequence
  Synthetic: FXN 3 reverse 9:69046131-69046155; AsCpf1-2
acctttcacctccccttcac

SEQ ID NO: 15688 - DNA, 21 bp, Artificial Sequence
  Synthetic: FXN 3 reverse 9:69046131-69046156; AsCpf1-2
acctttcacctccccttcacc

SEQ ID NO: 15689 - DNA, 22 bp, Artificial Sequence
  Synthetic: FXN 3 reverse 9:69046131-69046157; AsCpf1-2
acctttcacctccccttcacca

SEQ ID NO: 15690 - DNA, 23 bp, Artificial Sequence
  Synthetic: FXN 3 reverse 9:69046131-69046158; AsCpf1-2
acctttcacctccccttcaccat

SEQ ID NO: 15691 - DNA, 24 bp, Artificial Sequence
  Synthetic: FXN 3 reverse 9:69046131-69046159; AsCpf1-2
acctttcacctccccttcaccata

SEQ ID NO: 15692 - DNA, 25 bp, Artificial Sequence
  Synthetic: FXN 3 reverse 9:69046131-69046160; AsCpf1-2
acctttcacctccccttcaccatac

SEQ ID NO: 15693 - DNA, 18 bp, Artificial Sequence
  Synthetic: FXN 3 forward 9:69046132-69046154; AsCpf1-2
gtgaaggggaggtgaaag

SEQ ID NO: 15694 - DNA, 19 bp, Artificial Sequence
  Synthetic: FXN 3 forward 9:69046132-69046155; AsCpf1-2
gtgaaggggaggtgaaagg

SEQ ID NO: 15695 - DNA, 20 bp, Artificial Sequence
  Synthetic: FXN 3 forward 9:69046132-69046156; AsCpf1-2
gtgaaggggaggtgaaaggt

SEQ ID NO: 15696 - DNA, 21 bp, Artificial Sequence
  Synthetic: FXN 3 forward 9:69046132-69046157; AsCpf1-2
gtgaaggggaggtgaaaggtt

SEQ ID NO: 15697 - DNA, 22 bp, Artificial Sequence
  Synthetic: FXN 3 forward 9:69046132-69046158; AsCpf1-2
gtgaaggggaggtgaaaggtta

SEQ ID NO: 15698 - DNA, 23 bp, Artificial Sequence
  Synthetic: FXN 3 forward 9:69046132-69046159; AsCpf1-2
gtgaaggggaggtgaaaggttat

SEQ ID NO: 15699 - DNA, 24 bp, Artificial Sequence
  Synthetic: FXN 3 forward 9:69046132-69046160; AsCpf1-2
gtgaaggggaggtgaaaggttata

SEQ ID NO: 15700 - DNA, 25 bp, Artificial Sequence
  Synthetic: FXN 3 forward 9:69046132-69046161; AsCpf1-2
gtgaaggggaggtgaaaggttatat

SEQ ID NO: 15701 - DNA, 18 bp, Artificial Sequence
  Synthetic: FXN 3 forward 9:69046156-69046178; AsCpf1-2
tttgcatttctgaagggc

SEQ ID NO: 15702 - DNA, 19 bp, Artificial Sequence
  Synthetic: FXN 3 forward 9:69046156-69046179; AsCpf1-2
tttgcatttctgaagggct

SEQ ID NO: 15703 - DNA, 20 bp, Artificial Sequence
  Synthetic: FXN 3 forward 9:69046156-69046180; AsCpf1-2
tttgcatttctgaagggcta

SEQ ID NO: 15704 - DNA, 21 bp, Artificial Sequence
  Synthetic: FXN 3 forward 9:69046156-69046181; AsCpf1-2
tttgcatttctgaagggctaa

SEQ ID NO: 15705 - DNA, 22 bp, Artificial Sequence
  Synthetic: FXN 3 forward 9:69046156-69046182; AsCpf1-2
tttgcatttctgaagggctaag

SEQ ID NO: 15706 - DNA, 23 bp, Artificial Sequence
  Synthetic: FXN 3 forward 9:69046156-69046183; AsCpf1-2
tttgcatttctgaagggctaagt

SEQ ID NO: 15707 - DNA, 24 bp, Artificial Sequence
  Synthetic: FXN 3 forward 9:69046156-69046184; AsCpf1-2
tttgcatttctgaagggctaagta

SEQ ID NO: 15708 - DNA, 25 bp, Artificial Sequence
  Synthetic: FXN 3 forward 9:69046156-69046185; AsCpf1-2
tttgcatttctgaagggctaagtag

SEQ ID NO: 15709 - DNA, 18 bp, Artificial Sequence
  Synthetic: FXN 3 reverse 9:69046197-69046219; AsCpf1-2
ctctcttctcttctcctc

SEQ ID NO: 15710 - DNA, 19 bp, Artificial Sequence
  Synthetic: FXN 3 reverse 9:69046197-69046220; AsCpf1-2
ctctcttctcttctcctct

SEQ ID NO: 15711 - DNA, 20 bp, Artificial Sequence
  Synthetic: FXN 3 reverse 9:69046197-69046221; AsCpf1-2
ctctcttctcttctcctctc

SEQ ID NO: 15712 - DNA, 21 bp, Artificial Sequence
  Synthetic: FXN 3 reverse 9:69046197-69046222; AsCpf1-2
ctctcttctcttctcctctcc

SEQ ID NO: 15713 - DNA, 22 bp, Artificial Sequence
  Synthetic: FXN 3 reverse 9:69046197-69046223; AsCpf1-2
ctctcttctcttctcctctccc

SEQ ID NO: 15714 - DNA, 23 bp, Artificial Sequence
  Synthetic: FXN 3 reverse 9:69046197-69046224; AsCpf1-2
ctctcttctcttctcctctcccc

SEQ ID NO: 15715 - DNA, 24 bp, Artificial Sequence
  Synthetic: FXN 3 reverse 9:69046197-69046225; AsCpf1-2
ctctcttctcttctcctctcccct

SEQ ID NO: 15716 - DNA, 25 bp, Artificial Sequence
  Synthetic: FXN 3 reverse 9:69046197-69046226; AsCpf1-2
ctctcttctcttctcctctcccctg

SEQ ID NO: 15717 - DNA, 18 bp, Artificial Sequence
  Synthetic: FXN 3 reverse 9:69046221-69046243; AsCpf1-2
ttgcttttcttaaaaaaa

SEQ ID NO: 15718 - DNA, 19 bp, Artificial Sequence
  Synthetic: FXN 3 reverse 9:69046221-69046244; AsCpf1-2
ttgcttttcttaaaaaaaa

SEQ ID NO: 15719 - DNA, 20 bp, Artificial Sequence
  Synthetic: FXN 3 reverse 9:69046221-69046245; AsCpf1-2
ttgcttttcttaaaaaaaat

SEQ ID NO: 15720 - DNA, 21 bp, Artificial Sequence
  Synthetic: FXN 3 reverse 9:69046221-69046246; AsCpf1-2
ttgcttttcttaaaaaaaatt

SEQ ID NO: 15721 - DNA, 22 bp, Artificial Sequence
  Synthetic: FXN 3 reverse 9:69046221-69046247; AsCpf1-2
ttgcttttcttaaaaaaaatta

SEQ ID NO: 15722 - DNA, 23 bp, Artificial Sequence
  Synthetic: FXN 3 reverse 9:69046221-69046248; AsCpf1-2
ttgcttttcttaaaaaaaattat

SEQ ID NO: 15723 - DNA, 24 bp, Artificial Sequence
  Synthetic: FXN 3 reverse 9:69046221-69046249; AsCpf1-2
ttgcttttcttaaaaaaaattatc

SEQ ID NO: 15724 - DNA, 25 bp, Artificial Sequence
  Synthetic: FXN 3 reverse 9:69046221-69046250; AsCpf1-2
ttgcttttcttaaaaaaaattatcc

SEQ ID NO: 15725 - DNA, 18 bp, Artificial Sequence
  Synthetic: FXN 3 reverse 9:69046287-69046309; AsCpf1-2
ttgctacttctacattcg

SEQ ID NO: 15726 - DNA, 19 bp, Artificial Sequence
  Synthetic: FXN 3 reverse 9:69046287-69046310; AsCpf1-2
ttgctacttctacattcga

SEQ ID NO: 15727 - DNA, 20 bp, Artificial Sequence
  Synthetic: FXN 3 reverse 9:69046287-69046311; AsCpf1-2
ttgctacttctacattcgag

SEQ ID NO: 15728 - DNA, 21 bp, Artificial Sequence
  Synthetic: FXN 3 reverse 9:69046287-69046312; AsCpf1-2
ttgctacttctacattcgagt

SEQ ID NO: 15729 - DNA, 22 bp, Artificial Sequence
  Synthetic: FXN 3 reverse 9:69046287-69046313; AsCpf1-2
ttgctacttctacattcgagtg

SEQ ID NO: 15730 - DNA, 23 bp, Artificial Sequence
  Synthetic: FXN 3 reverse 9:69046287-69046314; AsCpf1-2
ttgctacttctacattcgagtgc

SEQ ID NO: 15731 - DNA, 24 bp, Artificial Sequence
  Synthetic: FXN 3 reverse 9:69046287-69046315; AsCpf1-2
ttgctacttctacattcgagtgcc

SEQ ID NO: 15732 - DNA, 25 bp, Artificial Sequence
  Synthetic: FXN 3 reverse 9:69046287-69046316; AsCpf1-2
ttgctacttctacattcgagtgcct

SEQ ID NO: 15733 - DNA, 18 bp, Artificial Sequence
  Synthetic: FXN 3 reverse 9:69046289-69046311; AsCpf1-2
tattgctacttctacatt

SEQ ID NO: 15734 - DNA, 19 bp, Artificial Sequence
  Synthetic: FXN 3 reverse 9:69046289-69046312; AsCpf1-2
tattgctacttctacattc

SEQ ID NO: 15735 - DNA, 20 bp, Artificial Sequence
  Synthetic: FXN 3 reverse 9:69046289-69046313; AsCpf1-2
tattgctacttctacattcg

SEQ ID NO: 15736 - DNA, 21 bp, Artificial Sequence
  Synthetic: FXN 3 reverse 9:69046289-69046314; AsCpf1-2
tattgctacttctacattcga

SEQ ID NO: 15737 - DNA, 22 bp, Artificial Sequence
  Synthetic: FXN 3 reverse 9:69046289-69046315; AsCpf1-2
tattgctacttctacattcgag

SEQ ID NO: 15738 - DNA, 23 bp, Artificial Sequence
  Synthetic: FXN 3 reverse 9:69046289-69046316; AsCpf1-2
tattgctacttctacattcgagt

SEQ ID NO: 15739 - DNA, 24 bp, Artificial Sequence
  Synthetic: FXN 3 reverse 9:69046289-69046317; AsCpf1-2
tattgctacttctacattcgagtg

SEQ ID NO: 15740 - DNA, 25 bp, Artificial Sequence
  Synthetic: FXN 3 reverse 9:69046289-69046318; AsCpf1-2
tattgctacttctacattcgagtgc

SEQ ID NO: 15741 - DNA, 18 bp, Artificial Sequence
  Synthetic: FXN 3 reverse 9:69046311-69046333; AsCpf1-2
acccattaatgcataatt

SEQ ID NO: 15742 - DNA, 19 bp, Artificial Sequence
  Synthetic: FXN 3 reverse 9:69046311-69046334; AsCpf1-2
acccattaatgcataattt

SEQ ID NO: 15743 - DNA, 20 bp, Artificial Sequence
  Synthetic: FXN 3 reverse 9:69046311-69046335; AsCpf1-2
acccattaatgcataattta

SEQ ID NO: 15744 - DNA, 21 bp, Artificial Sequence
  Synthetic: FXN 3 reverse 9:69046311-69046336; AsCpf1-2
acccattaatgcataatttat

SEQ ID NO: 15745 - DNA, 22 bp, Artificial Sequence
  Synthetic: FXN 3 reverse 9:69046311-69046337; AsCpf1-2
acccattaatgcataatttata

SEQ ID NO: 15746 - DNA, 23 bp, Artificial Sequence
  Synthetic: FXN 3 reverse 9:69046311-69046338; AsCpf1-2
acccattaatgcataatttatat

SEQ ID NO: 15747 - DNA, 24 bp, Artificial Sequence
  Synthetic: FXN 3 reverse 9:69046311-69046339; AsCpf1-2
acccattaatgcataatttatata

SEQ ID NO: 15748 - DNA, 25 bp, Artificial Sequence
  Synthetic: FXN 3 reverse 9:69046311-69046340; AsCpf1-2
acccattaatgcataatttatatat

SEQ ID NO: 15749 - DNA, 18 bp, Artificial Sequence
  Synthetic: FXN 3 forward 9:69046312-69046334; AsCpf1-2
taaattatgcattaatgg

SEQ ID NO: 15750 - DNA, 19 bp, Artificial Sequence
  Synthetic: FXN 3 forward 9:69046312-69046335; AsCpf1-2
taaattatgcattaatggg

SEQ ID NO: 15751 - DNA, 20 bp, Artificial Sequence
  Synthetic: FXN 3 forward 9:69046312-69046336; AsCpf1-2
taaattatgcattaatgggt

SEQ ID NO: 15752 - DNA, 21 bp, Artificial Sequence
  Synthetic: FXN 3 forward 9:69046312-69046337; AsCpf1-2
taaattatgcattaatgggtt

SEQ ID NO: 15753 - DNA, 22 bp, Artificial Sequence
  Synthetic: FXN 3 forward 9:69046312-69046338; AsCpf1-2
taaattatgcattaatgggtta

SEQ ID NO: 15754 - DNA, 23 bp, Artificial Sequence
  Synthetic: FXN 3 forward 9:69046312-69046339; AsCpf1-2
taaattatgcattaatgggttat

SEQ ID NO: 15755 - DNA, 24 bp, Artificial Sequence
  Synthetic: FXN 3 forward 9:69046312-69046340; AsCpf1-2
taaattatgcattaatgggttata

SEQ ID NO: 15756 - DNA, 25 bp, Artificial Sequence
  Synthetic: FXN 3 forward 9:69046312-69046341; AsCpf1-2
taaattatgcattaatgggttataa

SEQ ID NO: 15757 - DNA, 18 bp, Artificial Sequence
  Synthetic: FXN 3 forward 9:69046314-69046336; AsCpf1-2
aattatgcattaatgggt

SEQ ID NO: 15758 - DNA, 19 bp, Artificial Sequence
  Synthetic: FXN 3 forward 9:69046314-69046337; AsCpf1-2
aattatgcattaatgggtt

SEQ ID NO: 15759 - DNA, 20 bp, Artificial Sequence
  Synthetic: FXN 3 forward 9:69046314-69046338; AsCpf1-2
aattatgcattaatgggtta

SEQ ID NO: 15760 - DNA, 21 bp, Artificial Sequence
  Synthetic: FXN 3 forward 9:69046314-69046339; AsCpf1-2
aattatgcattaatgggttat

SEQ ID NO: 15761 - DNA, 22 bp, Artificial Sequence
  Synthetic: FXN 3 forward 9:69046314-69046340; AsCpf1-2
aattatgcattaatgggttata

SEQ ID NO: 15762 - DNA, 23 bp, Artificial Sequence
  Synthetic: FXN 3 forward 9:69046314-69046341; AsCpf1-2
aattatgcattaatgggttataa

SEQ ID NO: 15763 - DNA, 24 bp, Artificial Sequence
  Synthetic: FXN 3 forward 9:69046314-69046342; AsCpf1-2
aattatgcattaatgggttataat

SEQ ID NO: 15764 - DNA, 25 bp, Artificial Sequence
  Synthetic: FXN 3 forward 9:69046314-69046343; AsCpf1-2
aattatgcattaatgggttataatt

SEQ ID NO: 15765 - DNA, 18 bp, Artificial Sequence
  Synthetic: FXN 3 forward 9:69046321-69046343; AsCpf1-2
cattaatgggttataatt

SEQ ID NO: 15766 - DNA, 19 bp, Artificial Sequence
  Synthetic: FXN 3 forward 9:69046321-69046344; AsCpf1-2
cattaatgggttataattc

SEQ ID NO: 15767 - DNA, 20 bp, Artificial Sequence
  Synthetic: FXN 3 forward 9:69046321-69046345; AsCpf1-2
cattaatgggttataattca

SEQ ID NO: 15768 - DNA, 21 bp, Artificial Sequence
  Synthetic: FXN 3 forward 9:69046321-69046346; AsCpf1-2
cattaatgggttataattcac

SEQ ID NO: 15769 - DNA, 22 bp, Artificial Sequence
  Synthetic: FXN 3 forward 9:69046321-69046347; AsCpf1-2
cattaatgggttataattcact

SEQ ID NO: 15770 - DNA, 23 bp, Artificial Sequence
  Synthetic: FXN 3 forward 9:69046321-69046348; AsCpf1-2
cattaatgggttataattcactg

SEQ ID NO: 15771 - DNA, 24 bp, Artificial Sequence
  Synthetic: FXN 3 forward 9:69046321-69046349; AsCpf1-2
cattaatgggttataattcactga

SEQ ID NO: 15772 - DNA, 25 bp, Artificial Sequence
  Synthetic: FXN 3 forward 9:69046321-69046350; AsCpf1-2
cattaatgggttataattcactgaa

SEQ ID NO: 15773 - DNA, 18 bp, Artificial Sequence
  Synthetic: FXN 3 forward 9:69046336-69046358; AsCpf1-2
attcactgaaaaatagta

SEQ ID NO: 15774 - DNA, 19 bp, Artificial Sequence
  Synthetic: FXN 3 forward 9:69046336-69046359; AsCpf1-2
attcactgaaaaatagtaa

SEQ ID NO: 15775 - DNA, 20 bp, Artificial Sequence
  Synthetic: FXN 3 forward 9:69046336-69046360; AsCpf1-2
attcactgaaaaatagtaac

SEQ ID NO: 15776 - DNA, 21 bp, Artificial Sequence
  Synthetic: FXN 3 forward 9:69046336-69046361; AsCpf1-2
attcactgaaaaatagtaacg

SEQ ID NO: 15777 - DNA, 22 bp, Artificial Sequence
  Synthetic: FXN 3 forward 9:69046336-69046362; AsCpf1-2
attcactgaaaaatagtaacgt

SEQ ID NO: 15778 - DNA, 23 bp, Artificial Sequence
  Synthetic: FXN 3 forward 9:69046336-69046363; AsCpf1-2
attcactgaaaaatagtaacgta

SEQ ID NO: 15779 - DNA, 24 bp, Artificial Sequence
  Synthetic: FXN 3 forward 9:69046336-69046364; AsCpf1-2
attcactgaaaaatagtaacgtac

SEQ ID NO: 15780 - DNA, 25 bp, Artificial Sequence
  Synthetic: FXN 3 forward 9:69046336-69046365; AsCpf1-2
attcactgaaaaatagtaacgtact

SEQ ID NO: 15781 - DNA, 25 bp, Artificial Sequence
  Synthetic: FXN 3 forward 9:69037295-69037326; SaCas9
gaagaagaaaataaagaaaagttag

SEQ ID NO: 15782 - DNA, 24 bp, Artificial Sequence
  Synthetic: FXN 3 forward 9:69037296-69037326; SaCas9
aagaagaaaataaagaaaagttag

SEQ ID NO: 15783 - DNA, 23 bp, Artificial Sequence
  Synthetic: FXN 3 forward 9:69037297-69037326; SaCas9
agaagaaaataaagaaaagttag

SEQ ID NO: 15784 - DNA, 22 bp, Artificial Sequence
  Synthetic: FXN 3 forward 9:69037298-69037326; SaCas9
gaagaaaataaagaaaagttag

SEQ ID NO: 15785 - DNA, 21 bp, Artificial Sequence
  Synthetic: FXN 3 forward 9:69037299-69037326; SaCas9
aagaaaataaagaaaagttag

SEQ ID NO: 15786 - DNA, 20 bp, Artificial Sequence
  Synthetic: FXN 3 forward 9:69037300-69037326; SaCas9
agaaaataaagaaaagttag

SEQ ID NO: 15787 - DNA, 19 bp, Artificial Sequence
  Synthetic: FXN 3 forward 9:69037301-69037326; SaCas9
gaaaataaagaaaagttag

SEQ ID NO: 15788 - DNA, 18 bp, Artificial Sequence
  Synthetic: FXN 3 forward 9:69037302-69037326; SaCas9
aaaataaagaaaagttag

SEQ ID NO: 15789 - DNA, 25 bp, Artificial Sequence
  Synthetic: FXN 3 forward 9:69037333-69037364; SaCas9
cgcgcgcctgtaatcccagctactc

SEQ ID NO: 15790 - DNA, 24 bp, Artificial Sequence
  Synthetic: FXN 3 forward 9:69037334-69037364; SaCas9
gcgcgcctgtaatcccagctactc

SEQ ID NO: 15791 - DNA, 23 bp, Artificial Sequence
  Synthetic: FXN 3 forward 9:69037335-69037364; SaCas9
cgcgcctgtaatcccagctactc

SEQ ID NO: 15792 - DNA, 22 bp, Artificial Sequence
  Synthetic: FXN 3 forward 9:69037336-69037364; SaCas9
gcgcctgtaatcccagctactc

SEQ ID NO: 15793 - DNA, 21 bp, Artificial Sequence
  Synthetic: FXN 3 forward 9:69037337-69037364; SaCas9
cgcctgtaatcccagctactc

SEQ ID NO: 15794 - DNA, 20 bp, Artificial Sequence
  Synthetic: FXN 3 forward 9:69037338-69037364; SaCas9
gcctgtaatcccagctactc

SEQ ID NO: 15795 - DNA, 19 bp, Artificial Sequence
  Synthetic: FXN 3 forward 9:69037339-69037364; SaCas9
cctgtaatcccagctactc

SEQ ID NO: 15796 - DNA, 18 bp, Artificial Sequence
  Synthetic: FXN 3 forward 9:69037340-69037364; SaCas9
ctgtaatcccagctactc

SEQ ID NO: 15797 - DNA, 25 bp, Artificial Sequence
  Synthetic: FXN 3 forward 9:69037345-69037376; SaCas9
atcccagctactccagaggctgcgg

SEQ ID NO: 15798 - DNA, 24 bp, Artificial Sequence
  Synthetic: FXN 3 forward 9:69037346-69037376; SaCas9
tcccagctactccagaggctgcgg

SEQ ID NO: 15799 - DNA, 23 bp, Artificial Sequence
  Synthetic: FXN 3 forward 9:69037347-69037376; SaCas9
cccagctactccagaggctgcgg

SEQ ID NO: 15800 - DNA, 22 bp, Artificial Sequence
  Synthetic: FXN 3 forward 9:69037348-69037376; SaCas9
ccagctactccagaggctgcgg

SEQ ID NO: 15801 - DNA, 21 bp, Artificial Sequence
  Synthetic: FXN 3 forward 9:69037349-69037376; SaCas9
cagctactccagaggctgcgg

SEQ ID NO: 15802 - DNA, 20 bp, Artificial Sequence
  Synthetic: FXN 3 forward 9:69037350-69037376; SaCas9
agctactccagaggctgcgg

SEQ ID NO: 15803 - DNA, 19 bp, Artificial Sequence
  Synthetic: FXN 3 forward 9:69037351-69037376; SaCas9
gctactccagaggctgcgg

SEQ ID NO: 15804 - DNA, 18 bp, Artificial Sequence
  Synthetic: FXN 3 forward 9:69037352-69037376; SaCas9
ctactccagaggctgcgg

SEQ ID NO: 15805 - DNA, 25 bp, Artificial Sequence
  Synthetic: FXN 3 reverse 9:69037345-69037376; SaCas9
ctcctgccgcagcctctggagtagc

SEQ ID NO: 15806 - DNA, 24 bp, Artificial Sequence
  Synthetic: FXN 3 reverse 9:69037346-69037376; SaCas9
tcctgccgcagcctctggagtagc

SEQ ID NO: 15807 - DNA, 23 bp, Artificial Sequence
  Synthetic: FXN 3 reverse 9:69037347-69037376; SaCas9
cctgccgcagcctctggagtagc

SEQ ID NO: 15808 - DNA, 22 bp, Artificial Sequence
  Synthetic: FXN 3 reverse 9:69037348-69037376; SaCas9
ctgccgcagcctctggagtagc

SEQ ID NO: 15809 - DNA, 21 bp, Artificial Sequence
  Synthetic: FXN 3 reverse 9:69037349-69037376; SaCas9
tgccgcagcctctggagtagc

SEQ ID NO: 15810 - DNA, 20 bp, Artificial Sequence
  Synthetic: FXN 3 reverse 9:69037350-69037376; SaCas9
gccgcagcctctggagtagc

SEQ ID NO: 15811 - DNA, 19 bp, Artificial Sequence
  Synthetic: FXN 3 reverse 9:69037351-69037376; SaCas9
ccgcagcctctggagtagc

SEQ ID NO: 15812 - DNA, 18 bp, Artificial Sequence
  Synthetic: FXN 3 reverse 9:69037352-69037376; SaCas9
cgcagcctctggagtagc

SEQ ID NO: 15813 - DNA, 25 bp, Artificial Sequence
  Synthetic: FXN 3 forward 9:69037346-69037377; SaCas9
tcccagctactccagaggctgcggc

SEQ ID NO: 15814 - DNA, 24 bp, Artificial Sequence
  Synthetic: FXN 3 forward 9:69037347-69037377; SaCas9
cccagctactccagaggctgcggc

SEQ ID NO: 15815 - DNA, 23 bp, Artificial Sequence
  Synthetic: FXN 3 forward 9:69037348-69037377; SaCas9
ccagctactccagaggctgcggc

SEQ ID NO: 15816 - DNA, 22 bp, Artificial Sequence
  Synthetic: FXN 3 forward 9:69037349-69037377; SaCas9
cagctactccagaggctgcggc

SEQ ID NO: 15817 - DNA, 21 bp, Artificial Sequence
  Synthetic: FXN 3 forward 9:69037350-69037377; SaCas9
agctactccagaggctgcggc

SEQ ID NO: 15818 - DNA, 20 bp, Artificial Sequence
  Synthetic: FXN 3 forward 9:69037351-69037377; SaCas9
gctactccagaggctgcggc

SEQ ID NO: 15819 - DNA, 19 bp, Artificial Sequence
  Synthetic: FXN 3 forward 9:69037352-69037377; SaCas9
ctactccagaggctgcggc

SEQ ID NO: 15820 - DNA, 18 bp, Artificial Sequence
  Synthetic: FXN 3 forward 9:69037353-69037377; SaCas9
tactccagaggctgcggc

SEQ ID NO: 15821 - DNA, 25 bp, Artificial Sequence
  Synthetic: FXN 3 reverse 9:69037346-69037377; SaCas9
tctcctgccgcagcctctggagtag

SEQ ID NO: 15822 - DNA, 24 bp, Artificial Sequence
  Synthetic: FXN 3 reverse 9:69037347-69037377; SaCas9
ctcctgccgcagcctctggagtag

SEQ ID NO: 15823 - DNA, 23 bp, Artificial Sequence
  Synthetic: FXN 3 reverse 9:69037348-69037377; SaCas9
tcctgccgcagcctctggagtag

SEQ ID NO: 15824 - DNA, 22 bp, Artificial Sequence
  Synthetic: FXN 3 reverse 9:69037349-69037377; SaCas9
cctgccgcagcctctggagtag

SEQ ID NO: 15825 - DNA, 21 bp, Artificial Sequence
  Synthetic: FXN 3 reverse 9:69037350-69037377; SaCas9
ctgccgcagcctctggagtag

SEQ ID NO: 15826 - DNA, 20 bp, Artificial Sequence
  Synthetic: FXN 3 reverse 9:69037351-69037377; SaCas9
tgccgcagcctctggagtag

SEQ ID NO: 15827 - DNA, 19 bp, Artificial Sequence
  Synthetic: FXN 3 reverse 9:69037352-69037377; SaCas9
gccgcagcctctggagtag

SEQ ID NO: 15828 - DNA, 18 bp, Artificial Sequence
  Synthetic: FXN 3 reverse 9:69037353-69037377; SaCas9
ccgcagcctctggagtag

SEQ ID NO: 15829 - DNA, 25 bp, Artificial Sequence
  Synthetic: FXN 3 forward 9:69037348-69037379; SaCas9
ccagctactccagaggctgcggcag

SEQ ID NO: 15830 - DNA, 24 bp, Artificial Sequence
  Synthetic: FXN 3 forward 9:69037349-69037379; SaCas9
cagctactccagaggctgcggcag

SEQ ID NO: 15831 - DNA, 23 bp, Artificial Sequence
  Synthetic: FXN 3 forward 9:69037350-69037379; SaCas9
agctactccagaggctgcggcag

SEQ ID NO: 15832 - DNA, 22 bp, Artificial Sequence
  Synthetic: FXN 3 forward 9:69037351-69037379; SaCas9
gctactccagaggctgcggcag

SEQ ID NO: 15833 - DNA, 21 bp, Artificial Sequence
  Synthetic: FXN 3 forward 9:69037352-69037379; SaCas9
ctactccagaggctgcggcag

SEQ ID NO: 15834 - DNA, 20 bp, Artificial Sequence
  Synthetic: FXN 3 forward 9:69037353-69037379; SaCas9
tactccagaggctgcggcag

SEQ ID NO: 15835 - DNA, 19 bp, Artificial Sequence
  Synthetic: FXN 3 forward 9:69037354-69037379; SaCas9
actccagaggctgcggcag

SEQ ID NO: 15836 - DNA, 18 bp, Artificial Sequence
  Synthetic: FXN 3 forward 9:69037355-69037379; SaCas9
ctccagaggctgcggcag

SEQ ID NO: 15837 - DNA, 25 bp, Artificial Sequence
  Synthetic: FXN 3 reverse 9:69037354-69037385; SaCas9
caagcgattctcctgccgcagcctc

SEQ ID NO: 15838 - DNA, 24 bp, Artificial Sequence
  Synthetic: FXN 3 reverse 9:69037355-69037385; SaCas9
aagcgattctcctgccgcagcctc

SEQ ID NO: 15839 - DNA, 23 bp, Artificial Sequence
  Synthetic: FXN 3 reverse 9:69037356-69037385; SaCas9
agcgattctcctgccgcagcctc

SEQ ID NO: 15840 - DNA, 22 bp, Artificial Sequence
  Synthetic: FXN 3 reverse 9:69037357-69037385; SaCas9
gcgattctcctgccgcagcctc

SEQ ID NO: 15841 - DNA, 21 bp, Artificial Sequence
  Synthetic: FXN 3 reverse 9:69037358-69037385; SaCas9
cgattctcctgccgcagcctc

SEQ ID NO: 15842 - DNA, 20 bp, Artificial Sequence
  Synthetic: FXN 3 reverse 9:69037359-69037385; SaCas9
gattctcctgccgcagcctc

SEQ ID NO: 15843 - DNA, 19 bp, Artificial Sequence
  Synthetic: FXN 3 reverse 9:69037360-69037385; SaCas9
attctcctgccgcagcctc

SEQ ID NO: 15844 - DNA, 18 bp, Artificial Sequence
  Synthetic: FXN 3 reverse 9:69037361-69037385; SaCas9
ttctcctgccgcagcctc

SEQ ID NO: 15845 - DNA, 25 bp, Artificial Sequence
  Synthetic: FXN 3 reverse 9:69037355-69037386; SaCas9
tcaagcgattctcctgccgcagcct

SEQ ID NO: 15846 - DNA, 24 bp, Artificial Sequence
  Synthetic: FXN 3 reverse 9:69037356-69037386; SaCas9
caagcgattctcctgccgcagcct

SEQ ID NO: 15847 - DNA, 23 bp, Artificial Sequence
  Synthetic: FXN 3 reverse 9:69037357-69037386; SaCas9
aagcgattctcctgccgcagcct

SEQ ID NO: 15848 - DNA, 22 bp, Artificial Sequence
  Synthetic: FXN 3 reverse 9:69037358-69037386; SaCas9
agcgattctcctgccgcagcct

SEQ ID NO: 15849 - DNA, 21 bp, Artificial Sequence
  Synthetic: FXN 3 reverse 9:69037359-69037386; SaCas9
gcgattctcctgccgcagcct

SEQ ID NO: 15850 - DNA, 20 bp, Artificial Sequence
  Synthetic: FXN 3 reverse 9:69037360-69037386; SaCas9
cgattctcctgccgcagcct

SEQ ID NO: 15851 - DNA, 19 bp, Artificial Sequence
  Synthetic: FXN 3 reverse 9:69037361-69037386; SaCas9
gattctcctgccgcagcct

SEQ ID NO: 15852 - DNA, 18 bp, Artificial Sequence
  Synthetic: FXN 3 reverse 9:69037362-69037386; SaCas9
attctcctgccgcagcct

SEQ ID NO: 15853 - DNA, 25 bp, Artificial Sequence
  Synthetic: FXN 3 forward 9:69037357-69037388; SaCas9
ccagaggctgcggcaggagaatcgc

SEQ ID NO: 15854 - DNA, 24 bp, Artificial Sequence
  Synthetic: FXN 3 forward 9:69037358-69037388; SaCas9
cagaggctgcggcaggagaatcgc

SEQ ID NO: 15855 - DNA, 23 bp, Artificial Sequence
  Synthetic: FXN 3 forward 9:69037359-69037388; SaCas9
agaggctgcggcaggagaatcgc

SEQ ID NO: 15856 - DNA, 22 bp, Artificial Sequence
  Synthetic: FXN 3 forward 9:69037360-69037388; SaCas9
gaggctgcggcaggagaatcgc

SEQ ID NO: 15857 - DNA, 21 bp, Artificial Sequence
  Synthetic: FXN 3 forward 9:69037361-69037388; SaCas9
aggctgcggcaggagaatcgc

SEQ ID NO: 15858 - DNA, 20 bp, Artificial Sequence
  Synthetic: FXN 3 forward 9:69037362-69037388; SaCas9
ggctgcggcaggagaatcgc

SEQ ID NO: 15859 - DNA, 19 bp, Artificial Sequence
  Synthetic: FXN 3 forward 9:69037363-69037388; SaCas9
gctgcggcaggagaatcgc

SEQ ID NO: 15860 - DNA, 18 bp, Artificial Sequence
  Synthetic: FXN 3 forward 9:69037364-69037388; SaCas9
ctgcggcaggagaatcgc

SEQ ID NO: 15861 - DNA, 25 bp, Artificial Sequence
  Synthetic: FXN 3 forward 9:69037363-69037394; SaCas9
gctgcggcaggagaatcgcttgagc

SEQ ID NO: 15862 - DNA, 24 bp, Artificial Sequence
  Synthetic: FXN 3 forward 9:69037364-69037394; SaCas9
ctgcggcaggagaatcgcttgagc

SEQ ID NO: 15863 - DNA, 23 bp, Artificial Sequence
  Synthetic: FXN 3 forward 9:69037365-69037394; SaCas9
tgcggcaggagaatcgcttgagc

SEQ ID NO: 15864 - DNA, 22 bp, Artificial Sequence
  Synthetic: FXN 3 forward 9:69037366-69037394; SaCas9
gcggcaggagaatcgcttgagc

SEQ ID NO: 15865 - DNA, 21 bp, Artificial Sequence
  Synthetic: FXN 3 forward 9:69037367-69037394; SaCas9
cggcaggagaatcgcttgagc

SEQ ID NO: 15866 - DNA, 20 bp, Artificial Sequence
  Synthetic: FXN 3 forward 9:69037368-69037394; SaCas9
ggcaggagaatcgcttgagc

SEQ ID NO: 15867 - DNA, 19 bp, Artificial Sequence
  Synthetic: FXN 3 forward 9:69037369-69037394; SaCas9
gcaggagaatcgcttgagc

SEQ ID NO: 15868 - DNA, 18 bp, Artificial Sequence
  Synthetic: FXN 3 forward 9:69037370-69037394; SaCas9
caggagaatcgcttgagc

SEQ ID NO: 15869 - DNA, 25 bp, Artificial Sequence
  Synthetic: FXN 3 forward 9:69037364-69037395; SaCas9
ctgcggcaggagaatcgcttgagcc

SEQ ID NO: 15870 - DNA, 24 bp, Artificial Sequence
  Synthetic: FXN 3 forward 9:69037365-69037395; SaCas9
tgcggcaggagaatcgcttgagcc

SEQ ID NO: 15871 - DNA, 23 bp, Artificial Sequence
  Synthetic: FXN 3 forward 9:69037366-69037395; SaCas9
gcggcaggagaatcgcttgagcc

SEQ ID NO: 15872 - DNA, 22 bp, Artificial Sequence
  Synthetic: FXN 3 forward 9:69037367-69037395; SaCas9
cggcaggagaatcgcttgagcc

SEQ ID NO: 15873 - DNA, 21 bp, Artificial Sequence
  Synthetic: FXN 3 forward 9:69037368-69037395; SaCas9
ggcaggagaatcgcttgagcc

SEQ ID NO: 15874 - DNA, 20 bp, Artificial Sequence
  Synthetic: FXN 3 forward 9:69037369-69037395; SaCas9
gcaggagaatcgcttgagcc

SEQ ID NO: 15875 - DNA, 19 bp, Artificial Sequence
  Synthetic: FXN 3 forward 9:69037370-69037395; SaCas9
caggagaatcgcttgagcc

SEQ ID NO: 15876 - DNA, 18 bp, Artificial Sequence
  Synthetic: FXN 3 forward 9:69037371-69037395; SaCas9
aggagaatcgcttgagcc

SEQ ID NO: 15877 - DNA, 25 bp, Artificial Sequence
  Synthetic: FXN 3 forward 9:69037365-69037396; SaCas9
tgcggcaggagaatcgcttgagccc

SEQ ID NO: 15878 - DNA, 24 bp, Artificial Sequence
  Synthetic: FXN 3 forward 9:69037366-69037396; SaCas9
gcggcaggagaatcgcttgagccc

SEQ ID NO: 15879 - DNA, 23 bp, Artificial Sequence
  Synthetic: FXN 3 forward 9:69037367-69037396; SaCas9
cggcaggagaatcgcttgagccc

SEQ ID NO: 15880 - DNA, 22 bp, Artificial Sequence
  Synthetic: FXN 3 forward 9:69037368-69037396; SaCas9
ggcaggagaatcgcttgagccc

SEQ ID NO: 15881 - DNA, 21 bp, Artificial Sequence
  Synthetic: FXN 3 forward 9:69037369-69037396; SaCas9
gcaggagaatcgcttgagccc

SEQ ID NO: 15882 - DNA, 20 bp, Artificial Sequence
  Synthetic: FXN 3 forward 9:69037370-69037396; SaCas9
caggagaatcgcttgagccc

SEQ ID NO: 15883 - DNA, 19 bp, Artificial Sequence
  Synthetic: FXN 3 forward 9:69037371-69037396; SaCas9
aggagaatcgcttgagccc

SEQ ID NO: 15884 - DNA, 18 bp, Artificial Sequence
  Synthetic: FXN 3 forward 9:69037372-69037396; SaCas9
ggagaatcgcttgagccc

SEQ ID NO: 15885 - DNA, 25 bp, Artificial Sequence
  Synthetic: FXN 3 forward 9:69037371-69037402; SaCas9
aggagaatcgcttgagcccgggagg

SEQ ID NO: 15886 - DNA, 24 bp, Artificial Sequence
  Synthetic: FXN 3 forward 9:69037372-69037402; SaCas9
ggagaatcgcttgagcccgggagg

SEQ ID NO: 15887 - DNA, 23 bp, Artificial Sequence
  Synthetic: FXN 3 forward 9:69037373-69037402; SaCas9
gagaatcgcttgagcccgggagg

SEQ ID NO: 15888 - DNA, 22 bp, Artificial Sequence
  Synthetic: FXN 3 forward 9:69037374-69037402; SaCas9
agaatcgcttgagcccgggagg

SEQ ID NO: 15889 - DNA, 21 bp, Artificial Sequence
  Synthetic: FXN 3 forward 9:69037375-69037402; SaCas9
gaatcgcttgagcccgggagg

SEQ ID NO: 15890 - DNA, 20 bp, Artificial Sequence
  Synthetic: FXN 3 forward 9:69037376-69037402; SaCas9
aatcgcttgagcccgggagg

SEQ ID NO: 15891 - DNA, 19 bp, Artificial Sequence
  Synthetic: FXN 3 forward 9:69037377-69037402; SaCas9
atcgcttgagcccgggagg

SEQ ID NO: 15892 - DNA, 18 bp, Artificial Sequence
  Synthetic: FXN 3 forward 9:69037378-69037402; SaCas9
tcgcttgagcccgggagg

SEQ ID NO: 15893 - DNA, 25 bp, Artificial Sequence
  Synthetic: FXN 3 reverse 9:69037386-69037417; SaCas9
cttggcttaatgcaacctctgcctc

SEQ ID NO: 15894 - DNA, 24 bp, Artificial Sequence
  Synthetic: FXN 3 reverse 9:69037387-69037417; SaCas9
ttggcttaatgcaacctctgcctc

SEQ ID NO: 15895 - DNA, 23 bp, Artificial Sequence
  Synthetic: FXN 3 reverse 9:69037388-69037417; SaCas9
tggcttaatgcaacctctgcctc

SEQ ID NO: 15896 - DNA, 22 bp, Artificial Sequence
  Synthetic: FXN 3 reverse 9:69037389-69037417; SaCas9
ggcttaatgcaacctctgcctc

SEQ ID NO: 15897 - DNA, 21 bp, Artificial Sequence
  Synthetic: FXN 3 reverse 9:69037390-69037417; SaCas9
gcttaatgcaacctctgcctc

SEQ ID NO: 15898 - DNA, 20 bp, Artificial Sequence
  Synthetic: FXN 3 reverse 9:69037391-69037417; SaCas9
cttaatgcaacctctgcctc

SEQ ID NO: 15899 - DNA, 19 bp, Artificial Sequence
  Synthetic: FXN 3 reverse 9:69037392-69037417; SaCas9
ttaatgcaacctctgcctc

SEQ ID NO: 15900 - DNA, 18 bp, Artificial Sequence
  Synthetic: FXN 3 reverse 9:69037393-69037417; SaCas9
taatgcaacctctgcctc

SEQ ID NO: 15901 - DNA, 25 bp, Artificial Sequence
  Synthetic: FXN 3 forward 9:69037412-69037443; SaCas9
ccaagatcgcccaatgcactccggc

SEQ ID NO: 15902 - DNA, 24 bp, Artificial Sequence
  Synthetic: FXN 3 forward 9:69037413-69037443; SaCas9
caagatcgcccaatgcactccggc

SEQ ID NO: 15903 - DNA, 23 bp, Artificial Sequence
  Synthetic: FXN 3 forward 9:69037414-69037443; SaCas9
aagatcgcccaatgcactccggc

SEQ ID NO: 15904 - DNA, 22 bp, Artificial Sequence
  Synthetic: FXN 3 forward 9:69037415-69037443; SaCas9
agatcgcccaatgcactccggc

SEQ ID NO: 15905 - DNA, 21 bp, Artificial Sequence
  Synthetic: FXN 3 forward 9:69037416-69037443; SaCas9
gatcgcccaatgcactccggc

SEQ ID NO: 15906 - DNA, 20 bp, Artificial Sequence
  Synthetic: FXN 3 forward 9:69037417-69037443; SaCas9
atcgcccaatgcactccggc

SEQ ID NO: 15907 - DNA, 19 bp, Artificial Sequence
  Synthetic: FXN 3 forward 9:69037418-69037443; SaCas9
tcgcccaatgcactccggc

SEQ ID NO: 15908 - DNA, 18 bp, Artificial Sequence
  Synthetic: FXN 3 forward 9:69037419-69037443; SaCas9
cgcccaatgcactccggc

SEQ ID NO: 15909 - DNA, 25 bp, Artificial Sequence
  Synthetic: FXN 3 forward 9:69037420-69037451; SaCas9
gcccaatgcactccggcctgggcga

SEQ ID NO: 15910 - DNA, 24 bp, Artificial Sequence
  Synthetic: FXN 3 forward 9:69037421-69037451; SaCas9
cccaatgcactccggcctgggcga

SEQ ID NO: 15911 - DNA, 23 bp, Artificial Sequence
  Synthetic: FXN 3 forward 9:69037422-69037451; SaCas9
ccaatgcactccggcctgggcga

SEQ ID NO: 15912 - DNA, 22 bp, Artificial Sequence
  Synthetic: FXN 3 forward 9:69037423-69037451; SaCas9
caatgcactccggcctgggcga

SEQ ID NO: 15913 - DNA, 21 bp, Artificial Sequence
  Synthetic: FXN 3 forward 9:69037424-69037451; SaCas9
aatgcactccggcctgggcga

SEQ ID NO: 15914 - DNA, 20 bp, Artificial Sequence
  Synthetic: FXN 3 forward 9:69037425-69037451; SaCas9
atgcactccggcctgggcga

SEQ ID NO: 15915 - DNA, 19 bp, Artificial Sequence
  Synthetic: FXN 3 forward 9:69037426-69037451; SaCas9
tgcactccggcctgggcga

SEQ ID NO: 15916 - DNA, 18 bp, Artificial Sequence
  Synthetic: FXN 3 forward 9:69037427-69037451; SaCas9
gcactccggcctgggcga

SEQ ID NO: 15917 - DNA, 25 bp, Artificial Sequence
  Synthetic: FXN 3 reverse 9:69037420-69037451; SaCas9
gctctgtcgcccaggccggagtgca

SEQ ID NO: 15918 - DNA, 24 bp, Artificial Sequence
  Synthetic: FXN 3 reverse 9:69037421-69037451; SaCas9
ctctgtcgcccaggccggagtgca

SEQ ID NO: 15919 - DNA, 23 bp, Artificial Sequence
  Synthetic: FXN 3 reverse 9:69037422-69037451; SaCas9
tctgtcgcccaggccggagtgca

SEQ ID NO: 15920 - DNA, 22 bp, Artificial Sequence
  Synthetic: FXN 3 reverse 9:69037423-69037451; SaCas9
ctgtcgcccaggccggagtgca

SEQ ID NO: 15921 - DNA, 21 bp, Artificial Sequence
  Synthetic: FXN 3 reverse 9:69037424-69037451; SaCas9
tgtcgcccaggccggagtgca

SEQ ID NO: 15922 - DNA, 20 bp, Artificial Sequence
  Synthetic: FXN 3 reverse 9:69037425-69037451; SaCas9
gtcgcccaggccggagtgca

SEQ ID NO: 15923 - DNA, 19 bp, Artificial Sequence
  Synthetic: FXN 3 reverse 9:69037426-69037451; SaCas9
tcgcccaggccggagtgca

SEQ ID NO: 15924 - DNA, 18 bp, Artificial Sequence
  Synthetic: FXN 3 reverse 9:69037427-69037451; SaCas9
cgcccaggccggagtgca

SEQ ID NO: 15925 - DNA, 25 bp, Artificial Sequence
  Synthetic: FXN 3 reverse 9:69037429-69037460; SaCas9
cggagtcttgctctgtcgcccaggc

SEQ ID NO: 15926 - DNA, 24 bp, Artificial Sequence
  Synthetic: FXN 3 reverse 9:69037430-69037460; SaCas9
ggagtcttgctctgtcgcccaggc

SEQ ID NO: 15927 - DNA, 23 bp, Artificial Sequence
  Synthetic: FXN 3 reverse 9:69037431-69037460; SaCas9
gagtcttgctctgtcgcccaggc

SEQ ID NO: 15928 - DNA, 22 bp, Artificial Sequence
  Synthetic: FXN 3 reverse 9:69037432-69037460; SaCas9
agtcttgctctgtcgcccaggc

SEQ ID NO: 15929 - DNA, 21 bp, Artificial Sequence
  Synthetic: FXN 3 reverse 9:69037433-69037460; SaCas9
gtcttgctctgtcgcccaggc

SEQ ID NO: 15930 - DNA, 20 bp, Artificial Sequence
  Synthetic: FXN 3 reverse 9:69037434-69037460; SaCas9
tcttgctctgtcgcccaggc

SEQ ID NO: 15931 - DNA, 19 bp, Artificial Sequence
  Synthetic: FXN 3 reverse 9:69037435-69037460; SaCas9
cttgctctgtcgcccaggc

SEQ ID NO: 15932 - DNA, 18 bp, Artificial Sequence
  Synthetic: FXN 3 reverse 9:69037436-69037460; SaCas9
ttgctctgtcgcccaggc

SEQ ID NO: 15933 - DNA, 25 bp, Artificial Sequence
  Synthetic: FXN 3 reverse 9:69037430-69037461; SaCas9
acggagtcttgctctgtcgcccagg

SEQ ID NO: 15934 - DNA, 24 bp, Artificial Sequence
  Synthetic: FXN 3 reverse 9:69037431-69037461; SaCas9
cggagtcttgctctgtcgcccagg

SEQ ID NO: 15935 - DNA, 23 bp, Artificial Sequence
  Synthetic: FXN 3 reverse 9:69037432-69037461; SaCas9
ggagtcttgctctgtcgcccagg

SEQ ID NO: 15936 - DNA, 22 bp, Artificial Sequence
  Synthetic: FXN 3 reverse 9:69037433-69037461; SaCas9
gagtcttgctctgtcgcccagg

SEQ ID NO: 15937 - DNA, 21 bp, Artificial Sequence
  Synthetic: FXN 3 reverse 9:69037434-69037461; SaCas9
agtcttgctctgtcgcccagg

SEQ ID NO: 15938 - DNA, 20 bp, Artificial Sequence
  Synthetic: FXN 3 reverse 9:69037435-69037461; SaCas9
gtcttgctctgtcgcccagg

SEQ ID NO: 15939 - DNA, 19 bp, Artificial Sequence
  Synthetic: FXN 3 reverse 9:69037436-69037461; SaCas9
tcttgctctgtcgcccagg

SEQ ID NO: 15940 - DNA, 18 bp, Artificial Sequence
  Synthetic: FXN 3 reverse 9:69037437-69037461; SaCas9
cttgctctgtcgcccagg

SEQ ID NO: 15941 - DNA, 25 bp, Artificial Sequence
  Synthetic: FXN 3 reverse 9:69037454-69037485; SaCas9
tatttattattattattttttgaga

SEQ ID NO: 15942 - DNA, 24 bp, Artificial Sequence
  Synthetic: FXN 3 reverse 9:69037455-69037485; SaCas9
atttattattattattttttgaga

SEQ ID NO: 15943 - DNA, 23 bp, Artificial Sequence
  Synthetic: FXN 3 reverse 9:69037456-69037485; SaCas9
tttattattattattttttgaga

SEQ ID NO: 15944 - DNA, 22 bp, Artificial Sequence
  Synthetic: FXN 3 reverse 9:69037457-69037485; SaCas9
ttattattattattttttgaga

SEQ ID NO: 15945 - DNA, 21 bp, Artificial Sequence
  Synthetic: FXN 3 reverse 9:69037458-69037485; SaCas9
tattattattattttttgaga

SEQ ID NO: 15946 - DNA, 20 bp, Artificial Sequence
  Synthetic: FXN 3 reverse 9:69037459-69037485; SaCas9
attattattattttttgaga

SEQ ID NO: 15947 - DNA, 19 bp, Artificial Sequence
  Synthetic: FXN 3 reverse 9:69037460-69037485; SaCas9
ttattattattttttgaga

SEQ ID NO: 15948 - DNA, 18 bp, Artificial Sequence
  Synthetic: FXN 3 reverse 9:69037461-69037485; SaCas9
tattattattttttgaga

SEQ ID NO: 15949 - DNA, 25 bp, Artificial Sequence
  Synthetic: FXN 3 reverse 9:69037455-69037486; SaCas9
ttatttattattattattttttgag

SEQ ID NO: 15950 - DNA, 24 bp, Artificial Sequence
  Synthetic: FXN 3 reverse 9:69037456-69037486; SaCas9
tatttattattattattttttgag

SEQ ID NO: 15951 - DNA, 23 bp, Artificial Sequence
  Synthetic: FXN 3 reverse 9:69037457-69037486; SaCas9
atttattattattattttttgag

SEQ ID NO: 15952 - DNA, 22 bp, Artificial Sequence
  Synthetic: FXN 3 reverse 9:69037458-69037486; SaCas9
tttattattattattttttgag

SEQ ID NO: 15953 - DNA, 21 bp, Artificial Sequence
  Synthetic: FXN 3 reverse 9:69037459-69037486; SaCas9
ttattattattattttttgag

SEQ ID NO: 15954 - DNA, 20 bp, Artificial Sequence
  Synthetic: FXN 3 reverse 9:69037460-69037486; SaCas9
tattattattattttttgag

SEQ ID NO: 15955 - DNA, 19 bp, Artificial Sequence
  Synthetic: FXN 3 reverse 9:69037461-69037486; SaCas9
attattattattttttgag

SEQ ID NO: 15956 - DNA, 18 bp, Artificial Sequence
  Synthetic: FXN 3 reverse 9:69037462-69037486; SaCas9
ttattattattttttgag

SEQ ID NO: 15957 - DNA, 25 bp, Artificial Sequence
  Synthetic: FXN 3 reverse 9:69037460-69037491; SaCas9
tatttttatttattattattatttt

SEQ ID NO: 15958 - DNA, 24 bp, Artificial Sequence
  Synthetic: FXN 3 reverse 9:69037461-69037491; SaCas9
atttttatttattattattatttt

SEQ ID NO: 15959 - DNA, 23 bp, Artificial Sequence
  Synthetic: FXN 3 reverse 9:69037462-69037491; SaCas9
tttttatttattattattatttt

SEQ ID NO: 15960 - DNA, 22 bp, Artificial Sequence
  Synthetic: FXN 3 reverse 9:69037463-69037491; SaCas9
ttttatttattattattatttt

SEQ ID NO: 15961 - DNA, 21 bp, Artificial Sequence
  Synthetic: FXN 3 reverse 9:69037464-69037491; SaCas9
tttatttattattattatttt

SEQ ID NO: 15962 - DNA, 20 bp, Artificial Sequence
  Synthetic: FXN 3 reverse 9:69037465-69037491; SaCas9
ttatttattattattatttt

SEQ ID NO: 15963 - DNA, 19 bp, Artificial Sequence
  Synthetic: FXN 3 reverse 9:69037466-69037491; SaCas9
tatttattattattatttt

SEQ ID NO: 15964 - DNA, 18 bp, Artificial Sequence
  Synthetic: FXN 3 reverse 9:69037467-69037491; SaCas9
atttattattattatttt

SEQ ID NO: 15965 - DNA, 25 bp, Artificial Sequence
  Synthetic: FXN 3 forward 9:69037475-69037506; SaCas9
ataataaataaaaataaaaaataaa

SEQ ID NO: 15966 - DNA, 24 bp, Artificial Sequence
  Synthetic: FXN 3 forward 9:69037476-69037506; SaCas9
taataaataaaaataaaaaataaa

SEQ ID NO: 15967 - DNA, 23 bp, Artificial Sequence
  Synthetic: FXN 3 forward 9:69037477-69037506; SaCas9
aataaataaaaataaaaaataaa

SEQ ID NO: 15968 - DNA, 22 bp, Artificial Sequence
  Synthetic: FXN 3 forward 9:69037478-69037506; SaCas9
ataaataaaaataaaaaataaa

SEQ ID NO: 15969 - DNA, 21 bp, Artificial Sequence
  Synthetic: FXN 3 forward 9:69037479-69037506; SaCas9
taaataaaaataaaaaataaa

SEQ ID NO: 15970 - DNA, 20 bp, Artificial Sequence
  Synthetic: FXN 3 forward 9:69037480-69037506; SaCas9
aaataaaaataaaaaataaa

SEQ ID NO: 15971 - DNA, 19 bp, Artificial Sequence
  Synthetic: FXN 3 forward 9:69037481-69037506; SaCas9
aataaaaataaaaaataaa

SEQ ID NO: 15972 - DNA, 18 bp, Artificial Sequence
  Synthetic: FXN 3 forward 9:69037482-69037506; SaCas9
ataaaaataaaaaataaa

SEQ ID NO: 15973 - DNA, 25 bp, Artificial Sequence
  Synthetic: FXN 3 forward 9:69037493-69037524; SaCas9
aaataaaatggatttcccagcatct

SEQ ID NO: 15974 - DNA, 24 bp, Artificial Sequence
  Synthetic: FXN 3 forward 9:69037494-69037524; SaCas9
aataaaatggatttcccagcatct

SEQ ID NO: 15975 - DNA, 23 bp, Artificial Sequence
  Synthetic: FXN 3 forward 9:69037495-69037524; SaCas9
ataaaatggatttcccagcatct

SEQ ID NO: 15976 - DNA, 22 bp, Artificial Sequence
  Synthetic: FXN 3 forward 9:69037496-69037524; SaCas9
taaaatggatttcccagcatct

SEQ ID NO: 15977 - DNA, 21 bp, Artificial Sequence
  Synthetic: FXN 3 forward 9:69037497-69037524; SaCas9
aaaatggatttcccagcatct

SEQ ID NO: 15978 - DNA, 20 bp, Artificial Sequence
  Synthetic: FXN 3 forward 9:69037498-69037524; SaCas9
aaatggatttcccagcatct

SEQ ID NO: 15979 - DNA, 19 bp, Artificial Sequence
  Synthetic: FXN 3 forward 9:69037499-69037524; SaCas9
aatggatttcccagcatct

SEQ ID NO: 15980 - DNA, 18 bp, Artificial Sequence
  Synthetic: FXN 3 forward 9:69037500-69037524; SaCas9
atggatttcccagcatct

SEQ ID NO: 15981 - DNA, 25 bp, Artificial Sequence
  Synthetic: FXN 3 forward 9:69037494-69037525; SaCas9
aataaaatggatttcccagcatctc

SEQ ID NO: 15982 - DNA, 24 bp, Artificial Sequence
  Synthetic: FXN 3 forward 9:69037495-69037525; SaCas9
ataaaatggatttcccagcatctc

SEQ ID NO: 15983 - DNA, 23 bp, Artificial Sequence
  Synthetic: FXN 3 forward 9:69037496-69037525; SaCas9
taaaatggatttcccagcatctc

SEQ ID NO: 15984 - DNA, 22 bp, Artificial Sequence
  Synthetic: FXN 3 forward 9:69037497-69037525; SaCas9
aaaatggatttcccagcatctc

SEQ ID NO: 15985 - DNA, 21 bp, Artificial Sequence
  Synthetic: FXN 3 forward 9:69037498-69037525; SaCas9
aaatggatttcccagcatctc

SEQ ID NO: 15986 - DNA, 20 bp, Artificial Sequence
  Synthetic: FXN 3 forward 9:69037499-69037525; SaCas9
aatggatttcccagcatctc

SEQ ID NO: 15987 - DNA, 19 bp, Artificial Sequence
  Synthetic: FXN 3 forward 9:69037500-69037525; SaCas9
atggatttcccagcatctc

SEQ ID NO: 15988 - DNA, 18 bp, Artificial Sequence
  Synthetic: FXN 3 forward 9:69037501-69037525; SaCas9
tggatttcccagcatctc

SEQ ID NO: 15989 - DNA, 25 bp, Artificial Sequence
  Synthetic: FXN 3 reverse 9:69037505-69037536; SaCas9
acttgcctatttttccagagatgct

SEQ ID NO: 15990 - DNA, 24 bp, Artificial Sequence
  Synthetic: FXN 3 reverse 9:69037506-69037536; SaCas9
cttgcctatttttccagagatgct

SEQ ID NO: 15991 - DNA, 23 bp, Artificial Sequence
  Synthetic: FXN 3 reverse 9:69037507-69037536; SaCas9
ttgcctatttttccagagatgct

SEQ ID NO: 15992 - DNA, 22 bp, Artificial Sequence
  Synthetic: FXN 3 reverse 9:69037508-69037536; SaCas9
tgcctatttttccagagatgct

SEQ ID NO: 15993 - DNA, 21 bp, Artificial Sequence
  Synthetic: FXN 3 reverse 9:69037509-69037536; SaCas9
gcctatttttccagagatgct

SEQ ID NO: 15994 - DNA, 20 bp, Artificial Sequence
  Synthetic: FXN 3 reverse 9:69037510-69037536; SaCas9
cctatttttccagagatgct

SEQ ID NO: 15995 - DNA, 19 bp, Artificial Sequence
  Synthetic: FXN 3 reverse 9:69037511-69037536; SaCas9
ctatttttccagagatgct

SEQ ID NO: 15996 - DNA, 18 bp, Artificial Sequence
  Synthetic: FXN 3 reverse 9:69037512-69037536; SaCas9
tatttttccagagatgct

SEQ ID NO: 15997 - DNA, 25 bp, Artificial Sequence
  Synthetic: FXN 3 reverse 9:69037506-69037537; SaCas9
cacttgcctatttttccagagatgc

SEQ ID NO: 15998 - DNA, 24 bp, Artificial Sequence
  Synthetic: FXN 3 reverse 9:69037507-69037537; SaCas9
acttgcctatttttccagagatgc

SEQ ID NO: 15999 - DNA, 23 bp, Artificial Sequence
  Synthetic: FXN 3 reverse 9:69037508-69037537; SaCas9
cttgcctatttttccagagatgc

SEQ ID NO: 16000 - DNA, 22 bp, Artificial Sequence
  Synthetic: FXN 3 reverse 9:69037509-69037537; SaCas9
ttgcctatttttccagagatgc

SEQ ID NO: 16001 - DNA, 21 bp, Artificial Sequence
  Synthetic: FXN 3 reverse 9:69037510-69037537; SaCas9
tgcctatttttccagagatgc

SEQ ID NO: 16002 - DNA, 20 bp, Artificial Sequence
  Synthetic: FXN 3 reverse 9:69037511-69037537; SaCas9
gcctatttttccagagatgc

SEQ ID NO: 16003 - DNA, 19 bp, Artificial Sequence
  Synthetic: FXN 3 reverse 9:69037512-69037537; SaCas9
cctatttttccagagatgc

SEQ ID NO: 16004 - DNA, 18 bp, Artificial Sequence
  Synthetic: FXN 3 reverse 9:69037513-69037537; SaCas9
ctatttttccagagatgc

SEQ ID NO: 16005 - DNA, 25 bp, Artificial Sequence
  Synthetic: FXN 3 reverse 9:69037507-69037538; SaCas9
acacttgcctatttttccagagatg

SEQ ID NO: 16006 - DNA, 24 bp, Artificial Sequence
  Synthetic: FXN 3 reverse 9:69037508-69037538; SaCas9
cacttgcctatttttccagagatg

SEQ ID NO: 16007 - DNA, 23 bp, Artificial Sequence
  Synthetic: FXN 3 reverse 9:69037509-69037538; SaCas9
acttgcctatttttccagagatg

SEQ ID NO: 16008 - DNA, 22 bp, Artificial Sequence
  Synthetic: FXN 3 reverse 9:69037510-69037538; SaCas9
cttgcctatttttccagagatg

SEQ ID NO: 16009 - DNA, 21 bp, Artificial Sequence
  Synthetic: FXN 3 reverse 9:69037511-69037538; SaCas9
ttgcctatttttccagagatg

SEQ ID NO: 16010 - DNA, 20 bp, Artificial Sequence
  Synthetic: FXN 3 reverse 9:69037512-69037538; SaCas9
tgcctatttttccagagatg

SEQ ID NO: 16011 - DNA, 19 bp, Artificial Sequence
  Synthetic: FXN 3 reverse 9:69037513-69037538; SaCas9
gcctatttttccagagatg

SEQ ID NO: 16012 - DNA, 18 bp, Artificial Sequence
  Synthetic: FXN 3 reverse 9:69037514-69037538; SaCas9
cctatttttccagagatg

SEQ ID NO: 16013 - DNA, 25 bp, Artificial Sequence
  Synthetic: FXN 3 reverse 9:69037515-69037546; SaCas9
tcatggccacacttgcctatttttc

SEQ ID NO: 16014 - DNA, 24 bp, Artificial Sequence
  Synthetic: FXN 3 reverse 9:69037516-69037546; SaCas9
catggccacacttgcctatttttc

SEQ ID NO: 16015 - DNA, 23 bp, Artificial Sequence
  Synthetic: FXN 3 reverse 9:69037517-69037546; SaCas9
atggccacacttgcctatttttc

SEQ ID NO: 16016 - DNA, 22 bp, Artificial Sequence
  Synthetic: FXN 3 reverse 9:69037518-69037546; SaCas9
tggccacacttgcctatttttc

SEQ ID NO: 16017 - DNA, 21 bp, Artificial Sequence
  Synthetic: FXN 3 reverse 9:69037519-69037546; SaCas9
ggccacacttgcctatttttc

SEQ ID NO: 16018 - DNA, 20 bp, Artificial Sequence
  Synthetic: FXN 3 reverse 9:69037520-69037546; SaCas9
gccacacttgcctatttttc

SEQ ID NO: 16019 - DNA, 19 bp, Artificial Sequence
  Synthetic: FXN 3 reverse 9:69037521-69037546; SaCas9
ccacacttgcctatttttc

SEQ ID NO: 16020 - DNA, 18 bp, Artificial Sequence
  Synthetic: FXN 3 reverse 9:69037522-69037546; SaCas9
cacacttgcctatttttc

SEQ ID NO: 16021 - DNA, 25 bp, Artificial Sequence
  Synthetic: FXN 3 forward 9:69037539-69037570; SaCas9
gccatgatggtccttagatctcctc

SEQ ID NO: 16022 - DNA, 24 bp, Artificial Sequence
  Synthetic: FXN 3 forward 9:69037540-69037570; SaCas9
ccatgatggtccttagatctcctc

SEQ ID NO: 16023 - DNA, 23 bp, Artificial Sequence
  Synthetic: FXN 3 forward 9:69037541-69037570; SaCas9
catgatggtccttagatctcctc

SEQ ID NO: 16024 - DNA, 22 bp, Artificial Sequence
  Synthetic: FXN 3 forward 9:69037542-69037570; SaCas9
atgatggtccttagatctcctc

SEQ ID NO: 16025 - DNA, 21 bp, Artificial Sequence
  Synthetic: FXN 3 forward 9:69037543-69037570; SaCas9
tgatggtccttagatctcctc

SEQ ID NO: 16026 - DNA, 20 bp, Artificial Sequence
  Synthetic: FXN 3 forward 9:69037544-69037570; SaCas9
gatggtccttagatctcctc

SEQ ID NO: 16027 - DNA, 19 bp, Artificial Sequence
  Synthetic: FXN 3 forward 9:69037545-69037570; SaCas9
atggtccttagatctcctc

SEQ ID NO: 16028 - DNA, 18 bp, Artificial Sequence
  Synthetic: FXN 3 forward 9:69037546-69037570; SaCas9
tggtccttagatctcctc

SEQ ID NO: 16029 - DNA, 25 bp, Artificial Sequence
  Synthetic: FXN 3 forward 9:69037540-69037571; SaCas9
ccatgatggtccttagatctcctct

SEQ ID NO: 16030 - DNA, 24 bp, Artificial Sequence
  Synthetic: FXN 3 forward 9:69037541-69037571; SaCas9
catgatggtccttagatctcctct

SEQ ID NO: 16031 - DNA, 23 bp, Artificial Sequence
  Synthetic: FXN 3 forward 9:69037542-69037571; SaCas9
atgatggtccttagatctcctct

SEQ ID NO: 16032 - DNA, 22 bp, Artificial Sequence
  Synthetic: FXN 3 forward 9:69037543-69037571; SaCas9
tgatggtccttagatctcctct

SEQ ID NO: 16033 - DNA, 21 bp, Artificial Sequence
  Synthetic: FXN 3 forward 9:69037544-69037571; SaCas9
gatggtccttagatctcctct

SEQ ID NO: 16034 - DNA, 20 bp, Artificial Sequence
  Synthetic: FXN 3 forward 9:69037545-69037571; SaCas9
atggtccttagatctcctct

SEQ ID NO: 16035 - DNA, 19 bp, Artificial Sequence
  Synthetic: FXN 3 forward 9:69037546-69037571; SaCas9
tggtccttagatctcctct

SEQ ID NO: 16036 - DNA, 18 bp, Artificial Sequence
  Synthetic: FXN 3 forward 9:69037547-69037571; SaCas9
ggtccttagatctcctct

SEQ ID NO: 16037 - DNA, 25 bp, Artificial Sequence
  Synthetic: FXN 3 reverse 9:69037548-69037579; SaCas9
atgtctgctttcctagaggagatct

SEQ ID NO: 16038 - DNA, 24 bp, Artificial Sequence
  Synthetic: FXN 3 reverse 9:69037549-69037579; SaCas9
tgtctgctttcctagaggagatct

SEQ ID NO: 16039 - DNA, 23 bp, Artificial Sequence
  Synthetic: FXN 3 reverse 9:69037550-69037579; SaCas9
gtctgctttcctagaggagatct

SEQ ID NO: 16040 - DNA, 22 bp, Artificial Sequence
  Synthetic: FXN 3 reverse 9:69037551-69037579; SaCas9
tctgctttcctagaggagatct

SEQ ID NO: 16041 - DNA, 21 bp, Artificial Sequence
  Synthetic: FXN 3 reverse 9:69037552-69037579; SaCas9
ctgctttcctagaggagatct

SEQ ID NO: 16042 - DNA, 20 bp, Artificial Sequence
  Synthetic: FXN 3 reverse 9:69037553-69037579; SaCas9
tgctttcctagaggagatct

SEQ ID NO: 16043 - DNA, 19 bp, Artificial Sequence
  Synthetic: FXN 3 reverse 9:69037554-69037579; SaCas9
gctttcctagaggagatct

SEQ ID NO: 16044 - DNA, 18 bp, Artificial Sequence
  Synthetic: FXN 3 reverse 9:69037555-69037579; SaCas9
ctttcctagaggagatct

SEQ ID NO: 16045 - DNA, 25 bp, Artificial Sequence
  Synthetic: FXN 3 reverse 9:69037557-69037588; SaCas9
aagtaataaatgtctgctttcctag

SEQ ID NO: 16046 - DNA, 24 bp, Artificial Sequence
  Synthetic: FXN 3 reverse 9:69037558-69037588; SaCas9
agtaataaatgtctgctttcctag

SEQ ID NO: 16047 - DNA, 23 bp, Artificial Sequence
  Synthetic: FXN 3 reverse 9:69037559-69037588; SaCas9
gtaataaatgtctgctttcctag

SEQ ID NO: 16048 - DNA, 22 bp, Artificial Sequence
  Synthetic: FXN 3 reverse 9:69037560-69037588; SaCas9
taataaatgtctgctttcctag

SEQ ID NO: 16049 - DNA, 21 bp, Artificial Sequence
  Synthetic: FXN 3 reverse 9:69037561-69037588; SaCas9
aataaatgtctgctttcctag

SEQ ID NO: 16050 - DNA, 20 bp, Artificial Sequence
  Synthetic: FXN 3 reverse 9:69037562-69037588; SaCas9
ataaatgtctgctttcctag

SEQ ID NO: 16051 - DNA, 19 bp, Artificial Sequence
  Synthetic: FXN 3 reverse 9:69037563-69037588; SaCas9
taaatgtctgctttcctag

SEQ ID NO: 16052 - DNA, 18 bp, Artificial Sequence
  Synthetic: FXN 3 reverse 9:69037564-69037588; SaCas9
aaatgtctgctttcctag

SEQ ID NO: 16053 - DNA, 25 bp, Artificial Sequence
  Synthetic: FXN 3 reverse 9:69037558-69037589; SaCas9
caagtaataaatgtctgctttccta

SEQ ID NO: 16054 - DNA, 24 bp, Artificial Sequence
  Synthetic: FXN 3 reverse 9:69037559-69037589; SaCas9
aagtaataaatgtctgctttccta

SEQ ID NO: 16055 - DNA, 23 bp, Artificial Sequence
  Synthetic: FXN 3 reverse 9:69037560-69037589; SaCas9
agtaataaatgtctgctttccta

SEQ ID NO: 16056 - DNA, 22 bp, Artificial Sequence
  Synthetic: FXN 3 reverse 9:69037561-69037589; SaCas9
gtaataaatgtctgctttccta

SEQ ID NO: 16057 - DNA, 21 bp, Artificial Sequence
  Synthetic: FXN 3 reverse 9:69037562-69037589; SaCas9
taataaatgtctgctttccta

SEQ ID NO: 16058 - DNA, 20 bp, Artificial Sequence
  Synthetic: FXN 3 reverse 9:69037563-69037589; SaCas9
aataaatgtctgctttccta

SEQ ID NO: 16059 - DNA, 19 bp, Artificial Sequence
  Synthetic: FXN 3 reverse 9:69037564-69037589; SaCas9
ataaatgtctgctttccta

SEQ ID NO: 16060 - DNA, 18 bp, Artificial Sequence
  Synthetic: FXN 3 reverse 9:69037565-69037589; SaCas9
taaatgtctgctttccta

SEQ ID NO: 16061 - DNA, 25 bp, Artificial Sequence
  Synthetic: FXN 3 reverse 9:69037560-69037591; SaCas9
gccaagtaataaatgtctgctttcc

SEQ ID NO: 16062 - DNA, 24 bp, Artificial Sequence
  Synthetic: FXN 3 reverse 9:69037561-69037591; SaCas9
ccaagtaataaatgtctgctttcc

SEQ ID NO: 16063 - DNA, 23 bp, Artificial Sequence
  Synthetic: FXN 3 reverse 9:69037562-69037591; SaCas9
caagtaataaatgtctgctttcc

SEQ ID NO: 16064 - DNA, 22 bp, Artificial Sequence
  Synthetic: FXN 3 reverse 9:69037563-69037591; SaCas9
aagtaataaatgtctgctttcc

SEQ ID NO: 16065 - DNA, 21 bp, Artificial Sequence
  Synthetic: FXN 3 reverse 9:69037564-69037591; SaCas9
agtaataaatgtctgctttcc

SEQ ID NO: 16066 - DNA, 20 bp, Artificial Sequence
  Synthetic: FXN 3 reverse 9:69037565-69037591; SaCas9
gtaataaatgtctgctttcc

SEQ ID NO: 16067 - DNA, 19 bp, Artificial Sequence
  Synthetic: FXN 3 reverse 9:69037566-69037591; SaCas9
taataaatgtctgctttcc

SEQ ID NO: 16068 - DNA, 18 bp, Artificial Sequence
  Synthetic: FXN 3 reverse 9:69037567-69037591; SaCas9
aataaatgtctgctttcc

SEQ ID NO: 16069 - DNA, 25 bp, Artificial Sequence
  Synthetic: FXN 3 forward 9:69037579-69037610; SaCas9
ttattacttggcttctgtgcactat

SEQ ID NO: 16070 - DNA, 24 bp, Artificial Sequence
  Synthetic: FXN 3 forward 9:69037580-69037610; SaCas9
tattacttggcttctgtgcactat

SEQ ID NO: 16071 - DNA, 23 bp, Artificial Sequence
  Synthetic: FXN 3 forward 9:69037581-69037610; SaCas9
attacttggcttctgtgcactat

SEQ ID NO: 16072 - DNA, 22 bp, Artificial Sequence
  Synthetic: FXN 3 forward 9:69037582-69037610; SaCas9
ttacttggcttctgtgcactat

SEQ ID NO: 16073 - DNA, 21 bp, Artificial Sequence
  Synthetic: FXN 3 forward 9:69037583-69037610; SaCas9
tacttggcttctgtgcactat

SEQ ID NO: 16074 - DNA, 20 bp, Artificial Sequence
  Synthetic: FXN 3 forward 9:69037584-69037610; SaCas9
acttggcttctgtgcactat

SEQ ID NO: 16075 - DNA, 19 bp, Artificial Sequence
  Synthetic: FXN 3 forward 9:69037585-69037610; SaCas9
cttggcttctgtgcactat

SEQ ID NO: 16076 - DNA, 18 bp, Artificial Sequence
  Synthetic: FXN 3 forward 9:69037586-69037610; SaCas9
ttggcttctgtgcactat

SEQ ID NO: 16077 - DNA, 25 bp, Artificial Sequence
  Synthetic: FXN 3 reverse 9:69037590-69037621; SaCas9
aatacgtggcagctcagatagtgca

SEQ ID NO: 16078 - DNA, 24 bp, Artificial Sequence
  Synthetic: FXN 3 reverse 9:69037591-69037621; SaCas9
atacgtggcagctcagatagtgca

SEQ ID NO: 16079 - DNA, 23 bp, Artificial Sequence
  Synthetic: FXN 3 reverse 9:69037592-69037621; SaCas9
tacgtggcagctcagatagtgca

SEQ ID NO: 16080 - DNA, 22 bp, Artificial Sequence
  Synthetic: FXN 3 reverse 9:69037593-69037621; SaCas9
acgtggcagctcagatagtgca

SEQ ID NO: 16081 - DNA, 21 bp, Artificial Sequence
  Synthetic: FXN 3 reverse 9:69037594-69037621; SaCas9
cgtggcagctcagatagtgca

SEQ ID NO: 16082 - DNA, 20 bp, Artificial Sequence
  Synthetic: FXN 3 reverse 9:69037595-69037621; SaCas9
gtggcagctcagatagtgca

SEQ ID NO: 16083 - DNA, 19 bp, Artificial Sequence
  Synthetic: FXN 3 reverse 9:69037596-69037621; SaCas9
tggcagctcagatagtgca

SEQ ID NO: 16084 - DNA, 18 bp, Artificial Sequence
  Synthetic: FXN 3 reverse 9:69037597-69037621; SaCas9
ggcagctcagatagtgca

SEQ ID NO: 16085 - DNA, 25 bp, Artificial Sequence
  Synthetic: FXN 3 forward 9:69037594-69037625; SaCas9
tgtgcactatctgagctgccacgta

SEQ ID NO: 16086 - DNA, 24 bp, Artificial Sequence
  Synthetic: FXN 3 forward 9:69037595-69037625; SaCas9
gtgcactatctgagctgccacgta

SEQ ID NO: 16087 - DNA, 23 bp, Artificial Sequence
  Synthetic: FXN 3 forward 9:69037596-69037625; SaCas9
tgcactatctgagctgccacgta

SEQ ID NO: 16088 - DNA, 22 bp, Artificial Sequence
  Synthetic: FXN 3 forward 9:69037597-69037625; SaCas9
gcactatctgagctgccacgta

SEQ ID NO: 16089 - DNA, 21 bp, Artificial Sequence
  Synthetic: FXN 3 forward 9:69037598-69037625; SaCas9
cactatctgagctgccacgta

SEQ ID NO: 16090 - DNA, 20 bp, Artificial Sequence
  Synthetic: FXN 3 forward 9:69037599-69037625; SaCas9
actatctgagctgccacgta

SEQ ID NO: 16091 - DNA, 19 bp, Artificial Sequence
  Synthetic: FXN 3 forward 9:69037600-69037625; SaCas9
ctatctgagctgccacgta

SEQ ID NO: 16092 - DNA, 18 bp, Artificial Sequence
  Synthetic: FXN 3 forward 9:69037601-69037625; SaCas9
tatctgagctgccacgta

SEQ ID NO: 16093 - DNA, 25 bp, Artificial Sequence
  Synthetic: FXN 3 forward 9:69037616-69037647; SaCas9
gtattgggcttccacccctgcctgt

SEQ ID NO: 16094 - DNA, 24 bp, Artificial Sequence
  Synthetic: FXN 3 forward 9:69037617-69037647; SaCas9
tattgggcttccacccctgcctgt

SEQ ID NO: 16095 - DNA, 23 bp, Artificial Sequence
  Synthetic: FXN 3 forward 9:69037618-69037647; SaCas9
attgggcttccacccctgcctgt

SEQ ID NO: 16096 - DNA, 22 bp, Artificial Sequence
  Synthetic: FXN 3 forward 9:69037619-69037647; SaCas9
ttgggcttccacccctgcctgt

SEQ ID NO: 16097 - DNA, 21 bp, Artificial Sequence
  Synthetic: FXN 3 forward 9:69037620-69037647; SaCas9
tgggcttccacccctgcctgt

SEQ ID NO: 16098 - DNA, 20 bp, Artificial Sequence
  Synthetic: FXN 3 forward 9:69037621-69037647; SaCas9
gggcttccacccctgcctgt

SEQ ID NO: 16099 - DNA, 19 bp, Artificial Sequence
  Synthetic: FXN 3 forward 9:69037622-69037647; SaCas9
ggcttccacccctgcctgt

SEQ ID NO: 16100 - DNA, 18 bp, Artificial Sequence
  Synthetic: FXN 3 forward 9:69037623-69037647; SaCas9
gcttccacccctgcctgt

SEQ ID NO: 16101 - DNA, 25 bp, Artificial Sequence
  Synthetic: FXN 3 reverse 9:69037624-69037655; SaCas9
cccatgctgtccacacaggcagggg

SEQ ID NO: 16102 - DNA, 24 bp, Artificial Sequence
  Synthetic: FXN 3 reverse 9:69037625-69037655; SaCas9
ccatgctgtccacacaggcagggg

SEQ ID NO: 16103 - DNA, 23 bp, Artificial Sequence
  Synthetic: FXN 3 reverse 9:69037626-69037655; SaCas9
catgctgtccacacaggcagggg

SEQ ID NO: 16104 - DNA, 22 bp, Artificial Sequence
  Synthetic: FXN 3 reverse 9:69037627-69037655; SaCas9
atgctgtccacacaggcagggg

SEQ ID NO: 16105 - DNA, 21 bp, Artificial Sequence
  Synthetic: FXN 3 reverse 9:69037628-69037655; SaCas9
tgctgtccacacaggcagggg

SEQ ID NO: 16106 - DNA, 20 bp, Artificial Sequence
  Synthetic: FXN 3 reverse 9:69037629-69037655; SaCas9
gctgtccacacaggcagggg

SEQ ID NO: 16107 - DNA, 19 bp, Artificial Sequence
  Synthetic: FXN 3 reverse 9:69037630-69037655; SaCas9
ctgtccacacaggcagggg

SEQ ID NO: 16108 - DNA, 18 bp, Artificial Sequence
  Synthetic: FXN 3 reverse 9:69037631-69037655; SaCas9
tgtccacacaggcagggg

SEQ ID NO: 16109 - DNA, 25 bp, Artificial Sequence
  Synthetic: FXN 3 forward 9:69037625-69037656; SaCas9
ttccacccctgcctgtgtggacagc

SEQ ID NO: 16110 - DNA, 24 bp, Artificial Sequence
  Synthetic: FXN 3 forward 9:69037626-69037656; SaCas9
tccacccctgcctgtgtggacagc

SEQ ID NO: 16111 - DNA, 23 bp, Artificial Sequence
  Synthetic: FXN 3 forward 9:69037627-69037656; SaCas9
ccacccctgcctgtgtggacagc

SEQ ID NO: 16112 - DNA, 22 bp, Artificial Sequence
  Synthetic: FXN 3 forward 9:69037628-69037656; SaCas9
cacccctgcctgtgtggacagc

SEQ ID NO: 16113 - DNA, 21 bp, Artificial Sequence
  Synthetic: FXN 3 forward 9:69037629-69037656; SaCas9
acccctgcctgtgtggacagc

SEQ ID NO: 16114 - DNA, 20 bp, Artificial Sequence
  Synthetic: FXN 3 forward 9:69037630-69037656; SaCas9
cccctgcctgtgtggacagc

SEQ ID NO: 16115 - DNA, 19 bp, Artificial Sequence
  Synthetic: FXN 3 forward 9:69037631-69037656; SaCas9
ccctgcctgtgtggacagc

SEQ ID NO: 16116 - DNA, 18 bp, Artificial Sequence
  Synthetic: FXN 3 forward 9:69037632-69037656; SaCas9
cctgcctgtgtggacagc

SEQ ID NO: 16117 - DNA, 25 bp, Artificial Sequence
  Synthetic: FXN 3 reverse 9:69037625-69037656; SaCas9
acccatgctgtccacacaggcaggg

SEQ ID NO: 16118 - DNA, 24 bp, Artificial Sequence
  Synthetic: FXN 3 reverse 9:69037626-69037656; SaCas9
cccatgctgtccacacaggcaggg

SEQ ID NO: 16119 - DNA, 23 bp, Artificial Sequence
  Synthetic: FXN 3 reverse 9:69037627-69037656; SaCas9
ccatgctgtccacacaggcaggg

SEQ ID NO: 16120 - DNA, 22 bp, Artificial Sequence
  Synthetic: FXN 3 reverse 9:69037628-69037656; SaCas9
catgctgtccacacaggcaggg

SEQ ID NO: 16121 - DNA, 21 bp, Artificial Sequence
  Synthetic: FXN 3 reverse 9:69037629-69037656; SaCas9
atgctgtccacacaggcaggg

SEQ ID NO: 16122 - DNA, 20 bp, Artificial Sequence
  Synthetic: FXN 3 reverse 9:69037630-69037656; SaCas9
tgctgtccacacaggcaggg

SEQ ID NO: 16123 - DNA, 19 bp, Artificial Sequence
  Synthetic: FXN 3 reverse 9:69037631-69037656; SaCas9
gctgtccacacaggcaggg

SEQ ID NO: 16124 - DNA, 18 bp, Artificial Sequence
  Synthetic: FXN 3 reverse 9:69037632-69037656; SaCas9
ctgtccacacaggcaggg

SEQ ID NO: 16125 - DNA, 25 bp, Artificial Sequence
  Synthetic: FXN 3 reverse 9:69037629-69037660; SaCas9
gacaacccatgctgtccacacaggc

SEQ ID NO: 16126 - DNA, 24 bp, Artificial Sequence
  Synthetic: FXN 3 reverse 9:69037630-69037660; SaCas9
acaacccatgctgtccacacaggc

SEQ ID NO: 16127 - DNA, 23 bp, Artificial Sequence
  Synthetic: FXN 3 reverse 9:69037631-69037660; SaCas9
caacccatgctgtccacacaggc

SEQ ID NO: 16128 - DNA, 22 bp, Artificial Sequence
  Synthetic: FXN 3 reverse 9:69037632-69037660; SaCas9
aacccatgctgtccacacaggc

SEQ ID NO: 16129 - DNA, 21 bp, Artificial Sequence
  Synthetic: FXN 3 reverse 9:69037633-69037660; SaCas9
acccatgctgtccacacaggc

SEQ ID NO: 16130 - DNA, 20 bp, Artificial Sequence
  Synthetic: FXN 3 reverse 9:69037634-69037660; SaCas9
cccatgctgtccacacaggc

SEQ ID NO: 16131 - DNA, 19 bp, Artificial Sequence
  Synthetic: FXN 3 reverse 9:69037635-69037660; SaCas9
ccatgctgtccacacaggc

SEQ ID NO: 16132 - DNA, 18 bp, Artificial Sequence
  Synthetic: FXN 3 reverse 9:69037636-69037660; SaCas9
catgctgtccacacaggc

SEQ ID NO: 16133 - DNA, 25 bp, Artificial Sequence
  Synthetic: FXN 3 reverse 9:69037630-69037661; SaCas9
tgacaacccatgctgtccacacagg

SEQ ID NO: 16134 - DNA, 24 bp, Artificial Sequence
  Synthetic: FXN 3 reverse 9:69037631-69037661; SaCas9
gacaacccatgctgtccacacagg

SEQ ID NO: 16135 - DNA, 23 bp, Artificial Sequence
  Synthetic: FXN 3 reverse 9:69037632-69037661; SaCas9
acaacccatgctgtccacacagg

SEQ ID NO: 16136 - DNA, 22 bp, Artificial Sequence
  Synthetic: FXN 3 reverse 9:69037633-69037661; SaCas9
caacccatgctgtccacacagg

SEQ ID NO: 16137 - DNA, 21 bp, Artificial Sequence
  Synthetic: FXN 3 reverse 9:69037634-69037661; SaCas9
aacccatgctgtccacacagg

SEQ ID NO: 16138 - DNA, 20 bp, Artificial Sequence
  Synthetic: FXN 3 reverse 9:69037635-69037661; SaCas9
acccatgctgtccacacagg

SEQ ID NO: 16139 - DNA, 19 bp, Artificial Sequence
  Synthetic: FXN 3 reverse 9:69037636-69037661; SaCas9
cccatgctgtccacacagg

SEQ ID NO: 16140 - DNA, 18 bp, Artificial Sequence
  Synthetic: FXN 3 reverse 9:69037637-69037661; SaCas9
ccatgctgtccacacagg

SEQ ID NO: 16141 - DNA, 25 bp, Artificial Sequence
  Synthetic: FXN 3 forward 9:69037637-69037668; SaCas9
ctgtgtggacagcatgggttgtcag

SEQ ID NO: 16142 - DNA, 24 bp, Artificial Sequence
  Synthetic: FXN 3 forward 9:69037638-69037668; SaCas9
tgtgtggacagcatgggttgtcag

SEQ ID NO: 16143 - DNA, 23 bp, Artificial Sequence
  Synthetic: FXN 3 forward 9:69037639-69037668; SaCas9
gtgtggacagcatgggttgtcag

SEQ ID NO: 16144 - DNA, 22 bp, Artificial Sequence
  Synthetic: FXN 3 forward 9:69037640-69037668; SaCas9
tgtggacagcatgggttgtcag

SEQ ID NO: 16145 - DNA, 21 bp, Artificial Sequence
  Synthetic: FXN 3 forward 9:69037641-69037668; SaCas9
gtggacagcatgggttgtcag

SEQ ID NO: 16146 - DNA, 20 bp, Artificial Sequence
  Synthetic: FXN 3 forward 9:69037642-69037668; SaCas9
tggacagcatgggttgtcag

SEQ ID NO: 16147 - DNA, 19 bp, Artificial Sequence
  Synthetic: FXN 3 forward 9:69037643-69037668; SaCas9
ggacagcatgggttgtcag

SEQ ID NO: 16148 - DNA, 18 bp, Artificial Sequence
  Synthetic: FXN 3 forward 9:69037644-69037668; SaCas9
gacagcatgggttgtcag

SEQ ID NO: 16149 - DNA, 25 bp, Artificial Sequence
  Synthetic: FXN 3 forward 9:69037662-69037693; SaCas9
cagagttgtgttttgttttgttttt

SEQ ID NO: 16150 - DNA, 24 bp, Artificial Sequence
  Synthetic: FXN 3 forward 9:69037663-69037693; SaCas9
agagttgtgttttgttttgttttt

SEQ ID NO: 16151 - DNA, 23 bp, Artificial Sequence
  Synthetic: FXN 3 forward 9:69037664-69037693; SaCas9
gagttgtgttttgttttgttttt

SEQ ID NO: 16152 - DNA, 22 bp, Artificial Sequence
  Synthetic: FXN 3 forward 9:69037665-69037693; SaCas9
agttgtgttttgttttgttttt

SEQ ID NO: 16153 - DNA, 21 bp, Artificial Sequence
  Synthetic: FXN 3 forward 9:69037666-69037693; SaCas9
gttgtgttttgttttgttttt

SEQ ID NO: 16154 - DNA, 20 bp, Artificial Sequence
  Synthetic: FXN 3 forward 9:69037667-69037693; SaCas9
ttgtgttttgttttgttttt

SEQ ID NO: 16155 - DNA, 19 bp, Artificial Sequence
  Synthetic: FXN 3 forward 9:69037668-69037693; SaCas9
tgtgttttgttttgttttt

SEQ ID NO: 16156 - DNA, 18 bp, Artificial Sequence
  Synthetic: FXN 3 forward 9:69037669-69037693; SaCas9
gtgttttgttttgttttt

SEQ ID NO: 16157 - DNA, 25 bp, Artificial Sequence
  Synthetic: FXN 3 forward 9:69037668-69037699; SaCas9
tgtgttttgttttgtttttttgaga

SEQ ID NO: 16158 - DNA, 24 bp, Artificial Sequence
  Synthetic: FXN 3 forward 9:69037669-69037699; SaCas9
gtgttttgttttgtttttttgaga

SEQ ID NO: 16159 - DNA, 23 bp, Artificial Sequence
  Synthetic: FXN 3 forward 9:69037670-69037699; SaCas9
tgttttgttttgtttttttgaga

SEQ ID NO: 16160 - DNA, 22 bp, Artificial Sequence
  Synthetic: FXN 3 forward 9:69037671-69037699; SaCas9
gttttgttttgtttttttgaga

SEQ ID NO: 16161 - DNA, 21 bp, Artificial Sequence
  Synthetic: FXN 3 forward 9:69037672-69037699; SaCas9
ttttgttttgtttttttgaga

SEQ ID NO: 16162 - DNA, 20 bp, Artificial Sequence
  Synthetic: FXN 3 forward 9:69037673-69037699; SaCas9
tttgttttgtttttttgaga

SEQ ID NO: 16163 - DNA, 19 bp, Artificial Sequence
  Synthetic: FXN 3 forward 9:69037674-69037699; SaCas9
ttgttttgtttttttgaga

SEQ ID NO: 16164 - DNA, 18 bp, Artificial Sequence
  Synthetic: FXN 3 forward 9:69037675-69037699; SaCas9
tgttttgtttttttgaga

SEQ ID NO: 16165 - DNA, 25 bp, Artificial Sequence
  Synthetic: FXN 3 forward 9:69037693-69037724; SaCas9
cagagtttccctcttgttgcccagg

SEQ ID NO: 16166 - DNA, 24 bp, Artificial Sequence
  Synthetic: FXN 3 forward 9:69037694-69037724; SaCas9
agagtttccctcttgttgcccagg

SEQ ID NO: 16167 - DNA, 23 bp, Artificial Sequence
  Synthetic: FXN 3 forward 9:69037695-69037724; SaCas9
gagtttccctcttgttgcccagg

SEQ ID NO: 16168 - DNA, 22 bp, Artificial Sequence
  Synthetic: FXN 3 forward 9:69037696-69037724; SaCas9
agtttccctcttgttgcccagg

SEQ ID NO: 16169 - DNA, 21 bp, Artificial Sequence
  Synthetic: FXN 3 forward 9:69037697-69037724; SaCas9
gtttccctcttgttgcccagg

SEQ ID NO: 16170 - DNA, 20 bp, Artificial Sequence
  Synthetic: FXN 3 forward 9:69037698-69037724; SaCas9
tttccctcttgttgcccagg

SEQ ID NO: 16171 - DNA, 19 bp, Artificial Sequence
  Synthetic: FXN 3 forward 9:69037699-69037724; SaCas9
ttccctcttgttgcccagg

SEQ ID NO: 16172 - DNA, 18 bp, Artificial Sequence
  Synthetic: FXN 3 forward 9:69037700-69037724; SaCas9
tccctcttgttgcccagg

SEQ ID NO: 16173 - DNA, 25 bp, Artificial Sequence
  Synthetic: FXN 3 forward 9:69037694-69037725; SaCas9
agagtttccctcttgttgcccaggc

SEQ ID NO: 16174 - DNA, 24 bp, Artificial Sequence
  Synthetic: FXN 3 forward 9:69037695-69037725; SaCas9
gagtttccctcttgttgcccaggc

SEQ ID NO: 16175 - DNA, 23 bp, Artificial Sequence
  Synthetic: FXN 3 forward 9:69037696-69037725; SaCas9
agtttccctcttgttgcccaggc

SEQ ID NO: 16176 - DNA, 22 bp, Artificial Sequence
  Synthetic: FXN 3 forward 9:69037697-69037725; SaCas9
gtttccctcttgttgcccaggc

SEQ ID NO: 16177 - DNA, 21 bp, Artificial Sequence
  Synthetic: FXN 3 forward 9:69037698-69037725; SaCas9
tttccctcttgttgcccaggc

SEQ ID NO: 16178 - DNA, 20 bp, Artificial Sequence
  Synthetic: FXN 3 forward 9:69037699-69037725; SaCas9
ttccctcttgttgcccaggc

SEQ ID NO: 16179 - DNA, 19 bp, Artificial Sequence
  Synthetic: FXN 3 forward 9:69037700-69037725; SaCas9
tccctcttgttgcccaggc

SEQ ID NO: 16180 - DNA, 18 bp, Artificial Sequence
  Synthetic: FXN 3 forward 9:69037701-69037725; SaCas9
ccctcttgttgcccaggc

SEQ ID NO: 16181 - DNA, 25 bp, Artificial Sequence
  Synthetic: FXN 3 reverse 9:69037698-69037729; SaCas9
ctgcactccagcctgggcaacaaga

SEQ ID NO: 16182 - DNA, 24 bp, Artificial Sequence
  Synthetic: FXN 3 reverse 9:69037699-69037729; SaCas9
tgcactccagcctgggcaacaaga

SEQ ID NO: 16183 - DNA, 23 bp, Artificial Sequence
  Synthetic: FXN 3 reverse 9:69037700-69037729; SaCas9
gcactccagcctgggcaacaaga

SEQ ID NO: 16184 - DNA, 22 bp, Artificial Sequence
  Synthetic: FXN 3 reverse 9:69037701-69037729; SaCas9
cactccagcctgggcaacaaga

SEQ ID NO: 16185 - DNA, 21 bp, Artificial Sequence
  Synthetic: FXN 3 reverse 9:69037702-69037729; SaCas9
actccagcctgggcaacaaga

SEQ ID NO: 16186 - DNA, 20 bp, Artificial Sequence
  Synthetic: FXN 3 reverse 9:69037703-69037729; SaCas9
ctccagcctgggcaacaaga

SEQ ID NO: 16187 - DNA, 19 bp, Artificial Sequence
  Synthetic: FXN 3 reverse 9:69037704-69037729; SaCas9
tccagcctgggcaacaaga

SEQ ID NO: 16188 - DNA, 18 bp, Artificial Sequence
  Synthetic: FXN 3 reverse 9:69037705-69037729; SaCas9
ccagcctgggcaacaaga

SEQ ID NO: 16189 - DNA, 25 bp, Artificial Sequence
  Synthetic: FXN 3 reverse 9:69037699-69037730; SaCas9
actgcactccagcctgggcaacaag

SEQ ID NO: 16190 - DNA, 24 bp, Artificial Sequence
  Synthetic: FXN 3 reverse 9:69037700-69037730; SaCas9
ctgcactccagcctgggcaacaag

SEQ ID NO: 16191 - DNA, 23 bp, Artificial Sequence
  Synthetic: FXN 3 reverse 9:69037701-69037730; SaCas9
tgcactccagcctgggcaacaag

SEQ ID NO: 16192 - DNA, 22 bp, Artificial Sequence
  Synthetic: FXN 3 reverse 9:69037702-69037730; SaCas9
gcactccagcctgggcaacaag

SEQ ID NO: 16193 - DNA, 21 bp, Artificial Sequence
  Synthetic: FXN 3 reverse 9:69037703-69037730; SaCas9
cactccagcctgggcaacaag

SEQ ID NO: 16194 - DNA, 20 bp, Artificial Sequence
  Synthetic: FXN 3 reverse 9:69037704-69037730; SaCas9
actccagcctgggcaacaag

SEQ ID NO: 16195 - DNA, 19 bp, Artificial Sequence
  Synthetic: FXN 3 reverse 9:69037705-69037730; SaCas9
ctccagcctgggcaacaag

SEQ ID NO: 16196 - DNA, 18 bp, Artificial Sequence
  Synthetic: FXN 3 reverse 9:69037706-69037730; SaCas9
tccagcctgggcaacaag

SEQ ID NO: 16197 - DNA, 25 bp, Artificial Sequence
  Synthetic: FXN 3 reverse 9:69037700-69037731; SaCas9
cactgcactccagcctgggcaacaa

SEQ ID NO: 16198 - DNA, 24 bp, Artificial Sequence
  Synthetic: FXN 3 reverse 9:69037701-69037731; SaCas9
actgcactccagcctgggcaacaa

SEQ ID NO: 16199 - DNA, 23 bp, Artificial Sequence
  Synthetic: FXN 3 reverse 9:69037702-69037731; SaCas9
ctgcactccagcctgggcaacaa

SEQ ID NO: 16200 - DNA, 22 bp, Artificial Sequence
  Synthetic: FXN 3 reverse 9:69037703-69037731; SaCas9
tgcactccagcctgggcaacaa

SEQ ID NO: 16201 - DNA, 21 bp, Artificial Sequence
  Synthetic: FXN 3 reverse 9:69037704-69037731; SaCas9
gcactccagcctgggcaacaa

SEQ ID NO: 16202 - DNA, 20 bp, Artificial Sequence
  Synthetic: FXN 3 reverse 9:69037705-69037731; SaCas9
cactccagcctgggcaacaa

SEQ ID NO: 16203 - DNA, 19 bp, Artificial Sequence
  Synthetic: FXN 3 reverse 9:69037706-69037731; SaCas9
actccagcctgggcaacaa

SEQ ID NO: 16204 - DNA, 18 bp, Artificial Sequence
  Synthetic: FXN 3 reverse 9:69037707-69037731; SaCas9
ctccagcctgggcaacaa

SEQ ID NO: 16205 - DNA, 25 bp, Artificial Sequence
  Synthetic: FXN 3 reverse 9:69037702-69037733; SaCas9
gccactgcactccagcctgggcaac

SEQ ID NO: 16206 - DNA, 24 bp, Artificial Sequence
  Synthetic: FXN 3 reverse 9:69037703-69037733; SaCas9
ccactgcactccagcctgggcaac

SEQ ID NO: 16207 - DNA, 23 bp, Artificial Sequence
  Synthetic: FXN 3 reverse 9:69037704-69037733; SaCas9
cactgcactccagcctgggcaac

SEQ ID NO: 16208 - DNA, 22 bp, Artificial Sequence
  Synthetic: FXN 3 reverse 9:69037705-69037733; SaCas9
actgcactccagcctgggcaac

SEQ ID NO: 16209 - DNA, 21 bp, Artificial Sequence
  Synthetic: FXN 3 reverse 9:69037706-69037733; SaCas9
ctgcactccagcctgggcaac

SEQ ID NO: 16210 - DNA, 20 bp, Artificial Sequence
  Synthetic: FXN 3 reverse 9:69037707-69037733; SaCas9
tgcactccagcctgggcaac

SEQ ID NO: 16211 - DNA, 19 bp, Artificial Sequence
  Synthetic: FXN 3 reverse 9:69037708-69037733; SaCas9
gcactccagcctgggcaac

SEQ ID NO: 16212 - DNA, 18 bp, Artificial Sequence
  Synthetic: FXN 3 reverse 9:69037709-69037733; SaCas9
cactccagcctgggcaac

SEQ ID NO: 16213 - DNA, 25 bp, Artificial Sequence
  Synthetic: FXN 3 reverse 9:69037711-69037742; SaCas9
tgagactgagccactgcactccagc

SEQ ID NO: 16214 - DNA, 24 bp, Artificial Sequence
  Synthetic: FXN 3 reverse 9:69037712-69037742; SaCas9
gagactgagccactgcactccagc

SEQ ID NO: 16215 - DNA, 23 bp, Artificial Sequence
  Synthetic: FXN 3 reverse 9:69037713-69037742; SaCas9
agactgagccactgcactccagc

SEQ ID NO: 16216 - DNA, 22 bp, Artificial Sequence
  Synthetic: FXN 3 reverse 9:69037714-69037742; SaCas9
gactgagccactgcactccagc

SEQ ID NO: 16217 - DNA, 21 bp, Artificial Sequence
  Synthetic: FXN 3 reverse 9:69037715-69037742; SaCas9
actgagccactgcactccagc

SEQ ID NO: 16218 - DNA, 20 bp, Artificial Sequence
  Synthetic: FXN 3 reverse 9:69037716-69037742; SaCas9
ctgagccactgcactccagc

SEQ ID NO: 16219 - DNA, 19 bp, Artificial Sequence
  Synthetic: FXN 3 reverse 9:69037717-69037742; SaCas9
tgagccactgcactccagc

SEQ ID NO: 16220 - DNA, 18 bp, Artificial Sequence
  Synthetic: FXN 3 reverse 9:69037718-69037742; SaCas9
gagccactgcactccagc

SEQ ID NO: 16221 - DNA, 25 bp, Artificial Sequence
  Synthetic: FXN 3 reverse 9:69037731-69037762; SaCas9
aggcagaggttgcagtgagctgaga

SEQ ID NO: 16222 - DNA, 24 bp, Artificial Sequence
  Synthetic: FXN 3 reverse 9:69037732-69037762; SaCas9
ggcagaggttgcagtgagctgaga

SEQ ID NO: 16223 - DNA, 23 bp, Artificial Sequence
  Synthetic: FXN 3 reverse 9:69037733-69037762; SaCas9
gcagaggttgcagtgagctgaga

SEQ ID NO: 16224 - DNA, 22 bp, Artificial Sequence
  Synthetic: FXN 3 reverse 9:69037734-69037762; SaCas9
cagaggttgcagtgagctgaga

SEQ ID NO: 16225 - DNA, 21 bp, Artificial Sequence
  Synthetic: FXN 3 reverse 9:69037735-69037762; SaCas9
agaggttgcagtgagctgaga

SEQ ID NO: 16226 - DNA, 20 bp, Artificial Sequence
  Synthetic: FXN 3 reverse 9:69037736-69037762; SaCas9
gaggttgcagtgagctgaga

SEQ ID NO: 16227 - DNA, 19 bp, Artificial Sequence
  Synthetic: FXN 3 reverse 9:69037737-69037762; SaCas9
aggttgcagtgagctgaga

SEQ ID NO: 16228 - DNA, 18 bp, Artificial Sequence
  Synthetic: FXN 3 reverse 9:69037738-69037762; SaCas9
ggttgcagtgagctgaga

SEQ ID NO: 16229 - DNA, 25 bp, Artificial Sequence
  Synthetic: FXN 3 reverse 9:69037737-69037768; SaCas9
cccaggaggcagaggttgcagtgag

SEQ ID NO: 16230 - DNA, 24 bp, Artificial Sequence
  Synthetic: FXN 3 reverse 9:69037738-69037768; SaCas9
ccaggaggcagaggttgcagtgag

SEQ ID NO: 16231 - DNA, 23 bp, Artificial Sequence
  Synthetic: FXN 3 reverse 9:69037739-69037768; SaCas9
caggaggcagaggttgcagtgag

SEQ ID NO: 16232 - DNA, 22 bp, Artificial Sequence
  Synthetic: FXN 3 reverse 9:69037740-69037768; SaCas9
aggaggcagaggttgcagtgag

SEQ ID NO: 16233 - DNA, 21 bp, Artificial Sequence
  Synthetic: FXN 3 reverse 9:69037741-69037768; SaCas9
ggaggcagaggttgcagtgag

SEQ ID NO: 16234 - DNA, 20 bp, Artificial Sequence
  Synthetic: FXN 3 reverse 9:69037742-69037768; SaCas9
gaggcagaggttgcagtgag

SEQ ID NO: 16235 - DNA, 19 bp, Artificial Sequence
  Synthetic: FXN 3 reverse 9:69037743-69037768; SaCas9
aggcagaggttgcagtgag

SEQ ID NO: 16236 - DNA, 18 bp, Artificial Sequence
  Synthetic: FXN 3 reverse 9:69037744-69037768; SaCas9
ggcagaggttgcagtgag

SEQ ID NO: 16237 - DNA, 25 bp, Artificial Sequence
  Synthetic: FXN 3 forward 9:69037738-69037769; SaCas9
ctcagctcactgcaacctctgcctc

SEQ ID NO: 16238 - DNA, 24 bp, Artificial Sequence
  Synthetic: FXN 3 forward 9:69037739-69037769; SaCas9
tcagctcactgcaacctctgcctc

SEQ ID NO: 16239 - DNA, 23 bp, Artificial Sequence
  Synthetic: FXN 3 forward 9:69037740-69037769; SaCas9
cagctcactgcaacctctgcctc

SEQ ID NO: 16240 - DNA, 22 bp, Artificial Sequence
  Synthetic: FXN 3 forward 9:69037741-69037769; SaCas9
agctcactgcaacctctgcctc

SEQ ID NO: 16241 - DNA, 21 bp, Artificial Sequence
  Synthetic: FXN 3 forward 9:69037742-69037769; SaCas9
gctcactgcaacctctgcctc

SEQ ID NO: 16242 - DNA, 20 bp, Artificial Sequence
  Synthetic: FXN 3 forward 9:69037743-69037769; SaCas9
ctcactgcaacctctgcctc

SEQ ID NO: 16243 - DNA, 19 bp, Artificial Sequence
  Synthetic: FXN 3 forward 9:69037744-69037769; SaCas9
tcactgcaacctctgcctc

SEQ ID NO: 16244 - DNA, 18 bp, Artificial Sequence
  Synthetic: FXN 3 forward 9:69037745-69037769; SaCas9
cactgcaacctctgcctc

SEQ ID NO: 16245 - DNA, 25 bp, Artificial Sequence
  Synthetic: FXN 3 reverse 9:69037742-69037773; SaCas9
ttgaacccaggaggcagaggttgca

SEQ ID NO: 16246 - DNA, 24 bp, Artificial Sequence
  Synthetic: FXN 3 reverse 9:69037743-69037773; SaCas9
tgaacccaggaggcagaggttgca

SEQ ID NO: 16247 - DNA, 23 bp, Artificial Sequence
  Synthetic: FXN 3 reverse 9:69037744-69037773; SaCas9
gaacccaggaggcagaggttgca

SEQ ID NO: 16248 - DNA, 22 bp, Artificial Sequence
  Synthetic: FXN 3 reverse 9:69037745-69037773; SaCas9
aacccaggaggcagaggttgca

SEQ ID NO: 16249 - DNA, 21 bp, Artificial Sequence
  Synthetic: FXN 3 reverse 9:69037746-69037773; SaCas9
acccaggaggcagaggttgca

SEQ ID NO: 16250 - DNA, 20 bp, Artificial Sequence
  Synthetic: FXN 3 reverse 9:69037747-69037773; SaCas9
cccaggaggcagaggttgca

SEQ ID NO: 16251 - DNA, 19 bp, Artificial Sequence
  Synthetic: FXN 3 reverse 9:69037748-69037773; SaCas9
ccaggaggcagaggttgca

SEQ ID NO: 16252 - DNA, 18 bp, Artificial Sequence
  Synthetic: FXN 3 reverse 9:69037749-69037773; SaCas9
caggaggcagaggttgca

SEQ ID NO: 16253 - DNA, 25 bp, Artificial Sequence
  Synthetic: FXN 3 reverse 9:69037753-69037784; SaCas9
aggagaatcacttgaacccaggagg

SEQ ID NO: 16254 - DNA, 24 bp, Artificial Sequence
  Synthetic: FXN 3 reverse 9:69037754-69037784; SaCas9
ggagaatcacttgaacccaggagg

SEQ ID NO: 16255 - DNA, 23 bp, Artificial Sequence
  Synthetic: FXN 3 reverse 9:69037755-69037784; SaCas9
gagaatcacttgaacccaggagg

SEQ ID NO: 16256 - DNA, 22 bp, Artificial Sequence
  Synthetic: FXN 3 reverse 9:69037756-69037784; SaCas9
agaatcacttgaacccaggagg

SEQ ID NO: 16257 - DNA, 21 bp, Artificial Sequence
  Synthetic: FXN 3 reverse 9:69037757-69037784; SaCas9
gaatcacttgaacccaggagg

SEQ ID NO: 16258 - DNA, 20 bp, Artificial Sequence
  Synthetic: FXN 3 reverse 9:69037758-69037784; SaCas9
aatcacttgaacccaggagg

SEQ ID NO: 16259 - DNA, 19 bp, Artificial Sequence
  Synthetic: FXN 3 reverse 9:69037759-69037784; SaCas9
atcacttgaacccaggagg

SEQ ID NO: 16260 - DNA, 18 bp, Artificial Sequence
  Synthetic: FXN 3 reverse 9:69037760-69037784; SaCas9
tcacttgaacccaggagg

SEQ ID NO: 16261 - DNA, 25 bp, Artificial Sequence
  Synthetic: FXN 3 reverse 9:69037759-69037790; SaCas9
tgaggcaggagaatcacttgaaccc

SEQ ID NO: 16262 - DNA, 24 bp, Artificial Sequence
  Synthetic: FXN 3 reverse 9:69037760-69037790; SaCas9
gaggcaggagaatcacttgaaccc

SEQ ID NO: 16263 - DNA, 23 bp, Artificial Sequence
  Synthetic: FXN 3 reverse 9:69037761-69037790; SaCas9
aggcaggagaatcacttgaaccc

SEQ ID NO: 16264 - DNA, 22 bp, Artificial Sequence
  Synthetic: FXN 3 reverse 9:69037762-69037790; SaCas9
ggcaggagaatcacttgaaccc

SEQ ID NO: 16265 - DNA, 21 bp, Artificial Sequence
  Synthetic: FXN 3 reverse 9:69037763-69037790; SaCas9
gcaggagaatcacttgaaccc

SEQ ID NO: 16266 - DNA, 20 bp, Artificial Sequence
  Synthetic: FXN 3 reverse 9:69037764-69037790; SaCas9
caggagaatcacttgaaccc

SEQ ID NO: 16267 - DNA, 19 bp, Artificial Sequence
  Synthetic: FXN 3 reverse 9:69037765-69037790; SaCas9
aggagaatcacttgaaccc

SEQ ID NO: 16268 - DNA, 18 bp, Artificial Sequence
  Synthetic: FXN 3 reverse 9:69037766-69037790; SaCas9
ggagaatcacttgaaccc

SEQ ID NO: 16269 - DNA, 25 bp, Artificial Sequence
  Synthetic: FXN 3 reverse 9:69037760-69037791; SaCas9
ctgaggcaggagaatcacttgaacc

SEQ ID NO: 16270 - DNA, 24 bp, Artificial Sequence
  Synthetic: FXN 3 reverse 9:69037761-69037791; SaCas9
tgaggcaggagaatcacttgaacc

SEQ ID NO: 16271 - DNA, 23 bp, Artificial Sequence
  Synthetic: FXN 3 reverse 9:69037762-69037791; SaCas9
gaggcaggagaatcacttgaacc

SEQ ID NO: 16272 - DNA, 22 bp, Artificial Sequence
  Synthetic: FXN 3 reverse 9:69037763-69037791; SaCas9
aggcaggagaatcacttgaacc

SEQ ID NO: 16273 - DNA, 21 bp, Artificial Sequence
  Synthetic: FXN 3 reverse 9:69037764-69037791; SaCas9
ggcaggagaatcacttgaacc

SEQ ID NO: 16274 - DNA, 20 bp, Artificial Sequence
  Synthetic: FXN 3 reverse 9:69037765-69037791; SaCas9
gcaggagaatcacttgaacc

SEQ ID NO: 16275 - DNA, 19 bp, Artificial Sequence
  Synthetic: FXN 3 reverse 9:69037766-69037791; SaCas9
caggagaatcacttgaacc

SEQ ID NO: 16276 - DNA, 18 bp, Artificial Sequence
  Synthetic: FXN 3 reverse 9:69037767-69037791; SaCas9
aggagaatcacttgaacc

SEQ ID NO: 16277 - DNA, 25 bp, Artificial Sequence
  Synthetic: FXN 3 reverse 9:69037767-69037798; SaCas9
cgggaggctgaggcaggagaatcac

SEQ ID NO: 16278 - DNA, 24 bp, Artificial Sequence
  Synthetic: FXN 3 reverse 9:69037768-69037798; SaCas9
gggaggctgaggcaggagaatcac

SEQ ID NO: 16279 - DNA, 23 bp, Artificial Sequence
  Synthetic: FXN 3 reverse 9:69037769-69037798; SaCas9
ggaggctgaggcaggagaatcac

SEQ ID NO: 16280 - DNA, 22 bp, Artificial Sequence
  Synthetic: FXN 3 reverse 9:69037770-69037798; SaCas9
gaggctgaggcaggagaatcac

SEQ ID NO: 16281 - DNA, 21 bp, Artificial Sequence
  Synthetic: FXN 3 reverse 9:69037771-69037798; SaCas9
aggctgaggcaggagaatcac

SEQ ID NO: 16282 - DNA, 20 bp, Artificial Sequence
  Synthetic: FXN 3 reverse 9:69037772-69037798; SaCas9
ggctgaggcaggagaatcac

SEQ ID NO: 16283 - DNA, 19 bp, Artificial Sequence
  Synthetic: FXN 3 reverse 9:69037773-69037798; SaCas9
gctgaggcaggagaatcac

SEQ ID NO: 16284 - DNA, 18 bp, Artificial Sequence
  Synthetic: FXN 3 reverse 9:69037774-69037798; SaCas9
ctgaggcaggagaatcac

SEQ ID NO: 16285 - DNA, 25 bp, Artificial Sequence
  Synthetic: FXN 3 forward 9:69037770-69037801; SaCas9
caagtgattctcctgcctcagcctc

SEQ ID NO: 16286 - DNA, 24 bp, Artificial Sequence
  Synthetic: FXN 3 forward 9:69037771-69037801; SaCas9
aagtgattctcctgcctcagcctc

SEQ ID NO: 16287 - DNA, 23 bp, Artificial Sequence
  Synthetic: FXN 3 forward 9:69037772-69037801; SaCas9
agtgattctcctgcctcagcctc

SEQ ID NO: 16288 - DNA, 22 bp, Artificial Sequence
  Synthetic: FXN 3 forward 9:69037773-69037801; SaCas9
gtgattctcctgcctcagcctc

SEQ ID NO: 16289 - DNA, 21 bp, Artificial Sequence
  Synthetic: FXN 3 forward 9:69037774-69037801; SaCas9
tgattctcctgcctcagcctc

SEQ ID NO: 16290 - DNA, 20 bp, Artificial Sequence
  Synthetic: FXN 3 forward 9:69037775-69037801; SaCas9
gattctcctgcctcagcctc

SEQ ID NO: 16291 - DNA, 19 bp, Artificial Sequence
  Synthetic: FXN 3 forward 9:69037776-69037801; SaCas9
attctcctgcctcagcctc

SEQ ID NO: 16292 - DNA, 18 bp, Artificial Sequence
  Synthetic: FXN 3 forward 9:69037777-69037801; SaCas9
ttctcctgcctcagcctc

SEQ ID NO: 16293 - DNA, 25 bp, Artificial Sequence
  Synthetic: FXN 3 reverse 9:69037776-69037807; SaCas9
ccagctactcgggaggctgaggcag

SEQ ID NO: 16294 - DNA, 24 bp, Artificial Sequence
  Synthetic: FXN 3 reverse 9:69037777-69037807; SaCas9
cagctactcgggaggctgaggcag

SEQ ID NO: 16295 - DNA, 23 bp, Artificial Sequence
  Synthetic: FXN 3 reverse 9:69037778-69037807; SaCas9
agctactcgggaggctgaggcag

SEQ ID NO: 16296 - DNA, 22 bp, Artificial Sequence
  Synthetic: FXN 3 reverse 9:69037779-69037807; SaCas9
gctactcgggaggctgaggcag

SEQ ID NO: 16297 - DNA, 21 bp, Artificial Sequence
  Synthetic: FXN 3 reverse 9:69037780-69037807; SaCas9
ctactcgggaggctgaggcag

SEQ ID NO: 16298 - DNA, 20 bp, Artificial Sequence
  Synthetic: FXN 3 reverse 9:69037781-69037807; SaCas9
tactcgggaggctgaggcag

SEQ ID NO: 16299 - DNA, 19 bp, Artificial Sequence
  Synthetic: FXN 3 reverse 9:69037782-69037807; SaCas9
actcgggaggctgaggcag

SEQ ID NO: 16300 - DNA, 18 bp, Artificial Sequence
  Synthetic: FXN 3 reverse 9:69037783-69037807; SaCas9
ctcgggaggctgaggcag

SEQ ID NO: 16301 - DNA, 25 bp, Artificial Sequence
  Synthetic: FXN 3 forward 9:69037778-69037809; SaCas9
tctcctgcctcagcctcccgagtag

SEQ ID NO: 16302 - DNA, 24 bp, Artificial Sequence
  Synthetic: FXN 3 forward 9:69037779-69037809; SaCas9
ctcctgcctcagcctcccgagtag

SEQ ID NO: 16303 - DNA, 23 bp, Artificial Sequence
  Synthetic: FXN 3 forward 9:69037780-69037809; SaCas9
tcctgcctcagcctcccgagtag

SEQ ID NO: 16304 - DNA, 22 bp, Artificial Sequence
  Synthetic: FXN 3 forward 9:69037781-69037809; SaCas9
cctgcctcagcctcccgagtag

SEQ ID NO: 16305 - DNA, 21 bp, Artificial Sequence
  Synthetic: FXN 3 forward 9:69037782-69037809; SaCas9
ctgcctcagcctcccgagtag

SEQ ID NO: 16306 - DNA, 20 bp, Artificial Sequence
  Synthetic: FXN 3 forward 9:69037783-69037809; SaCas9
tgcctcagcctcccgagtag

SEQ ID NO: 16307 - DNA, 19 bp, Artificial Sequence
  Synthetic: FXN 3 forward 9:69037784-69037809; SaCas9
gcctcagcctcccgagtag

SEQ ID NO: 16308 - DNA, 18 bp, Artificial Sequence
  Synthetic: FXN 3 forward 9:69037785-69037809; SaCas9
cctcagcctcccgagtag

SEQ ID NO: 16309 - DNA, 25 bp, Artificial Sequence
  Synthetic: FXN 3 reverse 9:69037778-69037809; SaCas9
tcccagctactcgggaggctgaggc

SEQ ID NO: 16310 - DNA, 24 bp, Artificial Sequence
  Synthetic: FXN 3 reverse 9:69037779-69037809; SaCas9
cccagctactcgggaggctgaggc

SEQ ID NO: 16311 - DNA, 23 bp, Artificial Sequence
  Synthetic: FXN 3 reverse 9:69037780-69037809; SaCas9
ccagctactcgggaggctgaggc

SEQ ID NO: 16312 - DNA, 22 bp, Artificial Sequence
  Synthetic: FXN 3 reverse 9:69037781-69037809; SaCas9
cagctactcgggaggctgaggc

SEQ ID NO: 16313 - DNA, 21 bp, Artificial Sequence
  Synthetic: FXN 3 reverse 9:69037782-69037809; SaCas9
agctactcgggaggctgaggc

SEQ ID NO: 16314 - DNA, 20 bp, Artificial Sequence
  Synthetic: FXN 3 reverse 9:69037783-69037809; SaCas9
gctactcgggaggctgaggc

SEQ ID NO: 16315 - DNA, 19 bp, Artificial Sequence
  Synthetic: FXN 3 reverse 9:69037784-69037809; SaCas9
ctactcgggaggctgaggc

SEQ ID NO: 16316 - DNA, 18 bp, Artificial Sequence
  Synthetic: FXN 3 reverse 9:69037785-69037809; SaCas9
tactcgggaggctgaggc

SEQ ID NO: 16317 - DNA, 25 bp, Artificial Sequence
  Synthetic: FXN 3 forward 9:69037779-69037810; SaCas9
ctcctgcctcagcctcccgagtagc

SEQ ID NO: 16318 - DNA, 24 bp, Artificial Sequence
  Synthetic: FXN 3 forward 9:69037780-69037810; SaCas9
tcctgcctcagcctcccgagtagc

SEQ ID NO: 16319 - DNA, 23 bp, Artificial Sequence
  Synthetic: FXN 3 forward 9:69037781-69037810; SaCas9
cctgcctcagcctcccgagtagc

SEQ ID NO: 16320 - DNA, 22 bp, Artificial Sequence
  Synthetic: FXN 3 forward 9:69037782-69037810; SaCas9
ctgcctcagcctcccgagtagc

SEQ ID NO: 16321 - DNA, 21 bp, Artificial Sequence
  Synthetic: FXN 3 forward 9:69037783-69037810; SaCas9
tgcctcagcctcccgagtagc

SEQ ID NO: 16322 - DNA, 20 bp, Artificial Sequence
  Synthetic: FXN 3 forward 9:69037784-69037810; SaCas9
gcctcagcctcccgagtagc

SEQ ID NO: 16323 - DNA, 19 bp, Artificial Sequence
  Synthetic: FXN 3 forward 9:69037785-69037810; SaCas9
cctcagcctcccgagtagc

SEQ ID NO: 16324 - DNA, 18 bp, Artificial Sequence
  Synthetic: FXN 3 forward 9:69037786-69037810; SaCas9
ctcagcctcccgagtagc

SEQ ID NO: 16325 - DNA, 25 bp, Artificial Sequence
  Synthetic: FXN 3 reverse 9:69037779-69037810; SaCas9
atcccagctactcgggaggctgagg

SEQ ID NO: 16326 - DNA, 24 bp, Artificial Sequence
  Synthetic: FXN 3 reverse 9:69037780-69037810; SaCas9
tcccagctactcgggaggctgagg

SEQ ID NO: 16327 - DNA, 23 bp, Artificial Sequence
  Synthetic: FXN 3 reverse 9:69037781-69037810; SaCas9
cccagctactcgggaggctgagg

SEQ ID NO: 16328 - DNA, 22 bp, Artificial Sequence
  Synthetic: FXN 3 reverse 9:69037782-69037810; SaCas9
ccagctactcgggaggctgagg

SEQ ID NO: 16329 - DNA, 21 bp, Artificial Sequence
  Synthetic: FXN 3 reverse 9:69037783-69037810; SaCas9
cagctactcgggaggctgagg

SEQ ID NO: 16330 - DNA, 20 bp, Artificial Sequence
  Synthetic: FXN 3 reverse 9:69037784-69037810; SaCas9
agctactcgggaggctgagg

SEQ ID NO: 16331 - DNA, 19 bp, Artificial Sequence
  Synthetic: FXN 3 reverse 9:69037785-69037810; SaCas9
gctactcgggaggctgagg

SEQ ID NO: 16332 - DNA, 18 bp, Artificial Sequence
  Synthetic: FXN 3 reverse 9:69037786-69037810; SaCas9
ctactcgggaggctgagg

SEQ ID NO: 16333 - DNA, 25 bp, Artificial Sequence
  Synthetic: FXN 3 reverse 9:69037785-69037816; SaCas9
ccgataatcccagctactcgggagg

SEQ ID NO: 16334 - DNA, 24 bp, Artificial Sequence
  Synthetic: FXN 3 reverse 9:69037786-69037816; SaCas9
cgataatcccagctactcgggagg

SEQ ID NO: 16335 - DNA, 23 bp, Artificial Sequence
  Synthetic: FXN 3 reverse 9:69037787-69037816; SaCas9
gataatcccagctactcgggagg

SEQ ID NO: 16336 - DNA, 22 bp, Artificial Sequence
  Synthetic: FXN 3 reverse 9:69037788-69037816; SaCas9
ataatcccagctactcgggagg

SEQ ID NO: 16337 - DNA, 21 bp, Artificial Sequence
  Synthetic: FXN 3 reverse 9:69037789-69037816; SaCas9
taatcccagctactcgggagg

SEQ ID NO: 16338 - DNA, 20 bp, Artificial Sequence
  Synthetic: FXN 3 reverse 9:69037790-69037816; SaCas9
aatcccagctactcgggagg

SEQ ID NO: 16339 - DNA, 19 bp, Artificial Sequence
  Synthetic: FXN 3 reverse 9:69037791-69037816; SaCas9
atcccagctactcgggagg

SEQ ID NO: 16340 - DNA, 18 bp, Artificial Sequence
  Synthetic: FXN 3 reverse 9:69037792-69037816; SaCas9
tcccagctactcgggagg

SEQ ID NO: 16341 - DNA, 25 bp, Artificial Sequence
  Synthetic: FXN 3 reverse 9:69037791-69037822; SaCas9
aattagccgataatcccagctactc

SEQ ID NO: 16342 - DNA, 24 bp, Artificial Sequence
  Synthetic: FXN 3 reverse 9:69037792-69037822; SaCas9
attagccgataatcccagctactc

SEQ ID NO: 16343 - DNA, 23 bp, Artificial Sequence
  Synthetic: FXN 3 reverse 9:69037793-69037822; SaCas9
ttagccgataatcccagctactc

SEQ ID NO: 16344 - DNA, 22 bp, Artificial Sequence
  Synthetic: FXN 3 reverse 9:69037794-69037822; SaCas9
tagccgataatcccagctactc

SEQ ID NO: 16345 - DNA, 21 bp, Artificial Sequence
  Synthetic: FXN 3 reverse 9:69037795-69037822; SaCas9
agccgataatcccagctactc

SEQ ID NO: 16346 - DNA, 20 bp, Artificial Sequence
  Synthetic: FXN 3 reverse 9:69037796-69037822; SaCas9
gccgataatcccagctactc

SEQ ID NO: 16347 - DNA, 19 bp, Artificial Sequence
  Synthetic: FXN 3 reverse 9:69037797-69037822; SaCas9
ccgataatcccagctactc

SEQ ID NO: 16348 - DNA, 18 bp, Artificial Sequence
  Synthetic: FXN 3 reverse 9:69037798-69037822; SaCas9
cgataatcccagctactc

SEQ ID NO: 16349 - DNA, 25 bp, Artificial Sequence
  Synthetic: FXN 3 reverse 9:69037792-69037823; SaCas9
aaattagccgataatcccagctact

SEQ ID NO: 16350 - DNA, 24 bp, Artificial Sequence
  Synthetic: FXN 3 reverse 9:69037793-69037823; SaCas9
aattagccgataatcccagctact

SEQ ID NO: 16351 - DNA, 23 bp, Artificial Sequence
  Synthetic: FXN 3 reverse 9:69037794-69037823; SaCas9
attagccgataatcccagctact

SEQ ID NO: 16352 - DNA, 22 bp, Artificial Sequence
  Synthetic: FXN 3 reverse 9:69037795-69037823; SaCas9
ttagccgataatcccagctact

SEQ ID NO: 16353 - DNA, 21 bp, Artificial Sequence
  Synthetic: FXN 3 reverse 9:69037796-69037823; SaCas9
tagccgataatcccagctact

SEQ ID NO: 16354 - DNA, 20 bp, Artificial Sequence
  Synthetic: FXN 3 reverse 9:69037797-69037823; SaCas9
agccgataatcccagctact

SEQ ID NO: 16355 - DNA, 19 bp, Artificial Sequence
  Synthetic: FXN 3 reverse 9:69037798-69037823; SaCas9
gccgataatcccagctact

SEQ ID NO: 16356 - DNA, 18 bp, Artificial Sequence
  Synthetic: FXN 3 reverse 9:69037799-69037823; SaCas9
ccgataatcccagctact

SEQ ID NO: 16357 - DNA, 25 bp, Artificial Sequence
  Synthetic: FXN 3 reverse 9:69037793-69037824; SaCas9
aaaattagccgataatcccagctac

SEQ ID NO: 16358 - DNA, 24 bp, Artificial Sequence
  Synthetic: FXN 3 reverse 9:69037794-69037824; SaCas9
aaattagccgataatcccagctac

SEQ ID NO: 16359 - DNA, 23 bp, Artificial Sequence
  Synthetic: FXN 3 reverse 9:69037795-69037824; SaCas9
aattagccgataatcccagctac

SEQ ID NO: 16360 - DNA, 22 bp, Artificial Sequence
  Synthetic: FXN 3 reverse 9:69037796-69037824; SaCas9
attagccgataatcccagctac

SEQ ID NO: 16361 - DNA, 21 bp, Artificial Sequence
  Synthetic: FXN 3 reverse 9:69037797-69037824; SaCas9
ttagccgataatcccagctac

SEQ ID NO: 16362 - DNA, 20 bp, Artificial Sequence
  Synthetic: FXN 3 reverse 9:69037798-69037824; SaCas9
tagccgataatcccagctac

SEQ ID NO: 16363 - DNA, 19 bp, Artificial Sequence
  Synthetic: FXN 3 reverse 9:69037799-69037824; SaCas9
agccgataatcccagctac

SEQ ID NO: 16364 - DNA, 18 bp, Artificial Sequence
  Synthetic: FXN 3 reverse 9:69037800-69037824; SaCas9
gccgataatcccagctac

SEQ ID NO: 16365 - DNA, 25 bp, Artificial Sequence
  Synthetic: FXN 3 forward 9:69037809-69037840; SaCas9
ttatcggctaattttgtatttttag

SEQ ID NO: 16366 - DNA, 24 bp, Artificial Sequence
  Synthetic: FXN 3 forward 9:69037810-69037840; SaCas9
tatcggctaattttgtatttttag

SEQ ID NO: 16367 - DNA, 23 bp, Artificial Sequence
  Synthetic: FXN 3 forward 9:69037811-69037840; SaCas9
atcggctaattttgtatttttag

SEQ ID NO: 16368 - DNA, 22 bp, Artificial Sequence
  Synthetic: FXN 3 forward 9:69037812-69037840; SaCas9
tcggctaattttgtatttttag

SEQ ID NO: 16369 - DNA, 21 bp, Artificial Sequence
  Synthetic: FXN 3 forward 9:69037813-69037840; SaCas9
cggctaattttgtatttttag

SEQ ID NO: 16370 - DNA, 20 bp, Artificial Sequence
  Synthetic: FXN 3 forward 9:69037814-69037840; SaCas9
ggctaattttgtatttttag

SEQ ID NO: 16371 - DNA, 19 bp, Artificial Sequence
  Synthetic: FXN 3 forward 9:69037815-69037840; SaCas9
gctaattttgtatttttag

SEQ ID NO: 16372 - DNA, 18 bp, Artificial Sequence
  Synthetic: FXN 3 forward 9:69037816-69037840; SaCas9
ctaattttgtatttttag

SEQ ID NO: 16373 - DNA, 25 bp, Artificial Sequence
  Synthetic: FXN 3 forward 9:69037844-69037875; SaCas9
tttctccatgttggtcaggctggtc

SEQ ID NO: 16374 - DNA, 24 bp, Artificial Sequence
  Synthetic: FXN 3 forward 9:69037845-69037875; SaCas9
ttctccatgttggtcaggctggtc

SEQ ID NO: 16375 - DNA, 23 bp, Artificial Sequence
  Synthetic: FXN 3 forward 9:69037846-69037875; SaCas9
tctccatgttggtcaggctggtc

SEQ ID NO: 16376 - DNA, 22 bp, Artificial Sequence
  Synthetic: FXN 3 forward 9:69037847-69037875; SaCas9
ctccatgttggtcaggctggtc

SEQ ID NO: 16377 - DNA, 21 bp, Artificial Sequence
  Synthetic: FXN 3 forward 9:69037848-69037875; SaCas9
tccatgttggtcaggctggtc

SEQ ID NO: 16378 - DNA, 20 bp, Artificial Sequence
  Synthetic: FXN 3 forward 9:69037849-69037875; SaCas9
ccatgttggtcaggctggtc

SEQ ID NO: 16379 - DNA, 19 bp, Artificial Sequence
  Synthetic: FXN 3 forward 9:69037850-69037875; SaCas9
catgttggtcaggctggtc

SEQ ID NO: 16380 - DNA, 18 bp, Artificial Sequence
  Synthetic: FXN 3 forward 9:69037851-69037875; SaCas9
atgttggtcaggctggtc

SEQ ID NO: 16381 - DNA, 25 bp, Artificial Sequence
  Synthetic: FXN 3 reverse 9:69037844-69037875; SaCas9
gttcgagaccagcctgaccaacatg

SEQ ID NO: 16382 - DNA, 24 bp, Artificial Sequence
  Synthetic: FXN 3 reverse 9:69037845-69037875; SaCas9
ttcgagaccagcctgaccaacatg

SEQ ID NO: 16383 - DNA, 23 bp, Artificial Sequence
  Synthetic: FXN 3 reverse 9:69037846-69037875; SaCas9
tcgagaccagcctgaccaacatg

SEQ ID NO: 16384 - DNA, 22 bp, Artificial Sequence
  Synthetic: FXN 3 reverse 9:69037847-69037875; SaCas9
cgagaccagcctgaccaacatg

SEQ ID NO: 16385 - DNA, 21 bp, Artificial Sequence
  Synthetic: FXN 3 reverse 9:69037848-69037875; SaCas9
gagaccagcctgaccaacatg

SEQ ID NO: 16386 - DNA, 20 bp, Artificial Sequence
  Synthetic: FXN 3 reverse 9:69037849-69037875; SaCas9
agaccagcctgaccaacatg

SEQ ID NO: 16387 - DNA, 19 bp, Artificial Sequence
  Synthetic: FXN 3 reverse 9:69037850-69037875; SaCas9
gaccagcctgaccaacatg

SEQ ID NO: 16388 - DNA, 18 bp, Artificial Sequence
  Synthetic: FXN 3 reverse 9:69037851-69037875; SaCas9
accagcctgaccaacatg

SEQ ID NO: 16389 - DNA, 25 bp, Artificial Sequence
  Synthetic: FXN 3 reverse 9:69037846-69037877; SaCas9
gagttcgagaccagcctgaccaaca

SEQ ID NO: 16390 - DNA, 24 bp, Artificial Sequence
  Synthetic: FXN 3 reverse 9:69037847-69037877; SaCas9
agttcgagaccagcctgaccaaca

SEQ ID NO: 16391 - DNA, 23 bp, Artificial Sequence
  Synthetic: FXN 3 reverse 9:69037848-69037877; SaCas9
gttcgagaccagcctgaccaaca

SEQ ID NO: 16392 - DNA, 22 bp, Artificial Sequence
  Synthetic: FXN 3 reverse 9:69037849-69037877; SaCas9
ttcgagaccagcctgaccaaca

SEQ ID NO: 16393 - DNA, 21 bp, Artificial Sequence
  Synthetic: FXN 3 reverse 9:69037850-69037877; SaCas9
tcgagaccagcctgaccaaca

SEQ ID NO: 16394 - DNA, 20 bp, Artificial Sequence
  Synthetic: FXN 3 reverse 9:69037851-69037877; SaCas9
cgagaccagcctgaccaaca

SEQ ID NO: 16395 - DNA, 19 bp, Artificial Sequence
  Synthetic: FXN 3 reverse 9:69037852-69037877; SaCas9
gagaccagcctgaccaaca

SEQ ID NO: 16396 - DNA, 18 bp, Artificial Sequence
  Synthetic: FXN 3 reverse 9:69037853-69037877; SaCas9
agaccagcctgaccaaca

SEQ ID NO: 16397 - DNA, 25 bp, Artificial Sequence
  Synthetic: FXN 3 reverse 9:69037847-69037878; SaCas9
ggagttcgagaccagcctgaccaac

SEQ ID NO: 16398 - DNA, 24 bp, Artificial Sequence
  Synthetic: FXN 3 reverse 9:69037848-69037878; SaCas9
gagttcgagaccagcctgaccaac

SEQ ID NO: 16399 - DNA, 23 bp, Artificial Sequence
  Synthetic: FXN 3 reverse 9:69037849-69037878; SaCas9
agttcgagaccagcctgaccaac

SEQ ID NO: 16400 - DNA, 22 bp, Artificial Sequence
  Synthetic: FXN 3 reverse 9:69037850-69037878; SaCas9
gttcgagaccagcctgaccaac

SEQ ID NO: 16401 - DNA, 21 bp, Artificial Sequence
  Synthetic: FXN 3 reverse 9:69037851-69037878; SaCas9
ttcgagaccagcctgaccaac

SEQ ID NO: 16402 - DNA, 20 bp, Artificial Sequence
  Synthetic: FXN 3 reverse 9:69037852-69037878; SaCas9
tcgagaccagcctgaccaac

SEQ ID NO: 16403 - DNA, 19 bp, Artificial Sequence
  Synthetic: FXN 3 reverse 9:69037853-69037878; SaCas9
cgagaccagcctgaccaac

SEQ ID NO: 16404 - DNA, 18 bp, Artificial Sequence
  Synthetic: FXN 3 reverse 9:69037854-69037878; SaCas9
gagaccagcctgaccaac

SEQ ID NO: 16405 - DNA, 25 bp, Artificial Sequence
  Synthetic: FXN 3 reverse 9:69037867-69037898; SaCas9
gggcggatcacctgaggttgggagt

SEQ ID NO: 16406 - DNA, 24 bp, Artificial Sequence
  Synthetic: FXN 3 reverse 9:69037868-69037898; SaCas9
ggcggatcacctgaggttgggagt

SEQ ID NO: 16407 - DNA, 23 bp, Artificial Sequence
  Synthetic: FXN 3 reverse 9:69037869-69037898; SaCas9
gcggatcacctgaggttgggagt

SEQ ID NO: 16408 - DNA, 22 bp, Artificial Sequence
  Synthetic: FXN 3 reverse 9:69037870-69037898; SaCas9
cggatcacctgaggttgggagt

SEQ ID NO: 16409 - DNA, 21 bp, Artificial Sequence
  Synthetic: FXN 3 reverse 9:69037871-69037898; SaCas9
ggatcacctgaggttgggagt

SEQ ID NO: 16410 - DNA, 20 bp, Artificial Sequence
  Synthetic: FXN 3 reverse 9:69037872-69037898; SaCas9
gatcacctgaggttgggagt

SEQ ID NO: 16411 - DNA, 19 bp, Artificial Sequence
  Synthetic: FXN 3 reverse 9:69037873-69037898; SaCas9
atcacctgaggttgggagt

SEQ ID NO: 16412 - DNA, 18 bp, Artificial Sequence
  Synthetic: FXN 3 reverse 9:69037874-69037898; SaCas9
tcacctgaggttgggagt

SEQ ID NO: 16413 - DNA, 25 bp, Artificial Sequence
  Synthetic: FXN 3 reverse 9:69037873-69037904; SaCas9
cgaggtgggcggatcacctgaggtt

SEQ ID NO: 16414 - DNA, 24 bp, Artificial Sequence
  Synthetic: FXN 3 reverse 9:69037874-69037904; SaCas9
gaggtgggcggatcacctgaggtt

SEQ ID NO: 16415 - DNA, 23 bp, Artificial Sequence
  Synthetic: FXN 3 reverse 9:69037875-69037904; SaCas9
aggtgggcggatcacctgaggtt

SEQ ID NO: 16416 - DNA, 22 bp, Artificial Sequence
  Synthetic: FXN 3 reverse 9:69037876-69037904; SaCas9
ggtgggcggatcacctgaggtt

SEQ ID NO: 16417 - DNA, 21 bp, Artificial Sequence
  Synthetic: FXN 3 reverse 9:69037877-69037904; SaCas9
gtgggcggatcacctgaggtt

SEQ ID NO: 16418 - DNA, 20 bp, Artificial Sequence
  Synthetic: FXN 3 reverse 9:69037878-69037904; SaCas9
tgggcggatcacctgaggtt

SEQ ID NO: 16419 - DNA, 19 bp, Artificial Sequence
  Synthetic: FXN 3 reverse 9:69037879-69037904; SaCas9
gggcggatcacctgaggtt

SEQ ID NO: 16420 - DNA, 18 bp, Artificial Sequence
  Synthetic: FXN 3 reverse 9:69037880-69037904; SaCas9
ggcggatcacctgaggtt

SEQ ID NO: 16421 - DNA, 25 bp, Artificial Sequence
  Synthetic: FXN 3 reverse 9:69037874-69037905; SaCas9
gcgaggtgggcggatcacctgaggt

SEQ ID NO: 16422 - DNA, 24 bp, Artificial Sequence
  Synthetic: FXN 3 reverse 9:69037875-69037905; SaCas9
cgaggtgggcggatcacctgaggt

SEQ ID NO: 16423 - DNA, 23 bp, Artificial Sequence
  Synthetic: FXN 3 reverse 9:69037876-69037905; SaCas9
gaggtgggcggatcacctgaggt

SEQ ID NO: 16424 - DNA, 22 bp, Artificial Sequence
  Synthetic: FXN 3 reverse 9:69037877-69037905; SaCas9
aggtgggcggatcacctgaggt

SEQ ID NO: 16425 - DNA, 21 bp, Artificial Sequence
  Synthetic: FXN 3 reverse 9:69037878-69037905; SaCas9
ggtgggcggatcacctgaggt

SEQ ID NO: 16426 - DNA, 20 bp, Artificial Sequence
  Synthetic: FXN 3 reverse 9:69037879-69037905; SaCas9
gtgggcggatcacctgaggt

SEQ ID NO: 16427 - DNA, 19 bp, Artificial Sequence
  Synthetic: FXN 3 reverse 9:69037880-69037905; SaCas9
tgggcggatcacctgaggt

SEQ ID NO: 16428 - DNA, 18 bp, Artificial Sequence
  Synthetic: FXN 3 reverse 9:69037881-69037905; SaCas9
gggcggatcacctgaggt

SEQ ID NO: 16429 - DNA, 25 bp, Artificial Sequence
  Synthetic: FXN 3 reverse 9:69037875-69037906; SaCas9
ggcgaggtgggcggatcacctgagg

SEQ ID NO: 16430 - DNA, 24 bp, Artificial Sequence
  Synthetic: FXN 3 reverse 9:69037876-69037906; SaCas9
gcgaggtgggcggatcacctgagg

SEQ ID NO: 16431 - DNA, 23 bp, Artificial Sequence
  Synthetic: FXN 3 reverse 9:69037877-69037906; SaCas9
cgaggtgggcggatcacctgagg

SEQ ID NO: 16432 - DNA, 22 bp, Artificial Sequence
  Synthetic: FXN 3 reverse 9:69037878-69037906; SaCas9
gaggtgggcggatcacctgagg

SEQ ID NO: 16433 - DNA, 21 bp, Artificial Sequence
  Synthetic: FXN 3 reverse 9:69037879-69037906; SaCas9
aggtgggcggatcacctgagg

SEQ ID NO: 16434 - DNA, 20 bp, Artificial Sequence
  Synthetic: FXN 3 reverse 9:69037880-69037906; SaCas9
ggtgggcggatcacctgagg

SEQ ID NO: 16435 - DNA, 19 bp, Artificial Sequence
  Synthetic: FXN 3 reverse 9:69037881-69037906; SaCas9
gtgggcggatcacctgagg

SEQ ID NO: 16436 - DNA, 18 bp, Artificial Sequence
  Synthetic: FXN 3 reverse 9:69037882-69037906; SaCas9
tgggcggatcacctgagg

SEQ ID NO: 16437 - DNA, 25 bp, Artificial Sequence
  Synthetic: FXN 3 reverse 9:69037881-69037912; SaCas9
tgggagggcgaggtgggcggatcac

SEQ ID NO: 16438 - DNA, 24 bp, Artificial Sequence
  Synthetic: FXN 3 reverse 9:69037882-69037912; SaCas9
gggagggcgaggtgggcggatcac

SEQ ID NO: 16439 - DNA, 23 bp, Artificial Sequence
  Synthetic: FXN 3 reverse 9:69037883-69037912; SaCas9
ggagggcgaggtgggcggatcac

SEQ ID NO: 16440 - DNA, 22 bp, Artificial Sequence
  Synthetic: FXN 3 reverse 9:69037884-69037912; SaCas9
gagggcgaggtgggcggatcac

SEQ ID NO: 16441 - DNA, 21 bp, Artificial Sequence
  Synthetic: FXN 3 reverse 9:69037885-69037912; SaCas9
agggcgaggtgggcggatcac

SEQ ID NO: 16442 - DNA, 20 bp, Artificial Sequence
  Synthetic: FXN 3 reverse 9:69037886-69037912; SaCas9
gggcgaggtgggcggatcac

SEQ ID NO: 16443 - DNA, 19 bp, Artificial Sequence
  Synthetic: FXN 3 reverse 9:69037887-69037912; SaCas9
ggcgaggtgggcggatcac

SEQ ID NO: 16444 - DNA, 18 bp, Artificial Sequence
  Synthetic: FXN 3 reverse 9:69037888-69037912; SaCas9
gcgaggtgggcggatcac

SEQ ID NO: 16445 - DNA, 25 bp, Artificial Sequence
  Synthetic: FXN 3 reverse 9:69037890-69037921; SaCas9
ccagcactttgggagggcgaggtgg

SEQ ID NO: 16446 - DNA, 24 bp, Artificial Sequence
  Synthetic: FXN 3 reverse 9:69037891-69037921; SaCas9
cagcactttgggagggcgaggtgg

SEQ ID NO: 16447 - DNA, 23 bp, Artificial Sequence
  Synthetic: FXN 3 reverse 9:69037892-69037921; SaCas9
agcactttgggagggcgaggtgg

SEQ ID NO: 16448 - DNA, 22 bp, Artificial Sequence
  Synthetic: FXN 3 reverse 9:69037893-69037921; SaCas9
gcactttgggagggcgaggtgg

SEQ ID NO: 16449 - DNA, 21 bp, Artificial Sequence
  Synthetic: FXN 3 reverse 9:69037894-69037921; SaCas9
cactttgggagggcgaggtgg

SEQ ID NO: 16450 - DNA, 20 bp, Artificial Sequence
  Synthetic: FXN 3 reverse 9:69037895-69037921; SaCas9
actttgggagggcgaggtgg

SEQ ID NO: 16451 - DNA, 19 bp, Artificial Sequence
  Synthetic: FXN 3 reverse 9:69037896-69037921; SaCas9
ctttgggagggcgaggtgg

SEQ ID NO: 16452 - DNA, 18 bp, Artificial Sequence
  Synthetic: FXN 3 reverse 9:69037897-69037921; SaCas9
tttgggagggcgaggtgg

SEQ ID NO: 16453 - DNA, 25 bp, Artificial Sequence
  Synthetic: FXN 3 forward 9:69037892-69037923; SaCas9
ccgcccacctcgccctcccaaagtg

SEQ ID NO: 16454 - DNA, 24 bp, Artificial Sequence
  Synthetic: FXN 3 forward 9:69037893-69037923; SaCas9
cgcccacctcgccctcccaaagtg

SEQ ID NO: 16455 - DNA, 23 bp, Artificial Sequence
  Synthetic: FXN 3 forward 9:69037894-69037923; SaCas9
gcccacctcgccctcccaaagtg

SEQ ID NO: 16456 - DNA, 22 bp, Artificial Sequence
  Synthetic: FXN 3 forward 9:69037895-69037923; SaCas9
cccacctcgccctcccaaagtg

SEQ ID NO: 16457 - DNA, 21 bp, Artificial Sequence
  Synthetic: FXN 3 forward 9:69037896-69037923; SaCas9
ccacctcgccctcccaaagtg

SEQ ID NO: 16458 - DNA, 20 bp, Artificial Sequence
  Synthetic: FXN 3 forward 9:69037897-69037923; SaCas9
cacctcgccctcccaaagtg

SEQ ID NO: 16459 - DNA, 19 bp, Artificial Sequence
  Synthetic: FXN 3 forward 9:69037898-69037923; SaCas9
acctcgccctcccaaagtg

SEQ ID NO: 16460 - DNA, 18 bp, Artificial Sequence
  Synthetic: FXN 3 forward 9:69037899-69037923; SaCas9
cctcgccctcccaaagtg

SEQ ID NO: 16461 - DNA, 25 bp, Artificial Sequence
  Synthetic: FXN 3 forward 9:69037893-69037924; SaCas9
cgcccacctcgccctcccaaagtgc

SEQ ID NO: 16462 - DNA, 24 bp, Artificial Sequence
  Synthetic: FXN 3 forward 9:69037894-69037924; SaCas9
gcccacctcgccctcccaaagtgc

SEQ ID NO: 16463 - DNA, 23 bp, Artificial Sequence
  Synthetic: FXN 3 forward 9:69037895-69037924; SaCas9
cccacctcgccctcccaaagtgc

SEQ ID NO: 16464 - DNA, 22 bp, Artificial Sequence
  Synthetic: FXN 3 forward 9:69037896-69037924; SaCas9
ccacctcgccctcccaaagtgc

SEQ ID NO: 16465 - DNA, 21 bp, Artificial Sequence
  Synthetic: FXN 3 forward 9:69037897-69037924; SaCas9
cacctcgccctcccaaagtgc

SEQ ID NO: 16466 - DNA, 20 bp, Artificial Sequence
  Synthetic: FXN 3 forward 9:69037898-69037924; SaCas9
acctcgccctcccaaagtgc

SEQ ID NO: 16467 - DNA, 19 bp, Artificial Sequence
  Synthetic: FXN 3 forward 9:69037899-69037924; SaCas9
cctcgccctcccaaagtgc

SEQ ID NO: 16468 - DNA, 18 bp, Artificial Sequence
  Synthetic: FXN 3 forward 9:69037900-69037924; SaCas9
ctcgccctcccaaagtgc

SEQ ID NO: 16469 - DNA, 25 bp, Artificial Sequence
  Synthetic: FXN 3 reverse 9:69037894-69037925; SaCas9
aattccagcactttgggagggcgag

SEQ ID NO: 16470 - DNA, 24 bp, Artificial Sequence
  Synthetic: FXN 3 reverse 9:69037895-69037925; SaCas9
attccagcactttgggagggcgag

SEQ ID NO: 16471 - DNA, 23 bp, Artificial Sequence
  Synthetic: FXN 3 reverse 9:69037896-69037925; SaCas9
ttccagcactttgggagggcgag

SEQ ID NO: 16472 - DNA, 22 bp, Artificial Sequence
  Synthetic: FXN 3 reverse 9:69037897-69037925; SaCas9
tccagcactttgggagggcgag

SEQ ID NO: 16473 - DNA, 21 bp, Artificial Sequence
  Synthetic: FXN 3 reverse 9:69037898-69037925; SaCas9
ccagcactttgggagggcgag

SEQ ID NO: 16474 - DNA, 20 bp, Artificial Sequence
  Synthetic: FXN 3 reverse 9:69037899-69037925; SaCas9
cagcactttgggagggcgag

SEQ ID NO: 16475 - DNA, 19 bp, Artificial Sequence
  Synthetic: FXN 3 reverse 9:69037900-69037925; SaCas9
agcactttgggagggcgag

SEQ ID NO: 16476 - DNA, 18 bp, Artificial Sequence
  Synthetic: FXN 3 reverse 9:69037901-69037925; SaCas9
gcactttgggagggcgag

SEQ ID NO: 16477 - DNA, 25 bp, Artificial Sequence
  Synthetic: FXN 3 reverse 9:69037899-69037930; SaCas9
cctgtaattccagcactttgggagg

SEQ ID NO: 16478 - DNA, 24 bp, Artificial Sequence
  Synthetic: FXN 3 reverse 9:69037900-69037930; SaCas9
ctgtaattccagcactttgggagg

SEQ ID NO: 16479 - DNA, 23 bp, Artificial Sequence
  Synthetic: FXN 3 reverse 9:69037901-69037930; SaCas9
tgtaattccagcactttgggagg

SEQ ID NO: 16480 - DNA, 22 bp, Artificial Sequence
  Synthetic: FXN 3 reverse 9:69037902-69037930; SaCas9
gtaattccagcactttgggagg

SEQ ID NO: 16481 - DNA, 21 bp, Artificial Sequence
  Synthetic: FXN 3 reverse 9:69037903-69037930; SaCas9
taattccagcactttgggagg

SEQ ID NO: 16482 - DNA, 20 bp, Artificial Sequence
  Synthetic: FXN 3 reverse 9:69037904-69037930; SaCas9
aattccagcactttgggagg

SEQ ID NO: 16483 - DNA, 19 bp, Artificial Sequence
  Synthetic: FXN 3 reverse 9:69037905-69037930; SaCas9
attccagcactttgggagg

SEQ ID NO: 16484 - DNA, 18 bp, Artificial Sequence
  Synthetic: FXN 3 reverse 9:69037906-69037930; SaCas9
ttccagcactttgggagg

SEQ ID NO: 16485 - DNA, 25 bp, Artificial Sequence
  Synthetic: FXN 3 reverse 9:69037903-69037934; SaCas9
cacgcctgtaattccagcactttgg

SEQ ID NO: 16486 - DNA, 24 bp, Artificial Sequence
  Synthetic: FXN 3 reverse 9:69037904-69037934; SaCas9
acgcctgtaattccagcactttgg

SEQ ID NO: 16487 - DNA, 23 bp, Artificial Sequence
  Synthetic: FXN 3 reverse 9:69037905-69037934; SaCas9
cgcctgtaattccagcactttgg

SEQ ID NO: 16488 - DNA, 22 bp, Artificial Sequence
  Synthetic: FXN 3 reverse 9:69037906-69037934; SaCas9
gcctgtaattccagcactttgg

SEQ ID NO: 16489 - DNA, 21 bp, Artificial Sequence
  Synthetic: FXN 3 reverse 9:69037907-69037934; SaCas9
cctgtaattccagcactttgg

SEQ ID NO: 16490 - DNA, 20 bp, Artificial Sequence
  Synthetic: FXN 3 reverse 9:69037908-69037934; SaCas9
ctgtaattccagcactttgg

SEQ ID NO: 16491 - DNA, 19 bp, Artificial Sequence
  Synthetic: FXN 3 reverse 9:69037909-69037934; SaCas9
tgtaattccagcactttgg

SEQ ID NO: 16492 - DNA, 18 bp, Artificial Sequence
  Synthetic: FXN 3 reverse 9:69037910-69037934; SaCas9
gtaattccagcactttgg

SEQ ID NO: 16493 - DNA, 25 bp, Artificial Sequence
  Synthetic: FXN 3 reverse 9:69037905-69037936; SaCas9
ctcacgcctgtaattccagcacttt

SEQ ID NO: 16494 - DNA, 24 bp, Artificial Sequence
  Synthetic: FXN 3 reverse 9:69037906-69037936; SaCas9
tcacgcctgtaattccagcacttt

SEQ ID NO: 16495 - DNA, 23 bp, Artificial Sequence
  Synthetic: FXN 3 reverse 9:69037907-69037936; SaCas9
cacgcctgtaattccagcacttt

SEQ ID NO: 16496 - DNA, 22 bp, Artificial Sequence
  Synthetic: FXN 3 reverse 9:69037908-69037936; SaCas9
acgcctgtaattccagcacttt

SEQ ID NO: 16497 - DNA, 21 bp, Artificial Sequence
  Synthetic: FXN 3 reverse 9:69037909-69037936; SaCas9
cgcctgtaattccagcacttt

SEQ ID NO: 16498 - DNA, 20 bp, Artificial Sequence
  Synthetic: FXN 3 reverse 9:69037910-69037936; SaCas9
gcctgtaattccagcacttt

SEQ ID NO: 16499 - DNA, 19 bp, Artificial Sequence
  Synthetic: FXN 3 reverse 9:69037911-69037936; SaCas9
cctgtaattccagcacttt

SEQ ID NO: 16500 - DNA, 18 bp, Artificial Sequence
  Synthetic: FXN 3 reverse 9:69037912-69037936; SaCas9
ctgtaattccagcacttt

SEQ ID NO: 16501 - DNA, 25 bp, Artificial Sequence
  Synthetic: FXN 3 forward 9:69037906-69037937; SaCas9
ctcccaaagtgctggaattacaggc

SEQ ID NO: 16502 - DNA, 24 bp, Artificial Sequence
  Synthetic: FXN 3 forward 9:69037907-69037937; SaCas9
tcccaaagtgctggaattacaggc

SEQ ID NO: 16503 - DNA, 23 bp, Artificial Sequence
  Synthetic: FXN 3 forward 9:69037908-69037937; SaCas9
cccaaagtgctggaattacaggc

SEQ ID NO: 16504 - DNA, 22 bp, Artificial Sequence
  Synthetic: FXN 3 forward 9:69037909-69037937; SaCas9
ccaaagtgctggaattacaggc

SEQ ID NO: 16505 - DNA, 21 bp, Artificial Sequence
  Synthetic: FXN 3 forward 9:69037910-69037937; SaCas9
caaagtgctggaattacaggc

SEQ ID NO: 16506 - DNA, 20 bp, Artificial Sequence
  Synthetic: FXN 3 forward 9:69037911-69037937; SaCas9
aaagtgctggaattacaggc

SEQ ID NO: 16507 - DNA, 19 bp, Artificial Sequence
  Synthetic: FXN 3 forward 9:69037912-69037937; SaCas9
aagtgctggaattacaggc

SEQ ID NO: 16508 - DNA, 18 bp, Artificial Sequence
  Synthetic: FXN 3 forward 9:69037913-69037937; SaCas9
agtgctggaattacaggc

SEQ ID NO: 16509 - DNA, 25 bp, Artificial Sequence
  Synthetic: FXN 3 reverse 9:69037906-69037937; SaCas9
gctcacgcctgtaattccagcactt

SEQ ID NO: 16510 - DNA, 24 bp, Artificial Sequence
  Synthetic: FXN 3 reverse 9:69037907-69037937; SaCas9
ctcacgcctgtaattccagcactt

SEQ ID NO: 16511 - DNA, 23 bp, Artificial Sequence
  Synthetic: FXN 3 reverse 9:69037908-69037937; SaCas9
tcacgcctgtaattccagcactt

SEQ ID NO: 16512 - DNA, 22 bp, Artificial Sequence
  Synthetic: FXN 3 reverse 9:69037909-69037937; SaCas9
cacgcctgtaattccagcactt

SEQ ID NO: 16513 - DNA, 21 bp, Artificial Sequence
  Synthetic: FXN 3 reverse 9:69037910-69037937; SaCas9
acgcctgtaattccagcactt

SEQ ID NO: 16514 - DNA, 20 bp, Artificial Sequence
  Synthetic: FXN 3 reverse 9:69037911-69037937; SaCas9
cgcctgtaattccagcactt

SEQ ID NO: 16515 - DNA, 19 bp, Artificial Sequence
  Synthetic: FXN 3 reverse 9:69037912-69037937; SaCas9
gcctgtaattccagcactt

SEQ ID NO: 16516 - DNA, 18 bp, Artificial Sequence
  Synthetic: FXN 3 reverse 9:69037913-69037937; SaCas9
cctgtaattccagcactt

SEQ ID NO: 16517 - DNA, 25 bp, Artificial Sequence
  Synthetic: FXN 3 reverse 9:69037907-69037938; SaCas9
ggctcacgcctgtaattccagcact

SEQ ID NO: 16518 - DNA, 24 bp, Artificial Sequence
  Synthetic: FXN 3 reverse 9:69037908-69037938; SaCas9
gctcacgcctgtaattccagcact

SEQ ID NO: 16519 - DNA, 23 bp, Artificial Sequence
  Synthetic: FXN 3 reverse 9:69037909-69037938; SaCas9
ctcacgcctgtaattccagcact

SEQ ID NO: 16520 - DNA, 22 bp, Artificial Sequence
  Synthetic: FXN 3 reverse 9:69037910-69037938; SaCas9
tcacgcctgtaattccagcact

SEQ ID NO: 16521 - DNA, 21 bp, Artificial Sequence
  Synthetic: FXN 3 reverse 9:69037911-69037938; SaCas9
cacgcctgtaattccagcact

SEQ ID NO: 16522 - DNA, 20 bp, Artificial Sequence
  Synthetic: FXN 3 reverse 9:69037912-69037938; SaCas9
acgcctgtaattccagcact

SEQ ID NO: 16523 - DNA, 19 bp, Artificial Sequence
  Synthetic: FXN 3 reverse 9:69037913-69037938; SaCas9
cgcctgtaattccagcact

SEQ ID NO: 16524 - DNA, 18 bp, Artificial Sequence
  Synthetic: FXN 3 reverse 9:69037914-69037938; SaCas9
gcctgtaattccagcact

SEQ ID NO: 16525 - DNA, 25 bp, Artificial Sequence
  Synthetic: FXN 3 forward 9:69037931-69037962; SaCas9
gtgagccaccgcgtctggccatcag

SEQ ID NO: 16526 - DNA, 24 bp, Artificial Sequence
  Synthetic: FXN 3 forward 9:69037932-69037962; SaCas9
tgagccaccgcgtctggccatcag

SEQ ID NO: 16527 - DNA, 23 bp, Artificial Sequence
  Synthetic: FXN 3 forward 9:69037933-69037962; SaCas9
gagccaccgcgtctggccatcag

SEQ ID NO: 16528 - DNA, 22 bp, Artificial Sequence
  Synthetic: FXN 3 forward 9:69037934-69037962; SaCas9
agccaccgcgtctggccatcag

SEQ ID NO: 16529 - DNA, 21 bp, Artificial Sequence
  Synthetic: FXN 3 forward 9:69037935-69037962; SaCas9
gccaccgcgtctggccatcag

SEQ ID NO: 16530 - DNA, 20 bp, Artificial Sequence
  Synthetic: FXN 3 forward 9:69037936-69037962; SaCas9
ccaccgcgtctggccatcag

SEQ ID NO: 16531 - DNA, 19 bp, Artificial Sequence
  Synthetic: FXN 3 forward 9:69037937-69037962; SaCas9
caccgcgtctggccatcag

SEQ ID NO: 16532 - DNA, 18 bp, Artificial Sequence
  Synthetic: FXN 3 forward 9:69037938-69037962; SaCas9
accgcgtctggccatcag

SEQ ID NO: 16533 - DNA, 25 bp, Artificial Sequence
  Synthetic: FXN 3 forward 9:69037945-69037976; SaCas9
ctggccatcagcagagtttttaatt

SEQ ID NO: 16534 - DNA, 24 bp, Artificial Sequence
  Synthetic: FXN 3 forward 9:69037946-69037976; SaCas9
tggccatcagcagagtttttaatt

SEQ ID NO: 16535 - DNA, 23 bp, Artificial Sequence
  Synthetic: FXN 3 forward 9:69037947-69037976; SaCas9
ggccatcagcagagtttttaatt

SEQ ID NO: 16536 - DNA, 22 bp, Artificial Sequence
  Synthetic: FXN 3 forward 9:69037948-69037976; SaCas9
gccatcagcagagtttttaatt

SEQ ID NO: 16537 - DNA, 21 bp, Artificial Sequence
  Synthetic: FXN 3 forward 9:69037949-69037976; SaCas9
ccatcagcagagtttttaatt

SEQ ID NO: 16538 - DNA, 20 bp, Artificial Sequence
  Synthetic: FXN 3 forward 9:69037950-69037976; SaCas9
catcagcagagtttttaatt

SEQ ID NO: 16539 - DNA, 19 bp, Artificial Sequence
  Synthetic: FXN 3 forward 9:69037951-69037976; SaCas9
atcagcagagtttttaatt

SEQ ID NO: 16540 - DNA, 18 bp, Artificial Sequence
  Synthetic: FXN 3 forward 9:69037952-69037976; SaCas9
tcagcagagtttttaatt

SEQ ID NO: 16541 - DNA, 25 bp, Artificial Sequence
  Synthetic: FXN 3 forward 9:69037946-69037977; SaCas9
tggccatcagcagagtttttaattt

SEQ ID NO: 16542 - DNA, 24 bp, Artificial Sequence
  Synthetic: FXN 3 forward 9:69037947-69037977; SaCas9
ggccatcagcagagtttttaattt

SEQ ID NO: 16543 - DNA, 23 bp, Artificial Sequence
  Synthetic: FXN 3 forward 9:69037948-69037977; SaCas9
gccatcagcagagtttttaattt

SEQ ID NO: 16544 - DNA, 22 bp, Artificial Sequence
  Synthetic: FXN 3 forward 9:69037949-69037977; SaCas9
ccatcagcagagtttttaattt

SEQ ID NO: 16545 - DNA, 21 bp, Artificial Sequence
  Synthetic: FXN 3 forward 9:69037950-69037977; SaCas9
catcagcagagtttttaattt

SEQ ID NO: 16546 - DNA, 20 bp, Artificial Sequence
  Synthetic: FXN 3 forward 9:69037951-69037977; SaCas9
atcagcagagtttttaattt

SEQ ID NO: 16547 - DNA, 19 bp, Artificial Sequence
  Synthetic: FXN 3 forward 9:69037952-69037977; SaCas9
tcagcagagtttttaattt

SEQ ID NO: 16548 - DNA, 18 bp, Artificial Sequence
  Synthetic: FXN 3 forward 9:69037953-69037977; SaCas9
cagcagagtttttaattt

SEQ ID NO: 16549 - DNA, 25 bp, Artificial Sequence
  Synthetic: FXN 3 forward 9:69037948-69037979; SaCas9
gccatcagcagagtttttaatttag

SEQ ID NO: 16550 - DNA, 24 bp, Artificial Sequence
  Synthetic: FXN 3 forward 9:69037949-69037979; SaCas9
ccatcagcagagtttttaatttag

SEQ ID NO: 16551 - DNA, 23 bp, Artificial Sequence
  Synthetic: FXN 3 forward 9:69037950-69037979; SaCas9
catcagcagagtttttaatttag

SEQ ID NO: 16552 - DNA, 22 bp, Artificial Sequence
  Synthetic: FXN 3 forward 9:69037951-69037979; SaCas9
atcagcagagtttttaatttag

SEQ ID NO: 16553 - DNA, 21 bp, Artificial Sequence
  Synthetic: FXN 3 forward 9:69037952-69037979; SaCas9
tcagcagagtttttaatttag

SEQ ID NO: 16554 - DNA, 20 bp, Artificial Sequence
  Synthetic: FXN 3 forward 9:69037953-69037979; SaCas9
cagcagagtttttaatttag

SEQ ID NO: 16555 - DNA, 19 bp, Artificial Sequence
  Synthetic: FXN 3 forward 9:69037954-69037979; SaCas9
agcagagtttttaatttag

SEQ ID NO: 16556 - DNA, 18 bp, Artificial Sequence
  Synthetic: FXN 3 forward 9:69037955-69037979; SaCas9
gcagagtttttaatttag

SEQ ID NO: 16557 - DNA, 25 bp, Artificial Sequence
  Synthetic: FXN 3 forward 9:69037957-69037988; SaCas9
agagtttttaatttaggagaatgac

SEQ ID NO: 16558 - DNA, 24 bp, Artificial Sequence
  Synthetic: FXN 3 forward 9:69037958-69037988; SaCas9
gagtttttaatttaggagaatgac

SEQ ID NO: 16559 - DNA, 23 bp, Artificial Sequence
  Synthetic: FXN 3 forward 9:69037959-69037988; SaCas9
agtttttaatttaggagaatgac

SEQ ID NO: 16560 - DNA, 22 bp, Artificial Sequence
  Synthetic: FXN 3 forward 9:69037960-69037988; SaCas9
gtttttaatttaggagaatgac

SEQ ID NO: 16561 - DNA, 21 bp, Artificial Sequence
  Synthetic: FXN 3 forward 9:69037961-69037988; SaCas9
tttttaatttaggagaatgac

SEQ ID NO: 16562 - DNA, 20 bp, Artificial Sequence
  Synthetic: FXN 3 forward 9:69037962-69037988; SaCas9
ttttaatttaggagaatgac

SEQ ID NO: 16563 - DNA, 19 bp, Artificial Sequence
  Synthetic: FXN 3 forward 9:69037963-69037988; SaCas9
tttaatttaggagaatgac

SEQ ID NO: 16564 - DNA, 18 bp, Artificial Sequence
  Synthetic: FXN 3 forward 9:69037964-69037988; SaCas9
ttaatttaggagaatgac

SEQ ID NO: 16565 - DNA, 25 bp, Artificial Sequence
  Synthetic: FXN 3 forward 9:69037998-69038029; SaCas9
ttttagatggtacctggtggctgtt

SEQ ID NO: 16566 - DNA, 24 bp, Artificial Sequence
  Synthetic: FXN 3 forward 9:69037999-69038029; SaCas9
tttagatggtacctggtggctgtt

SEQ ID NO: 16567 - DNA, 23 bp, Artificial Sequence
  Synthetic: FXN 3 forward 9:69038000-69038029; SaCas9
ttagatggtacctggtggctgtt

SEQ ID NO: 16568 - DNA, 22 bp, Artificial Sequence
  Synthetic: FXN 3 forward 9:69038001-69038029; SaCas9
tagatggtacctggtggctgtt

SEQ ID NO: 16569 - DNA, 21 bp, Artificial Sequence
  Synthetic: FXN 3 forward 9:69038002-69038029; SaCas9
agatggtacctggtggctgtt

SEQ ID NO: 16570 - DNA, 20 bp, Artificial Sequence
  Synthetic: FXN 3 forward 9:69038003-69038029; SaCas9
gatggtacctggtggctgtt

SEQ ID NO: 16571 - DNA, 19 bp, Artificial Sequence
  Synthetic: FXN 3 forward 9:69038004-69038029; SaCas9
atggtacctggtggctgtt

SEQ ID NO: 16572 - DNA, 18 bp, Artificial Sequence
  Synthetic: FXN 3 forward 9:69038005-69038029; SaCas9
tggtacctggtggctgtt

SEQ ID NO: 16573 - DNA, 25 bp, Artificial Sequence
  Synthetic: FXN 3 forward 9:69038042-69038073; SaCas9
acacacccaacttggcgctgccgcc

SEQ ID NO: 16574 - DNA, 24 bp, Artificial Sequence
  Synthetic: FXN 3 forward 9:69038043-69038073; SaCas9
cacacccaacttggcgctgccgcc

SEQ ID NO: 16575 - DNA, 23 bp, Artificial Sequence
  Synthetic: FXN 3 forward 9:69038044-69038073; SaCas9
acacccaacttggcgctgccgcc

SEQ ID NO: 16576 - DNA, 22 bp, Artificial Sequence
  Synthetic: FXN 3 forward 9:69038045-69038073; SaCas9
cacccaacttggcgctgccgcc

SEQ ID NO: 16577 - DNA, 21 bp, Artificial Sequence
  Synthetic: FXN 3 forward 9:69038046-69038073; SaCas9
acccaacttggcgctgccgcc

SEQ ID NO: 16578 - DNA, 20 bp, Artificial Sequence
  Synthetic: FXN 3 forward 9:69038047-69038073; SaCas9
cccaacttggcgctgccgcc

SEQ ID NO: 16579 - DNA, 19 bp, Artificial Sequence
  Synthetic: FXN 3 forward 9:69038048-69038073; SaCas9
ccaacttggcgctgccgcc

SEQ ID NO: 16580 - DNA, 18 bp, Artificial Sequence
  Synthetic: FXN 3 forward 9:69038049-69038073; SaCas9
caacttggcgctgccgcc

SEQ ID NO: 16581 - DNA, 25 bp, Artificial Sequence
  Synthetic: FXN 3 forward 9:69038043-69038074; SaCas9
cacacccaacttggcgctgccgccc

SEQ ID NO: 16582 - DNA, 24 bp, Artificial Sequence
  Synthetic: FXN 3 forward 9:69038044-69038074; SaCas9
acacccaacttggcgctgccgccc

SEQ ID NO: 16583 - DNA, 23 bp, Artificial Sequence
  Synthetic: FXN 3 forward 9:69038045-69038074; SaCas9
cacccaacttggcgctgccgccc

SEQ ID NO: 16584 - DNA, 22 bp, Artificial Sequence
  Synthetic: FXN 3 forward 9:69038046-69038074; SaCas9
acccaacttggcgctgccgccc

SEQ ID NO: 16585 - DNA, 21 bp, Artificial Sequence
  Synthetic: FXN 3 forward 9:69038047-69038074; SaCas9
cccaacttggcgctgccgccc

SEQ ID NO: 16586 - DNA, 20 bp, Artificial Sequence
  Synthetic: FXN 3 forward 9:69038048-69038074; SaCas9
ccaacttggcgctgccgccc

SEQ ID NO: 16587 - DNA, 19 bp, Artificial Sequence
  Synthetic: FXN 3 forward 9:69038049-69038074; SaCas9
caacttggcgctgccgccc

SEQ ID NO: 16588 - DNA, 18 bp, Artificial Sequence
  Synthetic: FXN 3 forward 9:69038050-69038074; SaCas9
aacttggcgctgccgccc

SEQ ID NO: 16589 - DNA, 25 bp, Artificial Sequence
  Synthetic: FXN 3 reverse 9:69038046-69038077; SaCas9
ccacctcctgggcggcagcgccaag

SEQ ID NO: 16590 - DNA, 24 bp, Artificial Sequence
  Synthetic: FXN 3 reverse 9:69038047-69038077; SaCas9
cacctcctgggcggcagcgccaag

SEQ ID NO: 16591 - DNA, 23 bp, Artificial Sequence
  Synthetic: FXN 3 reverse 9:69038048-69038077; SaCas9
acctcctgggcggcagcgccaag

SEQ ID NO: 16592 - DNA, 22 bp, Artificial Sequence
  Synthetic: FXN 3 reverse 9:69038049-69038077; SaCas9
cctcctgggcggcagcgccaag

SEQ ID NO: 16593 - DNA, 21 bp, Artificial Sequence
  Synthetic: FXN 3 reverse 9:69038050-69038077; SaCas9
ctcctgggcggcagcgccaag

SEQ ID NO: 16594 - DNA, 20 bp, Artificial Sequence
  Synthetic: FXN 3 reverse 9:69038051-69038077; SaCas9
tcctgggcggcagcgccaag

SEQ ID NO: 16595 - DNA, 19 bp, Artificial Sequence
  Synthetic: FXN 3 reverse 9:69038052-69038077; SaCas9
cctgggcggcagcgccaag

SEQ ID NO: 16596 - DNA, 18 bp, Artificial Sequence
  Synthetic: FXN 3 reverse 9:69038053-69038077; SaCas9
ctgggcggcagcgccaag

SEQ ID NO: 16597 - DNA, 25 bp, Artificial Sequence
  Synthetic: FXN 3 forward 9:69038048-69038079; SaCas9
ccaacttggcgctgccgcccaggag

SEQ ID NO: 16598 - DNA, 24 bp, Artificial Sequence
  Synthetic: FXN 3 forward 9:69038049-69038079; SaCas9
caacttggcgctgccgcccaggag

SEQ ID NO: 16599 - DNA, 23 bp, Artificial Sequence
  Synthetic: FXN 3 forward 9:69038050-69038079; SaCas9
aacttggcgctgccgcccaggag

SEQ ID NO: 16600 - DNA, 22 bp, Artificial Sequence
  Synthetic: FXN 3 forward 9:69038051-69038079; SaCas9
acttggcgctgccgcccaggag

SEQ ID NO: 16601 - DNA, 21 bp, Artificial Sequence
  Synthetic: FXN 3 forward 9:69038052-69038079; SaCas9
cttggcgctgccgcccaggag

SEQ ID NO: 16602 - DNA, 20 bp, Artificial Sequence
  Synthetic: FXN 3 forward 9:69038053-69038079; SaCas9
ttggcgctgccgcccaggag

SEQ ID NO: 16603 - DNA, 19 bp, Artificial Sequence
  Synthetic: FXN 3 forward 9:69038054-69038079; SaCas9
tggcgctgccgcccaggag

SEQ ID NO: 16604 - DNA, 18 bp, Artificial Sequence
  Synthetic: FXN 3 forward 9:69038055-69038079; SaCas9
ggcgctgccgcccaggag

SEQ ID NO: 16605 - DNA, 25 bp, Artificial Sequence
  Synthetic: FXN 3 forward 9:69038055-69038086; SaCas9
ggcgctgccgcccaggaggtggaca

SEQ ID NO: 16606 - DNA, 24 bp, Artificial Sequence
  Synthetic: FXN 3 forward 9:69038056-69038086; SaCas9
gcgctgccgcccaggaggtggaca

SEQ ID NO: 16607 - DNA, 23 bp, Artificial Sequence
  Synthetic: FXN 3 forward 9:69038057-69038086; SaCas9
cgctgccgcccaggaggtggaca

SEQ ID NO: 16608 - DNA, 22 bp, Artificial Sequence
  Synthetic: FXN 3 forward 9:69038058-69038086; SaCas9
gctgccgcccaggaggtggaca

SEQ ID NO: 16609 - DNA, 21 bp, Artificial Sequence
  Synthetic: FXN 3 forward 9:69038059-69038086; SaCas9
ctgccgcccaggaggtggaca

SEQ ID NO: 16610 - DNA, 20 bp, Artificial Sequence
  Synthetic: FXN 3 forward 9:69038060-69038086; SaCas9
tgccgcccaggaggtggaca

SEQ ID NO: 16611 - DNA, 19 bp, Artificial Sequence
  Synthetic: FXN 3 forward 9:69038061-69038086; SaCas9
gccgcccaggaggtggaca

SEQ ID NO: 16612 - DNA, 18 bp, Artificial Sequence
  Synthetic: FXN 3 forward 9:69038062-69038086; SaCas9
ccgcccaggaggtggaca

SEQ ID NO: 16613 - DNA, 25 bp, Artificial Sequence
  Synthetic: FXN 3 forward 9:69038063-69038094; SaCas9
cgcccaggaggtggacactgggttt

SEQ ID NO: 16614 - DNA, 24 bp, Artificial Sequence
  Synthetic: FXN 3 forward 9:69038064-69038094; SaCas9
gcccaggaggtggacactgggttt

SEQ ID NO: 16615 - DNA, 23 bp, Artificial Sequence
  Synthetic: FXN 3 forward 9:69038065-69038094; SaCas9
cccaggaggtggacactgggttt

SEQ ID NO: 16616 - DNA, 22 bp, Artificial Sequence
  Synthetic: FXN 3 forward 9:69038066-69038094; SaCas9
ccaggaggtggacactgggttt

SEQ ID NO: 16617 - DNA, 21 bp, Artificial Sequence
  Synthetic: FXN 3 forward 9:69038067-69038094; SaCas9
caggaggtggacactgggttt

SEQ ID NO: 16618 - DNA, 20 bp, Artificial Sequence
  Synthetic: FXN 3 forward 9:69038068-69038094; SaCas9
aggaggtggacactgggttt

SEQ ID NO: 16619 - DNA, 19 bp, Artificial Sequence
  Synthetic: FXN 3 forward 9:69038069-69038094; SaCas9
ggaggtggacactgggttt

SEQ ID NO: 16620 - DNA, 18 bp, Artificial Sequence
  Synthetic: FXN 3 forward 9:69038070-69038094; SaCas9
gaggtggacactgggttt

SEQ ID NO: 16621 - DNA, 25 bp, Artificial Sequence
  Synthetic: FXN 3 reverse 9:69038064-69038095; SaCas9
tatccagaaacccagtgtccacctc

SEQ ID NO: 16622 - DNA, 24 bp, Artificial Sequence
  Synthetic: FXN 3 reverse 9:69038065-69038095; SaCas9
atccagaaacccagtgtccacctc

SEQ ID NO: 16623 - DNA, 23 bp, Artificial Sequence
  Synthetic: FXN 3 reverse 9:69038066-69038095; SaCas9
tccagaaacccagtgtccacctc

SEQ ID NO: 16624 - DNA, 22 bp, Artificial Sequence
  Synthetic: FXN 3 reverse 9:69038067-69038095; SaCas9
ccagaaacccagtgtccacctc

SEQ ID NO: 16625 - DNA, 21 bp, Artificial Sequence
  Synthetic: FXN 3 reverse 9:69038068-69038095; SaCas9
cagaaacccagtgtccacctc

SEQ ID NO: 16626 - DNA, 20 bp, Artificial Sequence
  Synthetic: FXN 3 reverse 9:69038069-69038095; SaCas9
agaaacccagtgtccacctc

SEQ ID NO: 16627 - DNA, 19 bp, Artificial Sequence
  Synthetic: FXN 3 reverse 9:69038070-69038095; SaCas9
gaaacccagtgtccacctc

SEQ ID NO: 16628 - DNA, 18 bp, Artificial Sequence
  Synthetic: FXN 3 reverse 9:69038071-69038095; SaCas9
aaacccagtgtccacctc

SEQ ID NO: 16629 - DNA, 25 bp, Artificial Sequence
  Synthetic: FXN 3 reverse 9:69038085-69038116; SaCas9
tgacagaggttgctaaccatctatc

SEQ ID NO: 16630 - DNA, 24 bp, Artificial Sequence
  Synthetic: FXN 3 reverse 9:69038086-69038116; SaCas9
gacagaggttgctaaccatctatc

SEQ ID NO: 16631 - DNA, 23 bp, Artificial Sequence
  Synthetic: FXN 3 reverse 9:69038087-69038116; SaCas9
acagaggttgctaaccatctatc

SEQ ID NO: 16632 - DNA, 22 bp, Artificial Sequence
  Synthetic: FXN 3 reverse 9:69038088-69038116; SaCas9
cagaggttgctaaccatctatc

SEQ ID NO: 16633 - DNA, 21 bp, Artificial Sequence
  Synthetic: FXN 3 reverse 9:69038089-69038116; SaCas9
agaggttgctaaccatctatc

SEQ ID NO: 16634 - DNA, 20 bp, Artificial Sequence
  Synthetic: FXN 3 reverse 9:69038090-69038116; SaCas9
gaggttgctaaccatctatc

SEQ ID NO: 16635 - DNA, 19 bp, Artificial Sequence
  Synthetic: FXN 3 reverse 9:69038091-69038116; SaCas9
aggttgctaaccatctatc

SEQ ID NO: 16636 - DNA, 18 bp, Artificial Sequence
  Synthetic: FXN 3 reverse 9:69038092-69038116; SaCas9
ggttgctaaccatctatc

SEQ ID NO: 16637 - DNA, 25 bp, Artificial Sequence
  Synthetic: FXN 3 forward 9:69038095-69038126; SaCas9
gatggttagcaacctctgtcaccag

SEQ ID NO: 16638 - DNA, 24 bp, Artificial Sequence
  Synthetic: FXN 3 forward 9:69038096-69038126; SaCas9
atggttagcaacctctgtcaccag

SEQ ID NO: 16639 - DNA, 23 bp, Artificial Sequence
  Synthetic: FXN 3 forward 9:69038097-69038126; SaCas9
tggttagcaacctctgtcaccag

SEQ ID NO: 16640 - DNA, 22 bp, Artificial Sequence
  Synthetic: FXN 3 forward 9:69038098-69038126; SaCas9
ggttagcaacctctgtcaccag

SEQ ID NO: 16641 - DNA, 21 bp, Artificial Sequence
  Synthetic: FXN 3 forward 9:69038099-69038126; SaCas9
gttagcaacctctgtcaccag

SEQ ID NO: 16642 - DNA, 20 bp, Artificial Sequence
  Synthetic: FXN 3 forward 9:69038100-69038126; SaCas9
ttagcaacctctgtcaccag

SEQ ID NO: 16643 - DNA, 19 bp, Artificial Sequence
  Synthetic: FXN 3 forward 9:69038101-69038126; SaCas9
tagcaacctctgtcaccag

SEQ ID NO: 16644 - DNA, 18 bp, Artificial Sequence
  Synthetic: FXN 3 forward 9:69038102-69038126; SaCas9
agcaacctctgtcaccag

SEQ ID NO: 16645 - DNA, 25 bp, Artificial Sequence
  Synthetic: FXN 3 reverse 9:69038107-69038138; SaCas9
agaaaaaaagaggcccagctggtga

SEQ ID NO: 16646 - DNA, 24 bp, Artificial Sequence
  Synthetic: FXN 3 reverse 9:69038108-69038138; SaCas9
gaaaaaaagaggcccagctggtga

SEQ ID NO: 16647 - DNA, 23 bp, Artificial Sequence
  Synthetic: FXN 3 reverse 9:69038109-69038138; SaCas9
aaaaaaagaggcccagctggtga

SEQ ID NO: 16648 - DNA, 22 bp, Artificial Sequence
  Synthetic: FXN 3 reverse 9:69038110-69038138; SaCas9
aaaaaagaggcccagctggtga

SEQ ID NO: 16649 - DNA, 21 bp, Artificial Sequence
  Synthetic: FXN 3 reverse 9:69038111-69038138; SaCas9
aaaaagaggcccagctggtga

SEQ ID NO: 16650 - DNA, 20 bp, Artificial Sequence
  Synthetic: FXN 3 reverse 9:69038112-69038138; SaCas9
aaaagaggcccagctggtga

SEQ ID NO: 16651 - DNA, 19 bp, Artificial Sequence
  Synthetic: FXN 3 reverse 9:69038113-69038138; SaCas9
aaagaggcccagctggtga

SEQ ID NO: 16652 - DNA, 18 bp, Artificial Sequence
  Synthetic: FXN 3 reverse 9:69038114-69038138; SaCas9
aagaggcccagctggtga

SEQ ID NO: 16653 - DNA, 25 bp, Artificial Sequence
  Synthetic: FXN 3 forward 9:69038116-69038147; SaCas9
ccagctgggcctctttttttctata

SEQ ID NO: 16654 - DNA, 24 bp, Artificial Sequence
  Synthetic: FXN 3 forward 9:69038117-69038147; SaCas9
cagctgggcctctttttttctata

SEQ ID NO: 16655 - DNA, 23 bp, Artificial Sequence
  Synthetic: FXN 3 forward 9:69038118-69038147; SaCas9
agctgggcctctttttttctata

SEQ ID NO: 16656 - DNA, 22 bp, Artificial Sequence
  Synthetic: FXN 3 forward 9:69038119-69038147; SaCas9
gctgggcctctttttttctata

SEQ ID NO: 16657 - DNA, 21 bp, Artificial Sequence
  Synthetic: FXN 3 forward 9:69038120-69038147; SaCas9
ctgggcctctttttttctata

SEQ ID NO: 16658 - DNA, 20 bp, Artificial Sequence
  Synthetic: FXN 3 forward 9:69038121-69038147; SaCas9
tgggcctctttttttctata

SEQ ID NO: 16659 - DNA, 19 bp, Artificial Sequence
  Synthetic: FXN 3 forward 9:69038122-69038147; SaCas9
gggcctctttttttctata

SEQ ID NO: 16660 - DNA, 18 bp, Artificial Sequence
  Synthetic: FXN 3 forward 9:69038123-69038147; SaCas9
ggcctctttttttctata

SEQ ID NO: 16661 - DNA, 25 bp, Artificial Sequence
  Synthetic: FXN 3 reverse 9:69038125-69038156; SaCas9
atgtgattaattcagtatagaaaaa

SEQ ID NO: 16662 - DNA, 24 bp, Artificial Sequence
  Synthetic: FXN 3 reverse 9:69038126-69038156; SaCas9
tgtgattaattcagtatagaaaaa

SEQ ID NO: 16663 - DNA, 23 bp, Artificial Sequence
  Synthetic: FXN 3 reverse 9:69038127-69038156; SaCas9
gtgattaattcagtatagaaaaa

SEQ ID NO: 16664 - DNA, 22 bp, Artificial Sequence
  Synthetic: FXN 3 reverse 9:69038128-69038156; SaCas9
tgattaattcagtatagaaaaa

SEQ ID NO: 16665 - DNA, 21 bp, Artificial Sequence
  Synthetic: FXN 3 reverse 9:69038129-69038156; SaCas9
gattaattcagtatagaaaaa

SEQ ID NO: 16666 - DNA, 20 bp, Artificial Sequence
  Synthetic: FXN 3 reverse 9:69038130-69038156; SaCas9
attaattcagtatagaaaaa

SEQ ID NO: 16667 - DNA, 19 bp, Artificial Sequence
  Synthetic: FXN 3 reverse 9:69038131-69038156; SaCas9
ttaattcagtatagaaaaa

SEQ ID NO: 16668 - DNA, 18 bp, Artificial Sequence
  Synthetic: FXN 3 reverse 9:69038132-69038156; SaCas9
taattcagtatagaaaaa

SEQ ID NO: 16669 - DNA, 25 bp, Artificial Sequence
  Synthetic: FXN 3 reverse 9:69038133-69038164; SaCas9
ttaaacaaatgtgattaattcagta

SEQ ID NO: 16670 - DNA, 24 bp, Artificial Sequence
  Synthetic: FXN 3 reverse 9:69038134-69038164; SaCas9
taaacaaatgtgattaattcagta

SEQ ID NO: 16671 - DNA, 23 bp, Artificial Sequence
  Synthetic: FXN 3 reverse 9:69038135-69038164; SaCas9
aaacaaatgtgattaattcagta

SEQ ID NO: 16672 - DNA, 22 bp, Artificial Sequence
  Synthetic: FXN 3 reverse 9:69038136-69038164; SaCas9
aacaaatgtgattaattcagta

SEQ ID NO: 16673 - DNA, 21 bp, Artificial Sequence
  Synthetic: FXN 3 reverse 9:69038137-69038164; SaCas9
acaaatgtgattaattcagta

SEQ ID NO: 16674 - DNA, 20 bp, Artificial Sequence
  Synthetic: FXN 3 reverse 9:69038138-69038164; SaCas9
caaatgtgattaattcagta

SEQ ID NO: 16675 - DNA, 19 bp, Artificial Sequence
  Synthetic: FXN 3 reverse 9:69038139-69038164; SaCas9
aaatgtgattaattcagta

SEQ ID NO: 16676 - DNA, 18 bp, Artificial Sequence
  Synthetic: FXN 3 reverse 9:69038140-69038164; SaCas9
aatgtgattaattcagta

SEQ ID NO: 16677 - DNA, 25 bp, Artificial Sequence
  Synthetic: FXN 3 forward 9:69038169-69038200; SaCas9
ctgttccatagttcccttgcacatc

SEQ ID NO: 16678 - DNA, 24 bp, Artificial Sequence
  Synthetic: FXN 3 forward 9:69038170-69038200; SaCas9
tgttccatagttcccttgcacatc

SEQ ID NO: 16679 - DNA, 23 bp, Artificial Sequence
  Synthetic: FXN 3 forward 9:69038171-69038200; SaCas9
gttccatagttcccttgcacatc

SEQ ID NO: 16680 - DNA, 22 bp, Artificial Sequence
  Synthetic: FXN 3 forward 9:69038172-69038200; SaCas9
ttccatagttcccttgcacatc

SEQ ID NO: 16681 - DNA, 21 bp, Artificial Sequence
  Synthetic: FXN 3 forward 9:69038173-69038200; SaCas9
tccatagttcccttgcacatc

SEQ ID NO: 16682 - DNA, 20 bp, Artificial Sequence
  Synthetic: FXN 3 forward 9:69038174-69038200; SaCas9
ccatagttcccttgcacatc

SEQ ID NO: 16683 - DNA, 19 bp, Artificial Sequence
  Synthetic: FXN 3 forward 9:69038175-69038200; SaCas9
catagttcccttgcacatc

SEQ ID NO: 16684 - DNA, 18 bp, Artificial Sequence
  Synthetic: FXN 3 forward 9:69038176-69038200; SaCas9
atagttcccttgcacatc

SEQ ID NO: 16685 - DNA, 25 bp, Artificial Sequence
  Synthetic: FXN 3 reverse 9:69038171-69038202; SaCas9
atacccaagatgtgcaagggaacta

SEQ ID NO: 16686 - DNA, 24 bp, Artificial Sequence
  Synthetic: FXN 3 reverse 9:69038172-69038202; SaCas9
tacccaagatgtgcaagggaacta

SEQ ID NO: 16687 - DNA, 23 bp, Artificial Sequence
  Synthetic: FXN 3 reverse 9:69038173-69038202; SaCas9
acccaagatgtgcaagggaacta

SEQ ID NO: 16688 - DNA, 22 bp, Artificial Sequence
  Synthetic: FXN 3 reverse 9:69038174-69038202; SaCas9
cccaagatgtgcaagggaacta

SEQ ID NO: 16689 - DNA, 21 bp, Artificial Sequence
  Synthetic: FXN 3 reverse 9:69038175-69038202; SaCas9
ccaagatgtgcaagggaacta

SEQ ID NO: 16690 - DNA, 20 bp, Artificial Sequence
  Synthetic: FXN 3 reverse 9:69038176-69038202; SaCas9
caagatgtgcaagggaacta

SEQ ID NO: 16691 - DNA, 19 bp, Artificial Sequence
  Synthetic: FXN 3 reverse 9:69038177-69038202; SaCas9
aagatgtgcaagggaacta

SEQ ID NO: 16692 - DNA, 18 bp, Artificial Sequence
  Synthetic: FXN 3 reverse 9:69038178-69038202; SaCas9
agatgtgcaagggaacta

SEQ ID NO: 16693 - DNA, 25 bp, Artificial Sequence
  Synthetic: FXN 3 reverse 9:69038172-69038203; SaCas9
aatacccaagatgtgcaagggaact

SEQ ID NO: 16694 - DNA, 24 bp, Artificial Sequence
  Synthetic: FXN 3 reverse 9:69038173-69038203; SaCas9
atacccaagatgtgcaagggaact

SEQ ID NO: 16695 - DNA, 23 bp, Artificial Sequence
  Synthetic: FXN 3 reverse 9:69038174-69038203; SaCas9
tacccaagatgtgcaagggaact

SEQ ID NO: 16696 - DNA, 22 bp, Artificial Sequence
  Synthetic: FXN 3 reverse 9:69038175-69038203; SaCas9
acccaagatgtgcaagggaact

SEQ ID NO: 16697 - DNA, 21 bp, Artificial Sequence
  Synthetic: FXN 3 reverse 9:69038176-69038203; SaCas9
cccaagatgtgcaagggaact

SEQ ID NO: 16698 - DNA, 20 bp, Artificial Sequence
  Synthetic: FXN 3 reverse 9:69038177-69038203; SaCas9
ccaagatgtgcaagggaact

SEQ ID NO: 16699 - DNA, 19 bp, Artificial Sequence
  Synthetic: FXN 3 reverse 9:69038178-69038203; SaCas9
caagatgtgcaagggaact

SEQ ID NO: 16700 - DNA, 18 bp, Artificial Sequence
  Synthetic: FXN 3 reverse 9:69038179-69038203; SaCas9
aagatgtgcaagggaact

SEQ ID NO: 16701 - DNA, 25 bp, Artificial Sequence
  Synthetic: FXN 3 forward 9:69038177-69038208; SaCas9
tagttcccttgcacatcttgggtat

SEQ ID NO: 16702 - DNA, 24 bp, Artificial Sequence
  Synthetic: FXN 3 forward 9:69038178-69038208; SaCas9
agttcccttgcacatcttgggtat

SEQ ID NO: 16703 - DNA, 23 bp, Artificial Sequence
  Synthetic: FXN 3 forward 9:69038179-69038208; SaCas9
gttcccttgcacatcttgggtat

SEQ ID NO: 16704 - DNA, 22 bp, Artificial Sequence
  Synthetic: FXN 3 forward 9:69038180-69038208; SaCas9
ttcccttgcacatcttgggtat

SEQ ID NO: 16705 - DNA, 21 bp, Artificial Sequence
  Synthetic: FXN 3 forward 9:69038181-69038208; SaCas9
tcccttgcacatcttgggtat

SEQ ID NO: 16706 - DNA, 20 bp, Artificial Sequence
  Synthetic: FXN 3 forward 9:69038182-69038208; SaCas9
cccttgcacatcttgggtat

SEQ ID NO: 16707 - DNA, 19 bp, Artificial Sequence
  Synthetic: FXN 3 forward 9:69038183-69038208; SaCas9
ccttgcacatcttgggtat

SEQ ID NO: 16708 - DNA, 18 bp, Artificial Sequence
  Synthetic: FXN 3 forward 9:69038184-69038208; SaCas9
cttgcacatcttgggtat

SEQ ID NO: 16709 - DNA, 25 bp, Artificial Sequence
  Synthetic: FXN 3 forward 9:69038179-69038210; SaCas9
gttcccttgcacatcttgggtattt

SEQ ID NO: 16710 - DNA, 24 bp, Artificial Sequence
  Synthetic: FXN 3 forward 9:69038180-69038210; SaCas9
ttcccttgcacatcttgggtattt

SEQ ID NO: 16711 - DNA, 23 bp, Artificial Sequence
  Synthetic: FXN 3 forward 9:69038181-69038210; SaCas9
tcccttgcacatcttgggtattt

SEQ ID NO: 16712 - DNA, 22 bp, Artificial Sequence
  Synthetic: FXN 3 forward 9:69038182-69038210; SaCas9
cccttgcacatcttgggtattt

SEQ ID NO: 16713 - DNA, 21 bp, Artificial Sequence
  Synthetic: FXN 3 forward 9:69038183-69038210; SaCas9
ccttgcacatcttgggtattt

SEQ ID NO: 16714 - DNA, 20 bp, Artificial Sequence
  Synthetic: FXN 3 forward 9:69038184-69038210; SaCas9
cttgcacatcttgggtattt

SEQ ID NO: 16715 - DNA, 19 bp, Artificial Sequence
  Synthetic: FXN 3 forward 9:69038185-69038210; SaCas9
ttgcacatcttgggtattt

SEQ ID NO: 16716 - DNA, 18 bp, Artificial Sequence
  Synthetic: FXN 3 forward 9:69038186-69038210; SaCas9
tgcacatcttgggtattt

SEQ ID NO: 16717 - DNA, 25 bp, Artificial Sequence
  Synthetic: FXN 3 reverse 9:69038179-69038210; SaCas9
ctcctcaaatacccaagatgtgcaa

SEQ ID NO: 16718 - DNA, 24 bp, Artificial Sequence
  Synthetic: FXN 3 reverse 9:69038180-69038210; SaCas9
tcctcaaatacccaagatgtgcaa

SEQ ID NO: 16719 - DNA, 23 bp, Artificial Sequence
  Synthetic: FXN 3 reverse 9:69038181-69038210; SaCas9
cctcaaatacccaagatgtgcaa

SEQ ID NO: 16720 - DNA, 22 bp, Artificial Sequence
  Synthetic: FXN 3 reverse 9:69038182-69038210; SaCas9
ctcaaatacccaagatgtgcaa

SEQ ID NO: 16721 - DNA, 21 bp, Artificial Sequence
  Synthetic: FXN 3 reverse 9:69038183-69038210; SaCas9
tcaaatacccaagatgtgcaa

SEQ ID NO: 16722 - DNA, 20 bp, Artificial Sequence
  Synthetic: FXN 3 reverse 9:69038184-69038210; SaCas9
caaatacccaagatgtgcaa

SEQ ID NO: 16723 - DNA, 19 bp, Artificial Sequence
  Synthetic: FXN 3 reverse 9:69038185-69038210; SaCas9
aaatacccaagatgtgcaa

SEQ ID NO: 16724 - DNA, 18 bp, Artificial Sequence
  Synthetic: FXN 3 reverse 9:69038186-69038210; SaCas9
aatacccaagatgtgcaa

SEQ ID NO: 16725 - DNA, 25 bp, Artificial Sequence
  Synthetic: FXN 3 forward 9:69038180-69038211; SaCas9
ttcccttgcacatcttgggtatttg

SEQ ID NO: 16726 - DNA, 24 bp, Artificial Sequence
  Synthetic: FXN 3 forward 9:69038181-69038211; SaCas9
tcccttgcacatcttgggtatttg

SEQ ID NO: 16727 - DNA, 23 bp, Artificial Sequence
  Synthetic: FXN 3 forward 9:69038182-69038211; SaCas9
cccttgcacatcttgggtatttg

SEQ ID NO: 16728 - DNA, 22 bp, Artificial Sequence
  Synthetic: FXN 3 forward 9:69038183-69038211; SaCas9
ccttgcacatcttgggtatttg

SEQ ID NO: 16729 - DNA, 21 bp, Artificial Sequence
  Synthetic: FXN 3 forward 9:69038184-69038211; SaCas9
cttgcacatcttgggtatttg

SEQ ID NO: 16730 - DNA, 20 bp, Artificial Sequence
  Synthetic: FXN 3 forward 9:69038185-69038211; SaCas9
ttgcacatcttgggtatttg

SEQ ID NO: 16731 - DNA, 19 bp, Artificial Sequence
  Synthetic: FXN 3 forward 9:69038186-69038211; SaCas9
tgcacatcttgggtatttg

SEQ ID NO: 16732 - DNA, 18 bp, Artificial Sequence
  Synthetic: FXN 3 forward 9:69038187-69038211; SaCas9
gcacatcttgggtatttg

SEQ ID NO: 16733 - DNA, 25 bp, Artificial Sequence
  Synthetic: FXN 3 reverse 9:69038180-69038211; SaCas9
actcctcaaatacccaagatgtgca

SEQ ID NO: 16734 - DNA, 24 bp, Artificial Sequence
  Synthetic: FXN 3 reverse 9:69038181-69038211; SaCas9
ctcctcaaatacccaagatgtgca

SEQ ID NO: 16735 - DNA, 23 bp, Artificial Sequence
  Synthetic: FXN 3 reverse 9:69038182-69038211; SaCas9
tcctcaaatacccaagatgtgca

SEQ ID NO: 16736 - DNA, 22 bp, Artificial Sequence
  Synthetic: FXN 3 reverse 9:69038183-69038211; SaCas9
cctcaaatacccaagatgtgca

SEQ ID NO: 16737 - DNA, 21 bp, Artificial Sequence
  Synthetic: FXN 3 reverse 9:69038184-69038211; SaCas9
ctcaaatacccaagatgtgca

SEQ ID NO: 16738 - DNA, 20 bp, Artificial Sequence
  Synthetic: FXN 3 reverse 9:69038185-69038211; SaCas9
tcaaatacccaagatgtgca

SEQ ID NO: 16739 - DNA, 19 bp, Artificial Sequence
  Synthetic: FXN 3 reverse 9:69038186-69038211; SaCas9
caaatacccaagatgtgca

SEQ ID NO: 16740 - DNA, 18 bp, Artificial Sequence
  Synthetic: FXN 3 reverse 9:69038187-69038211; SaCas9
aaatacccaagatgtgca

SEQ ID NO: 16741 - DNA, 25 bp, Artificial Sequence
  Synthetic: FXN 3 reverse 9:69038181-69038212; SaCas9
aactcctcaaatacccaagatgtgc

SEQ ID NO: 16742 - DNA, 24 bp, Artificial Sequence
  Synthetic: FXN 3 reverse 9:69038182-69038212; SaCas9
actcctcaaatacccaagatgtgc

SEQ ID NO: 16743 - DNA, 23 bp, Artificial Sequence
  Synthetic: FXN 3 reverse 9:69038183-69038212; SaCas9
ctcctcaaatacccaagatgtgc

SEQ ID NO: 16744 - DNA, 22 bp, Artificial Sequence
  Synthetic: FXN 3 reverse 9:69038184-69038212; SaCas9
tcctcaaatacccaagatgtgc

SEQ ID NO: 16745 - DNA, 21 bp, Artificial Sequence
  Synthetic: FXN 3 reverse 9:69038185-69038212; SaCas9
cctcaaatacccaagatgtgc

SEQ ID NO: 16746 - DNA, 20 bp, Artificial Sequence
  Synthetic: FXN 3 reverse 9:69038186-69038212; SaCas9
ctcaaatacccaagatgtgc

SEQ ID NO: 16747 - DNA, 19 bp, Artificial Sequence
  Synthetic: FXN 3 reverse 9:69038187-69038212; SaCas9
tcaaatacccaagatgtgc

SEQ ID NO: 16748 - DNA, 18 bp, Artificial Sequence
  Synthetic: FXN 3 reverse 9:69038188-69038212; SaCas9
caaatacccaagatgtgc

SEQ ID NO: 16749 - DNA, 25 bp, Artificial Sequence
  Synthetic: FXN 3 forward 9:69038185-69038216; SaCas9
ttgcacatcttgggtatttgaggag

SEQ ID NO: 16750 - DNA, 24 bp, Artificial Sequence
  Synthetic: FXN 3 forward 9:69038186-69038216; SaCas9
tgcacatcttgggtatttgaggag

SEQ ID NO: 16751 - DNA, 23 bp, Artificial Sequence
  Synthetic: FXN 3 forward 9:69038187-69038216; SaCas9
gcacatcttgggtatttgaggag

SEQ ID NO: 16752 - DNA, 22 bp, Artificial Sequence
  Synthetic: FXN 3 forward 9:69038188-69038216; SaCas9
cacatcttgggtatttgaggag

SEQ ID NO: 16753 - DNA, 21 bp, Artificial Sequence
  Synthetic: FXN 3 forward 9:69038189-69038216; SaCas9
acatcttgggtatttgaggag

SEQ ID NO: 16754 - DNA, 20 bp, Artificial Sequence
  Synthetic: FXN 3 forward 9:69038190-69038216; SaCas9
catcttgggtatttgaggag

SEQ ID NO: 16755 - DNA, 19 bp, Artificial Sequence
  Synthetic: FXN 3 forward 9:69038191-69038216; SaCas9
atcttgggtatttgaggag

SEQ ID NO: 16756 - DNA, 18 bp, Artificial Sequence
  Synthetic: FXN 3 forward 9:69038192-69038216; SaCas9
tcttgggtatttgaggag

SEQ ID NO: 16757 - DNA, 25 bp, Artificial Sequence
  Synthetic: FXN 3 forward 9:69038189-69038220; SaCas9
acatcttgggtatttgaggagttgg

SEQ ID NO: 16758 - DNA, 24 bp, Artificial Sequence
  Synthetic: FXN 3 forward 9:69038190-69038220; SaCas9
catcttgggtatttgaggagttgg

SEQ ID NO: 16759 - DNA, 23 bp, Artificial Sequence
  Synthetic: FXN 3 forward 9:69038191-69038220; SaCas9
atcttgggtatttgaggagttgg

SEQ ID NO: 16760 - DNA, 22 bp, Artificial Sequence
  Synthetic: FXN 3 forward 9:69038192-69038220; SaCas9
tcttgggtatttgaggagttgg

SEQ ID NO: 16761 - DNA, 21 bp, Artificial Sequence
  Synthetic: FXN 3 forward 9:69038193-69038220; SaCas9
cttgggtatttgaggagttgg

SEQ ID NO: 16762 - DNA, 20 bp, Artificial Sequence
  Synthetic: FXN 3 forward 9:69038194-69038220; SaCas9
ttgggtatttgaggagttgg

SEQ ID NO: 16763 - DNA, 19 bp, Artificial Sequence
  Synthetic: FXN 3 forward 9:69038195-69038220; SaCas9
tgggtatttgaggagttgg

SEQ ID NO: 16764 - DNA, 18 bp, Artificial Sequence
  Synthetic: FXN 3 forward 9:69038196-69038220; SaCas9
gggtatttgaggagttgg

SEQ ID NO: 16765 - DNA, 25 bp, Artificial Sequence
  Synthetic: FXN 3 forward 9:69038206-69038237; SaCas9
ggagttgggtgggtggcagtggcaa

SEQ ID NO: 16766 - DNA, 24 bp, Artificial Sequence
  Synthetic: FXN 3 forward 9:69038207-69038237; SaCas9
gagttgggtgggtggcagtggcaa

SEQ ID NO: 16767 - DNA, 23 bp, Artificial Sequence
  Synthetic: FXN 3 forward 9:69038208-69038237; SaCas9
agttgggtgggtggcagtggcaa

SEQ ID NO: 16768 - DNA, 22 bp, Artificial Sequence
  Synthetic: FXN 3 forward 9:69038209-69038237; SaCas9
gttgggtgggtggcagtggcaa

SEQ ID NO: 16769 - DNA, 21 bp, Artificial Sequence
  Synthetic: FXN 3 forward 9:69038210-69038237; SaCas9
ttgggtgggtggcagtggcaa

SEQ ID NO: 16770 - DNA, 20 bp, Artificial Sequence
  Synthetic: FXN 3 forward 9:69038211-69038237; SaCas9
tgggtgggtggcagtggcaa

SEQ ID NO: 16771 - DNA, 19 bp, Artificial Sequence
  Synthetic: FXN 3 forward 9:69038212-69038237; SaCas9
gggtgggtggcagtggcaa

SEQ ID NO: 16772 - DNA, 18 bp, Artificial Sequence
  Synthetic: FXN 3 forward 9:69038213-69038237; SaCas9
ggtgggtggcagtggcaa

SEQ ID NO: 16773 - DNA, 25 bp, Artificial Sequence
  Synthetic: FXN 3 forward 9:69038207-69038238; SaCas9
gagttgggtgggtggcagtggcaac

SEQ ID NO: 16774 - DNA, 24 bp, Artificial Sequence
  Synthetic: FXN 3 forward 9:69038208-69038238; SaCas9
agttgggtgggtggcagtggcaac

SEQ ID NO: 16775 - DNA, 23 bp, Artificial Sequence
  Synthetic: FXN 3 forward 9:69038209-69038238; SaCas9
gttgggtgggtggcagtggcaac

SEQ ID NO: 16776 - DNA, 22 bp, Artificial Sequence
  Synthetic: FXN 3 forward 9:69038210-69038238; SaCas9
ttgggtgggtggcagtggcaac

SEQ ID NO: 16777 - DNA, 21 bp, Artificial Sequence
  Synthetic: FXN 3 forward 9:69038211-69038238; SaCas9
tgggtgggtggcagtggcaac

SEQ ID NO: 16778 - DNA, 20 bp, Artificial Sequence
  Synthetic: FXN 3 forward 9:69038212-69038238; SaCas9
gggtgggtggcagtggcaac

SEQ ID NO: 16779 - DNA, 19 bp, Artificial Sequence
  Synthetic: FXN 3 forward 9:69038213-69038238; SaCas9
ggtgggtggcagtggcaac

SEQ ID NO: 16780 - DNA, 18 bp, Artificial Sequence
  Synthetic: FXN 3 forward 9:69038214-69038238; SaCas9
gtgggtggcagtggcaac

SEQ ID NO: 16781 - DNA, 25 bp, Artificial Sequence
  Synthetic: FXN 3 reverse 9:69038242-69038273; SaCas9
cagtcagggctttaaaataattaaa

SEQ ID NO: 16782 - DNA, 24 bp, Artificial Sequence
  Synthetic: FXN 3 reverse 9:69038243-69038273; SaCas9
agtcagggctttaaaataattaaa

SEQ ID NO: 16783 - DNA, 23 bp, Artificial Sequence
  Synthetic: FXN 3 reverse 9:69038244-69038273; SaCas9
gtcagggctttaaaataattaaa

SEQ ID NO: 16784 - DNA, 22 bp, Artificial Sequence
  Synthetic: FXN 3 reverse 9:69038245-69038273; SaCas9
tcagggctttaaaataattaaa

SEQ ID NO: 16785 - DNA, 21 bp, Artificial Sequence
  Synthetic: FXN 3 reverse 9:69038246-69038273; SaCas9
cagggctttaaaataattaaa

SEQ ID NO: 16786 - DNA, 20 bp, Artificial Sequence
  Synthetic: FXN 3 reverse 9:69038247-69038273; SaCas9
agggctttaaaataattaaa

SEQ ID NO: 16787 - DNA, 19 bp, Artificial Sequence
  Synthetic: FXN 3 reverse 9:69038248-69038273; SaCas9
gggctttaaaataattaaa

SEQ ID NO: 16788 - DNA, 18 bp, Artificial Sequence
  Synthetic: FXN 3 reverse 9:69038249-69038273; SaCas9
ggctttaaaataattaaa

SEQ ID NO: 16789 - DNA, 25 bp, Artificial Sequence
  Synthetic: FXN 3 forward 9:69038250-69038281; SaCas9
taattattttaaagccctgactgtc

SEQ ID NO: 16790 - DNA, 24 bp, Artificial Sequence
  Synthetic: FXN 3 forward 9:69038251-69038281; SaCas9
aattattttaaagccctgactgtc

SEQ ID NO: 16791 - DNA, 23 bp, Artificial Sequence
  Synthetic: FXN 3 forward 9:69038252-69038281; SaCas9
attattttaaagccctgactgtc

SEQ ID NO: 16792 - DNA, 22 bp, Artificial Sequence
  Synthetic: FXN 3 forward 9:69038253-69038281; SaCas9
ttattttaaagccctgactgtc

SEQ ID NO: 16793 - DNA, 21 bp, Artificial Sequence
  Synthetic: FXN 3 forward 9:69038254-69038281; SaCas9
tattttaaagccctgactgtc

SEQ ID NO: 16794 - DNA, 20 bp, Artificial Sequence
  Synthetic: FXN 3 forward 9:69038255-69038281; SaCas9
attttaaagccctgactgtc

SEQ ID NO: 16795 - DNA, 19 bp, Artificial Sequence
  Synthetic: FXN 3 forward 9:69038256-69038281; SaCas9
ttttaaagccctgactgtc

SEQ ID NO: 16796 - DNA, 18 bp, Artificial Sequence
  Synthetic: FXN 3 forward 9:69038257-69038281; SaCas9
tttaaagccctgactgtc

SEQ ID NO: 16797 - DNA, 25 bp, Artificial Sequence
  Synthetic: FXN 3 reverse 9:69038263-69038294; SaCas9
gagcttagggtcaatccaggacagt

SEQ ID NO: 16798 - DNA, 24 bp, Artificial Sequence
  Synthetic: FXN 3 reverse 9:69038264-69038294; SaCas9
agcttagggtcaatccaggacagt

SEQ ID NO: 16799 - DNA, 23 bp, Artificial Sequence
  Synthetic: FXN 3 reverse 9:69038265-69038294; SaCas9
gcttagggtcaatccaggacagt

SEQ ID NO: 16800 - DNA, 22 bp, Artificial Sequence
  Synthetic: FXN 3 reverse 9:69038266-69038294; SaCas9
cttagggtcaatccaggacagt

SEQ ID NO: 16801 - DNA, 21 bp, Artificial Sequence
  Synthetic: FXN 3 reverse 9:69038267-69038294; SaCas9
ttagggtcaatccaggacagt

SEQ ID NO: 16802 - DNA, 20 bp, Artificial Sequence
  Synthetic: FXN 3 reverse 9:69038268-69038294; SaCas9
tagggtcaatccaggacagt

SEQ ID NO: 16803 - DNA, 19 bp, Artificial Sequence
  Synthetic: FXN 3 reverse 9:69038269-69038294; SaCas9
agggtcaatccaggacagt

SEQ ID NO: 16804 - DNA, 18 bp, Artificial Sequence
  Synthetic: FXN 3 reverse 9:69038270-69038294; SaCas9
gggtcaatccaggacagt

SEQ ID NO: 16805 - DNA, 25 bp, Artificial Sequence
  Synthetic: FXN 3 reverse 9:69038272-69038303; SaCas9
gaccagggggagcttagggtcaatc

SEQ ID NO: 16806 - DNA, 24 bp, Artificial Sequence
  Synthetic: FXN 3 reverse 9:69038273-69038303; SaCas9
accagggggagcttagggtcaatc

SEQ ID NO: 16807 - DNA, 23 bp, Artificial Sequence
  Synthetic: FXN 3 reverse 9:69038274-69038303; SaCas9
ccagggggagcttagggtcaatc

SEQ ID NO: 16808 - DNA, 22 bp, Artificial Sequence
  Synthetic: FXN 3 reverse 9:69038275-69038303; SaCas9
cagggggagcttagggtcaatc

SEQ ID NO: 16809 - DNA, 21 bp, Artificial Sequence
  Synthetic: FXN 3 reverse 9:69038276-69038303; SaCas9
agggggagcttagggtcaatc

SEQ ID NO: 16810 - DNA, 20 bp, Artificial Sequence
  Synthetic: FXN 3 reverse 9:69038277-69038303; SaCas9
gggggagcttagggtcaatc

SEQ ID NO: 16811 - DNA, 19 bp, Artificial Sequence
  Synthetic: FXN 3 reverse 9:69038278-69038303; SaCas9
ggggagcttagggtcaatc

SEQ ID NO: 16812 - DNA, 18 bp, Artificial Sequence
  Synthetic: FXN 3 reverse 9:69038279-69038303; SaCas9
gggagcttagggtcaatc

SEQ ID NO: 16813 - DNA, 25 bp, Artificial Sequence
  Synthetic: FXN 3 reverse 9:69038283-69038314; SaCas9
tgaattttggagaccagggggagct

SEQ ID NO: 16814 - DNA, 24 bp, Artificial Sequence
  Synthetic: FXN 3 reverse 9:69038284-69038314; SaCas9
gaattttggagaccagggggagct

SEQ ID NO: 16815 - DNA, 23 bp, Artificial Sequence
  Synthetic: FXN 3 reverse 9:69038285-69038314; SaCas9
aattttggagaccagggggagct

SEQ ID NO: 16816 - DNA, 22 bp, Artificial Sequence
  Synthetic: FXN 3 reverse 9:69038286-69038314; SaCas9
attttggagaccagggggagct

SEQ ID NO: 16817 - DNA, 21 bp, Artificial Sequence
  Synthetic: FXN 3 reverse 9:69038287-69038314; SaCas9
ttttggagaccagggggagct

SEQ ID NO: 16818 - DNA, 20 bp, Artificial Sequence
  Synthetic: FXN 3 reverse 9:69038288-69038314; SaCas9
tttggagaccagggggagct

SEQ ID NO: 16819 - DNA, 19 bp, Artificial Sequence
  Synthetic: FXN 3 reverse 9:69038289-69038314; SaCas9
ttggagaccagggggagct

SEQ ID NO: 16820 - DNA, 18 bp, Artificial Sequence
  Synthetic: FXN 3 reverse 9:69038290-69038314; SaCas9
tggagaccagggggagct

SEQ ID NO: 16821 - DNA, 25 bp, Artificial Sequence
  Synthetic: FXN 3 forward 9:69038290-69038321; SaCas9
gctccccctggtctccaaaattcat

SEQ ID NO: 16822 - DNA, 24 bp, Artificial Sequence
  Synthetic: FXN 3 forward 9:69038291-69038321; SaCas9
ctccccctggtctccaaaattcat

SEQ ID NO: 16823 - DNA, 23 bp, Artificial Sequence
  Synthetic: FXN 3 forward 9:69038292-69038321; SaCas9
tccccctggtctccaaaattcat

SEQ ID NO: 16824 - DNA, 22 bp, Artificial Sequence
  Synthetic: FXN 3 forward 9:69038293-69038321; SaCas9
ccccctggtctccaaaattcat

SEQ ID NO: 16825 - DNA, 21 bp, Artificial Sequence
  Synthetic: FXN 3 forward 9:69038294-69038321; SaCas9
cccctggtctccaaaattcat

SEQ ID NO: 16826 - DNA, 20 bp, Artificial Sequence
  Synthetic: FXN 3 forward 9:69038295-69038321; SaCas9
ccctggtctccaaaattcat

SEQ ID NO: 16827 - DNA, 19 bp, Artificial Sequence
  Synthetic: FXN 3 forward 9:69038296-69038321; SaCas9
cctggtctccaaaattcat

SEQ ID NO: 16828 - DNA, 18 bp, Artificial Sequence
  Synthetic: FXN 3 forward 9:69038297-69038321; SaCas9
ctggtctccaaaattcat

SEQ ID NO: 16829 - DNA, 25 bp, Artificial Sequence
  Synthetic: FXN 3 reverse 9:69038290-69038321; SaCas9
tttctgatgaattttggagaccagg

SEQ ID NO: 16830 - DNA, 24 bp, Artificial Sequence
  Synthetic: FXN 3 reverse 9:69038291-69038321; SaCas9
ttctgatgaattttggagaccagg

SEQ ID NO: 16831 - DNA, 23 bp, Artificial Sequence
  Synthetic: FXN 3 reverse 9:69038292-69038321; SaCas9
tctgatgaattttggagaccagg

SEQ ID NO: 16832 - DNA, 22 bp, Artificial Sequence
  Synthetic: FXN 3 reverse 9:69038293-69038321; SaCas9
ctgatgaattttggagaccagg

SEQ ID NO: 16833 - DNA, 21 bp, Artificial Sequence
  Synthetic: FXN 3 reverse 9:69038294-69038321; SaCas9
tgatgaattttggagaccagg

SEQ ID NO: 16834 - DNA, 20 bp, Artificial Sequence
  Synthetic: FXN 3 reverse 9:69038295-69038321; SaCas9
gatgaattttggagaccagg

SEQ ID NO: 16835 - DNA, 19 bp, Artificial Sequence
  Synthetic: FXN 3 reverse 9:69038296-69038321; SaCas9
atgaattttggagaccagg

SEQ ID NO: 16836 - DNA, 18 bp, Artificial Sequence
  Synthetic: FXN 3 reverse 9:69038297-69038321; SaCas9
tgaattttggagaccagg

SEQ ID NO: 16837 - DNA, 25 bp, Artificial Sequence
  Synthetic: FXN 3 reverse 9:69038291-69038322; SaCas9
gtttctgatgaattttggagaccag

SEQ ID NO: 16838 - DNA, 24 bp, Artificial Sequence
  Synthetic: FXN 3 reverse 9:69038292-69038322; SaCas9
tttctgatgaattttggagaccag

SEQ ID NO: 16839 - DNA, 23 bp, Artificial Sequence
  Synthetic: FXN 3 reverse 9:69038293-69038322; SaCas9
ttctgatgaattttggagaccag

SEQ ID NO: 16840 - DNA, 22 bp, Artificial Sequence
  Synthetic: FXN 3 reverse 9:69038294-69038322; SaCas9
tctgatgaattttggagaccag

SEQ ID NO: 16841 - DNA, 21 bp, Artificial Sequence
  Synthetic: FXN 3 reverse 9:69038295-69038322; SaCas9
ctgatgaattttggagaccag

SEQ ID NO: 16842 - DNA, 20 bp, Artificial Sequence
  Synthetic: FXN 3 reverse 9:69038296-69038322; SaCas9
tgatgaattttggagaccag

SEQ ID NO: 16843 - DNA, 19 bp, Artificial Sequence
  Synthetic: FXN 3 reverse 9:69038297-69038322; SaCas9
gatgaattttggagaccag

SEQ ID NO: 16844 - DNA, 18 bp, Artificial Sequence
  Synthetic: FXN 3 reverse 9:69038298-69038322; SaCas9
atgaattttggagaccag

SEQ ID NO: 16845 - DNA, 25 bp, Artificial Sequence
  Synthetic: FXN 3 reverse 9:69038292-69038323; SaCas9
agtttctgatgaattttggagacca

SEQ ID NO: 16846 - DNA, 24 bp, Artificial Sequence
  Synthetic: FXN 3 reverse 9:69038293-69038323; SaCas9
gtttctgatgaattttggagacca

SEQ ID NO: 16847 - DNA, 23 bp, Artificial Sequence
  Synthetic: FXN 3 reverse 9:69038294-69038323; SaCas9
tttctgatgaattttggagacca

SEQ ID NO: 16848 - DNA, 22 bp, Artificial Sequence
  Synthetic: FXN 3 reverse 9:69038295-69038323; SaCas9
ttctgatgaattttggagacca

SEQ ID NO: 16849 - DNA, 21 bp, Artificial Sequence
  Synthetic: FXN 3 reverse 9:69038296-69038323; SaCas9
tctgatgaattttggagacca

SEQ ID NO: 16850 - DNA, 20 bp, Artificial Sequence
  Synthetic: FXN 3 reverse 9:69038297-69038323; SaCas9
ctgatgaattttggagacca

SEQ ID NO: 16851 - DNA, 19 bp, Artificial Sequence
  Synthetic: FXN 3 reverse 9:69038298-69038323; SaCas9
tgatgaattttggagacca

SEQ ID NO: 16852 - DNA, 18 bp, Artificial Sequence
  Synthetic: FXN 3 reverse 9:69038299-69038323; SaCas9
gatgaattttggagacca

SEQ ID NO: 16853 - DNA, 25 bp, Artificial Sequence
  Synthetic: FXN 3 reverse 9:69038293-69038324; SaCas9
cagtttctgatgaattttggagacc

SEQ ID NO: 16854 - DNA, 24 bp, Artificial Sequence
  Synthetic: FXN 3 reverse 9:69038294-69038324; SaCas9
agtttctgatgaattttggagacc

SEQ ID NO: 16855 - DNA, 23 bp, Artificial Sequence
  Synthetic: FXN 3 reverse 9:69038295-69038324; SaCas9
gtttctgatgaattttggagacc

SEQ ID NO: 16856 - DNA, 22 bp, Artificial Sequence
  Synthetic: FXN 3 reverse 9:69038296-69038324; SaCas9
tttctgatgaattttggagacc

SEQ ID NO: 16857 - DNA, 21 bp, Artificial Sequence
  Synthetic: FXN 3 reverse 9:69038297-69038324; SaCas9
ttctgatgaattttggagacc

SEQ ID NO: 16858 - DNA, 20 bp, Artificial Sequence
  Synthetic: FXN 3 reverse 9:69038298-69038324; SaCas9
tctgatgaattttggagacc

SEQ ID NO: 16859 - DNA, 19 bp, Artificial Sequence
  Synthetic: FXN 3 reverse 9:69038299-69038324; SaCas9
ctgatgaattttggagacc

SEQ ID NO: 16860 - DNA, 18 bp, Artificial Sequence
  Synthetic: FXN 3 reverse 9:69038300-69038324; SaCas9
tgatgaattttggagacc

SEQ ID NO: 16861 - DNA, 25 bp, Artificial Sequence
  Synthetic: FXN 3 reverse 9:69038294-69038325; SaCas9
tcagtttctgatgaattttggagac

SEQ ID NO: 16862 - DNA, 24 bp, Artificial Sequence
  Synthetic: FXN 3 reverse 9:69038295-69038325; SaCas9
cagtttctgatgaattttggagac

SEQ ID NO: 16863 - DNA, 23 bp, Artificial Sequence
  Synthetic: FXN 3 reverse 9:69038296-69038325; SaCas9
agtttctgatgaattttggagac

SEQ ID NO: 16864 - DNA, 22 bp, Artificial Sequence
  Synthetic: FXN 3 reverse 9:69038297-69038325; SaCas9
gtttctgatgaattttggagac

SEQ ID NO: 16865 - DNA, 21 bp, Artificial Sequence
  Synthetic: FXN 3 reverse 9:69038298-69038325; SaCas9
tttctgatgaattttggagac

SEQ ID NO: 16866 - DNA, 20 bp, Artificial Sequence
  Synthetic: FXN 3 reverse 9:69038299-69038325; SaCas9
ttctgatgaattttggagac

SEQ ID NO: 16867 - DNA, 19 bp, Artificial Sequence
  Synthetic: FXN 3 reverse 9:69038300-69038325; SaCas9
tctgatgaattttggagac

SEQ ID NO: 16868 - DNA, 18 bp, Artificial Sequence
  Synthetic: FXN 3 reverse 9:69038301-69038325; SaCas9
ctgatgaattttggagac

SEQ ID NO: 16869 - DNA, 25 bp, Artificial Sequence
  Synthetic: FXN 3 forward 9:69038296-69038327; SaCas9
cctggtctccaaaattcatcagaaa

SEQ ID NO: 16870 - DNA, 24 bp, Artificial Sequence
  Synthetic: FXN 3 forward 9:69038297-69038327; SaCas9
ctggtctccaaaattcatcagaaa

SEQ ID NO: 16871 - DNA, 23 bp, Artificial Sequence
  Synthetic: FXN 3 forward 9:69038298-69038327; SaCas9
tggtctccaaaattcatcagaaa

SEQ ID NO: 16872 - DNA, 22 bp, Artificial Sequence
  Synthetic: FXN 3 forward 9:69038299-69038327; SaCas9
ggtctccaaaattcatcagaaa

SEQ ID NO: 16873 - DNA, 21 bp, Artificial Sequence
  Synthetic: FXN 3 forward 9:69038300-69038327; SaCas9
gtctccaaaattcatcagaaa

SEQ ID NO: 16874 - DNA, 20 bp, Artificial Sequence
  Synthetic: FXN 3 forward 9:69038301-69038327; SaCas9
tctccaaaattcatcagaaa

SEQ ID NO: 16875 - DNA, 19 bp, Artificial Sequence
  Synthetic: FXN 3 forward 9:69038302-69038327; SaCas9
ctccaaaattcatcagaaa

SEQ ID NO: 16876 - DNA, 18 bp, Artificial Sequence
  Synthetic: FXN 3 forward 9:69038303-69038327; SaCas9
tccaaaattcatcagaaa

SEQ ID NO: 16877 - DNA, 25 bp, Artificial Sequence
  Synthetic: FXN 3 reverse 9:69038301-69038332; SaCas9
agtgaactcagtttctgatgaattt

SEQ ID NO: 16878 - DNA, 24 bp, Artificial Sequence
  Synthetic: FXN 3 reverse 9:69038302-69038332; SaCas9
gtgaactcagtttctgatgaattt

SEQ ID NO: 16879 - DNA, 23 bp, Artificial Sequence
  Synthetic: FXN 3 reverse 9:69038303-69038332; SaCas9
tgaactcagtttctgatgaattt

SEQ ID NO: 16880 - DNA, 22 bp, Artificial Sequence
  Synthetic: FXN 3 reverse 9:69038304-69038332; SaCas9
gaactcagtttctgatgaattt

SEQ ID NO: 16881 - DNA, 21 bp, Artificial Sequence
  Synthetic: FXN 3 reverse 9:69038305-69038332; SaCas9
aactcagtttctgatgaattt

SEQ ID NO: 16882 - DNA, 20 bp, Artificial Sequence
  Synthetic: FXN 3 reverse 9:69038306-69038332; SaCas9
actcagtttctgatgaattt

SEQ ID NO: 16883 - DNA, 19 bp, Artificial Sequence
  Synthetic: FXN 3 reverse 9:69038307-69038332; SaCas9
ctcagtttctgatgaattt

SEQ ID NO: 16884 - DNA, 18 bp, Artificial Sequence
  Synthetic: FXN 3 reverse 9:69038308-69038332; SaCas9
tcagtttctgatgaattt

SEQ ID NO: 16885 - DNA, 25 bp, Artificial Sequence
  Synthetic: FXN 3 reverse 9:69038302-69038333; SaCas9
aagtgaactcagtttctgatgaatt

SEQ ID NO: 16886 - DNA, 24 bp, Artificial Sequence
  Synthetic: FXN 3 reverse 9:69038303-69038333; SaCas9
agtgaactcagtttctgatgaatt

SEQ ID NO: 16887 - DNA, 23 bp, Artificial Sequence
  Synthetic: FXN 3 reverse 9:69038304-69038333; SaCas9
gtgaactcagtttctgatgaatt

SEQ ID NO: 16888 - DNA, 22 bp, Artificial Sequence
  Synthetic: FXN 3 reverse 9:69038305-69038333; SaCas9
tgaactcagtttctgatgaatt

SEQ ID NO: 16889 - DNA, 21 bp, Artificial Sequence
  Synthetic: FXN 3 reverse 9:69038306-69038333; SaCas9
gaactcagtttctgatgaatt

SEQ ID NO: 16890 - DNA, 20 bp, Artificial Sequence
  Synthetic: FXN 3 reverse 9:69038307-69038333; SaCas9
aactcagtttctgatgaatt

SEQ ID NO: 16891 - DNA, 19 bp, Artificial Sequence
  Synthetic: FXN 3 reverse 9:69038308-69038333; SaCas9
actcagtttctgatgaatt

SEQ ID NO: 16892 - DNA, 18 bp, Artificial Sequence
  Synthetic: FXN 3 reverse 9:69038309-69038333; SaCas9
ctcagtttctgatgaatt

SEQ ID NO: 16893 - DNA, 25 bp, Artificial Sequence
  Synthetic: FXN 3 forward 9:69038306-69038337; SaCas9
aaaattcatcagaaactgagttcac

SEQ ID NO: 16894 - DNA, 24 bp, Artificial Sequence
  Synthetic: FXN 3 forward 9:69038307-69038337; SaCas9
aaattcatcagaaactgagttcac

SEQ ID NO: 16895 - DNA, 23 bp, Artificial Sequence
  Synthetic: FXN 3 forward 9:69038308-69038337; SaCas9
aattcatcagaaactgagttcac

SEQ ID NO: 16896 - DNA, 22 bp, Artificial Sequence
  Synthetic: FXN 3 forward 9:69038309-69038337; SaCas9
attcatcagaaactgagttcac

SEQ ID NO: 16897 - DNA, 21 bp, Artificial Sequence
  Synthetic: FXN 3 forward 9:69038310-69038337; SaCas9
ttcatcagaaactgagttcac

SEQ ID NO: 16898 - DNA, 20 bp, Artificial Sequence
  Synthetic: FXN 3 forward 9:69038311-69038337; SaCas9
tcatcagaaactgagttcac

SEQ ID NO: 16899 - DNA, 19 bp, Artificial Sequence
  Synthetic: FXN 3 forward 9:69038312-69038337; SaCas9
catcagaaactgagttcac

SEQ ID NO: 16900 - DNA, 18 bp, Artificial Sequence
  Synthetic: FXN 3 forward 9:69038313-69038337; SaCas9
atcagaaactgagttcac

SEQ ID NO: 16901 - DNA, 25 bp, Artificial Sequence
  Synthetic: FXN 3 reverse 9:69038309-69038340; SaCas9
ggccttcaagtgaactcagtttctg

SEQ ID NO: 16902 - DNA, 24 bp, Artificial Sequence
  Synthetic: FXN 3 reverse 9:69038310-69038340; SaCas9
gccttcaagtgaactcagtttctg

SEQ ID NO: 16903 - DNA, 23 bp, Artificial Sequence
  Synthetic: FXN 3 reverse 9:69038311-69038340; SaCas9
ccttcaagtgaactcagtttctg

SEQ ID NO: 16904 - DNA, 22 bp, Artificial Sequence
  Synthetic: FXN 3 reverse 9:69038312-69038340; SaCas9
cttcaagtgaactcagtttctg

SEQ ID NO: 16905 - DNA, 21 bp, Artificial Sequence
  Synthetic: FXN 3 reverse 9:69038313-69038340; SaCas9
ttcaagtgaactcagtttctg

SEQ ID NO: 16906 - DNA, 20 bp, Artificial Sequence
  Synthetic: FXN 3 reverse 9:69038314-69038340; SaCas9
tcaagtgaactcagtttctg

SEQ ID NO: 16907 - DNA, 19 bp, Artificial Sequence
  Synthetic: FXN 3 reverse 9:69038315-69038340; SaCas9
caagtgaactcagtttctg

SEQ ID NO: 16908 - DNA, 18 bp, Artificial Sequence
  Synthetic: FXN 3 reverse 9:69038316-69038340; SaCas9
aagtgaactcagtttctg

SEQ ID NO: 16909 - DNA, 25 bp, Artificial Sequence
  Synthetic: FXN 3 reverse 9:69038325-69038356; SaCas9
aaaagggtggggaagaggccttcaa

SEQ ID NO: 16910 - DNA, 24 bp, Artificial Sequence
  Synthetic: FXN 3 reverse 9:69038326-69038356; SaCas9
aaagggtggggaagaggccttcaa

SEQ ID NO: 16911 - DNA, 23 bp, Artificial Sequence
  Synthetic: FXN 3 reverse 9:69038327-69038356; SaCas9
aagggtggggaagaggccttcaa

SEQ ID NO: 16912 - DNA, 22 bp, Artificial Sequence
  Synthetic: FXN 3 reverse 9:69038328-69038356; SaCas9
agggtggggaagaggccttcaa

SEQ ID NO: 16913 - DNA, 21 bp, Artificial Sequence
  Synthetic: FXN 3 reverse 9:69038329-69038356; SaCas9
gggtggggaagaggccttcaa

SEQ ID NO: 16914 - DNA, 20 bp, Artificial Sequence
  Synthetic: FXN 3 reverse 9:69038330-69038356; SaCas9
ggtggggaagaggccttcaa

SEQ ID NO: 16915 - DNA, 19 bp, Artificial Sequence
  Synthetic: FXN 3 reverse 9:69038331-69038356; SaCas9
gtggggaagaggccttcaa

SEQ ID NO: 16916 - DNA, 18 bp, Artificial Sequence
  Synthetic: FXN 3 reverse 9:69038332-69038356; SaCas9
tggggaagaggccttcaa

SEQ ID NO: 16917 - DNA, 25 bp, Artificial Sequence
  Synthetic: FXN 3 reverse 9:69038338-69038369; SaCas9
gcaaggggtggagaaaagggtgggg

SEQ ID NO: 16918 - DNA, 24 bp, Artificial Sequence
  Synthetic: FXN 3 reverse 9:69038339-69038369; SaCas9
caaggggtggagaaaagggtgggg

SEQ ID NO: 16919 - DNA, 23 bp, Artificial Sequence
  Synthetic: FXN 3 reverse 9:69038340-69038369; SaCas9
aaggggtggagaaaagggtgggg

SEQ ID NO: 16920 - DNA, 22 bp, Artificial Sequence
  Synthetic: FXN 3 reverse 9:69038341-69038369; SaCas9
aggggtggagaaaagggtgggg

SEQ ID NO: 16921 - DNA, 21 bp, Artificial Sequence
  Synthetic: FXN 3 reverse 9:69038342-69038369; SaCas9
ggggtggagaaaagggtgggg

SEQ ID NO: 16922 - DNA, 20 bp, Artificial Sequence
  Synthetic: FXN 3 reverse 9:69038343-69038369; SaCas9
gggtggagaaaagggtgggg

SEQ ID NO: 16923 - DNA, 19 bp, Artificial Sequence
  Synthetic: FXN 3 reverse 9:69038344-69038369; SaCas9
ggtggagaaaagggtgggg

SEQ ID NO: 16924 - DNA, 18 bp, Artificial Sequence
  Synthetic: FXN 3 reverse 9:69038345-69038369; SaCas9
gtggagaaaagggtgggg

SEQ ID NO: 16925 - DNA, 25 bp, Artificial Sequence
  Synthetic: FXN 3 reverse 9:69038341-69038372; SaCas9
gatgcaaggggtggagaaaagggtg

SEQ ID NO: 16926 - DNA, 24 bp, Artificial Sequence
  Synthetic: FXN 3 reverse 9:69038342-69038372; SaCas9
atgcaaggggtggagaaaagggtg

SEQ ID NO: 16927 - DNA, 23 bp, Artificial Sequence
  Synthetic: FXN 3 reverse 9:69038343-69038372; SaCas9
tgcaaggggtggagaaaagggtg

SEQ ID NO: 16928 - DNA, 22 bp, Artificial Sequence
  Synthetic: FXN 3 reverse 9:69038344-69038372; SaCas9
gcaaggggtggagaaaagggtg

SEQ ID NO: 16929 - DNA, 21 bp, Artificial Sequence
  Synthetic: FXN 3 reverse 9:69038345-69038372; SaCas9
caaggggtggagaaaagggtg

SEQ ID NO: 16930 - DNA, 20 bp, Artificial Sequence
  Synthetic: FXN 3 reverse 9:69038346-69038372; SaCas9
aaggggtggagaaaagggtg

SEQ ID NO: 16931 - DNA, 19 bp, Artificial Sequence
  Synthetic: FXN 3 reverse 9:69038347-69038372; SaCas9
aggggtggagaaaagggtg

SEQ ID NO: 16932 - DNA, 18 bp, Artificial Sequence
  Synthetic: FXN 3 reverse 9:69038348-69038372; SaCas9
ggggtggagaaaagggtg

SEQ ID NO: 16933 - DNA, 25 bp, Artificial Sequence
  Synthetic: FXN 3 reverse 9:69038342-69038373; SaCas9
agatgcaaggggtggagaaaagggt

SEQ ID NO: 16934 - DNA, 24 bp, Artificial Sequence
  Synthetic: FXN 3 reverse 9:69038343-69038373; SaCas9
gatgcaaggggtggagaaaagggt

SEQ ID NO: 16935 - DNA, 23 bp, Artificial Sequence
  Synthetic: FXN 3 reverse 9:69038344-69038373; SaCas9
atgcaaggggtggagaaaagggt

SEQ ID NO: 16936 - DNA, 22 bp, Artificial Sequence
  Synthetic: FXN 3 reverse 9:69038345-69038373; SaCas9
tgcaaggggtggagaaaagggt

SEQ ID NO: 16937 - DNA, 21 bp, Artificial Sequence
  Synthetic: FXN 3 reverse 9:69038346-69038373; SaCas9
gcaaggggtggagaaaagggt

SEQ ID NO: 16938 - DNA, 20 bp, Artificial Sequence
  Synthetic: FXN 3 reverse 9:69038347-69038373; SaCas9
caaggggtggagaaaagggt

SEQ ID NO: 16939 - DNA, 19 bp, Artificial Sequence
  Synthetic: FXN 3 reverse 9:69038348-69038373; SaCas9
aaggggtggagaaaagggt

SEQ ID NO: 16940 - DNA, 18 bp, Artificial Sequence
  Synthetic: FXN 3 reverse 9:69038349-69038373; SaCas9
aggggtggagaaaagggt

SEQ ID NO: 16941 - DNA, 25 bp, Artificial Sequence
  Synthetic: FXN 3 reverse 9:69038343-69038374; SaCas9
tagatgcaaggggtggagaaaaggg

SEQ ID NO: 16942 - DNA, 24 bp, Artificial Sequence
  Synthetic: FXN 3 reverse 9:69038344-69038374; SaCas9
agatgcaaggggtggagaaaaggg

SEQ ID NO: 16943 - DNA, 23 bp, Artificial Sequence
  Synthetic: FXN 3 reverse 9:69038345-69038374; SaCas9
gatgcaaggggtggagaaaaggg

SEQ ID NO: 16944 - DNA, 22 bp, Artificial Sequence
  Synthetic: FXN 3 reverse 9:69038346-69038374; SaCas9
atgcaaggggtggagaaaaggg

SEQ ID NO: 16945 - DNA, 21 bp, Artificial Sequence
  Synthetic: FXN 3 reverse 9:69038347-69038374; SaCas9
tgcaaggggtggagaaaaggg

SEQ ID NO: 16946 - DNA, 20 bp, Artificial Sequence
  Synthetic: FXN 3 reverse 9:69038348-69038374; SaCas9
gcaaggggtggagaaaaggg

SEQ ID NO: 16947 - DNA, 19 bp, Artificial Sequence
  Synthetic: FXN 3 reverse 9:69038349-69038374; SaCas9
caaggggtggagaaaaggg

SEQ ID NO: 16948 - DNA, 18 bp, Artificial Sequence
  Synthetic: FXN 3 reverse 9:69038350-69038374; SaCas9
aaggggtggagaaaaggg

SEQ ID NO: 16949 - DNA, 25 bp, Artificial Sequence
  Synthetic: FXN 3 reverse 9:69038344-69038375; SaCas9
gtagatgcaaggggtggagaaaagg

SEQ ID NO: 16950 - DNA, 24 bp, Artificial Sequence
  Synthetic: FXN 3 reverse 9:69038345-69038375; SaCas9
tagatgcaaggggtggagaaaagg

SEQ ID NO: 16951 - DNA, 23 bp, Artificial Sequence
  Synthetic: FXN 3 reverse 9:69038346-69038375; SaCas9
agatgcaaggggtggagaaaagg

SEQ ID NO: 16952 - DNA, 22 bp, Artificial Sequence
  Synthetic: FXN 3 reverse 9:69038347-69038375; SaCas9
gatgcaaggggtggagaaaagg

SEQ ID NO: 16953 - DNA, 21 bp, Artificial Sequence
  Synthetic: FXN 3 reverse 9:69038348-69038375; SaCas9
atgcaaggggtggagaaaagg

SEQ ID NO: 16954 - DNA, 20 bp, Artificial Sequence
  Synthetic: FXN 3 reverse 9:69038349-69038375; SaCas9
tgcaaggggtggagaaaagg

SEQ ID NO: 16955 - DNA, 19 bp, Artificial Sequence
  Synthetic: FXN 3 reverse 9:69038350-69038375; SaCas9
gcaaggggtggagaaaagg

SEQ ID NO: 16956 - DNA, 18 bp, Artificial Sequence
  Synthetic: FXN 3 reverse 9:69038351-69038375; SaCas9
caaggggtggagaaaagg

SEQ ID NO: 16957 - DNA, 25 bp, Artificial Sequence
  Synthetic: FXN 3 reverse 9:69038348-69038379; SaCas9
agaagtagatgcaaggggtggagaa

SEQ ID NO: 16958 - DNA, 24 bp, Artificial Sequence
  Synthetic: FXN 3 reverse 9:69038349-69038379; SaCas9
gaagtagatgcaaggggtggagaa

SEQ ID NO: 16959 - DNA, 23 bp, Artificial Sequence
  Synthetic: FXN 3 reverse 9:69038350-69038379; SaCas9
aagtagatgcaaggggtggagaa

SEQ ID NO: 16960 - DNA, 22 bp, Artificial Sequence
  Synthetic: FXN 3 reverse 9:69038351-69038379; SaCas9
agtagatgcaaggggtggagaa

SEQ ID NO: 16961 - DNA, 21 bp, Artificial Sequence
  Synthetic: FXN 3 reverse 9:69038352-69038379; SaCas9
gtagatgcaaggggtggagaa

SEQ ID NO: 16962 - DNA, 20 bp, Artificial Sequence
  Synthetic: FXN 3 reverse 9:69038353-69038379; SaCas9
tagatgcaaggggtggagaa

SEQ ID NO: 16963 - DNA, 19 bp, Artificial Sequence
  Synthetic: FXN 3 reverse 9:69038354-69038379; SaCas9
agatgcaaggggtggagaa

SEQ ID NO: 16964 - DNA, 18 bp, Artificial Sequence
  Synthetic: FXN 3 reverse 9:69038355-69038379; SaCas9
gatgcaaggggtggagaa

SEQ ID NO: 16965 - DNA, 25 bp, Artificial Sequence
  Synthetic: FXN 3 reverse 9:69038353-69038384; SaCas9
gctttagaagtagatgcaaggggtg

SEQ ID NO: 16966 - DNA, 24 bp, Artificial Sequence
  Synthetic: FXN 3 reverse 9:69038354-69038384; SaCas9
ctttagaagtagatgcaaggggtg

SEQ ID NO: 16967 - DNA, 23 bp, Artificial Sequence
  Synthetic: FXN 3 reverse 9:69038355-69038384; SaCas9
tttagaagtagatgcaaggggtg

SEQ ID NO: 16968 - DNA, 22 bp, Artificial Sequence
  Synthetic: FXN 3 reverse 9:69038356-69038384; SaCas9
ttagaagtagatgcaaggggtg

SEQ ID NO: 16969 - DNA, 21 bp, Artificial Sequence
  Synthetic: FXN 3 reverse 9:69038357-69038384; SaCas9
tagaagtagatgcaaggggtg

SEQ ID NO: 16970 - DNA, 20 bp, Artificial Sequence
  Synthetic: FXN 3 reverse 9:69038358-69038384; SaCas9
agaagtagatgcaaggggtg

SEQ ID NO: 16971 - DNA, 19 bp, Artificial Sequence
  Synthetic: FXN 3 reverse 9:69038359-69038384; SaCas9
gaagtagatgcaaggggtg

SEQ ID NO: 16972 - DNA, 18 bp, Artificial Sequence
  Synthetic: FXN 3 reverse 9:69038360-69038384; SaCas9
aagtagatgcaaggggtg

SEQ ID NO: 16973 - DNA, 25 bp, Artificial Sequence
  Synthetic: FXN 3 reverse 9:69038355-69038386; SaCas9
ctgctttagaagtagatgcaagggg

SEQ ID NO: 16974 - DNA, 24 bp, Artificial Sequence
  Synthetic: FXN 3 reverse 9:69038356-69038386; SaCas9
tgctttagaagtagatgcaagggg

SEQ ID NO: 16975 - DNA, 23 bp, Artificial Sequence
  Synthetic: FXN 3 reverse 9:69038357-69038386; SaCas9
gctttagaagtagatgcaagggg

SEQ ID NO: 16976 - DNA, 22 bp, Artificial Sequence
  Synthetic: FXN 3 reverse 9:69038358-69038386; SaCas9
ctttagaagtagatgcaagggg

SEQ ID NO: 16977 - DNA, 21 bp, Artificial Sequence
  Synthetic: FXN 3 reverse 9:69038359-69038386; SaCas9
tttagaagtagatgcaagggg

SEQ ID NO: 16978 - DNA, 20 bp, Artificial Sequence
  Synthetic: FXN 3 reverse 9:69038360-69038386; SaCas9
ttagaagtagatgcaagggg

SEQ ID NO: 16979 - DNA, 19 bp, Artificial Sequence
  Synthetic: FXN 3 reverse 9:69038361-69038386; SaCas9
tagaagtagatgcaagggg

SEQ ID NO: 16980 - DNA, 18 bp, Artificial Sequence
  Synthetic: FXN 3 reverse 9:69038362-69038386; SaCas9
agaagtagatgcaagggg

SEQ ID NO: 16981 - DNA, 25 bp, Artificial Sequence
  Synthetic: FXN 3 reverse 9:69038356-69038387; SaCas9
gctgctttagaagtagatgcaaggg

SEQ ID NO: 16982 - DNA, 24 bp, Artificial Sequence
  Synthetic: FXN 3 reverse 9:69038357-69038387; SaCas9
ctgctttagaagtagatgcaaggg

SEQ ID NO: 16983 - DNA, 23 bp, Artificial Sequence
  Synthetic: FXN 3 reverse 9:69038358-69038387; SaCas9
tgctttagaagtagatgcaaggg

SEQ ID NO: 16984 - DNA, 22 bp, Artificial Sequence
  Synthetic: FXN 3 reverse 9:69038359-69038387; SaCas9
gctttagaagtagatgcaaggg

SEQ ID NO: 16985 - DNA, 21 bp, Artificial Sequence
  Synthetic: FXN 3 reverse 9:69038360-69038387; SaCas9
ctttagaagtagatgcaaggg

SEQ ID NO: 16986 - DNA, 20 bp, Artificial Sequence
  Synthetic: FXN 3 reverse 9:69038361-69038387; SaCas9
tttagaagtagatgcaaggg

SEQ ID NO: 16987 - DNA, 19 bp, Artificial Sequence
  Synthetic: FXN 3 reverse 9:69038362-69038387; SaCas9
ttagaagtagatgcaaggg

SEQ ID NO: 16988 - DNA, 18 bp, Artificial Sequence
  Synthetic: FXN 3 reverse 9:69038363-69038387; SaCas9
tagaagtagatgcaaggg

SEQ ID NO: 16989 - DNA, 25 bp, Artificial Sequence
  Synthetic: FXN 3 reverse 9:69038360-69038391; SaCas9
aacagctgctttagaagtagatgca

SEQ ID NO: 16990 - DNA, 24 bp, Artificial Sequence
  Synthetic: FXN 3 reverse 9:69038361-69038391; SaCas9
acagctgctttagaagtagatgca

SEQ ID NO: 16991 - DNA, 23 bp, Artificial Sequence
  Synthetic: FXN 3 reverse 9:69038362-69038391; SaCas9
cagctgctttagaagtagatgca

SEQ ID NO: 16992 - DNA, 22 bp, Artificial Sequence
  Synthetic: FXN 3 reverse 9:69038363-69038391; SaCas9
agctgctttagaagtagatgca

SEQ ID NO: 16993 - DNA, 21 bp, Artificial Sequence
  Synthetic: FXN 3 reverse 9:69038364-69038391; SaCas9
gctgctttagaagtagatgca

SEQ ID NO: 16994 - DNA, 20 bp, Artificial Sequence
  Synthetic: FXN 3 reverse 9:69038365-69038391; SaCas9
ctgctttagaagtagatgca

SEQ ID NO: 16995 - DNA, 19 bp, Artificial Sequence
  Synthetic: FXN 3 reverse 9:69038366-69038391; SaCas9
tgctttagaagtagatgca

SEQ ID NO: 16996 - DNA, 18 bp, Artificial Sequence
  Synthetic: FXN 3 reverse 9:69038367-69038391; SaCas9
gctttagaagtagatgca

SEQ ID NO: 16997 - DNA, 25 bp, Artificial Sequence
  Synthetic: FXN 3 reverse 9:69038361-69038392; SaCas9
gaacagctgctttagaagtagatgc

SEQ ID NO: 16998 - DNA, 24 bp, Artificial Sequence
  Synthetic: FXN 3 reverse 9:69038362-69038392; SaCas9
aacagctgctttagaagtagatgc

SEQ ID NO: 16999 - DNA, 23 bp, Artificial Sequence
  Synthetic: FXN 3 reverse 9:69038363-69038392; SaCas9
acagctgctttagaagtagatgc

SEQ ID NO: 17000 - DNA, 22 bp, Artificial Sequence
  Synthetic: FXN 3 reverse 9:69038364-69038392; SaCas9
cagctgctttagaagtagatgc

SEQ ID NO: 17001 - DNA, 21 bp, Artificial Sequence
  Synthetic: FXN 3 reverse 9:69038365-69038392; SaCas9
agctgctttagaagtagatgc

SEQ ID NO: 17002 - DNA, 20 bp, Artificial Sequence
  Synthetic: FXN 3 reverse 9:69038366-69038392; SaCas9
gctgctttagaagtagatgc

SEQ ID NO: 17003 - DNA, 19 bp, Artificial Sequence
  Synthetic: FXN 3 reverse 9:69038367-69038392; SaCas9
ctgctttagaagtagatgc

SEQ ID NO: 17004 - DNA, 18 bp, Artificial Sequence
  Synthetic: FXN 3 reverse 9:69038368-69038392; SaCas9
tgctttagaagtagatgc

SEQ ID NO: 17005 - DNA, 25 bp, Artificial Sequence
  Synthetic: FXN 3 forward 9:69038369-69038400; SaCas9
atctacttctaaagcagctgttcaa

SEQ ID NO: 17006 - DNA, 24 bp, Artificial Sequence
  Synthetic: FXN 3 forward 9:69038370-69038400; SaCas9
tctacttctaaagcagctgttcaa

SEQ ID NO: 17007 - DNA, 23 bp, Artificial Sequence
  Synthetic: FXN 3 forward 9:69038371-69038400; SaCas9
ctacttctaaagcagctgttcaa

SEQ ID NO: 17008 - DNA, 22 bp, Artificial Sequence
  Synthetic: FXN 3 forward 9:69038372-69038400; SaCas9
tacttctaaagcagctgttcaa

SEQ ID NO: 17009 - DNA, 21 bp, Artificial Sequence
  Synthetic: FXN 3 forward 9:69038373-69038400; SaCas9
acttctaaagcagctgttcaa

SEQ ID NO: 17010 - DNA, 20 bp, Artificial Sequence
  Synthetic: FXN 3 forward 9:69038374-69038400; SaCas9
cttctaaagcagctgttcaa

SEQ ID NO: 17011 - DNA, 19 bp, Artificial Sequence
  Synthetic: FXN 3 forward 9:69038375-69038400; SaCas9
ttctaaagcagctgttcaa

SEQ ID NO: 17012 - DNA, 18 bp, Artificial Sequence
  Synthetic: FXN 3 forward 9:69038376-69038400; SaCas9
tctaaagcagctgttcaa

SEQ ID NO: 17013 - DNA, 25 bp, Artificial Sequence
  Synthetic: FXN 3 reverse 9:69038374-69038405; SaCas9
ttctgtttctgttgaacagctgctt

SEQ ID NO: 17014 - DNA, 24 bp, Artificial Sequence
  Synthetic: FXN 3 reverse 9:69038375-69038405; SaCas9
tctgtttctgttgaacagctgctt

SEQ ID NO: 17015 - DNA, 23 bp, Artificial Sequence
  Synthetic: FXN 3 reverse 9:69038376-69038405; SaCas9
ctgtttctgttgaacagctgctt

SEQ ID NO: 17016 - DNA, 22 bp, Artificial Sequence
  Synthetic: FXN 3 reverse 9:69038377-69038405; SaCas9
tgtttctgttgaacagctgctt

SEQ ID NO: 17017 - DNA, 21 bp, Artificial Sequence
  Synthetic: FXN 3 reverse 9:69038378-69038405; SaCas9
gtttctgttgaacagctgctt

SEQ ID NO: 17018 - DNA, 20 bp, Artificial Sequence
  Synthetic: FXN 3 reverse 9:69038379-69038405; SaCas9
tttctgttgaacagctgctt

SEQ ID NO: 17019 - DNA, 19 bp, Artificial Sequence
  Synthetic: FXN 3 reverse 9:69038380-69038405; SaCas9
ttctgttgaacagctgctt

SEQ ID NO: 17020 - DNA, 18 bp, Artificial Sequence
  Synthetic: FXN 3 reverse 9:69038381-69038405; SaCas9
tctgttgaacagctgctt

SEQ ID NO: 17021 - DNA, 25 bp, Artificial Sequence
  Synthetic: FXN 3 forward 9:69038375-69038406; SaCas9
ttctaaagcagctgttcaacagaaa

SEQ ID NO: 17022 - DNA, 24 bp, Artificial Sequence
  Synthetic: FXN 3 forward 9:69038376-69038406; SaCas9
tctaaagcagctgttcaacagaaa

SEQ ID NO: 17023 - DNA, 23 bp, Artificial Sequence
  Synthetic: FXN 3 forward 9:69038377-69038406; SaCas9
ctaaagcagctgttcaacagaaa

SEQ ID NO: 17024 - DNA, 22 bp, Artificial Sequence
  Synthetic: FXN 3 forward 9:69038378-69038406; SaCas9
taaagcagctgttcaacagaaa

SEQ ID NO: 17025 - DNA, 21 bp, Artificial Sequence
  Synthetic: FXN 3 forward 9:69038379-69038406; SaCas9
aaagcagctgttcaacagaaa

SEQ ID NO: 17026 - DNA, 20 bp, Artificial Sequence
  Synthetic: FXN 3 forward 9:69038380-69038406; SaCas9
aagcagctgttcaacagaaa

SEQ ID NO: 17027 - DNA, 19 bp, Artificial Sequence
  Synthetic: FXN 3 forward 9:69038381-69038406; SaCas9
agcagctgttcaacagaaa

SEQ ID NO: 17028 - DNA, 18 bp, Artificial Sequence
  Synthetic: FXN 3 forward 9:69038382-69038406; SaCas9
gcagctgttcaacagaaa

SEQ ID NO: 17029 - DNA, 25 bp, Artificial Sequence
  Synthetic: FXN 3 forward 9:69038379-69038410; SaCas9
aaagcagctgttcaacagaaacaga

SEQ ID NO: 17030 - DNA, 24 bp, Artificial Sequence
  Synthetic: FXN 3 forward 9:69038380-69038410; SaCas9
aagcagctgttcaacagaaacaga

SEQ ID NO: 17031 - DNA, 23 bp, Artificial Sequence
  Synthetic: FXN 3 forward 9:69038381-69038410; SaCas9
agcagctgttcaacagaaacaga

SEQ ID NO: 17032 - DNA, 22 bp, Artificial Sequence
  Synthetic: FXN 3 forward 9:69038382-69038410; SaCas9
gcagctgttcaacagaaacaga

SEQ ID NO: 17033 - DNA, 21 bp, Artificial Sequence
  Synthetic: FXN 3 forward 9:69038383-69038410; SaCas9
cagctgttcaacagaaacaga

SEQ ID NO: 17034 - DNA, 20 bp, Artificial Sequence
  Synthetic: FXN 3 forward 9:69038384-69038410; SaCas9
agctgttcaacagaaacaga

SEQ ID NO: 17035 - DNA, 19 bp, Artificial Sequence
  Synthetic: FXN 3 forward 9:69038385-69038410; SaCas9
gctgttcaacagaaacaga

SEQ ID NO: 17036 - DNA, 18 bp, Artificial Sequence
  Synthetic: FXN 3 forward 9:69038386-69038410; SaCas9
ctgttcaacagaaacaga

SEQ ID NO: 17037 - DNA, 25 bp, Artificial Sequence
  Synthetic: FXN 3 forward 9:69038380-69038411; SaCas9
aagcagctgttcaacagaaacagaa

SEQ ID NO: 17038 - DNA, 24 bp, Artificial Sequence
  Synthetic: FXN 3 forward 9:69038381-69038411; SaCas9
agcagctgttcaacagaaacagaa

SEQ ID NO: 17039 - DNA, 23 bp, Artificial Sequence
  Synthetic: FXN 3 forward 9:69038382-69038411; SaCas9
gcagctgttcaacagaaacagaa

SEQ ID NO: 17040 - DNA, 22 bp, Artificial Sequence
  Synthetic: FXN 3 forward 9:69038383-69038411; SaCas9
cagctgttcaacagaaacagaa

SEQ ID NO: 17041 - DNA, 21 bp, Artificial Sequence
  Synthetic: FXN 3 forward 9:69038384-69038411; SaCas9
agctgttcaacagaaacagaa

SEQ ID NO: 17042 - DNA, 20 bp, Artificial Sequence
  Synthetic: FXN 3 forward 9:69038385-69038411; SaCas9
gctgttcaacagaaacagaa

SEQ ID NO: 17043 - DNA, 19 bp, Artificial Sequence
  Synthetic: FXN 3 forward 9:69038386-69038411; SaCas9
ctgttcaacagaaacagaa

SEQ ID NO: 17044 - DNA, 18 bp, Artificial Sequence
  Synthetic: FXN 3 forward 9:69038387-69038411; SaCas9
tgttcaacagaaacagaa

SEQ ID NO: 17045 - DNA, 25 bp, Artificial Sequence
  Synthetic: FXN 3 forward 9:69038381-69038412; SaCas9
agcagctgttcaacagaaacagaat

SEQ ID NO: 17046 - DNA, 24 bp, Artificial Sequence
  Synthetic: FXN 3 forward 9:69038382-69038412; SaCas9
gcagctgttcaacagaaacagaat

SEQ ID NO: 17047 - DNA, 23 bp, Artificial Sequence
  Synthetic: FXN 3 forward 9:69038383-69038412; SaCas9
cagctgttcaacagaaacagaat

SEQ ID NO: 17048 - DNA, 22 bp, Artificial Sequence
  Synthetic: FXN 3 forward 9:69038384-69038412; SaCas9
agctgttcaacagaaacagaat

SEQ ID NO: 17049 - DNA, 21 bp, Artificial Sequence
  Synthetic: FXN 3 forward 9:69038385-69038412; SaCas9
gctgttcaacagaaacagaat

SEQ ID NO: 17050 - DNA, 20 bp, Artificial Sequence
  Synthetic: FXN 3 forward 9:69038386-69038412; SaCas9
ctgttcaacagaaacagaat

SEQ ID NO: 17051 - DNA, 19 bp, Artificial Sequence
  Synthetic: FXN 3 forward 9:69038387-69038412; SaCas9
tgttcaacagaaacagaat

SEQ ID NO: 17052 - DNA, 18 bp, Artificial Sequence
  Synthetic: FXN 3 forward 9:69038388-69038412; SaCas9
gttcaacagaaacagaat

SEQ ID NO: 17053 - DNA, 25 bp, Artificial Sequence
  Synthetic: FXN 3 reverse 9:69038388-69038419; SaCas9
gtgtgtggctcccattctgtttctg

SEQ ID NO: 17054 - DNA, 24 bp, Artificial Sequence
  Synthetic: FXN 3 reverse 9:69038389-69038419; SaCas9
tgtgtggctcccattctgtttctg

SEQ ID NO: 17055 - DNA, 23 bp, Artificial Sequence
  Synthetic: FXN 3 reverse 9:69038390-69038419; SaCas9
gtgtggctcccattctgtttctg

SEQ ID NO: 17056 - DNA, 22 bp, Artificial Sequence
  Synthetic: FXN 3 reverse 9:69038391-69038419; SaCas9
tgtggctcccattctgtttctg

SEQ ID NO: 17057 - DNA, 21 bp, Artificial Sequence
  Synthetic: FXN 3 reverse 9:69038392-69038419; SaCas9
gtggctcccattctgtttctg

SEQ ID NO: 17058 - DNA, 20 bp, Artificial Sequence
  Synthetic: FXN 3 reverse 9:69038393-69038419; SaCas9
tggctcccattctgtttctg

SEQ ID NO: 17059 - DNA, 19 bp, Artificial Sequence
  Synthetic: FXN 3 reverse 9:69038394-69038419; SaCas9
ggctcccattctgtttctg

SEQ ID NO: 17060 - DNA, 18 bp, Artificial Sequence
  Synthetic: FXN 3 reverse 9:69038395-69038419; SaCas9
gctcccattctgtttctg

SEQ ID NO: 17061 - DNA, 25 bp, Artificial Sequence
  Synthetic: FXN 3 forward 9:69038418-69038449; SaCas9
cataattctacattttctagttaaa

SEQ ID NO: 17062 - DNA, 24 bp, Artificial Sequence
  Synthetic: FXN 3 forward 9:69038419-69038449; SaCas9
ataattctacattttctagttaaa

SEQ ID NO: 17063 - DNA, 23 bp, Artificial Sequence
  Synthetic: FXN 3 forward 9:69038420-69038449; SaCas9
taattctacattttctagttaaa

SEQ ID NO: 17064 - DNA, 22 bp, Artificial Sequence
  Synthetic: FXN 3 forward 9:69038421-69038449; SaCas9
aattctacattttctagttaaa

SEQ ID NO: 17065 - DNA, 21 bp, Artificial Sequence
  Synthetic: FXN 3 forward 9:69038422-69038449; SaCas9
attctacattttctagttaaa

SEQ ID NO: 17066 - DNA, 20 bp, Artificial Sequence
  Synthetic: FXN 3 forward 9:69038423-69038449; SaCas9
ttctacattttctagttaaa

SEQ ID NO: 17067 - DNA, 19 bp, Artificial Sequence
  Synthetic: FXN 3 forward 9:69038424-69038449; SaCas9
tctacattttctagttaaa

SEQ ID NO: 17068 - DNA, 18 bp, Artificial Sequence
  Synthetic: FXN 3 forward 9:69038425-69038449; SaCas9
ctacattttctagttaaa

SEQ ID NO: 17069 - DNA, 25 bp, Artificial Sequence
  Synthetic: FXN 3 reverse 9:69038422-69038453; SaCas9
tttttttctttttaactagaaaatg

SEQ ID NO: 17070 - DNA, 24 bp, Artificial Sequence
  Synthetic: FXN 3 reverse 9:69038423-69038453; SaCas9
ttttttctttttaactagaaaatg

SEQ ID NO: 17071 - DNA, 23 bp, Artificial Sequence
  Synthetic: FXN 3 reverse 9:69038424-69038453; SaCas9
tttttctttttaactagaaaatg

SEQ ID NO: 17072 - DNA, 22 bp, Artificial Sequence
  Synthetic: FXN 3 reverse 9:69038425-69038453; SaCas9
ttttctttttaactagaaaatg

SEQ ID NO: 17073 - DNA, 21 bp, Artificial Sequence
  Synthetic: FXN 3 reverse 9:69038426-69038453; SaCas9
tttctttttaactagaaaatg

SEQ ID NO: 17074 - DNA, 20 bp, Artificial Sequence
  Synthetic: FXN 3 reverse 9:69038427-69038453; SaCas9
ttctttttaactagaaaatg

SEQ ID NO: 17075 - DNA, 19 bp, Artificial Sequence
  Synthetic: FXN 3 reverse 9:69038428-69038453; SaCas9
tctttttaactagaaaatg

SEQ ID NO: 17076 - DNA, 18 bp, Artificial Sequence
  Synthetic: FXN 3 reverse 9:69038429-69038453; SaCas9
ctttttaactagaaaatg

SEQ ID NO: 17077 - DNA, 25 bp, Artificial Sequence
  Synthetic: FXN 3 reverse 9:69038431-69038462; SaCas9
aaaatgatttttttttctttttaac

SEQ ID NO: 17078 - DNA, 24 bp, Artificial Sequence
  Synthetic: FXN 3 reverse 9:69038432-69038462; SaCas9
aaatgatttttttttctttttaac

SEQ ID NO: 17079 - DNA, 23 bp, Artificial Sequence
  Synthetic: FXN 3 reverse 9:69038433-69038462; SaCas9
aatgatttttttttctttttaac

SEQ ID NO: 17080 - DNA, 22 bp, Artificial Sequence
  Synthetic: FXN 3 reverse 9:69038434-69038462; SaCas9
atgatttttttttctttttaac

SEQ ID NO: 17081 - DNA, 21 bp, Artificial Sequence
  Synthetic: FXN 3 reverse 9:69038435-69038462; SaCas9
tgatttttttttctttttaac

SEQ ID NO: 17082 - DNA, 20 bp, Artificial Sequence
  Synthetic: FXN 3 reverse 9:69038436-69038462; SaCas9
gatttttttttctttttaac

SEQ ID NO: 17083 - DNA, 19 bp, Artificial Sequence
  Synthetic: FXN 3 reverse 9:69038437-69038462; SaCas9
atttttttttctttttaac

SEQ ID NO: 17084 - DNA, 18 bp, Artificial Sequence
  Synthetic: FXN 3 reverse 9:69038438-69038462; SaCas9
tttttttttctttttaac

SEQ ID NO: 17085 - DNA, 25 bp, Artificial Sequence
  Synthetic: FXN 3 reverse 9:69038459-69038490; SaCas9
tgtactaggttgaataaatatattg

SEQ ID NO: 17086 - DNA, 24 bp, Artificial Sequence
  Synthetic: FXN 3 reverse 9:69038460-69038490; SaCas9
gtactaggttgaataaatatattg

SEQ ID NO: 17087 - DNA, 23 bp, Artificial Sequence
  Synthetic: FXN 3 reverse 9:69038461-69038490; SaCas9
tactaggttgaataaatatattg

SEQ ID NO: 17088 - DNA, 22 bp, Artificial Sequence
  Synthetic: FXN 3 reverse 9:69038462-69038490; SaCas9
actaggttgaataaatatattg

SEQ ID NO: 17089 - DNA, 21 bp, Artificial Sequence
  Synthetic: FXN 3 reverse 9:69038463-69038490; SaCas9
ctaggttgaataaatatattg

SEQ ID NO: 17090 - DNA, 20 bp, Artificial Sequence
  Synthetic: FXN 3 reverse 9:69038464-69038490; SaCas9
taggttgaataaatatattg

SEQ ID NO: 17091 - DNA, 19 bp, Artificial Sequence
  Synthetic: FXN 3 reverse 9:69038465-69038490; SaCas9
aggttgaataaatatattg

SEQ ID NO: 17092 - DNA, 18 bp, Artificial Sequence
  Synthetic: FXN 3 reverse 9:69038466-69038490; SaCas9
ggttgaataaatatattg

SEQ ID NO: 17093 - DNA, 25 bp, Artificial Sequence
  Synthetic: FXN 3 reverse 9:69038475-69038506; SaCas9
atgataatattttgtatgtactagg

SEQ ID NO: 17094 - DNA, 24 bp, Artificial Sequence
  Synthetic: FXN 3 reverse 9:69038476-69038506; SaCas9
tgataatattttgtatgtactagg

SEQ ID NO: 17095 - DNA, 23 bp, Artificial Sequence
  Synthetic: FXN 3 reverse 9:69038477-69038506; SaCas9
gataatattttgtatgtactagg

SEQ ID NO: 17096 - DNA, 22 bp, Artificial Sequence
  Synthetic: FXN 3 reverse 9:69038478-69038506; SaCas9
ataatattttgtatgtactagg

SEQ ID NO: 17097 - DNA, 21 bp, Artificial Sequence
  Synthetic: FXN 3 reverse 9:69038479-69038506; SaCas9
taatattttgtatgtactagg

SEQ ID NO: 17098 - DNA, 20 bp, Artificial Sequence
  Synthetic: FXN 3 reverse 9:69038480-69038506; SaCas9
aatattttgtatgtactagg

SEQ ID NO: 17099 - DNA, 19 bp, Artificial Sequence
  Synthetic: FXN 3 reverse 9:69038481-69038506; SaCas9
atattttgtatgtactagg

SEQ ID NO: 17100 - DNA, 18 bp, Artificial Sequence
  Synthetic: FXN 3 reverse 9:69038482-69038506; SaCas9
tattttgtatgtactagg

SEQ ID NO: 17101 - DNA, 25 bp, Artificial Sequence
  Synthetic: FXN 3 reverse 9:69038504-69038535; SaCas9
gatttttaaaatactgattacatgt

SEQ ID NO: 17102 - DNA, 24 bp, Artificial Sequence
  Synthetic: FXN 3 reverse 9:69038505-69038535; SaCas9
atttttaaaatactgattacatgt

SEQ ID NO: 17103 - DNA, 23 bp, Artificial Sequence
  Synthetic: FXN 3 reverse 9:69038506-69038535; SaCas9
tttttaaaatactgattacatgt

SEQ ID NO: 17104 - DNA, 22 bp, Artificial Sequence
  Synthetic: FXN 3 reverse 9:69038507-69038535; SaCas9
ttttaaaatactgattacatgt

SEQ ID NO: 17105 - DNA, 21 bp, Artificial Sequence
  Synthetic: FXN 3 reverse 9:69038508-69038535; SaCas9
tttaaaatactgattacatgt

SEQ ID NO: 17106 - DNA, 20 bp, Artificial Sequence
  Synthetic: FXN 3 reverse 9:69038509-69038535; SaCas9
ttaaaatactgattacatgt

SEQ ID NO: 17107 - DNA, 19 bp, Artificial Sequence
  Synthetic: FXN 3 reverse 9:69038510-69038535; SaCas9
taaaatactgattacatgt

SEQ ID NO: 17108 - DNA, 18 bp, Artificial Sequence
  Synthetic: FXN 3 reverse 9:69038511-69038535; SaCas9
aaaatactgattacatgt

SEQ ID NO: 17109 - DNA, 25 bp, Artificial Sequence
  Synthetic: FXN 3 reverse 9:69038505-69038536; SaCas9
tgatttttaaaatactgattacatg

SEQ ID NO: 17110 - DNA, 24 bp, Artificial Sequence
  Synthetic: FXN 3 reverse 9:69038506-69038536; SaCas9
gatttttaaaatactgattacatg

SEQ ID NO: 17111 - DNA, 23 bp, Artificial Sequence
  Synthetic: FXN 3 reverse 9:69038507-69038536; SaCas9
atttttaaaatactgattacatg

SEQ ID NO: 17112 - DNA, 22 bp, Artificial Sequence
  Synthetic: FXN 3 reverse 9:69038508-69038536; SaCas9
tttttaaaatactgattacatg

SEQ ID NO: 17113 - DNA, 21 bp, Artificial Sequence
  Synthetic: FXN 3 reverse 9:69038509-69038536; SaCas9
ttttaaaatactgattacatg

SEQ ID NO: 17114 - DNA, 20 bp, Artificial Sequence
  Synthetic: FXN 3 reverse 9:69038510-69038536; SaCas9
tttaaaatactgattacatg

SEQ ID NO: 17115 - DNA, 19 bp, Artificial Sequence
  Synthetic: FXN 3 reverse 9:69038511-69038536; SaCas9
ttaaaatactgattacatg

SEQ ID NO: 17116 - DNA, 18 bp, Artificial Sequence
  Synthetic: FXN 3 reverse 9:69038512-69038536; SaCas9
taaaatactgattacatg

SEQ ID NO: 17117 - DNA, 25 bp, Artificial Sequence
  Synthetic: FXN 3 forward 9:69038514-69038545; SaCas9
gtaatcagtattttaaaaatcagta

SEQ ID NO: 17118 - DNA, 24 bp, Artificial Sequence
  Synthetic: FXN 3 forward 9:69038515-69038545; SaCas9
taatcagtattttaaaaatcagta

SEQ ID NO: 17119 - DNA, 23 bp, Artificial Sequence
  Synthetic: FXN 3 forward 9:69038516-69038545; SaCas9
aatcagtattttaaaaatcagta

SEQ ID NO: 17120 - DNA, 22 bp, Artificial Sequence
  Synthetic: FXN 3 forward 9:69038517-69038545; SaCas9
atcagtattttaaaaatcagta

SEQ ID NO: 17121 - DNA, 21 bp, Artificial Sequence
  Synthetic: FXN 3 forward 9:69038518-69038545; SaCas9
tcagtattttaaaaatcagta

SEQ ID NO: 17122 - DNA, 20 bp, Artificial Sequence
  Synthetic: FXN 3 forward 9:69038519-69038545; SaCas9
cagtattttaaaaatcagta

SEQ ID NO: 17123 - DNA, 19 bp, Artificial Sequence
  Synthetic: FXN 3 forward 9:69038520-69038545; SaCas9
agtattttaaaaatcagta

SEQ ID NO: 17124 - DNA, 18 bp, Artificial Sequence
  Synthetic: FXN 3 forward 9:69038521-69038545; SaCas9
gtattttaaaaatcagta

SEQ ID NO: 17125 - DNA, 25 bp, Artificial Sequence
  Synthetic: FXN 3 forward 9:69038549-69038580; SaCas9
gcacggtggctcacgactgtaatcc

SEQ ID NO: 17126 - DNA, 24 bp, Artificial Sequence
  Synthetic: FXN 3 forward 9:69038550-69038580; SaCas9
cacggtggctcacgactgtaatcc

SEQ ID NO: 17127 - DNA, 23 bp, Artificial Sequence
  Synthetic: FXN 3 forward 9:69038551-69038580; SaCas9
acggtggctcacgactgtaatcc

SEQ ID NO: 17128 - DNA, 22 bp, Artificial Sequence
  Synthetic: FXN 3 forward 9:69038552-69038580; SaCas9
cggtggctcacgactgtaatcc

SEQ ID NO: 17129 - DNA, 21 bp, Artificial Sequence
  Synthetic: FXN 3 forward 9:69038553-69038580; SaCas9
ggtggctcacgactgtaatcc

SEQ ID NO: 17130 - DNA, 20 bp, Artificial Sequence
  Synthetic: FXN 3 forward 9:69038554-69038580; SaCas9
gtggctcacgactgtaatcc

SEQ ID NO: 17131 - DNA, 19 bp, Artificial Sequence
  Synthetic: FXN 3 forward 9:69038555-69038580; SaCas9
tggctcacgactgtaatcc

SEQ ID NO: 17132 - DNA, 18 bp, Artificial Sequence
  Synthetic: FXN 3 forward 9:69038556-69038580; SaCas9
ggctcacgactgtaatcc

SEQ ID NO: 17133 - DNA, 25 bp, Artificial Sequence
  Synthetic: FXN 3 forward 9:69038556-69038587; SaCas9
ggctcacgactgtaatcccaggact

SEQ ID NO: 17134 - DNA, 24 bp, Artificial Sequence
  Synthetic: FXN 3 forward 9:69038557-69038587; SaCas9
gctcacgactgtaatcccaggact

SEQ ID NO: 17135 - DNA, 23 bp, Artificial Sequence
  Synthetic: FXN 3 forward 9:69038558-69038587; SaCas9
ctcacgactgtaatcccaggact

SEQ ID NO: 17136 - DNA, 22 bp, Artificial Sequence
  Synthetic: FXN 3 forward 9:69038559-69038587; SaCas9
tcacgactgtaatcccaggact

SEQ ID NO: 17137 - DNA, 21 bp, Artificial Sequence
  Synthetic: FXN 3 forward 9:69038560-69038587; SaCas9
cacgactgtaatcccaggact

SEQ ID NO: 17138 - DNA, 20 bp, Artificial Sequence
  Synthetic: FXN 3 forward 9:69038561-69038587; SaCas9
acgactgtaatcccaggact

SEQ ID NO: 17139 - DNA, 19 bp, Artificial Sequence
  Synthetic: FXN 3 forward 9:69038562-69038587; SaCas9
cgactgtaatcccaggact

SEQ ID NO: 17140 - DNA, 18 bp, Artificial Sequence
  Synthetic: FXN 3 forward 9:69038563-69038587; SaCas9
gactgtaatcccaggact

SEQ ID NO: 17141 - DNA, 25 bp, Artificial Sequence
  Synthetic: FXN 3 forward 9:69038557-69038588; SaCas9
gctcacgactgtaatcccaggactt

SEQ ID NO: 17142 - DNA, 24 bp, Artificial Sequence
  Synthetic: FXN 3 forward 9:69038558-69038588; SaCas9
ctcacgactgtaatcccaggactt

SEQ ID NO: 17143 - DNA, 23 bp, Artificial Sequence
  Synthetic: FXN 3 forward 9:69038559-69038588; SaCas9
tcacgactgtaatcccaggactt

SEQ ID NO: 17144 - DNA, 22 bp, Artificial Sequence
  Synthetic: FXN 3 forward 9:69038560-69038588; SaCas9
cacgactgtaatcccaggactt

SEQ ID NO: 17145 - DNA, 21 bp, Artificial Sequence
  Synthetic: FXN 3 forward 9:69038561-69038588; SaCas9
acgactgtaatcccaggactt

SEQ ID NO: 17146 - DNA, 20 bp, Artificial Sequence
  Synthetic: FXN 3 forward 9:69038562-69038588; SaCas9
cgactgtaatcccaggactt

SEQ ID NO: 17147 - DNA, 19 bp, Artificial Sequence
  Synthetic: FXN 3 forward 9:69038563-69038588; SaCas9
gactgtaatcccaggactt

SEQ ID NO: 17148 - DNA, 18 bp, Artificial Sequence
  Synthetic: FXN 3 forward 9:69038564-69038588; SaCas9
actgtaatcccaggactt

SEQ ID NO: 17149 - DNA, 25 bp, Artificial Sequence
  Synthetic: FXN 3 reverse 9:69038557-69038588; SaCas9
ctcccaaagtcctgggattacagtc

SEQ ID NO: 17150 - DNA, 24 bp, Artificial Sequence
  Synthetic: FXN 3 reverse 9:69038558-69038588; SaCas9
tcccaaagtcctgggattacagtc

SEQ ID NO: 17151 - DNA, 23 bp, Artificial Sequence
  Synthetic: FXN 3 reverse 9:69038559-69038588; SaCas9
cccaaagtcctgggattacagtc

SEQ ID NO: 17152 - DNA, 22 bp, Artificial Sequence
  Synthetic: FXN 3 reverse 9:69038560-69038588; SaCas9
ccaaagtcctgggattacagtc

SEQ ID NO: 17153 - DNA, 21 bp, Artificial Sequence
  Synthetic: FXN 3 reverse 9:69038561-69038588; SaCas9
caaagtcctgggattacagtc

SEQ ID NO: 17154 - DNA, 20 bp, Artificial Sequence
  Synthetic: FXN 3 reverse 9:69038562-69038588; SaCas9
aaagtcctgggattacagtc

SEQ ID NO: 17155 - DNA, 19 bp, Artificial Sequence
  Synthetic: FXN 3 reverse 9:69038563-69038588; SaCas9
aagtcctgggattacagtc

SEQ ID NO: 17156 - DNA, 18 bp, Artificial Sequence
  Synthetic: FXN 3 reverse 9:69038564-69038588; SaCas9
agtcctgggattacagtc

SEQ ID NO: 17157 - DNA, 25 bp, Artificial Sequence
  Synthetic: FXN 3 forward 9:69038558-69038589; SaCas9
ctcacgactgtaatcccaggacttt

SEQ ID NO: 17158 - DNA, 24 bp, Artificial Sequence
  Synthetic: FXN 3 forward 9:69038559-69038589; SaCas9
tcacgactgtaatcccaggacttt

SEQ ID NO: 17159 - DNA, 23 bp, Artificial Sequence
  Synthetic: FXN 3 forward 9:69038560-69038589; SaCas9
cacgactgtaatcccaggacttt

SEQ ID NO: 17160 - DNA, 22 bp, Artificial Sequence
  Synthetic: FXN 3 forward 9:69038561-69038589; SaCas9
acgactgtaatcccaggacttt

SEQ ID NO: 17161 - DNA, 21 bp, Artificial Sequence
  Synthetic: FXN 3 forward 9:69038562-69038589; SaCas9
cgactgtaatcccaggacttt

SEQ ID NO: 17162 - DNA, 20 bp, Artificial Sequence
  Synthetic: FXN 3 forward 9:69038563-69038589; SaCas9
gactgtaatcccaggacttt

SEQ ID NO: 17163 - DNA, 19 bp, Artificial Sequence
  Synthetic: FXN 3 forward 9:69038564-69038589; SaCas9
actgtaatcccaggacttt

SEQ ID NO: 17164 - DNA, 18 bp, Artificial Sequence
  Synthetic: FXN 3 forward 9:69038565-69038589; SaCas9
ctgtaatcccaggacttt

SEQ ID NO: 17165 - DNA, 25 bp, Artificial Sequence
  Synthetic: FXN 3 forward 9:69038564-69038595; SaCas9
actgtaatcccaggactttgggagg

SEQ ID NO: 17166 - DNA, 24 bp, Artificial Sequence
  Synthetic: FXN 3 forward 9:69038565-69038595; SaCas9
ctgtaatcccaggactttgggagg

SEQ ID NO: 17167 - DNA, 23 bp, Artificial Sequence
  Synthetic: FXN 3 forward 9:69038566-69038595; SaCas9
tgtaatcccaggactttgggagg

SEQ ID NO: 17168 - DNA, 22 bp, Artificial Sequence
  Synthetic: FXN 3 forward 9:69038567-69038595; SaCas9
gtaatcccaggactttgggagg

SEQ ID NO: 17169 - DNA, 21 bp, Artificial Sequence
  Synthetic: FXN 3 forward 9:69038568-69038595; SaCas9
taatcccaggactttgggagg

SEQ ID NO: 17170 - DNA, 20 bp, Artificial Sequence
  Synthetic: FXN 3 forward 9:69038569-69038595; SaCas9
aatcccaggactttgggagg

SEQ ID NO: 17171 - DNA, 19 bp, Artificial Sequence
  Synthetic: FXN 3 forward 9:69038570-69038595; SaCas9
atcccaggactttgggagg

SEQ ID NO: 17172 - DNA, 18 bp, Artificial Sequence
  Synthetic: FXN 3 forward 9:69038571-69038595; SaCas9
tcccaggactttgggagg

SEQ ID NO: 17173 - DNA, 25 bp, Artificial Sequence
  Synthetic: FXN 3 forward 9:69038569-69038600; SaCas9
aatcccaggactttgggaggccgag

SEQ ID NO: 17174 - DNA, 24 bp, Artificial Sequence
  Synthetic: FXN 3 forward 9:69038570-69038600; SaCas9
atcccaggactttgggaggccgag

SEQ ID NO: 17175 - DNA, 23 bp, Artificial Sequence
  Synthetic: FXN 3 forward 9:69038571-69038600; SaCas9
tcccaggactttgggaggccgag

SEQ ID NO: 17176 - DNA, 22 bp, Artificial Sequence
  Synthetic: FXN 3 forward 9:69038572-69038600; SaCas9
cccaggactttgggaggccgag

SEQ ID NO: 17177 - DNA, 21 bp, Artificial Sequence
  Synthetic: FXN 3 forward 9:69038573-69038600; SaCas9
ccaggactttgggaggccgag

SEQ ID NO: 17178 - DNA, 20 bp, Artificial Sequence
  Synthetic: FXN 3 forward 9:69038574-69038600; SaCas9
caggactttgggaggccgag

SEQ ID NO: 17179 - DNA, 19 bp, Artificial Sequence
  Synthetic: FXN 3 forward 9:69038575-69038600; SaCas9
aggactttgggaggccgag

SEQ ID NO: 17180 - DNA, 18 bp, Artificial Sequence
  Synthetic: FXN 3 forward 9:69038576-69038600; SaCas9
ggactttgggaggccgag

SEQ ID NO: 17181 - DNA, 25 bp, Artificial Sequence
  Synthetic: FXN 3 reverse 9:69038570-69038601; SaCas9
cactcgcctcggcctcccaaagtcc

SEQ ID NO: 17182 - DNA, 24 bp, Artificial Sequence
  Synthetic: FXN 3 reverse 9:69038571-69038601; SaCas9
actcgcctcggcctcccaaagtcc

SEQ ID NO: 17183 - DNA, 23 bp, Artificial Sequence
  Synthetic: FXN 3 reverse 9:69038572-69038601; SaCas9
ctcgcctcggcctcccaaagtcc

SEQ ID NO: 17184 - DNA, 22 bp, Artificial Sequence
  Synthetic: FXN 3 reverse 9:69038573-69038601; SaCas9
tcgcctcggcctcccaaagtcc

SEQ ID NO: 17185 - DNA, 21 bp, Artificial Sequence
  Synthetic: FXN 3 reverse 9:69038574-69038601; SaCas9
cgcctcggcctcccaaagtcc

SEQ ID NO: 17186 - DNA, 20 bp, Artificial Sequence
  Synthetic: FXN 3 reverse 9:69038575-69038601; SaCas9
gcctcggcctcccaaagtcc

SEQ ID NO: 17187 - DNA, 19 bp, Artificial Sequence
  Synthetic: FXN 3 reverse 9:69038576-69038601; SaCas9
cctcggcctcccaaagtcc

SEQ ID NO: 17188 - DNA, 18 bp, Artificial Sequence
  Synthetic: FXN 3 reverse 9:69038577-69038601; SaCas9
ctcggcctcccaaagtcc

SEQ ID NO: 17189 - DNA, 25 bp, Artificial Sequence
  Synthetic: FXN 3 reverse 9:69038571-69038602; SaCas9
ccactcgcctcggcctcccaaagtc

SEQ ID NO: 17190 - DNA, 24 bp, Artificial Sequence
  Synthetic: FXN 3 reverse 9:69038572-69038602; SaCas9
cactcgcctcggcctcccaaagtc

SEQ ID NO: 17191 - DNA, 23 bp, Artificial Sequence
  Synthetic: FXN 3 reverse 9:69038573-69038602; SaCas9
actcgcctcggcctcccaaagtc

SEQ ID NO: 17192 - DNA, 22 bp, Artificial Sequence
  Synthetic: FXN 3 reverse 9:69038574-69038602; SaCas9
ctcgcctcggcctcccaaagtc

SEQ ID NO: 17193 - DNA, 21 bp, Artificial Sequence
  Synthetic: FXN 3 reverse 9:69038575-69038602; SaCas9
tcgcctcggcctcccaaagtc

SEQ ID NO: 17194 - DNA, 20 bp, Artificial Sequence
  Synthetic: FXN 3 reverse 9:69038576-69038602; SaCas9
cgcctcggcctcccaaagtc

SEQ ID NO: 17195 - DNA, 19 bp, Artificial Sequence
  Synthetic: FXN 3 reverse 9:69038577-69038602; SaCas9
gcctcggcctcccaaagtc

SEQ ID NO: 17196 - DNA, 18 bp, Artificial Sequence
  Synthetic: FXN 3 reverse 9:69038578-69038602; SaCas9
cctcggcctcccaaagtc

SEQ ID NO: 17197 - DNA, 25 bp, Artificial Sequence
  Synthetic: FXN 3 forward 9:69038573-69038604; SaCas9
ccaggactttgggaggccgaggcga

SEQ ID NO: 17198 - DNA, 24 bp, Artificial Sequence
  Synthetic: FXN 3 forward 9:69038574-69038604; SaCas9
caggactttgggaggccgaggcga

SEQ ID NO: 17199 - DNA, 23 bp, Artificial Sequence
  Synthetic: FXN 3 forward 9:69038575-69038604; SaCas9
aggactttgggaggccgaggcga

SEQ ID NO: 17200 - DNA, 22 bp, Artificial Sequence
  Synthetic: FXN 3 forward 9:69038576-69038604; SaCas9
ggactttgggaggccgaggcga

SEQ ID NO: 17201 - DNA, 21 bp, Artificial Sequence
  Synthetic: FXN 3 forward 9:69038577-69038604; SaCas9
gactttgggaggccgaggcga

SEQ ID NO: 17202 - DNA, 20 bp, Artificial Sequence
  Synthetic: FXN 3 forward 9:69038578-69038604; SaCas9
actttgggaggccgaggcga

SEQ ID NO: 17203 - DNA, 19 bp, Artificial Sequence
  Synthetic: FXN 3 forward 9:69038579-69038604; SaCas9
ctttgggaggccgaggcga

SEQ ID NO: 17204 - DNA, 18 bp, Artificial Sequence
  Synthetic: FXN 3 forward 9:69038580-69038604; SaCas9
tttgggaggccgaggcga

SEQ ID NO: 17205 - DNA, 25 bp, Artificial Sequence
  Synthetic: FXN 3 forward 9:69038582-69038613; SaCas9
tgggaggccgaggcgagtggatcat

SEQ ID NO: 17206 - DNA, 24 bp, Artificial Sequence
  Synthetic: FXN 3 forward 9:69038583-69038613; SaCas9
gggaggccgaggcgagtggatcat

SEQ ID NO: 17207 - DNA, 23 bp, Artificial Sequence
  Synthetic: FXN 3 forward 9:69038584-69038613; SaCas9
ggaggccgaggcgagtggatcat

SEQ ID NO: 17208 - DNA, 22 bp, Artificial Sequence
  Synthetic: FXN 3 forward 9:69038585-69038613; SaCas9
gaggccgaggcgagtggatcat

SEQ ID NO: 17209 - DNA, 21 bp, Artificial Sequence
  Synthetic: FXN 3 forward 9:69038586-69038613; SaCas9
aggccgaggcgagtggatcat

SEQ ID NO: 17210 - DNA, 20 bp, Artificial Sequence
  Synthetic: FXN 3 forward 9:69038587-69038613; SaCas9
ggccgaggcgagtggatcat

SEQ ID NO: 17211 - DNA, 19 bp, Artificial Sequence
  Synthetic: FXN 3 forward 9:69038588-69038613; SaCas9
gccgaggcgagtggatcat

SEQ ID NO: 17212 - DNA, 18 bp, Artificial Sequence
  Synthetic: FXN 3 forward 9:69038589-69038613; SaCas9
ccgaggcgagtggatcat

SEQ ID NO: 17213 - DNA, 25 bp, Artificial Sequence
  Synthetic: FXN 3 forward 9:69038589-69038620; SaCas9
ccgaggcgagtggatcatctgagat

SEQ ID NO: 17214 - DNA, 24 bp, Artificial Sequence
  Synthetic: FXN 3 forward 9:69038590-69038620; SaCas9
cgaggcgagtggatcatctgagat

SEQ ID NO: 17215 - DNA, 23 bp, Artificial Sequence
  Synthetic: FXN 3 forward 9:69038591-69038620; SaCas9
gaggcgagtggatcatctgagat

SEQ ID NO: 17216 - DNA, 22 bp, Artificial Sequence
  Synthetic: FXN 3 forward 9:69038592-69038620; SaCas9
aggcgagtggatcatctgagat

SEQ ID NO: 17217 - DNA, 21 bp, Artificial Sequence
  Synthetic: FXN 3 forward 9:69038593-69038620; SaCas9
ggcgagtggatcatctgagat

SEQ ID NO: 17218 - DNA, 20 bp, Artificial Sequence
  Synthetic: FXN 3 forward 9:69038594-69038620; SaCas9
gcgagtggatcatctgagat

SEQ ID NO: 17219 - DNA, 19 bp, Artificial Sequence
  Synthetic: FXN 3 forward 9:69038595-69038620; SaCas9
cgagtggatcatctgagat

SEQ ID NO: 17220 - DNA, 18 bp, Artificial Sequence
  Synthetic: FXN 3 forward 9:69038596-69038620; SaCas9
gagtggatcatctgagat

SEQ ID NO: 17221 - DNA, 25 bp, Artificial Sequence
  Synthetic: FXN 3 forward 9:69038590-69038621; SaCas9
cgaggcgagtggatcatctgagatc

SEQ ID NO: 17222 - DNA, 24 bp, Artificial Sequence
  Synthetic: FXN 3 forward 9:69038591-69038621; SaCas9
gaggcgagtggatcatctgagatc

SEQ ID NO: 17223 - DNA, 23 bp, Artificial Sequence
  Synthetic: FXN 3 forward 9:69038592-69038621; SaCas9
aggcgagtggatcatctgagatc

SEQ ID NO: 17224 - DNA, 22 bp, Artificial Sequence
  Synthetic: FXN 3 forward 9:69038593-69038621; SaCas9
ggcgagtggatcatctgagatc

SEQ ID NO: 17225 - DNA, 21 bp, Artificial Sequence
  Synthetic: FXN 3 forward 9:69038594-69038621; SaCas9
gcgagtggatcatctgagatc

SEQ ID NO: 17226 - DNA, 20 bp, Artificial Sequence
  Synthetic: FXN 3 forward 9:69038595-69038621; SaCas9
cgagtggatcatctgagatc

SEQ ID NO: 17227 - DNA, 19 bp, Artificial Sequence
  Synthetic: FXN 3 forward 9:69038596-69038621; SaCas9
gagtggatcatctgagatc

SEQ ID NO: 17228 - DNA, 18 bp, Artificial Sequence
  Synthetic: FXN 3 forward 9:69038597-69038621; SaCas9
agtggatcatctgagatc

SEQ ID NO: 17229 - DNA, 25 bp, Artificial Sequence
  Synthetic: FXN 3 forward 9:69038619-69038650; SaCas9
gttcaagaccagcctggccaacatg

SEQ ID NO: 17230 - DNA, 24 bp, Artificial Sequence
  Synthetic: FXN 3 forward 9:69038620-69038650; SaCas9
ttcaagaccagcctggccaacatg

SEQ ID NO: 17231 - DNA, 23 bp, Artificial Sequence
  Synthetic: FXN 3 forward 9:69038621-69038650; SaCas9
tcaagaccagcctggccaacatg

SEQ ID NO: 17232 - DNA, 22 bp, Artificial Sequence
  Synthetic: FXN 3 forward 9:69038622-69038650; SaCas9
caagaccagcctggccaacatg

SEQ ID NO: 17233 - DNA, 21 bp, Artificial Sequence
  Synthetic: FXN 3 forward 9:69038623-69038650; SaCas9
aagaccagcctggccaacatg

SEQ ID NO: 17234 - DNA, 20 bp, Artificial Sequence
  Synthetic: FXN 3 forward 9:69038624-69038650; SaCas9
agaccagcctggccaacatg

SEQ ID NO: 17235 - DNA, 19 bp, Artificial Sequence
  Synthetic: FXN 3 forward 9:69038625-69038650; SaCas9
gaccagcctggccaacatg

SEQ ID NO: 17236 - DNA, 18 bp, Artificial Sequence
  Synthetic: FXN 3 forward 9:69038626-69038650; SaCas9
accagcctggccaacatg

SEQ ID NO: 17237 - DNA, 25 bp, Artificial Sequence
  Synthetic: FXN 3 reverse 9:69038619-69038650; SaCas9
tttcaccatgttggccaggctggtc

SEQ ID NO: 17238 - DNA, 24 bp, Artificial Sequence
  Synthetic: FXN 3 reverse 9:69038620-69038650; SaCas9
ttcaccatgttggccaggctggtc

SEQ ID NO: 17239 - DNA, 23 bp, Artificial Sequence
  Synthetic: FXN 3 reverse 9:69038621-69038650; SaCas9
tcaccatgttggccaggctggtc

SEQ ID NO: 17240 - DNA, 22 bp, Artificial Sequence
  Synthetic: FXN 3 reverse 9:69038622-69038650; SaCas9
caccatgttggccaggctggtc

SEQ ID NO: 17241 - DNA, 21 bp, Artificial Sequence
  Synthetic: FXN 3 reverse 9:69038623-69038650; SaCas9
accatgttggccaggctggtc

SEQ ID NO: 17242 - DNA, 20 bp, Artificial Sequence
  Synthetic: FXN 3 reverse 9:69038624-69038650; SaCas9
ccatgttggccaggctggtc

SEQ ID NO: 17243 - DNA, 19 bp, Artificial Sequence
  Synthetic: FXN 3 reverse 9:69038625-69038650; SaCas9
catgttggccaggctggtc

SEQ ID NO: 17244 - DNA, 18 bp, Artificial Sequence
  Synthetic: FXN 3 reverse 9:69038626-69038650; SaCas9
atgttggccaggctggtc

SEQ ID NO: 17245 - DNA, 25 bp, Artificial Sequence
  Synthetic: FXN 3 reverse 9:69038649-69038680; SaCas9
atgctgagctagtttttagtagaga

SEQ ID NO: 17246 - DNA, 24 bp, Artificial Sequence
  Synthetic: FXN 3 reverse 9:69038650-69038680; SaCas9
tgctgagctagtttttagtagaga

SEQ ID NO: 17247 - DNA, 23 bp, Artificial Sequence
  Synthetic: FXN 3 reverse 9:69038651-69038680; SaCas9
gctgagctagtttttagtagaga

SEQ ID NO: 17248 - DNA, 22 bp, Artificial Sequence
  Synthetic: FXN 3 reverse 9:69038652-69038680; SaCas9
ctgagctagtttttagtagaga

SEQ ID NO: 17249 - DNA, 21 bp, Artificial Sequence
  Synthetic: FXN 3 reverse 9:69038653-69038680; SaCas9
tgagctagtttttagtagaga

SEQ ID NO: 17250 - DNA, 20 bp, Artificial Sequence
  Synthetic: FXN 3 reverse 9:69038654-69038680; SaCas9
gagctagtttttagtagaga

SEQ ID NO: 17251 - DNA, 19 bp, Artificial Sequence
  Synthetic: FXN 3 reverse 9:69038655-69038680; SaCas9
agctagtttttagtagaga

SEQ ID NO: 17252 - DNA, 18 bp, Artificial Sequence
  Synthetic: FXN 3 reverse 9:69038656-69038680; SaCas9
gctagtttttagtagaga

SEQ ID NO: 17253 - DNA, 25 bp, Artificial Sequence
  Synthetic: FXN 3 reverse 9:69038650-69038681; SaCas9
catgctgagctagtttttagtagag

SEQ ID NO: 17254 - DNA, 24 bp, Artificial Sequence
  Synthetic: FXN 3 reverse 9:69038651-69038681; SaCas9
atgctgagctagtttttagtagag

SEQ ID NO: 17255 - DNA, 23 bp, Artificial Sequence
  Synthetic: FXN 3 reverse 9:69038652-69038681; SaCas9
tgctgagctagtttttagtagag

SEQ ID NO: 17256 - DNA, 22 bp, Artificial Sequence
  Synthetic: FXN 3 reverse 9:69038653-69038681; SaCas9
gctgagctagtttttagtagag

SEQ ID NO: 17257 - DNA, 21 bp, Artificial Sequence
  Synthetic: FXN 3 reverse 9:69038654-69038681; SaCas9
ctgagctagtttttagtagag

SEQ ID NO: 17258 - DNA, 20 bp, Artificial Sequence
  Synthetic: FXN 3 reverse 9:69038655-69038681; SaCas9
tgagctagtttttagtagag

SEQ ID NO: 17259 - DNA, 19 bp, Artificial Sequence
  Synthetic: FXN 3 reverse 9:69038656-69038681; SaCas9
gagctagtttttagtagag

SEQ ID NO: 17260 - DNA, 18 bp, Artificial Sequence
  Synthetic: FXN 3 reverse 9:69038657-69038681; SaCas9
agctagtttttagtagag

SEQ ID NO: 17261 - DNA, 25 bp, Artificial Sequence
  Synthetic: FXN 3 reverse 9:69038655-69038686; SaCas9
accaccatgctgagctagtttttag

SEQ ID NO: 17262 - DNA, 24 bp, Artificial Sequence
  Synthetic: FXN 3 reverse 9:69038656-69038686; SaCas9
ccaccatgctgagctagtttttag

SEQ ID NO: 17263 - DNA, 23 bp, Artificial Sequence
  Synthetic: FXN 3 reverse 9:69038657-69038686; SaCas9
caccatgctgagctagtttttag

SEQ ID NO: 17264 - DNA, 22 bp, Artificial Sequence
  Synthetic: FXN 3 reverse 9:69038658-69038686; SaCas9
accatgctgagctagtttttag

SEQ ID NO: 17265 - DNA, 21 bp, Artificial Sequence
  Synthetic: FXN 3 reverse 9:69038659-69038686; SaCas9
ccatgctgagctagtttttag

SEQ ID NO: 17266 - DNA, 20 bp, Artificial Sequence
  Synthetic: FXN 3 reverse 9:69038660-69038686; SaCas9
catgctgagctagtttttag

SEQ ID NO: 17267 - DNA, 19 bp, Artificial Sequence
  Synthetic: FXN 3 reverse 9:69038661-69038686; SaCas9
atgctgagctagtttttag

SEQ ID NO: 17268 - DNA, 18 bp, Artificial Sequence
  Synthetic: FXN 3 reverse 9:69038662-69038686; SaCas9
tgctgagctagtttttag

SEQ ID NO: 17269 - DNA, 25 bp, Artificial Sequence
  Synthetic: FXN 3 forward 9:69038659-69038690; SaCas9
tactaaaaactagctcagcatggtg

SEQ ID NO: 17270 - DNA, 24 bp, Artificial Sequence
  Synthetic: FXN 3 forward 9:69038660-69038690; SaCas9
actaaaaactagctcagcatggtg

SEQ ID NO: 17271 - DNA, 23 bp, Artificial Sequence
  Synthetic: FXN 3 forward 9:69038661-69038690; SaCas9
ctaaaaactagctcagcatggtg

SEQ ID NO: 17272 - DNA, 22 bp, Artificial Sequence
  Synthetic: FXN 3 forward 9:69038662-69038690; SaCas9
taaaaactagctcagcatggtg

SEQ ID NO: 17273 - DNA, 21 bp, Artificial Sequence
  Synthetic: FXN 3 forward 9:69038663-69038690; SaCas9
aaaaactagctcagcatggtg

SEQ ID NO: 17274 - DNA, 20 bp, Artificial Sequence
  Synthetic: FXN 3 forward 9:69038664-69038690; SaCas9
aaaactagctcagcatggtg

SEQ ID NO: 17275 - DNA, 19 bp, Artificial Sequence
  Synthetic: FXN 3 forward 9:69038665-69038690; SaCas9
aaactagctcagcatggtg

SEQ ID NO: 17276 - DNA, 18 bp, Artificial Sequence
  Synthetic: FXN 3 forward 9:69038666-69038690; SaCas9
aactagctcagcatggtg

SEQ ID NO: 17277 - DNA, 25 bp, Artificial Sequence
  Synthetic: FXN 3 reverse 9:69038671-69038702; SaCas9
gggactacaggcacccaccaccatg

SEQ ID NO: 17278 - DNA, 24 bp, Artificial Sequence
  Synthetic: FXN 3 reverse 9:69038672-69038702; SaCas9
ggactacaggcacccaccaccatg

SEQ ID NO: 17279 - DNA, 23 bp, Artificial Sequence
  Synthetic: FXN 3 reverse 9:69038673-69038702; SaCas9
gactacaggcacccaccaccatg

SEQ ID NO: 17280 - DNA, 22 bp, Artificial Sequence
  Synthetic: FXN 3 reverse 9:69038674-69038702; SaCas9
actacaggcacccaccaccatg

SEQ ID NO: 17281 - DNA, 21 bp, Artificial Sequence
  Synthetic: FXN 3 reverse 9:69038675-69038702; SaCas9
ctacaggcacccaccaccatg

SEQ ID NO: 17282 - DNA, 20 bp, Artificial Sequence
  Synthetic: FXN 3 reverse 9:69038676-69038702; SaCas9
tacaggcacccaccaccatg

SEQ ID NO: 17283 - DNA, 19 bp, Artificial Sequence
  Synthetic: FXN 3 reverse 9:69038677-69038702; SaCas9
acaggcacccaccaccatg

SEQ ID NO: 17284 - DNA, 18 bp, Artificial Sequence
  Synthetic: FXN 3 reverse 9:69038678-69038702; SaCas9
caggcacccaccaccatg

SEQ ID NO: 17285 - DNA, 25 bp, Artificial Sequence
  Synthetic: FXN 3 forward 9:69038683-69038714; SaCas9
ggtgggtgcctgtagtcccagctac

SEQ ID NO: 17286 - DNA, 24 bp, Artificial Sequence
  Synthetic: FXN 3 forward 9:69038684-69038714; SaCas9
gtgggtgcctgtagtcccagctac

SEQ ID NO: 17287 - DNA, 23 bp, Artificial Sequence
  Synthetic: FXN 3 forward 9:69038685-69038714; SaCas9
tgggtgcctgtagtcccagctac

SEQ ID NO: 17288 - DNA, 22 bp, Artificial Sequence
  Synthetic: FXN 3 forward 9:69038686-69038714; SaCas9
gggtgcctgtagtcccagctac

SEQ ID NO: 17289 - DNA, 21 bp, Artificial Sequence
  Synthetic: FXN 3 forward 9:69038687-69038714; SaCas9
ggtgcctgtagtcccagctac

SEQ ID NO: 17290 - DNA, 20 bp, Artificial Sequence
  Synthetic: FXN 3 forward 9:69038688-69038714; SaCas9
gtgcctgtagtcccagctac

SEQ ID NO: 17291 - DNA, 19 bp, Artificial Sequence
  Synthetic: FXN 3 forward 9:69038689-69038714; SaCas9
tgcctgtagtcccagctac

SEQ ID NO: 17292 - DNA, 18 bp, Artificial Sequence
  Synthetic: FXN 3 forward 9:69038690-69038714; SaCas9
gcctgtagtcccagctac

SEQ ID NO: 17293 - DNA, 25 bp, Artificial Sequence
  Synthetic: FXN 3 forward 9:69038684-69038715; SaCas9
gtgggtgcctgtagtcccagctact

SEQ ID NO: 17294 - DNA, 24 bp, Artificial Sequence
  Synthetic: FXN 3 forward 9:69038685-69038715; SaCas9
tgggtgcctgtagtcccagctact

SEQ ID NO: 17295 - DNA, 23 bp, Artificial Sequence
  Synthetic: FXN 3 forward 9:69038686-69038715; SaCas9
gggtgcctgtagtcccagctact

SEQ ID NO: 17296 - DNA, 22 bp, Artificial Sequence
  Synthetic: FXN 3 forward 9:69038687-69038715; SaCas9
ggtgcctgtagtcccagctact

SEQ ID NO: 17297 - DNA, 21 bp, Artificial Sequence
  Synthetic: FXN 3 forward 9:69038688-69038715; SaCas9
gtgcctgtagtcccagctact

SEQ ID NO: 17298 - DNA, 20 bp, Artificial Sequence
  Synthetic: FXN 3 forward 9:69038689-69038715; SaCas9
tgcctgtagtcccagctact

SEQ ID NO: 17299 - DNA, 19 bp, Artificial Sequence
  Synthetic: FXN 3 forward 9:69038690-69038715; SaCas9
gcctgtagtcccagctact

SEQ ID NO: 17300 - DNA, 18 bp, Artificial Sequence
  Synthetic: FXN 3 forward 9:69038691-69038715; SaCas9
cctgtagtcccagctact

SEQ ID NO: 17301 - DNA, 25 bp, Artificial Sequence
  Synthetic: FXN 3 forward 9:69038685-69038716; SaCas9
tgggtgcctgtagtcccagctactc

SEQ ID NO: 17302 - DNA, 24 bp, Artificial Sequence
  Synthetic: FXN 3 forward 9:69038686-69038716; SaCas9
gggtgcctgtagtcccagctactc

SEQ ID NO: 17303 - DNA, 23 bp, Artificial Sequence
  Synthetic: FXN 3 forward 9:69038687-69038716; SaCas9
ggtgcctgtagtcccagctactc

SEQ ID NO: 17304 - DNA, 22 bp, Artificial Sequence
  Synthetic: FXN 3 forward 9:69038688-69038716; SaCas9
gtgcctgtagtcccagctactc

SEQ ID NO: 17305 - DNA, 21 bp, Artificial Sequence
  Synthetic: FXN 3 forward 9:69038689-69038716; SaCas9
tgcctgtagtcccagctactc

SEQ ID NO: 17306 - DNA, 20 bp, Artificial Sequence
  Synthetic: FXN 3 forward 9:69038690-69038716; SaCas9
gcctgtagtcccagctactc

SEQ ID NO: 17307 - DNA, 19 bp, Artificial Sequence
  Synthetic: FXN 3 forward 9:69038691-69038716; SaCas9
cctgtagtcccagctactc

SEQ ID NO: 17308 - DNA, 18 bp, Artificial Sequence
  Synthetic: FXN 3 forward 9:69038692-69038716; SaCas9
ctgtagtcccagctactc

SEQ ID NO: 17309 - DNA, 25 bp, Artificial Sequence
  Synthetic: FXN 3 forward 9:69038691-69038722; SaCas9
cctgtagtcccagctactcgggagg

SEQ ID NO: 17310 - DNA, 24 bp, Artificial Sequence
  Synthetic: FXN 3 forward 9:69038692-69038722; SaCas9
ctgtagtcccagctactcgggagg

SEQ ID NO: 17311 - DNA, 23 bp, Artificial Sequence
  Synthetic: FXN 3 forward 9:69038693-69038722; SaCas9
tgtagtcccagctactcgggagg

SEQ ID NO: 17312 - DNA, 22 bp, Artificial Sequence
  Synthetic: FXN 3 forward 9:69038694-69038722; SaCas9
gtagtcccagctactcgggagg

SEQ ID NO: 17313 - DNA, 21 bp, Artificial Sequence
  Synthetic: FXN 3 forward 9:69038695-69038722; SaCas9
tagtcccagctactcgggagg

SEQ ID NO: 17314 - DNA, 20 bp, Artificial Sequence
  Synthetic: FXN 3 forward 9:69038696-69038722; SaCas9
agtcccagctactcgggagg

SEQ ID NO: 17315 - DNA, 19 bp, Artificial Sequence
  Synthetic: FXN 3 forward 9:69038697-69038722; SaCas9
gtcccagctactcgggagg

SEQ ID NO: 17316 - DNA, 18 bp, Artificial Sequence
  Synthetic: FXN 3 forward 9:69038698-69038722; SaCas9
tcccagctactcgggagg

SEQ ID NO: 17317 - DNA, 25 bp, Artificial Sequence
  Synthetic: FXN 3 reverse 9:69038697-69038728; SaCas9
ctcatgcctcagcctcccgagtagc

SEQ ID NO: 17318 - DNA, 24 bp, Artificial Sequence
  Synthetic: FXN 3 reverse 9:69038698-69038728; SaCas9
tcatgcctcagcctcccgagtagc

SEQ ID NO: 17319 - DNA, 23 bp, Artificial Sequence
  Synthetic: FXN 3 reverse 9:69038699-69038728; SaCas9
catgcctcagcctcccgagtagc

SEQ ID NO: 17320 - DNA, 22 bp, Artificial Sequence
  Synthetic: FXN 3 reverse 9:69038700-69038728; SaCas9
atgcctcagcctcccgagtagc

SEQ ID NO: 17321 - DNA, 21 bp, Artificial Sequence
  Synthetic: FXN 3 reverse 9:69038701-69038728; SaCas9
tgcctcagcctcccgagtagc

SEQ ID NO: 17322 - DNA, 20 bp, Artificial Sequence
  Synthetic: FXN 3 reverse 9:69038702-69038728; SaCas9
gcctcagcctcccgagtagc

SEQ ID NO: 17323 - DNA, 19 bp, Artificial Sequence
  Synthetic: FXN 3 reverse 9:69038703-69038728; SaCas9
cctcagcctcccgagtagc

SEQ ID NO: 17324 - DNA, 18 bp, Artificial Sequence
  Synthetic: FXN 3 reverse 9:69038704-69038728; SaCas9
ctcagcctcccgagtagc

SEQ ID NO: 17325 - DNA, 25 bp, Artificial Sequence
  Synthetic: FXN 3 forward 9:69038698-69038729; SaCas9
tcccagctactcgggaggctgaggc

SEQ ID NO: 17326 - DNA, 24 bp, Artificial Sequence
  Synthetic: FXN 3 forward 9:69038699-69038729; SaCas9
cccagctactcgggaggctgaggc

SEQ ID NO: 17327 - DNA, 23 bp, Artificial Sequence
  Synthetic: FXN 3 forward 9:69038700-69038729; SaCas9
ccagctactcgggaggctgaggc

SEQ ID NO: 17328 - DNA, 22 bp, Artificial Sequence
  Synthetic: FXN 3 forward 9:69038701-69038729; SaCas9
cagctactcgggaggctgaggc

SEQ ID NO: 17329 - DNA, 21 bp, Artificial Sequence
  Synthetic: FXN 3 forward 9:69038702-69038729; SaCas9
agctactcgggaggctgaggc

SEQ ID NO: 17330 - DNA, 20 bp, Artificial Sequence
  Synthetic: FXN 3 forward 9:69038703-69038729; SaCas9
gctactcgggaggctgaggc

SEQ ID NO: 17331 - DNA, 19 bp, Artificial Sequence
  Synthetic: FXN 3 forward 9:69038704-69038729; SaCas9
ctactcgggaggctgaggc

SEQ ID NO: 17332 - DNA, 18 bp, Artificial Sequence
  Synthetic: FXN 3 forward 9:69038705-69038729; SaCas9
tactcgggaggctgaggc

SEQ ID NO: 17333 - DNA, 25 bp, Artificial Sequence
  Synthetic: FXN 3 reverse 9:69038698-69038729; SaCas9
tctcatgcctcagcctcccgagtag

SEQ ID NO: 17334 - DNA, 24 bp, Artificial Sequence
  Synthetic: FXN 3 reverse 9:69038699-69038729; SaCas9
ctcatgcctcagcctcccgagtag

SEQ ID NO: 17335 - DNA, 23 bp, Artificial Sequence
  Synthetic: FXN 3 reverse 9:69038700-69038729; SaCas9
tcatgcctcagcctcccgagtag

SEQ ID NO: 17336 - DNA, 22 bp, Artificial Sequence
  Synthetic: FXN 3 reverse 9:69038701-69038729; SaCas9
catgcctcagcctcccgagtag

SEQ ID NO: 17337 - DNA, 21 bp, Artificial Sequence
  Synthetic: FXN 3 reverse 9:69038702-69038729; SaCas9
atgcctcagcctcccgagtag

SEQ ID NO: 17338 - DNA, 20 bp, Artificial Sequence
  Synthetic: FXN 3 reverse 9:69038703-69038729; SaCas9
tgcctcagcctcccgagtag

SEQ ID NO: 17339 - DNA, 19 bp, Artificial Sequence
  Synthetic: FXN 3 reverse 9:69038704-69038729; SaCas9
gcctcagcctcccgagtag

SEQ ID NO: 17340 - DNA, 18 bp, Artificial Sequence
  Synthetic: FXN 3 reverse 9:69038705-69038729; SaCas9
cctcagcctcccgagtag

SEQ ID NO: 17341 - DNA, 25 bp, Artificial Sequence
  Synthetic: FXN 3 forward 9:69038700-69038731; SaCas9
ccagctactcgggaggctgaggcat

SEQ ID NO: 17342 - DNA, 24 bp, Artificial Sequence
  Synthetic: FXN 3 forward 9:69038701-69038731; SaCas9
cagctactcgggaggctgaggcat

SEQ ID NO: 17343 - DNA, 23 bp, Artificial Sequence
  Synthetic: FXN 3 forward 9:69038702-69038731; SaCas9
agctactcgggaggctgaggcat

SEQ ID NO: 17344 - DNA, 22 bp, Artificial Sequence
  Synthetic: FXN 3 forward 9:69038703-69038731; SaCas9
gctactcgggaggctgaggcat

SEQ ID NO: 17345 - DNA, 21 bp, Artificial Sequence
  Synthetic: FXN 3 forward 9:69038704-69038731; SaCas9
ctactcgggaggctgaggcat

SEQ ID NO: 17346 - DNA, 20 bp, Artificial Sequence
  Synthetic: FXN 3 forward 9:69038705-69038731; SaCas9
tactcgggaggctgaggcat

SEQ ID NO: 17347 - DNA, 19 bp, Artificial Sequence
  Synthetic: FXN 3 forward 9:69038706-69038731; SaCas9
actcgggaggctgaggcat

SEQ ID NO: 17348 - DNA, 18 bp, Artificial Sequence
  Synthetic: FXN 3 forward 9:69038707-69038731; SaCas9
ctcgggaggctgaggcat

SEQ ID NO: 17349 - DNA, 25 bp, Artificial Sequence
  Synthetic: FXN 3 reverse 9:69038706-69038737; SaCas9
caagtgattctcatgcctcagcctc

SEQ ID NO: 17350 - DNA, 24 bp, Artificial Sequence
  Synthetic: FXN 3 reverse 9:69038707-69038737; SaCas9
aagtgattctcatgcctcagcctc

SEQ ID NO: 17351 - DNA, 23 bp, Artificial Sequence
  Synthetic: FXN 3 reverse 9:69038708-69038737; SaCas9
agtgattctcatgcctcagcctc

SEQ ID NO: 17352 - DNA, 22 bp, Artificial Sequence
  Synthetic: FXN 3 reverse 9:69038709-69038737; SaCas9
gtgattctcatgcctcagcctc

SEQ ID NO: 17353 - DNA, 21 bp, Artificial Sequence
  Synthetic: FXN 3 reverse 9:69038710-69038737; SaCas9
tgattctcatgcctcagcctc

SEQ ID NO: 17354 - DNA, 20 bp, Artificial Sequence
  Synthetic: FXN 3 reverse 9:69038711-69038737; SaCas9
gattctcatgcctcagcctc

SEQ ID NO: 17355 - DNA, 19 bp, Artificial Sequence
  Synthetic: FXN 3 reverse 9:69038712-69038737; SaCas9
attctcatgcctcagcctc

SEQ ID NO: 17356 - DNA, 18 bp, Artificial Sequence
  Synthetic: FXN 3 reverse 9:69038713-69038737; SaCas9
ttctcatgcctcagcctc

SEQ ID NO: 17357 - DNA, 25 bp, Artificial Sequence
  Synthetic: FXN 3 forward 9:69038709-69038740; SaCas9
cgggaggctgaggcatgagaatcac

SEQ ID NO: 17358 - DNA, 24 bp, Artificial Sequence
  Synthetic: FXN 3 forward 9:69038710-69038740; SaCas9
gggaggctgaggcatgagaatcac

SEQ ID NO: 17359 - DNA, 23 bp, Artificial Sequence
  Synthetic: FXN 3 forward 9:69038711-69038740; SaCas9
ggaggctgaggcatgagaatcac

SEQ ID NO: 17360 - DNA, 22 bp, Artificial Sequence
  Synthetic: FXN 3 forward 9:69038712-69038740; SaCas9
gaggctgaggcatgagaatcac

SEQ ID NO: 17361 - DNA, 21 bp, Artificial Sequence
  Synthetic: FXN 3 forward 9:69038713-69038740; SaCas9
aggctgaggcatgagaatcac

SEQ ID NO: 17362 - DNA, 20 bp, Artificial Sequence
  Synthetic: FXN 3 forward 9:69038714-69038740; SaCas9
ggctgaggcatgagaatcac

SEQ ID NO: 17363 - DNA, 19 bp, Artificial Sequence
  Synthetic: FXN 3 forward 9:69038715-69038740; SaCas9
gctgaggcatgagaatcac

SEQ ID NO: 17364 - DNA, 18 bp, Artificial Sequence
  Synthetic: FXN 3 forward 9:69038716-69038740; SaCas9
ctgaggcatgagaatcac

SEQ ID NO: 17365 - DNA, 25 bp, Artificial Sequence
  Synthetic: FXN 3 forward 9:69038716-69038747; SaCas9
ctgaggcatgagaatcacttgagcc

SEQ ID NO: 17366 - DNA, 24 bp, Artificial Sequence
  Synthetic: FXN 3 forward 9:69038717-69038747; SaCas9
tgaggcatgagaatcacttgagcc

SEQ ID NO: 17367 - DNA, 23 bp, Artificial Sequence
  Synthetic: FXN 3 forward 9:69038718-69038747; SaCas9
gaggcatgagaatcacttgagcc

SEQ ID NO: 17368 - DNA, 22 bp, Artificial Sequence
  Synthetic: FXN 3 forward 9:69038719-69038747; SaCas9
aggcatgagaatcacttgagcc

SEQ ID NO: 17369 - DNA, 21 bp, Artificial Sequence
  Synthetic: FXN 3 forward 9:69038720-69038747; SaCas9
ggcatgagaatcacttgagcc

SEQ ID NO: 17370 - DNA, 20 bp, Artificial Sequence
  Synthetic: FXN 3 forward 9:69038721-69038747; SaCas9
gcatgagaatcacttgagcc

SEQ ID NO: 17371 - DNA, 19 bp, Artificial Sequence
  Synthetic: FXN 3 forward 9:69038722-69038747; SaCas9
catgagaatcacttgagcc

SEQ ID NO: 17372 - DNA, 18 bp, Artificial Sequence
  Synthetic: FXN 3 forward 9:69038723-69038747; SaCas9
atgagaatcacttgagcc

SEQ ID NO: 17373 - DNA, 25 bp, Artificial Sequence
  Synthetic: FXN 3 forward 9:69038717-69038748; SaCas9
tgaggcatgagaatcacttgagccc

SEQ ID NO: 17374 - DNA, 24 bp, Artificial Sequence
  Synthetic: FXN 3 forward 9:69038718-69038748; SaCas9
gaggcatgagaatcacttgagccc

SEQ ID NO: 17375 - DNA, 23 bp, Artificial Sequence
  Synthetic: FXN 3 forward 9:69038719-69038748; SaCas9
aggcatgagaatcacttgagccc

SEQ ID NO: 17376 - DNA, 22 bp, Artificial Sequence
  Synthetic: FXN 3 forward 9:69038720-69038748; SaCas9
ggcatgagaatcacttgagccc

SEQ ID NO: 17377 - DNA, 21 bp, Artificial Sequence
  Synthetic: FXN 3 forward 9:69038721-69038748; SaCas9
gcatgagaatcacttgagccc

SEQ ID NO: 17378 - DNA, 20 bp, Artificial Sequence
  Synthetic: FXN 3 forward 9:69038722-69038748; SaCas9
catgagaatcacttgagccc

SEQ ID NO: 17379 - DNA, 19 bp, Artificial Sequence
  Synthetic: FXN 3 forward 9:69038723-69038748; SaCas9
atgagaatcacttgagccc

SEQ ID NO: 17380 - DNA, 18 bp, Artificial Sequence
  Synthetic: FXN 3 forward 9:69038724-69038748; SaCas9
tgagaatcacttgagccc

SEQ ID NO: 17381 - DNA, 25 bp, Artificial Sequence
  Synthetic: FXN 3 forward 9:69038723-69038754; SaCas9
atgagaatcacttgagcccaggagg

SEQ ID NO: 17382 - DNA, 24 bp, Artificial Sequence
  Synthetic: FXN 3 forward 9:69038724-69038754; SaCas9
tgagaatcacttgagcccaggagg

SEQ ID NO: 17383 - DNA, 23 bp, Artificial Sequence
  Synthetic: FXN 3 forward 9:69038725-69038754; SaCas9
gagaatcacttgagcccaggagg

SEQ ID NO: 17384 - DNA, 22 bp, Artificial Sequence
  Synthetic: FXN 3 forward 9:69038726-69038754; SaCas9
agaatcacttgagcccaggagg

SEQ ID NO: 17385 - DNA, 21 bp, Artificial Sequence
  Synthetic: FXN 3 forward 9:69038727-69038754; SaCas9
gaatcacttgagcccaggagg

SEQ ID NO: 17386 - DNA, 20 bp, Artificial Sequence
  Synthetic: FXN 3 forward 9:69038728-69038754; SaCas9
aatcacttgagcccaggagg

SEQ ID NO: 17387 - DNA, 19 bp, Artificial Sequence
  Synthetic: FXN 3 forward 9:69038729-69038754; SaCas9
atcacttgagcccaggagg

SEQ ID NO: 17388 - DNA, 18 bp, Artificial Sequence
  Synthetic: FXN 3 forward 9:69038730-69038754; SaCas9
tcacttgagcccaggagg

SEQ ID NO: 17389 - DNA, 25 bp, Artificial Sequence
  Synthetic: FXN 3 forward 9:69038734-69038765; SaCas9
ttgagcccaggaggcagaggttgca

SEQ ID NO: 17390 - DNA, 24 bp, Artificial Sequence
  Synthetic: FXN 3 forward 9:69038735-69038765; SaCas9
tgagcccaggaggcagaggttgca

SEQ ID NO: 17391 - DNA, 23 bp, Artificial Sequence
  Synthetic: FXN 3 forward 9:69038736-69038765; SaCas9
gagcccaggaggcagaggttgca

SEQ ID NO: 17392 - DNA, 22 bp, Artificial Sequence
  Synthetic: FXN 3 forward 9:69038737-69038765; SaCas9
agcccaggaggcagaggttgca

SEQ ID NO: 17393 - DNA, 21 bp, Artificial Sequence
  Synthetic: FXN 3 forward 9:69038738-69038765; SaCas9
gcccaggaggcagaggttgca

SEQ ID NO: 17394 - DNA, 20 bp, Artificial Sequence
  Synthetic: FXN 3 forward 9:69038739-69038765; SaCas9
cccaggaggcagaggttgca

SEQ ID NO: 17395 - DNA, 19 bp, Artificial Sequence
  Synthetic: FXN 3 forward 9:69038740-69038765; SaCas9
ccaggaggcagaggttgca

SEQ ID NO: 17396 - DNA, 18 bp, Artificial Sequence
  Synthetic: FXN 3 forward 9:69038741-69038765; SaCas9
caggaggcagaggttgca

SEQ ID NO: 17397 - DNA, 25 bp, Artificial Sequence
  Synthetic: FXN 3 reverse 9:69038738-69038769; SaCas9
cttggctcactgcaacctctgcctc

SEQ ID NO: 17398 - DNA, 24 bp, Artificial Sequence
  Synthetic: FXN 3 reverse 9:69038739-69038769; SaCas9
ttggctcactgcaacctctgcctc

SEQ ID NO: 17399 - DNA, 23 bp, Artificial Sequence
  Synthetic: FXN 3 reverse 9:69038740-69038769; SaCas9
tggctcactgcaacctctgcctc

SEQ ID NO: 17400 - DNA, 22 bp, Artificial Sequence
  Synthetic: FXN 3 reverse 9:69038741-69038769; SaCas9
ggctcactgcaacctctgcctc

SEQ ID NO: 17401 - DNA, 21 bp, Artificial Sequence
  Synthetic: FXN 3 reverse 9:69038742-69038769; SaCas9
gctcactgcaacctctgcctc

SEQ ID NO: 17402 - DNA, 20 bp, Artificial Sequence
  Synthetic: FXN 3 reverse 9:69038743-69038769; SaCas9
ctcactgcaacctctgcctc

SEQ ID NO: 17403 - DNA, 19 bp, Artificial Sequence
  Synthetic: FXN 3 reverse 9:69038744-69038769; SaCas9
tcactgcaacctctgcctc

SEQ ID NO: 17404 - DNA, 18 bp, Artificial Sequence
  Synthetic: FXN 3 reverse 9:69038745-69038769; SaCas9
cactgcaacctctgcctc

SEQ ID NO: 17405 - DNA, 25 bp, Artificial Sequence
  Synthetic: FXN 3 forward 9:69038747-69038778; SaCas9
gcagaggttgcagtgagccaagatt

SEQ ID NO: 17406 - DNA, 24 bp, Artificial Sequence
  Synthetic: FXN 3 forward 9:69038748-69038778; SaCas9
cagaggttgcagtgagccaagatt

SEQ ID NO: 17407 - DNA, 23 bp, Artificial Sequence
  Synthetic: FXN 3 forward 9:69038749-69038778; SaCas9
agaggttgcagtgagccaagatt

SEQ ID NO: 17408 - DNA, 22 bp, Artificial Sequence
  Synthetic: FXN 3 forward 9:69038750-69038778; SaCas9
gaggttgcagtgagccaagatt

SEQ ID NO: 17409 - DNA, 21 bp, Artificial Sequence
  Synthetic: FXN 3 forward 9:69038751-69038778; SaCas9
aggttgcagtgagccaagatt

SEQ ID NO: 17410 - DNA, 20 bp, Artificial Sequence
  Synthetic: FXN 3 forward 9:69038752-69038778; SaCas9
ggttgcagtgagccaagatt

SEQ ID NO: 17411 - DNA, 19 bp, Artificial Sequence
  Synthetic: FXN 3 forward 9:69038753-69038778; SaCas9
gttgcagtgagccaagatt

SEQ ID NO: 17412 - DNA, 18 bp, Artificial Sequence
  Synthetic: FXN 3 forward 9:69038754-69038778; SaCas9
ttgcagtgagccaagatt

SEQ ID NO: 17413 - DNA, 25 bp, Artificial Sequence
  Synthetic: FXN 3 forward 9:69038748-69038779; SaCas9
cagaggttgcagtgagccaagattt

SEQ ID NO: 17414 - DNA, 24 bp, Artificial Sequence
  Synthetic: FXN 3 forward 9:69038749-69038779; SaCas9
agaggttgcagtgagccaagattt

SEQ ID NO: 17415 - DNA, 23 bp, Artificial Sequence
  Synthetic: FXN 3 forward 9:69038750-69038779; SaCas9
gaggttgcagtgagccaagattt

SEQ ID NO: 17416 - DNA, 22 bp, Artificial Sequence
  Synthetic: FXN 3 forward 9:69038751-69038779; SaCas9
aggttgcagtgagccaagattt

SEQ ID NO: 17417 - DNA, 21 bp, Artificial Sequence
  Synthetic: FXN 3 forward 9:69038752-69038779; SaCas9
ggttgcagtgagccaagattt

SEQ ID NO: 17418 - DNA, 20 bp, Artificial Sequence
  Synthetic: FXN 3 forward 9:69038753-69038779; SaCas9
gttgcagtgagccaagattt

SEQ ID NO: 17419 - DNA, 19 bp, Artificial Sequence
  Synthetic: FXN 3 forward 9:69038754-69038779; SaCas9
ttgcagtgagccaagattt

SEQ ID NO: 17420 - DNA, 18 bp, Artificial Sequence
  Synthetic: FXN 3 forward 9:69038755-69038779; SaCas9
tgcagtgagccaagattt

SEQ ID NO: 17421 - DNA, 25 bp, Artificial Sequence
  Synthetic: FXN 3 forward 9:69038749-69038780; SaCas9
agaggttgcagtgagccaagatttt

SEQ ID NO: 17422 - DNA, 24 bp, Artificial Sequence
  Synthetic: FXN 3 forward 9:69038750-69038780; SaCas9
gaggttgcagtgagccaagatttt

SEQ ID NO: 17423 - DNA, 23 bp, Artificial Sequence
  Synthetic: FXN 3 forward 9:69038751-69038780; SaCas9
aggttgcagtgagccaagatttt

SEQ ID NO: 17424 - DNA, 22 bp, Artificial Sequence
  Synthetic: FXN 3 forward 9:69038752-69038780; SaCas9
ggttgcagtgagccaagatttt

SEQ ID NO: 17425 - DNA, 21 bp, Artificial Sequence
  Synthetic: FXN 3 forward 9:69038753-69038780; SaCas9
gttgcagtgagccaagatttt

SEQ ID NO: 17426 - DNA, 20 bp, Artificial Sequence
  Synthetic: FXN 3 forward 9:69038754-69038780; SaCas9
ttgcagtgagccaagatttt

SEQ ID NO: 17427 - DNA, 19 bp, Artificial Sequence
  Synthetic: FXN 3 forward 9:69038755-69038780; SaCas9
tgcagtgagccaagatttt

SEQ ID NO: 17428 - DNA, 18 bp, Artificial Sequence
  Synthetic: FXN 3 forward 9:69038756-69038780; SaCas9
gcagtgagccaagatttt

SEQ ID NO: 17429 - DNA, 25 bp, Artificial Sequence
  Synthetic: FXN 3 forward 9:69038750-69038781; SaCas9
gaggttgcagtgagccaagattttg

SEQ ID NO: 17430 - DNA, 24 bp, Artificial Sequence
  Synthetic: FXN 3 forward 9:69038751-69038781; SaCas9
aggttgcagtgagccaagattttg

SEQ ID NO: 17431 - DNA, 23 bp, Artificial Sequence
  Synthetic: FXN 3 forward 9:69038752-69038781; SaCas9
ggttgcagtgagccaagattttg

SEQ ID NO: 17432 - DNA, 22 bp, Artificial Sequence
  Synthetic: FXN 3 forward 9:69038753-69038781; SaCas9
gttgcagtgagccaagattttg

SEQ ID NO: 17433 - DNA, 21 bp, Artificial Sequence
  Synthetic: FXN 3 forward 9:69038754-69038781; SaCas9
ttgcagtgagccaagattttg

SEQ ID NO: 17434 - DNA, 20 bp, Artificial Sequence
  Synthetic: FXN 3 forward 9:69038755-69038781; SaCas9
tgcagtgagccaagattttg

SEQ ID NO: 17435 - DNA, 19 bp, Artificial Sequence
  Synthetic: FXN 3 forward 9:69038756-69038781; SaCas9
gcagtgagccaagattttg

SEQ ID NO: 17436 - DNA, 18 bp, Artificial Sequence
  Synthetic: FXN 3 forward 9:69038757-69038781; SaCas9
cagtgagccaagattttg

SEQ ID NO: 17437 - DNA, 25 bp, Artificial Sequence
  Synthetic: FXN 3 reverse 9:69038779-69038810; SaCas9
tattactgattttttttgtatgtca

SEQ ID NO: 17438 - DNA, 24 bp, Artificial Sequence
  Synthetic: FXN 3 reverse 9:69038780-69038810; SaCas9
attactgattttttttgtatgtca

SEQ ID NO: 17439 - DNA, 23 bp, Artificial Sequence
  Synthetic: FXN 3 reverse 9:69038781-69038810; SaCas9
ttactgattttttttgtatgtca

SEQ ID NO: 17440 - DNA, 22 bp, Artificial Sequence
  Synthetic: FXN 3 reverse 9:69038782-69038810; SaCas9
tactgattttttttgtatgtca

SEQ ID NO: 17441 - DNA, 21 bp, Artificial Sequence
  Synthetic: FXN 3 reverse 9:69038783-69038810; SaCas9
actgattttttttgtatgtca

SEQ ID NO: 17442 - DNA, 20 bp, Artificial Sequence
  Synthetic: FXN 3 reverse 9:69038784-69038810; SaCas9
ctgattttttttgtatgtca

SEQ ID NO: 17443 - DNA, 19 bp, Artificial Sequence
  Synthetic: FXN 3 reverse 9:69038785-69038810; SaCas9
tgattttttttgtatgtca

SEQ ID NO: 17444 - DNA, 18 bp, Artificial Sequence
  Synthetic: FXN 3 reverse 9:69038786-69038810; SaCas9
gattttttttgtatgtca

SEQ ID NO: 17445 - DNA, 25 bp, Artificial Sequence
  Synthetic: FXN 3 reverse 9:69038823-69038854; SaCas9
tatgctggaagtatatgagtacgaa

SEQ ID NO: 17446 - DNA, 24 bp, Artificial Sequence
  Synthetic: FXN 3 reverse 9:69038824-69038854; SaCas9
atgctggaagtatatgagtacgaa

SEQ ID NO: 17447 - DNA, 23 bp, Artificial Sequence
  Synthetic: FXN 3 reverse 9:69038825-69038854; SaCas9
tgctggaagtatatgagtacgaa

SEQ ID NO: 17448 - DNA, 22 bp, Artificial Sequence
  Synthetic: FXN 3 reverse 9:69038826-69038854; SaCas9
gctggaagtatatgagtacgaa

SEQ ID NO: 17449 - DNA, 21 bp, Artificial Sequence
  Synthetic: FXN 3 reverse 9:69038827-69038854; SaCas9
ctggaagtatatgagtacgaa

SEQ ID NO: 17450 - DNA, 20 bp, Artificial Sequence
  Synthetic: FXN 3 reverse 9:69038828-69038854; SaCas9
tggaagtatatgagtacgaa

SEQ ID NO: 17451 - DNA, 19 bp, Artificial Sequence
  Synthetic: FXN 3 reverse 9:69038829-69038854; SaCas9
ggaagtatatgagtacgaa

SEQ ID NO: 17452 - DNA, 18 bp, Artificial Sequence
  Synthetic: FXN 3 reverse 9:69038830-69038854; SaCas9
gaagtatatgagtacgaa

SEQ ID NO: 17453 - DNA, 25 bp, Artificial Sequence
  Synthetic: FXN 3 reverse 9:69038828-69038859; SaCas9
tgagatatgctggaagtatatgagt

SEQ ID NO: 17454 - DNA, 24 bp, Artificial Sequence
  Synthetic: FXN 3 reverse 9:69038829-69038859; SaCas9
gagatatgctggaagtatatgagt

SEQ ID NO: 17455 - DNA, 23 bp, Artificial Sequence
  Synthetic: FXN 3 reverse 9:69038830-69038859; SaCas9
agatatgctggaagtatatgagt

SEQ ID NO: 17456 - DNA, 22 bp, Artificial Sequence
  Synthetic: FXN 3 reverse 9:69038831-69038859; SaCas9
gatatgctggaagtatatgagt

SEQ ID NO: 17457 - DNA, 21 bp, Artificial Sequence
  Synthetic: FXN 3 reverse 9:69038832-69038859; SaCas9
atatgctggaagtatatgagt

SEQ ID NO: 17458 - DNA, 20 bp, Artificial Sequence
  Synthetic: FXN 3 reverse 9:69038833-69038859; SaCas9
tatgctggaagtatatgagt

SEQ ID NO: 17459 - DNA, 19 bp, Artificial Sequence
  Synthetic: FXN 3 reverse 9:69038834-69038859; SaCas9
atgctggaagtatatgagt

SEQ ID NO: 17460 - DNA, 18 bp, Artificial Sequence
  Synthetic: FXN 3 reverse 9:69038835-69038859; SaCas9
tgctggaagtatatgagt

SEQ ID NO: 17461 - DNA, 25 bp, Artificial Sequence
  Synthetic: FXN 3 reverse 9:69038834-69038865; SaCas9
gtgaattgagatatgctggaagtat

SEQ ID NO: 17462 - DNA, 24 bp, Artificial Sequence
  Synthetic: FXN 3 reverse 9:69038835-69038865; SaCas9
tgaattgagatatgctggaagtat

SEQ ID NO: 17463 - DNA, 23 bp, Artificial Sequence
  Synthetic: FXN 3 reverse 9:69038836-69038865; SaCas9
gaattgagatatgctggaagtat

SEQ ID NO: 17464 - DNA, 22 bp, Artificial Sequence
  Synthetic: FXN 3 reverse 9:69038837-69038865; SaCas9
aattgagatatgctggaagtat

SEQ ID NO: 17465 - DNA, 21 bp, Artificial Sequence
  Synthetic: FXN 3 reverse 9:69038838-69038865; SaCas9
attgagatatgctggaagtat

SEQ ID NO: 17466 - DNA, 20 bp, Artificial Sequence
  Synthetic: FXN 3 reverse 9:69038839-69038865; SaCas9
ttgagatatgctggaagtat

SEQ ID NO: 17467 - DNA, 19 bp, Artificial Sequence
  Synthetic: FXN 3 reverse 9:69038840-69038865; SaCas9
tgagatatgctggaagtat

SEQ ID NO: 17468 - DNA, 18 bp, Artificial Sequence
  Synthetic: FXN 3 reverse 9:69038841-69038865; SaCas9
gagatatgctggaagtat

SEQ ID NO: 17469 - DNA, 25 bp, Artificial Sequence
  Synthetic: FXN 3 reverse 9:69038843-69038874; SaCas9
ttagaaattgtgaattgagatatgc

SEQ ID NO: 17470 - DNA, 24 bp, Artificial Sequence
  Synthetic: FXN 3 reverse 9:69038844-69038874; SaCas9
tagaaattgtgaattgagatatgc

SEQ ID NO: 17471 - DNA, 23 bp, Artificial Sequence
  Synthetic: FXN 3 reverse 9:69038845-69038874; SaCas9
agaaattgtgaattgagatatgc

SEQ ID NO: 17472 - DNA, 22 bp, Artificial Sequence
  Synthetic: FXN 3 reverse 9:69038846-69038874; SaCas9
gaaattgtgaattgagatatgc

SEQ ID NO: 17473 - DNA, 21 bp, Artificial Sequence
  Synthetic: FXN 3 reverse 9:69038847-69038874; SaCas9
aaattgtgaattgagatatgc

SEQ ID NO: 17474 - DNA, 20 bp, Artificial Sequence
  Synthetic: FXN 3 reverse 9:69038848-69038874; SaCas9
aattgtgaattgagatatgc

SEQ ID NO: 17475 - DNA, 19 bp, Artificial Sequence
  Synthetic: FXN 3 reverse 9:69038849-69038874; SaCas9
attgtgaattgagatatgc

SEQ ID NO: 17476 - DNA, 18 bp, Artificial Sequence
  Synthetic: FXN 3 reverse 9:69038850-69038874; SaCas9
ttgtgaattgagatatgc

SEQ ID NO: 17477 - DNA, 25 bp, Artificial Sequence
  Synthetic: FXN 3 reverse 9:69038844-69038875; SaCas9
cttagaaattgtgaattgagatatg

SEQ ID NO: 17478 - DNA, 24 bp, Artificial Sequence
  Synthetic: FXN 3 reverse 9:69038845-69038875; SaCas9
ttagaaattgtgaattgagatatg

SEQ ID NO: 17479 - DNA, 23 bp, Artificial Sequence
  Synthetic: FXN 3 reverse 9:69038846-69038875; SaCas9
tagaaattgtgaattgagatatg

SEQ ID NO: 17480 - DNA, 22 bp, Artificial Sequence
  Synthetic: FXN 3 reverse 9:69038847-69038875; SaCas9
agaaattgtgaattgagatatg

SEQ ID NO: 17481 - DNA, 21 bp, Artificial Sequence
  Synthetic: FXN 3 reverse 9:69038848-69038875; SaCas9
gaaattgtgaattgagatatg

SEQ ID NO: 17482 - DNA, 20 bp, Artificial Sequence
  Synthetic: FXN 3 reverse 9:69038849-69038875; SaCas9
aaattgtgaattgagatatg

SEQ ID NO: 17483 - DNA, 19 bp, Artificial Sequence
  Synthetic: FXN 3 reverse 9:69038850-69038875; SaCas9
aattgtgaattgagatatg

SEQ ID NO: 17484 - DNA, 18 bp, Artificial Sequence
  Synthetic: FXN 3 reverse 9:69038851-69038875; SaCas9
attgtgaattgagatatg

SEQ ID NO: 17485 - DNA, 25 bp, Artificial Sequence
  Synthetic: FXN 3 reverse 9:69038854-69038885; SaCas9
agagcatttacttagaaattgtgaa

SEQ ID NO: 17486 - DNA, 24 bp, Artificial Sequence
  Synthetic: FXN 3 reverse 9:69038855-69038885; SaCas9
gagcatttacttagaaattgtgaa

SEQ ID NO: 17487 - DNA, 23 bp, Artificial Sequence
  Synthetic: FXN 3 reverse 9:69038856-69038885; SaCas9
agcatttacttagaaattgtgaa

SEQ ID NO: 17488 - DNA, 22 bp, Artificial Sequence
  Synthetic: FXN 3 reverse 9:69038857-69038885; SaCas9
gcatttacttagaaattgtgaa

SEQ ID NO: 17489 - DNA, 21 bp, Artificial Sequence
  Synthetic: FXN 3 reverse 9:69038858-69038885; SaCas9
catttacttagaaattgtgaa

SEQ ID NO: 17490 - DNA, 20 bp, Artificial Sequence
  Synthetic: FXN 3 reverse 9:69038859-69038885; SaCas9
atttacttagaaattgtgaa

SEQ ID NO: 17491 - DNA, 19 bp, Artificial Sequence
  Synthetic: FXN 3 reverse 9:69038860-69038885; SaCas9
tttacttagaaattgtgaa

SEQ ID NO: 17492 - DNA, 18 bp, Artificial Sequence
  Synthetic: FXN 3 reverse 9:69038861-69038885; SaCas9
ttacttagaaattgtgaa

SEQ ID NO: 17493 - DNA, 25 bp, Artificial Sequence
  Synthetic: FXN 3 reverse 9:69038859-69038890; SaCas9
cagatagagcatttacttagaaatt

SEQ ID NO: 17494 - DNA, 24 bp, Artificial Sequence
  Synthetic: FXN 3 reverse 9:69038860-69038890; SaCas9
agatagagcatttacttagaaatt

SEQ ID NO: 17495 - DNA, 23 bp, Artificial Sequence
  Synthetic: FXN 3 reverse 9:69038861-69038890; SaCas9
gatagagcatttacttagaaatt

SEQ ID NO: 17496 - DNA, 22 bp, Artificial Sequence
  Synthetic: FXN 3 reverse 9:69038862-69038890; SaCas9
atagagcatttacttagaaatt

SEQ ID NO: 17497 - DNA, 21 bp, Artificial Sequence
  Synthetic: FXN 3 reverse 9:69038863-69038890; SaCas9
tagagcatttacttagaaatt

SEQ ID NO: 17498 - DNA, 20 bp, Artificial Sequence
  Synthetic: FXN 3 reverse 9:69038864-69038890; SaCas9
agagcatttacttagaaatt

SEQ ID NO: 17499 - DNA, 19 bp, Artificial Sequence
  Synthetic: FXN 3 reverse 9:69038865-69038890; SaCas9
gagcatttacttagaaatt

SEQ ID NO: 17500 - DNA, 18 bp, Artificial Sequence
  Synthetic: FXN 3 reverse 9:69038866-69038890; SaCas9
agcatttacttagaaatt

SEQ ID NO: 17501 - DNA, 25 bp, Artificial Sequence
  Synthetic: FXN 3 reverse 9:69038867-69038898; SaCas9
agtaaatacagatagagcatttact

SEQ ID NO: 17502 - DNA, 24 bp, Artificial Sequence
  Synthetic: FXN 3 reverse 9:69038868-69038898; SaCas9
gtaaatacagatagagcatttact

SEQ ID NO: 17503 - DNA, 23 bp, Artificial Sequence
  Synthetic: FXN 3 reverse 9:69038869-69038898; SaCas9
taaatacagatagagcatttact

SEQ ID NO: 17504 - DNA, 22 bp, Artificial Sequence
  Synthetic: FXN 3 reverse 9:69038870-69038898; SaCas9
aaatacagatagagcatttact

SEQ ID NO: 17505 - DNA, 21 bp, Artificial Sequence
  Synthetic: FXN 3 reverse 9:69038871-69038898; SaCas9
aatacagatagagcatttact

SEQ ID NO: 17506 - DNA, 20 bp, Artificial Sequence
  Synthetic: FXN 3 reverse 9:69038872-69038898; SaCas9
atacagatagagcatttact

SEQ ID NO: 17507 - DNA, 19 bp, Artificial Sequence
  Synthetic: FXN 3 reverse 9:69038873-69038898; SaCas9
tacagatagagcatttact

SEQ ID NO: 17508 - DNA, 18 bp, Artificial Sequence
  Synthetic: FXN 3 reverse 9:69038874-69038898; SaCas9
acagatagagcatttact

SEQ ID NO: 17509 - DNA, 25 bp, Artificial Sequence
  Synthetic: FXN 3 reverse 9:69038880-69038911; SaCas9
tgaattttataaaagtaaatacaga

SEQ ID NO: 17510 - DNA, 24 bp, Artificial Sequence
  Synthetic: FXN 3 reverse 9:69038881-69038911; SaCas9
gaattttataaaagtaaatacaga

SEQ ID NO: 17511 - DNA, 23 bp, Artificial Sequence
  Synthetic: FXN 3 reverse 9:69038882-69038911; SaCas9
aattttataaaagtaaatacaga

SEQ ID NO: 17512 - DNA, 22 bp, Artificial Sequence
  Synthetic: FXN 3 reverse 9:69038883-69038911; SaCas9
attttataaaagtaaatacaga

SEQ ID NO: 17513 - DNA, 21 bp, Artificial Sequence
  Synthetic: FXN 3 reverse 9:69038884-69038911; SaCas9
ttttataaaagtaaatacaga

SEQ ID NO: 17514 - DNA, 20 bp, Artificial Sequence
  Synthetic: FXN 3 reverse 9:69038885-69038911; SaCas9
tttataaaagtaaatacaga

SEQ ID NO: 17515 - DNA, 19 bp, Artificial Sequence
  Synthetic: FXN 3 reverse 9:69038886-69038911; SaCas9
ttataaaagtaaatacaga

SEQ ID NO: 17516 - DNA, 18 bp, Artificial Sequence
  Synthetic: FXN 3 reverse 9:69038887-69038911; SaCas9
tataaaagtaaatacaga

SEQ ID NO: 17517 - DNA, 25 bp, Artificial Sequence
  Synthetic: FXN 3 forward 9:69038895-69038926; SaCas9
acttttataaaattcacaattaaaa

SEQ ID NO: 17518 - DNA, 24 bp, Artificial Sequence
  Synthetic: FXN 3 forward 9:69038896-69038926; SaCas9
cttttataaaattcacaattaaaa

SEQ ID NO: 17519 - DNA, 23 bp, Artificial Sequence
  Synthetic: FXN 3 forward 9:69038897-69038926; SaCas9
ttttataaaattcacaattaaaa

SEQ ID NO: 17520 - DNA, 22 bp, Artificial Sequence
  Synthetic: FXN 3 forward 9:69038898-69038926; SaCas9
tttataaaattcacaattaaaa

SEQ ID NO: 17521 - DNA, 21 bp, Artificial Sequence
  Synthetic: FXN 3 forward 9:69038899-69038926; SaCas9
ttataaaattcacaattaaaa

SEQ ID NO: 17522 - DNA, 20 bp, Artificial Sequence
  Synthetic: FXN 3 forward 9:69038900-69038926; SaCas9
tataaaattcacaattaaaa

SEQ ID NO: 17523 - DNA, 19 bp, Artificial Sequence
  Synthetic: FXN 3 forward 9:69038901-69038926; SaCas9
ataaaattcacaattaaaa

SEQ ID NO: 17524 - DNA, 18 bp, Artificial Sequence
  Synthetic: FXN 3 forward 9:69038902-69038926; SaCas9
taaaattcacaattaaaa

SEQ ID NO: 17525 - DNA, 25 bp, Artificial Sequence
  Synthetic: FXN 3 reverse 9:69038906-69038937; SaCas9
actatgtgaaccttcatttttaatt

SEQ ID NO: 17526 - DNA, 24 bp, Artificial Sequence
  Synthetic: FXN 3 reverse 9:69038907-69038937; SaCas9
ctatgtgaaccttcatttttaatt

SEQ ID NO: 17527 - DNA, 23 bp, Artificial Sequence
  Synthetic: FXN 3 reverse 9:69038908-69038937; SaCas9
tatgtgaaccttcatttttaatt

SEQ ID NO: 17528 - DNA, 22 bp, Artificial Sequence
  Synthetic: FXN 3 reverse 9:69038909-69038937; SaCas9
atgtgaaccttcatttttaatt

SEQ ID NO: 17529 - DNA, 21 bp, Artificial Sequence
  Synthetic: FXN 3 reverse 9:69038910-69038937; SaCas9
tgtgaaccttcatttttaatt

SEQ ID NO: 17530 - DNA, 20 bp, Artificial Sequence
  Synthetic: FXN 3 reverse 9:69038911-69038937; SaCas9
gtgaaccttcatttttaatt

SEQ ID NO: 17531 - DNA, 19 bp, Artificial Sequence
  Synthetic: FXN 3 reverse 9:69038912-69038937; SaCas9
tgaaccttcatttttaatt

SEQ ID NO: 17532 - DNA, 18 bp, Artificial Sequence
  Synthetic: FXN 3 reverse 9:69038913-69038937; SaCas9
gaaccttcatttttaatt

SEQ ID NO: 17533 - DNA, 25 bp, Artificial Sequence
  Synthetic: FXN 3 reverse 9:69038926-69038957; SaCas9
agtgtgtttggaacaacttgactat

SEQ ID NO: 17534 - DNA, 24 bp, Artificial Sequence
  Synthetic: FXN 3 reverse 9:69038927-69038957; SaCas9
gtgtgtttggaacaacttgactat

SEQ ID NO: 17535 - DNA, 23 bp, Artificial Sequence
  Synthetic: FXN 3 reverse 9:69038928-69038957; SaCas9
tgtgtttggaacaacttgactat

SEQ ID NO: 17536 - DNA, 22 bp, Artificial Sequence
  Synthetic: FXN 3 reverse 9:69038929-69038957; SaCas9
gtgtttggaacaacttgactat

SEQ ID NO: 17537 - DNA, 21 bp, Artificial Sequence
  Synthetic: FXN 3 reverse 9:69038930-69038957; SaCas9
tgtttggaacaacttgactat

SEQ ID NO: 17538 - DNA, 20 bp, Artificial Sequence
  Synthetic: FXN 3 reverse 9:69038931-69038957; SaCas9
gtttggaacaacttgactat

SEQ ID NO: 17539 - DNA, 19 bp, Artificial Sequence
  Synthetic: FXN 3 reverse 9:69038932-69038957; SaCas9
tttggaacaacttgactat

SEQ ID NO: 17540 - DNA, 18 bp, Artificial Sequence
  Synthetic: FXN 3 reverse 9:69038933-69038957; SaCas9
ttggaacaacttgactat

SEQ ID NO: 17541 - DNA, 25 bp, Artificial Sequence
  Synthetic: FXN 3 reverse 9:69038943-69038974; SaCas9
agcctaggagacatttaagtgtgtt

SEQ ID NO: 17542 - DNA, 24 bp, Artificial Sequence
  Synthetic: FXN 3 reverse 9:69038944-69038974; SaCas9
gcctaggagacatttaagtgtgtt

SEQ ID NO: 17543 - DNA, 23 bp, Artificial Sequence
  Synthetic: FXN 3 reverse 9:69038945-69038974; SaCas9
cctaggagacatttaagtgtgtt

SEQ ID NO: 17544 - DNA, 22 bp, Artificial Sequence
  Synthetic: FXN 3 reverse 9:69038946-69038974; SaCas9
ctaggagacatttaagtgtgtt

SEQ ID NO: 17545 - DNA, 21 bp, Artificial Sequence
  Synthetic: FXN 3 reverse 9:69038947-69038974; SaCas9
taggagacatttaagtgtgtt

SEQ ID NO: 17546 - DNA, 20 bp, Artificial Sequence
  Synthetic: FXN 3 reverse 9:69038948-69038974; SaCas9
aggagacatttaagtgtgtt

SEQ ID NO: 17547 - DNA, 19 bp, Artificial Sequence
  Synthetic: FXN 3 reverse 9:69038949-69038974; SaCas9
ggagacatttaagtgtgtt

SEQ ID NO: 17548 - DNA, 18 bp, Artificial Sequence
  Synthetic: FXN 3 reverse 9:69038950-69038974; SaCas9
gagacatttaagtgtgtt

SEQ ID NO: 17549 - DNA, 25 bp, Artificial Sequence
  Synthetic: FXN 3 reverse 9:69038944-69038975; SaCas9
cagcctaggagacatttaagtgtgt

SEQ ID NO: 17550 - DNA, 24 bp, Artificial Sequence
  Synthetic: FXN 3 reverse 9:69038945-69038975; SaCas9
agcctaggagacatttaagtgtgt

SEQ ID NO: 17551 - DNA, 23 bp, Artificial Sequence
  Synthetic: FXN 3 reverse 9:69038946-69038975; SaCas9
gcctaggagacatttaagtgtgt

SEQ ID NO: 17552 - DNA, 22 bp, Artificial Sequence
  Synthetic: FXN 3 reverse 9:69038947-69038975; SaCas9
cctaggagacatttaagtgtgt

SEQ ID NO: 17553 - DNA, 21 bp, Artificial Sequence
  Synthetic: FXN 3 reverse 9:69038948-69038975; SaCas9
ctaggagacatttaagtgtgt

SEQ ID NO: 17554 - DNA, 20 bp, Artificial Sequence
  Synthetic: FXN 3 reverse 9:69038949-69038975; SaCas9
taggagacatttaagtgtgt

SEQ ID NO: 17555 - DNA, 19 bp, Artificial Sequence
  Synthetic: FXN 3 reverse 9:69038950-69038975; SaCas9
aggagacatttaagtgtgt

SEQ ID NO: 17556 - DNA, 18 bp, Artificial Sequence
  Synthetic: FXN 3 reverse 9:69038951-69038975; SaCas9
ggagacatttaagtgtgt

SEQ ID NO: 17557 - DNA, 25 bp, Artificial Sequence
  Synthetic: FXN 3 forward 9:69038947-69038978; SaCas9
caaacacacttaaatgtctcctagg

SEQ ID NO: 17558 - DNA, 24 bp, Artificial Sequence
  Synthetic: FXN 3 forward 9:69038948-69038978; SaCas9
aaacacacttaaatgtctcctagg

SEQ ID NO: 17559 - DNA, 23 bp, Artificial Sequence
  Synthetic: FXN 3 forward 9:69038949-69038978; SaCas9
aacacacttaaatgtctcctagg

SEQ ID NO: 17560 - DNA, 22 bp, Artificial Sequence
  Synthetic: FXN 3 forward 9:69038950-69038978; SaCas9
acacacttaaatgtctcctagg

SEQ ID NO: 17561 - DNA, 21 bp, Artificial Sequence
  Synthetic: FXN 3 forward 9:69038951-69038978; SaCas9
cacacttaaatgtctcctagg

SEQ ID NO: 17562 - DNA, 20 bp, Artificial Sequence
  Synthetic: FXN 3 forward 9:69038952-69038978; SaCas9
acacttaaatgtctcctagg

SEQ ID NO: 17563 - DNA, 19 bp, Artificial Sequence
  Synthetic: FXN 3 forward 9:69038953-69038978; SaCas9
cacttaaatgtctcctagg

SEQ ID NO: 17564 - DNA, 18 bp, Artificial Sequence
  Synthetic: FXN 3 forward 9:69038954-69038978; SaCas9
acttaaatgtctcctagg

SEQ ID NO: 17565 - DNA, 25 bp, Artificial Sequence
  Synthetic: FXN 3 reverse 9:69038963-69038994; SaCas9
aggtgtgagcaaccacacccagcct

SEQ ID NO: 17566 - DNA, 24 bp, Artificial Sequence
  Synthetic: FXN 3 reverse 9:69038964-69038994; SaCas9
ggtgtgagcaaccacacccagcct

SEQ ID NO: 17567 - DNA, 23 bp, Artificial Sequence
  Synthetic: FXN 3 reverse 9:69038965-69038994; SaCas9
gtgtgagcaaccacacccagcct

SEQ ID NO: 17568 - DNA, 22 bp, Artificial Sequence
  Synthetic: FXN 3 reverse 9:69038966-69038994; SaCas9
tgtgagcaaccacacccagcct

SEQ ID NO: 17569 - DNA, 21 bp, Artificial Sequence
  Synthetic: FXN 3 reverse 9:69038967-69038994; SaCas9
gtgagcaaccacacccagcct

SEQ ID NO: 17570 - DNA, 20 bp, Artificial Sequence
  Synthetic: FXN 3 reverse 9:69038968-69038994; SaCas9
tgagcaaccacacccagcct

SEQ ID NO: 17571 - DNA, 19 bp, Artificial Sequence
  Synthetic: FXN 3 reverse 9:69038969-69038994; SaCas9
gagcaaccacacccagcct

SEQ ID NO: 17572 - DNA, 18 bp, Artificial Sequence
  Synthetic: FXN 3 reverse 9:69038970-69038994; SaCas9
agcaaccacacccagcct

SEQ ID NO: 17573 - DNA, 25 bp, Artificial Sequence
  Synthetic: FXN 3 reverse 9:69038964-69038995; SaCas9
caggtgtgagcaaccacacccagcc

SEQ ID NO: 17574 - DNA, 24 bp, Artificial Sequence
  Synthetic: FXN 3 reverse 9:69038965-69038995; SaCas9
aggtgtgagcaaccacacccagcc

SEQ ID NO: 17575 - DNA, 23 bp, Artificial Sequence
  Synthetic: FXN 3 reverse 9:69038966-69038995; SaCas9
ggtgtgagcaaccacacccagcc

SEQ ID NO: 17576 - DNA, 22 bp, Artificial Sequence
  Synthetic: FXN 3 reverse 9:69038967-69038995; SaCas9
gtgtgagcaaccacacccagcc

SEQ ID NO: 17577 - DNA, 21 bp, Artificial Sequence
  Synthetic: FXN 3 reverse 9:69038968-69038995; SaCas9
tgtgagcaaccacacccagcc

SEQ ID NO: 17578 - DNA, 20 bp, Artificial Sequence
  Synthetic: FXN 3 reverse 9:69038969-69038995; SaCas9
gtgagcaaccacacccagcc

SEQ ID NO: 17579 - DNA, 19 bp, Artificial Sequence
  Synthetic: FXN 3 reverse 9:69038970-69038995; SaCas9
tgagcaaccacacccagcc

SEQ ID NO: 17580 - DNA, 18 bp, Artificial Sequence
  Synthetic: FXN 3 reverse 9:69038971-69038995; SaCas9
gagcaaccacacccagcc

SEQ ID NO: 17581 - DNA, 25 bp, Artificial Sequence
  Synthetic: FXN 3 forward 9:69038983-69039014; SaCas9
tgctcacacctgtaatcccagcact

SEQ ID NO: 17582 - DNA, 24 bp, Artificial Sequence
  Synthetic: FXN 3 forward 9:69038984-69039014; SaCas9
gctcacacctgtaatcccagcact

SEQ ID NO: 17583 - DNA, 23 bp, Artificial Sequence
  Synthetic: FXN 3 forward 9:69038985-69039014; SaCas9
ctcacacctgtaatcccagcact

SEQ ID NO: 17584 - DNA, 22 bp, Artificial Sequence
  Synthetic: FXN 3 forward 9:69038986-69039014; SaCas9
tcacacctgtaatcccagcact

SEQ ID NO: 17585 - DNA, 21 bp, Artificial Sequence
  Synthetic: FXN 3 forward 9:69038987-69039014; SaCas9
cacacctgtaatcccagcact

SEQ ID NO: 17586 - DNA, 20 bp, Artificial Sequence
  Synthetic: FXN 3 forward 9:69038988-69039014; SaCas9
acacctgtaatcccagcact

SEQ ID NO: 17587 - DNA, 19 bp, Artificial Sequence
  Synthetic: FXN 3 forward 9:69038989-69039014; SaCas9
cacctgtaatcccagcact

SEQ ID NO: 17588 - DNA, 18 bp, Artificial Sequence
  Synthetic: FXN 3 forward 9:69038990-69039014; SaCas9
acctgtaatcccagcact

SEQ ID NO: 17589 - DNA, 25 bp, Artificial Sequence
  Synthetic: FXN 3 forward 9:69038984-69039015; SaCas9
gctcacacctgtaatcccagcactt

SEQ ID NO: 17590 - DNA, 24 bp, Artificial Sequence
  Synthetic: FXN 3 forward 9:69038985-69039015; SaCas9
ctcacacctgtaatcccagcactt

SEQ ID NO: 17591 - DNA, 23 bp, Artificial Sequence
  Synthetic: FXN 3 forward 9:69038986-69039015; SaCas9
tcacacctgtaatcccagcactt

SEQ ID NO: 17592 - DNA, 22 bp, Artificial Sequence
  Synthetic: FXN 3 forward 9:69038987-69039015; SaCas9
cacacctgtaatcccagcactt

SEQ ID NO: 17593 - DNA, 21 bp, Artificial Sequence
  Synthetic: FXN 3 forward 9:69038988-69039015; SaCas9
acacctgtaatcccagcactt

SEQ ID NO: 17594 - DNA, 20 bp, Artificial Sequence
  Synthetic: FXN 3 forward 9:69038989-69039015; SaCas9
cacctgtaatcccagcactt

SEQ ID NO: 17595 - DNA, 19 bp, Artificial Sequence
  Synthetic: FXN 3 forward 9:69038990-69039015; SaCas9
acctgtaatcccagcactt

SEQ ID NO: 17596 - DNA, 18 bp, Artificial Sequence
  Synthetic: FXN 3 forward 9:69038991-69039015; SaCas9
cctgtaatcccagcactt

SEQ ID NO: 17597 - DNA, 25 bp, Artificial Sequence
  Synthetic: FXN 3 reverse 9:69038984-69039015; SaCas9
ctcccaaagtgctgggattacaggt

SEQ ID NO: 17598 - DNA, 24 bp, Artificial Sequence
  Synthetic: FXN 3 reverse 9:69038985-69039015; SaCas9
tcccaaagtgctgggattacaggt

SEQ ID NO: 17599 - DNA, 23 bp, Artificial Sequence
  Synthetic: FXN 3 reverse 9:69038986-69039015; SaCas9
cccaaagtgctgggattacaggt

SEQ ID NO: 17600 - DNA, 22 bp, Artificial Sequence
  Synthetic: FXN 3 reverse 9:69038987-69039015; SaCas9
ccaaagtgctgggattacaggt

SEQ ID NO: 17601 - DNA, 21 bp, Artificial Sequence
  Synthetic: FXN 3 reverse 9:69038988-69039015; SaCas9
caaagtgctgggattacaggt

SEQ ID NO: 17602 - DNA, 20 bp, Artificial Sequence
  Synthetic: FXN 3 reverse 9:69038989-69039015; SaCas9
aaagtgctgggattacaggt

SEQ ID NO: 17603 - DNA, 19 bp, Artificial Sequence
  Synthetic: FXN 3 reverse 9:69038990-69039015; SaCas9
aagtgctgggattacaggt

SEQ ID NO: 17604 - DNA, 18 bp, Artificial Sequence
  Synthetic: FXN 3 reverse 9:69038991-69039015; SaCas9
agtgctgggattacaggt

SEQ ID NO: 17605 - DNA, 25 bp, Artificial Sequence
  Synthetic: FXN 3 forward 9:69038985-69039016; SaCas9
ctcacacctgtaatcccagcacttt

SEQ ID NO: 17606 - DNA, 24 bp, Artificial Sequence
  Synthetic: FXN 3 forward 9:69038986-69039016; SaCas9
tcacacctgtaatcccagcacttt

SEQ ID NO: 17607 - DNA, 23 bp, Artificial Sequence
  Synthetic: FXN 3 forward 9:69038987-69039016; SaCas9
cacacctgtaatcccagcacttt

SEQ ID NO: 17608 - DNA, 22 bp, Artificial Sequence
  Synthetic: FXN 3 forward 9:69038988-69039016; SaCas9
acacctgtaatcccagcacttt

SEQ ID NO: 17609 - DNA, 21 bp, Artificial Sequence
  Synthetic: FXN 3 forward 9:69038989-69039016; SaCas9
cacctgtaatcccagcacttt

SEQ ID NO: 17610 - DNA, 20 bp, Artificial Sequence
  Synthetic: FXN 3 forward 9:69038990-69039016; SaCas9
acctgtaatcccagcacttt

SEQ ID NO: 17611 - DNA, 19 bp, Artificial Sequence
  Synthetic: FXN 3 forward 9:69038991-69039016; SaCas9
cctgtaatcccagcacttt

SEQ ID NO: 17612 - DNA, 18 bp, Artificial Sequence
  Synthetic: FXN 3 forward 9:69038992-69039016; SaCas9
ctgtaatcccagcacttt

SEQ ID NO: 17613 - DNA, 25 bp, Artificial Sequence
  Synthetic: FXN 3 forward 9:69038991-69039022; SaCas9
cctgtaatcccagcactttgggagg

SEQ ID NO: 17614 - DNA, 24 bp, Artificial Sequence
  Synthetic: FXN 3 forward 9:69038992-69039022; SaCas9
ctgtaatcccagcactttgggagg

SEQ ID NO: 17615 - DNA, 23 bp, Artificial Sequence
  Synthetic: FXN 3 forward 9:69038993-69039022; SaCas9
tgtaatcccagcactttgggagg

SEQ ID NO: 17616 - DNA, 22 bp, Artificial Sequence
  Synthetic: FXN 3 forward 9:69038994-69039022; SaCas9
gtaatcccagcactttgggagg

SEQ ID NO: 17617 - DNA, 21 bp, Artificial Sequence
  Synthetic: FXN 3 forward 9:69038995-69039022; SaCas9
taatcccagcactttgggagg

SEQ ID NO: 17618 - DNA, 20 bp, Artificial Sequence
  Synthetic: FXN 3 forward 9:69038996-69039022; SaCas9
aatcccagcactttgggagg

SEQ ID NO: 17619 - DNA, 19 bp, Artificial Sequence
  Synthetic: FXN 3 forward 9:69038997-69039022; SaCas9
atcccagcactttgggagg

SEQ ID NO: 17620 - DNA, 18 bp, Artificial Sequence
  Synthetic: FXN 3 forward 9:69038998-69039022; SaCas9
tcccagcactttgggagg

SEQ ID NO: 17621 - DNA, 25 bp, Artificial Sequence
  Synthetic: FXN 3 forward 9:69038996-69039027; SaCas9
aatcccagcactttgggaggctgag

SEQ ID NO: 17622 - DNA, 24 bp, Artificial Sequence
  Synthetic: FXN 3 forward 9:69038997-69039027; SaCas9
atcccagcactttgggaggctgag

SEQ ID NO: 17623 - DNA, 23 bp, Artificial Sequence
  Synthetic: FXN 3 forward 9:69038998-69039027; SaCas9
tcccagcactttgggaggctgag

SEQ ID NO: 17624 - DNA, 22 bp, Artificial Sequence
  Synthetic: FXN 3 forward 9:69038999-69039027; SaCas9
cccagcactttgggaggctgag

SEQ ID NO: 17625 - DNA, 21 bp, Artificial Sequence
  Synthetic: FXN 3 forward 9:69039000-69039027; SaCas9
ccagcactttgggaggctgag

SEQ ID NO: 17626 - DNA, 20 bp, Artificial Sequence
  Synthetic: FXN 3 forward 9:69039001-69039027; SaCas9
cagcactttgggaggctgag

SEQ ID NO: 17627 - DNA, 19 bp, Artificial Sequence
  Synthetic: FXN 3 forward 9:69039002-69039027; SaCas9
agcactttgggaggctgag

SEQ ID NO: 17628 - DNA, 18 bp, Artificial Sequence
  Synthetic: FXN 3 forward 9:69039003-69039027; SaCas9
gcactttgggaggctgag

SEQ ID NO: 17629 - DNA, 25 bp, Artificial Sequence
  Synthetic: FXN 3 reverse 9:69038997-69039028; SaCas9
cgcccatctcagcctcccaaagtgc

SEQ ID NO: 17630 - DNA, 24 bp, Artificial Sequence
  Synthetic: FXN 3 reverse 9:69038998-69039028; SaCas9
gcccatctcagcctcccaaagtgc

SEQ ID NO: 17631 - DNA, 23 bp, Artificial Sequence
  Synthetic: FXN 3 reverse 9:69038999-69039028; SaCas9
cccatctcagcctcccaaagtgc

SEQ ID NO: 17632 - DNA, 22 bp, Artificial Sequence
  Synthetic: FXN 3 reverse 9:69039000-69039028; SaCas9
ccatctcagcctcccaaagtgc

SEQ ID NO: 17633 - DNA, 21 bp, Artificial Sequence
  Synthetic: FXN 3 reverse 9:69039001-69039028; SaCas9
catctcagcctcccaaagtgc

SEQ ID NO: 17634 - DNA, 20 bp, Artificial Sequence
  Synthetic: FXN 3 reverse 9:69039002-69039028; SaCas9
atctcagcctcccaaagtgc

SEQ ID NO: 17635 - DNA, 19 bp, Artificial Sequence
  Synthetic: FXN 3 reverse 9:69039003-69039028; SaCas9
tctcagcctcccaaagtgc

SEQ ID NO: 17636 - DNA, 18 bp, Artificial Sequence
  Synthetic: FXN 3 reverse 9:69039004-69039028; SaCas9
ctcagcctcccaaagtgc

SEQ ID NO: 17637 - DNA, 25 bp, Artificial Sequence
  Synthetic: FXN 3 reverse 9:69038998-69039029; SaCas9
ccgcccatctcagcctcccaaagtg

SEQ ID NO: 17638 - DNA, 24 bp, Artificial Sequence
  Synthetic: FXN 3 reverse 9:69038999-69039029; SaCas9
cgcccatctcagcctcccaaagtg

SEQ ID NO: 17639 - DNA, 23 bp, Artificial Sequence
  Synthetic: FXN 3 reverse 9:69039000-69039029; SaCas9
gcccatctcagcctcccaaagtg

SEQ ID NO: 17640 - DNA, 22 bp, Artificial Sequence
  Synthetic: FXN 3 reverse 9:69039001-69039029; SaCas9
cccatctcagcctcccaaagtg

SEQ ID NO: 17641 - DNA, 21 bp, Artificial Sequence
  Synthetic: FXN 3 reverse 9:69039002-69039029; SaCas9
ccatctcagcctcccaaagtg

SEQ ID NO: 17642 - DNA, 20 bp, Artificial Sequence
  Synthetic: FXN 3 reverse 9:69039003-69039029; SaCas9
catctcagcctcccaaagtg

SEQ ID NO: 17643 - DNA, 19 bp, Artificial Sequence
  Synthetic: FXN 3 reverse 9:69039004-69039029; SaCas9
atctcagcctcccaaagtg

SEQ ID NO: 17644 - DNA, 18 bp, Artificial Sequence
  Synthetic: FXN 3 reverse 9:69039005-69039029; SaCas9
tctcagcctcccaaagtg

SEQ ID NO: 17645 - DNA, 25 bp, Artificial Sequence
  Synthetic: FXN 3 forward 9:69039000-69039031; SaCas9
ccagcactttgggaggctgagatgg

SEQ ID NO: 17646 - DNA, 24 bp, Artificial Sequence
  Synthetic: FXN 3 forward 9:69039001-69039031; SaCas9
cagcactttgggaggctgagatgg

SEQ ID NO: 17647 - DNA, 23 bp, Artificial Sequence
  Synthetic: FXN 3 forward 9:69039002-69039031; SaCas9
agcactttgggaggctgagatgg

SEQ ID NO: 17648 - DNA, 22 bp, Artificial Sequence
  Synthetic: FXN 3 forward 9:69039003-69039031; SaCas9
gcactttgggaggctgagatgg

SEQ ID NO: 17649 - DNA, 21 bp, Artificial Sequence
  Synthetic: FXN 3 forward 9:69039004-69039031; SaCas9
cactttgggaggctgagatgg

SEQ ID NO: 17650 - DNA, 20 bp, Artificial Sequence
  Synthetic: FXN 3 forward 9:69039005-69039031; SaCas9
actttgggaggctgagatgg

SEQ ID NO: 17651 - DNA, 19 bp, Artificial Sequence
  Synthetic: FXN 3 forward 9:69039006-69039031; SaCas9
ctttgggaggctgagatgg

SEQ ID NO: 17652 - DNA, 18 bp, Artificial Sequence
  Synthetic: FXN 3 forward 9:69039007-69039031; SaCas9
tttgggaggctgagatgg

SEQ ID NO: 17653 - DNA, 25 bp, Artificial Sequence
  Synthetic: FXN 3 forward 9:69039009-69039040; SaCas9
tgggaggctgagatgggcggatcac

SEQ ID NO: 17654 - DNA, 24 bp, Artificial Sequence
  Synthetic: FXN 3 forward 9:69039010-69039040; SaCas9
gggaggctgagatgggcggatcac

SEQ ID NO: 17655 - DNA, 23 bp, Artificial Sequence
  Synthetic: FXN 3 forward 9:69039011-69039040; SaCas9
ggaggctgagatgggcggatcac

SEQ ID NO: 17656 - DNA, 22 bp, Artificial Sequence
  Synthetic: FXN 3 forward 9:69039012-69039040; SaCas9
gaggctgagatgggcggatcac

SEQ ID NO: 17657 - DNA, 21 bp, Artificial Sequence
  Synthetic: FXN 3 forward 9:69039013-69039040; SaCas9
aggctgagatgggcggatcac

SEQ ID NO: 17658 - DNA, 20 bp, Artificial Sequence
  Synthetic: FXN 3 forward 9:69039014-69039040; SaCas9
ggctgagatgggcggatcac

SEQ ID NO: 17659 - DNA, 19 bp, Artificial Sequence
  Synthetic: FXN 3 forward 9:69039015-69039040; SaCas9
gctgagatgggcggatcac

SEQ ID NO: 17660 - DNA, 18 bp, Artificial Sequence
  Synthetic: FXN 3 forward 9:69039016-69039040; SaCas9
ctgagatgggcggatcac

SEQ ID NO: 17661 - DNA, 25 bp, Artificial Sequence
  Synthetic: FXN 3 forward 9:69039016-69039047; SaCas9
ctgagatgggcggatcacctgaggt

SEQ ID NO: 17662 - DNA, 24 bp, Artificial Sequence
  Synthetic: FXN 3 forward 9:69039017-69039047; SaCas9
tgagatgggcggatcacctgaggt

SEQ ID NO: 17663 - DNA, 23 bp, Artificial Sequence
  Synthetic: FXN 3 forward 9:69039018-69039047; SaCas9
gagatgggcggatcacctgaggt

SEQ ID NO: 17664 - DNA, 22 bp, Artificial Sequence
  Synthetic: FXN 3 forward 9:69039019-69039047; SaCas9
agatgggcggatcacctgaggt

SEQ ID NO: 17665 - DNA, 21 bp, Artificial Sequence
  Synthetic: FXN 3 forward 9:69039020-69039047; SaCas9
gatgggcggatcacctgaggt

SEQ ID NO: 17666 - DNA, 20 bp, Artificial Sequence
  Synthetic: FXN 3 forward 9:69039021-69039047; SaCas9
atgggcggatcacctgaggt

SEQ ID NO: 17667 - DNA, 19 bp, Artificial Sequence
  Synthetic: FXN 3 forward 9:69039022-69039047; SaCas9
tgggcggatcacctgaggt

SEQ ID NO: 17668 - DNA, 18 bp, Artificial Sequence
  Synthetic: FXN 3 forward 9:69039023-69039047; SaCas9
gggcggatcacctgaggt

SEQ ID NO: 17669 - DNA, 25 bp, Artificial Sequence
  Synthetic: FXN 3 forward 9:69039017-69039048; SaCas9
tgagatgggcggatcacctgaggtc

SEQ ID NO: 17670 - DNA, 24 bp, Artificial Sequence
  Synthetic: FXN 3 forward 9:69039018-69039048; SaCas9
gagatgggcggatcacctgaggtc

SEQ ID NO: 17671 - DNA, 23 bp, Artificial Sequence
  Synthetic: FXN 3 forward 9:69039019-69039048; SaCas9
agatgggcggatcacctgaggtc

SEQ ID NO: 17672 - DNA, 22 bp, Artificial Sequence
  Synthetic: FXN 3 forward 9:69039020-69039048; SaCas9
gatgggcggatcacctgaggtc

SEQ ID NO: 17673 - DNA, 21 bp, Artificial Sequence
  Synthetic: FXN 3 forward 9:69039021-69039048; SaCas9
atgggcggatcacctgaggtc

SEQ ID NO: 17674 - DNA, 20 bp, Artificial Sequence
  Synthetic: FXN 3 forward 9:69039022-69039048; SaCas9
tgggcggatcacctgaggtc

SEQ ID NO: 17675 - DNA, 19 bp, Artificial Sequence
  Synthetic: FXN 3 forward 9:69039023-69039048; SaCas9
gggcggatcacctgaggtc

SEQ ID NO: 17676 - DNA, 18 bp, Artificial Sequence
  Synthetic: FXN 3 forward 9:69039024-69039048; SaCas9
ggcggatcacctgaggtc

SEQ ID NO: 17677 - DNA, 25 bp, Artificial Sequence
  Synthetic: FXN 3 forward 9:69039023-69039054; SaCas9
gggcggatcacctgaggtcaggagt

SEQ ID NO: 17678 - DNA, 24 bp, Artificial Sequence
  Synthetic: FXN 3 forward 9:69039024-69039054; SaCas9
ggcggatcacctgaggtcaggagt

SEQ ID NO: 17679 - DNA, 23 bp, Artificial Sequence
  Synthetic: FXN 3 forward 9:69039025-69039054; SaCas9
gcggatcacctgaggtcaggagt

SEQ ID NO: 17680 - DNA, 22 bp, Artificial Sequence
  Synthetic: FXN 3 forward 9:69039026-69039054; SaCas9
cggatcacctgaggtcaggagt

SEQ ID NO: 17681 - DNA, 21 bp, Artificial Sequence
  Synthetic: FXN 3 forward 9:69039027-69039054; SaCas9
ggatcacctgaggtcaggagt

SEQ ID NO: 17682 - DNA, 20 bp, Artificial Sequence
  Synthetic: FXN 3 forward 9:69039028-69039054; SaCas9
gatcacctgaggtcaggagt

SEQ ID NO: 17683 - DNA, 19 bp, Artificial Sequence
  Synthetic: FXN 3 forward 9:69039029-69039054; SaCas9
atcacctgaggtcaggagt

SEQ ID NO: 17684 - DNA, 18 bp, Artificial Sequence
  Synthetic: FXN 3 forward 9:69039030-69039054; SaCas9
tcacctgaggtcaggagt

SEQ ID NO: 17685 - DNA, 25 bp, Artificial Sequence
  Synthetic: FXN 3 forward 9:69039046-69039077; SaCas9
gtttgagaccagcctggccaacatg

SEQ ID NO: 17686 - DNA, 24 bp, Artificial Sequence
  Synthetic: FXN 3 forward 9:69039047-69039077; SaCas9
tttgagaccagcctggccaacatg

SEQ ID NO: 17687 - DNA, 23 bp, Artificial Sequence
  Synthetic: FXN 3 forward 9:69039048-69039077; SaCas9
ttgagaccagcctggccaacatg

SEQ ID NO: 17688 - DNA, 22 bp, Artificial Sequence
  Synthetic: FXN 3 forward 9:69039049-69039077; SaCas9
tgagaccagcctggccaacatg

SEQ ID NO: 17689 - DNA, 21 bp, Artificial Sequence
  Synthetic: FXN 3 forward 9:69039050-69039077; SaCas9
gagaccagcctggccaacatg

SEQ ID NO: 17690 - DNA, 20 bp, Artificial Sequence
  Synthetic: FXN 3 forward 9:69039051-69039077; SaCas9
agaccagcctggccaacatg

SEQ ID NO: 17691 - DNA, 19 bp, Artificial Sequence
  Synthetic: FXN 3 forward 9:69039052-69039077; SaCas9
gaccagcctggccaacatg

SEQ ID NO: 17692 - DNA, 18 bp, Artificial Sequence
  Synthetic: FXN 3 forward 9:69039053-69039077; SaCas9
accagcctggccaacatg

SEQ ID NO: 17693 - DNA, 25 bp, Artificial Sequence
  Synthetic: FXN 3 reverse 9:69039076-69039107; SaCas9
ctaatttttgtatttttagtagaga

SEQ ID NO: 17694 - DNA, 24 bp, Artificial Sequence
  Synthetic: FXN 3 reverse 9:69039077-69039107; SaCas9
taatttttgtatttttagtagaga

SEQ ID NO: 17695 - DNA, 23 bp, Artificial Sequence
  Synthetic: FXN 3 reverse 9:69039078-69039107; SaCas9
aatttttgtatttttagtagaga

SEQ ID NO: 17696 - DNA, 22 bp, Artificial Sequence
  Synthetic: FXN 3 reverse 9:69039079-69039107; SaCas9
atttttgtatttttagtagaga

SEQ ID NO: 17697 - DNA, 21 bp, Artificial Sequence
  Synthetic: FXN 3 reverse 9:69039080-69039107; SaCas9
tttttgtatttttagtagaga

SEQ ID NO: 17698 - DNA, 20 bp, Artificial Sequence
  Synthetic: FXN 3 reverse 9:69039081-69039107; SaCas9
ttttgtatttttagtagaga

SEQ ID NO: 17699 - DNA, 19 bp, Artificial Sequence
  Synthetic: FXN 3 reverse 9:69039082-69039107; SaCas9
tttgtatttttagtagaga

SEQ ID NO: 17700 - DNA, 18 bp, Artificial Sequence
  Synthetic: FXN 3 reverse 9:69039083-69039107; SaCas9
ttgtatttttagtagaga

SEQ ID NO: 17701 - DNA, 25 bp, Artificial Sequence
  Synthetic: FXN 3 reverse 9:69039077-69039108; SaCas9
gctaatttttgtatttttagtagag

SEQ ID NO: 17702 - DNA, 24 bp, Artificial Sequence
  Synthetic: FXN 3 reverse 9:69039078-69039108; SaCas9
ctaatttttgtatttttagtagag

SEQ ID NO: 17703 - DNA, 23 bp, Artificial Sequence
  Synthetic: FXN 3 reverse 9:69039079-69039108; SaCas9
taatttttgtatttttagtagag

SEQ ID NO: 17704 - DNA, 22 bp, Artificial Sequence
  Synthetic: FXN 3 reverse 9:69039080-69039108; SaCas9
aatttttgtatttttagtagag

SEQ ID NO: 17705 - DNA, 21 bp, Artificial Sequence
  Synthetic: FXN 3 reverse 9:69039081-69039108; SaCas9
atttttgtatttttagtagag

SEQ ID NO: 17706 - DNA, 20 bp, Artificial Sequence
  Synthetic: FXN 3 reverse 9:69039082-69039108; SaCas9
tttttgtatttttagtagag

SEQ ID NO: 17707 - DNA, 19 bp, Artificial Sequence
  Synthetic: FXN 3 reverse 9:69039083-69039108; SaCas9
ttttgtatttttagtagag

SEQ ID NO: 17708 - DNA, 18 bp, Artificial Sequence
  Synthetic: FXN 3 reverse 9:69039084-69039108; SaCas9
tttgtatttttagtagag

SEQ ID NO: 17709 - DNA, 25 bp, Artificial Sequence
  Synthetic: FXN 3 forward 9:69039082-69039113; SaCas9
tctctactaaaaatacaaaaattag

SEQ ID NO: 17710 - DNA, 24 bp, Artificial Sequence
  Synthetic: FXN 3 forward 9:69039083-69039113; SaCas9
ctctactaaaaatacaaaaattag

SEQ ID NO: 17711 - DNA, 23 bp, Artificial Sequence
  Synthetic: FXN 3 forward 9:69039084-69039113; SaCas9
tctactaaaaatacaaaaattag

SEQ ID NO: 17712 - DNA, 22 bp, Artificial Sequence
  Synthetic: FXN 3 forward 9:69039085-69039113; SaCas9
ctactaaaaatacaaaaattag

SEQ ID NO: 17713 - DNA, 21 bp, Artificial Sequence
  Synthetic: FXN 3 forward 9:69039086-69039113; SaCas9
tactaaaaatacaaaaattag

SEQ ID NO: 17714 - DNA, 20 bp, Artificial Sequence
  Synthetic: FXN 3 forward 9:69039087-69039113; SaCas9
actaaaaatacaaaaattag

SEQ ID NO: 17715 - DNA, 19 bp, Artificial Sequence
  Synthetic: FXN 3 forward 9:69039088-69039113; SaCas9
ctaaaaatacaaaaattag

SEQ ID NO: 17716 - DNA, 18 bp, Artificial Sequence
  Synthetic: FXN 3 forward 9:69039089-69039113; SaCas9
taaaaatacaaaaattag

SEQ ID NO: 17717 - DNA, 25 bp, Artificial Sequence
  Synthetic: FXN 3 reverse 9:69039082-69039113; SaCas9
atccagctaatttttgtatttttag

SEQ ID NO: 17718 - DNA, 24 bp, Artificial Sequence
  Synthetic: FXN 3 reverse 9:69039083-69039113; SaCas9
tccagctaatttttgtatttttag

SEQ ID NO: 17719 - DNA, 23 bp, Artificial Sequence
  Synthetic: FXN 3 reverse 9:69039084-69039113; SaCas9
ccagctaatttttgtatttttag

SEQ ID NO: 17720 - DNA, 22 bp, Artificial Sequence
  Synthetic: FXN 3 reverse 9:69039085-69039113; SaCas9
cagctaatttttgtatttttag

SEQ ID NO: 17721 - DNA, 21 bp, Artificial Sequence
  Synthetic: FXN 3 reverse 9:69039086-69039113; SaCas9
agctaatttttgtatttttag

SEQ ID NO: 17722 - DNA, 20 bp, Artificial Sequence
  Synthetic: FXN 3 reverse 9:69039087-69039113; SaCas9
gctaatttttgtatttttag

SEQ ID NO: 17723 - DNA, 19 bp, Artificial Sequence
  Synthetic: FXN 3 reverse 9:69039088-69039113; SaCas9
ctaatttttgtatttttag

SEQ ID NO: 17724 - DNA, 18 bp, Artificial Sequence
  Synthetic: FXN 3 reverse 9:69039089-69039113; SaCas9
taatttttgtatttttag

SEQ ID NO: 17725 - DNA, 25 bp, Artificial Sequence
  Synthetic: FXN 3 forward 9:69039119-69039150; SaCas9
gcactcacctgtaatcccagctact

SEQ ID NO: 17726 - DNA, 24 bp, Artificial Sequence
  Synthetic: FXN 3 forward 9:69039120-69039150; SaCas9
cactcacctgtaatcccagctact

SEQ ID NO: 17727 - DNA, 23 bp, Artificial Sequence
  Synthetic: FXN 3 forward 9:69039121-69039150; SaCas9
actcacctgtaatcccagctact

SEQ ID NO: 17728 - DNA, 22 bp, Artificial Sequence
  Synthetic: FXN 3 forward 9:69039122-69039150; SaCas9
ctcacctgtaatcccagctact

SEQ ID NO: 17729 - DNA, 21 bp, Artificial Sequence
  Synthetic: FXN 3 forward 9:69039123-69039150; SaCas9
tcacctgtaatcccagctact

SEQ ID NO: 17730 - DNA, 20 bp, Artificial Sequence
  Synthetic: FXN 3 forward 9:69039124-69039150; SaCas9
cacctgtaatcccagctact

SEQ ID NO: 17731 - DNA, 19 bp, Artificial Sequence
  Synthetic: FXN 3 forward 9:69039125-69039150; SaCas9
acctgtaatcccagctact

SEQ ID NO: 17732 - DNA, 18 bp, Artificial Sequence
  Synthetic: FXN 3 forward 9:69039126-69039150; SaCas9
cctgtaatcccagctact

SEQ ID NO: 17733 - DNA, 25 bp, Artificial Sequence
  Synthetic: FXN 3 forward 9:69039120-69039151; SaCas9
cactcacctgtaatcccagctactc

SEQ ID NO: 17734 - DNA, 24 bp, Artificial Sequence
  Synthetic: FXN 3 forward 9:69039121-69039151; SaCas9
actcacctgtaatcccagctactc

SEQ ID NO: 17735 - DNA, 23 bp, Artificial Sequence
  Synthetic: FXN 3 forward 9:69039122-69039151; SaCas9
ctcacctgtaatcccagctactc

SEQ ID NO: 17736 - DNA, 22 bp, Artificial Sequence
  Synthetic: FXN 3 forward 9:69039123-69039151; SaCas9
tcacctgtaatcccagctactc

SEQ ID NO: 17737 - DNA, 21 bp, Artificial Sequence
  Synthetic: FXN 3 forward 9:69039124-69039151; SaCas9
cacctgtaatcccagctactc

SEQ ID NO: 17738 - DNA, 20 bp, Artificial Sequence
  Synthetic: FXN 3 forward 9:69039125-69039151; SaCas9
acctgtaatcccagctactc

SEQ ID NO: 17739 - DNA, 19 bp, Artificial Sequence
  Synthetic: FXN 3 forward 9:69039126-69039151; SaCas9
cctgtaatcccagctactc

SEQ ID NO: 17740 - DNA, 18 bp, Artificial Sequence
  Synthetic: FXN 3 forward 9:69039127-69039151; SaCas9
ctgtaatcccagctactc

SEQ ID NO: 17741 - DNA, 25 bp, Artificial Sequence
  Synthetic: FXN 3 reverse 9:69039121-69039152; SaCas9
gcctcctgagtagctgggattacag

SEQ ID NO: 17742 - DNA, 24 bp, Artificial Sequence
  Synthetic: FXN 3 reverse 9:69039122-69039152; SaCas9
cctcctgagtagctgggattacag

SEQ ID NO: 17743 - DNA, 23 bp, Artificial Sequence
  Synthetic: FXN 3 reverse 9:69039123-69039152; SaCas9
ctcctgagtagctgggattacag

SEQ ID NO: 17744 - DNA, 22 bp, Artificial Sequence
  Synthetic: FXN 3 reverse 9:69039124-69039152; SaCas9
tcctgagtagctgggattacag

SEQ ID NO: 17745 - DNA, 21 bp, Artificial Sequence
  Synthetic: FXN 3 reverse 9:69039125-69039152; SaCas9
cctgagtagctgggattacag

SEQ ID NO: 17746 - DNA, 20 bp, Artificial Sequence
  Synthetic: FXN 3 reverse 9:69039126-69039152; SaCas9
ctgagtagctgggattacag

SEQ ID NO: 17747 - DNA, 19 bp, Artificial Sequence
  Synthetic: FXN 3 reverse 9:69039127-69039152; SaCas9
tgagtagctgggattacag

SEQ ID NO: 17748 - DNA, 18 bp, Artificial Sequence
  Synthetic: FXN 3 reverse 9:69039128-69039152; SaCas9
gagtagctgggattacag

SEQ ID NO: 17749 - DNA, 25 bp, Artificial Sequence
  Synthetic: FXN 3 forward 9:69039126-69039157; SaCas9
cctgtaatcccagctactcaggagg

SEQ ID NO: 17750 - DNA, 24 bp, Artificial Sequence
  Synthetic: FXN 3 forward 9:69039127-69039157; SaCas9
ctgtaatcccagctactcaggagg

SEQ ID NO: 17751 - DNA, 23 bp, Artificial Sequence
  Synthetic: FXN 3 forward 9:69039128-69039157; SaCas9
tgtaatcccagctactcaggagg

SEQ ID NO: 17752 - DNA, 22 bp, Artificial Sequence
  Synthetic: FXN 3 forward 9:69039129-69039157; SaCas9
gtaatcccagctactcaggagg

SEQ ID NO: 17753 - DNA, 21 bp, Artificial Sequence
  Synthetic: FXN 3 forward 9:69039130-69039157; SaCas9
taatcccagctactcaggagg

SEQ ID NO: 17754 - DNA, 20 bp, Artificial Sequence
  Synthetic: FXN 3 forward 9:69039131-69039157; SaCas9
aatcccagctactcaggagg

SEQ ID NO: 17755 - DNA, 19 bp, Artificial Sequence
  Synthetic: FXN 3 forward 9:69039132-69039157; SaCas9
atcccagctactcaggagg

SEQ ID NO: 17756 - DNA, 18 bp, Artificial Sequence
  Synthetic: FXN 3 forward 9:69039133-69039157; SaCas9
tcccagctactcaggagg

SEQ ID NO: 17757 - DNA, 25 bp, Artificial Sequence
  Synthetic: FXN 3 forward 9:69039132-69039163; SaCas9
atcccagctactcaggaggctgagg

SEQ ID NO: 17758 - DNA, 24 bp, Artificial Sequence
  Synthetic: FXN 3 forward 9:69039133-69039163; SaCas9
tcccagctactcaggaggctgagg

SEQ ID NO: 17759 - DNA, 23 bp, Artificial Sequence
  Synthetic: FXN 3 forward 9:69039134-69039163; SaCas9
cccagctactcaggaggctgagg

SEQ ID NO: 17760 - DNA, 22 bp, Artificial Sequence
  Synthetic: FXN 3 forward 9:69039135-69039163; SaCas9
ccagctactcaggaggctgagg

SEQ ID NO: 17761 - DNA, 21 bp, Artificial Sequence
  Synthetic: FXN 3 forward 9:69039136-69039163; SaCas9
cagctactcaggaggctgagg

SEQ ID NO: 17762 - DNA, 20 bp, Artificial Sequence
  Synthetic: FXN 3 forward 9:69039137-69039163; SaCas9
agctactcaggaggctgagg

SEQ ID NO: 17763 - DNA, 19 bp, Artificial Sequence
  Synthetic: FXN 3 forward 9:69039138-69039163; SaCas9
gctactcaggaggctgagg

SEQ ID NO: 17764 - DNA, 18 bp, Artificial Sequence
  Synthetic: FXN 3 forward 9:69039139-69039163; SaCas9
ctactcaggaggctgagg

SEQ ID NO: 17765 - DNA, 25 bp, Artificial Sequence
  Synthetic: FXN 3 reverse 9:69039132-69039163; SaCas9
atcctgcctcagcctcctgagtagc

SEQ ID NO: 17766 - DNA, 24 bp, Artificial Sequence
  Synthetic: FXN 3 reverse 9:69039133-69039163; SaCas9
tcctgcctcagcctcctgagtagc

SEQ ID NO: 17767 - DNA, 23 bp, Artificial Sequence
  Synthetic: FXN 3 reverse 9:69039134-69039163; SaCas9
cctgcctcagcctcctgagtagc

SEQ ID NO: 17768 - DNA, 22 bp, Artificial Sequence
  Synthetic: FXN 3 reverse 9:69039135-69039163; SaCas9
ctgcctcagcctcctgagtagc

SEQ ID NO: 17769 - DNA, 21 bp, Artificial Sequence
  Synthetic: FXN 3 reverse 9:69039136-69039163; SaCas9
tgcctcagcctcctgagtagc

SEQ ID NO: 17770 - DNA, 20 bp, Artificial Sequence
  Synthetic: FXN 3 reverse 9:69039137-69039163; SaCas9
gcctcagcctcctgagtagc

SEQ ID NO: 17771 - DNA, 19 bp, Artificial Sequence
  Synthetic: FXN 3 reverse 9:69039138-69039163; SaCas9
cctcagcctcctgagtagc

SEQ ID NO: 17772 - DNA, 18 bp, Artificial Sequence
  Synthetic: FXN 3 reverse 9:69039139-69039163; SaCas9
ctcagcctcctgagtagc

SEQ ID NO: 17773 - DNA, 25 bp, Artificial Sequence
  Synthetic: FXN 3 reverse 9:69039133-69039164; SaCas9
tatcctgcctcagcctcctgagtag

SEQ ID NO: 17774 - DNA, 24 bp, Artificial Sequence
  Synthetic: FXN 3 reverse 9:69039134-69039164; SaCas9
atcctgcctcagcctcctgagtag

SEQ ID NO: 17775 - DNA, 23 bp, Artificial Sequence
  Synthetic: FXN 3 reverse 9:69039135-69039164; SaCas9
tcctgcctcagcctcctgagtag

SEQ ID NO: 17776 - DNA, 22 bp, Artificial Sequence
  Synthetic: FXN 3 reverse 9:69039136-69039164; SaCas9
cctgcctcagcctcctgagtag

SEQ ID NO: 17777 - DNA, 21 bp, Artificial Sequence
  Synthetic: FXN 3 reverse 9:69039137-69039164; SaCas9
ctgcctcagcctcctgagtag

SEQ ID NO: 17778 - DNA, 20 bp, Artificial Sequence
  Synthetic: FXN 3 reverse 9:69039138-69039164; SaCas9
tgcctcagcctcctgagtag

SEQ ID NO: 17779 - DNA, 19 bp, Artificial Sequence
  Synthetic: FXN 3 reverse 9:69039139-69039164; SaCas9
gcctcagcctcctgagtag

SEQ ID NO: 17780 - DNA, 18 bp, Artificial Sequence
  Synthetic: FXN 3 reverse 9:69039140-69039164; SaCas9
cctcagcctcctgagtag

SEQ ID NO: 17781 - DNA, 25 bp, Artificial Sequence
  Synthetic: FXN 3 reverse 9:69039141-69039172; SaCas9
caagcaattatcctgcctcagcctc

SEQ ID NO: 17782 - DNA, 24 bp, Artificial Sequence
  Synthetic: FXN 3 reverse 9:69039142-69039172; SaCas9
aagcaattatcctgcctcagcctc

SEQ ID NO: 17783 - DNA, 23 bp, Artificial Sequence
  Synthetic: FXN 3 reverse 9:69039143-69039172; SaCas9
agcaattatcctgcctcagcctc

SEQ ID NO: 17784 - DNA, 22 bp, Artificial Sequence
  Synthetic: FXN 3 reverse 9:69039144-69039172; SaCas9
gcaattatcctgcctcagcctc

SEQ ID NO: 17785 - DNA, 21 bp, Artificial Sequence
  Synthetic: FXN 3 reverse 9:69039145-69039172; SaCas9
caattatcctgcctcagcctc

SEQ ID NO: 17786 - DNA, 20 bp, Artificial Sequence
  Synthetic: FXN 3 reverse 9:69039146-69039172; SaCas9
aattatcctgcctcagcctc

SEQ ID NO: 17787 - DNA, 19 bp, Artificial Sequence
  Synthetic: FXN 3 reverse 9:69039147-69039172; SaCas9
attatcctgcctcagcctc

SEQ ID NO: 17788 - DNA, 18 bp, Artificial Sequence
  Synthetic: FXN 3 reverse 9:69039148-69039172; SaCas9
ttatcctgcctcagcctc

SEQ ID NO: 17789 - DNA, 25 bp, Artificial Sequence
  Synthetic: FXN 3 forward 9:69039144-69039175; SaCas9
caggaggctgaggcaggataattgc

SEQ ID NO: 17790 - DNA, 24 bp, Artificial Sequence
  Synthetic: FXN 3 forward 9:69039145-69039175; SaCas9
aggaggctgaggcaggataattgc

SEQ ID NO: 17791 - DNA, 23 bp, Artificial Sequence
  Synthetic: FXN 3 forward 9:69039146-69039175; SaCas9
ggaggctgaggcaggataattgc

SEQ ID NO: 17792 - DNA, 22 bp, Artificial Sequence
  Synthetic: FXN 3 forward 9:69039147-69039175; SaCas9
gaggctgaggcaggataattgc

SEQ ID NO: 17793 - DNA, 21 bp, Artificial Sequence
  Synthetic: FXN 3 forward 9:69039148-69039175; SaCas9
aggctgaggcaggataattgc

SEQ ID NO: 17794 - DNA, 20 bp, Artificial Sequence
  Synthetic: FXN 3 forward 9:69039149-69039175; SaCas9
ggctgaggcaggataattgc

SEQ ID NO: 17795 - DNA, 19 bp, Artificial Sequence
  Synthetic: FXN 3 forward 9:69039150-69039175; SaCas9
gctgaggcaggataattgc

SEQ ID NO: 17796 - DNA, 18 bp, Artificial Sequence
  Synthetic: FXN 3 forward 9:69039151-69039175; SaCas9
ctgaggcaggataattgc

SEQ ID NO: 17797 - DNA, 25 bp, Artificial Sequence
  Synthetic: FXN 3 forward 9:69039150-69039181; SaCas9
gctgaggcaggataattgcttgaac

SEQ ID NO: 17798 - DNA, 24 bp, Artificial Sequence
  Synthetic: FXN 3 forward 9:69039151-69039181; SaCas9
ctgaggcaggataattgcttgaac

SEQ ID NO: 17799 - DNA, 23 bp, Artificial Sequence
  Synthetic: FXN 3 forward 9:69039152-69039181; SaCas9
tgaggcaggataattgcttgaac

SEQ ID NO: 17800 - DNA, 22 bp, Artificial Sequence
  Synthetic: FXN 3 forward 9:69039153-69039181; SaCas9
gaggcaggataattgcttgaac

SEQ ID NO: 17801 - DNA, 21 bp, Artificial Sequence
  Synthetic: FXN 3 forward 9:69039154-69039181; SaCas9
aggcaggataattgcttgaac

SEQ ID NO: 17802 - DNA, 20 bp, Artificial Sequence
  Synthetic: FXN 3 forward 9:69039155-69039181; SaCas9
ggcaggataattgcttgaac

SEQ ID NO: 17803 - DNA, 19 bp, Artificial Sequence
  Synthetic: FXN 3 forward 9:69039156-69039181; SaCas9
gcaggataattgcttgaac

SEQ ID NO: 17804 - DNA, 18 bp, Artificial Sequence
  Synthetic: FXN 3 forward 9:69039157-69039181; SaCas9
caggataattgcttgaac

SEQ ID NO: 17805 - DNA, 25 bp, Artificial Sequence
  Synthetic: FXN 3 forward 9:69039151-69039182; SaCas9
ctgaggcaggataattgcttgaacc

SEQ ID NO: 17806 - DNA, 24 bp, Artificial Sequence
  Synthetic: FXN 3 forward 9:69039152-69039182; SaCas9
tgaggcaggataattgcttgaacc

SEQ ID NO: 17807 - DNA, 23 bp, Artificial Sequence
  Synthetic: FXN 3 forward 9:69039153-69039182; SaCas9
gaggcaggataattgcttgaacc

SEQ ID NO: 17808 - DNA, 22 bp, Artificial Sequence
  Synthetic: FXN 3 forward 9:69039154-69039182; SaCas9
aggcaggataattgcttgaacc

SEQ ID NO: 17809 - DNA, 21 bp, Artificial Sequence
  Synthetic: FXN 3 forward 9:69039155-69039182; SaCas9
ggcaggataattgcttgaacc

SEQ ID NO: 17810 - DNA, 20 bp, Artificial Sequence
  Synthetic: FXN 3 forward 9:69039156-69039182; SaCas9
gcaggataattgcttgaacc

SEQ ID NO: 17811 - DNA, 19 bp, Artificial Sequence
  Synthetic: FXN 3 forward 9:69039157-69039182; SaCas9
caggataattgcttgaacc

SEQ ID NO: 17812 - DNA, 18 bp, Artificial Sequence
  Synthetic: FXN 3 forward 9:69039158-69039182; SaCas9
aggataattgcttgaacc

SEQ ID NO: 17813 - DNA, 25 bp, Artificial Sequence
  Synthetic: FXN 3 forward 9:69039152-69039183; SaCas9
tgaggcaggataattgcttgaaccc

SEQ ID NO: 17814 - DNA, 24 bp, Artificial Sequence
  Synthetic: FXN 3 forward 9:69039153-69039183; SaCas9
gaggcaggataattgcttgaaccc

SEQ ID NO: 17815 - DNA, 23 bp, Artificial Sequence
  Synthetic: FXN 3 forward 9:69039154-69039183; SaCas9
aggcaggataattgcttgaaccc

SEQ ID NO: 17816 - DNA, 22 bp, Artificial Sequence
  Synthetic: FXN 3 forward 9:69039155-69039183; SaCas9
ggcaggataattgcttgaaccc

SEQ ID NO: 17817 - DNA, 21 bp, Artificial Sequence
  Synthetic: FXN 3 forward 9:69039156-69039183; SaCas9
gcaggataattgcttgaaccc

SEQ ID NO: 17818 - DNA, 20 bp, Artificial Sequence
  Synthetic: FXN 3 forward 9:69039157-69039183; SaCas9
caggataattgcttgaaccc

SEQ ID NO: 17819 - DNA, 19 bp, Artificial Sequence
  Synthetic: FXN 3 forward 9:69039158-69039183; SaCas9
aggataattgcttgaaccc

SEQ ID NO: 17820 - DNA, 18 bp, Artificial Sequence
  Synthetic: FXN 3 forward 9:69039159-69039183; SaCas9
ggataattgcttgaaccc

SEQ ID NO: 17821 - DNA, 25 bp, Artificial Sequence
  Synthetic: FXN 3 forward 9:69039160-69039191; SaCas9
gataattgcttgaacccgggaggtg

SEQ ID NO: 17822 - DNA, 24 bp, Artificial Sequence
  Synthetic: FXN 3 forward 9:69039161-69039191; SaCas9
ataattgcttgaacccgggaggtg

SEQ ID NO: 17823 - DNA, 23 bp, Artificial Sequence
  Synthetic: FXN 3 forward 9:69039162-69039191; SaCas9
taattgcttgaacccgggaggtg

SEQ ID NO: 17824 - DNA, 22 bp, Artificial Sequence
  Synthetic: FXN 3 forward 9:69039163-69039191; SaCas9
aattgcttgaacccgggaggtg

SEQ ID NO: 17825 - DNA, 21 bp, Artificial Sequence
  Synthetic: FXN 3 forward 9:69039164-69039191; SaCas9
attgcttgaacccgggaggtg

SEQ ID NO: 17826 - DNA, 20 bp, Artificial Sequence
  Synthetic: FXN 3 forward 9:69039165-69039191; SaCas9
ttgcttgaacccgggaggtg

SEQ ID NO: 17827 - DNA, 19 bp, Artificial Sequence
  Synthetic: FXN 3 forward 9:69039166-69039191; SaCas9
tgcttgaacccgggaggtg

SEQ ID NO: 17828 - DNA, 18 bp, Artificial Sequence
  Synthetic: FXN 3 forward 9:69039167-69039191; SaCas9
gcttgaacccgggaggtg

SEQ ID NO: 17829 - DNA, 25 bp, Artificial Sequence
  Synthetic: FXN 3 forward 9:69039161-69039192; SaCas9
ataattgcttgaacccgggaggtgg

SEQ ID NO: 17830 - DNA, 24 bp, Artificial Sequence
  Synthetic: FXN 3 forward 9:69039162-69039192; SaCas9
taattgcttgaacccgggaggtgg

SEQ ID NO: 17831 - DNA, 23 bp, Artificial Sequence
  Synthetic: FXN 3 forward 9:69039163-69039192; SaCas9
aattgcttgaacccgggaggtgg

SEQ ID NO: 17832 - DNA, 22 bp, Artificial Sequence
  Synthetic: FXN 3 forward 9:69039164-69039192; SaCas9
attgcttgaacccgggaggtgg

SEQ ID NO: 17833 - DNA, 21 bp, Artificial Sequence
  Synthetic: FXN 3 forward 9:69039165-69039192; SaCas9
ttgcttgaacccgggaggtgg

SEQ ID NO: 17834 - DNA, 20 bp, Artificial Sequence
  Synthetic: FXN 3 forward 9:69039166-69039192; SaCas9
tgcttgaacccgggaggtgg

SEQ ID NO: 17835 - DNA, 19 bp, Artificial Sequence
  Synthetic: FXN 3 forward 9:69039167-69039192; SaCas9
gcttgaacccgggaggtgg

SEQ ID NO: 17836 - DNA, 18 bp, Artificial Sequence
  Synthetic: FXN 3 forward 9:69039168-69039192; SaCas9
cttgaacccgggaggtgg

SEQ ID NO: 17837 - DNA, 25 bp, Artificial Sequence
  Synthetic: FXN 3 forward 9:69039172-69039203; SaCas9
aacccgggaggtggtggaggttgca

SEQ ID NO: 17838 - DNA, 24 bp, Artificial Sequence
  Synthetic: FXN 3 forward 9:69039173-69039203; SaCas9
acccgggaggtggtggaggttgca

SEQ ID NO: 17839 - DNA, 23 bp, Artificial Sequence
  Synthetic: FXN 3 forward 9:69039174-69039203; SaCas9
cccgggaggtggtggaggttgca

SEQ ID NO: 17840 - DNA, 22 bp, Artificial Sequence
  Synthetic: FXN 3 forward 9:69039175-69039203; SaCas9
ccgggaggtggtggaggttgca

SEQ ID NO: 17841 - DNA, 21 bp, Artificial Sequence
  Synthetic: FXN 3 forward 9:69039176-69039203; SaCas9
cgggaggtggtggaggttgca

SEQ ID NO: 17842 - DNA, 20 bp, Artificial Sequence
  Synthetic: FXN 3 forward 9:69039177-69039203; SaCas9
gggaggtggtggaggttgca

SEQ ID NO: 17843 - DNA, 19 bp, Artificial Sequence
  Synthetic: FXN 3 forward 9:69039178-69039203; SaCas9
ggaggtggtggaggttgca

SEQ ID NO: 17844 - DNA, 18 bp, Artificial Sequence
  Synthetic: FXN 3 forward 9:69039179-69039203; SaCas9
gaggtggtggaggttgca

SEQ ID NO: 17845 - DNA, 25 bp, Artificial Sequence
  Synthetic: FXN 3 reverse 9:69039173-69039204; SaCas9
ggctcactgcaacctccaccacctc

SEQ ID NO: 17846 - DNA, 24 bp, Artificial Sequence
  Synthetic: FXN 3 reverse 9:69039174-69039204; SaCas9
gctcactgcaacctccaccacctc

SEQ ID NO: 17847 - DNA, 23 bp, Artificial Sequence
  Synthetic: FXN 3 reverse 9:69039175-69039204; SaCas9
ctcactgcaacctccaccacctc

SEQ ID NO: 17848 - DNA, 22 bp, Artificial Sequence
  Synthetic: FXN 3 reverse 9:69039176-69039204; SaCas9
tcactgcaacctccaccacctc

SEQ ID NO: 17849 - DNA, 21 bp, Artificial Sequence
  Synthetic: FXN 3 reverse 9:69039177-69039204; SaCas9
cactgcaacctccaccacctc

SEQ ID NO: 17850 - DNA, 20 bp, Artificial Sequence
  Synthetic: FXN 3 reverse 9:69039178-69039204; SaCas9
actgcaacctccaccacctc

SEQ ID NO: 17851 - DNA, 19 bp, Artificial Sequence
  Synthetic: FXN 3 reverse 9:69039179-69039204; SaCas9
ctgcaacctccaccacctc

SEQ ID NO: 17852 - DNA, 18 bp, Artificial Sequence
  Synthetic: FXN 3 reverse 9:69039180-69039204; SaCas9
tgcaacctccaccacctc

SEQ ID NO: 17853 - DNA, 25 bp, Artificial Sequence
  Synthetic: FXN 3 forward 9:69039177-69039208; SaCas9
gggaggtggtggaggttgcagtgag

SEQ ID NO: 17854 - DNA, 24 bp, Artificial Sequence
  Synthetic: FXN 3 forward 9:69039178-69039208; SaCas9
ggaggtggtggaggttgcagtgag

SEQ ID NO: 17855 - DNA, 23 bp, Artificial Sequence
  Synthetic: FXN 3 forward 9:69039179-69039208; SaCas9
gaggtggtggaggttgcagtgag

SEQ ID NO: 17856 - DNA, 22 bp, Artificial Sequence
  Synthetic: FXN 3 forward 9:69039180-69039208; SaCas9
aggtggtggaggttgcagtgag

SEQ ID NO: 17857 - DNA, 21 bp, Artificial Sequence
  Synthetic: FXN 3 forward 9:69039181-69039208; SaCas9
ggtggtggaggttgcagtgag

SEQ ID NO: 17858 - DNA, 20 bp, Artificial Sequence
  Synthetic: FXN 3 forward 9:69039182-69039208; SaCas9
gtggtggaggttgcagtgag

SEQ ID NO: 17859 - DNA, 19 bp, Artificial Sequence
  Synthetic: FXN 3 forward 9:69039183-69039208; SaCas9
tggtggaggttgcagtgag

SEQ ID NO: 17860 - DNA, 18 bp, Artificial Sequence
  Synthetic: FXN 3 forward 9:69039184-69039208; SaCas9
ggtggaggttgcagtgag

SEQ ID NO: 17861 - DNA, 25 bp, Artificial Sequence
  Synthetic: FXN 3 forward 9:69039203-69039234; SaCas9
cgagatcgcaccactgccttccaac

SEQ ID NO: 17862 - DNA, 24 bp, Artificial Sequence
  Synthetic: FXN 3 forward 9:69039204-69039234; SaCas9
gagatcgcaccactgccttccaac

SEQ ID NO: 17863 - DNA, 23 bp, Artificial Sequence
  Synthetic: FXN 3 forward 9:69039205-69039234; SaCas9
agatcgcaccactgccttccaac

SEQ ID NO: 17864 - DNA, 22 bp, Artificial Sequence
  Synthetic: FXN 3 forward 9:69039206-69039234; SaCas9
gatcgcaccactgccttccaac

SEQ ID NO: 17865 - DNA, 21 bp, Artificial Sequence
  Synthetic: FXN 3 forward 9:69039207-69039234; SaCas9
atcgcaccactgccttccaac

SEQ ID NO: 17866 - DNA, 20 bp, Artificial Sequence
  Synthetic: FXN 3 forward 9:69039208-69039234; SaCas9
tcgcaccactgccttccaac

SEQ ID NO: 17867 - DNA, 19 bp, Artificial Sequence
  Synthetic: FXN 3 forward 9:69039209-69039234; SaCas9
cgcaccactgccttccaac

SEQ ID NO: 17868 - DNA, 18 bp, Artificial Sequence
  Synthetic: FXN 3 forward 9:69039210-69039234; SaCas9
gcaccactgccttccaac

SEQ ID NO: 17869 - DNA, 25 bp, Artificial Sequence
  Synthetic: FXN 3 forward 9:69039211-69039242; SaCas9
caccactgccttccaacctgggcga

SEQ ID NO: 17870 - DNA, 24 bp, Artificial Sequence
  Synthetic: FXN 3 forward 9:69039212-69039242; SaCas9
accactgccttccaacctgggcga

SEQ ID NO: 17871 - DNA, 23 bp, Artificial Sequence
  Synthetic: FXN 3 forward 9:69039213-69039242; SaCas9
ccactgccttccaacctgggcga

SEQ ID NO: 17872 - DNA, 22 bp, Artificial Sequence
  Synthetic: FXN 3 forward 9:69039214-69039242; SaCas9
cactgccttccaacctgggcga

SEQ ID NO: 17873 - DNA, 21 bp, Artificial Sequence
  Synthetic: FXN 3 forward 9:69039215-69039242; SaCas9
actgccttccaacctgggcga

SEQ ID NO: 17874 - DNA, 20 bp, Artificial Sequence
  Synthetic: FXN 3 forward 9:69039216-69039242; SaCas9
ctgccttccaacctgggcga

SEQ ID NO: 17875 - DNA, 19 bp, Artificial Sequence
  Synthetic: FXN 3 forward 9:69039217-69039242; SaCas9
tgccttccaacctgggcga

SEQ ID NO: 17876 - DNA, 18 bp, Artificial Sequence
  Synthetic: FXN 3 forward 9:69039218-69039242; SaCas9
gccttccaacctgggcga

SEQ ID NO: 17877 - DNA, 25 bp, Artificial Sequence
  Synthetic: FXN 3 forward 9:69039215-69039246; SaCas9
actgccttccaacctgggcgacaga

SEQ ID NO: 17878 - DNA, 24 bp, Artificial Sequence
  Synthetic: FXN 3 forward 9:69039216-69039246; SaCas9
ctgccttccaacctgggcgacaga

SEQ ID NO: 17879 - DNA, 23 bp, Artificial Sequence
  Synthetic: FXN 3 forward 9:69039217-69039246; SaCas9
tgccttccaacctgggcgacaga

SEQ ID NO: 17880 - DNA, 22 bp, Artificial Sequence
  Synthetic: FXN 3 forward 9:69039218-69039246; SaCas9
gccttccaacctgggcgacaga

SEQ ID NO: 17881 - DNA, 21 bp, Artificial Sequence
  Synthetic: FXN 3 forward 9:69039219-69039246; SaCas9
ccttccaacctgggcgacaga

SEQ ID NO: 17882 - DNA, 20 bp, Artificial Sequence
  Synthetic: FXN 3 forward 9:69039220-69039246; SaCas9
cttccaacctgggcgacaga

SEQ ID NO: 17883 - DNA, 19 bp, Artificial Sequence
  Synthetic: FXN 3 forward 9:69039221-69039246; SaCas9
ttccaacctgggcgacaga

SEQ ID NO: 17884 - DNA, 18 bp, Artificial Sequence
  Synthetic: FXN 3 forward 9:69039222-69039246; SaCas9
tccaacctgggcgacaga

SEQ ID NO: 17885 - DNA, 25 bp, Artificial Sequence
  Synthetic: FXN 3 reverse 9:69039220-69039251; SaCas9
cggagtctcgctctgtcgcccaggt

SEQ ID NO: 17886 - DNA, 24 bp, Artificial Sequence
  Synthetic: FXN 3 reverse 9:69039221-69039251; SaCas9
ggagtctcgctctgtcgcccaggt

SEQ ID NO: 17887 - DNA, 23 bp, Artificial Sequence
  Synthetic: FXN 3 reverse 9:69039222-69039251; SaCas9
gagtctcgctctgtcgcccaggt

SEQ ID NO: 17888 - DNA, 22 bp, Artificial Sequence
  Synthetic: FXN 3 reverse 9:69039223-69039251; SaCas9
agtctcgctctgtcgcccaggt

SEQ ID NO: 17889 - DNA, 21 bp, Artificial Sequence
  Synthetic: FXN 3 reverse 9:69039224-69039251; SaCas9
gtctcgctctgtcgcccaggt

SEQ ID NO: 17890 - DNA, 20 bp, Artificial Sequence
  Synthetic: FXN 3 reverse 9:69039225-69039251; SaCas9
tctcgctctgtcgcccaggt

SEQ ID NO: 17891 - DNA, 19 bp, Artificial Sequence
  Synthetic: FXN 3 reverse 9:69039226-69039251; SaCas9
ctcgctctgtcgcccaggt

SEQ ID NO: 17892 - DNA, 18 bp, Artificial Sequence
  Synthetic: FXN 3 reverse 9:69039227-69039251; SaCas9
tcgctctgtcgcccaggt

SEQ ID NO: 17893 - DNA, 25 bp, Artificial Sequence
  Synthetic: FXN 3 reverse 9:69039221-69039252; SaCas9
acggagtctcgctctgtcgcccagg

SEQ ID NO: 17894 - DNA, 24 bp, Artificial Sequence
  Synthetic: FXN 3 reverse 9:69039222-69039252; SaCas9
cggagtctcgctctgtcgcccagg

SEQ ID NO: 17895 - DNA, 23 bp, Artificial Sequence
  Synthetic: FXN 3 reverse 9:69039223-69039252; SaCas9
ggagtctcgctctgtcgcccagg

SEQ ID NO: 17896 - DNA, 22 bp, Artificial Sequence
  Synthetic: FXN 3 reverse 9:69039224-69039252; SaCas9
gagtctcgctctgtcgcccagg

SEQ ID NO: 17897 - DNA, 21 bp, Artificial Sequence
  Synthetic: FXN 3 reverse 9:69039225-69039252; SaCas9
agtctcgctctgtcgcccagg

SEQ ID NO: 17898 - DNA, 20 bp, Artificial Sequence
  Synthetic: FXN 3 reverse 9:69039226-69039252; SaCas9
gtctcgctctgtcgcccagg

SEQ ID NO: 17899 - DNA, 19 bp, Artificial Sequence
  Synthetic: FXN 3 reverse 9:69039227-69039252; SaCas9
tctcgctctgtcgcccagg

SEQ ID NO: 17900 - DNA, 18 bp, Artificial Sequence
  Synthetic: FXN 3 reverse 9:69039228-69039252; SaCas9
ctcgctctgtcgcccagg

SEQ ID NO: 17901 - DNA, 25 bp, Artificial Sequence
  Synthetic: FXN 3 reverse 9:69039245-69039276; SaCas9
aggagccttttttttttttttgaga

SEQ ID NO: 17902 - DNA, 24 bp, Artificial Sequence
  Synthetic: FXN 3 reverse 9:69039246-69039276; SaCas9
ggagccttttttttttttttgaga

SEQ ID NO: 17903 - DNA, 23 bp, Artificial Sequence
  Synthetic: FXN 3 reverse 9:69039247-69039276; SaCas9
gagccttttttttttttttgaga

SEQ ID NO: 17904 - DNA, 22 bp, Artificial Sequence
  Synthetic: FXN 3 reverse 9:69039248-69039276; SaCas9
agccttttttttttttttgaga

SEQ ID NO: 17905 - DNA, 21 bp, Artificial Sequence
  Synthetic: FXN 3 reverse 9:69039249-69039276; SaCas9
gccttttttttttttttgaga

SEQ ID NO: 17906 - DNA, 20 bp, Artificial Sequence
  Synthetic: FXN 3 reverse 9:69039250-69039276; SaCas9
ccttttttttttttttgaga

SEQ ID NO: 17907 - DNA, 19 bp, Artificial Sequence
  Synthetic: FXN 3 reverse 9:69039251-69039276; SaCas9
cttttttttttttttgaga

SEQ ID NO: 17908 - DNA, 18 bp, Artificial Sequence
  Synthetic: FXN 3 reverse 9:69039252-69039276; SaCas9
ttttttttttttttgaga

SEQ ID NO: 17909 - DNA, 25 bp, Artificial Sequence
  Synthetic: FXN 3 reverse 9:69039246-69039277; SaCas9
taggagccttttttttttttttgag

SEQ ID NO: 17910 - DNA, 24 bp, Artificial Sequence
  Synthetic: FXN 3 reverse 9:69039247-69039277; SaCas9
aggagccttttttttttttttgag

SEQ ID NO: 17911 - DNA, 23 bp, Artificial Sequence
  Synthetic: FXN 3 reverse 9:69039248-69039277; SaCas9
ggagccttttttttttttttgag

SEQ ID NO: 17912 - DNA, 22 bp, Artificial Sequence
  Synthetic: FXN 3 reverse 9:69039249-69039277; SaCas9
gagccttttttttttttttgag

SEQ ID NO: 17913 - DNA, 21 bp, Artificial Sequence
  Synthetic: FXN 3 reverse 9:69039250-69039277; SaCas9
agccttttttttttttttgag

SEQ ID NO: 17914 - DNA, 20 bp, Artificial Sequence
  Synthetic: FXN 3 reverse 9:69039251-69039277; SaCas9
gccttttttttttttttgag

SEQ ID NO: 17915 - DNA, 19 bp, Artificial Sequence
  Synthetic: FXN 3 reverse 9:69039252-69039277; SaCas9
ccttttttttttttttgag

SEQ ID NO: 17916 - DNA, 18 bp, Artificial Sequence
  Synthetic: FXN 3 reverse 9:69039253-69039277; SaCas9
cttttttttttttttgag

SEQ ID NO: 17917 - DNA, 25 bp, Artificial Sequence
  Synthetic: FXN 3 reverse 9:69039251-69039282; SaCas9
gttattaggagcctttttttttttt

SEQ ID NO: 17918 - DNA, 24 bp, Artificial Sequence
  Synthetic: FXN 3 reverse 9:69039252-69039282; SaCas9
ttattaggagcctttttttttttt

SEQ ID NO: 17919 - DNA, 23 bp, Artificial Sequence
  Synthetic: FXN 3 reverse 9:69039253-69039282; SaCas9
tattaggagcctttttttttttt

SEQ ID NO: 17920 - DNA, 22 bp, Artificial Sequence
  Synthetic: FXN 3 reverse 9:69039254-69039282; SaCas9
attaggagcctttttttttttt

SEQ ID NO: 17921 - DNA, 21 bp, Artificial Sequence
  Synthetic: FXN 3 reverse 9:69039255-69039282; SaCas9
ttaggagcctttttttttttt

SEQ ID NO: 17922 - DNA, 20 bp, Artificial Sequence
  Synthetic: FXN 3 reverse 9:69039256-69039282; SaCas9
taggagcctttttttttttt

SEQ ID NO: 17923 - DNA, 19 bp, Artificial Sequence
  Synthetic: FXN 3 reverse 9:69039257-69039282; SaCas9
aggagcctttttttttttt

SEQ ID NO: 17924 - DNA, 18 bp, Artificial Sequence
  Synthetic: FXN 3 reverse 9:69039258-69039282; SaCas9
ggagcctttttttttttt

SEQ ID NO: 17925 - DNA, 25 bp, Artificial Sequence
  Synthetic: FXN 3 reverse 9:69039270-69039301; SaCas9
gtgataataaagtaataaagttatt

SEQ ID NO: 17926 - DNA, 24 bp, Artificial Sequence
  Synthetic: FXN 3 reverse 9:69039271-69039301; SaCas9
tgataataaagtaataaagttatt

SEQ ID NO: 17927 - DNA, 23 bp, Artificial Sequence
  Synthetic: FXN 3 reverse 9:69039272-69039301; SaCas9
gataataaagtaataaagttatt

SEQ ID NO: 17928 - DNA, 22 bp, Artificial Sequence
  Synthetic: FXN 3 reverse 9:69039273-69039301; SaCas9
ataataaagtaataaagttatt

SEQ ID NO: 17929 - DNA, 21 bp, Artificial Sequence
  Synthetic: FXN 3 reverse 9:69039274-69039301; SaCas9
taataaagtaataaagttatt

SEQ ID NO: 17930 - DNA, 20 bp, Artificial Sequence
  Synthetic: FXN 3 reverse 9:69039275-69039301; SaCas9
aataaagtaataaagttatt

SEQ ID NO: 17931 - DNA, 19 bp, Artificial Sequence
  Synthetic: FXN 3 reverse 9:69039276-69039301; SaCas9
ataaagtaataaagttatt

SEQ ID NO: 17932 - DNA, 18 bp, Artificial Sequence
  Synthetic: FXN 3 reverse 9:69039277-69039301; SaCas9
taaagtaataaagttatt

SEQ ID NO: 17933 - DNA, 25 bp, Artificial Sequence
  Synthetic: FXN 3 reverse 9:69039271-69039302; SaCas9
ggtgataataaagtaataaagttat

SEQ ID NO: 17934 - DNA, 24 bp, Artificial Sequence
  Synthetic: FXN 3 reverse 9:69039272-69039302; SaCas9
gtgataataaagtaataaagttat

SEQ ID NO: 17935 - DNA, 23 bp, Artificial Sequence
  Synthetic: FXN 3 reverse 9:69039273-69039302; SaCas9
tgataataaagtaataaagttat

SEQ ID NO: 17936 - DNA, 22 bp, Artificial Sequence
  Synthetic: FXN 3 reverse 9:69039274-69039302; SaCas9
gataataaagtaataaagttat

SEQ ID NO: 17937 - DNA, 21 bp, Artificial Sequence
  Synthetic: FXN 3 reverse 9:69039275-69039302; SaCas9
ataataaagtaataaagttat

SEQ ID NO: 17938 - DNA, 20 bp, Artificial Sequence
  Synthetic: FXN 3 reverse 9:69039276-69039302; SaCas9
taataaagtaataaagttat

SEQ ID NO: 17939 - DNA, 19 bp, Artificial Sequence
  Synthetic: FXN 3 reverse 9:69039277-69039302; SaCas9
aataaagtaataaagttat

SEQ ID NO: 17940 - DNA, 18 bp, Artificial Sequence
  Synthetic: FXN 3 reverse 9:69039278-69039302; SaCas9
ataaagtaataaagttat

SEQ ID NO: 17941 - DNA, 25 bp, Artificial Sequence
  Synthetic: FXN 3 forward 9:69039295-69039326; SaCas9
tatcacctcaaataattaaaattaa

SEQ ID NO: 17942 - DNA, 24 bp, Artificial Sequence
  Synthetic: FXN 3 forward 9:69039296-69039326; SaCas9
atcacctcaaataattaaaattaa

SEQ ID NO: 17943 - DNA, 23 bp, Artificial Sequence
  Synthetic: FXN 3 forward 9:69039297-69039326; SaCas9
tcacctcaaataattaaaattaa

SEQ ID NO: 17944 - DNA, 22 bp, Artificial Sequence
  Synthetic: FXN 3 forward 9:69039298-69039326; SaCas9
cacctcaaataattaaaattaa

SEQ ID NO: 17945 - DNA, 21 bp, Artificial Sequence
  Synthetic: FXN 3 forward 9:69039299-69039326; SaCas9
acctcaaataattaaaattaa

SEQ ID NO: 17946 - DNA, 20 bp, Artificial Sequence
  Synthetic: FXN 3 forward 9:69039300-69039326; SaCas9
cctcaaataattaaaattaa

SEQ ID NO: 17947 - DNA, 19 bp, Artificial Sequence
  Synthetic: FXN 3 forward 9:69039301-69039326; SaCas9
ctcaaataattaaaattaa

SEQ ID NO: 17948 - DNA, 18 bp, Artificial Sequence
  Synthetic: FXN 3 forward 9:69039302-69039326; SaCas9
tcaaataattaaaattaa

SEQ ID NO: 17949 - DNA, 25 bp, Artificial Sequence
  Synthetic: FXN 3 reverse 9:69039300-69039331; SaCas9
ttcaacttcatttaattttaattat

SEQ ID NO: 17950 - DNA, 24 bp, Artificial Sequence
  Synthetic: FXN 3 reverse 9:69039301-69039331; SaCas9
tcaacttcatttaattttaattat

SEQ ID NO: 17951 - DNA, 23 bp, Artificial Sequence
  Synthetic: FXN 3 reverse 9:69039302-69039331; SaCas9
caacttcatttaattttaattat

SEQ ID NO: 17952 - DNA, 22 bp, Artificial Sequence
  Synthetic: FXN 3 reverse 9:69039303-69039331; SaCas9
aacttcatttaattttaattat

SEQ ID NO: 17953 - DNA, 21 bp, Artificial Sequence
  Synthetic: FXN 3 reverse 9:69039304-69039331; SaCas9
acttcatttaattttaattat

SEQ ID NO: 17954 - DNA, 20 bp, Artificial Sequence
  Synthetic: FXN 3 reverse 9:69039305-69039331; SaCas9
cttcatttaattttaattat

SEQ ID NO: 17955 - DNA, 19 bp, Artificial Sequence
  Synthetic: FXN 3 reverse 9:69039306-69039331; SaCas9
ttcatttaattttaattat

SEQ ID NO: 17956 - DNA, 18 bp, Artificial Sequence
  Synthetic: FXN 3 reverse 9:69039307-69039331; SaCas9
tcatttaattttaattat

SEQ ID NO: 17957 - DNA, 25 bp, Artificial Sequence
  Synthetic: FXN 3 forward 9:69039301-69039332; SaCas9
ctcaaataattaaaattaaatgaag

SEQ ID NO: 17958 - DNA, 24 bp, Artificial Sequence
  Synthetic: FXN 3 forward 9:69039302-69039332; SaCas9
tcaaataattaaaattaaatgaag

SEQ ID NO: 17959 - DNA, 23 bp, Artificial Sequence
  Synthetic: FXN 3 forward 9:69039303-69039332; SaCas9
caaataattaaaattaaatgaag

SEQ ID NO: 17960 - DNA, 22 bp, Artificial Sequence
  Synthetic: FXN 3 forward 9:69039304-69039332; SaCas9
aaataattaaaattaaatgaag

SEQ ID NO: 17961 - DNA, 21 bp, Artificial Sequence
  Synthetic: FXN 3 forward 9:69039305-69039332; SaCas9
aataattaaaattaaatgaag

SEQ ID NO: 17962 - DNA, 20 bp, Artificial Sequence
  Synthetic: FXN 3 forward 9:69039306-69039332; SaCas9
ataattaaaattaaatgaag

SEQ ID NO: 17963 - DNA, 19 bp, Artificial Sequence
  Synthetic: FXN 3 forward 9:69039307-69039332; SaCas9
taattaaaattaaatgaag

SEQ ID NO: 17964 - DNA, 18 bp, Artificial Sequence
  Synthetic: FXN 3 forward 9:69039308-69039332; SaCas9
aattaaaattaaatgaag

SEQ ID NO: 17965 - DNA, 25 bp, Artificial Sequence
  Synthetic: FXN 3 reverse 9:69039332-69039363; SaCas9
aaatgtggctaatgggactgaggac

SEQ ID NO: 17966 - DNA, 24 bp, Artificial Sequence
  Synthetic: FXN 3 reverse 9:69039333-69039363; SaCas9
aatgtggctaatgggactgaggac

SEQ ID NO: 17967 - DNA, 23 bp, Artificial Sequence
  Synthetic: FXN 3 reverse 9:69039334-69039363; SaCas9
atgtggctaatgggactgaggac

SEQ ID NO: 17968 - DNA, 22 bp, Artificial Sequence
  Synthetic: FXN 3 reverse 9:69039335-69039363; SaCas9
tgtggctaatgggactgaggac

SEQ ID NO: 17969 - DNA, 21 bp, Artificial Sequence
  Synthetic: FXN 3 reverse 9:69039336-69039363; SaCas9
gtggctaatgggactgaggac

SEQ ID NO: 17970 - DNA, 20 bp, Artificial Sequence
  Synthetic: FXN 3 reverse 9:69039337-69039363; SaCas9
tggctaatgggactgaggac

SEQ ID NO: 17971 - DNA, 19 bp, Artificial Sequence
  Synthetic: FXN 3 reverse 9:69039338-69039363; SaCas9
ggctaatgggactgaggac

SEQ ID NO: 17972 - DNA, 18 bp, Artificial Sequence
  Synthetic: FXN 3 reverse 9:69039339-69039363; SaCas9
gctaatgggactgaggac

SEQ ID NO: 17973 - DNA, 25 bp, Artificial Sequence
  Synthetic: FXN 3 reverse 9:69039338-69039369; SaCas9
cactagaaatgtggctaatgggact

SEQ ID NO: 17974 - DNA, 24 bp, Artificial Sequence
  Synthetic: FXN 3 reverse 9:69039339-69039369; SaCas9
actagaaatgtggctaatgggact

SEQ ID NO: 17975 - DNA, 23 bp, Artificial Sequence
  Synthetic: FXN 3 reverse 9:69039340-69039369; SaCas9
ctagaaatgtggctaatgggact

SEQ ID NO: 17976 - DNA, 22 bp, Artificial Sequence
  Synthetic: FXN 3 reverse 9:69039341-69039369; SaCas9
tagaaatgtggctaatgggact

SEQ ID NO: 17977 - DNA, 21 bp, Artificial Sequence
  Synthetic: FXN 3 reverse 9:69039342-69039369; SaCas9
agaaatgtggctaatgggact

SEQ ID NO: 17978 - DNA, 20 bp, Artificial Sequence
  Synthetic: FXN 3 reverse 9:69039343-69039369; SaCas9
gaaatgtggctaatgggact

SEQ ID NO: 17979 - DNA, 19 bp, Artificial Sequence
  Synthetic: FXN 3 reverse 9:69039344-69039369; SaCas9
aaatgtggctaatgggact

SEQ ID NO: 17980 - DNA, 18 bp, Artificial Sequence
  Synthetic: FXN 3 reverse 9:69039345-69039369; SaCas9
aatgtggctaatgggact

SEQ ID NO: 17981 - DNA, 25 bp, Artificial Sequence
  Synthetic: FXN 3 reverse 9:69039340-69039371; SaCas9
agcactagaaatgtggctaatggga

SEQ ID NO: 17982 - DNA, 24 bp, Artificial Sequence
  Synthetic: FXN 3 reverse 9:69039341-69039371; SaCas9
gcactagaaatgtggctaatggga

SEQ ID NO: 17983 - DNA, 23 bp, Artificial Sequence
  Synthetic: FXN 3 reverse 9:69039342-69039371; SaCas9
cactagaaatgtggctaatggga

SEQ ID NO: 17984 - DNA, 22 bp, Artificial Sequence
  Synthetic: FXN 3 reverse 9:69039343-69039371; SaCas9
actagaaatgtggctaatggga

SEQ ID NO: 17985 - DNA, 21 bp, Artificial Sequence
  Synthetic: FXN 3 reverse 9:69039344-69039371; SaCas9
ctagaaatgtggctaatggga

SEQ ID NO: 17986 - DNA, 20 bp, Artificial Sequence
  Synthetic: FXN 3 reverse 9:69039345-69039371; SaCas9
tagaaatgtggctaatggga

SEQ ID NO: 17987 - DNA, 19 bp, Artificial Sequence
  Synthetic: FXN 3 reverse 9:69039346-69039371; SaCas9
agaaatgtggctaatggga

SEQ ID NO: 17988 - DNA, 18 bp, Artificial Sequence
  Synthetic: FXN 3 reverse 9:69039347-69039371; SaCas9
gaaatgtggctaatggga

SEQ ID NO: 17989 - DNA, 25 bp, Artificial Sequence
  Synthetic: FXN 3 reverse 9:69039345-69039376; SaCas9
tactgagcactagaaatgtggctaa

SEQ ID NO: 17990 - DNA, 24 bp, Artificial Sequence
  Synthetic: FXN 3 reverse 9:69039346-69039376; SaCas9
actgagcactagaaatgtggctaa

SEQ ID NO: 17991 - DNA, 23 bp, Artificial Sequence
  Synthetic: FXN 3 reverse 9:69039347-69039376; SaCas9
ctgagcactagaaatgtggctaa

SEQ ID NO: 17992 - DNA, 22 bp, Artificial Sequence
  Synthetic: FXN 3 reverse 9:69039348-69039376; SaCas9
tgagcactagaaatgtggctaa

SEQ ID NO: 17993 - DNA, 21 bp, Artificial Sequence
  Synthetic: FXN 3 reverse 9:69039349-69039376; SaCas9
gagcactagaaatgtggctaa

SEQ ID NO: 17994 - DNA, 20 bp, Artificial Sequence
  Synthetic: FXN 3 reverse 9:69039350-69039376; SaCas9
agcactagaaatgtggctaa

SEQ ID NO: 17995 - DNA, 19 bp, Artificial Sequence
  Synthetic: FXN 3 reverse 9:69039351-69039376; SaCas9
gcactagaaatgtggctaa

SEQ ID NO: 17996 - DNA, 18 bp, Artificial Sequence
  Synthetic: FXN 3 reverse 9:69039352-69039376; SaCas9
cactagaaatgtggctaa

SEQ ID NO: 17997 - DNA, 25 bp, Artificial Sequence
  Synthetic: FXN 3 reverse 9:69039346-69039377; SaCas9
ctactgagcactagaaatgtggcta

SEQ ID NO: 17998 - DNA, 24 bp, Artificial Sequence
  Synthetic: FXN 3 reverse 9:69039347-69039377; SaCas9
tactgagcactagaaatgtggcta

SEQ ID NO: 17999 - DNA, 23 bp, Artificial Sequence
  Synthetic: FXN 3 reverse 9:69039348-69039377; SaCas9
actgagcactagaaatgtggcta

SEQ ID NO: 18000 - DNA, 22 bp, Artificial Sequence
  Synthetic: FXN 3 reverse 9:69039349-69039377; SaCas9
ctgagcactagaaatgtggcta

SEQ ID NO: 18001 - DNA, 21 bp, Artificial Sequence
  Synthetic: FXN 3 reverse 9:69039350-69039377; SaCas9
tgagcactagaaatgtggcta

SEQ ID NO: 18002 - DNA, 20 bp, Artificial Sequence
  Synthetic: FXN 3 reverse 9:69039351-69039377; SaCas9
gagcactagaaatgtggcta

SEQ ID NO: 18003 - DNA, 19 bp, Artificial Sequence
  Synthetic: FXN 3 reverse 9:69039352-69039377; SaCas9
agcactagaaatgtggcta

SEQ ID NO: 18004 - DNA, 18 bp, Artificial Sequence
  Synthetic: FXN 3 reverse 9:69039353-69039377; SaCas9
gcactagaaatgtggcta

SEQ ID NO: 18005 - DNA, 25 bp, Artificial Sequence
  Synthetic: FXN 3 forward 9:69039354-69039385; SaCas9
gccacatttctagtgctcagtagcc

SEQ ID NO: 18006 - DNA, 24 bp, Artificial Sequence
  Synthetic: FXN 3 forward 9:69039355-69039385; SaCas9
ccacatttctagtgctcagtagcc

SEQ ID NO: 18007 - DNA, 23 bp, Artificial Sequence
  Synthetic: FXN 3 forward 9:69039356-69039385; SaCas9
cacatttctagtgctcagtagcc

SEQ ID NO: 18008 - DNA, 22 bp, Artificial Sequence
  Synthetic: FXN 3 forward 9:69039357-69039385; SaCas9
acatttctagtgctcagtagcc

SEQ ID NO: 18009 - DNA, 21 bp, Artificial Sequence
  Synthetic: FXN 3 forward 9:69039358-69039385; SaCas9
catttctagtgctcagtagcc

SEQ ID NO: 18010 - DNA, 20 bp, Artificial Sequence
  Synthetic: FXN 3 forward 9:69039359-69039385; SaCas9
atttctagtgctcagtagcc

SEQ ID NO: 18011 - DNA, 19 bp, Artificial Sequence
  Synthetic: FXN 3 forward 9:69039360-69039385; SaCas9
tttctagtgctcagtagcc

SEQ ID NO: 18012 - DNA, 18 bp, Artificial Sequence
  Synthetic: FXN 3 forward 9:69039361-69039385; SaCas9
ttctagtgctcagtagcc

SEQ ID NO: 18013 - DNA, 25 bp, Artificial Sequence
  Synthetic: FXN 3 forward 9:69039355-69039386; SaCas9
ccacatttctagtgctcagtagcca

SEQ ID NO: 18014 - DNA, 24 bp, Artificial Sequence
  Synthetic: FXN 3 forward 9:69039356-69039386; SaCas9
cacatttctagtgctcagtagcca

SEQ ID NO: 18015 - DNA, 23 bp, Artificial Sequence
  Synthetic: FXN 3 forward 9:69039357-69039386; SaCas9
acatttctagtgctcagtagcca

SEQ ID NO: 18016 - DNA, 22 bp, Artificial Sequence
  Synthetic: FXN 3 forward 9:69039358-69039386; SaCas9
catttctagtgctcagtagcca

SEQ ID NO: 18017 - DNA, 21 bp, Artificial Sequence
  Synthetic: FXN 3 forward 9:69039359-69039386; SaCas9
atttctagtgctcagtagcca

SEQ ID NO: 18018 - DNA, 20 bp, Artificial Sequence
  Synthetic: FXN 3 forward 9:69039360-69039386; SaCas9
tttctagtgctcagtagcca

SEQ ID NO: 18019 - DNA, 19 bp, Artificial Sequence
  Synthetic: FXN 3 forward 9:69039361-69039386; SaCas9
ttctagtgctcagtagcca

SEQ ID NO: 18020 - DNA, 18 bp, Artificial Sequence
  Synthetic: FXN 3 forward 9:69039362-69039386; SaCas9
tctagtgctcagtagcca

SEQ ID NO: 18021 - DNA, 25 bp, Artificial Sequence
  Synthetic: FXN 3 forward 9:69039356-69039387; SaCas9
cacatttctagtgctcagtagccac

SEQ ID NO: 18022 - DNA, 24 bp, Artificial Sequence
  Synthetic: FXN 3 forward 9:69039357-69039387; SaCas9
acatttctagtgctcagtagccac

SEQ ID NO: 18023 - DNA, 23 bp, Artificial Sequence
  Synthetic: FXN 3 forward 9:69039358-69039387; SaCas9
catttctagtgctcagtagccac

SEQ ID NO: 18024 - DNA, 22 bp, Artificial Sequence
  Synthetic: FXN 3 forward 9:69039359-69039387; SaCas9
atttctagtgctcagtagccac

SEQ ID NO: 18025 - DNA, 21 bp, Artificial Sequence
  Synthetic: FXN 3 forward 9:69039360-69039387; SaCas9
tttctagtgctcagtagccac

SEQ ID NO: 18026 - DNA, 20 bp, Artificial Sequence
  Synthetic: FXN 3 forward 9:69039361-69039387; SaCas9
ttctagtgctcagtagccac

SEQ ID NO: 18027 - DNA, 19 bp, Artificial Sequence
  Synthetic: FXN 3 forward 9:69039362-69039387; SaCas9
tctagtgctcagtagccac

SEQ ID NO: 18028 - DNA, 18 bp, Artificial Sequence
  Synthetic: FXN 3 forward 9:69039363-69039387; SaCas9
ctagtgctcagtagccac

SEQ ID NO: 18029 - DNA, 25 bp, Artificial Sequence
  Synthetic: FXN 3 reverse 9:69039360-69039391; SaCas9
accagcccccgtggctactgagcac

SEQ ID NO: 18030 - DNA, 24 bp, Artificial Sequence
  Synthetic: FXN 3 reverse 9:69039361-69039391; SaCas9
ccagcccccgtggctactgagcac

SEQ ID NO: 18031 - DNA, 23 bp, Artificial Sequence
  Synthetic: FXN 3 reverse 9:69039362-69039391; SaCas9
cagcccccgtggctactgagcac

SEQ ID NO: 18032 - DNA, 22 bp, Artificial Sequence
  Synthetic: FXN 3 reverse 9:69039363-69039391; SaCas9
agcccccgtggctactgagcac

SEQ ID NO: 18033 - DNA, 21 bp, Artificial Sequence
  Synthetic: FXN 3 reverse 9:69039364-69039391; SaCas9
gcccccgtggctactgagcac

SEQ ID NO: 18034 - DNA, 20 bp, Artificial Sequence
  Synthetic: FXN 3 reverse 9:69039365-69039391; SaCas9
cccccgtggctactgagcac

SEQ ID NO: 18035 - DNA, 19 bp, Artificial Sequence
  Synthetic: FXN 3 reverse 9:69039366-69039391; SaCas9
ccccgtggctactgagcac

SEQ ID NO: 18036 - DNA, 18 bp, Artificial Sequence
  Synthetic: FXN 3 reverse 9:69039367-69039391; SaCas9
cccgtggctactgagcac

SEQ ID NO: 18037 - DNA, 25 bp, Artificial Sequence
  Synthetic: FXN 3 reverse 9:69039368-69039399; SaCas9
tggtggtcaccagcccccgtggcta

SEQ ID NO: 18038 - DNA, 24 bp, Artificial Sequence
  Synthetic: FXN 3 reverse 9:69039369-69039399; SaCas9
ggtggtcaccagcccccgtggcta

SEQ ID NO: 18039 - DNA, 23 bp, Artificial Sequence
  Synthetic: FXN 3 reverse 9:69039370-69039399; SaCas9
gtggtcaccagcccccgtggcta

SEQ ID NO: 18040 - DNA, 22 bp, Artificial Sequence
  Synthetic: FXN 3 reverse 9:69039371-69039399; SaCas9
tggtcaccagcccccgtggcta

SEQ ID NO: 18041 - DNA, 21 bp, Artificial Sequence
  Synthetic: FXN 3 reverse 9:69039372-69039399; SaCas9
ggtcaccagcccccgtggcta

SEQ ID NO: 18042 - DNA, 20 bp, Artificial Sequence
  Synthetic: FXN 3 reverse 9:69039373-69039399; SaCas9
gtcaccagcccccgtggcta

SEQ ID NO: 18043 - DNA, 19 bp, Artificial Sequence
  Synthetic: FXN 3 reverse 9:69039374-69039399; SaCas9
tcaccagcccccgtggcta

SEQ ID NO: 18044 - DNA, 18 bp, Artificial Sequence
  Synthetic: FXN 3 reverse 9:69039375-69039399; SaCas9
caccagcccccgtggcta

SEQ ID NO: 18045 - DNA, 25 bp, Artificial Sequence
  Synthetic: FXN 3 forward 9:69039375-69039406; SaCas9
agccacgggggctggtgaccaccac

SEQ ID NO: 18046 - DNA, 24 bp, Artificial Sequence
  Synthetic: FXN 3 forward 9:69039376-69039406; SaCas9
gccacgggggctggtgaccaccac

SEQ ID NO: 18047 - DNA, 23 bp, Artificial Sequence
  Synthetic: FXN 3 forward 9:69039377-69039406; SaCas9
ccacgggggctggtgaccaccac

SEQ ID NO: 18048 - DNA, 22 bp, Artificial Sequence
  Synthetic: FXN 3 forward 9:69039378-69039406; SaCas9
cacgggggctggtgaccaccac

SEQ ID NO: 18049 - DNA, 21 bp, Artificial Sequence
  Synthetic: FXN 3 forward 9:69039379-69039406; SaCas9
acgggggctggtgaccaccac

SEQ ID NO: 18050 - DNA, 20 bp, Artificial Sequence
  Synthetic: FXN 3 forward 9:69039380-69039406; SaCas9
cgggggctggtgaccaccac

SEQ ID NO: 18051 - DNA, 19 bp, Artificial Sequence
  Synthetic: FXN 3 forward 9:69039381-69039406; SaCas9
gggggctggtgaccaccac

SEQ ID NO: 18052 - DNA, 18 bp, Artificial Sequence
  Synthetic: FXN 3 forward 9:69039382-69039406; SaCas9
ggggctggtgaccaccac

SEQ ID NO: 18053 - DNA, 25 bp, Artificial Sequence
  Synthetic: FXN 3 forward 9:69039376-69039407; SaCas9
gccacgggggctggtgaccaccaca

SEQ ID NO: 18054 - DNA, 24 bp, Artificial Sequence
  Synthetic: FXN 3 forward 9:69039377-69039407; SaCas9
ccacgggggctggtgaccaccaca

SEQ ID NO: 18055 - DNA, 23 bp, Artificial Sequence
  Synthetic: FXN 3 forward 9:69039378-69039407; SaCas9
cacgggggctggtgaccaccaca

SEQ ID NO: 18056 - DNA, 22 bp, Artificial Sequence
  Synthetic: FXN 3 forward 9:69039379-69039407; SaCas9
acgggggctggtgaccaccaca

SEQ ID NO: 18057 - DNA, 21 bp, Artificial Sequence
  Synthetic: FXN 3 forward 9:69039380-69039407; SaCas9
cgggggctggtgaccaccaca

SEQ ID NO: 18058 - DNA, 20 bp, Artificial Sequence
  Synthetic: FXN 3 forward 9:69039381-69039407; SaCas9
gggggctggtgaccaccaca

SEQ ID NO: 18059 - DNA, 19 bp, Artificial Sequence
  Synthetic: FXN 3 forward 9:69039382-69039407; SaCas9
ggggctggtgaccaccaca

SEQ ID NO: 18060 - DNA, 18 bp, Artificial Sequence
  Synthetic: FXN 3 forward 9:69039383-69039407; SaCas9
gggctggtgaccaccaca

SEQ ID NO: 18061 - DNA, 25 bp, Artificial Sequence
  Synthetic: FXN 3 forward 9:69039428-69039459; SaCas9
ttggttctcagatctggctactcag

SEQ ID NO: 18062 - DNA, 24 bp, Artificial Sequence
  Synthetic: FXN 3 forward 9:69039429-69039459; SaCas9
tggttctcagatctggctactcag

SEQ ID NO: 18063 - DNA, 23 bp, Artificial Sequence
  Synthetic: FXN 3 forward 9:69039430-69039459; SaCas9
ggttctcagatctggctactcag

SEQ ID NO: 18064 - DNA, 22 bp, Artificial Sequence
  Synthetic: FXN 3 forward 9:69039431-69039459; SaCas9
gttctcagatctggctactcag

SEQ ID NO: 18065 - DNA, 21 bp, Artificial Sequence
  Synthetic: FXN 3 forward 9:69039432-69039459; SaCas9
ttctcagatctggctactcag

SEQ ID NO: 18066 - DNA, 20 bp, Artificial Sequence
  Synthetic: FXN 3 forward 9:69039433-69039459; SaCas9
tctcagatctggctactcag

SEQ ID NO: 18067 - DNA, 19 bp, Artificial Sequence
  Synthetic: FXN 3 forward 9:69039434-69039459; SaCas9
ctcagatctggctactcag

SEQ ID NO: 18068 - DNA, 18 bp, Artificial Sequence
  Synthetic: FXN 3 forward 9:69039435-69039459; SaCas9
tcagatctggctactcag

SEQ ID NO: 18069 - DNA, 25 bp, Artificial Sequence
  Synthetic: FXN 3 reverse 9:69039431-69039462; SaCas9
ttggttctgctgagtagccagatct

SEQ ID NO: 18070 - DNA, 24 bp, Artificial Sequence
  Synthetic: FXN 3 reverse 9:69039432-69039462; SaCas9
tggttctgctgagtagccagatct

SEQ ID NO: 18071 - DNA, 23 bp, Artificial Sequence
  Synthetic: FXN 3 reverse 9:69039433-69039462; SaCas9
ggttctgctgagtagccagatct

SEQ ID NO: 18072 - DNA, 22 bp, Artificial Sequence
  Synthetic: FXN 3 reverse 9:69039434-69039462; SaCas9
gttctgctgagtagccagatct

SEQ ID NO: 18073 - DNA, 21 bp, Artificial Sequence
  Synthetic: FXN 3 reverse 9:69039435-69039462; SaCas9
ttctgctgagtagccagatct

SEQ ID NO: 18074 - DNA, 20 bp, Artificial Sequence
  Synthetic: FXN 3 reverse 9:69039436-69039462; SaCas9
tctgctgagtagccagatct

SEQ ID NO: 18075 - DNA, 19 bp, Artificial Sequence
  Synthetic: FXN 3 reverse 9:69039437-69039462; SaCas9
ctgctgagtagccagatct

SEQ ID NO: 18076 - DNA, 18 bp, Artificial Sequence
  Synthetic: FXN 3 reverse 9:69039438-69039462; SaCas9
tgctgagtagccagatct

SEQ ID NO: 18077 - DNA, 25 bp, Artificial Sequence
  Synthetic: FXN 3 reverse 9:69039433-69039464; SaCas9
tcttggttctgctgagtagccagat

SEQ ID NO: 18078 - DNA, 24 bp, Artificial Sequence
  Synthetic: FXN 3 reverse 9:69039434-69039464; SaCas9
cttggttctgctgagtagccagat

SEQ ID NO: 18079 - DNA, 23 bp, Artificial Sequence
  Synthetic: FXN 3 reverse 9:69039435-69039464; SaCas9
ttggttctgctgagtagccagat

SEQ ID NO: 18080 - DNA, 22 bp, Artificial Sequence
  Synthetic: FXN 3 reverse 9:69039436-69039464; SaCas9
tggttctgctgagtagccagat

SEQ ID NO: 18081 - DNA, 21 bp, Artificial Sequence
  Synthetic: FXN 3 reverse 9:69039437-69039464; SaCas9
ggttctgctgagtagccagat

SEQ ID NO: 18082 - DNA, 20 bp, Artificial Sequence
  Synthetic: FXN 3 reverse 9:69039438-69039464; SaCas9
gttctgctgagtagccagat

SEQ ID NO: 18083 - DNA, 19 bp, Artificial Sequence
  Synthetic: FXN 3 reverse 9:69039439-69039464; SaCas9
ttctgctgagtagccagat

SEQ ID NO: 18084 - DNA, 18 bp, Artificial Sequence
  Synthetic: FXN 3 reverse 9:69039440-69039464; SaCas9
tctgctgagtagccagat

SEQ ID NO: 18085 - DNA, 25 bp, Artificial Sequence
  Synthetic: FXN 3 forward 9:69039435-69039466; SaCas9
tcagatctggctactcagcagaacc

SEQ ID NO: 18086 - DNA, 24 bp, Artificial Sequence
  Synthetic: FXN 3 forward 9:69039436-69039466; SaCas9
cagatctggctactcagcagaacc

SEQ ID NO: 18087 - DNA, 23 bp, Artificial Sequence
  Synthetic: FXN 3 forward 9:69039437-69039466; SaCas9
agatctggctactcagcagaacc

SEQ ID NO: 18088 - DNA, 22 bp, Artificial Sequence
  Synthetic: FXN 3 forward 9:69039438-69039466; SaCas9
gatctggctactcagcagaacc

SEQ ID NO: 18089 - DNA, 21 bp, Artificial Sequence
  Synthetic: FXN 3 forward 9:69039439-69039466; SaCas9
atctggctactcagcagaacc

SEQ ID NO: 18090 - DNA, 20 bp, Artificial Sequence
  Synthetic: FXN 3 forward 9:69039440-69039466; SaCas9
tctggctactcagcagaacc

SEQ ID NO: 18091 - DNA, 19 bp, Artificial Sequence
  Synthetic: FXN 3 forward 9:69039441-69039466; SaCas9
ctggctactcagcagaacc

SEQ ID NO: 18092 - DNA, 18 bp, Artificial Sequence
  Synthetic: FXN 3 forward 9:69039442-69039466; SaCas9
tggctactcagcagaacc

SEQ ID NO: 18093 - DNA, 25 bp, Artificial Sequence
  Synthetic: FXN 3 forward 9:69039444-69039475; SaCas9
gctactcagcagaaccaagaatcca

SEQ ID NO: 18094 - DNA, 24 bp, Artificial Sequence
  Synthetic: FXN 3 forward 9:69039445-69039475; SaCas9
ctactcagcagaaccaagaatcca

SEQ ID NO: 18095 - DNA, 23 bp, Artificial Sequence
  Synthetic: FXN 3 forward 9:69039446-69039475; SaCas9
tactcagcagaaccaagaatcca

SEQ ID NO: 18096 - DNA, 22 bp, Artificial Sequence
  Synthetic: FXN 3 forward 9:69039447-69039475; SaCas9
actcagcagaaccaagaatcca

SEQ ID NO: 18097 - DNA, 21 bp, Artificial Sequence
  Synthetic: FXN 3 forward 9:69039448-69039475; SaCas9
ctcagcagaaccaagaatcca

SEQ ID NO: 18098 - DNA, 20 bp, Artificial Sequence
  Synthetic: FXN 3 forward 9:69039449-69039475; SaCas9
tcagcagaaccaagaatcca

SEQ ID NO: 18099 - DNA, 19 bp, Artificial Sequence
  Synthetic: FXN 3 forward 9:69039450-69039475; SaCas9
cagcagaaccaagaatcca

SEQ ID NO: 18100 - DNA, 18 bp, Artificial Sequence
  Synthetic: FXN 3 forward 9:69039451-69039475; SaCas9
agcagaaccaagaatcca

SEQ ID NO: 18101 - DNA, 25 bp, Artificial Sequence
  Synthetic: FXN 3 reverse 9:69039447-69039478; SaCas9
ccgtttctgtggattcttggttctg

SEQ ID NO: 18102 - DNA, 24 bp, Artificial Sequence
  Synthetic: FXN 3 reverse 9:69039448-69039478; SaCas9
cgtttctgtggattcttggttctg

SEQ ID NO: 18103 - DNA, 23 bp, Artificial Sequence
  Synthetic: FXN 3 reverse 9:69039449-69039478; SaCas9
gtttctgtggattcttggttctg

SEQ ID NO: 18104 - DNA, 22 bp, Artificial Sequence
  Synthetic: FXN 3 reverse 9:69039450-69039478; SaCas9
tttctgtggattcttggttctg

SEQ ID NO: 18105 - DNA, 21 bp, Artificial Sequence
  Synthetic: FXN 3 reverse 9:69039451-69039478; SaCas9
ttctgtggattcttggttctg

SEQ ID NO: 18106 - DNA, 20 bp, Artificial Sequence
  Synthetic: FXN 3 reverse 9:69039452-69039478; SaCas9
tctgtggattcttggttctg

SEQ ID NO: 18107 - DNA, 19 bp, Artificial Sequence
  Synthetic: FXN 3 reverse 9:69039453-69039478; SaCas9
ctgtggattcttggttctg

SEQ ID NO: 18108 - DNA, 18 bp, Artificial Sequence
  Synthetic: FXN 3 reverse 9:69039454-69039478; SaCas9
tgtggattcttggttctg

SEQ ID NO: 18109 - DNA, 25 bp, Artificial Sequence
  Synthetic: FXN 3 reverse 9:69039464-69039495; SaCas9
ggctgtgcttttaaaagccgtttct

SEQ ID NO: 18110 - DNA, 24 bp, Artificial Sequence
  Synthetic: FXN 3 reverse 9:69039465-69039495; SaCas9
gctgtgcttttaaaagccgtttct

SEQ ID NO: 18111 - DNA, 23 bp, Artificial Sequence
  Synthetic: FXN 3 reverse 9:69039466-69039495; SaCas9
ctgtgcttttaaaagccgtttct

SEQ ID NO: 18112 - DNA, 22 bp, Artificial Sequence
  Synthetic: FXN 3 reverse 9:69039467-69039495; SaCas9
tgtgcttttaaaagccgtttct

SEQ ID NO: 18113 - DNA, 21 bp, Artificial Sequence
  Synthetic: FXN 3 reverse 9:69039468-69039495; SaCas9
gtgcttttaaaagccgtttct

SEQ ID NO: 18114 - DNA, 20 bp, Artificial Sequence
  Synthetic: FXN 3 reverse 9:69039469-69039495; SaCas9
tgcttttaaaagccgtttct

SEQ ID NO: 18115 - DNA, 19 bp, Artificial Sequence
  Synthetic: FXN 3 reverse 9:69039470-69039495; SaCas9
gcttttaaaagccgtttct

SEQ ID NO: 18116 - DNA, 18 bp, Artificial Sequence
  Synthetic: FXN 3 reverse 9:69039471-69039495; SaCas9
cttttaaaagccgtttct

SEQ ID NO: 18117 - DNA, 25 bp, Artificial Sequence
  Synthetic: FXN 3 reverse 9:69039492-69039523; SaCas9
taggtaaggctggggctgggggctg

SEQ ID NO: 18118 - DNA, 24 bp, Artificial Sequence
  Synthetic: FXN 3 reverse 9:69039493-69039523; SaCas9
aggtaaggctggggctgggggctg

SEQ ID NO: 18119 - DNA, 23 bp, Artificial Sequence
  Synthetic: FXN 3 reverse 9:69039494-69039523; SaCas9
ggtaaggctggggctgggggctg

SEQ ID NO: 18120 - DNA, 22 bp, Artificial Sequence
  Synthetic: FXN 3 reverse 9:69039495-69039523; SaCas9
gtaaggctggggctgggggctg

SEQ ID NO: 18121 - DNA, 21 bp, Artificial Sequence
  Synthetic: FXN 3 reverse 9:69039496-69039523; SaCas9
taaggctggggctgggggctg

SEQ ID NO: 18122 - DNA, 20 bp, Artificial Sequence
  Synthetic: FXN 3 reverse 9:69039497-69039523; SaCas9
aaggctggggctgggggctg

SEQ ID NO: 18123 - DNA, 19 bp, Artificial Sequence
  Synthetic: FXN 3 reverse 9:69039498-69039523; SaCas9
aggctggggctgggggctg

SEQ ID NO: 18124 - DNA, 18 bp, Artificial Sequence
  Synthetic: FXN 3 reverse 9:69039499-69039523; SaCas9
ggctggggctgggggctg

SEQ ID NO: 18125 - DNA, 25 bp, Artificial Sequence
  Synthetic: FXN 3 reverse 9:69039493-69039524; SaCas9
gtaggtaaggctggggctgggggct

SEQ ID NO: 18126 - DNA, 24 bp, Artificial Sequence
  Synthetic: FXN 3 reverse 9:69039494-69039524; SaCas9
taggtaaggctggggctgggggct

SEQ ID NO: 18127 - DNA, 23 bp, Artificial Sequence
  Synthetic: FXN 3 reverse 9:69039495-69039524; SaCas9
aggtaaggctggggctgggggct

SEQ ID NO: 18128 - DNA, 22 bp, Artificial Sequence
  Synthetic: FXN 3 reverse 9:69039496-69039524; SaCas9
ggtaaggctggggctgggggct

SEQ ID NO: 18129 - DNA, 21 bp, Artificial Sequence
  Synthetic: FXN 3 reverse 9:69039497-69039524; SaCas9
gtaaggctggggctgggggct

SEQ ID NO: 18130 - DNA, 20 bp, Artificial Sequence
  Synthetic: FXN 3 reverse 9:69039498-69039524; SaCas9
taaggctggggctgggggct

SEQ ID NO: 18131 - DNA, 19 bp, Artificial Sequence
  Synthetic: FXN 3 reverse 9:69039499-69039524; SaCas9
aaggctggggctgggggct

SEQ ID NO: 18132 - DNA, 18 bp, Artificial Sequence
  Synthetic: FXN 3 reverse 9:69039500-69039524; SaCas9
aggctggggctgggggct

SEQ ID NO: 18133 - DNA, 25 bp, Artificial Sequence
  Synthetic: FXN 3 forward 9:69039499-69039530; SaCas9
agcccccagccccagccttacctac

SEQ ID NO: 18134 - DNA, 24 bp, Artificial Sequence
  Synthetic: FXN 3 forward 9:69039500-69039530; SaCas9
gcccccagccccagccttacctac

SEQ ID NO: 18135 - DNA, 23 bp, Artificial Sequence
  Synthetic: FXN 3 forward 9:69039501-69039530; SaCas9
cccccagccccagccttacctac

SEQ ID NO: 18136 - DNA, 22 bp, Artificial Sequence
  Synthetic: FXN 3 forward 9:69039502-69039530; SaCas9
ccccagccccagccttacctac

SEQ ID NO: 18137 - DNA, 21 bp, Artificial Sequence
  Synthetic: FXN 3 forward 9:69039503-69039530; SaCas9
cccagccccagccttacctac

SEQ ID NO: 18138 - DNA, 20 bp, Artificial Sequence
  Synthetic: FXN 3 forward 9:69039504-69039530; SaCas9
ccagccccagccttacctac

SEQ ID NO: 18139 - DNA, 19 bp, Artificial Sequence
  Synthetic: FXN 3 forward 9:69039505-69039530; SaCas9
cagccccagccttacctac

SEQ ID NO: 18140 - DNA, 18 bp, Artificial Sequence
  Synthetic: FXN 3 forward 9:69039506-69039530; SaCas9
agccccagccttacctac

SEQ ID NO: 18141 - DNA, 25 bp, Artificial Sequence
  Synthetic: FXN 3 forward 9:69039500-69039531; SaCas9
gcccccagccccagccttacctacc

SEQ ID NO: 18142 - DNA, 24 bp, Artificial Sequence
  Synthetic: FXN 3 forward 9:69039501-69039531; SaCas9
cccccagccccagccttacctacc

SEQ ID NO: 18143 - DNA, 23 bp, Artificial Sequence
  Synthetic: FXN 3 forward 9:69039502-69039531; SaCas9
ccccagccccagccttacctacc

SEQ ID NO: 18144 - DNA, 22 bp, Artificial Sequence
  Synthetic: FXN 3 forward 9:69039503-69039531; SaCas9
cccagccccagccttacctacc

SEQ ID NO: 18145 - DNA, 21 bp, Artificial Sequence
  Synthetic: FXN 3 forward 9:69039504-69039531; SaCas9
ccagccccagccttacctacc

SEQ ID NO: 18146 - DNA, 20 bp, Artificial Sequence
  Synthetic: FXN 3 forward 9:69039505-69039531; SaCas9
cagccccagccttacctacc

SEQ ID NO: 18147 - DNA, 19 bp, Artificial Sequence
  Synthetic: FXN 3 forward 9:69039506-69039531; SaCas9
agccccagccttacctacc

SEQ ID NO: 18148 - DNA, 18 bp, Artificial Sequence
  Synthetic: FXN 3 forward 9:69039507-69039531; SaCas9
gccccagccttacctacc

SEQ ID NO: 18149 - DNA, 25 bp, Artificial Sequence
  Synthetic: FXN 3 reverse 9:69039500-69039531; SaCas9
cctccaggtaggtaaggctggggct

SEQ ID NO: 18150 - DNA, 24 bp, Artificial Sequence
  Synthetic: FXN 3 reverse 9:69039501-69039531; SaCas9
ctccaggtaggtaaggctggggct

SEQ ID NO: 18151 - DNA, 23 bp, Artificial Sequence
  Synthetic: FXN 3 reverse 9:69039502-69039531; SaCas9
tccaggtaggtaaggctggggct

SEQ ID NO: 18152 - DNA, 22 bp, Artificial Sequence
  Synthetic: FXN 3 reverse 9:69039503-69039531; SaCas9
ccaggtaggtaaggctggggct

SEQ ID NO: 18153 - DNA, 21 bp, Artificial Sequence
  Synthetic: FXN 3 reverse 9:69039504-69039531; SaCas9
caggtaggtaaggctggggct

SEQ ID NO: 18154 - DNA, 20 bp, Artificial Sequence
  Synthetic: FXN 3 reverse 9:69039505-69039531; SaCas9
aggtaggtaaggctggggct

SEQ ID NO: 18155 - DNA, 19 bp, Artificial Sequence
  Synthetic: FXN 3 reverse 9:69039506-69039531; SaCas9
ggtaggtaaggctggggct

SEQ ID NO: 18156 - DNA, 18 bp, Artificial Sequence
  Synthetic: FXN 3 reverse 9:69039507-69039531; SaCas9
gtaggtaaggctggggct

SEQ ID NO: 18157 - DNA, 25 bp, Artificial Sequence
  Synthetic: FXN 3 reverse 9:69039501-69039532; SaCas9
gcctccaggtaggtaaggctggggc

SEQ ID NO: 18158 - DNA, 24 bp, Artificial Sequence
  Synthetic: FXN 3 reverse 9:69039502-69039532; SaCas9
cctccaggtaggtaaggctggggc

SEQ ID NO: 18159 - DNA, 23 bp, Artificial Sequence
  Synthetic: FXN 3 reverse 9:69039503-69039532; SaCas9
ctccaggtaggtaaggctggggc

SEQ ID NO: 18160 - DNA, 22 bp, Artificial Sequence
  Synthetic: FXN 3 reverse 9:69039504-69039532; SaCas9
tccaggtaggtaaggctggggc

SEQ ID NO: 18161 - DNA, 21 bp, Artificial Sequence
  Synthetic: FXN 3 reverse 9:69039505-69039532; SaCas9
ccaggtaggtaaggctggggc

SEQ ID NO: 18162 - DNA, 20 bp, Artificial Sequence
  Synthetic: FXN 3 reverse 9:69039506-69039532; SaCas9
caggtaggtaaggctggggc

SEQ ID NO: 18163 - DNA, 19 bp, Artificial Sequence
  Synthetic: FXN 3 reverse 9:69039507-69039532; SaCas9
aggtaggtaaggctggggc

SEQ ID NO: 18164 - DNA, 18 bp, Artificial Sequence
  Synthetic: FXN 3 reverse 9:69039508-69039532; SaCas9
ggtaggtaaggctggggc

SEQ ID NO: 18165 - DNA, 25 bp, Artificial Sequence
  Synthetic: FXN 3 reverse 9:69039502-69039533; SaCas9
agcctccaggtaggtaaggctgggg

SEQ ID NO: 18166 - DNA, 24 bp, Artificial Sequence
  Synthetic: FXN 3 reverse 9:69039503-69039533; SaCas9
gcctccaggtaggtaaggctgggg

SEQ ID NO: 18167 - DNA, 23 bp, Artificial Sequence
  Synthetic: FXN 3 reverse 9:69039504-69039533; SaCas9
cctccaggtaggtaaggctgggg

SEQ ID NO: 18168 - DNA, 22 bp, Artificial Sequence
  Synthetic: FXN 3 reverse 9:69039505-69039533; SaCas9
ctccaggtaggtaaggctgggg

SEQ ID NO: 18169 - DNA, 21 bp, Artificial Sequence
  Synthetic: FXN 3 reverse 9:69039506-69039533; SaCas9
tccaggtaggtaaggctgggg

SEQ ID NO: 18170 - DNA, 20 bp, Artificial Sequence
  Synthetic: FXN 3 reverse 9:69039507-69039533; SaCas9
ccaggtaggtaaggctgggg

SEQ ID NO: 18171 - DNA, 19 bp, Artificial Sequence
  Synthetic: FXN 3 reverse 9:69039508-69039533; SaCas9
caggtaggtaaggctgggg

SEQ ID NO: 18172 - DNA, 18 bp, Artificial Sequence
  Synthetic: FXN 3 reverse 9:69039509-69039533; SaCas9
aggtaggtaaggctgggg

SEQ ID NO: 18173 - DNA, 25 bp, Artificial Sequence
  Synthetic: FXN 3 forward 9:69039506-69039537; SaCas9
agccccagccttacctacctggagg

SEQ ID NO: 18174 - DNA, 24 bp, Artificial Sequence
  Synthetic: FXN 3 forward 9:69039507-69039537; SaCas9
gccccagccttacctacctggagg

SEQ ID NO: 18175 - DNA, 23 bp, Artificial Sequence
  Synthetic: FXN 3 forward 9:69039508-69039537; SaCas9
ccccagccttacctacctggagg

SEQ ID NO: 18176 - DNA, 22 bp, Artificial Sequence
  Synthetic: FXN 3 forward 9:69039509-69039537; SaCas9
cccagccttacctacctggagg

SEQ ID NO: 18177 - DNA, 21 bp, Artificial Sequence
  Synthetic: FXN 3 forward 9:69039510-69039537; SaCas9
ccagccttacctacctggagg

SEQ ID NO: 18178 - DNA, 20 bp, Artificial Sequence
  Synthetic: FXN 3 forward 9:69039511-69039537; SaCas9
cagccttacctacctggagg

SEQ ID NO: 18179 - DNA, 19 bp, Artificial Sequence
  Synthetic: FXN 3 forward 9:69039512-69039537; SaCas9
agccttacctacctggagg

SEQ ID NO: 18180 - DNA, 18 bp, Artificial Sequence
  Synthetic: FXN 3 forward 9:69039513-69039537; SaCas9
gccttacctacctggagg

SEQ ID NO: 18181 - DNA, 25 bp, Artificial Sequence
  Synthetic: FXN 3 forward 9:69039507-69039538; SaCas9
gccccagccttacctacctggaggc

SEQ ID NO: 18182 - DNA, 24 bp, Artificial Sequence
  Synthetic: FXN 3 forward 9:69039508-69039538; SaCas9
ccccagccttacctacctggaggc

SEQ ID NO: 18183 - DNA, 23 bp, Artificial Sequence
  Synthetic: FXN 3 forward 9:69039509-69039538; SaCas9
cccagccttacctacctggaggc

SEQ ID NO: 18184 - DNA, 22 bp, Artificial Sequence
  Synthetic: FXN 3 forward 9:69039510-69039538; SaCas9
ccagccttacctacctggaggc

SEQ ID NO: 18185 - DNA, 21 bp, Artificial Sequence
  Synthetic: FXN 3 forward 9:69039511-69039538; SaCas9
cagccttacctacctggaggc

SEQ ID NO: 18186 - DNA, 20 bp, Artificial Sequence
  Synthetic: FXN 3 forward 9:69039512-69039538; SaCas9
agccttacctacctggaggc

SEQ ID NO: 18187 - DNA, 19 bp, Artificial Sequence
  Synthetic: FXN 3 forward 9:69039513-69039538; SaCas9
gccttacctacctggaggc

SEQ ID NO: 18188 - DNA, 18 bp, Artificial Sequence
  Synthetic: FXN 3 forward 9:69039514-69039538; SaCas9
ccttacctacctggaggc

SEQ ID NO: 18189 - DNA, 25 bp, Artificial Sequence
  Synthetic: FXN 3 reverse 9:69039507-69039538; SaCas9
ttcccagcctccaggtaggtaaggc

SEQ ID NO: 18190 - DNA, 24 bp, Artificial Sequence
  Synthetic: FXN 3 reverse 9:69039508-69039538; SaCas9
tcccagcctccaggtaggtaaggc

SEQ ID NO: 18191 - DNA, 23 bp, Artificial Sequence
  Synthetic: FXN 3 reverse 9:69039509-69039538; SaCas9
cccagcctccaggtaggtaaggc

SEQ ID NO: 18192 - DNA, 22 bp, Artificial Sequence
  Synthetic: FXN 3 reverse 9:69039510-69039538; SaCas9
ccagcctccaggtaggtaaggc

SEQ ID NO: 18193 - DNA, 21 bp, Artificial Sequence
  Synthetic: FXN 3 reverse 9:69039511-69039538; SaCas9
cagcctccaggtaggtaaggc

SEQ ID NO: 18194 - DNA, 20 bp, Artificial Sequence
  Synthetic: FXN 3 reverse 9:69039512-69039538; SaCas9
agcctccaggtaggtaaggc

SEQ ID NO: 18195 - DNA, 19 bp, Artificial Sequence
  Synthetic: FXN 3 reverse 9:69039513-69039538; SaCas9
gcctccaggtaggtaaggc

SEQ ID NO: 18196 - DNA, 18 bp, Artificial Sequence
  Synthetic: FXN 3 reverse 9:69039514-69039538; SaCas9
cctccaggtaggtaaggc

SEQ ID NO: 18197 - DNA, 25 bp, Artificial Sequence
  Synthetic: FXN 3 forward 9:69039508-69039539; SaCas9
ccccagccttacctacctggaggct

SEQ ID NO: 18198 - DNA, 24 bp, Artificial Sequence
  Synthetic: FXN 3 forward 9:69039509-69039539; SaCas9
cccagccttacctacctggaggct

SEQ ID NO: 18199 - DNA, 23 bp, Artificial Sequence
  Synthetic: FXN 3 forward 9:69039510-69039539; SaCas9
ccagccttacctacctggaggct

SEQ ID NO: 18200 - DNA, 22 bp, Artificial Sequence
  Synthetic: FXN 3 forward 9:69039511-69039539; SaCas9
cagccttacctacctggaggct

SEQ ID NO: 18201 - DNA, 21 bp, Artificial Sequence
  Synthetic: FXN 3 forward 9:69039512-69039539; SaCas9
agccttacctacctggaggct

SEQ ID NO: 18202 - DNA, 20 bp, Artificial Sequence
  Synthetic: FXN 3 forward 9:69039513-69039539; SaCas9
gccttacctacctggaggct

SEQ ID NO: 18203 - DNA, 19 bp, Artificial Sequence
  Synthetic: FXN 3 forward 9:69039514-69039539; SaCas9
ccttacctacctggaggct

SEQ ID NO: 18204 - DNA, 18 bp, Artificial Sequence
  Synthetic: FXN 3 forward 9:69039515-69039539; SaCas9
cttacctacctggaggct

SEQ ID NO: 18205 - DNA, 25 bp, Artificial Sequence
  Synthetic: FXN 3 reverse 9:69039508-69039539; SaCas9
cttcccagcctccaggtaggtaagg

SEQ ID NO: 18206 - DNA, 24 bp, Artificial Sequence
  Synthetic: FXN 3 reverse 9:69039509-69039539; SaCas9
ttcccagcctccaggtaggtaagg

SEQ ID NO: 18207 - DNA, 23 bp, Artificial Sequence
  Synthetic: FXN 3 reverse 9:69039510-69039539; SaCas9
tcccagcctccaggtaggtaagg

SEQ ID NO: 18208 - DNA, 22 bp, Artificial Sequence
  Synthetic: FXN 3 reverse 9:69039511-69039539; SaCas9
cccagcctccaggtaggtaagg

SEQ ID NO: 18209 - DNA, 21 bp, Artificial Sequence
  Synthetic: FXN 3 reverse 9:69039512-69039539; SaCas9
ccagcctccaggtaggtaagg

SEQ ID NO: 18210 - DNA, 20 bp, Artificial Sequence
  Synthetic: FXN 3 reverse 9:69039513-69039539; SaCas9
cagcctccaggtaggtaagg

SEQ ID NO: 18211 - DNA, 19 bp, Artificial Sequence
  Synthetic: FXN 3 reverse 9:69039514-69039539; SaCas9
agcctccaggtaggtaagg

SEQ ID NO: 18212 - DNA, 18 bp, Artificial Sequence
  Synthetic: FXN 3 reverse 9:69039515-69039539; SaCas9
gcctccaggtaggtaagg

SEQ ID NO: 18213 - DNA, 25 bp, Artificial Sequence
  Synthetic: FXN 3 forward 9:69039511-69039542; SaCas9
cagccttacctacctggaggctggg

SEQ ID NO: 18214 - DNA, 24 bp, Artificial Sequence
  Synthetic: FXN 3 forward 9:69039512-69039542; SaCas9
agccttacctacctggaggctggg

SEQ ID NO: 18215 - DNA, 23 bp, Artificial Sequence
  Synthetic: FXN 3 forward 9:69039513-69039542; SaCas9
gccttacctacctggaggctggg

SEQ ID NO: 18216 - DNA, 22 bp, Artificial Sequence
  Synthetic: FXN 3 forward 9:69039514-69039542; SaCas9
ccttacctacctggaggctggg

SEQ ID NO: 18217 - DNA, 21 bp, Artificial Sequence
  Synthetic: FXN 3 forward 9:69039515-69039542; SaCas9
cttacctacctggaggctggg

SEQ ID NO: 18218 - DNA, 20 bp, Artificial Sequence
  Synthetic: FXN 3 forward 9:69039516-69039542; SaCas9
ttacctacctggaggctggg

SEQ ID NO: 18219 - DNA, 19 bp, Artificial Sequence
  Synthetic: FXN 3 forward 9:69039517-69039542; SaCas9
tacctacctggaggctggg

SEQ ID NO: 18220 - DNA, 18 bp, Artificial Sequence
  Synthetic: FXN 3 forward 9:69039518-69039542; SaCas9
acctacctggaggctggg

SEQ ID NO: 18221 - DNA, 25 bp, Artificial Sequence
  Synthetic: FXN 3 forward 9:69039526-69039557; SaCas9
ggaggctgggaaggactctgattcc

SEQ ID NO: 18222 - DNA, 24 bp, Artificial Sequence
  Synthetic: FXN 3 forward 9:69039527-69039557; SaCas9
gaggctgggaaggactctgattcc

SEQ ID NO: 18223 - DNA, 23 bp, Artificial Sequence
  Synthetic: FXN 3 forward 9:69039528-69039557; SaCas9
aggctgggaaggactctgattcc

SEQ ID NO: 18224 - DNA, 22 bp, Artificial Sequence
  Synthetic: FXN 3 forward 9:69039529-69039557; SaCas9
ggctgggaaggactctgattcc

SEQ ID NO: 18225 - DNA, 21 bp, Artificial Sequence
  Synthetic: FXN 3 forward 9:69039530-69039557; SaCas9
gctgggaaggactctgattcc

SEQ ID NO: 18226 - DNA, 20 bp, Artificial Sequence
  Synthetic: FXN 3 forward 9:69039531-69039557; SaCas9
ctgggaaggactctgattcc

SEQ ID NO: 18227 - DNA, 19 bp, Artificial Sequence
  Synthetic: FXN 3 forward 9:69039532-69039557; SaCas9
tgggaaggactctgattcc

SEQ ID NO: 18228 - DNA, 18 bp, Artificial Sequence
  Synthetic: FXN 3 forward 9:69039533-69039557; SaCas9
gggaaggactctgattcc

SEQ ID NO: 18229 - DNA, 25 bp, Artificial Sequence
  Synthetic: FXN 3 reverse 9:69039540-69039571; SaCas9
aaaaacataggctgcctcgtggaat

SEQ ID NO: 18230 - DNA, 24 bp, Artificial Sequence
  Synthetic: FXN 3 reverse 9:69039541-69039571; SaCas9
aaaacataggctgcctcgtggaat

SEQ ID NO: 18231 - DNA, 23 bp, Artificial Sequence
  Synthetic: FXN 3 reverse 9:69039542-69039571; SaCas9
aaacataggctgcctcgtggaat

SEQ ID NO: 18232 - DNA, 22 bp, Artificial Sequence
  Synthetic: FXN 3 reverse 9:69039543-69039571; SaCas9
aacataggctgcctcgtggaat

SEQ ID NO: 18233 - DNA, 21 bp, Artificial Sequence
  Synthetic: FXN 3 reverse 9:69039544-69039571; SaCas9
acataggctgcctcgtggaat

SEQ ID NO: 18234 - DNA, 20 bp, Artificial Sequence
  Synthetic: FXN 3 reverse 9:69039545-69039571; SaCas9
cataggctgcctcgtggaat

SEQ ID NO: 18235 - DNA, 19 bp, Artificial Sequence
  Synthetic: FXN 3 reverse 9:69039546-69039571; SaCas9
ataggctgcctcgtggaat

SEQ ID NO: 18236 - DNA, 18 bp, Artificial Sequence
  Synthetic: FXN 3 reverse 9:69039547-69039571; SaCas9
taggctgcctcgtggaat

SEQ ID NO: 18237 - DNA, 25 bp, Artificial Sequence
  Synthetic: FXN 3 reverse 9:69039546-69039577; SaCas9
ccatcaaaaaacataggctgcctcg

SEQ ID NO: 18238 - DNA, 24 bp, Artificial Sequence
  Synthetic: FXN 3 reverse 9:69039547-69039577; SaCas9
catcaaaaaacataggctgcctcg

SEQ ID NO: 18239 - DNA, 23 bp, Artificial Sequence
  Synthetic: FXN 3 reverse 9:69039548-69039577; SaCas9
atcaaaaaacataggctgcctcg

SEQ ID NO: 18240 - DNA, 22 bp, Artificial Sequence
  Synthetic: FXN 3 reverse 9:69039549-69039577; SaCas9
tcaaaaaacataggctgcctcg

SEQ ID NO: 18241 - DNA, 21 bp, Artificial Sequence
  Synthetic: FXN 3 reverse 9:69039550-69039577; SaCas9
caaaaaacataggctgcctcg

SEQ ID NO: 18242 - DNA, 20 bp, Artificial Sequence
  Synthetic: FXN 3 reverse 9:69039551-69039577; SaCas9
aaaaaacataggctgcctcg

SEQ ID NO: 18243 - DNA, 19 bp, Artificial Sequence
  Synthetic: FXN 3 reverse 9:69039552-69039577; SaCas9
aaaaacataggctgcctcg

SEQ ID NO: 18244 - DNA, 18 bp, Artificial Sequence
  Synthetic: FXN 3 reverse 9:69039553-69039577; SaCas9
aaaacataggctgcctcg

SEQ ID NO: 18245 - DNA, 25 bp, Artificial Sequence
  Synthetic: FXN 3 reverse 9:69039547-69039578; SaCas9
tccatcaaaaaacataggctgcctc

SEQ ID NO: 18246 - DNA, 24 bp, Artificial Sequence
  Synthetic: FXN 3 reverse 9:69039548-69039578; SaCas9
ccatcaaaaaacataggctgcctc

SEQ ID NO: 18247 - DNA, 23 bp, Artificial Sequence
  Synthetic: FXN 3 reverse 9:69039549-69039578; SaCas9
catcaaaaaacataggctgcctc

SEQ ID NO: 18248 - DNA, 22 bp, Artificial Sequence
  Synthetic: FXN 3 reverse 9:69039550-69039578; SaCas9
atcaaaaaacataggctgcctc

SEQ ID NO: 18249 - DNA, 21 bp, Artificial Sequence
  Synthetic: FXN 3 reverse 9:69039551-69039578; SaCas9
tcaaaaaacataggctgcctc

SEQ ID NO: 18250 - DNA, 20 bp, Artificial Sequence
  Synthetic: FXN 3 reverse 9:69039552-69039578; SaCas9
caaaaaacataggctgcctc

SEQ ID NO: 18251 - DNA, 19 bp, Artificial Sequence
  Synthetic: FXN 3 reverse 9:69039553-69039578; SaCas9
aaaaaacataggctgcctc

SEQ ID NO: 18252 - DNA, 18 bp, Artificial Sequence
  Synthetic: FXN 3 reverse 9:69039554-69039578; SaCas9
aaaaacataggctgcctc

SEQ ID NO: 18253 - DNA, 25 bp, Artificial Sequence
  Synthetic: FXN 3 forward 9:69039548-69039579; SaCas9
tccacgaggcagcctatgttttttg

SEQ ID NO: 18254 - DNA, 24 bp, Artificial Sequence
  Synthetic: FXN 3 forward 9:69039549-69039579; SaCas9
ccacgaggcagcctatgttttttg

SEQ ID NO: 18255 - DNA, 23 bp, Artificial Sequence
  Synthetic: FXN 3 forward 9:69039550-69039579; SaCas9
cacgaggcagcctatgttttttg

SEQ ID NO: 18256 - DNA, 22 bp, Artificial Sequence
  Synthetic: FXN 3 forward 9:69039551-69039579; SaCas9
acgaggcagcctatgttttttg

SEQ ID NO: 18257 - DNA, 21 bp, Artificial Sequence
  Synthetic: FXN 3 forward 9:69039552-69039579; SaCas9
cgaggcagcctatgttttttg

SEQ ID NO: 18258 - DNA, 20 bp, Artificial Sequence
  Synthetic: FXN 3 forward 9:69039553-69039579; SaCas9
gaggcagcctatgttttttg

SEQ ID NO: 18259 - DNA, 19 bp, Artificial Sequence
  Synthetic: FXN 3 forward 9:69039554-69039579; SaCas9
aggcagcctatgttttttg

SEQ ID NO: 18260 - DNA, 18 bp, Artificial Sequence
  Synthetic: FXN 3 forward 9:69039555-69039579; SaCas9
ggcagcctatgttttttg

SEQ ID NO: 18261 - DNA, 25 bp, Artificial Sequence
  Synthetic: FXN 3 forward 9:69039549-69039580; SaCas9
ccacgaggcagcctatgttttttga

SEQ ID NO: 18262 - DNA, 24 bp, Artificial Sequence
  Synthetic: FXN 3 forward 9:69039550-69039580; SaCas9
cacgaggcagcctatgttttttga

SEQ ID NO: 18263 - DNA, 23 bp, Artificial Sequence
  Synthetic: FXN 3 forward 9:69039551-69039580; SaCas9
acgaggcagcctatgttttttga

SEQ ID NO: 18264 - DNA, 22 bp, Artificial Sequence
  Synthetic: FXN 3 forward 9:69039552-69039580; SaCas9
cgaggcagcctatgttttttga

SEQ ID NO: 18265 - DNA, 21 bp, Artificial Sequence
  Synthetic: FXN 3 forward 9:69039553-69039580; SaCas9
gaggcagcctatgttttttga

SEQ ID NO: 18266 - DNA, 20 bp, Artificial Sequence
  Synthetic: FXN 3 forward 9:69039554-69039580; SaCas9
aggcagcctatgttttttga

SEQ ID NO: 18267 - DNA, 19 bp, Artificial Sequence
  Synthetic: FXN 3 forward 9:69039555-69039580; SaCas9
ggcagcctatgttttttga

SEQ ID NO: 18268 - DNA, 18 bp, Artificial Sequence
  Synthetic: FXN 3 forward 9:69039556-69039580; SaCas9
gcagcctatgttttttga

SEQ ID NO: 18269 - DNA, 25 bp, Artificial Sequence
  Synthetic: FXN 3 forward 9:69039551-69039582; SaCas9
acgaggcagcctatgttttttgatg

SEQ ID NO: 18270 - DNA, 24 bp, Artificial Sequence
  Synthetic: FXN 3 forward 9:69039552-69039582; SaCas9
cgaggcagcctatgttttttgatg

SEQ ID NO: 18271 - DNA, 23 bp, Artificial Sequence
  Synthetic: FXN 3 forward 9:69039553-69039582; SaCas9
gaggcagcctatgttttttgatg

SEQ ID NO: 18272 - DNA, 22 bp, Artificial Sequence
  Synthetic: FXN 3 forward 9:69039554-69039582; SaCas9
aggcagcctatgttttttgatg

SEQ ID NO: 18273 - DNA, 21 bp, Artificial Sequence
  Synthetic: FXN 3 forward 9:69039555-69039582; SaCas9
ggcagcctatgttttttgatg

SEQ ID NO: 18274 - DNA, 20 bp, Artificial Sequence
  Synthetic: FXN 3 forward 9:69039556-69039582; SaCas9
gcagcctatgttttttgatg

SEQ ID NO: 18275 - DNA, 19 bp, Artificial Sequence
  Synthetic: FXN 3 forward 9:69039557-69039582; SaCas9
cagcctatgttttttgatg

SEQ ID NO: 18276 - DNA, 18 bp, Artificial Sequence
  Synthetic: FXN 3 forward 9:69039558-69039582; SaCas9
agcctatgttttttgatg

SEQ ID NO: 18277 - DNA, 25 bp, Artificial Sequence
  Synthetic: FXN 3 forward 9:69039552-69039583; SaCas9
cgaggcagcctatgttttttgatgg

SEQ ID NO: 18278 - DNA, 24 bp, Artificial Sequence
  Synthetic: FXN 3 forward 9:69039553-69039583; SaCas9
gaggcagcctatgttttttgatgg

SEQ ID NO: 18279 - DNA, 23 bp, Artificial Sequence
  Synthetic: FXN 3 forward 9:69039554-69039583; SaCas9
aggcagcctatgttttttgatgg

SEQ ID NO: 18280 - DNA, 22 bp, Artificial Sequence
  Synthetic: FXN 3 forward 9:69039555-69039583; SaCas9
ggcagcctatgttttttgatgg

SEQ ID NO: 18281 - DNA, 21 bp, Artificial Sequence
  Synthetic: FXN 3 forward 9:69039556-69039583; SaCas9
gcagcctatgttttttgatgg

SEQ ID NO: 18282 - DNA, 20 bp, Artificial Sequence
  Synthetic: FXN 3 forward 9:69039557-69039583; SaCas9
cagcctatgttttttgatgg

SEQ ID NO: 18283 - DNA, 19 bp, Artificial Sequence
  Synthetic: FXN 3 forward 9:69039558-69039583; SaCas9
agcctatgttttttgatgg

SEQ ID NO: 18284 - DNA, 18 bp, Artificial Sequence
  Synthetic: FXN 3 forward 9:69039559-69039583; SaCas9
gcctatgttttttgatgg

SEQ ID NO: 18285 - DNA, 25 bp, Artificial Sequence
  Synthetic: FXN 3 forward 9:69039562-69039593; SaCas9
tatgttttttgatggagggatgtga

SEQ ID NO: 18286 - DNA, 24 bp, Artificial Sequence
  Synthetic: FXN 3 forward 9:69039563-69039593; SaCas9
atgttttttgatggagggatgtga

SEQ ID NO: 18287 - DNA, 23 bp, Artificial Sequence
  Synthetic: FXN 3 forward 9:69039564-69039593; SaCas9
tgttttttgatggagggatgtga

SEQ ID NO: 18288 - DNA, 22 bp, Artificial Sequence
  Synthetic: FXN 3 forward 9:69039565-69039593; SaCas9
gttttttgatggagggatgtga

SEQ ID NO: 18289 - DNA, 21 bp, Artificial Sequence
  Synthetic: FXN 3 forward 9:69039566-69039593; SaCas9
ttttttgatggagggatgtga

SEQ ID NO: 18290 - DNA, 20 bp, Artificial Sequence
  Synthetic: FXN 3 forward 9:69039567-69039593; SaCas9
tttttgatggagggatgtga

SEQ ID NO: 18291 - DNA, 19 bp, Artificial Sequence
  Synthetic: FXN 3 forward 9:69039568-69039593; SaCas9
ttttgatggagggatgtga

SEQ ID NO: 18292 - DNA, 18 bp, Artificial Sequence
  Synthetic: FXN 3 forward 9:69039569-69039593; SaCas9
tttgatggagggatgtga

SEQ ID NO: 18293 - DNA, 25 bp, Artificial Sequence
  Synthetic: FXN 3 forward 9:69039563-69039594; SaCas9
atgttttttgatggagggatgtgac

SEQ ID NO: 18294 - DNA, 24 bp, Artificial Sequence
  Synthetic: FXN 3 forward 9:69039564-69039594; SaCas9
tgttttttgatggagggatgtgac

SEQ ID NO: 18295 - DNA, 23 bp, Artificial Sequence
  Synthetic: FXN 3 forward 9:69039565-69039594; SaCas9
gttttttgatggagggatgtgac

SEQ ID NO: 18296 - DNA, 22 bp, Artificial Sequence
  Synthetic: FXN 3 forward 9:69039566-69039594; SaCas9
ttttttgatggagggatgtgac

SEQ ID NO: 18297 - DNA, 21 bp, Artificial Sequence
  Synthetic: FXN 3 forward 9:69039567-69039594; SaCas9
tttttgatggagggatgtgac

SEQ ID NO: 18298 - DNA, 20 bp, Artificial Sequence
  Synthetic: FXN 3 forward 9:69039568-69039594; SaCas9
ttttgatggagggatgtgac

SEQ ID NO: 18299 - DNA, 19 bp, Artificial Sequence
  Synthetic: FXN 3 forward 9:69039569-69039594; SaCas9
tttgatggagggatgtgac

SEQ ID NO: 18300 - DNA, 18 bp, Artificial Sequence
  Synthetic: FXN 3 forward 9:69039570-69039594; SaCas9
ttgatggagggatgtgac

SEQ ID NO: 18301 - DNA, 25 bp, Artificial Sequence
  Synthetic: FXN 3 forward 9:69039596-69039627; SaCas9
catctttaacgtttcctcttaaata

SEQ ID NO: 18302 - DNA, 24 bp, Artificial Sequence
  Synthetic: FXN 3 forward 9:69039597-69039627; SaCas9
atctttaacgtttcctcttaaata

SEQ ID NO: 18303 - DNA, 23 bp, Artificial Sequence
  Synthetic: FXN 3 forward 9:69039598-69039627; SaCas9
tctttaacgtttcctcttaaata

SEQ ID NO: 18304 - DNA, 22 bp, Artificial Sequence
  Synthetic: FXN 3 forward 9:69039599-69039627; SaCas9
ctttaacgtttcctcttaaata

SEQ ID NO: 18305 - DNA, 21 bp, Artificial Sequence
  Synthetic: FXN 3 forward 9:69039600-69039627; SaCas9
tttaacgtttcctcttaaata

SEQ ID NO: 18306 - DNA, 20 bp, Artificial Sequence
  Synthetic: FXN 3 forward 9:69039601-69039627; SaCas9
ttaacgtttcctcttaaata

SEQ ID NO: 18307 - DNA, 19 bp, Artificial Sequence
  Synthetic: FXN 3 forward 9:69039602-69039627; SaCas9
taacgtttcctcttaaata

SEQ ID NO: 18308 - DNA, 18 bp, Artificial Sequence
  Synthetic: FXN 3 forward 9:69039603-69039627; SaCas9
aacgtttcctcttaaata

SEQ ID NO: 18309 - DNA, 25 bp, Artificial Sequence
  Synthetic: FXN 3 forward 9:69039597-69039628; SaCas9
atctttaacgtttcctcttaaatac

SEQ ID NO: 18310 - DNA, 24 bp, Artificial Sequence
  Synthetic: FXN 3 forward 9:69039598-69039628; SaCas9
tctttaacgtttcctcttaaatac

SEQ ID NO: 18311 - DNA, 23 bp, Artificial Sequence
  Synthetic: FXN 3 forward 9:69039599-69039628; SaCas9
ctttaacgtttcctcttaaatac

SEQ ID NO: 18312 - DNA, 22 bp, Artificial Sequence
  Synthetic: FXN 3 forward 9:69039600-69039628; SaCas9
tttaacgtttcctcttaaatac

SEQ ID NO: 18313 - DNA, 21 bp, Artificial Sequence
  Synthetic: FXN 3 forward 9:69039601-69039628; SaCas9
ttaacgtttcctcttaaatac

SEQ ID NO: 18314 - DNA, 20 bp, Artificial Sequence
  Synthetic: FXN 3 forward 9:69039602-69039628; SaCas9
taacgtttcctcttaaatac

SEQ ID NO: 18315 - DNA, 19 bp, Artificial Sequence
  Synthetic: FXN 3 forward 9:69039603-69039628; SaCas9
aacgtttcctcttaaatac

SEQ ID NO: 18316 - DNA, 18 bp, Artificial Sequence
  Synthetic: FXN 3 forward 9:69039604-69039628; SaCas9
acgtttcctcttaaatac

SEQ ID NO: 18317 - DNA, 25 bp, Artificial Sequence
  Synthetic: FXN 3 reverse 9:69039607-69039638; SaCas9
ctcgaagctgtctccagtatttaag

SEQ ID NO: 18318 - DNA, 24 bp, Artificial Sequence
  Synthetic: FXN 3 reverse 9:69039608-69039638; SaCas9
tcgaagctgtctccagtatttaag

SEQ ID NO: 18319 - DNA, 23 bp, Artificial Sequence
  Synthetic: FXN 3 reverse 9:69039609-69039638; SaCas9
cgaagctgtctccagtatttaag

SEQ ID NO: 18320 - DNA, 22 bp, Artificial Sequence
  Synthetic: FXN 3 reverse 9:69039610-69039638; SaCas9
gaagctgtctccagtatttaag

SEQ ID NO: 18321 - DNA, 21 bp, Artificial Sequence
  Synthetic: FXN 3 reverse 9:69039611-69039638; SaCas9
aagctgtctccagtatttaag

SEQ ID NO: 18322 - DNA, 20 bp, Artificial Sequence
  Synthetic: FXN 3 reverse 9:69039612-69039638; SaCas9
agctgtctccagtatttaag

SEQ ID NO: 18323 - DNA, 19 bp, Artificial Sequence
  Synthetic: FXN 3 reverse 9:69039613-69039638; SaCas9
gctgtctccagtatttaag

SEQ ID NO: 18324 - DNA, 18 bp, Artificial Sequence
  Synthetic: FXN 3 reverse 9:69039614-69039638; SaCas9
ctgtctccagtatttaag

SEQ ID NO: 18325 - DNA, 25 bp, Artificial Sequence
  Synthetic: FXN 3 forward 9:69039608-69039639; SaCas9
ttcctcttaaatactggagacagct

SEQ ID NO: 18326 - DNA, 24 bp, Artificial Sequence
  Synthetic: FXN 3 forward 9:69039609-69039639; SaCas9
tcctcttaaatactggagacagct

SEQ ID NO: 18327 - DNA, 23 bp, Artificial Sequence
  Synthetic: FXN 3 forward 9:69039610-69039639; SaCas9
cctcttaaatactggagacagct

SEQ ID NO: 18328 - DNA, 22 bp, Artificial Sequence
  Synthetic: FXN 3 forward 9:69039611-69039639; SaCas9
ctcttaaatactggagacagct

SEQ ID NO: 18329 - DNA, 21 bp, Artificial Sequence
  Synthetic: FXN 3 forward 9:69039612-69039639; SaCas9
tcttaaatactggagacagct

SEQ ID NO: 18330 - DNA, 20 bp, Artificial Sequence
  Synthetic: FXN 3 forward 9:69039613-69039639; SaCas9
cttaaatactggagacagct

SEQ ID NO: 18331 - DNA, 19 bp, Artificial Sequence
  Synthetic: FXN 3 forward 9:69039614-69039639; SaCas9
ttaaatactggagacagct

SEQ ID NO: 18332 - DNA, 18 bp, Artificial Sequence
  Synthetic: FXN 3 forward 9:69039615-69039639; SaCas9
taaatactggagacagct

SEQ ID NO: 18333 - DNA, 25 bp, Artificial Sequence
  Synthetic: FXN 3 reverse 9:69039608-69039639; SaCas9
cctcgaagctgtctccagtatttaa

SEQ ID NO: 18334 - DNA, 24 bp, Artificial Sequence
  Synthetic: FXN 3 reverse 9:69039609-69039639; SaCas9
ctcgaagctgtctccagtatttaa

SEQ ID NO: 18335 - DNA, 23 bp, Artificial Sequence
  Synthetic: FXN 3 reverse 9:69039610-69039639; SaCas9
tcgaagctgtctccagtatttaa

SEQ ID NO: 18336 - DNA, 22 bp, Artificial Sequence
  Synthetic: FXN 3 reverse 9:69039611-69039639; SaCas9
cgaagctgtctccagtatttaa

SEQ ID NO: 18337 - DNA, 21 bp, Artificial Sequence
  Synthetic: FXN 3 reverse 9:69039612-69039639; SaCas9
gaagctgtctccagtatttaa

SEQ ID NO: 18338 - DNA, 20 bp, Artificial Sequence
  Synthetic: FXN 3 reverse 9:69039613-69039639; SaCas9
aagctgtctccagtatttaa

SEQ ID NO: 18339 - DNA, 19 bp, Artificial Sequence
  Synthetic: FXN 3 reverse 9:69039614-69039639; SaCas9
agctgtctccagtatttaa

SEQ ID NO: 18340 - DNA, 18 bp, Artificial Sequence
  Synthetic: FXN 3 reverse 9:69039615-69039639; SaCas9
gctgtctccagtatttaa

SEQ ID NO: 18341 - DNA, 25 bp, Artificial Sequence
  Synthetic: FXN 3 forward 9:69039610-69039641; SaCas9
cctcttaaatactggagacagcttc

SEQ ID NO: 18342 - DNA, 24 bp, Artificial Sequence
  Synthetic: FXN 3 forward 9:69039611-69039641; SaCas9
ctcttaaatactggagacagcttc

SEQ ID NO: 18343 - DNA, 23 bp, Artificial Sequence
  Synthetic: FXN 3 forward 9:69039612-69039641; SaCas9
tcttaaatactggagacagcttc

SEQ ID NO: 18344 - DNA, 22 bp, Artificial Sequence
  Synthetic: FXN 3 forward 9:69039613-69039641; SaCas9
cttaaatactggagacagcttc

SEQ ID NO: 18345 - DNA, 21 bp, Artificial Sequence
  Synthetic: FXN 3 forward 9:69039614-69039641; SaCas9
ttaaatactggagacagcttc

SEQ ID NO: 18346 - DNA, 20 bp, Artificial Sequence
  Synthetic: FXN 3 forward 9:69039615-69039641; SaCas9
taaatactggagacagcttc

SEQ ID NO: 18347 - DNA, 19 bp, Artificial Sequence
  Synthetic: FXN 3 forward 9:69039616-69039641; SaCas9
aaatactggagacagcttc

SEQ ID NO: 18348 - DNA, 18 bp, Artificial Sequence
  Synthetic: FXN 3 forward 9:69039617-69039641; SaCas9
aatactggagacagcttc

SEQ ID NO: 18349 - DNA, 25 bp, Artificial Sequence
  Synthetic: FXN 3 reverse 9:69039610-69039641; SaCas9
ctcctcgaagctgtctccagtattt

SEQ ID NO: 18350 - DNA, 24 bp, Artificial Sequence
  Synthetic: FXN 3 reverse 9:69039611-69039641; SaCas9
tcctcgaagctgtctccagtattt

SEQ ID NO: 18351 - DNA, 23 bp, Artificial Sequence
  Synthetic: FXN 3 reverse 9:69039612-69039641; SaCas9
cctcgaagctgtctccagtattt

SEQ ID NO: 18352 - DNA, 22 bp, Artificial Sequence
  Synthetic: FXN 3 reverse 9:69039613-69039641; SaCas9
ctcgaagctgtctccagtattt

SEQ ID NO: 18353 - DNA, 21 bp, Artificial Sequence
  Synthetic: FXN 3 reverse 9:69039614-69039641; SaCas9
tcgaagctgtctccagtattt

SEQ ID NO: 18354 - DNA, 20 bp, Artificial Sequence
  Synthetic: FXN 3 reverse 9:69039615-69039641; SaCas9
cgaagctgtctccagtattt

SEQ ID NO: 18355 - DNA, 19 bp, Artificial Sequence
  Synthetic: FXN 3 reverse 9:69039616-69039641; SaCas9
gaagctgtctccagtattt

SEQ ID NO: 18356 - DNA, 18 bp, Artificial Sequence
  Synthetic: FXN 3 reverse 9:69039617-69039641; SaCas9
aagctgtctccagtattt

SEQ ID NO: 18357 - DNA, 25 bp, Artificial Sequence
  Synthetic: FXN 3 forward 9:69039611-69039642; SaCas9
ctcttaaatactggagacagcttcg

SEQ ID NO: 18358 - DNA, 24 bp, Artificial Sequence
  Synthetic: FXN 3 forward 9:69039612-69039642; SaCas9
tcttaaatactggagacagcttcg

SEQ ID NO: 18359 - DNA, 23 bp, Artificial Sequence
  Synthetic: FXN 3 forward 9:69039613-69039642; SaCas9
cttaaatactggagacagcttcg

SEQ ID NO: 18360 - DNA, 22 bp, Artificial Sequence
  Synthetic: FXN 3 forward 9:69039614-69039642; SaCas9
ttaaatactggagacagcttcg

SEQ ID NO: 18361 - DNA, 21 bp, Artificial Sequence
  Synthetic: FXN 3 forward 9:69039615-69039642; SaCas9
taaatactggagacagcttcg

SEQ ID NO: 18362 - DNA, 20 bp, Artificial Sequence
  Synthetic: FXN 3 forward 9:69039616-69039642; SaCas9
aaatactggagacagcttcg

SEQ ID NO: 18363 - DNA, 19 bp, Artificial Sequence
  Synthetic: FXN 3 forward 9:69039617-69039642; SaCas9
aatactggagacagcttcg

SEQ ID NO: 18364 - DNA, 18 bp, Artificial Sequence
  Synthetic: FXN 3 forward 9:69039618-69039642; SaCas9
atactggagacagcttcg

SEQ ID NO: 18365 - DNA, 25 bp, Artificial Sequence
  Synthetic: FXN 3 forward 9:69039613-69039644; SaCas9
cttaaatactggagacagcttcgag

SEQ ID NO: 18366 - DNA, 24 bp, Artificial Sequence
  Synthetic: FXN 3 forward 9:69039614-69039644; SaCas9
ttaaatactggagacagcttcgag

SEQ ID NO: 18367 - DNA, 23 bp, Artificial Sequence
  Synthetic: FXN 3 forward 9:69039615-69039644; SaCas9
taaatactggagacagcttcgag

SEQ ID NO: 18368 - DNA, 22 bp, Artificial Sequence
  Synthetic: FXN 3 forward 9:69039616-69039644; SaCas9
aaatactggagacagcttcgag

SEQ ID NO: 18369 - DNA, 21 bp, Artificial Sequence
  Synthetic: FXN 3 forward 9:69039617-69039644; SaCas9
aatactggagacagcttcgag

SEQ ID NO: 18370 - DNA, 20 bp, Artificial Sequence
  Synthetic: FXN 3 forward 9:69039618-69039644; SaCas9
atactggagacagcttcgag

SEQ ID NO: 18371 - DNA, 19 bp, Artificial Sequence
  Synthetic: FXN 3 forward 9:69039619-69039644; SaCas9
tactggagacagcttcgag

SEQ ID NO: 18372 - DNA, 18 bp, Artificial Sequence
  Synthetic: FXN 3 forward 9:69039620-69039644; SaCas9
actggagacagcttcgag

SEQ ID NO: 18373 - DNA, 25 bp, Artificial Sequence
  Synthetic: FXN 3 forward 9:69039614-69039645; SaCas9
ttaaatactggagacagcttcgagg

SEQ ID NO: 18374 - DNA, 24 bp, Artificial Sequence
  Synthetic: FXN 3 forward 9:69039615-69039645; SaCas9
taaatactggagacagcttcgagg

SEQ ID NO: 18375 - DNA, 23 bp, Artificial Sequence
  Synthetic: FXN 3 forward 9:69039616-69039645; SaCas9
aaatactggagacagcttcgagg

SEQ ID NO: 18376 - DNA, 22 bp, Artificial Sequence
  Synthetic: FXN 3 forward 9:69039617-69039645; SaCas9
aatactggagacagcttcgagg

SEQ ID NO: 18377 - DNA, 21 bp, Artificial Sequence
  Synthetic: FXN 3 forward 9:69039618-69039645; SaCas9
atactggagacagcttcgagg

SEQ ID NO: 18378 - DNA, 20 bp, Artificial Sequence
  Synthetic: FXN 3 forward 9:69039619-69039645; SaCas9
tactggagacagcttcgagg

SEQ ID NO: 18379 - DNA, 19 bp, Artificial Sequence
  Synthetic: FXN 3 forward 9:69039620-69039645; SaCas9
actggagacagcttcgagg

SEQ ID NO: 18380 - DNA, 18 bp, Artificial Sequence
  Synthetic: FXN 3 forward 9:69039621-69039645; SaCas9
ctggagacagcttcgagg

SEQ ID NO: 18381 - DNA, 25 bp, Artificial Sequence
  Synthetic: FXN 3 forward 9:69039623-69039654; SaCas9
ggagacagcttcgaggaggagataa

SEQ ID NO: 18382 - DNA, 24 bp, Artificial Sequence
  Synthetic: FXN 3 forward 9:69039624-69039654; SaCas9
gagacagcttcgaggaggagataa

SEQ ID NO: 18383 - DNA, 23 bp, Artificial Sequence
  Synthetic: FXN 3 forward 9:69039625-69039654; SaCas9
agacagcttcgaggaggagataa

SEQ ID NO: 18384 - DNA, 22 bp, Artificial Sequence
  Synthetic: FXN 3 forward 9:69039626-69039654; SaCas9
gacagcttcgaggaggagataa

SEQ ID NO: 18385 - DNA, 21 bp, Artificial Sequence
  Synthetic: FXN 3 forward 9:69039627-69039654; SaCas9
acagcttcgaggaggagataa

SEQ ID NO: 18386 - DNA, 20 bp, Artificial Sequence
  Synthetic: FXN 3 forward 9:69039628-69039654; SaCas9
cagcttcgaggaggagataa

SEQ ID NO: 18387 - DNA, 19 bp, Artificial Sequence
  Synthetic: FXN 3 forward 9:69039629-69039654; SaCas9
agcttcgaggaggagataa

SEQ ID NO: 18388 - DNA, 18 bp, Artificial Sequence
  Synthetic: FXN 3 forward 9:69039630-69039654; SaCas9
gcttcgaggaggagataa

SEQ ID NO: 18389 - DNA, 25 bp, Artificial Sequence
  Synthetic: FXN 3 reverse 9:69039631-69039662; SaCas9
taagacacatccagttatctcctcc

SEQ ID NO: 18390 - DNA, 24 bp, Artificial Sequence
  Synthetic: FXN 3 reverse 9:69039632-69039662; SaCas9
aagacacatccagttatctcctcc

SEQ ID NO: 18391 - DNA, 23 bp, Artificial Sequence
  Synthetic: FXN 3 reverse 9:69039633-69039662; SaCas9
agacacatccagttatctcctcc

SEQ ID NO: 18392 - DNA, 22 bp, Artificial Sequence
  Synthetic: FXN 3 reverse 9:69039634-69039662; SaCas9
gacacatccagttatctcctcc

SEQ ID NO: 18393 - DNA, 21 bp, Artificial Sequence
  Synthetic: FXN 3 reverse 9:69039635-69039662; SaCas9
acacatccagttatctcctcc

SEQ ID NO: 18394 - DNA, 20 bp, Artificial Sequence
  Synthetic: FXN 3 reverse 9:69039636-69039662; SaCas9
cacatccagttatctcctcc

SEQ ID NO: 18395 - DNA, 19 bp, Artificial Sequence
  Synthetic: FXN 3 reverse 9:69039637-69039662; SaCas9
acatccagttatctcctcc

SEQ ID NO: 18396 - DNA, 18 bp, Artificial Sequence
  Synthetic: FXN 3 reverse 9:69039638-69039662; SaCas9
catccagttatctcctcc

SEQ ID NO: 18397 - DNA, 25 bp, Artificial Sequence
  Synthetic: FXN 3 forward 9:69039646-69039677; SaCas9
aactggatgtgtcttagtccatttg

SEQ ID NO: 18398 - DNA, 24 bp, Artificial Sequence
  Synthetic: FXN 3 forward 9:69039647-69039677; SaCas9
actggatgtgtcttagtccatttg

SEQ ID NO: 18399 - DNA, 23 bp, Artificial Sequence
  Synthetic: FXN 3 forward 9:69039648-69039677; SaCas9
ctggatgtgtcttagtccatttg

SEQ ID NO: 18400 - DNA, 22 bp, Artificial Sequence
  Synthetic: FXN 3 forward 9:69039649-69039677; SaCas9
tggatgtgtcttagtccatttg

SEQ ID NO: 18401 - DNA, 21 bp, Artificial Sequence
  Synthetic: FXN 3 forward 9:69039650-69039677; SaCas9
ggatgtgtcttagtccatttg

SEQ ID NO: 18402 - DNA, 20 bp, Artificial Sequence
  Synthetic: FXN 3 forward 9:69039651-69039677; SaCas9
gatgtgtcttagtccatttg

SEQ ID NO: 18403 - DNA, 19 bp, Artificial Sequence
  Synthetic: FXN 3 forward 9:69039652-69039677; SaCas9
atgtgtcttagtccatttg

SEQ ID NO: 18404 - DNA, 18 bp, Artificial Sequence
  Synthetic: FXN 3 forward 9:69039653-69039677; SaCas9
tgtgtcttagtccatttg

SEQ ID NO: 18405 - DNA, 25 bp, Artificial Sequence
  Synthetic: FXN 3 forward 9:69039647-69039678; SaCas9
actggatgtgtcttagtccatttga

SEQ ID NO: 18406 - DNA, 24 bp, Artificial Sequence
  Synthetic: FXN 3 forward 9:69039648-69039678; SaCas9
ctggatgtgtcttagtccatttga

SEQ ID NO: 18407 - DNA, 23 bp, Artificial Sequence
  Synthetic: FXN 3 forward 9:69039649-69039678; SaCas9
tggatgtgtcttagtccatttga

SEQ ID NO: 18408 - DNA, 22 bp, Artificial Sequence
  Synthetic: FXN 3 forward 9:69039650-69039678; SaCas9
ggatgtgtcttagtccatttga

SEQ ID NO: 18409 - DNA, 21 bp, Artificial Sequence
  Synthetic: FXN 3 forward 9:69039651-69039678; SaCas9
gatgtgtcttagtccatttga

SEQ ID NO: 18410 - DNA, 20 bp, Artificial Sequence
  Synthetic: FXN 3 forward 9:69039652-69039678; SaCas9
atgtgtcttagtccatttga

SEQ ID NO: 18411 - DNA, 19 bp, Artificial Sequence
  Synthetic: FXN 3 forward 9:69039653-69039678; SaCas9
tgtgtcttagtccatttga

SEQ ID NO: 18412 - DNA, 18 bp, Artificial Sequence
  Synthetic: FXN 3 forward 9:69039654-69039678; SaCas9
gtgtcttagtccatttga

SEQ ID NO: 18413 - DNA, 25 bp, Artificial Sequence
  Synthetic: FXN 3 forward 9:69039649-69039680; SaCas9
tggatgtgtcttagtccatttgatg

SEQ ID NO: 18414 - DNA, 24 bp, Artificial Sequence
  Synthetic: FXN 3 forward 9:69039650-69039680; SaCas9
ggatgtgtcttagtccatttgatg

SEQ ID NO: 18415 - DNA, 23 bp, Artificial Sequence
  Synthetic: FXN 3 forward 9:69039651-69039680; SaCas9
gatgtgtcttagtccatttgatg

SEQ ID NO: 18416 - DNA, 22 bp, Artificial Sequence
  Synthetic: FXN 3 forward 9:69039652-69039680; SaCas9
atgtgtcttagtccatttgatg

SEQ ID NO: 18417 - DNA, 21 bp, Artificial Sequence
  Synthetic: FXN 3 forward 9:69039653-69039680; SaCas9
tgtgtcttagtccatttgatg

SEQ ID NO: 18418 - DNA, 20 bp, Artificial Sequence
  Synthetic: FXN 3 forward 9:69039654-69039680; SaCas9
gtgtcttagtccatttgatg

SEQ ID NO: 18419 - DNA, 19 bp, Artificial Sequence
  Synthetic: FXN 3 forward 9:69039655-69039680; SaCas9
tgtcttagtccatttgatg

SEQ ID NO: 18420 - DNA, 18 bp, Artificial Sequence
  Synthetic: FXN 3 forward 9:69039656-69039680; SaCas9
gtcttagtccatttgatg

SEQ ID NO: 18421 - DNA, 25 bp, Artificial Sequence
  Synthetic: FXN 3 forward 9:69039650-69039681; SaCas9
ggatgtgtcttagtccatttgatgg

SEQ ID NO: 18422 - DNA, 24 bp, Artificial Sequence
  Synthetic: FXN 3 forward 9:69039651-69039681; SaCas9
gatgtgtcttagtccatttgatgg

SEQ ID NO: 18423 - DNA, 23 bp, Artificial Sequence
  Synthetic: FXN 3 forward 9:69039652-69039681; SaCas9
atgtgtcttagtccatttgatgg

SEQ ID NO: 18424 - DNA, 22 bp, Artificial Sequence
  Synthetic: FXN 3 forward 9:69039653-69039681; SaCas9
tgtgtcttagtccatttgatgg

SEQ ID NO: 18425 - DNA, 21 bp, Artificial Sequence
  Synthetic: FXN 3 forward 9:69039654-69039681; SaCas9
gtgtcttagtccatttgatgg

SEQ ID NO: 18426 - DNA, 20 bp, Artificial Sequence
  Synthetic: FXN 3 forward 9:69039655-69039681; SaCas9
tgtcttagtccatttgatgg

SEQ ID NO: 18427 - DNA, 19 bp, Artificial Sequence
  Synthetic: FXN 3 forward 9:69039656-69039681; SaCas9
gtcttagtccatttgatgg

SEQ ID NO: 18428 - DNA, 18 bp, Artificial Sequence
  Synthetic: FXN 3 forward 9:69039657-69039681; SaCas9
tcttagtccatttgatgg

SEQ ID NO: 18429 - DNA, 25 bp, Artificial Sequence
  Synthetic: FXN 3 forward 9:69039659-69039690; SaCas9
ttagtccatttgatggagggatgtg

SEQ ID NO: 18430 - DNA, 24 bp, Artificial Sequence
  Synthetic: FXN 3 forward 9:69039660-69039690; SaCas9
tagtccatttgatggagggatgtg

SEQ ID NO: 18431 - DNA, 23 bp, Artificial Sequence
  Synthetic: FXN 3 forward 9:69039661-69039690; SaCas9
agtccatttgatggagggatgtg

SEQ ID NO: 18432 - DNA, 22 bp, Artificial Sequence
  Synthetic: FXN 3 forward 9:69039662-69039690; SaCas9
gtccatttgatggagggatgtg

SEQ ID NO: 18433 - DNA, 21 bp, Artificial Sequence
  Synthetic: FXN 3 forward 9:69039663-69039690; SaCas9
tccatttgatggagggatgtg

SEQ ID NO: 18434 - DNA, 20 bp, Artificial Sequence
  Synthetic: FXN 3 forward 9:69039664-69039690; SaCas9
ccatttgatggagggatgtg

SEQ ID NO: 18435 - DNA, 19 bp, Artificial Sequence
  Synthetic: FXN 3 forward 9:69039665-69039690; SaCas9
catttgatggagggatgtg

SEQ ID NO: 18436 - DNA, 18 bp, Artificial Sequence
  Synthetic: FXN 3 forward 9:69039666-69039690; SaCas9
atttgatggagggatgtg

SEQ ID NO: 18437 - DNA, 25 bp, Artificial Sequence
  Synthetic: FXN 3 forward 9:69039660-69039691; SaCas9
tagtccatttgatggagggatgtga

SEQ ID NO: 18438 - DNA, 24 bp, Artificial Sequence
  Synthetic: FXN 3 forward 9:69039661-69039691; SaCas9
agtccatttgatggagggatgtga

SEQ ID NO: 18439 - DNA, 23 bp, Artificial Sequence
  Synthetic: FXN 3 forward 9:69039662-69039691; SaCas9
gtccatttgatggagggatgtga

SEQ ID NO: 18440 - DNA, 22 bp, Artificial Sequence
  Synthetic: FXN 3 forward 9:69039663-69039691; SaCas9
tccatttgatggagggatgtga

SEQ ID NO: 18441 - DNA, 21 bp, Artificial Sequence
  Synthetic: FXN 3 forward 9:69039664-69039691; SaCas9
ccatttgatggagggatgtga

SEQ ID NO: 18442 - DNA, 20 bp, Artificial Sequence
  Synthetic: FXN 3 forward 9:69039665-69039691; SaCas9
catttgatggagggatgtga

SEQ ID NO: 18443 - DNA, 19 bp, Artificial Sequence
  Synthetic: FXN 3 forward 9:69039666-69039691; SaCas9
atttgatggagggatgtga

SEQ ID NO: 18444 - DNA, 18 bp, Artificial Sequence
  Synthetic: FXN 3 forward 9:69039667-69039691; SaCas9
tttgatggagggatgtga

SEQ ID NO: 18445 - DNA, 25 bp, Artificial Sequence
  Synthetic: FXN 3 reverse 9:69039662-69039693; SaCas9
cagccccgtcacatccctccatcaa

SEQ ID NO: 18446 - DNA, 24 bp, Artificial Sequence
  Synthetic: FXN 3 reverse 9:69039663-69039693; SaCas9
agccccgtcacatccctccatcaa

SEQ ID NO: 18447 - DNA, 23 bp, Artificial Sequence
  Synthetic: FXN 3 reverse 9:69039664-69039693; SaCas9
gccccgtcacatccctccatcaa

SEQ ID NO: 18448 - DNA, 22 bp, Artificial Sequence
  Synthetic: FXN 3 reverse 9:69039665-69039693; SaCas9
ccccgtcacatccctccatcaa

SEQ ID NO: 18449 - DNA, 21 bp, Artificial Sequence
  Synthetic: FXN 3 reverse 9:69039666-69039693; SaCas9
cccgtcacatccctccatcaa

SEQ ID NO: 18450 - DNA, 20 bp, Artificial Sequence
  Synthetic: FXN 3 reverse 9:69039667-69039693; SaCas9
ccgtcacatccctccatcaa

SEQ ID NO: 18451 - DNA, 19 bp, Artificial Sequence
  Synthetic: FXN 3 reverse 9:69039668-69039693; SaCas9
cgtcacatccctccatcaa

SEQ ID NO: 18452 - DNA, 18 bp, Artificial Sequence
  Synthetic: FXN 3 reverse 9:69039669-69039693; SaCas9
gtcacatccctccatcaa

SEQ ID NO: 18453 - DNA, 25 bp, Artificial Sequence
  Synthetic: FXN 3 forward 9:69039693-69039724; SaCas9
cgtctttaacgtttcctcttaaata

SEQ ID NO: 18454 - DNA, 24 bp, Artificial Sequence
  Synthetic: FXN 3 forward 9:69039694-69039724; SaCas9
gtctttaacgtttcctcttaaata

SEQ ID NO: 18455 - DNA, 23 bp, Artificial Sequence
  Synthetic: FXN 3 forward 9:69039695-69039724; SaCas9
tctttaacgtttcctcttaaata

SEQ ID NO: 18456 - DNA, 22 bp, Artificial Sequence
  Synthetic: FXN 3 forward 9:69039696-69039724; SaCas9
ctttaacgtttcctcttaaata

SEQ ID NO: 18457 - DNA, 21 bp, Artificial Sequence
  Synthetic: FXN 3 forward 9:69039697-69039724; SaCas9
tttaacgtttcctcttaaata

SEQ ID NO: 18458 - DNA, 20 bp, Artificial Sequence
  Synthetic: FXN 3 forward 9:69039698-69039724; SaCas9
ttaacgtttcctcttaaata

SEQ ID NO: 18459 - DNA, 19 bp, Artificial Sequence
  Synthetic: FXN 3 forward 9:69039699-69039724; SaCas9
taacgtttcctcttaaata

SEQ ID NO: 18460 - DNA, 18 bp, Artificial Sequence
  Synthetic: FXN 3 forward 9:69039700-69039724; SaCas9
aacgtttcctcttaaata

SEQ ID NO: 18461 - DNA, 25 bp, Artificial Sequence
  Synthetic: FXN 3 forward 9:69039694-69039725; SaCas9
gtctttaacgtttcctcttaaatac

SEQ ID NO: 18462 - DNA, 24 bp, Artificial Sequence
  Synthetic: FXN 3 forward 9:69039695-69039725; SaCas9
tctttaacgtttcctcttaaatac

SEQ ID NO: 18463 - DNA, 23 bp, Artificial Sequence
  Synthetic: FXN 3 forward 9:69039696-69039725; SaCas9
ctttaacgtttcctcttaaatac

SEQ ID NO: 18464 - DNA, 22 bp, Artificial Sequence
  Synthetic: FXN 3 forward 9:69039697-69039725; SaCas9
tttaacgtttcctcttaaatac

SEQ ID NO: 18465 - DNA, 21 bp, Artificial Sequence
  Synthetic: FXN 3 forward 9:69039698-69039725; SaCas9
ttaacgtttcctcttaaatac

SEQ ID NO: 18466 - DNA, 20 bp, Artificial Sequence
  Synthetic: FXN 3 forward 9:69039699-69039725; SaCas9
taacgtttcctcttaaatac

SEQ ID NO: 18467 - DNA, 19 bp, Artificial Sequence
  Synthetic: FXN 3 forward 9:69039700-69039725; SaCas9
aacgtttcctcttaaatac

SEQ ID NO: 18468 - DNA, 18 bp, Artificial Sequence
  Synthetic: FXN 3 forward 9:69039701-69039725; SaCas9
acgtttcctcttaaatac

SEQ ID NO: 18469 - DNA, 25 bp, Artificial Sequence
  Synthetic: FXN 3 reverse 9:69039704-69039735; SaCas9
ctcgaagctgtctccggtatttaag

SEQ ID NO: 18470 - DNA, 24 bp, Artificial Sequence
  Synthetic: FXN 3 reverse 9:69039705-69039735; SaCas9
tcgaagctgtctccggtatttaag

SEQ ID NO: 18471 - DNA, 23 bp, Artificial Sequence
  Synthetic: FXN 3 reverse 9:69039706-69039735; SaCas9
cgaagctgtctccggtatttaag

SEQ ID NO: 18472 - DNA, 22 bp, Artificial Sequence
  Synthetic: FXN 3 reverse 9:69039707-69039735; SaCas9
gaagctgtctccggtatttaag

SEQ ID NO: 18473 - DNA, 21 bp, Artificial Sequence
  Synthetic: FXN 3 reverse 9:69039708-69039735; SaCas9
aagctgtctccggtatttaag

SEQ ID NO: 18474 - DNA, 20 bp, Artificial Sequence
  Synthetic: FXN 3 reverse 9:69039709-69039735; SaCas9
agctgtctccggtatttaag

SEQ ID NO: 18475 - DNA, 19 bp, Artificial Sequence
  Synthetic: FXN 3 reverse 9:69039710-69039735; SaCas9
gctgtctccggtatttaag

SEQ ID NO: 18476 - DNA, 18 bp, Artificial Sequence
  Synthetic: FXN 3 reverse 9:69039711-69039735; SaCas9
ctgtctccggtatttaag

SEQ ID NO: 18477 - DNA, 25 bp, Artificial Sequence
  Synthetic: FXN 3 forward 9:69039705-69039736; SaCas9
ttcctcttaaataccggagacagct

SEQ ID NO: 18478 - DNA, 24 bp, Artificial Sequence
  Synthetic: FXN 3 forward 9:69039706-69039736; SaCas9
tcctcttaaataccggagacagct

SEQ ID NO: 18479 - DNA, 23 bp, Artificial Sequence
  Synthetic: FXN 3 forward 9:69039707-69039736; SaCas9
cctcttaaataccggagacagct

SEQ ID NO: 18480 - DNA, 22 bp, Artificial Sequence
  Synthetic: FXN 3 forward 9:69039708-69039736; SaCas9
ctcttaaataccggagacagct

SEQ ID NO: 18481 - DNA, 21 bp, Artificial Sequence
  Synthetic: FXN 3 forward 9:69039709-69039736; SaCas9
tcttaaataccggagacagct

SEQ ID NO: 18482 - DNA, 20 bp, Artificial Sequence
  Synthetic: FXN 3 forward 9:69039710-69039736; SaCas9
cttaaataccggagacagct

SEQ ID NO: 18483 - DNA, 19 bp, Artificial Sequence
  Synthetic: FXN 3 forward 9:69039711-69039736; SaCas9
ttaaataccggagacagct

SEQ ID NO: 18484 - DNA, 18 bp, Artificial Sequence
  Synthetic: FXN 3 forward 9:69039712-69039736; SaCas9
taaataccggagacagct

SEQ ID NO: 18485 - DNA, 25 bp, Artificial Sequence
  Synthetic: FXN 3 reverse 9:69039705-69039736; SaCas9
tctcgaagctgtctccggtatttaa

SEQ ID NO: 18486 - DNA, 24 bp, Artificial Sequence
  Synthetic: FXN 3 reverse 9:69039706-69039736; SaCas9
ctcgaagctgtctccggtatttaa

SEQ ID NO: 18487 - DNA, 23 bp, Artificial Sequence
  Synthetic: FXN 3 reverse 9:69039707-69039736; SaCas9
tcgaagctgtctccggtatttaa

SEQ ID NO: 18488 - DNA, 22 bp, Artificial Sequence
  Synthetic: FXN 3 reverse 9:69039708-69039736; SaCas9
cgaagctgtctccggtatttaa

SEQ ID NO: 18489 - DNA, 21 bp, Artificial Sequence
  Synthetic: FXN 3 reverse 9:69039709-69039736; SaCas9
gaagctgtctccggtatttaa

SEQ ID NO: 18490 - DNA, 20 bp, Artificial Sequence
  Synthetic: FXN 3 reverse 9:69039710-69039736; SaCas9
aagctgtctccggtatttaa

SEQ ID NO: 18491 - DNA, 19 bp, Artificial Sequence
  Synthetic: FXN 3 reverse 9:69039711-69039736; SaCas9
agctgtctccggtatttaa

SEQ ID NO: 18492 - DNA, 18 bp, Artificial Sequence
  Synthetic: FXN 3 reverse 9:69039712-69039736; SaCas9
gctgtctccggtatttaa

SEQ ID NO: 18493 - DNA, 25 bp, Artificial Sequence
  Synthetic: FXN 3 forward 9:69039707-69039738; SaCas9
cctcttaaataccggagacagcttc

SEQ ID NO: 18494 - DNA, 24 bp, Artificial Sequence
  Synthetic: FXN 3 forward 9:69039708-69039738; SaCas9
ctcttaaataccggagacagcttc

SEQ ID NO: 18495 - DNA, 23 bp, Artificial Sequence
  Synthetic: FXN 3 forward 9:69039709-69039738; SaCas9
tcttaaataccggagacagcttc

SEQ ID NO: 18496 - DNA, 22 bp, Artificial Sequence
  Synthetic: FXN 3 forward 9:69039710-69039738; SaCas9
cttaaataccggagacagcttc

SEQ ID NO: 18497 - DNA, 21 bp, Artificial Sequence
  Synthetic: FXN 3 forward 9:69039711-69039738; SaCas9
ttaaataccggagacagcttc

SEQ ID NO: 18498 - DNA, 20 bp, Artificial Sequence
  Synthetic: FXN 3 forward 9:69039712-69039738; SaCas9
taaataccggagacagcttc

SEQ ID NO: 18499 - DNA, 19 bp, Artificial Sequence
  Synthetic: FXN 3 forward 9:69039713-69039738; SaCas9
aaataccggagacagcttc

SEQ ID NO: 18500 - DNA, 18 bp, Artificial Sequence
  Synthetic: FXN 3 forward 9:69039714-69039738; SaCas9
aataccggagacagcttc

SEQ ID NO: 18501 - DNA, 25 bp, Artificial Sequence
  Synthetic: FXN 3 reverse 9:69039707-69039738; SaCas9
cttctcgaagctgtctccggtattt

SEQ ID NO: 18502 - DNA, 24 bp, Artificial Sequence
  Synthetic: FXN 3 reverse 9:69039708-69039738; SaCas9
ttctcgaagctgtctccggtattt

SEQ ID NO: 18503 - DNA, 23 bp, Artificial Sequence
  Synthetic: FXN 3 reverse 9:69039709-69039738; SaCas9
tctcgaagctgtctccggtattt

SEQ ID NO: 18504 - DNA, 22 bp, Artificial Sequence
  Synthetic: FXN 3 reverse 9:69039710-69039738; SaCas9
ctcgaagctgtctccggtattt

SEQ ID NO: 18505 - DNA, 21 bp, Artificial Sequence
  Synthetic: FXN 3 reverse 9:69039711-69039738; SaCas9
tcgaagctgtctccggtattt

SEQ ID NO: 18506 - DNA, 20 bp, Artificial Sequence
  Synthetic: FXN 3 reverse 9:69039712-69039738; SaCas9
cgaagctgtctccggtattt

SEQ ID NO: 18507 - DNA, 19 bp, Artificial Sequence
  Synthetic: FXN 3 reverse 9:69039713-69039738; SaCas9
gaagctgtctccggtattt

SEQ ID NO: 18508 - DNA, 18 bp, Artificial Sequence
  Synthetic: FXN 3 reverse 9:69039714-69039738; SaCas9
aagctgtctccggtattt

SEQ ID NO: 18509 - DNA, 25 bp, Artificial Sequence
  Synthetic: FXN 3 forward 9:69039710-69039741; SaCas9
cttaaataccggagacagcttcgag

SEQ ID NO: 18510 - DNA, 24 bp, Artificial Sequence
  Synthetic: FXN 3 forward 9:69039711-69039741; SaCas9
ttaaataccggagacagcttcgag

SEQ ID NO: 18511 - DNA, 23 bp, Artificial Sequence
  Synthetic: FXN 3 forward 9:69039712-69039741; SaCas9
taaataccggagacagcttcgag

SEQ ID NO: 18512 - DNA, 22 bp, Artificial Sequence
  Synthetic: FXN 3 forward 9:69039713-69039741; SaCas9
aaataccggagacagcttcgag

SEQ ID NO: 18513 - DNA, 21 bp, Artificial Sequence
  Synthetic: FXN 3 forward 9:69039714-69039741; SaCas9
aataccggagacagcttcgag

SEQ ID NO: 18514 - DNA, 20 bp, Artificial Sequence
  Synthetic: FXN 3 forward 9:69039715-69039741; SaCas9
ataccggagacagcttcgag

SEQ ID NO: 18515 - DNA, 19 bp, Artificial Sequence
  Synthetic: FXN 3 forward 9:69039716-69039741; SaCas9
taccggagacagcttcgag

SEQ ID NO: 18516 - DNA, 18 bp, Artificial Sequence
  Synthetic: FXN 3 forward 9:69039717-69039741; SaCas9
accggagacagcttcgag

SEQ ID NO: 18517 - DNA, 25 bp, Artificial Sequence
  Synthetic: FXN 3 forward 9:69039711-69039742; SaCas9
ttaaataccggagacagcttcgaga

SEQ ID NO: 18518 - DNA, 24 bp, Artificial Sequence
  Synthetic: FXN 3 forward 9:69039712-69039742; SaCas9
taaataccggagacagcttcgaga

SEQ ID NO: 18519 - DNA, 23 bp, Artificial Sequence
  Synthetic: FXN 3 forward 9:69039713-69039742; SaCas9
aaataccggagacagcttcgaga

SEQ ID NO: 18520 - DNA, 22 bp, Artificial Sequence
  Synthetic: FXN 3 forward 9:69039714-69039742; SaCas9
aataccggagacagcttcgaga

SEQ ID NO: 18521 - DNA, 21 bp, Artificial Sequence
  Synthetic: FXN 3 forward 9:69039715-69039742; SaCas9
ataccggagacagcttcgaga

SEQ ID NO: 18522 - DNA, 20 bp, Artificial Sequence
  Synthetic: FXN 3 forward 9:69039716-69039742; SaCas9
taccggagacagcttcgaga

SEQ ID NO: 18523 - DNA, 19 bp, Artificial Sequence
  Synthetic: FXN 3 forward 9:69039717-69039742; SaCas9
accggagacagcttcgaga

SEQ ID NO: 18524 - DNA, 18 bp, Artificial Sequence
  Synthetic: FXN 3 forward 9:69039718-69039742; SaCas9
ccggagacagcttcgaga

SEQ ID NO: 18525 - DNA, 25 bp, Artificial Sequence
  Synthetic: FXN 3 forward 9:69039720-69039751; SaCas9
ggagacagcttcgagaaggagataa

SEQ ID NO: 18526 - DNA, 24 bp, Artificial Sequence
  Synthetic: FXN 3 forward 9:69039721-69039751; SaCas9
gagacagcttcgagaaggagataa

SEQ ID NO: 18527 - DNA, 23 bp, Artificial Sequence
  Synthetic: FXN 3 forward 9:69039722-69039751; SaCas9
agacagcttcgagaaggagataa

SEQ ID NO: 18528 - DNA, 22 bp, Artificial Sequence
  Synthetic: FXN 3 forward 9:69039723-69039751; SaCas9
gacagcttcgagaaggagataa

SEQ ID NO: 18529 - DNA, 21 bp, Artificial Sequence
  Synthetic: FXN 3 forward 9:69039724-69039751; SaCas9
acagcttcgagaaggagataa

SEQ ID NO: 18530 - DNA, 20 bp, Artificial Sequence
  Synthetic: FXN 3 forward 9:69039725-69039751; SaCas9
cagcttcgagaaggagataa

SEQ ID NO: 18531 - DNA, 19 bp, Artificial Sequence
  Synthetic: FXN 3 forward 9:69039726-69039751; SaCas9
agcttcgagaaggagataa

SEQ ID NO: 18532 - DNA, 18 bp, Artificial Sequence
  Synthetic: FXN 3 forward 9:69039727-69039751; SaCas9
gcttcgagaaggagataa

SEQ ID NO: 18533 - DNA, 25 bp, Artificial Sequence
  Synthetic: FXN 3 reverse 9:69039728-69039759; SaCas9
taagaaacatccagttatctccttc

SEQ ID NO: 18534 - DNA, 24 bp, Artificial Sequence
  Synthetic: FXN 3 reverse 9:69039729-69039759; SaCas9
aagaaacatccagttatctccttc

SEQ ID NO: 18535 - DNA, 23 bp, Artificial Sequence
  Synthetic: FXN 3 reverse 9:69039730-69039759; SaCas9
agaaacatccagttatctccttc

SEQ ID NO: 18536 - DNA, 22 bp, Artificial Sequence
  Synthetic: FXN 3 reverse 9:69039731-69039759; SaCas9
gaaacatccagttatctccttc

SEQ ID NO: 18537 - DNA, 21 bp, Artificial Sequence
  Synthetic: FXN 3 reverse 9:69039732-69039759; SaCas9
aaacatccagttatctccttc

SEQ ID NO: 18538 - DNA, 20 bp, Artificial Sequence
  Synthetic: FXN 3 reverse 9:69039733-69039759; SaCas9
aacatccagttatctccttc

SEQ ID NO: 18539 - DNA, 19 bp, Artificial Sequence
  Synthetic: FXN 3 reverse 9:69039734-69039759; SaCas9
acatccagttatctccttc

SEQ ID NO: 18540 - DNA, 18 bp, Artificial Sequence
  Synthetic: FXN 3 reverse 9:69039735-69039759; SaCas9
catccagttatctccttc

SEQ ID NO: 18541 - DNA, 25 bp, Artificial Sequence
  Synthetic: FXN 3 reverse 9:69039752-69039783; SaCas9
tgtcacaagcaacagaaaatggact

SEQ ID NO: 18542 - DNA, 24 bp, Artificial Sequence
  Synthetic: FXN 3 reverse 9:69039753-69039783; SaCas9
gtcacaagcaacagaaaatggact

SEQ ID NO: 18543 - DNA, 23 bp, Artificial Sequence
  Synthetic: FXN 3 reverse 9:69039754-69039783; SaCas9
tcacaagcaacagaaaatggact

SEQ ID NO: 18544 - DNA, 22 bp, Artificial Sequence
  Synthetic: FXN 3 reverse 9:69039755-69039783; SaCas9
cacaagcaacagaaaatggact

SEQ ID NO: 18545 - DNA, 21 bp, Artificial Sequence
  Synthetic: FXN 3 reverse 9:69039756-69039783; SaCas9
acaagcaacagaaaatggact

SEQ ID NO: 18546 - DNA, 20 bp, Artificial Sequence
  Synthetic: FXN 3 reverse 9:69039757-69039783; SaCas9
caagcaacagaaaatggact

SEQ ID NO: 18547 - DNA, 19 bp, Artificial Sequence
  Synthetic: FXN 3 reverse 9:69039758-69039783; SaCas9
aagcaacagaaaatggact

SEQ ID NO: 18548 - DNA, 18 bp, Artificial Sequence
  Synthetic: FXN 3 reverse 9:69039759-69039783; SaCas9
agcaacagaaaatggact

SEQ ID NO: 18549 - DNA, 25 bp, Artificial Sequence
  Synthetic: FXN 3 forward 9:69039756-69039787; SaCas9
ttagtccattttctgttgcttgtga

SEQ ID NO: 18550 - DNA, 24 bp, Artificial Sequence
  Synthetic: FXN 3 forward 9:69039757-69039787; SaCas9
tagtccattttctgttgcttgtga

SEQ ID NO: 18551 - DNA, 23 bp, Artificial Sequence
  Synthetic: FXN 3 forward 9:69039758-69039787; SaCas9
agtccattttctgttgcttgtga

SEQ ID NO: 18552 - DNA, 22 bp, Artificial Sequence
  Synthetic: FXN 3 forward 9:69039759-69039787; SaCas9
gtccattttctgttgcttgtga

SEQ ID NO: 18553 - DNA, 21 bp, Artificial Sequence
  Synthetic: FXN 3 forward 9:69039760-69039787; SaCas9
tccattttctgttgcttgtga

SEQ ID NO: 18554 - DNA, 20 bp, Artificial Sequence
  Synthetic: FXN 3 forward 9:69039761-69039787; SaCas9
ccattttctgttgcttgtga

SEQ ID NO: 18555 - DNA, 19 bp, Artificial Sequence
  Synthetic: FXN 3 forward 9:69039762-69039787; SaCas9
cattttctgttgcttgtga

SEQ ID NO: 18556 - DNA, 18 bp, Artificial Sequence
  Synthetic: FXN 3 forward 9:69039763-69039787; SaCas9
attttctgttgcttgtga

SEQ ID NO: 18557 - DNA, 25 bp, Artificial Sequence
  Synthetic: FXN 3 reverse 9:69039759-69039790; SaCas9
ggtattctgtcacaagcaacagaaa

SEQ ID NO: 18558 - DNA, 24 bp, Artificial Sequence
  Synthetic: FXN 3 reverse 9:69039760-69039790; SaCas9
gtattctgtcacaagcaacagaaa

SEQ ID NO: 18559 - DNA, 23 bp, Artificial Sequence
  Synthetic: FXN 3 reverse 9:69039761-69039790; SaCas9
tattctgtcacaagcaacagaaa

SEQ ID NO: 18560 - DNA, 22 bp, Artificial Sequence
  Synthetic: FXN 3 reverse 9:69039762-69039790; SaCas9
attctgtcacaagcaacagaaa

SEQ ID NO: 18561 - DNA, 21 bp, Artificial Sequence
  Synthetic: FXN 3 reverse 9:69039763-69039790; SaCas9
ttctgtcacaagcaacagaaa

SEQ ID NO: 18562 - DNA, 20 bp, Artificial Sequence
  Synthetic: FXN 3 reverse 9:69039764-69039790; SaCas9
tctgtcacaagcaacagaaa

SEQ ID NO: 18563 - DNA, 19 bp, Artificial Sequence
  Synthetic: FXN 3 reverse 9:69039765-69039790; SaCas9
ctgtcacaagcaacagaaa

SEQ ID NO: 18564 - DNA, 18 bp, Artificial Sequence
  Synthetic: FXN 3 reverse 9:69039766-69039790; SaCas9
tgtcacaagcaacagaaa

SEQ ID NO: 18565 - DNA, 25 bp, Artificial Sequence
  Synthetic: FXN 3 forward 9:69039764-69039795; SaCas9
ttttctgttgcttgtgacagaatac

SEQ ID NO: 18566 - DNA, 24 bp, Artificial Sequence
  Synthetic: FXN 3 forward 9:69039765-69039795; SaCas9
tttctgttgcttgtgacagaatac

SEQ ID NO: 18567 - DNA, 23 bp, Artificial Sequence
  Synthetic: FXN 3 forward 9:69039766-69039795; SaCas9
ttctgttgcttgtgacagaatac

SEQ ID NO: 18568 - DNA, 22 bp, Artificial Sequence
  Synthetic: FXN 3 forward 9:69039767-69039795; SaCas9
tctgttgcttgtgacagaatac

SEQ ID NO: 18569 - DNA, 21 bp, Artificial Sequence
  Synthetic: FXN 3 forward 9:69039768-69039795; SaCas9
ctgttgcttgtgacagaatac

SEQ ID NO: 18570 - DNA, 20 bp, Artificial Sequence
  Synthetic: FXN 3 forward 9:69039769-69039795; SaCas9
tgttgcttgtgacagaatac

SEQ ID NO: 18571 - DNA, 19 bp, Artificial Sequence
  Synthetic: FXN 3 forward 9:69039770-69039795; SaCas9
gttgcttgtgacagaatac

SEQ ID NO: 18572 - DNA, 18 bp, Artificial Sequence
  Synthetic: FXN 3 forward 9:69039771-69039795; SaCas9
ttgcttgtgacagaatac

SEQ ID NO: 18573 - DNA, 25 bp, Artificial Sequence
  Synthetic: FXN 3 reverse 9:69039765-69039796; SaCas9
gtttcaggtattctgtcacaagcaa

SEQ ID NO: 18574 - DNA, 24 bp, Artificial Sequence
  Synthetic: FXN 3 reverse 9:69039766-69039796; SaCas9
tttcaggtattctgtcacaagcaa

SEQ ID NO: 18575 - DNA, 23 bp, Artificial Sequence
  Synthetic: FXN 3 reverse 9:69039767-69039796; SaCas9
ttcaggtattctgtcacaagcaa

SEQ ID NO: 18576 - DNA, 22 bp, Artificial Sequence
  Synthetic: FXN 3 reverse 9:69039768-69039796; SaCas9
tcaggtattctgtcacaagcaa

SEQ ID NO: 18577 - DNA, 21 bp, Artificial Sequence
  Synthetic: FXN 3 reverse 9:69039769-69039796; SaCas9
caggtattctgtcacaagcaa

SEQ ID NO: 18578 - DNA, 20 bp, Artificial Sequence
  Synthetic: FXN 3 reverse 9:69039770-69039796; SaCas9
aggtattctgtcacaagcaa

SEQ ID NO: 18579 - DNA, 19 bp, Artificial Sequence
  Synthetic: FXN 3 reverse 9:69039771-69039796; SaCas9
ggtattctgtcacaagcaa

SEQ ID NO: 18580 - DNA, 18 bp, Artificial Sequence
  Synthetic: FXN 3 reverse 9:69039772-69039796; SaCas9
gtattctgtcacaagcaa

SEQ ID NO: 18581 - DNA, 25 bp, Artificial Sequence
  Synthetic: FXN 3 forward 9:69039770-69039801; SaCas9
gttgcttgtgacagaatacctgaaa

SEQ ID NO: 18582 - DNA, 24 bp, Artificial Sequence
  Synthetic: FXN 3 forward 9:69039771-69039801; SaCas9
ttgcttgtgacagaatacctgaaa

SEQ ID NO: 18583 - DNA, 23 bp, Artificial Sequence
  Synthetic: FXN 3 forward 9:69039772-69039801; SaCas9
tgcttgtgacagaatacctgaaa

SEQ ID NO: 18584 - DNA, 22 bp, Artificial Sequence
  Synthetic: FXN 3 forward 9:69039773-69039801; SaCas9
gcttgtgacagaatacctgaaa

SEQ ID NO: 18585 - DNA, 21 bp, Artificial Sequence
  Synthetic: FXN 3 forward 9:69039774-69039801; SaCas9
cttgtgacagaatacctgaaa

SEQ ID NO: 18586 - DNA, 20 bp, Artificial Sequence
  Synthetic: FXN 3 forward 9:69039775-69039801; SaCas9
ttgtgacagaatacctgaaa

SEQ ID NO: 18587 - DNA, 19 bp, Artificial Sequence
  Synthetic: FXN 3 forward 9:69039776-69039801; SaCas9
tgtgacagaatacctgaaa

SEQ ID NO: 18588 - DNA, 18 bp, Artificial Sequence
  Synthetic: FXN 3 forward 9:69039777-69039801; SaCas9
gtgacagaatacctgaaa

SEQ ID NO: 18589 - DNA, 25 bp, Artificial Sequence
  Synthetic: FXN 3 forward 9:69039810-69039841; SaCas9
ggtaaaaaattttcttcttactgct

SEQ ID NO: 18590 - DNA, 24 bp, Artificial Sequence
  Synthetic: FXN 3 forward 9:69039811-69039841; SaCas9
gtaaaaaattttcttcttactgct

SEQ ID NO: 18591 - DNA, 23 bp, Artificial Sequence
  Synthetic: FXN 3 forward 9:69039812-69039841; SaCas9
taaaaaattttcttcttactgct

SEQ ID NO: 18592 - DNA, 22 bp, Artificial Sequence
  Synthetic: FXN 3 forward 9:69039813-69039841; SaCas9
aaaaaattttcttcttactgct

SEQ ID NO: 18593 - DNA, 21 bp, Artificial Sequence
  Synthetic: FXN 3 forward 9:69039814-69039841; SaCas9
aaaaattttcttcttactgct

SEQ ID NO: 18594 - DNA, 20 bp, Artificial Sequence
  Synthetic: FXN 3 forward 9:69039815-69039841; SaCas9
aaaattttcttcttactgct

SEQ ID NO: 18595 - DNA, 19 bp, Artificial Sequence
  Synthetic: FXN 3 forward 9:69039816-69039841; SaCas9
aaattttcttcttactgct

SEQ ID NO: 18596 - DNA, 18 bp, Artificial Sequence
  Synthetic: FXN 3 forward 9:69039817-69039841; SaCas9
aattttcttcttactgct

SEQ ID NO: 18597 - DNA, 25 bp, Artificial Sequence
  Synthetic: FXN 3 forward 9:69039811-69039842; SaCas9
gtaaaaaattttcttcttactgctc

SEQ ID NO: 18598 - DNA, 24 bp, Artificial Sequence
  Synthetic: FXN 3 forward 9:69039812-69039842; SaCas9
taaaaaattttcttcttactgctc

SEQ ID NO: 18599 - DNA, 23 bp, Artificial Sequence
  Synthetic: FXN 3 forward 9:69039813-69039842; SaCas9
aaaaaattttcttcttactgctc

SEQ ID NO: 18600 - DNA, 22 bp, Artificial Sequence
  Synthetic: FXN 3 forward 9:69039814-69039842; SaCas9
aaaaattttcttcttactgctc

SEQ ID NO: 18601 - DNA, 21 bp, Artificial Sequence
  Synthetic: FXN 3 forward 9:69039815-69039842; SaCas9
aaaattttcttcttactgctc

SEQ ID NO: 18602 - DNA, 20 bp, Artificial Sequence
  Synthetic: FXN 3 forward 9:69039816-69039842; SaCas9
aaattttcttcttactgctc

SEQ ID NO: 18603 - DNA, 19 bp, Artificial Sequence
  Synthetic: FXN 3 forward 9:69039817-69039842; SaCas9
aattttcttcttactgctc

SEQ ID NO: 18604 - DNA, 18 bp, Artificial Sequence
  Synthetic: FXN 3 forward 9:69039818-69039842; SaCas9
attttcttcttactgctc

SEQ ID NO: 18605 - DNA, 25 bp, Artificial Sequence
  Synthetic: FXN 3 forward 9:69039817-69039848; SaCas9
aattttcttcttactgctctggagg

SEQ ID NO: 18606 - DNA, 24 bp, Artificial Sequence
  Synthetic: FXN 3 forward 9:69039818-69039848; SaCas9
attttcttcttactgctctggagg

SEQ ID NO: 18607 - DNA, 23 bp, Artificial Sequence
  Synthetic: FXN 3 forward 9:69039819-69039848; SaCas9
ttttcttcttactgctctggagg

SEQ ID NO: 18608 - DNA, 22 bp, Artificial Sequence
  Synthetic: FXN 3 forward 9:69039820-69039848; SaCas9
tttcttcttactgctctggagg

SEQ ID NO: 18609 - DNA, 21 bp, Artificial Sequence
  Synthetic: FXN 3 forward 9:69039821-69039848; SaCas9
ttcttcttactgctctggagg

SEQ ID NO: 18610 - DNA, 20 bp, Artificial Sequence
  Synthetic: FXN 3 forward 9:69039822-69039848; SaCas9
tcttcttactgctctggagg

SEQ ID NO: 18611 - DNA, 19 bp, Artificial Sequence
  Synthetic: FXN 3 forward 9:69039823-69039848; SaCas9
cttcttactgctctggagg

SEQ ID NO: 18612 - DNA, 18 bp, Artificial Sequence
  Synthetic: FXN 3 forward 9:69039824-69039848; SaCas9
ttcttactgctctggagg

SEQ ID NO: 18613 - DNA, 25 bp, Artificial Sequence
  Synthetic: FXN 3 forward 9:69039819-69039850; SaCas9
ttttcttcttactgctctggaggct

SEQ ID NO: 18614 - DNA, 24 bp, Artificial Sequence
  Synthetic: FXN 3 forward 9:69039820-69039850; SaCas9
tttcttcttactgctctggaggct

SEQ ID NO: 18615 - DNA, 23 bp, Artificial Sequence
  Synthetic: FXN 3 forward 9:69039821-69039850; SaCas9
ttcttcttactgctctggaggct

SEQ ID NO: 18616 - DNA, 22 bp, Artificial Sequence
  Synthetic: FXN 3 forward 9:69039822-69039850; SaCas9
tcttcttactgctctggaggct

SEQ ID NO: 18617 - DNA, 21 bp, Artificial Sequence
  Synthetic: FXN 3 forward 9:69039823-69039850; SaCas9
cttcttactgctctggaggct

SEQ ID NO: 18618 - DNA, 20 bp, Artificial Sequence
  Synthetic: FXN 3 forward 9:69039824-69039850; SaCas9
ttcttactgctctggaggct

SEQ ID NO: 18619 - DNA, 19 bp, Artificial Sequence
  Synthetic: FXN 3 forward 9:69039825-69039850; SaCas9
tcttactgctctggaggct

SEQ ID NO: 18620 - DNA, 18 bp, Artificial Sequence
  Synthetic: FXN 3 forward 9:69039826-69039850; SaCas9
cttactgctctggaggct

SEQ ID NO: 18621 - DNA, 25 bp, Artificial Sequence
  Synthetic: FXN 3 reverse 9:69039820-69039851; SaCas9
acttctcagcctccagagcagtaag

SEQ ID NO: 18622 - DNA, 24 bp, Artificial Sequence
  Synthetic: FXN 3 reverse 9:69039821-69039851; SaCas9
cttctcagcctccagagcagtaag

SEQ ID NO: 18623 - DNA, 23 bp, Artificial Sequence
  Synthetic: FXN 3 reverse 9:69039822-69039851; SaCas9
ttctcagcctccagagcagtaag

SEQ ID NO: 18624 - DNA, 22 bp, Artificial Sequence
  Synthetic: FXN 3 reverse 9:69039823-69039851; SaCas9
tctcagcctccagagcagtaag

SEQ ID NO: 18625 - DNA, 21 bp, Artificial Sequence
  Synthetic: FXN 3 reverse 9:69039824-69039851; SaCas9
ctcagcctccagagcagtaag

SEQ ID NO: 18626 - DNA, 20 bp, Artificial Sequence
  Synthetic: FXN 3 reverse 9:69039825-69039851; SaCas9
tcagcctccagagcagtaag

SEQ ID NO: 18627 - DNA, 19 bp, Artificial Sequence
  Synthetic: FXN 3 reverse 9:69039826-69039851; SaCas9
cagcctccagagcagtaag

SEQ ID NO: 18628 - DNA, 18 bp, Artificial Sequence
  Synthetic: FXN 3 reverse 9:69039827-69039851; SaCas9
agcctccagagcagtaag

SEQ ID NO: 18629 - DNA, 25 bp, Artificial Sequence
  Synthetic: FXN 3 reverse 9:69039823-69039854; SaCas9
tggacttctcagcctccagagcagt

SEQ ID NO: 18630 - DNA, 24 bp, Artificial Sequence
  Synthetic: FXN 3 reverse 9:69039824-69039854; SaCas9
ggacttctcagcctccagagcagt

SEQ ID NO: 18631 - DNA, 23 bp, Artificial Sequence
  Synthetic: FXN 3 reverse 9:69039825-69039854; SaCas9
gacttctcagcctccagagcagt

SEQ ID NO: 18632 - DNA, 22 bp, Artificial Sequence
  Synthetic: FXN 3 reverse 9:69039826-69039854; SaCas9
acttctcagcctccagagcagt

SEQ ID NO: 18633 - DNA, 21 bp, Artificial Sequence
  Synthetic: FXN 3 reverse 9:69039827-69039854; SaCas9
cttctcagcctccagagcagt

SEQ ID NO: 18634 - DNA, 20 bp, Artificial Sequence
  Synthetic: FXN 3 reverse 9:69039828-69039854; SaCas9
ttctcagcctccagagcagt

SEQ ID NO: 18635 - DNA, 19 bp, Artificial Sequence
  Synthetic: FXN 3 reverse 9:69039829-69039854; SaCas9
tctcagcctccagagcagt

SEQ ID NO: 18636 - DNA, 18 bp, Artificial Sequence
  Synthetic: FXN 3 reverse 9:69039830-69039854; SaCas9
ctcagcctccagagcagt

SEQ ID NO: 18637 - DNA, 25 bp, Artificial Sequence
  Synthetic: FXN 3 reverse 9:69039832-69039863; SaCas9
acttgactttggacttctcagcctc

SEQ ID NO: 18638 - DNA, 24 bp, Artificial Sequence
  Synthetic: FXN 3 reverse 9:69039833-69039863; SaCas9
cttgactttggacttctcagcctc

SEQ ID NO: 18639 - DNA, 23 bp, Artificial Sequence
  Synthetic: FXN 3 reverse 9:69039834-69039863; SaCas9
ttgactttggacttctcagcctc

SEQ ID NO: 18640 - DNA, 22 bp, Artificial Sequence
  Synthetic: FXN 3 reverse 9:69039835-69039863; SaCas9
tgactttggacttctcagcctc

SEQ ID NO: 18641 - DNA, 21 bp, Artificial Sequence
  Synthetic: FXN 3 reverse 9:69039836-69039863; SaCas9
gactttggacttctcagcctc

SEQ ID NO: 18642 - DNA, 20 bp, Artificial Sequence
  Synthetic: FXN 3 reverse 9:69039837-69039863; SaCas9
actttggacttctcagcctc

SEQ ID NO: 18643 - DNA, 19 bp, Artificial Sequence
  Synthetic: FXN 3 reverse 9:69039838-69039863; SaCas9
ctttggacttctcagcctc

SEQ ID NO: 18644 - DNA, 18 bp, Artificial Sequence
  Synthetic: FXN 3 reverse 9:69039839-69039863; SaCas9
tttggacttctcagcctc

SEQ ID NO: 18645 - DNA, 25 bp, Artificial Sequence
  Synthetic: FXN 3 reverse 9:69039849-69039880; SaCas9
cccaccagcaagaagggacttgact

SEQ ID NO: 18646 - DNA, 24 bp, Artificial Sequence
  Synthetic: FXN 3 reverse 9:69039850-69039880; SaCas9
ccaccagcaagaagggacttgact

SEQ ID NO: 18647 - DNA, 23 bp, Artificial Sequence
  Synthetic: FXN 3 reverse 9:69039851-69039880; SaCas9
caccagcaagaagggacttgact

SEQ ID NO: 18648 - DNA, 22 bp, Artificial Sequence
  Synthetic: FXN 3 reverse 9:69039852-69039880; SaCas9
accagcaagaagggacttgact

SEQ ID NO: 18649 - DNA, 21 bp, Artificial Sequence
  Synthetic: FXN 3 reverse 9:69039853-69039880; SaCas9
ccagcaagaagggacttgact

SEQ ID NO: 18650 - DNA, 20 bp, Artificial Sequence
  Synthetic: FXN 3 reverse 9:69039854-69039880; SaCas9
cagcaagaagggacttgact

SEQ ID NO: 18651 - DNA, 19 bp, Artificial Sequence
  Synthetic: FXN 3 reverse 9:69039855-69039880; SaCas9
agcaagaagggacttgact

SEQ ID NO: 18652 - DNA, 18 bp, Artificial Sequence
  Synthetic: FXN 3 reverse 9:69039856-69039880; SaCas9
gcaagaagggacttgact

SEQ ID NO: 18653 - DNA, 25 bp, Artificial Sequence
  Synthetic: FXN 3 forward 9:69039850-69039881; SaCas9
tccaaagtcaagtcccttcttgctg

SEQ ID NO: 18654 - DNA, 24 bp, Artificial Sequence
  Synthetic: FXN 3 forward 9:69039851-69039881; SaCas9
ccaaagtcaagtcccttcttgctg

SEQ ID NO: 18655 - DNA, 23 bp, Artificial Sequence
  Synthetic: FXN 3 forward 9:69039852-69039881; SaCas9
caaagtcaagtcccttcttgctg

SEQ ID NO: 18656 - DNA, 22 bp, Artificial Sequence
  Synthetic: FXN 3 forward 9:69039853-69039881; SaCas9
aaagtcaagtcccttcttgctg

SEQ ID NO: 18657 - DNA, 21 bp, Artificial Sequence
  Synthetic: FXN 3 forward 9:69039854-69039881; SaCas9
aagtcaagtcccttcttgctg

SEQ ID NO: 18658 - DNA, 20 bp, Artificial Sequence
  Synthetic: FXN 3 forward 9:69039855-69039881; SaCas9
agtcaagtcccttcttgctg

SEQ ID NO: 18659 - DNA, 19 bp, Artificial Sequence
  Synthetic: FXN 3 forward 9:69039856-69039881; SaCas9
gtcaagtcccttcttgctg

SEQ ID NO: 18660 - DNA, 18 bp, Artificial Sequence
  Synthetic: FXN 3 forward 9:69039857-69039881; SaCas9
tcaagtcccttcttgctg

SEQ ID NO: 18661 - DNA, 25 bp, Artificial Sequence
  Synthetic: FXN 3 forward 9:69039851-69039882; SaCas9
ccaaagtcaagtcccttcttgctgg

SEQ ID NO: 18662 - DNA, 24 bp, Artificial Sequence
  Synthetic: FXN 3 forward 9:69039852-69039882; SaCas9
caaagtcaagtcccttcttgctgg

SEQ ID NO: 18663 - DNA, 23 bp, Artificial Sequence
  Synthetic: FXN 3 forward 9:69039853-69039882; SaCas9
aaagtcaagtcccttcttgctgg

SEQ ID NO: 18664 - DNA, 22 bp, Artificial Sequence
  Synthetic: FXN 3 forward 9:69039854-69039882; SaCas9
aagtcaagtcccttcttgctgg

SEQ ID NO: 18665 - DNA, 21 bp, Artificial Sequence
  Synthetic: FXN 3 forward 9:69039855-69039882; SaCas9
agtcaagtcccttcttgctgg

SEQ ID NO: 18666 - DNA, 20 bp, Artificial Sequence
  Synthetic: FXN 3 forward 9:69039856-69039882; SaCas9
gtcaagtcccttcttgctgg

SEQ ID NO: 18667 - DNA, 19 bp, Artificial Sequence
  Synthetic: FXN 3 forward 9:69039857-69039882; SaCas9
tcaagtcccttcttgctgg

SEQ ID NO: 18668 - DNA, 18 bp, Artificial Sequence
  Synthetic: FXN 3 forward 9:69039858-69039882; SaCas9
caagtcccttcttgctgg

SEQ ID NO: 18669 - DNA, 25 bp, Artificial Sequence
  Synthetic: FXN 3 forward 9:69039852-69039883; SaCas9
caaagtcaagtcccttcttgctggt

SEQ ID NO: 18670 - DNA, 24 bp, Artificial Sequence
  Synthetic: FXN 3 forward 9:69039853-69039883; SaCas9
aaagtcaagtcccttcttgctggt

SEQ ID NO: 18671 - DNA, 23 bp, Artificial Sequence
  Synthetic: FXN 3 forward 9:69039854-69039883; SaCas9
aagtcaagtcccttcttgctggt

SEQ ID NO: 18672 - DNA, 22 bp, Artificial Sequence
  Synthetic: FXN 3 forward 9:69039855-69039883; SaCas9
agtcaagtcccttcttgctggt

SEQ ID NO: 18673 - DNA, 21 bp, Artificial Sequence
  Synthetic: FXN 3 forward 9:69039856-69039883; SaCas9
gtcaagtcccttcttgctggt

SEQ ID NO: 18674 - DNA, 20 bp, Artificial Sequence
  Synthetic: FXN 3 forward 9:69039857-69039883; SaCas9
tcaagtcccttcttgctggt

SEQ ID NO: 18675 - DNA, 19 bp, Artificial Sequence
  Synthetic: FXN 3 forward 9:69039858-69039883; SaCas9
caagtcccttcttgctggt

SEQ ID NO: 18676 - DNA, 18 bp, Artificial Sequence
  Synthetic: FXN 3 forward 9:69039859-69039883; SaCas9
aagtcccttcttgctggt

SEQ ID NO: 18677 - DNA, 25 bp, Artificial Sequence
  Synthetic: FXN 3 reverse 9:69039861-69039892; SaCas9
ctctgcaaagtccccaccagcaaga

SEQ ID NO: 18678 - DNA, 24 bp, Artificial Sequence
  Synthetic: FXN 3 reverse 9:69039862-69039892; SaCas9
tctgcaaagtccccaccagcaaga

SEQ ID NO: 18679 - DNA, 23 bp, Artificial Sequence
  Synthetic: FXN 3 reverse 9:69039863-69039892; SaCas9
ctgcaaagtccccaccagcaaga

SEQ ID NO: 18680 - DNA, 22 bp, Artificial Sequence
  Synthetic: FXN 3 reverse 9:69039864-69039892; SaCas9
tgcaaagtccccaccagcaaga

SEQ ID NO: 18681 - DNA, 21 bp, Artificial Sequence
  Synthetic: FXN 3 reverse 9:69039865-69039892; SaCas9
gcaaagtccccaccagcaaga

SEQ ID NO: 18682 - DNA, 20 bp, Artificial Sequence
  Synthetic: FXN 3 reverse 9:69039866-69039892; SaCas9
caaagtccccaccagcaaga

SEQ ID NO: 18683 - DNA, 19 bp, Artificial Sequence
  Synthetic: FXN 3 reverse 9:69039867-69039892; SaCas9
aaagtccccaccagcaaga

SEQ ID NO: 18684 - DNA, 18 bp, Artificial Sequence
  Synthetic: FXN 3 reverse 9:69039868-69039892; SaCas9
aagtccccaccagcaaga

SEQ ID NO: 18685 - DNA, 25 bp, Artificial Sequence
  Synthetic: FXN 3 forward 9:69039862-69039893; SaCas9
tcccttcttgctggtggggactttg

SEQ ID NO: 18686 - DNA, 24 bp, Artificial Sequence
  Synthetic: FXN 3 forward 9:69039863-69039893; SaCas9
cccttcttgctggtggggactttg

SEQ ID NO: 18687 - DNA, 23 bp, Artificial Sequence
  Synthetic: FXN 3 forward 9:69039864-69039893; SaCas9
ccttcttgctggtggggactttg

SEQ ID NO: 18688 - DNA, 22 bp, Artificial Sequence
  Synthetic: FXN 3 forward 9:69039865-69039893; SaCas9
cttcttgctggtggggactttg

SEQ ID NO: 18689 - DNA, 21 bp, Artificial Sequence
  Synthetic: FXN 3 forward 9:69039866-69039893; SaCas9
ttcttgctggtggggactttg

SEQ ID NO: 18690 - DNA, 20 bp, Artificial Sequence
  Synthetic: FXN 3 forward 9:69039867-69039893; SaCas9
tcttgctggtggggactttg

SEQ ID NO: 18691 - DNA, 19 bp, Artificial Sequence
  Synthetic: FXN 3 forward 9:69039868-69039893; SaCas9
cttgctggtggggactttg

SEQ ID NO: 18692 - DNA, 18 bp, Artificial Sequence
  Synthetic: FXN 3 forward 9:69039869-69039893; SaCas9
ttgctggtggggactttg

SEQ ID NO: 18693 - DNA, 25 bp, Artificial Sequence
  Synthetic: FXN 3 reverse 9:69039862-69039893; SaCas9
actctgcaaagtccccaccagcaag

SEQ ID NO: 18694 - DNA, 24 bp, Artificial Sequence
  Synthetic: FXN 3 reverse 9:69039863-69039893; SaCas9
ctctgcaaagtccccaccagcaag

SEQ ID NO: 18695 - DNA, 23 bp, Artificial Sequence
  Synthetic: FXN 3 reverse 9:69039864-69039893; SaCas9
tctgcaaagtccccaccagcaag

SEQ ID NO: 18696 - DNA, 22 bp, Artificial Sequence
  Synthetic: FXN 3 reverse 9:69039865-69039893; SaCas9
ctgcaaagtccccaccagcaag

SEQ ID NO: 18697 - DNA, 21 bp, Artificial Sequence
  Synthetic: FXN 3 reverse 9:69039866-69039893; SaCas9
tgcaaagtccccaccagcaag

SEQ ID NO: 18698 - DNA, 20 bp, Artificial Sequence
  Synthetic: FXN 3 reverse 9:69039867-69039893; SaCas9
gcaaagtccccaccagcaag

SEQ ID NO: 18699 - DNA, 19 bp, Artificial Sequence
  Synthetic: FXN 3 reverse 9:69039868-69039893; SaCas9
caaagtccccaccagcaag

SEQ ID NO: 18700 - DNA, 18 bp, Artificial Sequence
  Synthetic: FXN 3 reverse 9:69039869-69039893; SaCas9
aaagtccccaccagcaag

SEQ ID NO: 18701 - DNA, 25 bp, Artificial Sequence
  Synthetic: FXN 3 reverse 9:69039865-69039896; SaCas9
aatactctgcaaagtccccaccagc

SEQ ID NO: 18702 - DNA, 24 bp, Artificial Sequence
  Synthetic: FXN 3 reverse 9:69039866-69039896; SaCas9
atactctgcaaagtccccaccagc

SEQ ID NO: 18703 - DNA, 23 bp, Artificial Sequence
  Synthetic: FXN 3 reverse 9:69039867-69039896; SaCas9
tactctgcaaagtccccaccagc

SEQ ID NO: 18704 - DNA, 22 bp, Artificial Sequence
  Synthetic: FXN 3 reverse 9:69039868-69039896; SaCas9
actctgcaaagtccccaccagc

SEQ ID NO: 18705 - DNA, 21 bp, Artificial Sequence
  Synthetic: FXN 3 reverse 9:69039869-69039896; SaCas9
ctctgcaaagtccccaccagc

SEQ ID NO: 18706 - DNA, 20 bp, Artificial Sequence
  Synthetic: FXN 3 reverse 9:69039870-69039896; SaCas9
tctgcaaagtccccaccagc

SEQ ID NO: 18707 - DNA, 19 bp, Artificial Sequence
  Synthetic: FXN 3 reverse 9:69039871-69039896; SaCas9
ctgcaaagtccccaccagc

SEQ ID NO: 18708 - DNA, 18 bp, Artificial Sequence
  Synthetic: FXN 3 reverse 9:69039872-69039896; SaCas9
tgcaaagtccccaccagc

SEQ ID NO: 18709 - DNA, 25 bp, Artificial Sequence
  Synthetic: FXN 3 forward 9:69039869-69039900; SaCas9
ttgctggtggggactttgcagagta

SEQ ID NO: 18710 - DNA, 24 bp, Artificial Sequence
  Synthetic: FXN 3 forward 9:69039870-69039900; SaCas9
tgctggtggggactttgcagagta

SEQ ID NO: 18711 - DNA, 23 bp, Artificial Sequence
  Synthetic: FXN 3 forward 9:69039871-69039900; SaCas9
gctggtggggactttgcagagta

SEQ ID NO: 18712 - DNA, 22 bp, Artificial Sequence
  Synthetic: FXN 3 forward 9:69039872-69039900; SaCas9
ctggtggggactttgcagagta

SEQ ID NO: 18713 - DNA, 21 bp, Artificial Sequence
  Synthetic: FXN 3 forward 9:69039873-69039900; SaCas9
tggtggggactttgcagagta

SEQ ID NO: 18714 - DNA, 20 bp, Artificial Sequence
  Synthetic: FXN 3 forward 9:69039874-69039900; SaCas9
ggtggggactttgcagagta

SEQ ID NO: 18715 - DNA, 19 bp, Artificial Sequence
  Synthetic: FXN 3 forward 9:69039875-69039900; SaCas9
gtggggactttgcagagta

SEQ ID NO: 18716 - DNA, 18 bp, Artificial Sequence
  Synthetic: FXN 3 forward 9:69039876-69039900; SaCas9
tggggactttgcagagta

SEQ ID NO: 18717 - DNA, 25 bp, Artificial Sequence
  Synthetic: FXN 3 forward 9:69039880-69039911; SaCas9
gactttgcagagtattgaggcggca

SEQ ID NO: 18718 - DNA, 24 bp, Artificial Sequence
  Synthetic: FXN 3 forward 9:69039881-69039911; SaCas9
actttgcagagtattgaggcggca

SEQ ID NO: 18719 - DNA, 23 bp, Artificial Sequence
  Synthetic: FXN 3 forward 9:69039882-69039911; SaCas9
ctttgcagagtattgaggcggca

SEQ ID NO: 18720 - DNA, 22 bp, Artificial Sequence
  Synthetic: FXN 3 forward 9:69039883-69039911; SaCas9
tttgcagagtattgaggcggca

SEQ ID NO: 18721 - DNA, 21 bp, Artificial Sequence
  Synthetic: FXN 3 forward 9:69039884-69039911; SaCas9
ttgcagagtattgaggcggca

SEQ ID NO: 18722 - DNA, 20 bp, Artificial Sequence
  Synthetic: FXN 3 forward 9:69039885-69039911; SaCas9
tgcagagtattgaggcggca

SEQ ID NO: 18723 - DNA, 19 bp, Artificial Sequence
  Synthetic: FXN 3 forward 9:69039886-69039911; SaCas9
gcagagtattgaggcggca

SEQ ID NO: 18724 - DNA, 18 bp, Artificial Sequence
  Synthetic: FXN 3 forward 9:69039887-69039911; SaCas9
cagagtattgaggcggca

SEQ ID NO: 18725 - DNA, 25 bp, Artificial Sequence
  Synthetic: FXN 3 forward 9:69039896-69039927; SaCas9
gaggcggcaccgggcgtcatatggt

SEQ ID NO: 18726 - DNA, 24 bp, Artificial Sequence
  Synthetic: FXN 3 forward 9:69039897-69039927; SaCas9
aggcggcaccgggcgtcatatggt

SEQ ID NO: 18727 - DNA, 23 bp, Artificial Sequence
  Synthetic: FXN 3 forward 9:69039898-69039927; SaCas9
ggcggcaccgggcgtcatatggt

SEQ ID NO: 18728 - DNA, 22 bp, Artificial Sequence
  Synthetic: FXN 3 forward 9:69039899-69039927; SaCas9
gcggcaccgggcgtcatatggt

SEQ ID NO: 18729 - DNA, 21 bp, Artificial Sequence
  Synthetic: FXN 3 forward 9:69039900-69039927; SaCas9
cggcaccgggcgtcatatggt

SEQ ID NO: 18730 - DNA, 20 bp, Artificial Sequence
  Synthetic: FXN 3 forward 9:69039901-69039927; SaCas9
ggcaccgggcgtcatatggt

SEQ ID NO: 18731 - DNA, 19 bp, Artificial Sequence
  Synthetic: FXN 3 forward 9:69039902-69039927; SaCas9
gcaccgggcgtcatatggt

SEQ ID NO: 18732 - DNA, 18 bp, Artificial Sequence
  Synthetic: FXN 3 forward 9:69039903-69039927; SaCas9
caccgggcgtcatatggt

SEQ ID NO: 18733 - DNA, 25 bp, Artificial Sequence
  Synthetic: FXN 3 forward 9:69039897-69039928; SaCas9
aggcggcaccgggcgtcatatggta

SEQ ID NO: 18734 - DNA, 24 bp, Artificial Sequence
  Synthetic: FXN 3 forward 9:69039898-69039928; SaCas9
ggcggcaccgggcgtcatatggta

SEQ ID NO: 18735 - DNA, 23 bp, Artificial Sequence
  Synthetic: FXN 3 forward 9:69039899-69039928; SaCas9
gcggcaccgggcgtcatatggta

SEQ ID NO: 18736 - DNA, 22 bp, Artificial Sequence
  Synthetic: FXN 3 forward 9:69039900-69039928; SaCas9
cggcaccgggcgtcatatggta

SEQ ID NO: 18737 - DNA, 21 bp, Artificial Sequence
  Synthetic: FXN 3 forward 9:69039901-69039928; SaCas9
ggcaccgggcgtcatatggta

SEQ ID NO: 18738 - DNA, 20 bp, Artificial Sequence
  Synthetic: FXN 3 forward 9:69039902-69039928; SaCas9
gcaccgggcgtcatatggta

SEQ ID NO: 18739 - DNA, 19 bp, Artificial Sequence
  Synthetic: FXN 3 forward 9:69039903-69039928; SaCas9
caccgggcgtcatatggta

SEQ ID NO: 18740 - DNA, 18 bp, Artificial Sequence
  Synthetic: FXN 3 forward 9:69039904-69039928; SaCas9
accgggcgtcatatggta

SEQ ID NO: 18741 - DNA, 25 bp, Artificial Sequence
  Synthetic: FXN 3 forward 9:69039902-69039933; SaCas9
gcaccgggcgtcatatggtaagggg

SEQ ID NO: 18742 - DNA, 24 bp, Artificial Sequence
  Synthetic: FXN 3 forward 9:69039903-69039933; SaCas9
caccgggcgtcatatggtaagggg

SEQ ID NO: 18743 - DNA, 23 bp, Artificial Sequence
  Synthetic: FXN 3 forward 9:69039904-69039933; SaCas9
accgggcgtcatatggtaagggg

SEQ ID NO: 18744 - DNA, 22 bp, Artificial Sequence
  Synthetic: FXN 3 forward 9:69039905-69039933; SaCas9
ccgggcgtcatatggtaagggg

SEQ ID NO: 18745 - DNA, 21 bp, Artificial Sequence
  Synthetic: FXN 3 forward 9:69039906-69039933; SaCas9
cgggcgtcatatggtaagggg

SEQ ID NO: 18746 - DNA, 20 bp, Artificial Sequence
  Synthetic: FXN 3 forward 9:69039907-69039933; SaCas9
gggcgtcatatggtaagggg

SEQ ID NO: 18747 - DNA, 19 bp, Artificial Sequence
  Synthetic: FXN 3 forward 9:69039908-69039933; SaCas9
ggcgtcatatggtaagggg

SEQ ID NO: 18748 - DNA, 18 bp, Artificial Sequence
  Synthetic: FXN 3 forward 9:69039909-69039933; SaCas9
gcgtcatatggtaagggg

SEQ ID NO: 18749 - DNA, 25 bp, Artificial Sequence
  Synthetic: FXN 3 reverse 9:69039939-69039970; SaCas9
gctttataagaaaagaaaaagacac

SEQ ID NO: 18750 - DNA, 24 bp, Artificial Sequence
  Synthetic: FXN 3 reverse 9:69039940-69039970; SaCas9
ctttataagaaaagaaaaagacac

SEQ ID NO: 18751 - DNA, 23 bp, Artificial Sequence
  Synthetic: FXN 3 reverse 9:69039941-69039970; SaCas9
tttataagaaaagaaaaagacac

SEQ ID NO: 18752 - DNA, 22 bp, Artificial Sequence
  Synthetic: FXN 3 reverse 9:69039942-69039970; SaCas9
ttataagaaaagaaaaagacac

SEQ ID NO: 18753 - DNA, 21 bp, Artificial Sequence
  Synthetic: FXN 3 reverse 9:69039943-69039970; SaCas9
tataagaaaagaaaaagacac

SEQ ID NO: 18754 - DNA, 20 bp, Artificial Sequence
  Synthetic: FXN 3 reverse 9:69039944-69039970; SaCas9
ataagaaaagaaaaagacac

SEQ ID NO: 18755 - DNA, 19 bp, Artificial Sequence
  Synthetic: FXN 3 reverse 9:69039945-69039970; SaCas9
taagaaaagaaaaagacac

SEQ ID NO: 18756 - DNA, 18 bp, Artificial Sequence
  Synthetic: FXN 3 reverse 9:69039946-69039970; SaCas9
aagaaaagaaaaagacac

SEQ ID NO: 18757 - DNA, 25 bp, Artificial Sequence
  Synthetic: FXN 3 reverse 9:69039952-69039983; SaCas9
tgaaactagttaggctttataagaa

SEQ ID NO: 18758 - DNA, 24 bp, Artificial Sequence
  Synthetic: FXN 3 reverse 9:69039953-69039983; SaCas9
gaaactagttaggctttataagaa

SEQ ID NO: 18759 - DNA, 23 bp, Artificial Sequence
  Synthetic: FXN 3 reverse 9:69039954-69039983; SaCas9
aaactagttaggctttataagaa

SEQ ID NO: 18760 - DNA, 22 bp, Artificial Sequence
  Synthetic: FXN 3 reverse 9:69039955-69039983; SaCas9
aactagttaggctttataagaa

SEQ ID NO: 18761 - DNA, 21 bp, Artificial Sequence
  Synthetic: FXN 3 reverse 9:69039956-69039983; SaCas9
actagttaggctttataagaa

SEQ ID NO: 18762 - DNA, 20 bp, Artificial Sequence
  Synthetic: FXN 3 reverse 9:69039957-69039983; SaCas9
ctagttaggctttataagaa

SEQ ID NO: 18763 - DNA, 19 bp, Artificial Sequence
  Synthetic: FXN 3 reverse 9:69039958-69039983; SaCas9
tagttaggctttataagaa

SEQ ID NO: 18764 - DNA, 18 bp, Artificial Sequence
  Synthetic: FXN 3 reverse 9:69039959-69039983; SaCas9
agttaggctttataagaa

SEQ ID NO: 18765 - DNA, 25 bp, Artificial Sequence
  Synthetic: FXN 3 reverse 9:69039957-69039988; SaCas9
gggagtgaaactagttaggctttat

SEQ ID NO: 18766 - DNA, 24 bp, Artificial Sequence
  Synthetic: FXN 3 reverse 9:69039958-69039988; SaCas9
ggagtgaaactagttaggctttat

SEQ ID NO: 18767 - DNA, 23 bp, Artificial Sequence
  Synthetic: FXN 3 reverse 9:69039959-69039988; SaCas9
gagtgaaactagttaggctttat

SEQ ID NO: 18768 - DNA, 22 bp, Artificial Sequence
  Synthetic: FXN 3 reverse 9:69039960-69039988; SaCas9
agtgaaactagttaggctttat

SEQ ID NO: 18769 - DNA, 21 bp, Artificial Sequence
  Synthetic: FXN 3 reverse 9:69039961-69039988; SaCas9
gtgaaactagttaggctttat

SEQ ID NO: 18770 - DNA, 20 bp, Artificial Sequence
  Synthetic: FXN 3 reverse 9:69039962-69039988; SaCas9
tgaaactagttaggctttat

SEQ ID NO: 18771 - DNA, 19 bp, Artificial Sequence
  Synthetic: FXN 3 reverse 9:69039963-69039988; SaCas9
gaaactagttaggctttat

SEQ ID NO: 18772 - DNA, 18 bp, Artificial Sequence
  Synthetic: FXN 3 reverse 9:69039964-69039988; SaCas9
aaactagttaggctttat

SEQ ID NO: 18773 - DNA, 25 bp, Artificial Sequence
  Synthetic: FXN 3 reverse 9:69039978-69040009; SaCas9
catagattaatgggttatcatggga

SEQ ID NO: 18774 - DNA, 24 bp, Artificial Sequence
  Synthetic: FXN 3 reverse 9:69039979-69040009; SaCas9
atagattaatgggttatcatggga

SEQ ID NO: 18775 - DNA, 23 bp, Artificial Sequence
  Synthetic: FXN 3 reverse 9:69039980-69040009; SaCas9
tagattaatgggttatcatggga

SEQ ID NO: 18776 - DNA, 22 bp, Artificial Sequence
  Synthetic: FXN 3 reverse 9:69039981-69040009; SaCas9
agattaatgggttatcatggga

SEQ ID NO: 18777 - DNA, 21 bp, Artificial Sequence
  Synthetic: FXN 3 reverse 9:69039982-69040009; SaCas9
gattaatgggttatcatggga

SEQ ID NO: 18778 - DNA, 20 bp, Artificial Sequence
  Synthetic: FXN 3 reverse 9:69039983-69040009; SaCas9
attaatgggttatcatggga

SEQ ID NO: 18779 - DNA, 19 bp, Artificial Sequence
  Synthetic: FXN 3 reverse 9:69039984-69040009; SaCas9
ttaatgggttatcatggga

SEQ ID NO: 18780 - DNA, 18 bp, Artificial Sequence
  Synthetic: FXN 3 reverse 9:69039985-69040009; SaCas9
taatgggttatcatggga

SEQ ID NO: 18781 - DNA, 25 bp, Artificial Sequence
  Synthetic: FXN 3 forward 9:69039981-69040012; SaCas9
cactcccatgataacccattaatct

SEQ ID NO: 18782 - DNA, 24 bp, Artificial Sequence
  Synthetic: FXN 3 forward 9:69039982-69040012; SaCas9
actcccatgataacccattaatct

SEQ ID NO: 18783 - DNA, 23 bp, Artificial Sequence
  Synthetic: FXN 3 forward 9:69039983-69040012; SaCas9
ctcccatgataacccattaatct

SEQ ID NO: 18784 - DNA, 22 bp, Artificial Sequence
  Synthetic: FXN 3 forward 9:69039984-69040012; SaCas9
tcccatgataacccattaatct

SEQ ID NO: 18785 - DNA, 21 bp, Artificial Sequence
  Synthetic: FXN 3 forward 9:69039985-69040012; SaCas9
cccatgataacccattaatct

SEQ ID NO: 18786 - DNA, 20 bp, Artificial Sequence
  Synthetic: FXN 3 forward 9:69039986-69040012; SaCas9
ccatgataacccattaatct

SEQ ID NO: 18787 - DNA, 19 bp, Artificial Sequence
  Synthetic: FXN 3 forward 9:69039987-69040012; SaCas9
catgataacccattaatct

SEQ ID NO: 18788 - DNA, 18 bp, Artificial Sequence
  Synthetic: FXN 3 forward 9:69039988-69040012; SaCas9
atgataacccattaatct

SEQ ID NO: 18789 - DNA, 25 bp, Artificial Sequence
  Synthetic: FXN 3 reverse 9:69039982-69040013; SaCas9
cattcatagattaatgggttatcat

SEQ ID NO: 18790 - DNA, 24 bp, Artificial Sequence
  Synthetic: FXN 3 reverse 9:69039983-69040013; SaCas9
attcatagattaatgggttatcat

SEQ ID NO: 18791 - DNA, 23 bp, Artificial Sequence
  Synthetic: FXN 3 reverse 9:69039984-69040013; SaCas9
ttcatagattaatgggttatcat

SEQ ID NO: 18792 - DNA, 22 bp, Artificial Sequence
  Synthetic: FXN 3 reverse 9:69039985-69040013; SaCas9
tcatagattaatgggttatcat

SEQ ID NO: 18793 - DNA, 21 bp, Artificial Sequence
  Synthetic: FXN 3 reverse 9:69039986-69040013; SaCas9
catagattaatgggttatcat

SEQ ID NO: 18794 - DNA, 20 bp, Artificial Sequence
  Synthetic: FXN 3 reverse 9:69039987-69040013; SaCas9
atagattaatgggttatcat

SEQ ID NO: 18795 - DNA, 19 bp, Artificial Sequence
  Synthetic: FXN 3 reverse 9:69039988-69040013; SaCas9
tagattaatgggttatcat

SEQ ID NO: 18796 - DNA, 18 bp, Artificial Sequence
  Synthetic: FXN 3 reverse 9:69039989-69040013; SaCas9
agattaatgggttatcat

SEQ ID NO: 18797 - DNA, 25 bp, Artificial Sequence
  Synthetic: FXN 3 reverse 9:69039983-69040014; SaCas9
ccattcatagattaatgggttatca

SEQ ID NO: 18798 - DNA, 24 bp, Artificial Sequence
  Synthetic: FXN 3 reverse 9:69039984-69040014; SaCas9
cattcatagattaatgggttatca

SEQ ID NO: 18799 - DNA, 23 bp, Artificial Sequence
  Synthetic: FXN 3 reverse 9:69039985-69040014; SaCas9
attcatagattaatgggttatca

SEQ ID NO: 18800 - DNA, 22 bp, Artificial Sequence
  Synthetic: FXN 3 reverse 9:69039986-69040014; SaCas9
ttcatagattaatgggttatca

SEQ ID NO: 18801 - DNA, 21 bp, Artificial Sequence
  Synthetic: FXN 3 reverse 9:69039987-69040014; SaCas9
tcatagattaatgggttatca

SEQ ID NO: 18802 - DNA, 20 bp, Artificial Sequence
  Synthetic: FXN 3 reverse 9:69039988-69040014; SaCas9
catagattaatgggttatca

SEQ ID NO: 18803 - DNA, 19 bp, Artificial Sequence
  Synthetic: FXN 3 reverse 9:69039989-69040014; SaCas9
atagattaatgggttatca

SEQ ID NO: 18804 - DNA, 18 bp, Artificial Sequence
  Synthetic: FXN 3 reverse 9:69039990-69040014; SaCas9
tagattaatgggttatca

SEQ ID NO: 18805 - DNA, 25 bp, Artificial Sequence
  Synthetic: FXN 3 reverse 9:69039984-69040015; SaCas9
tccattcatagattaatgggttatc

SEQ ID NO: 18806 - DNA, 24 bp, Artificial Sequence
  Synthetic: FXN 3 reverse 9:69039985-69040015; SaCas9
ccattcatagattaatgggttatc

SEQ ID NO: 18807 - DNA, 23 bp, Artificial Sequence
  Synthetic: FXN 3 reverse 9:69039986-69040015; SaCas9
cattcatagattaatgggttatc

SEQ ID NO: 18808 - DNA, 22 bp, Artificial Sequence
  Synthetic: FXN 3 reverse 9:69039987-69040015; SaCas9
attcatagattaatgggttatc

SEQ ID NO: 18809 - DNA, 21 bp, Artificial Sequence
  Synthetic: FXN 3 reverse 9:69039988-69040015; SaCas9
ttcatagattaatgggttatc

SEQ ID NO: 18810 - DNA, 20 bp, Artificial Sequence
  Synthetic: FXN 3 reverse 9:69039989-69040015; SaCas9
tcatagattaatgggttatc

SEQ ID NO: 18811 - DNA, 19 bp, Artificial Sequence
  Synthetic: FXN 3 reverse 9:69039990-69040015; SaCas9
catagattaatgggttatc

SEQ ID NO: 18812 - DNA, 18 bp, Artificial Sequence
  Synthetic: FXN 3 reverse 9:69039991-69040015; SaCas9
atagattaatgggttatc

SEQ ID NO: 18813 - DNA, 25 bp, Artificial Sequence
  Synthetic: FXN 3 forward 9:69039985-69040016; SaCas9
cccatgataacccattaatctatga

SEQ ID NO: 18814 - DNA, 24 bp, Artificial Sequence
  Synthetic: FXN 3 forward 9:69039986-69040016; SaCas9
ccatgataacccattaatctatga

SEQ ID NO: 18815 - DNA, 23 bp, Artificial Sequence
  Synthetic: FXN 3 forward 9:69039987-69040016; SaCas9
catgataacccattaatctatga

SEQ ID NO: 18816 - DNA, 22 bp, Artificial Sequence
  Synthetic: FXN 3 forward 9:69039988-69040016; SaCas9
atgataacccattaatctatga

SEQ ID NO: 18817 - DNA, 21 bp, Artificial Sequence
  Synthetic: FXN 3 forward 9:69039989-69040016; SaCas9
tgataacccattaatctatga

SEQ ID NO: 18818 - DNA, 20 bp, Artificial Sequence
  Synthetic: FXN 3 forward 9:69039990-69040016; SaCas9
gataacccattaatctatga

SEQ ID NO: 18819 - DNA, 19 bp, Artificial Sequence
  Synthetic: FXN 3 forward 9:69039991-69040016; SaCas9
ataacccattaatctatga

SEQ ID NO: 18820 - DNA, 18 bp, Artificial Sequence
  Synthetic: FXN 3 forward 9:69039992-69040016; SaCas9
taacccattaatctatga

SEQ ID NO: 18821 - DNA, 25 bp, Artificial Sequence
  Synthetic: FXN 3 reverse 9:69039994-69040025; SaCas9
aatggattaatccattcatagatta

SEQ ID NO: 18822 - DNA, 24 bp, Artificial Sequence
  Synthetic: FXN 3 reverse 9:69039995-69040025; SaCas9
atggattaatccattcatagatta

SEQ ID NO: 18823 - DNA, 23 bp, Artificial Sequence
  Synthetic: FXN 3 reverse 9:69039996-69040025; SaCas9
tggattaatccattcatagatta

SEQ ID NO: 18824 - DNA, 22 bp, Artificial Sequence
  Synthetic: FXN 3 reverse 9:69039997-69040025; SaCas9
ggattaatccattcatagatta

SEQ ID NO: 18825 - DNA, 21 bp, Artificial Sequence
  Synthetic: FXN 3 reverse 9:69039998-69040025; SaCas9
gattaatccattcatagatta

SEQ ID NO: 18826 - DNA, 20 bp, Artificial Sequence
  Synthetic: FXN 3 reverse 9:69039999-69040025; SaCas9
attaatccattcatagatta

SEQ ID NO: 18827 - DNA, 19 bp, Artificial Sequence
  Synthetic: FXN 3 reverse 9:69040000-69040025; SaCas9
ttaatccattcatagatta

SEQ ID NO: 18828 - DNA, 18 bp, Artificial Sequence
  Synthetic: FXN 3 reverse 9:69040001-69040025; SaCas9
taatccattcatagatta

SEQ ID NO: 18829 - DNA, 25 bp, Artificial Sequence
  Synthetic: FXN 3 forward 9:69040001-69040032; SaCas9
aatctatgaatggattaatccatta

SEQ ID NO: 18830 - DNA, 24 bp, Artificial Sequence
  Synthetic: FXN 3 forward 9:69040002-69040032; SaCas9
atctatgaatggattaatccatta

SEQ ID NO: 18831 - DNA, 23 bp, Artificial Sequence
  Synthetic: FXN 3 forward 9:69040003-69040032; SaCas9
tctatgaatggattaatccatta

SEQ ID NO: 18832 - DNA, 22 bp, Artificial Sequence
  Synthetic: FXN 3 forward 9:69040004-69040032; SaCas9
ctatgaatggattaatccatta

SEQ ID NO: 18833 - DNA, 21 bp, Artificial Sequence
  Synthetic: FXN 3 forward 9:69040005-69040032; SaCas9
tatgaatggattaatccatta

SEQ ID NO: 18834 - DNA, 20 bp, Artificial Sequence
  Synthetic: FXN 3 forward 9:69040006-69040032; SaCas9
atgaatggattaatccatta

SEQ ID NO: 18835 - DNA, 19 bp, Artificial Sequence
  Synthetic: FXN 3 forward 9:69040007-69040032; SaCas9
tgaatggattaatccatta

SEQ ID NO: 18836 - DNA, 18 bp, Artificial Sequence
  Synthetic: FXN 3 forward 9:69040008-69040032; SaCas9
gaatggattaatccatta

SEQ ID NO: 18837 - DNA, 25 bp, Artificial Sequence
  Synthetic: FXN 3 forward 9:69040003-69040034; SaCas9
tctatgaatggattaatccattatt

SEQ ID NO: 18838 - DNA, 24 bp, Artificial Sequence
  Synthetic: FXN 3 forward 9:69040004-69040034; SaCas9
ctatgaatggattaatccattatt

SEQ ID NO: 18839 - DNA, 23 bp, Artificial Sequence
  Synthetic: FXN 3 forward 9:69040005-69040034; SaCas9
tatgaatggattaatccattatt

SEQ ID NO: 18840 - DNA, 22 bp, Artificial Sequence
  Synthetic: FXN 3 forward 9:69040006-69040034; SaCas9
atgaatggattaatccattatt

SEQ ID NO: 18841 - DNA, 21 bp, Artificial Sequence
  Synthetic: FXN 3 forward 9:69040007-69040034; SaCas9
tgaatggattaatccattatt

SEQ ID NO: 18842 - DNA, 20 bp, Artificial Sequence
  Synthetic: FXN 3 forward 9:69040008-69040034; SaCas9
gaatggattaatccattatt

SEQ ID NO: 18843 - DNA, 19 bp, Artificial Sequence
  Synthetic: FXN 3 forward 9:69040009-69040034; SaCas9
aatggattaatccattatt

SEQ ID NO: 18844 - DNA, 18 bp, Artificial Sequence
  Synthetic: FXN 3 forward 9:69040010-69040034; SaCas9
atggattaatccattatt

SEQ ID NO: 18845 - DNA, 25 bp, Artificial Sequence
  Synthetic: FXN 3 forward 9:69040004-69040035; SaCas9
ctatgaatggattaatccattattg

SEQ ID NO: 18846 - DNA, 24 bp, Artificial Sequence
  Synthetic: FXN 3 forward 9:69040005-69040035; SaCas9
tatgaatggattaatccattattg

SEQ ID NO: 18847 - DNA, 23 bp, Artificial Sequence
  Synthetic: FXN 3 forward 9:69040006-69040035; SaCas9
atgaatggattaatccattattg

SEQ ID NO: 18848 - DNA, 22 bp, Artificial Sequence
  Synthetic: FXN 3 forward 9:69040007-69040035; SaCas9
tgaatggattaatccattattg

SEQ ID NO: 18849 - DNA, 21 bp, Artificial Sequence
  Synthetic: FXN 3 forward 9:69040008-69040035; SaCas9
gaatggattaatccattattg

SEQ ID NO: 18850 - DNA, 20 bp, Artificial Sequence
  Synthetic: FXN 3 forward 9:69040009-69040035; SaCas9
aatggattaatccattattg

SEQ ID NO: 18851 - DNA, 19 bp, Artificial Sequence
  Synthetic: FXN 3 forward 9:69040010-69040035; SaCas9
atggattaatccattattg

SEQ ID NO: 18852 - DNA, 18 bp, Artificial Sequence
  Synthetic: FXN 3 forward 9:69040011-69040035; SaCas9
tggattaatccattattg

SEQ ID NO: 18853 - DNA, 25 bp, Artificial Sequence
  Synthetic: FXN 3 forward 9:69040005-69040036; SaCas9
tatgaatggattaatccattattga

SEQ ID NO: 18854 - DNA, 24 bp, Artificial Sequence
  Synthetic: FXN 3 forward 9:69040006-69040036; SaCas9
atgaatggattaatccattattga

SEQ ID NO: 18855 - DNA, 23 bp, Artificial Sequence
  Synthetic: FXN 3 forward 9:69040007-69040036; SaCas9
tgaatggattaatccattattga

SEQ ID NO: 18856 - DNA, 22 bp, Artificial Sequence
  Synthetic: FXN 3 forward 9:69040008-69040036; SaCas9
gaatggattaatccattattga

SEQ ID NO: 18857 - DNA, 21 bp, Artificial Sequence
  Synthetic: FXN 3 forward 9:69040009-69040036; SaCas9
aatggattaatccattattga

SEQ ID NO: 18858 - DNA, 20 bp, Artificial Sequence
  Synthetic: FXN 3 forward 9:69040010-69040036; SaCas9
atggattaatccattattga

SEQ ID NO: 18859 - DNA, 19 bp, Artificial Sequence
  Synthetic: FXN 3 forward 9:69040011-69040036; SaCas9
tggattaatccattattga

SEQ ID NO: 18860 - DNA, 18 bp, Artificial Sequence
  Synthetic: FXN 3 forward 9:69040012-69040036; SaCas9
ggattaatccattattga

SEQ ID NO: 18861 - DNA, 25 bp, Artificial Sequence
  Synthetic: FXN 3 forward 9:69040008-69040039; SaCas9
gaatggattaatccattattgaggg

SEQ ID NO: 18862 - DNA, 24 bp, Artificial Sequence
  Synthetic: FXN 3 forward 9:69040009-69040039; SaCas9
aatggattaatccattattgaggg

SEQ ID NO: 18863 - DNA, 23 bp, Artificial Sequence
  Synthetic: FXN 3 forward 9:69040010-69040039; SaCas9
atggattaatccattattgaggg

SEQ ID NO: 18864 - DNA, 22 bp, Artificial Sequence
  Synthetic: FXN 3 forward 9:69040011-69040039; SaCas9
tggattaatccattattgaggg

SEQ ID NO: 18865 - DNA, 21 bp, Artificial Sequence
  Synthetic: FXN 3 forward 9:69040012-69040039; SaCas9
ggattaatccattattgaggg

SEQ ID NO: 18866 - DNA, 20 bp, Artificial Sequence
  Synthetic: FXN 3 forward 9:69040013-69040039; SaCas9
gattaatccattattgaggg

SEQ ID NO: 18867 - DNA, 19 bp, Artificial Sequence
  Synthetic: FXN 3 forward 9:69040014-69040039; SaCas9
attaatccattattgaggg

SEQ ID NO: 18868 - DNA, 18 bp, Artificial Sequence
  Synthetic: FXN 3 forward 9:69040015-69040039; SaCas9
ttaatccattattgaggg

SEQ ID NO: 18869 - DNA, 25 bp, Artificial Sequence
  Synthetic: FXN 3 reverse 9:69040018-69040049; SaCas9
ggtcatgaaggttcttccctcaata

SEQ ID NO: 18870 - DNA, 24 bp, Artificial Sequence
  Synthetic: FXN 3 reverse 9:69040019-69040049; SaCas9
gtcatgaaggttcttccctcaata

SEQ ID NO: 18871 - DNA, 23 bp, Artificial Sequence
  Synthetic: FXN 3 reverse 9:69040020-69040049; SaCas9
tcatgaaggttcttccctcaata

SEQ ID NO: 18872 - DNA, 22 bp, Artificial Sequence
  Synthetic: FXN 3 reverse 9:69040021-69040049; SaCas9
catgaaggttcttccctcaata

SEQ ID NO: 18873 - DNA, 21 bp, Artificial Sequence
  Synthetic: FXN 3 reverse 9:69040022-69040049; SaCas9
atgaaggttcttccctcaata

SEQ ID NO: 18874 - DNA, 20 bp, Artificial Sequence
  Synthetic: FXN 3 reverse 9:69040023-69040049; SaCas9
tgaaggttcttccctcaata

SEQ ID NO: 18875 - DNA, 19 bp, Artificial Sequence
  Synthetic: FXN 3 reverse 9:69040024-69040049; SaCas9
gaaggttcttccctcaata

SEQ ID NO: 18876 - DNA, 18 bp, Artificial Sequence
  Synthetic: FXN 3 reverse 9:69040025-69040049; SaCas9
aaggttcttccctcaata

SEQ ID NO: 18877 - DNA, 25 bp, Artificial Sequence
  Synthetic: FXN 3 reverse 9:69040039-69040070; SaCas9
ggggcctttaagcggtgactgggtc

SEQ ID NO: 18878 - DNA, 24 bp, Artificial Sequence
  Synthetic: FXN 3 reverse 9:69040040-69040070; SaCas9
gggcctttaagcggtgactgggtc

SEQ ID NO: 18879 - DNA, 23 bp, Artificial Sequence
  Synthetic: FXN 3 reverse 9:69040041-69040070; SaCas9
ggcctttaagcggtgactgggtc

SEQ ID NO: 18880 - DNA, 22 bp, Artificial Sequence
  Synthetic: FXN 3 reverse 9:69040042-69040070; SaCas9
gcctttaagcggtgactgggtc

SEQ ID NO: 18881 - DNA, 21 bp, Artificial Sequence
  Synthetic: FXN 3 reverse 9:69040043-69040070; SaCas9
cctttaagcggtgactgggtc

SEQ ID NO: 18882 - DNA, 20 bp, Artificial Sequence
  Synthetic: FXN 3 reverse 9:69040044-69040070; SaCas9
ctttaagcggtgactgggtc

SEQ ID NO: 18883 - DNA, 19 bp, Artificial Sequence
  Synthetic: FXN 3 reverse 9:69040045-69040070; SaCas9
tttaagcggtgactgggtc

SEQ ID NO: 18884 - DNA, 18 bp, Artificial Sequence
  Synthetic: FXN 3 reverse 9:69040046-69040070; SaCas9
ttaagcggtgactgggtc

SEQ ID NO: 18885 - DNA, 25 bp, Artificial Sequence
  Synthetic: FXN 3 reverse 9:69040046-69040077; SaCas9
gagaggtggggcctttaagcggtga

SEQ ID NO: 18886 - DNA, 24 bp, Artificial Sequence
  Synthetic: FXN 3 reverse 9:69040047-69040077; SaCas9
agaggtggggcctttaagcggtga

SEQ ID NO: 18887 - DNA, 23 bp, Artificial Sequence
  Synthetic: FXN 3 reverse 9:69040048-69040077; SaCas9
gaggtggggcctttaagcggtga

SEQ ID NO: 18888 - DNA, 22 bp, Artificial Sequence
  Synthetic: FXN 3 reverse 9:69040049-69040077; SaCas9
aggtggggcctttaagcggtga

SEQ ID NO: 18889 - DNA, 21 bp, Artificial Sequence
  Synthetic: FXN 3 reverse 9:69040050-69040077; SaCas9
ggtggggcctttaagcggtga

SEQ ID NO: 18890 - DNA, 20 bp, Artificial Sequence
  Synthetic: FXN 3 reverse 9:69040051-69040077; SaCas9
gtggggcctttaagcggtga

SEQ ID NO: 18891 - DNA, 19 bp, Artificial Sequence
  Synthetic: FXN 3 reverse 9:69040052-69040077; SaCas9
tggggcctttaagcggtga

SEQ ID NO: 18892 - DNA, 18 bp, Artificial Sequence
  Synthetic: FXN 3 reverse 9:69040053-69040077; SaCas9
ggggcctttaagcggtga

SEQ ID NO: 18893 - DNA, 25 bp, Artificial Sequence
  Synthetic: FXN 3 forward 9:69040064-69040095; SaCas9
ggccccacctctcaatactgccaca

SEQ ID NO: 18894 - DNA, 24 bp, Artificial Sequence
  Synthetic: FXN 3 forward 9:69040065-69040095; SaCas9
gccccacctctcaatactgccaca

SEQ ID NO: 18895 - DNA, 23 bp, Artificial Sequence
  Synthetic: FXN 3 forward 9:69040066-69040095; SaCas9
ccccacctctcaatactgccaca

SEQ ID NO: 18896 - DNA, 22 bp, Artificial Sequence
  Synthetic: FXN 3 forward 9:69040067-69040095; SaCas9
cccacctctcaatactgccaca

SEQ ID NO: 18897 - DNA, 21 bp, Artificial Sequence
  Synthetic: FXN 3 forward 9:69040068-69040095; SaCas9
ccacctctcaatactgccaca

SEQ ID NO: 18898 - DNA, 20 bp, Artificial Sequence
  Synthetic: FXN 3 forward 9:69040069-69040095; SaCas9
cacctctcaatactgccaca

SEQ ID NO: 18899 - DNA, 19 bp, Artificial Sequence
  Synthetic: FXN 3 forward 9:69040070-69040095; SaCas9
acctctcaatactgccaca

SEQ ID NO: 18900 - DNA, 18 bp, Artificial Sequence
  Synthetic: FXN 3 forward 9:69040071-69040095; SaCas9
cctctcaatactgccaca

SEQ ID NO: 18901 - DNA, 25 bp, Artificial Sequence
  Synthetic: FXN 3 forward 9:69040065-69040096; SaCas9
gccccacctctcaatactgccacat

SEQ ID NO: 18902 - DNA, 24 bp, Artificial Sequence
  Synthetic: FXN 3 forward 9:69040066-69040096; SaCas9
ccccacctctcaatactgccacat

SEQ ID NO: 18903 - DNA, 23 bp, Artificial Sequence
  Synthetic: FXN 3 forward 9:69040067-69040096; SaCas9
cccacctctcaatactgccacat

SEQ ID NO: 18904 - DNA, 22 bp, Artificial Sequence
  Synthetic: FXN 3 forward 9:69040068-69040096; SaCas9
ccacctctcaatactgccacat

SEQ ID NO: 18905 - DNA, 21 bp, Artificial Sequence
  Synthetic: FXN 3 forward 9:69040069-69040096; SaCas9
cacctctcaatactgccacat

SEQ ID NO: 18906 - DNA, 20 bp, Artificial Sequence
  Synthetic: FXN 3 forward 9:69040070-69040096; SaCas9
acctctcaatactgccacat

SEQ ID NO: 18907 - DNA, 19 bp, Artificial Sequence
  Synthetic: FXN 3 forward 9:69040071-69040096; SaCas9
cctctcaatactgccacat

SEQ ID NO: 18908 - DNA, 18 bp, Artificial Sequence
  Synthetic: FXN 3 forward 9:69040072-69040096; SaCas9
ctctcaatactgccacat

SEQ ID NO: 18909 - DNA, 25 bp, Artificial Sequence
  Synthetic: FXN 3 reverse 9:69040065-69040096; SaCas9
ttcccgatgtggcagtattgagagg

SEQ ID NO: 18910 - DNA, 24 bp, Artificial Sequence
  Synthetic: FXN 3 reverse 9:69040066-69040096; SaCas9
tcccgatgtggcagtattgagagg

SEQ ID NO: 18911 - DNA, 23 bp, Artificial Sequence
  Synthetic: FXN 3 reverse 9:69040067-69040096; SaCas9
cccgatgtggcagtattgagagg

SEQ ID NO: 18912 - DNA, 22 bp, Artificial Sequence
  Synthetic: FXN 3 reverse 9:69040068-69040096; SaCas9
ccgatgtggcagtattgagagg

SEQ ID NO: 18913 - DNA, 21 bp, Artificial Sequence
  Synthetic: FXN 3 reverse 9:69040069-69040096; SaCas9
cgatgtggcagtattgagagg

SEQ ID NO: 18914 - DNA, 20 bp, Artificial Sequence
  Synthetic: FXN 3 reverse 9:69040070-69040096; SaCas9
gatgtggcagtattgagagg

SEQ ID NO: 18915 - DNA, 19 bp, Artificial Sequence
  Synthetic: FXN 3 reverse 9:69040071-69040096; SaCas9
atgtggcagtattgagagg

SEQ ID NO: 18916 - DNA, 18 bp, Artificial Sequence
  Synthetic: FXN 3 reverse 9:69040072-69040096; SaCas9
tgtggcagtattgagagg

SEQ ID NO: 18917 - DNA, 25 bp, Artificial Sequence
  Synthetic: FXN 3 forward 9:69040066-69040097; SaCas9
ccccacctctcaatactgccacatc

SEQ ID NO: 18918 - DNA, 24 bp, Artificial Sequence
  Synthetic: FXN 3 forward 9:69040067-69040097; SaCas9
cccacctctcaatactgccacatc

SEQ ID NO: 18919 - DNA, 23 bp, Artificial Sequence
  Synthetic: FXN 3 forward 9:69040068-69040097; SaCas9
ccacctctcaatactgccacatc

SEQ ID NO: 18920 - DNA, 22 bp, Artificial Sequence
  Synthetic: FXN 3 forward 9:69040069-69040097; SaCas9
cacctctcaatactgccacatc

SEQ ID NO: 18921 - DNA, 21 bp, Artificial Sequence
  Synthetic: FXN 3 forward 9:69040070-69040097; SaCas9
acctctcaatactgccacatc

SEQ ID NO: 18922 - DNA, 20 bp, Artificial Sequence
  Synthetic: FXN 3 forward 9:69040071-69040097; SaCas9
cctctcaatactgccacatc

SEQ ID NO: 18923 - DNA, 19 bp, Artificial Sequence
  Synthetic: FXN 3 forward 9:69040072-69040097; SaCas9
ctctcaatactgccacatc

SEQ ID NO: 18924 - DNA, 18 bp, Artificial Sequence
  Synthetic: FXN 3 forward 9:69040073-69040097; SaCas9
tctcaatactgccacatc

SEQ ID NO: 18925 - DNA, 25 bp, Artificial Sequence
  Synthetic: FXN 3 reverse 9:69040066-69040097; SaCas9
attcccgatgtggcagtattgagag

SEQ ID NO: 18926 - DNA, 24 bp, Artificial Sequence
  Synthetic: FXN 3 reverse 9:69040067-69040097; SaCas9
ttcccgatgtggcagtattgagag

SEQ ID NO: 18927 - DNA, 23 bp, Artificial Sequence
  Synthetic: FXN 3 reverse 9:69040068-69040097; SaCas9
tcccgatgtggcagtattgagag

SEQ ID NO: 18928 - DNA, 22 bp, Artificial Sequence
  Synthetic: FXN 3 reverse 9:69040069-69040097; SaCas9
cccgatgtggcagtattgagag

SEQ ID NO: 18929 - DNA, 21 bp, Artificial Sequence
  Synthetic: FXN 3 reverse 9:69040070-69040097; SaCas9
ccgatgtggcagtattgagag

SEQ ID NO: 18930 - DNA, 20 bp, Artificial Sequence
  Synthetic: FXN 3 reverse 9:69040071-69040097; SaCas9
cgatgtggcagtattgagag

SEQ ID NO: 18931 - DNA, 19 bp, Artificial Sequence
  Synthetic: FXN 3 reverse 9:69040072-69040097; SaCas9
gatgtggcagtattgagag

SEQ ID NO: 18932 - DNA, 18 bp, Artificial Sequence
  Synthetic: FXN 3 reverse 9:69040073-69040097; SaCas9
atgtggcagtattgagag

SEQ ID NO: 18933 - DNA, 25 bp, Artificial Sequence
  Synthetic: FXN 3 reverse 9:69040071-69040102; SaCas9
acttaattcccgatgtggcagtatt

SEQ ID NO: 18934 - DNA, 24 bp, Artificial Sequence
  Synthetic: FXN 3 reverse 9:69040072-69040102; SaCas9
cttaattcccgatgtggcagtatt

SEQ ID NO: 18935 - DNA, 23 bp, Artificial Sequence
  Synthetic: FXN 3 reverse 9:69040073-69040102; SaCas9
ttaattcccgatgtggcagtatt

SEQ ID NO: 18936 - DNA, 22 bp, Artificial Sequence
  Synthetic: FXN 3 reverse 9:69040074-69040102; SaCas9
taattcccgatgtggcagtatt

SEQ ID NO: 18937 - DNA, 21 bp, Artificial Sequence
  Synthetic: FXN 3 reverse 9:69040075-69040102; SaCas9
aattcccgatgtggcagtatt

SEQ ID NO: 18938 - DNA, 20 bp, Artificial Sequence
  Synthetic: FXN 3 reverse 9:69040076-69040102; SaCas9
attcccgatgtggcagtatt

SEQ ID NO: 18939 - DNA, 19 bp, Artificial Sequence
  Synthetic: FXN 3 reverse 9:69040077-69040102; SaCas9
ttcccgatgtggcagtatt

SEQ ID NO: 18940 - DNA, 18 bp, Artificial Sequence
  Synthetic: FXN 3 reverse 9:69040078-69040102; SaCas9
tcccgatgtggcagtatt

SEQ ID NO: 18941 - DNA, 25 bp, Artificial Sequence
  Synthetic: FXN 3 reverse 9:69040073-69040104; SaCas9
aaacttaattcccgatgtggcagta

SEQ ID NO: 18942 - DNA, 24 bp, Artificial Sequence
  Synthetic: FXN 3 reverse 9:69040074-69040104; SaCas9
aacttaattcccgatgtggcagta

SEQ ID NO: 18943 - DNA, 23 bp, Artificial Sequence
  Synthetic: FXN 3 reverse 9:69040075-69040104; SaCas9
acttaattcccgatgtggcagta

SEQ ID NO: 18944 - DNA, 22 bp, Artificial Sequence
  Synthetic: FXN 3 reverse 9:69040076-69040104; SaCas9
cttaattcccgatgtggcagta

SEQ ID NO: 18945 - DNA, 21 bp, Artificial Sequence
  Synthetic: FXN 3 reverse 9:69040077-69040104; SaCas9
ttaattcccgatgtggcagta

SEQ ID NO: 18946 - DNA, 20 bp, Artificial Sequence
  Synthetic: FXN 3 reverse 9:69040078-69040104; SaCas9
taattcccgatgtggcagta

SEQ ID NO: 18947 - DNA, 19 bp, Artificial Sequence
  Synthetic: FXN 3 reverse 9:69040079-69040104; SaCas9
aattcccgatgtggcagta

SEQ ID NO: 18948 - DNA, 18 bp, Artificial Sequence
  Synthetic: FXN 3 reverse 9:69040080-69040104; SaCas9
attcccgatgtggcagta

SEQ ID NO: 18949 - DNA, 25 bp, Artificial Sequence
  Synthetic: FXN 3 forward 9:69040083-69040114; SaCas9
gccacatcgggaattaagtttcaac

SEQ ID NO: 18950 - DNA, 24 bp, Artificial Sequence
  Synthetic: FXN 3 forward 9:69040084-69040114; SaCas9
ccacatcgggaattaagtttcaac

SEQ ID NO: 18951 - DNA, 23 bp, Artificial Sequence
  Synthetic: FXN 3 forward 9:69040085-69040114; SaCas9
cacatcgggaattaagtttcaac

SEQ ID NO: 18952 - DNA, 22 bp, Artificial Sequence
  Synthetic: FXN 3 forward 9:69040086-69040114; SaCas9
acatcgggaattaagtttcaac

SEQ ID NO: 18953 - DNA, 21 bp, Artificial Sequence
  Synthetic: FXN 3 forward 9:69040087-69040114; SaCas9
catcgggaattaagtttcaac

SEQ ID NO: 18954 - DNA, 20 bp, Artificial Sequence
  Synthetic: FXN 3 forward 9:69040088-69040114; SaCas9
atcgggaattaagtttcaac

SEQ ID NO: 18955 - DNA, 19 bp, Artificial Sequence
  Synthetic: FXN 3 forward 9:69040089-69040114; SaCas9
tcgggaattaagtttcaac

SEQ ID NO: 18956 - DNA, 18 bp, Artificial Sequence
  Synthetic: FXN 3 forward 9:69040090-69040114; SaCas9
cgggaattaagtttcaac

SEQ ID NO: 18957 - DNA, 25 bp, Artificial Sequence
  Synthetic: FXN 3 forward 9:69040090-69040121; SaCas9
cgggaattaagtttcaacatgagtt

SEQ ID NO: 18958 - DNA, 24 bp, Artificial Sequence
  Synthetic: FXN 3 forward 9:69040091-69040121; SaCas9
gggaattaagtttcaacatgagtt

SEQ ID NO: 18959 - DNA, 23 bp, Artificial Sequence
  Synthetic: FXN 3 forward 9:69040092-69040121; SaCas9
ggaattaagtttcaacatgagtt

SEQ ID NO: 18960 - DNA, 22 bp, Artificial Sequence
  Synthetic: FXN 3 forward 9:69040093-69040121; SaCas9
gaattaagtttcaacatgagtt

SEQ ID NO: 18961 - DNA, 21 bp, Artificial Sequence
  Synthetic: FXN 3 forward 9:69040094-69040121; SaCas9
aattaagtttcaacatgagtt

SEQ ID NO: 18962 - DNA, 20 bp, Artificial Sequence
  Synthetic: FXN 3 forward 9:69040095-69040121; SaCas9
attaagtttcaacatgagtt

SEQ ID NO: 18963 - DNA, 19 bp, Artificial Sequence
  Synthetic: FXN 3 forward 9:69040096-69040121; SaCas9
ttaagtttcaacatgagtt

SEQ ID NO: 18964 - DNA, 18 bp, Artificial Sequence
  Synthetic: FXN 3 forward 9:69040097-69040121; SaCas9
taagtttcaacatgagtt

SEQ ID NO: 18965 - DNA, 25 bp, Artificial Sequence
  Synthetic: FXN 3 forward 9:69040091-69040122; SaCas9
gggaattaagtttcaacatgagttt

SEQ ID NO: 18966 - DNA, 24 bp, Artificial Sequence
  Synthetic: FXN 3 forward 9:69040092-69040122; SaCas9
ggaattaagtttcaacatgagttt

SEQ ID NO: 18967 - DNA, 23 bp, Artificial Sequence
  Synthetic: FXN 3 forward 9:69040093-69040122; SaCas9
gaattaagtttcaacatgagttt

SEQ ID NO: 18968 - DNA, 22 bp, Artificial Sequence
  Synthetic: FXN 3 forward 9:69040094-69040122; SaCas9
aattaagtttcaacatgagttt

SEQ ID NO: 18969 - DNA, 21 bp, Artificial Sequence
  Synthetic: FXN 3 forward 9:69040095-69040122; SaCas9
attaagtttcaacatgagttt

SEQ ID NO: 18970 - DNA, 20 bp, Artificial Sequence
  Synthetic: FXN 3 forward 9:69040096-69040122; SaCas9
ttaagtttcaacatgagttt

SEQ ID NO: 18971 - DNA, 19 bp, Artificial Sequence
  Synthetic: FXN 3 forward 9:69040097-69040122; SaCas9
taagtttcaacatgagttt

SEQ ID NO: 18972 - DNA, 18 bp, Artificial Sequence
  Synthetic: FXN 3 forward 9:69040098-69040122; SaCas9
aagtttcaacatgagttt

SEQ ID NO: 18973 - DNA, 25 bp, Artificial Sequence
  Synthetic: FXN 3 reverse 9:69040101-69040132; SaCas9
atgtttgtcacctccgaaactcatg

SEQ ID NO: 18974 - DNA, 24 bp, Artificial Sequence
  Synthetic: FXN 3 reverse 9:69040102-69040132; SaCas9
tgtttgtcacctccgaaactcatg

SEQ ID NO: 18975 - DNA, 23 bp, Artificial Sequence
  Synthetic: FXN 3 reverse 9:69040103-69040132; SaCas9
gtttgtcacctccgaaactcatg

SEQ ID NO: 18976 - DNA, 22 bp, Artificial Sequence
  Synthetic: FXN 3 reverse 9:69040104-69040132; SaCas9
tttgtcacctccgaaactcatg

SEQ ID NO: 18977 - DNA, 21 bp, Artificial Sequence
  Synthetic: FXN 3 reverse 9:69040105-69040132; SaCas9
ttgtcacctccgaaactcatg

SEQ ID NO: 18978 - DNA, 20 bp, Artificial Sequence
  Synthetic: FXN 3 reverse 9:69040106-69040132; SaCas9
tgtcacctccgaaactcatg

SEQ ID NO: 18979 - DNA, 19 bp, Artificial Sequence
  Synthetic: FXN 3 reverse 9:69040107-69040132; SaCas9
gtcacctccgaaactcatg

SEQ ID NO: 18980 - DNA, 18 bp, Artificial Sequence
  Synthetic: FXN 3 reverse 9:69040108-69040132; SaCas9
tcacctccgaaactcatg

SEQ ID NO: 18981 - DNA, 25 bp, Artificial Sequence
  Synthetic: FXN 3 reverse 9:69040113-69040144; SaCas9
gctatggtttgaatgtttgtcacct

SEQ ID NO: 18982 - DNA, 24 bp, Artificial Sequence
  Synthetic: FXN 3 reverse 9:69040114-69040144; SaCas9
ctatggtttgaatgtttgtcacct

SEQ ID NO: 18983 - DNA, 23 bp, Artificial Sequence
  Synthetic: FXN 3 reverse 9:69040115-69040144; SaCas9
tatggtttgaatgtttgtcacct

SEQ ID NO: 18984 - DNA, 22 bp, Artificial Sequence
  Synthetic: FXN 3 reverse 9:69040116-69040144; SaCas9
atggtttgaatgtttgtcacct

SEQ ID NO: 18985 - DNA, 21 bp, Artificial Sequence
  Synthetic: FXN 3 reverse 9:69040117-69040144; SaCas9
tggtttgaatgtttgtcacct

SEQ ID NO: 18986 - DNA, 20 bp, Artificial Sequence
  Synthetic: FXN 3 reverse 9:69040118-69040144; SaCas9
ggtttgaatgtttgtcacct

SEQ ID NO: 18987 - DNA, 19 bp, Artificial Sequence
  Synthetic: FXN 3 reverse 9:69040119-69040144; SaCas9
gtttgaatgtttgtcacct

SEQ ID NO: 18988 - DNA, 18 bp, Artificial Sequence
  Synthetic: FXN 3 reverse 9:69040120-69040144; SaCas9
tttgaatgtttgtcacct

SEQ ID NO: 18989 - DNA, 25 bp, Artificial Sequence
  Synthetic: FXN 3 reverse 9:69040130-69040161; SaCas9
catttaagagacagcatgctatggt

SEQ ID NO: 18990 - DNA, 24 bp, Artificial Sequence
  Synthetic: FXN 3 reverse 9:69040131-69040161; SaCas9
atttaagagacagcatgctatggt

SEQ ID NO: 18991 - DNA, 23 bp, Artificial Sequence
  Synthetic: FXN 3 reverse 9:69040132-69040161; SaCas9
tttaagagacagcatgctatggt

SEQ ID NO: 18992 - DNA, 22 bp, Artificial Sequence
  Synthetic: FXN 3 reverse 9:69040133-69040161; SaCas9
ttaagagacagcatgctatggt

SEQ ID NO: 18993 - DNA, 21 bp, Artificial Sequence
  Synthetic: FXN 3 reverse 9:69040134-69040161; SaCas9
taagagacagcatgctatggt

SEQ ID NO: 18994 - DNA, 20 bp, Artificial Sequence
  Synthetic: FXN 3 reverse 9:69040135-69040161; SaCas9
aagagacagcatgctatggt

SEQ ID NO: 18995 - DNA, 19 bp, Artificial Sequence
  Synthetic: FXN 3 reverse 9:69040136-69040161; SaCas9
agagacagcatgctatggt

SEQ ID NO: 18996 - DNA, 18 bp, Artificial Sequence
  Synthetic: FXN 3 reverse 9:69040137-69040161; SaCas9
gagacagcatgctatggt

SEQ ID NO: 18997 - DNA, 25 bp, Artificial Sequence
  Synthetic: FXN 3 reverse 9:69040150-69040181; SaCas9
gccacaggagcttattgagtcattt

SEQ ID NO: 18998 - DNA, 24 bp, Artificial Sequence
  Synthetic: FXN 3 reverse 9:69040151-69040181; SaCas9
ccacaggagcttattgagtcattt

SEQ ID NO: 18999 - DNA, 23 bp, Artificial Sequence
  Synthetic: FXN 3 reverse 9:69040152-69040181; SaCas9
cacaggagcttattgagtcattt

SEQ ID NO: 19000 - DNA, 22 bp, Artificial Sequence
  Synthetic: FXN 3 reverse 9:69040153-69040181; SaCas9
acaggagcttattgagtcattt

SEQ ID NO: 19001 - DNA, 21 bp, Artificial Sequence
  Synthetic: FXN 3 reverse 9:69040154-69040181; SaCas9
caggagcttattgagtcattt

SEQ ID NO: 19002 - DNA, 20 bp, Artificial Sequence
  Synthetic: FXN 3 reverse 9:69040155-69040181; SaCas9
aggagcttattgagtcattt

SEQ ID NO: 19003 - DNA, 19 bp, Artificial Sequence
  Synthetic: FXN 3 reverse 9:69040156-69040181; SaCas9
ggagcttattgagtcattt

SEQ ID NO: 19004 - DNA, 18 bp, Artificial Sequence
  Synthetic: FXN 3 reverse 9:69040157-69040181; SaCas9
gagcttattgagtcattt

SEQ ID NO: 19005 - DNA, 25 bp, Artificial Sequence
  Synthetic: FXN 3 reverse 9:69040161-69040192; SaCas9
cagaagtggatgccacaggagctta

SEQ ID NO: 19006 - DNA, 24 bp, Artificial Sequence
  Synthetic: FXN 3 reverse 9:69040162-69040192; SaCas9
agaagtggatgccacaggagctta

SEQ ID NO: 19007 - DNA, 23 bp, Artificial Sequence
  Synthetic: FXN 3 reverse 9:69040163-69040192; SaCas9
gaagtggatgccacaggagctta

SEQ ID NO: 19008 - DNA, 22 bp, Artificial Sequence
  Synthetic: FXN 3 reverse 9:69040164-69040192; SaCas9
aagtggatgccacaggagctta

SEQ ID NO: 19009 - DNA, 21 bp, Artificial Sequence
  Synthetic: FXN 3 reverse 9:69040165-69040192; SaCas9
agtggatgccacaggagctta

SEQ ID NO: 19010 - DNA, 20 bp, Artificial Sequence
  Synthetic: FXN 3 reverse 9:69040166-69040192; SaCas9
gtggatgccacaggagctta

SEQ ID NO: 19011 - DNA, 19 bp, Artificial Sequence
  Synthetic: FXN 3 reverse 9:69040167-69040192; SaCas9
tggatgccacaggagctta

SEQ ID NO: 19012 - DNA, 18 bp, Artificial Sequence
  Synthetic: FXN 3 reverse 9:69040168-69040192; SaCas9
ggatgccacaggagctta

SEQ ID NO: 19013 - DNA, 25 bp, Artificial Sequence
  Synthetic: FXN 3 reverse 9:69040170-69040201; SaCas9
caaggcatgcagaagtggatgccac

SEQ ID NO: 19014 - DNA, 24 bp, Artificial Sequence
  Synthetic: FXN 3 reverse 9:69040171-69040201; SaCas9
aaggcatgcagaagtggatgccac

SEQ ID NO: 19015 - DNA, 23 bp, Artificial Sequence
  Synthetic: FXN 3 reverse 9:69040172-69040201; SaCas9
aggcatgcagaagtggatgccac

SEQ ID NO: 19016 - DNA, 22 bp, Artificial Sequence
  Synthetic: FXN 3 reverse 9:69040173-69040201; SaCas9
ggcatgcagaagtggatgccac

SEQ ID NO: 19017 - DNA, 21 bp, Artificial Sequence
  Synthetic: FXN 3 reverse 9:69040174-69040201; SaCas9
gcatgcagaagtggatgccac

SEQ ID NO: 19018 - DNA, 20 bp, Artificial Sequence
  Synthetic: FXN 3 reverse 9:69040175-69040201; SaCas9
catgcagaagtggatgccac

SEQ ID NO: 19019 - DNA, 19 bp, Artificial Sequence
  Synthetic: FXN 3 reverse 9:69040176-69040201; SaCas9
atgcagaagtggatgccac

SEQ ID NO: 19020 - DNA, 18 bp, Artificial Sequence
  Synthetic: FXN 3 reverse 9:69040177-69040201; SaCas9
tgcagaagtggatgccac

SEQ ID NO: 19021 - DNA, 25 bp, Artificial Sequence
  Synthetic: FXN 3 reverse 9:69040171-69040202; SaCas9
ccaaggcatgcagaagtggatgcca

SEQ ID NO: 19022 - DNA, 24 bp, Artificial Sequence
  Synthetic: FXN 3 reverse 9:69040172-69040202; SaCas9
caaggcatgcagaagtggatgcca

SEQ ID NO: 19023 - DNA, 23 bp, Artificial Sequence
  Synthetic: FXN 3 reverse 9:69040173-69040202; SaCas9
aaggcatgcagaagtggatgcca

SEQ ID NO: 19024 - DNA, 22 bp, Artificial Sequence
  Synthetic: FXN 3 reverse 9:69040174-69040202; SaCas9
aggcatgcagaagtggatgcca

SEQ ID NO: 19025 - DNA, 21 bp, Artificial Sequence
  Synthetic: FXN 3 reverse 9:69040175-69040202; SaCas9
ggcatgcagaagtggatgcca

SEQ ID NO: 19026 - DNA, 20 bp, Artificial Sequence
  Synthetic: FXN 3 reverse 9:69040176-69040202; SaCas9
gcatgcagaagtggatgcca

SEQ ID NO: 19027 - DNA, 19 bp, Artificial Sequence
  Synthetic: FXN 3 reverse 9:69040177-69040202; SaCas9
catgcagaagtggatgcca

SEQ ID NO: 19028 - DNA, 18 bp, Artificial Sequence
  Synthetic: FXN 3 reverse 9:69040178-69040202; SaCas9
atgcagaagtggatgcca

SEQ ID NO: 19029 - DNA, 25 bp, Artificial Sequence
  Synthetic: FXN 3 forward 9:69040173-69040204; SaCas9
cctgtggcatccacttctgcatgcc

SEQ ID NO: 19030 - DNA, 24 bp, Artificial Sequence
  Synthetic: FXN 3 forward 9:69040174-69040204; SaCas9
ctgtggcatccacttctgcatgcc

SEQ ID NO: 19031 - DNA, 23 bp, Artificial Sequence
  Synthetic: FXN 3 forward 9:69040175-69040204; SaCas9
tgtggcatccacttctgcatgcc

SEQ ID NO: 19032 - DNA, 22 bp, Artificial Sequence
  Synthetic: FXN 3 forward 9:69040176-69040204; SaCas9
gtggcatccacttctgcatgcc

SEQ ID NO: 19033 - DNA, 21 bp, Artificial Sequence
  Synthetic: FXN 3 forward 9:69040177-69040204; SaCas9
tggcatccacttctgcatgcc

SEQ ID NO: 19034 - DNA, 20 bp, Artificial Sequence
  Synthetic: FXN 3 forward 9:69040178-69040204; SaCas9
ggcatccacttctgcatgcc

SEQ ID NO: 19035 - DNA, 19 bp, Artificial Sequence
  Synthetic: FXN 3 forward 9:69040179-69040204; SaCas9
gcatccacttctgcatgcc

SEQ ID NO: 19036 - DNA, 18 bp, Artificial Sequence
  Synthetic: FXN 3 forward 9:69040180-69040204; SaCas9
catccacttctgcatgcc

SEQ ID NO: 19037 - DNA, 25 bp, Artificial Sequence
  Synthetic: FXN 3 reverse 9:69040181-69040212; SaCas9
taaaagctgcccaaggcatgcagaa

SEQ ID NO: 19038 - DNA, 24 bp, Artificial Sequence
  Synthetic: FXN 3 reverse 9:69040182-69040212; SaCas9
aaaagctgcccaaggcatgcagaa

SEQ ID NO: 19039 - DNA, 23 bp, Artificial Sequence
  Synthetic: FXN 3 reverse 9:69040183-69040212; SaCas9
aaagctgcccaaggcatgcagaa

SEQ ID NO: 19040 - DNA, 22 bp, Artificial Sequence
  Synthetic: FXN 3 reverse 9:69040184-69040212; SaCas9
aagctgcccaaggcatgcagaa

SEQ ID NO: 19041 - DNA, 21 bp, Artificial Sequence
  Synthetic: FXN 3 reverse 9:69040185-69040212; SaCas9
agctgcccaaggcatgcagaa

SEQ ID NO: 19042 - DNA, 20 bp, Artificial Sequence
  Synthetic: FXN 3 reverse 9:69040186-69040212; SaCas9
gctgcccaaggcatgcagaa

SEQ ID NO: 19043 - DNA, 19 bp, Artificial Sequence
  Synthetic: FXN 3 reverse 9:69040187-69040212; SaCas9
ctgcccaaggcatgcagaa

SEQ ID NO: 19044 - DNA, 18 bp, Artificial Sequence
  Synthetic: FXN 3 reverse 9:69040188-69040212; SaCas9
tgcccaaggcatgcagaa

SEQ ID NO: 19045 - DNA, 25 bp, Artificial Sequence
  Synthetic: FXN 3 reverse 9:69040186-69040217; SaCas9
atgtctaaaagctgcccaaggcatg

SEQ ID NO: 19046 - DNA, 24 bp, Artificial Sequence
  Synthetic: FXN 3 reverse 9:69040187-69040217; SaCas9
tgtctaaaagctgcccaaggcatg

SEQ ID NO: 19047 - DNA, 23 bp, Artificial Sequence
  Synthetic: FXN 3 reverse 9:69040188-69040217; SaCas9
gtctaaaagctgcccaaggcatg

SEQ ID NO: 19048 - DNA, 22 bp, Artificial Sequence
  Synthetic: FXN 3 reverse 9:69040189-69040217; SaCas9
tctaaaagctgcccaaggcatg

SEQ ID NO: 19049 - DNA, 21 bp, Artificial Sequence
  Synthetic: FXN 3 reverse 9:69040190-69040217; SaCas9
ctaaaagctgcccaaggcatg

SEQ ID NO: 19050 - DNA, 20 bp, Artificial Sequence
  Synthetic: FXN 3 reverse 9:69040191-69040217; SaCas9
taaaagctgcccaaggcatg

SEQ ID NO: 19051 - DNA, 19 bp, Artificial Sequence
  Synthetic: FXN 3 reverse 9:69040192-69040217; SaCas9
aaaagctgcccaaggcatg

SEQ ID NO: 19052 - DNA, 18 bp, Artificial Sequence
  Synthetic: FXN 3 reverse 9:69040193-69040217; SaCas9
aaagctgcccaaggcatg

SEQ ID NO: 19053 - DNA, 25 bp, Artificial Sequence
  Synthetic: FXN 3 forward 9:69040205-69040236; SaCas9
gcttttagacatctgtccattttcc

SEQ ID NO: 19054 - DNA, 24 bp, Artificial Sequence
  Synthetic: FXN 3 forward 9:69040206-69040236; SaCas9
cttttagacatctgtccattttcc

SEQ ID NO: 19055 - DNA, 23 bp, Artificial Sequence
  Synthetic: FXN 3 forward 9:69040207-69040236; SaCas9
ttttagacatctgtccattttcc

SEQ ID NO: 19056 - DNA, 22 bp, Artificial Sequence
  Synthetic: FXN 3 forward 9:69040208-69040236; SaCas9
tttagacatctgtccattttcc

SEQ ID NO: 19057 - DNA, 21 bp, Artificial Sequence
  Synthetic: FXN 3 forward 9:69040209-69040236; SaCas9
ttagacatctgtccattttcc

SEQ ID NO: 19058 - DNA, 20 bp, Artificial Sequence
  Synthetic: FXN 3 forward 9:69040210-69040236; SaCas9
tagacatctgtccattttcc

SEQ ID NO: 19059 - DNA, 19 bp, Artificial Sequence
  Synthetic: FXN 3 forward 9:69040211-69040236; SaCas9
agacatctgtccattttcc

SEQ ID NO: 19060 - DNA, 18 bp, Artificial Sequence
  Synthetic: FXN 3 forward 9:69040212-69040236; SaCas9
gacatctgtccattttcc

SEQ ID NO: 19061 - DNA, 25 bp, Artificial Sequence
  Synthetic: FXN 3 forward 9:69040207-69040238; SaCas9
ttttagacatctgtccattttccta

SEQ ID NO: 19062 - DNA, 24 bp, Artificial Sequence
  Synthetic: FXN 3 forward 9:69040208-69040238; SaCas9
tttagacatctgtccattttccta

SEQ ID NO: 19063 - DNA, 23 bp, Artificial Sequence
  Synthetic: FXN 3 forward 9:69040209-69040238; SaCas9
ttagacatctgtccattttccta

SEQ ID NO: 19064 - DNA, 22 bp, Artificial Sequence
  Synthetic: FXN 3 forward 9:69040210-69040238; SaCas9
tagacatctgtccattttccta

SEQ ID NO: 19065 - DNA, 21 bp, Artificial Sequence
  Synthetic: FXN 3 forward 9:69040211-69040238; SaCas9
agacatctgtccattttccta

SEQ ID NO: 19066 - DNA, 20 bp, Artificial Sequence
  Synthetic: FXN 3 forward 9:69040212-69040238; SaCas9
gacatctgtccattttccta

SEQ ID NO: 19067 - DNA, 19 bp, Artificial Sequence
  Synthetic: FXN 3 forward 9:69040213-69040238; SaCas9
acatctgtccattttccta

SEQ ID NO: 19068 - DNA, 18 bp, Artificial Sequence
  Synthetic: FXN 3 forward 9:69040214-69040238; SaCas9
catctgtccattttccta

SEQ ID NO: 19069 - DNA, 25 bp, Artificial Sequence
  Synthetic: FXN 3 forward 9:69040208-69040239; SaCas9
tttagacatctgtccattttcctag

SEQ ID NO: 19070 - DNA, 24 bp, Artificial Sequence
  Synthetic: FXN 3 forward 9:69040209-69040239; SaCas9
ttagacatctgtccattttcctag

SEQ ID NO: 19071 - DNA, 23 bp, Artificial Sequence
  Synthetic: FXN 3 forward 9:69040210-69040239; SaCas9
tagacatctgtccattttcctag

SEQ ID NO: 19072 - DNA, 22 bp, Artificial Sequence
  Synthetic: FXN 3 forward 9:69040211-69040239; SaCas9
agacatctgtccattttcctag

SEQ ID NO: 19073 - DNA, 21 bp, Artificial Sequence
  Synthetic: FXN 3 forward 9:69040212-69040239; SaCas9
gacatctgtccattttcctag

SEQ ID NO: 19074 - DNA, 20 bp, Artificial Sequence
  Synthetic: FXN 3 forward 9:69040213-69040239; SaCas9
acatctgtccattttcctag

SEQ ID NO: 19075 - DNA, 19 bp, Artificial Sequence
  Synthetic: FXN 3 forward 9:69040214-69040239; SaCas9
catctgtccattttcctag

SEQ ID NO: 19076 - DNA, 18 bp, Artificial Sequence
  Synthetic: FXN 3 forward 9:69040215-69040239; SaCas9
atctgtccattttcctag

SEQ ID NO: 19077 - DNA, 25 bp, Artificial Sequence
  Synthetic: FXN 3 reverse 9:69040219-69040250; SaCas9
gtggtggtcttgtccctctaggaaa

SEQ ID NO: 19078 - DNA, 24 bp, Artificial Sequence
  Synthetic: FXN 3 reverse 9:69040220-69040250; SaCas9
tggtggtcttgtccctctaggaaa

SEQ ID NO: 19079 - DNA, 23 bp, Artificial Sequence
  Synthetic: FXN 3 reverse 9:69040221-69040250; SaCas9
ggtggtcttgtccctctaggaaa

SEQ ID NO: 19080 - DNA, 22 bp, Artificial Sequence
  Synthetic: FXN 3 reverse 9:69040222-69040250; SaCas9
gtggtcttgtccctctaggaaa

SEQ ID NO: 19081 - DNA, 21 bp, Artificial Sequence
  Synthetic: FXN 3 reverse 9:69040223-69040250; SaCas9
tggtcttgtccctctaggaaa

SEQ ID NO: 19082 - DNA, 20 bp, Artificial Sequence
  Synthetic: FXN 3 reverse 9:69040224-69040250; SaCas9
ggtcttgtccctctaggaaa

SEQ ID NO: 19083 - DNA, 19 bp, Artificial Sequence
  Synthetic: FXN 3 reverse 9:69040225-69040250; SaCas9
gtcttgtccctctaggaaa

SEQ ID NO: 19084 - DNA, 18 bp, Artificial Sequence
  Synthetic: FXN 3 reverse 9:69040226-69040250; SaCas9
tcttgtccctctaggaaa

SEQ ID NO: 19085 - DNA, 25 bp, Artificial Sequence
  Synthetic: FXN 3 reverse 9:69040225-69040256; SaCas9
tcacaggtggtggtcttgtccctct

SEQ ID NO: 19086 - DNA, 24 bp, Artificial Sequence
  Synthetic: FXN 3 reverse 9:69040226-69040256; SaCas9
cacaggtggtggtcttgtccctct

SEQ ID NO: 19087 - DNA, 23 bp, Artificial Sequence
  Synthetic: FXN 3 reverse 9:69040227-69040256; SaCas9
acaggtggtggtcttgtccctct

SEQ ID NO: 19088 - DNA, 22 bp, Artificial Sequence
  Synthetic: FXN 3 reverse 9:69040228-69040256; SaCas9
caggtggtggtcttgtccctct

SEQ ID NO: 19089 - DNA, 21 bp, Artificial Sequence
  Synthetic: FXN 3 reverse 9:69040229-69040256; SaCas9
aggtggtggtcttgtccctct

SEQ ID NO: 19090 - DNA, 20 bp, Artificial Sequence
  Synthetic: FXN 3 reverse 9:69040230-69040256; SaCas9
ggtggtggtcttgtccctct

SEQ ID NO: 19091 - DNA, 19 bp, Artificial Sequence
  Synthetic: FXN 3 reverse 9:69040231-69040256; SaCas9
gtggtggtcttgtccctct

SEQ ID NO: 19092 - DNA, 18 bp, Artificial Sequence
  Synthetic: FXN 3 reverse 9:69040232-69040256; SaCas9
tggtggtcttgtccctct

SEQ ID NO: 19093 - DNA, 25 bp, Artificial Sequence
  Synthetic: FXN 3 reverse 9:69040226-69040257; SaCas9
atcacaggtggtggtcttgtccctc

SEQ ID NO: 19094 - DNA, 24 bp, Artificial Sequence
  Synthetic: FXN 3 reverse 9:69040227-69040257; SaCas9
tcacaggtggtggtcttgtccctc

SEQ ID NO: 19095 - DNA, 23 bp, Artificial Sequence
  Synthetic: FXN 3 reverse 9:69040228-69040257; SaCas9
cacaggtggtggtcttgtccctc

SEQ ID NO: 19096 - DNA, 22 bp, Artificial Sequence
  Synthetic: FXN 3 reverse 9:69040229-69040257; SaCas9
acaggtggtggtcttgtccctc

SEQ ID NO: 19097 - DNA, 21 bp, Artificial Sequence
  Synthetic: FXN 3 reverse 9:69040230-69040257; SaCas9
caggtggtggtcttgtccctc

SEQ ID NO: 19098 - DNA, 20 bp, Artificial Sequence
  Synthetic: FXN 3 reverse 9:69040231-69040257; SaCas9
aggtggtggtcttgtccctc

SEQ ID NO: 19099 - DNA, 19 bp, Artificial Sequence
  Synthetic: FXN 3 reverse 9:69040232-69040257; SaCas9
ggtggtggtcttgtccctc

SEQ ID NO: 19100 - DNA, 18 bp, Artificial Sequence
  Synthetic: FXN 3 reverse 9:69040233-69040257; SaCas9
gtggtggtcttgtccctc

SEQ ID NO: 19101 - DNA, 25 bp, Artificial Sequence
  Synthetic: FXN 3 reverse 9:69040255-69040286; SaCas9
tgttaggcctaaagccaaaaggtca

SEQ ID NO: 19102 - DNA, 24 bp, Artificial Sequence
  Synthetic: FXN 3 reverse 9:69040256-69040286; SaCas9
gttaggcctaaagccaaaaggtca

SEQ ID NO: 19103 - DNA, 23 bp, Artificial Sequence
  Synthetic: FXN 3 reverse 9:69040257-69040286; SaCas9
ttaggcctaaagccaaaaggtca

SEQ ID NO: 19104 - DNA, 22 bp, Artificial Sequence
  Synthetic: FXN 3 reverse 9:69040258-69040286; SaCas9
taggcctaaagccaaaaggtca

SEQ ID NO: 19105 - DNA, 21 bp, Artificial Sequence
  Synthetic: FXN 3 reverse 9:69040259-69040286; SaCas9
aggcctaaagccaaaaggtca

SEQ ID NO: 19106 - DNA, 20 bp, Artificial Sequence
  Synthetic: FXN 3 reverse 9:69040260-69040286; SaCas9
ggcctaaagccaaaaggtca

SEQ ID NO: 19107 - DNA, 19 bp, Artificial Sequence
  Synthetic: FXN 3 reverse 9:69040261-69040286; SaCas9
gcctaaagccaaaaggtca

SEQ ID NO: 19108 - DNA, 18 bp, Artificial Sequence
  Synthetic: FXN 3 reverse 9:69040262-69040286; SaCas9
cctaaagccaaaaggtca

SEQ ID NO: 19109 - DNA, 25 bp, Artificial Sequence
  Synthetic: FXN 3 reverse 9:69040296-69040327; SaCas9
caataaaaatgatttgaaagtgagt

SEQ ID NO: 19110 - DNA, 24 bp, Artificial Sequence
  Synthetic: FXN 3 reverse 9:69040297-69040327; SaCas9
aataaaaatgatttgaaagtgagt

SEQ ID NO: 19111 - DNA, 23 bp, Artificial Sequence
  Synthetic: FXN 3 reverse 9:69040298-69040327; SaCas9
ataaaaatgatttgaaagtgagt

SEQ ID NO: 19112 - DNA, 22 bp, Artificial Sequence
  Synthetic: FXN 3 reverse 9:69040299-69040327; SaCas9
taaaaatgatttgaaagtgagt

SEQ ID NO: 19113 - DNA, 21 bp, Artificial Sequence
  Synthetic: FXN 3 reverse 9:69040300-69040327; SaCas9
aaaaatgatttgaaagtgagt

SEQ ID NO: 19114 - DNA, 20 bp, Artificial Sequence
  Synthetic: FXN 3 reverse 9:69040301-69040327; SaCas9
aaaatgatttgaaagtgagt

SEQ ID NO: 19115 - DNA, 19 bp, Artificial Sequence
  Synthetic: FXN 3 reverse 9:69040302-69040327; SaCas9
aaatgatttgaaagtgagt

SEQ ID NO: 19116 - DNA, 18 bp, Artificial Sequence
  Synthetic: FXN 3 reverse 9:69040303-69040327; SaCas9
aatgatttgaaagtgagt

SEQ ID NO: 19117 - DNA, 25 bp, Artificial Sequence
  Synthetic: FXN 3 reverse 9:69040298-69040329; SaCas9
gacaataaaaatgatttgaaagtga

SEQ ID NO: 19118 - DNA, 24 bp, Artificial Sequence
  Synthetic: FXN 3 reverse 9:69040299-69040329; SaCas9
acaataaaaatgatttgaaagtga

SEQ ID NO: 19119 - DNA, 23 bp, Artificial Sequence
  Synthetic: FXN 3 reverse 9:69040300-69040329; SaCas9
caataaaaatgatttgaaagtga

SEQ ID NO: 19120 - DNA, 22 bp, Artificial Sequence
  Synthetic: FXN 3 reverse 9:69040301-69040329; SaCas9
aataaaaatgatttgaaagtga

SEQ ID NO: 19121 - DNA, 21 bp, Artificial Sequence
  Synthetic: FXN 3 reverse 9:69040302-69040329; SaCas9
ataaaaatgatttgaaagtga

SEQ ID NO: 19122 - DNA, 20 bp, Artificial Sequence
  Synthetic: FXN 3 reverse 9:69040303-69040329; SaCas9
taaaaatgatttgaaagtga

SEQ ID NO: 19123 - DNA, 19 bp, Artificial Sequence
  Synthetic: FXN 3 reverse 9:69040304-69040329; SaCas9
aaaaatgatttgaaagtga

SEQ ID NO: 19124 - DNA, 18 bp, Artificial Sequence
  Synthetic: FXN 3 reverse 9:69040305-69040329; SaCas9
aaaatgatttgaaagtga

SEQ ID NO: 19125 - DNA, 25 bp, Artificial Sequence
  Synthetic: FXN 3 reverse 9:69040302-69040333; SaCas9
gcaagacaataaaaatgatttgaaa

SEQ ID NO: 19126 - DNA, 24 bp, Artificial Sequence
  Synthetic: FXN 3 reverse 9:69040303-69040333; SaCas9
caagacaataaaaatgatttgaaa

SEQ ID NO: 19127 - DNA, 23 bp, Artificial Sequence
  Synthetic: FXN 3 reverse 9:69040304-69040333; SaCas9
aagacaataaaaatgatttgaaa

SEQ ID NO: 19128 - DNA, 22 bp, Artificial Sequence
  Synthetic: FXN 3 reverse 9:69040305-69040333; SaCas9
agacaataaaaatgatttgaaa

SEQ ID NO: 19129 - DNA, 21 bp, Artificial Sequence
  Synthetic: FXN 3 reverse 9:69040306-69040333; SaCas9
gacaataaaaatgatttgaaa

SEQ ID NO: 19130 - DNA, 20 bp, Artificial Sequence
  Synthetic: FXN 3 reverse 9:69040307-69040333; SaCas9
acaataaaaatgatttgaaa

SEQ ID NO: 19131 - DNA, 19 bp, Artificial Sequence
  Synthetic: FXN 3 reverse 9:69040308-69040333; SaCas9
caataaaaatgatttgaaa

SEQ ID NO: 19132 - DNA, 18 bp, Artificial Sequence
  Synthetic: FXN 3 reverse 9:69040309-69040333; SaCas9
aataaaaatgatttgaaa

SEQ ID NO: 19133 - DNA, 25 bp, Artificial Sequence
  Synthetic: FXN 3 reverse 9:69040308-69040339; SaCas9
ttgtctgcaagacaataaaaatgat

SEQ ID NO: 19134 - DNA, 24 bp, Artificial Sequence
  Synthetic: FXN 3 reverse 9:69040309-69040339; SaCas9
tgtctgcaagacaataaaaatgat

SEQ ID NO: 19135 - DNA, 23 bp, Artificial Sequence
  Synthetic: FXN 3 reverse 9:69040310-69040339; SaCas9
gtctgcaagacaataaaaatgat

SEQ ID NO: 19136 - DNA, 22 bp, Artificial Sequence
  Synthetic: FXN 3 reverse 9:69040311-69040339; SaCas9
tctgcaagacaataaaaatgat

SEQ ID NO: 19137 - DNA, 21 bp, Artificial Sequence
  Synthetic: FXN 3 reverse 9:69040312-69040339; SaCas9
ctgcaagacaataaaaatgat

SEQ ID NO: 19138 - DNA, 20 bp, Artificial Sequence
  Synthetic: FXN 3 reverse 9:69040313-69040339; SaCas9
tgcaagacaataaaaatgat

SEQ ID NO: 19139 - DNA, 19 bp, Artificial Sequence
  Synthetic: FXN 3 reverse 9:69040314-69040339; SaCas9
gcaagacaataaaaatgat

SEQ ID NO: 19140 - DNA, 18 bp, Artificial Sequence
  Synthetic: FXN 3 reverse 9:69040315-69040339; SaCas9
caagacaataaaaatgat

SEQ ID NO: 19141 - DNA, 25 bp, Artificial Sequence
  Synthetic: FXN 3 forward 9:69040332-69040363; SaCas9
cagacaatttacacaagtttacaca

SEQ ID NO: 19142 - DNA, 24 bp, Artificial Sequence
  Synthetic: FXN 3 forward 9:69040333-69040363; SaCas9
agacaatttacacaagtttacaca

SEQ ID NO: 19143 - DNA, 23 bp, Artificial Sequence
  Synthetic: FXN 3 forward 9:69040334-69040363; SaCas9
gacaatttacacaagtttacaca

SEQ ID NO: 19144 - DNA, 22 bp, Artificial Sequence
  Synthetic: FXN 3 forward 9:69040335-69040363; SaCas9
acaatttacacaagtttacaca

SEQ ID NO: 19145 - DNA, 21 bp, Artificial Sequence
  Synthetic: FXN 3 forward 9:69040336-69040363; SaCas9
caatttacacaagtttacaca

SEQ ID NO: 19146 - DNA, 20 bp, Artificial Sequence
  Synthetic: FXN 3 forward 9:69040337-69040363; SaCas9
aatttacacaagtttacaca

SEQ ID NO: 19147 - DNA, 19 bp, Artificial Sequence
  Synthetic: FXN 3 forward 9:69040338-69040363; SaCas9
atttacacaagtttacaca

SEQ ID NO: 19148 - DNA, 18 bp, Artificial Sequence
  Synthetic: FXN 3 forward 9:69040339-69040363; SaCas9
tttacacaagtttacaca

SEQ ID NO: 19149 - DNA, 25 bp, Artificial Sequence
  Synthetic: FXN 3 forward 9:69040337-69040368; SaCas9
aatttacacaagtttacacatagaa

SEQ ID NO: 19150 - DNA, 24 bp, Artificial Sequence
  Synthetic: FXN 3 forward 9:69040338-69040368; SaCas9
atttacacaagtttacacatagaa

SEQ ID NO: 19151 - DNA, 23 bp, Artificial Sequence
  Synthetic: FXN 3 forward 9:69040339-69040368; SaCas9
tttacacaagtttacacatagaa

SEQ ID NO: 19152 - DNA, 22 bp, Artificial Sequence
  Synthetic: FXN 3 forward 9:69040340-69040368; SaCas9
ttacacaagtttacacatagaa

SEQ ID NO: 19153 - DNA, 21 bp, Artificial Sequence
  Synthetic: FXN 3 forward 9:69040341-69040368; SaCas9
tacacaagtttacacatagaa

SEQ ID NO: 19154 - DNA, 20 bp, Artificial Sequence
  Synthetic: FXN 3 forward 9:69040342-69040368; SaCas9
acacaagtttacacatagaa

SEQ ID NO: 19155 - DNA, 19 bp, Artificial Sequence
  Synthetic: FXN 3 forward 9:69040343-69040368; SaCas9
cacaagtttacacatagaa

SEQ ID NO: 19156 - DNA, 18 bp, Artificial Sequence
  Synthetic: FXN 3 forward 9:69040344-69040368; SaCas9
acaagtttacacatagaa

SEQ ID NO: 19157 - DNA, 25 bp, Artificial Sequence
  Synthetic: FXN 3 forward 9:69040363-69040394; SaCas9
aggatatgtaaatatttatacgctg

SEQ ID NO: 19158 - DNA, 24 bp, Artificial Sequence
  Synthetic: FXN 3 forward 9:69040364-69040394; SaCas9
ggatatgtaaatatttatacgctg

SEQ ID NO: 19159 - DNA, 23 bp, Artificial Sequence
  Synthetic: FXN 3 forward 9:69040365-69040394; SaCas9
gatatgtaaatatttatacgctg

SEQ ID NO: 19160 - DNA, 22 bp, Artificial Sequence
  Synthetic: FXN 3 forward 9:69040366-69040394; SaCas9
atatgtaaatatttatacgctg

SEQ ID NO: 19161 - DNA, 21 bp, Artificial Sequence
  Synthetic: FXN 3 forward 9:69040367-69040394; SaCas9
tatgtaaatatttatacgctg

SEQ ID NO: 19162 - DNA, 20 bp, Artificial Sequence
  Synthetic: FXN 3 forward 9:69040368-69040394; SaCas9
atgtaaatatttatacgctg

SEQ ID NO: 19163 - DNA, 19 bp, Artificial Sequence
  Synthetic: FXN 3 forward 9:69040369-69040394; SaCas9
tgtaaatatttatacgctg

SEQ ID NO: 19164 - DNA, 18 bp, Artificial Sequence
  Synthetic: FXN 3 forward 9:69040370-69040394; SaCas9
gtaaatatttatacgctg

SEQ ID NO: 19165 - DNA, 25 bp, Artificial Sequence
  Synthetic: FXN 3 forward 9:69040399-69040430; SaCas9
ggctcacgcctgtaatcccagcact

SEQ ID NO: 19166 - DNA, 24 bp, Artificial Sequence
  Synthetic: FXN 3 forward 9:69040400-69040430; SaCas9
gctcacgcctgtaatcccagcact

SEQ ID NO: 19167 - DNA, 23 bp, Artificial Sequence
  Synthetic: FXN 3 forward 9:69040401-69040430; SaCas9
ctcacgcctgtaatcccagcact

SEQ ID NO: 19168 - DNA, 22 bp, Artificial Sequence
  Synthetic: FXN 3 forward 9:69040402-69040430; SaCas9
tcacgcctgtaatcccagcact

SEQ ID NO: 19169 - DNA, 21 bp, Artificial Sequence
  Synthetic: FXN 3 forward 9:69040403-69040430; SaCas9
cacgcctgtaatcccagcact

SEQ ID NO: 19170 - DNA, 20 bp, Artificial Sequence
  Synthetic: FXN 3 forward 9:69040404-69040430; SaCas9
acgcctgtaatcccagcact

SEQ ID NO: 19171 - DNA, 19 bp, Artificial Sequence
  Synthetic: FXN 3 forward 9:69040405-69040430; SaCas9
cgcctgtaatcccagcact

SEQ ID NO: 19172 - DNA, 18 bp, Artificial Sequence
  Synthetic: FXN 3 forward 9:69040406-69040430; SaCas9
gcctgtaatcccagcact

SEQ ID NO: 19173 - DNA, 25 bp, Artificial Sequence
  Synthetic: FXN 3 forward 9:69040400-69040431; SaCas9
gctcacgcctgtaatcccagcactt

SEQ ID NO: 19174 - DNA, 24 bp, Artificial Sequence
  Synthetic: FXN 3 forward 9:69040401-69040431; SaCas9
ctcacgcctgtaatcccagcactt

SEQ ID NO: 19175 - DNA, 23 bp, Artificial Sequence
  Synthetic: FXN 3 forward 9:69040402-69040431; SaCas9
tcacgcctgtaatcccagcactt

SEQ ID NO: 19176 - DNA, 22 bp, Artificial Sequence
  Synthetic: FXN 3 forward 9:69040403-69040431; SaCas9
cacgcctgtaatcccagcactt

SEQ ID NO: 19177 - DNA, 21 bp, Artificial Sequence
  Synthetic: FXN 3 forward 9:69040404-69040431; SaCas9
acgcctgtaatcccagcactt

SEQ ID NO: 19178 - DNA, 20 bp, Artificial Sequence
  Synthetic: FXN 3 forward 9:69040405-69040431; SaCas9
cgcctgtaatcccagcactt

SEQ ID NO: 19179 - DNA, 19 bp, Artificial Sequence
  Synthetic: FXN 3 forward 9:69040406-69040431; SaCas9
gcctgtaatcccagcactt

SEQ ID NO: 19180 - DNA, 18 bp, Artificial Sequence
  Synthetic: FXN 3 forward 9:69040407-69040431; SaCas9
cctgtaatcccagcactt

SEQ ID NO: 19181 - DNA, 25 bp, Artificial Sequence
  Synthetic: FXN 3 reverse 9:69040400-69040431; SaCas9
ctcccaaagtgctgggattacaggc

SEQ ID NO: 19182 - DNA, 24 bp, Artificial Sequence
  Synthetic: FXN 3 reverse 9:69040401-69040431; SaCas9
tcccaaagtgctgggattacaggc

SEQ ID NO: 19183 - DNA, 23 bp, Artificial Sequence
  Synthetic: FXN 3 reverse 9:69040402-69040431; SaCas9
cccaaagtgctgggattacaggc

SEQ ID NO: 19184 - DNA, 22 bp, Artificial Sequence
  Synthetic: FXN 3 reverse 9:69040403-69040431; SaCas9
ccaaagtgctgggattacaggc

SEQ ID NO: 19185 - DNA, 21 bp, Artificial Sequence
  Synthetic: FXN 3 reverse 9:69040404-69040431; SaCas9
caaagtgctgggattacaggc

SEQ ID NO: 19186 - DNA, 20 bp, Artificial Sequence
  Synthetic: FXN 3 reverse 9:69040405-69040431; SaCas9
aaagtgctgggattacaggc

SEQ ID NO: 19187 - DNA, 19 bp, Artificial Sequence
  Synthetic: FXN 3 reverse 9:69040406-69040431; SaCas9
aagtgctgggattacaggc

SEQ ID NO: 19188 - DNA, 18 bp, Artificial Sequence
  Synthetic: FXN 3 reverse 9:69040407-69040431; SaCas9
agtgctgggattacaggc

SEQ ID NO: 19189 - DNA, 25 bp, Artificial Sequence
  Synthetic: FXN 3 forward 9:69040401-69040432; SaCas9
ctcacgcctgtaatcccagcacttt

SEQ ID NO: 19190 - DNA, 24 bp, Artificial Sequence
  Synthetic: FXN 3 forward 9:69040402-69040432; SaCas9
tcacgcctgtaatcccagcacttt

SEQ ID NO: 19191 - DNA, 23 bp, Artificial Sequence
  Synthetic: FXN 3 forward 9:69040403-69040432; SaCas9
cacgcctgtaatcccagcacttt

SEQ ID NO: 19192 - DNA, 22 bp, Artificial Sequence
  Synthetic: FXN 3 forward 9:69040404-69040432; SaCas9
acgcctgtaatcccagcacttt

SEQ ID NO: 19193 - DNA, 21 bp, Artificial Sequence
  Synthetic: FXN 3 forward 9:69040405-69040432; SaCas9
cgcctgtaatcccagcacttt

SEQ ID NO: 19194 - DNA, 20 bp, Artificial Sequence
  Synthetic: FXN 3 forward 9:69040406-69040432; SaCas9
gcctgtaatcccagcacttt

SEQ ID NO: 19195 - DNA, 19 bp, Artificial Sequence
  Synthetic: FXN 3 forward 9:69040407-69040432; SaCas9
cctgtaatcccagcacttt

SEQ ID NO: 19196 - DNA, 18 bp, Artificial Sequence
  Synthetic: FXN 3 forward 9:69040408-69040432; SaCas9
ctgtaatcccagcacttt

SEQ ID NO: 19197 - DNA, 25 bp, Artificial Sequence
  Synthetic: FXN 3 forward 9:69040407-69040438; SaCas9
cctgtaatcccagcactttgggagg

SEQ ID NO: 19198 - DNA, 24 bp, Artificial Sequence
  Synthetic: FXN 3 forward 9:69040408-69040438; SaCas9
ctgtaatcccagcactttgggagg

SEQ ID NO: 19199 - DNA, 23 bp, Artificial Sequence
  Synthetic: FXN 3 forward 9:69040409-69040438; SaCas9
tgtaatcccagcactttgggagg

SEQ ID NO: 19200 - DNA, 22 bp, Artificial Sequence
  Synthetic: FXN 3 forward 9:69040410-69040438; SaCas9
gtaatcccagcactttgggagg

SEQ ID NO: 19201 - DNA, 21 bp, Artificial Sequence
  Synthetic: FXN 3 forward 9:69040411-69040438; SaCas9
taatcccagcactttgggagg

SEQ ID NO: 19202 - DNA, 20 bp, Artificial Sequence
  Synthetic: FXN 3 forward 9:69040412-69040438; SaCas9
aatcccagcactttgggagg

SEQ ID NO: 19203 - DNA, 19 bp, Artificial Sequence
  Synthetic: FXN 3 forward 9:69040413-69040438; SaCas9
atcccagcactttgggagg

SEQ ID NO: 19204 - DNA, 18 bp, Artificial Sequence
  Synthetic: FXN 3 forward 9:69040414-69040438; SaCas9
tcccagcactttgggagg

SEQ ID NO: 19205 - DNA, 25 bp, Artificial Sequence
  Synthetic: FXN 3 reverse 9:69040413-69040444; SaCas9
cacctgcctcggcctcccaaagtgc

SEQ ID NO: 19206 - DNA, 24 bp, Artificial Sequence
  Synthetic: FXN 3 reverse 9:69040414-69040444; SaCas9
acctgcctcggcctcccaaagtgc

SEQ ID NO: 19207 - DNA, 23 bp, Artificial Sequence
  Synthetic: FXN 3 reverse 9:69040415-69040444; SaCas9
cctgcctcggcctcccaaagtgc

SEQ ID NO: 19208 - DNA, 22 bp, Artificial Sequence
  Synthetic: FXN 3 reverse 9:69040416-69040444; SaCas9
ctgcctcggcctcccaaagtgc

SEQ ID NO: 19209 - DNA, 21 bp, Artificial Sequence
  Synthetic: FXN 3 reverse 9:69040417-69040444; SaCas9
tgcctcggcctcccaaagtgc

SEQ ID NO: 19210 - DNA, 20 bp, Artificial Sequence
  Synthetic: FXN 3 reverse 9:69040418-69040444; SaCas9
gcctcggcctcccaaagtgc

SEQ ID NO: 19211 - DNA, 19 bp, Artificial Sequence
  Synthetic: FXN 3 reverse 9:69040419-69040444; SaCas9
cctcggcctcccaaagtgc

SEQ ID NO: 19212 - DNA, 18 bp, Artificial Sequence
  Synthetic: FXN 3 reverse 9:69040420-69040444; SaCas9
ctcggcctcccaaagtgc

SEQ ID NO: 19213 - DNA, 25 bp, Artificial Sequence
  Synthetic: FXN 3 reverse 9:69040414-69040445; SaCas9
ccacctgcctcggcctcccaaagtg

SEQ ID NO: 19214 - DNA, 24 bp, Artificial Sequence
  Synthetic: FXN 3 reverse 9:69040415-69040445; SaCas9
cacctgcctcggcctcccaaagtg

SEQ ID NO: 19215 - DNA, 23 bp, Artificial Sequence
  Synthetic: FXN 3 reverse 9:69040416-69040445; SaCas9
acctgcctcggcctcccaaagtg

SEQ ID NO: 19216 - DNA, 22 bp, Artificial Sequence
  Synthetic: FXN 3 reverse 9:69040417-69040445; SaCas9
cctgcctcggcctcccaaagtg

SEQ ID NO: 19217 - DNA, 21 bp, Artificial Sequence
  Synthetic: FXN 3 reverse 9:69040418-69040445; SaCas9
ctgcctcggcctcccaaagtg

SEQ ID NO: 19218 - DNA, 20 bp, Artificial Sequence
  Synthetic: FXN 3 reverse 9:69040419-69040445; SaCas9
tgcctcggcctcccaaagtg

SEQ ID NO: 19219 - DNA, 19 bp, Artificial Sequence
  Synthetic: FXN 3 reverse 9:69040420-69040445; SaCas9
gcctcggcctcccaaagtg

SEQ ID NO: 19220 - DNA, 18 bp, Artificial Sequence
  Synthetic: FXN 3 reverse 9:69040421-69040445; SaCas9
cctcggcctcccaaagtg

SEQ ID NO: 19221 - DNA, 25 bp, Artificial Sequence
  Synthetic: FXN 3 forward 9:69040416-69040447; SaCas9
ccagcactttgggaggccgaggcag

SEQ ID NO: 19222 - DNA, 24 bp, Artificial Sequence
  Synthetic: FXN 3 forward 9:69040417-69040447; SaCas9
cagcactttgggaggccgaggcag

SEQ ID NO: 19223 - DNA, 23 bp, Artificial Sequence
  Synthetic: FXN 3 forward 9:69040418-69040447; SaCas9
agcactttgggaggccgaggcag

SEQ ID NO: 19224 - DNA, 22 bp, Artificial Sequence
  Synthetic: FXN 3 forward 9:69040419-69040447; SaCas9
gcactttgggaggccgaggcag

SEQ ID NO: 19225 - DNA, 21 bp, Artificial Sequence
  Synthetic: FXN 3 forward 9:69040420-69040447; SaCas9
cactttgggaggccgaggcag

SEQ ID NO: 19226 - DNA, 20 bp, Artificial Sequence
  Synthetic: FXN 3 forward 9:69040421-69040447; SaCas9
actttgggaggccgaggcag

SEQ ID NO: 19227 - DNA, 19 bp, Artificial Sequence
  Synthetic: FXN 3 forward 9:69040422-69040447; SaCas9
ctttgggaggccgaggcag

SEQ ID NO: 19228 - DNA, 18 bp, Artificial Sequence
  Synthetic: FXN 3 forward 9:69040423-69040447; SaCas9
tttgggaggccgaggcag

SEQ ID NO: 19229 - DNA, 25 bp, Artificial Sequence
  Synthetic: FXN 3 forward 9:69040423-69040454; SaCas9
tttgggaggccgaggcaggtggatc

SEQ ID NO: 19230 - DNA, 24 bp, Artificial Sequence
  Synthetic: FXN 3 forward 9:69040424-69040454; SaCas9
ttgggaggccgaggcaggtggatc

SEQ ID NO: 19231 - DNA, 23 bp, Artificial Sequence
  Synthetic: FXN 3 forward 9:69040425-69040454; SaCas9
tgggaggccgaggcaggtggatc

SEQ ID NO: 19232 - DNA, 22 bp, Artificial Sequence
  Synthetic: FXN 3 forward 9:69040426-69040454; SaCas9
gggaggccgaggcaggtggatc

SEQ ID NO: 19233 - DNA, 21 bp, Artificial Sequence
  Synthetic: FXN 3 forward 9:69040427-69040454; SaCas9
ggaggccgaggcaggtggatc

SEQ ID NO: 19234 - DNA, 20 bp, Artificial Sequence
  Synthetic: FXN 3 forward 9:69040428-69040454; SaCas9
gaggccgaggcaggtggatc

SEQ ID NO: 19235 - DNA, 19 bp, Artificial Sequence
  Synthetic: FXN 3 forward 9:69040429-69040454; SaCas9
aggccgaggcaggtggatc

SEQ ID NO: 19236 - DNA, 18 bp, Artificial Sequence
  Synthetic: FXN 3 forward 9:69040430-69040454; SaCas9
ggccgaggcaggtggatc

SEQ ID NO: 19237 - DNA, 25 bp, Artificial Sequence
  Synthetic: FXN 3 forward 9:69040430-69040461; SaCas9
ggccgaggcaggtggatcacgagtt

SEQ ID NO: 19238 - DNA, 24 bp, Artificial Sequence
  Synthetic: FXN 3 forward 9:69040431-69040461; SaCas9
gccgaggcaggtggatcacgagtt

SEQ ID NO: 19239 - DNA, 23 bp, Artificial Sequence
  Synthetic: FXN 3 forward 9:69040432-69040461; SaCas9
ccgaggcaggtggatcacgagtt

SEQ ID NO: 19240 - DNA, 22 bp, Artificial Sequence
  Synthetic: FXN 3 forward 9:69040433-69040461; SaCas9
cgaggcaggtggatcacgagtt

SEQ ID NO: 19241 - DNA, 21 bp, Artificial Sequence
  Synthetic: FXN 3 forward 9:69040434-69040461; SaCas9
gaggcaggtggatcacgagtt

SEQ ID NO: 19242 - DNA, 20 bp, Artificial Sequence
  Synthetic: FXN 3 forward 9:69040435-69040461; SaCas9
aggcaggtggatcacgagtt

SEQ ID NO: 19243 - DNA, 19 bp, Artificial Sequence
  Synthetic: FXN 3 forward 9:69040436-69040461; SaCas9
ggcaggtggatcacgagtt

SEQ ID NO: 19244 - DNA, 18 bp, Artificial Sequence
  Synthetic: FXN 3 forward 9:69040437-69040461; SaCas9
gcaggtggatcacgagtt

SEQ ID NO: 19245 - DNA, 25 bp, Artificial Sequence
  Synthetic: FXN 3 forward 9:69040431-69040462; SaCas9
gccgaggcaggtggatcacgagttc

SEQ ID NO: 19246 - DNA, 24 bp, Artificial Sequence
  Synthetic: FXN 3 forward 9:69040432-69040462; SaCas9
ccgaggcaggtggatcacgagttc

SEQ ID NO: 19247 - DNA, 23 bp, Artificial Sequence
  Synthetic: FXN 3 forward 9:69040433-69040462; SaCas9
cgaggcaggtggatcacgagttc

SEQ ID NO: 19248 - DNA, 22 bp, Artificial Sequence
  Synthetic: FXN 3 forward 9:69040434-69040462; SaCas9
gaggcaggtggatcacgagttc

SEQ ID NO: 19249 - DNA, 21 bp, Artificial Sequence
  Synthetic: FXN 3 forward 9:69040435-69040462; SaCas9
aggcaggtggatcacgagttc

SEQ ID NO: 19250 - DNA, 20 bp, Artificial Sequence
  Synthetic: FXN 3 forward 9:69040436-69040462; SaCas9
ggcaggtggatcacgagttc

SEQ ID NO: 19251 - DNA, 19 bp, Artificial Sequence
  Synthetic: FXN 3 forward 9:69040437-69040462; SaCas9
gcaggtggatcacgagttc

SEQ ID NO: 19252 - DNA, 18 bp, Artificial Sequence
  Synthetic: FXN 3 forward 9:69040438-69040462; SaCas9
caggtggatcacgagttc

SEQ ID NO: 19253 - DNA, 25 bp, Artificial Sequence
  Synthetic: FXN 3 forward 9:69040436-69040467; SaCas9
ggcaggtggatcacgagttcaggag

SEQ ID NO: 19254 - DNA, 24 bp, Artificial Sequence
  Synthetic: FXN 3 forward 9:69040437-69040467; SaCas9
gcaggtggatcacgagttcaggag

SEQ ID NO: 19255 - DNA, 23 bp, Artificial Sequence
  Synthetic: FXN 3 forward 9:69040438-69040467; SaCas9
caggtggatcacgagttcaggag

SEQ ID NO: 19256 - DNA, 22 bp, Artificial Sequence
  Synthetic: FXN 3 forward 9:69040439-69040467; SaCas9
aggtggatcacgagttcaggag

SEQ ID NO: 19257 - DNA, 21 bp, Artificial Sequence
  Synthetic: FXN 3 forward 9:69040440-69040467; SaCas9
ggtggatcacgagttcaggag

SEQ ID NO: 19258 - DNA, 20 bp, Artificial Sequence
  Synthetic: FXN 3 forward 9:69040441-69040467; SaCas9
gtggatcacgagttcaggag

SEQ ID NO: 19259 - DNA, 19 bp, Artificial Sequence
  Synthetic: FXN 3 forward 9:69040442-69040467; SaCas9
tggatcacgagttcaggag

SEQ ID NO: 19260 - DNA, 18 bp, Artificial Sequence
  Synthetic: FXN 3 forward 9:69040443-69040467; SaCas9
ggatcacgagttcaggag

SEQ ID NO: 19261 - DNA, 25 bp, Artificial Sequence
  Synthetic: FXN 3 forward 9:69040437-69040468; SaCas9
gcaggtggatcacgagttcaggaga

SEQ ID NO: 19262 - DNA, 24 bp, Artificial Sequence
  Synthetic: FXN 3 forward 9:69040438-69040468; SaCas9
caggtggatcacgagttcaggaga

SEQ ID NO: 19263 - DNA, 23 bp, Artificial Sequence
  Synthetic: FXN 3 forward 9:69040439-69040468; SaCas9
aggtggatcacgagttcaggaga

SEQ ID NO: 19264 - DNA, 22 bp, Artificial Sequence
  Synthetic: FXN 3 forward 9:69040440-69040468; SaCas9
ggtggatcacgagttcaggaga

SEQ ID NO: 19265 - DNA, 21 bp, Artificial Sequence
  Synthetic: FXN 3 forward 9:69040441-69040468; SaCas9
gtggatcacgagttcaggaga

SEQ ID NO: 19266 - DNA, 20 bp, Artificial Sequence
  Synthetic: FXN 3 forward 9:69040442-69040468; SaCas9
tggatcacgagttcaggaga

SEQ ID NO: 19267 - DNA, 19 bp, Artificial Sequence
  Synthetic: FXN 3 forward 9:69040443-69040468; SaCas9
ggatcacgagttcaggaga

SEQ ID NO: 19268 - DNA, 18 bp, Artificial Sequence
  Synthetic: FXN 3 forward 9:69040444-69040468; SaCas9
gatcacgagttcaggaga

SEQ ID NO: 19269 - DNA, 25 bp, Artificial Sequence
  Synthetic: FXN 3 reverse 9:69040452-69040483; SaCas9
tattagccaggatggtctccatctc

SEQ ID NO: 19270 - DNA, 24 bp, Artificial Sequence
  Synthetic: FXN 3 reverse 9:69040453-69040483; SaCas9
attagccaggatggtctccatctc

SEQ ID NO: 19271 - DNA, 23 bp, Artificial Sequence
  Synthetic: FXN 3 reverse 9:69040454-69040483; SaCas9
ttagccaggatggtctccatctc

SEQ ID NO: 19272 - DNA, 22 bp, Artificial Sequence
  Synthetic: FXN 3 reverse 9:69040455-69040483; SaCas9
tagccaggatggtctccatctc

SEQ ID NO: 19273 - DNA, 21 bp, Artificial Sequence
  Synthetic: FXN 3 reverse 9:69040456-69040483; SaCas9
agccaggatggtctccatctc

SEQ ID NO: 19274 - DNA, 20 bp, Artificial Sequence
  Synthetic: FXN 3 reverse 9:69040457-69040483; SaCas9
gccaggatggtctccatctc

SEQ ID NO: 19275 - DNA, 19 bp, Artificial Sequence
  Synthetic: FXN 3 reverse 9:69040458-69040483; SaCas9
ccaggatggtctccatctc

SEQ ID NO: 19276 - DNA, 18 bp, Artificial Sequence
  Synthetic: FXN 3 reverse 9:69040459-69040483; SaCas9
caggatggtctccatctc

SEQ ID NO: 19277 - DNA, 25 bp, Artificial Sequence
  Synthetic: FXN 3 forward 9:69040460-69040491; SaCas9
gatggagaccatcctggctaatacg

SEQ ID NO: 19278 - DNA, 24 bp, Artificial Sequence
  Synthetic: FXN 3 forward 9:69040461-69040491; SaCas9
atggagaccatcctggctaatacg

SEQ ID NO: 19279 - DNA, 23 bp, Artificial Sequence
  Synthetic: FXN 3 forward 9:69040462-69040491; SaCas9
tggagaccatcctggctaatacg

SEQ ID NO: 19280 - DNA, 22 bp, Artificial Sequence
  Synthetic: FXN 3 forward 9:69040463-69040491; SaCas9
ggagaccatcctggctaatacg

SEQ ID NO: 19281 - DNA, 21 bp, Artificial Sequence
  Synthetic: FXN 3 forward 9:69040464-69040491; SaCas9
gagaccatcctggctaatacg

SEQ ID NO: 19282 - DNA, 20 bp, Artificial Sequence
  Synthetic: FXN 3 forward 9:69040465-69040491; SaCas9
agaccatcctggctaatacg

SEQ ID NO: 19283 - DNA, 19 bp, Artificial Sequence
  Synthetic: FXN 3 forward 9:69040466-69040491; SaCas9
gaccatcctggctaatacg

SEQ ID NO: 19284 - DNA, 18 bp, Artificial Sequence
  Synthetic: FXN 3 forward 9:69040467-69040491; SaCas9
accatcctggctaatacg

SEQ ID NO: 19285 - DNA, 25 bp, Artificial Sequence
  Synthetic: FXN 3 reverse 9:69040470-69040501; SaCas9
agagatggggtttcatcgtattagc

SEQ ID NO: 19286 - DNA, 24 bp, Artificial Sequence
  Synthetic: FXN 3 reverse 9:69040471-69040501; SaCas9
gagatggggtttcatcgtattagc

SEQ ID NO: 19287 - DNA, 23 bp, Artificial Sequence
  Synthetic: FXN 3 reverse 9:69040472-69040501; SaCas9
agatggggtttcatcgtattagc

SEQ ID NO: 19288 - DNA, 22 bp, Artificial Sequence
  Synthetic: FXN 3 reverse 9:69040473-69040501; SaCas9
gatggggtttcatcgtattagc

SEQ ID NO: 19289 - DNA, 21 bp, Artificial Sequence
  Synthetic: FXN 3 reverse 9:69040474-69040501; SaCas9
atggggtttcatcgtattagc

SEQ ID NO: 19290 - DNA, 20 bp, Artificial Sequence
  Synthetic: FXN 3 reverse 9:69040475-69040501; SaCas9
tggggtttcatcgtattagc

SEQ ID NO: 19291 - DNA, 19 bp, Artificial Sequence
  Synthetic: FXN 3 reverse 9:69040476-69040501; SaCas9
ggggtttcatcgtattagc

SEQ ID NO: 19292 - DNA, 18 bp, Artificial Sequence
  Synthetic: FXN 3 reverse 9:69040477-69040501; SaCas9
gggtttcatcgtattagc

SEQ ID NO: 19293 - DNA, 25 bp, Artificial Sequence
  Synthetic: FXN 3 reverse 9:69040490-69040521; SaCas9
taattttttgtatttttagtagaga

SEQ ID NO: 19294 - DNA, 24 bp, Artificial Sequence
  Synthetic: FXN 3 reverse 9:69040491-69040521; SaCas9
aattttttgtatttttagtagaga

SEQ ID NO: 19295 - DNA, 23 bp, Artificial Sequence
  Synthetic: FXN 3 reverse 9:69040492-69040521; SaCas9
attttttgtatttttagtagaga

SEQ ID NO: 19296 - DNA, 22 bp, Artificial Sequence
  Synthetic: FXN 3 reverse 9:69040493-69040521; SaCas9
ttttttgtatttttagtagaga

SEQ ID NO: 19297 - DNA, 21 bp, Artificial Sequence
  Synthetic: FXN 3 reverse 9:69040494-69040521; SaCas9
tttttgtatttttagtagaga

SEQ ID NO: 19298 - DNA, 20 bp, Artificial Sequence
  Synthetic: FXN 3 reverse 9:69040495-69040521; SaCas9
ttttgtatttttagtagaga

SEQ ID NO: 19299 - DNA, 19 bp, Artificial Sequence
  Synthetic: FXN 3 reverse 9:69040496-69040521; SaCas9
tttgtatttttagtagaga

SEQ ID NO: 19300 - DNA, 18 bp, Artificial Sequence
  Synthetic: FXN 3 reverse 9:69040497-69040521; SaCas9
ttgtatttttagtagaga

SEQ ID NO: 19301 - DNA, 25 bp, Artificial Sequence
  Synthetic: FXN 3 reverse 9:69040491-69040522; SaCas9
ctaattttttgtatttttagtagag

SEQ ID NO: 19302 - DNA, 24 bp, Artificial Sequence
  Synthetic: FXN 3 reverse 9:69040492-69040522; SaCas9
taattttttgtatttttagtagag

SEQ ID NO: 19303 - DNA, 23 bp, Artificial Sequence
  Synthetic: FXN 3 reverse 9:69040493-69040522; SaCas9
aattttttgtatttttagtagag

SEQ ID NO: 19304 - DNA, 22 bp, Artificial Sequence
  Synthetic: FXN 3 reverse 9:69040494-69040522; SaCas9
attttttgtatttttagtagag

SEQ ID NO: 19305 - DNA, 21 bp, Artificial Sequence
  Synthetic: FXN 3 reverse 9:69040495-69040522; SaCas9
ttttttgtatttttagtagag

SEQ ID NO: 19306 - DNA, 20 bp, Artificial Sequence
  Synthetic: FXN 3 reverse 9:69040496-69040522; SaCas9
tttttgtatttttagtagag

SEQ ID NO: 19307 - DNA, 19 bp, Artificial Sequence
  Synthetic: FXN 3 reverse 9:69040497-69040522; SaCas9
ttttgtatttttagtagag

SEQ ID NO: 19308 - DNA, 18 bp, Artificial Sequence
  Synthetic: FXN 3 reverse 9:69040498-69040522; SaCas9
tttgtatttttagtagag

SEQ ID NO: 19309 - DNA, 25 bp, Artificial Sequence
  Synthetic: FXN 3 reverse 9:69040496-69040527; SaCas9
cccggctaattttttgtatttttag

SEQ ID NO: 19310 - DNA, 24 bp, Artificial Sequence
  Synthetic: FXN 3 reverse 9:69040497-69040527; SaCas9
ccggctaattttttgtatttttag

SEQ ID NO: 19311 - DNA, 23 bp, Artificial Sequence
  Synthetic: FXN 3 reverse 9:69040498-69040527; SaCas9
cggctaattttttgtatttttag

SEQ ID NO: 19312 - DNA, 22 bp, Artificial Sequence
  Synthetic: FXN 3 reverse 9:69040499-69040527; SaCas9
ggctaattttttgtatttttag

SEQ ID NO: 19313 - DNA, 21 bp, Artificial Sequence
  Synthetic: FXN 3 reverse 9:69040500-69040527; SaCas9
gctaattttttgtatttttag

SEQ ID NO: 19314 - DNA, 20 bp, Artificial Sequence
  Synthetic: FXN 3 reverse 9:69040501-69040527; SaCas9
ctaattttttgtatttttag

SEQ ID NO: 19315 - DNA, 19 bp, Artificial Sequence
  Synthetic: FXN 3 reverse 9:69040502-69040527; SaCas9
taattttttgtatttttag

SEQ ID NO: 19316 - DNA, 18 bp, Artificial Sequence
  Synthetic: FXN 3 reverse 9:69040503-69040527; SaCas9
aattttttgtatttttag

SEQ ID NO: 19317 - DNA, 25 bp, Artificial Sequence
  Synthetic: FXN 3 forward 9:69040497-69040528; SaCas9
ctctactaaaaatacaaaaaattag

SEQ ID NO: 19318 - DNA, 24 bp, Artificial Sequence
  Synthetic: FXN 3 forward 9:69040498-69040528; SaCas9
tctactaaaaatacaaaaaattag

SEQ ID NO: 19319 - DNA, 23 bp, Artificial Sequence
  Synthetic: FXN 3 forward 9:69040499-69040528; SaCas9
ctactaaaaatacaaaaaattag

SEQ ID NO: 19320 - DNA, 22 bp, Artificial Sequence
  Synthetic: FXN 3 forward 9:69040500-69040528; SaCas9
tactaaaaatacaaaaaattag

SEQ ID NO: 19321 - DNA, 21 bp, Artificial Sequence
  Synthetic: FXN 3 forward 9:69040501-69040528; SaCas9
actaaaaatacaaaaaattag

SEQ ID NO: 19322 - DNA, 20 bp, Artificial Sequence
  Synthetic: FXN 3 forward 9:69040502-69040528; SaCas9
ctaaaaatacaaaaaattag

SEQ ID NO: 19323 - DNA, 19 bp, Artificial Sequence
  Synthetic: FXN 3 forward 9:69040503-69040528; SaCas9
taaaaatacaaaaaattag

SEQ ID NO: 19324 - DNA, 18 bp, Artificial Sequence
  Synthetic: FXN 3 forward 9:69040504-69040528; SaCas9
aaaaatacaaaaaattag

SEQ ID NO: 19325 - DNA, 25 bp, Artificial Sequence
  Synthetic: FXN 3 forward 9:69040509-69040540; SaCas9
tacaaaaaattagccgggcgtggtg

SEQ ID NO: 19326 - DNA, 24 bp, Artificial Sequence
  Synthetic: FXN 3 forward 9:69040510-69040540; SaCas9
acaaaaaattagccgggcgtggtg

SEQ ID NO: 19327 - DNA, 23 bp, Artificial Sequence
  Synthetic: FXN 3 forward 9:69040511-69040540; SaCas9
caaaaaattagccgggcgtggtg

SEQ ID NO: 19328 - DNA, 22 bp, Artificial Sequence
  Synthetic: FXN 3 forward 9:69040512-69040540; SaCas9
aaaaaattagccgggcgtggtg

SEQ ID NO: 19329 - DNA, 21 bp, Artificial Sequence
  Synthetic: FXN 3 forward 9:69040513-69040540; SaCas9
aaaaattagccgggcgtggtg

SEQ ID NO: 19330 - DNA, 20 bp, Artificial Sequence
  Synthetic: FXN 3 forward 9:69040514-69040540; SaCas9
aaaattagccgggcgtggtg

SEQ ID NO: 19331 - DNA, 19 bp, Artificial Sequence
  Synthetic: FXN 3 forward 9:69040515-69040540; SaCas9
aaattagccgggcgtggtg

SEQ ID NO: 19332 - DNA, 18 bp, Artificial Sequence
  Synthetic: FXN 3 forward 9:69040516-69040540; SaCas9
aattagccgggcgtggtg

SEQ ID NO: 19333 - DNA, 25 bp, Artificial Sequence
  Synthetic: FXN 3 forward 9:69040533-69040564; SaCas9
gacgggtgcctgtagtccccactac

SEQ ID NO: 19334 - DNA, 24 bp, Artificial Sequence
  Synthetic: FXN 3 forward 9:69040534-69040564; SaCas9
acgggtgcctgtagtccccactac

SEQ ID NO: 19335 - DNA, 23 bp, Artificial Sequence
  Synthetic: FXN 3 forward 9:69040535-69040564; SaCas9
cgggtgcctgtagtccccactac

SEQ ID NO: 19336 - DNA, 22 bp, Artificial Sequence
  Synthetic: FXN 3 forward 9:69040536-69040564; SaCas9
gggtgcctgtagtccccactac

SEQ ID NO: 19337 - DNA, 21 bp, Artificial Sequence
  Synthetic: FXN 3 forward 9:69040537-69040564; SaCas9
ggtgcctgtagtccccactac

SEQ ID NO: 19338 - DNA, 20 bp, Artificial Sequence
  Synthetic: FXN 3 forward 9:69040538-69040564; SaCas9
gtgcctgtagtccccactac

SEQ ID NO: 19339 - DNA, 19 bp, Artificial Sequence
  Synthetic: FXN 3 forward 9:69040539-69040564; SaCas9
tgcctgtagtccccactac

SEQ ID NO: 19340 - DNA, 18 bp, Artificial Sequence
  Synthetic: FXN 3 forward 9:69040540-69040564; SaCas9
gcctgtagtccccactac

SEQ ID NO: 19341 - DNA, 25 bp, Artificial Sequence
  Synthetic: FXN 3 forward 9:69040534-69040565; SaCas9
acgggtgcctgtagtccccactact

SEQ ID NO: 19342 - DNA, 24 bp, Artificial Sequence
  Synthetic: FXN 3 forward 9:69040535-69040565; SaCas9
cgggtgcctgtagtccccactact

SEQ ID NO: 19343 - DNA, 23 bp, Artificial Sequence
  Synthetic: FXN 3 forward 9:69040536-69040565; SaCas9
gggtgcctgtagtccccactact

SEQ ID NO: 19344 - DNA, 22 bp, Artificial Sequence
  Synthetic: FXN 3 forward 9:69040537-69040565; SaCas9
ggtgcctgtagtccccactact

SEQ ID NO: 19345 - DNA, 21 bp, Artificial Sequence
  Synthetic: FXN 3 forward 9:69040538-69040565; SaCas9
gtgcctgtagtccccactact

SEQ ID NO: 19346 - DNA, 20 bp, Artificial Sequence
  Synthetic: FXN 3 forward 9:69040539-69040565; SaCas9
tgcctgtagtccccactact

SEQ ID NO: 19347 - DNA, 19 bp, Artificial Sequence
  Synthetic: FXN 3 forward 9:69040540-69040565; SaCas9
gcctgtagtccccactact

SEQ ID NO: 19348 - DNA, 18 bp, Artificial Sequence
  Synthetic: FXN 3 forward 9:69040541-69040565; SaCas9
cctgtagtccccactact

SEQ ID NO: 19349 - DNA, 25 bp, Artificial Sequence
  Synthetic: FXN 3 forward 9:69040541-69040572; SaCas9
cctgtagtccccactactcgggacg

SEQ ID NO: 19350 - DNA, 24 bp, Artificial Sequence
  Synthetic: FXN 3 forward 9:69040542-69040572; SaCas9
ctgtagtccccactactcgggacg

SEQ ID NO: 19351 - DNA, 23 bp, Artificial Sequence
  Synthetic: FXN 3 forward 9:69040543-69040572; SaCas9
tgtagtccccactactcgggacg

SEQ ID NO: 19352 - DNA, 22 bp, Artificial Sequence
  Synthetic: FXN 3 forward 9:69040544-69040572; SaCas9
gtagtccccactactcgggacg

SEQ ID NO: 19353 - DNA, 21 bp, Artificial Sequence
  Synthetic: FXN 3 forward 9:69040545-69040572; SaCas9
tagtccccactactcgggacg

SEQ ID NO: 19354 - DNA, 20 bp, Artificial Sequence
  Synthetic: FXN 3 forward 9:69040546-69040572; SaCas9
agtccccactactcgggacg

SEQ ID NO: 19355 - DNA, 19 bp, Artificial Sequence
  Synthetic: FXN 3 forward 9:69040547-69040572; SaCas9
gtccccactactcgggacg

SEQ ID NO: 19356 - DNA, 18 bp, Artificial Sequence
  Synthetic: FXN 3 forward 9:69040548-69040572; SaCas9
tccccactactcgggacg

SEQ ID NO: 19357 - DNA, 25 bp, Artificial Sequence
  Synthetic: FXN 3 forward 9:69040547-69040578; SaCas9
gtccccactactcgggacgctgagg

SEQ ID NO: 19358 - DNA, 24 bp, Artificial Sequence
  Synthetic: FXN 3 forward 9:69040548-69040578; SaCas9
tccccactactcgggacgctgagg

SEQ ID NO: 19359 - DNA, 23 bp, Artificial Sequence
  Synthetic: FXN 3 forward 9:69040549-69040578; SaCas9
ccccactactcgggacgctgagg

SEQ ID NO: 19360 - DNA, 22 bp, Artificial Sequence
  Synthetic: FXN 3 forward 9:69040550-69040578; SaCas9
cccactactcgggacgctgagg

SEQ ID NO: 19361 - DNA, 21 bp, Artificial Sequence
  Synthetic: FXN 3 forward 9:69040551-69040578; SaCas9
ccactactcgggacgctgagg

SEQ ID NO: 19362 - DNA, 20 bp, Artificial Sequence
  Synthetic: FXN 3 forward 9:69040552-69040578; SaCas9
cactactcgggacgctgagg

SEQ ID NO: 19363 - DNA, 19 bp, Artificial Sequence
  Synthetic: FXN 3 forward 9:69040553-69040578; SaCas9
actactcgggacgctgagg

SEQ ID NO: 19364 - DNA, 18 bp, Artificial Sequence
  Synthetic: FXN 3 forward 9:69040554-69040578; SaCas9
ctactcgggacgctgagg

SEQ ID NO: 19365 - DNA, 25 bp, Artificial Sequence
  Synthetic: FXN 3 reverse 9:69040547-69040578; SaCas9
ctcctgcctcagcgtcccgagtagt

SEQ ID NO: 19366 - DNA, 24 bp, Artificial Sequence
  Synthetic: FXN 3 reverse 9:69040548-69040578; SaCas9
tcctgcctcagcgtcccgagtagt

SEQ ID NO: 19367 - DNA, 23 bp, Artificial Sequence
  Synthetic: FXN 3 reverse 9:69040549-69040578; SaCas9
cctgcctcagcgtcccgagtagt

SEQ ID NO: 19368 - DNA, 22 bp, Artificial Sequence
  Synthetic: FXN 3 reverse 9:69040550-69040578; SaCas9
ctgcctcagcgtcccgagtagt

SEQ ID NO: 19369 - DNA, 21 bp, Artificial Sequence
  Synthetic: FXN 3 reverse 9:69040551-69040578; SaCas9
tgcctcagcgtcccgagtagt

SEQ ID NO: 19370 - DNA, 20 bp, Artificial Sequence
  Synthetic: FXN 3 reverse 9:69040552-69040578; SaCas9
gcctcagcgtcccgagtagt

SEQ ID NO: 19371 - DNA, 19 bp, Artificial Sequence
  Synthetic: FXN 3 reverse 9:69040553-69040578; SaCas9
cctcagcgtcccgagtagt

SEQ ID NO: 19372 - DNA, 18 bp, Artificial Sequence
  Synthetic: FXN 3 reverse 9:69040554-69040578; SaCas9
ctcagcgtcccgagtagt

SEQ ID NO: 19373 - DNA, 25 bp, Artificial Sequence
  Synthetic: FXN 3 forward 9:69040548-69040579; SaCas9
tccccactactcgggacgctgaggc

SEQ ID NO: 19374 - DNA, 24 bp, Artificial Sequence
  Synthetic: FXN 3 forward 9:69040549-69040579; SaCas9
ccccactactcgggacgctgaggc

SEQ ID NO: 19375 - DNA, 23 bp, Artificial Sequence
  Synthetic: FXN 3 forward 9:69040550-69040579; SaCas9
cccactactcgggacgctgaggc

SEQ ID NO: 19376 - DNA, 22 bp, Artificial Sequence
  Synthetic: FXN 3 forward 9:69040551-69040579; SaCas9
ccactactcgggacgctgaggc

SEQ ID NO: 19377 - DNA, 21 bp, Artificial Sequence
  Synthetic: FXN 3 forward 9:69040552-69040579; SaCas9
cactactcgggacgctgaggc

SEQ ID NO: 19378 - DNA, 20 bp, Artificial Sequence
  Synthetic: FXN 3 forward 9:69040553-69040579; SaCas9
actactcgggacgctgaggc

SEQ ID NO: 19379 - DNA, 19 bp, Artificial Sequence
  Synthetic: FXN 3 forward 9:69040554-69040579; SaCas9
ctactcgggacgctgaggc

SEQ ID NO: 19380 - DNA, 18 bp, Artificial Sequence
  Synthetic: FXN 3 forward 9:69040555-69040579; SaCas9
tactcgggacgctgaggc

SEQ ID NO: 19381 - DNA, 25 bp, Artificial Sequence
  Synthetic: FXN 3 reverse 9:69040548-69040579; SaCas9
tctcctgcctcagcgtcccgagtag

SEQ ID NO: 19382 - DNA, 24 bp, Artificial Sequence
  Synthetic: FXN 3 reverse 9:69040549-69040579; SaCas9
ctcctgcctcagcgtcccgagtag

SEQ ID NO: 19383 - DNA, 23 bp, Artificial Sequence
  Synthetic: FXN 3 reverse 9:69040550-69040579; SaCas9
tcctgcctcagcgtcccgagtag

SEQ ID NO: 19384 - DNA, 22 bp, Artificial Sequence
  Synthetic: FXN 3 reverse 9:69040551-69040579; SaCas9
cctgcctcagcgtcccgagtag

SEQ ID NO: 19385 - DNA, 21 bp, Artificial Sequence
  Synthetic: FXN 3 reverse 9:69040552-69040579; SaCas9
ctgcctcagcgtcccgagtag

SEQ ID NO: 19386 - DNA, 20 bp, Artificial Sequence
  Synthetic: FXN 3 reverse 9:69040553-69040579; SaCas9
tgcctcagcgtcccgagtag

SEQ ID NO: 19387 - DNA, 19 bp, Artificial Sequence
  Synthetic: FXN 3 reverse 9:69040554-69040579; SaCas9
gcctcagcgtcccgagtag

SEQ ID NO: 19388 - DNA, 18 bp, Artificial Sequence
  Synthetic: FXN 3 reverse 9:69040555-69040579; SaCas9
cctcagcgtcccgagtag

SEQ ID NO: 19389 - DNA, 25 bp, Artificial Sequence
  Synthetic: FXN 3 reverse 9:69040549-69040580; SaCas9
ttctcctgcctcagcgtcccgagta

SEQ ID NO: 19390 - DNA, 24 bp, Artificial Sequence
  Synthetic: FXN 3 reverse 9:69040550-69040580; SaCas9
tctcctgcctcagcgtcccgagta

SEQ ID NO: 19391 - DNA, 23 bp, Artificial Sequence
  Synthetic: FXN 3 reverse 9:69040551-69040580; SaCas9
ctcctgcctcagcgtcccgagta

SEQ ID NO: 19392 - DNA, 22 bp, Artificial Sequence
  Synthetic: FXN 3 reverse 9:69040552-69040580; SaCas9
tcctgcctcagcgtcccgagta

SEQ ID NO: 19393 - DNA, 21 bp, Artificial Sequence
  Synthetic: FXN 3 reverse 9:69040553-69040580; SaCas9
cctgcctcagcgtcccgagta

SEQ ID NO: 19394 - DNA, 20 bp, Artificial Sequence
  Synthetic: FXN 3 reverse 9:69040554-69040580; SaCas9
ctgcctcagcgtcccgagta

SEQ ID NO: 19395 - DNA, 19 bp, Artificial Sequence
  Synthetic: FXN 3 reverse 9:69040555-69040580; SaCas9
tgcctcagcgtcccgagta

SEQ ID NO: 19396 - DNA, 18 bp, Artificial Sequence
  Synthetic: FXN 3 reverse 9:69040556-69040580; SaCas9
gcctcagcgtcccgagta

SEQ ID NO: 19397 - DNA, 25 bp, Artificial Sequence
  Synthetic: FXN 3 forward 9:69040550-69040581; SaCas9
cccactactcgggacgctgaggcag

SEQ ID NO: 19398 - DNA, 24 bp, Artificial Sequence
  Synthetic: FXN 3 forward 9:69040551-69040581; SaCas9
ccactactcgggacgctgaggcag

SEQ ID NO: 19399 - DNA, 23 bp, Artificial Sequence
  Synthetic: FXN 3 forward 9:69040552-69040581; SaCas9
cactactcgggacgctgaggcag

SEQ ID NO: 19400 - DNA, 22 bp, Artificial Sequence
  Synthetic: FXN 3 forward 9:69040553-69040581; SaCas9
actactcgggacgctgaggcag

SEQ ID NO: 19401 - DNA, 21 bp, Artificial Sequence
  Synthetic: FXN 3 forward 9:69040554-69040581; SaCas9
ctactcgggacgctgaggcag

SEQ ID NO: 19402 - DNA, 20 bp, Artificial Sequence
  Synthetic: FXN 3 forward 9:69040555-69040581; SaCas9
tactcgggacgctgaggcag

SEQ ID NO: 19403 - DNA, 19 bp, Artificial Sequence
  Synthetic: FXN 3 forward 9:69040556-69040581; SaCas9
actcgggacgctgaggcag

SEQ ID NO: 19404 - DNA, 18 bp, Artificial Sequence
  Synthetic: FXN 3 forward 9:69040557-69040581; SaCas9
ctcgggacgctgaggcag

SEQ ID NO: 19405 - DNA, 25 bp, Artificial Sequence
  Synthetic: FXN 3 reverse 9:69040556-69040587; SaCas9
cacgccattctcctgcctcagcgtc

SEQ ID NO: 19406 - DNA, 24 bp, Artificial Sequence
  Synthetic: FXN 3 reverse 9:69040557-69040587; SaCas9
acgccattctcctgcctcagcgtc

SEQ ID NO: 19407 - DNA, 23 bp, Artificial Sequence
  Synthetic: FXN 3 reverse 9:69040558-69040587; SaCas9
cgccattctcctgcctcagcgtc

SEQ ID NO: 19408 - DNA, 22 bp, Artificial Sequence
  Synthetic: FXN 3 reverse 9:69040559-69040587; SaCas9
gccattctcctgcctcagcgtc

SEQ ID NO: 19409 - DNA, 21 bp, Artificial Sequence
  Synthetic: FXN 3 reverse 9:69040560-69040587; SaCas9
ccattctcctgcctcagcgtc

SEQ ID NO: 19410 - DNA, 20 bp, Artificial Sequence
  Synthetic: FXN 3 reverse 9:69040561-69040587; SaCas9
cattctcctgcctcagcgtc

SEQ ID NO: 19411 - DNA, 19 bp, Artificial Sequence
  Synthetic: FXN 3 reverse 9:69040562-69040587; SaCas9
attctcctgcctcagcgtc

SEQ ID NO: 19412 - DNA, 18 bp, Artificial Sequence
  Synthetic: FXN 3 reverse 9:69040563-69040587; SaCas9
ttctcctgcctcagcgtc

SEQ ID NO: 19413 - DNA, 25 bp, Artificial Sequence
  Synthetic: FXN 3 forward 9:69040559-69040590; SaCas9
cgggacgctgaggcaggagaatggc

SEQ ID NO: 19414 - DNA, 24 bp, Artificial Sequence
  Synthetic: FXN 3 forward 9:69040560-69040590; SaCas9
gggacgctgaggcaggagaatggc

SEQ ID NO: 19415 - DNA, 23 bp, Artificial Sequence
  Synthetic: FXN 3 forward 9:69040561-69040590; SaCas9
ggacgctgaggcaggagaatggc

SEQ ID NO: 19416 - DNA, 22 bp, Artificial Sequence
  Synthetic: FXN 3 forward 9:69040562-69040590; SaCas9
gacgctgaggcaggagaatggc

SEQ ID NO: 19417 - DNA, 21 bp, Artificial Sequence
  Synthetic: FXN 3 forward 9:69040563-69040590; SaCas9
acgctgaggcaggagaatggc

SEQ ID NO: 19418 - DNA, 20 bp, Artificial Sequence
  Synthetic: FXN 3 forward 9:69040564-69040590; SaCas9
cgctgaggcaggagaatggc

SEQ ID NO: 19419 - DNA, 19 bp, Artificial Sequence
  Synthetic: FXN 3 forward 9:69040565-69040590; SaCas9
gctgaggcaggagaatggc

SEQ ID NO: 19420 - DNA, 18 bp, Artificial Sequence
  Synthetic: FXN 3 forward 9:69040566-69040590; SaCas9
ctgaggcaggagaatggc

SEQ ID NO: 19421 - DNA, 25 bp, Artificial Sequence
  Synthetic: FXN 3 forward 9:69040565-69040596; SaCas9
gctgaggcaggagaatggcgtgaac

SEQ ID NO: 19422 - DNA, 24 bp, Artificial Sequence
  Synthetic: FXN 3 forward 9:69040566-69040596; SaCas9
ctgaggcaggagaatggcgtgaac

SEQ ID NO: 19423 - DNA, 23 bp, Artificial Sequence
  Synthetic: FXN 3 forward 9:69040567-69040596; SaCas9
tgaggcaggagaatggcgtgaac

SEQ ID NO: 19424 - DNA, 22 bp, Artificial Sequence
  Synthetic: FXN 3 forward 9:69040568-69040596; SaCas9
gaggcaggagaatggcgtgaac

SEQ ID NO: 19425 - DNA, 21 bp, Artificial Sequence
  Synthetic: FXN 3 forward 9:69040569-69040596; SaCas9
aggcaggagaatggcgtgaac

SEQ ID NO: 19426 - DNA, 20 bp, Artificial Sequence
  Synthetic: FXN 3 forward 9:69040570-69040596; SaCas9
ggcaggagaatggcgtgaac

SEQ ID NO: 19427 - DNA, 19 bp, Artificial Sequence
  Synthetic: FXN 3 forward 9:69040571-69040596; SaCas9
gcaggagaatggcgtgaac

SEQ ID NO: 19428 - DNA, 18 bp, Artificial Sequence
  Synthetic: FXN 3 forward 9:69040572-69040596; SaCas9
caggagaatggcgtgaac

SEQ ID NO: 19429 - DNA, 25 bp, Artificial Sequence
  Synthetic: FXN 3 forward 9:69040566-69040597; SaCas9
ctgaggcaggagaatggcgtgaacc

SEQ ID NO: 19430 - DNA, 24 bp, Artificial Sequence
  Synthetic: FXN 3 forward 9:69040567-69040597; SaCas9
tgaggcaggagaatggcgtgaacc

SEQ ID NO: 19431 - DNA, 23 bp, Artificial Sequence
  Synthetic: FXN 3 forward 9:69040568-69040597; SaCas9
gaggcaggagaatggcgtgaacc

SEQ ID NO: 19432 - DNA, 22 bp, Artificial Sequence
  Synthetic: FXN 3 forward 9:69040569-69040597; SaCas9
aggcaggagaatggcgtgaacc

SEQ ID NO: 19433 - DNA, 21 bp, Artificial Sequence
  Synthetic: FXN 3 forward 9:69040570-69040597; SaCas9
ggcaggagaatggcgtgaacc

SEQ ID NO: 19434 - DNA, 20 bp, Artificial Sequence
  Synthetic: FXN 3 forward 9:69040571-69040597; SaCas9
gcaggagaatggcgtgaacc

SEQ ID NO: 19435 - DNA, 19 bp, Artificial Sequence
  Synthetic: FXN 3 forward 9:69040572-69040597; SaCas9
caggagaatggcgtgaacc

SEQ ID NO: 19436 - DNA, 18 bp, Artificial Sequence
  Synthetic: FXN 3 forward 9:69040573-69040597; SaCas9
aggagaatggcgtgaacc

SEQ ID NO: 19437 - DNA, 25 bp, Artificial Sequence
  Synthetic: FXN 3 forward 9:69040567-69040598; SaCas9
tgaggcaggagaatggcgtgaaccc

SEQ ID NO: 19438 - DNA, 24 bp, Artificial Sequence
  Synthetic: FXN 3 forward 9:69040568-69040598; SaCas9
gaggcaggagaatggcgtgaaccc

SEQ ID NO: 19439 - DNA, 23 bp, Artificial Sequence
  Synthetic: FXN 3 forward 9:69040569-69040598; SaCas9
aggcaggagaatggcgtgaaccc

SEQ ID NO: 19440 - DNA, 22 bp, Artificial Sequence
  Synthetic: FXN 3 forward 9:69040570-69040598; SaCas9
ggcaggagaatggcgtgaaccc

SEQ ID NO: 19441 - DNA, 21 bp, Artificial Sequence
  Synthetic: FXN 3 forward 9:69040571-69040598; SaCas9
gcaggagaatggcgtgaaccc

SEQ ID NO: 19442 - DNA, 20 bp, Artificial Sequence
  Synthetic: FXN 3 forward 9:69040572-69040598; SaCas9
caggagaatggcgtgaaccc

SEQ ID NO: 19443 - DNA, 19 bp, Artificial Sequence
  Synthetic: FXN 3 forward 9:69040573-69040598; SaCas9
aggagaatggcgtgaaccc

SEQ ID NO: 19444 - DNA, 18 bp, Artificial Sequence
  Synthetic: FXN 3 forward 9:69040574-69040598; SaCas9
ggagaatggcgtgaaccc

SEQ ID NO: 19445 - DNA, 25 bp, Artificial Sequence
  Synthetic: FXN 3 forward 9:69040573-69040604; SaCas9
aggagaatggcgtgaacccgggagg

SEQ ID NO: 19446 - DNA, 24 bp, Artificial Sequence
  Synthetic: FXN 3 forward 9:69040574-69040604; SaCas9
ggagaatggcgtgaacccgggagg

SEQ ID NO: 19447 - DNA, 23 bp, Artificial Sequence
  Synthetic: FXN 3 forward 9:69040575-69040604; SaCas9
gagaatggcgtgaacccgggagg

SEQ ID NO: 19448 - DNA, 22 bp, Artificial Sequence
  Synthetic: FXN 3 forward 9:69040576-69040604; SaCas9
agaatggcgtgaacccgggagg

SEQ ID NO: 19449 - DNA, 21 bp, Artificial Sequence
  Synthetic: FXN 3 forward 9:69040577-69040604; SaCas9
gaatggcgtgaacccgggagg

SEQ ID NO: 19450 - DNA, 20 bp, Artificial Sequence
  Synthetic: FXN 3 forward 9:69040578-69040604; SaCas9
aatggcgtgaacccgggagg

SEQ ID NO: 19451 - DNA, 19 bp, Artificial Sequence
  Synthetic: FXN 3 forward 9:69040579-69040604; SaCas9
atggcgtgaacccgggagg

SEQ ID NO: 19452 - DNA, 18 bp, Artificial Sequence
  Synthetic: FXN 3 forward 9:69040580-69040604; SaCas9
tggcgtgaacccgggagg

SEQ ID NO: 19453 - DNA, 25 bp, Artificial Sequence
  Synthetic: FXN 3 reverse 9:69040588-69040619; SaCas9
ctcggatcactgcaagctctgcctc

SEQ ID NO: 19454 - DNA, 24 bp, Artificial Sequence
  Synthetic: FXN 3 reverse 9:69040589-69040619; SaCas9
tcggatcactgcaagctctgcctc

SEQ ID NO: 19455 - DNA, 23 bp, Artificial Sequence
  Synthetic: FXN 3 reverse 9:69040590-69040619; SaCas9
cggatcactgcaagctctgcctc

SEQ ID NO: 19456 - DNA, 22 bp, Artificial Sequence
  Synthetic: FXN 3 reverse 9:69040591-69040619; SaCas9
ggatcactgcaagctctgcctc

SEQ ID NO: 19457 - DNA, 21 bp, Artificial Sequence
  Synthetic: FXN 3 reverse 9:69040592-69040619; SaCas9
gatcactgcaagctctgcctc

SEQ ID NO: 19458 - DNA, 20 bp, Artificial Sequence
  Synthetic: FXN 3 reverse 9:69040593-69040619; SaCas9
atcactgcaagctctgcctc

SEQ ID NO: 19459 - DNA, 19 bp, Artificial Sequence
  Synthetic: FXN 3 reverse 9:69040594-69040619; SaCas9
tcactgcaagctctgcctc

SEQ ID NO: 19460 - DNA, 18 bp, Artificial Sequence
  Synthetic: FXN 3 reverse 9:69040595-69040619; SaCas9
cactgcaagctctgcctc

SEQ ID NO: 19461 - DNA, 25 bp, Artificial Sequence
  Synthetic: FXN 3 forward 9:69040589-69040620; SaCas9
cccgggaggcagagcttgcagtgat

SEQ ID NO: 19462 - DNA, 24 bp, Artificial Sequence
  Synthetic: FXN 3 forward 9:69040590-69040620; SaCas9
ccgggaggcagagcttgcagtgat

SEQ ID NO: 19463 - DNA, 23 bp, Artificial Sequence
  Synthetic: FXN 3 forward 9:69040591-69040620; SaCas9
cgggaggcagagcttgcagtgat

SEQ ID NO: 19464 - DNA, 22 bp, Artificial Sequence
  Synthetic: FXN 3 forward 9:69040592-69040620; SaCas9
gggaggcagagcttgcagtgat

SEQ ID NO: 19465 - DNA, 21 bp, Artificial Sequence
  Synthetic: FXN 3 forward 9:69040593-69040620; SaCas9
ggaggcagagcttgcagtgat

SEQ ID NO: 19466 - DNA, 20 bp, Artificial Sequence
  Synthetic: FXN 3 forward 9:69040594-69040620; SaCas9
gaggcagagcttgcagtgat

SEQ ID NO: 19467 - DNA, 19 bp, Artificial Sequence
  Synthetic: FXN 3 forward 9:69040595-69040620; SaCas9
aggcagagcttgcagtgat

SEQ ID NO: 19468 - DNA, 18 bp, Artificial Sequence
  Synthetic: FXN 3 forward 9:69040596-69040620; SaCas9
ggcagagcttgcagtgat

SEQ ID NO: 19469 - DNA, 25 bp, Artificial Sequence
  Synthetic: FXN 3 reverse 9:69040612-69040643; SaCas9
caggctggagtgcagtggcacgatc

SEQ ID NO: 19470 - DNA, 24 bp, Artificial Sequence
  Synthetic: FXN 3 reverse 9:69040613-69040643; SaCas9
aggctggagtgcagtggcacgatc

SEQ ID NO: 19471 - DNA, 23 bp, Artificial Sequence
  Synthetic: FXN 3 reverse 9:69040614-69040643; SaCas9
ggctggagtgcagtggcacgatc

SEQ ID NO: 19472 - DNA, 22 bp, Artificial Sequence
  Synthetic: FXN 3 reverse 9:69040615-69040643; SaCas9
gctggagtgcagtggcacgatc

SEQ ID NO: 19473 - DNA, 21 bp, Artificial Sequence
  Synthetic: FXN 3 reverse 9:69040616-69040643; SaCas9
ctggagtgcagtggcacgatc

SEQ ID NO: 19474 - DNA, 20 bp, Artificial Sequence
  Synthetic: FXN 3 reverse 9:69040617-69040643; SaCas9
tggagtgcagtggcacgatc

SEQ ID NO: 19475 - DNA, 19 bp, Artificial Sequence
  Synthetic: FXN 3 reverse 9:69040618-69040643; SaCas9
ggagtgcagtggcacgatc

SEQ ID NO: 19476 - DNA, 18 bp, Artificial Sequence
  Synthetic: FXN 3 reverse 9:69040619-69040643; SaCas9
gagtgcagtggcacgatc

SEQ ID NO: 19477 - DNA, 25 bp, Artificial Sequence
  Synthetic: FXN 3 forward 9:69040615-69040646; SaCas9
cgagatcgtgccactgcactccagc

SEQ ID NO: 19478 - DNA, 24 bp, Artificial Sequence
  Synthetic: FXN 3 forward 9:69040616-69040646; SaCas9
gagatcgtgccactgcactccagc

SEQ ID NO: 19479 - DNA, 23 bp, Artificial Sequence
  Synthetic: FXN 3 forward 9:69040617-69040646; SaCas9
agatcgtgccactgcactccagc

SEQ ID NO: 19480 - DNA, 22 bp, Artificial Sequence
  Synthetic: FXN 3 forward 9:69040618-69040646; SaCas9
gatcgtgccactgcactccagc

SEQ ID NO: 19481 - DNA, 21 bp, Artificial Sequence
  Synthetic: FXN 3 forward 9:69040619-69040646; SaCas9
atcgtgccactgcactccagc

SEQ ID NO: 19482 - DNA, 20 bp, Artificial Sequence
  Synthetic: FXN 3 forward 9:69040620-69040646; SaCas9
tcgtgccactgcactccagc

SEQ ID NO: 19483 - DNA, 19 bp, Artificial Sequence
  Synthetic: FXN 3 forward 9:69040621-69040646; SaCas9
cgtgccactgcactccagc

SEQ ID NO: 19484 - DNA, 18 bp, Artificial Sequence
  Synthetic: FXN 3 forward 9:69040622-69040646; SaCas9
gtgccactgcactccagc

SEQ ID NO: 19485 - DNA, 25 bp, Artificial Sequence
  Synthetic: FXN 3 forward 9:69040623-69040654; SaCas9
tgccactgcactccagcctgggtga

SEQ ID NO: 19486 - DNA, 24 bp, Artificial Sequence
  Synthetic: FXN 3 forward 9:69040624-69040654; SaCas9
gccactgcactccagcctgggtga

SEQ ID NO: 19487 - DNA, 23 bp, Artificial Sequence
  Synthetic: FXN 3 forward 9:69040625-69040654; SaCas9
ccactgcactccagcctgggtga

SEQ ID NO: 19488 - DNA, 22 bp, Artificial Sequence
  Synthetic: FXN 3 forward 9:69040626-69040654; SaCas9
cactgcactccagcctgggtga

SEQ ID NO: 19489 - DNA, 21 bp, Artificial Sequence
  Synthetic: FXN 3 forward 9:69040627-69040654; SaCas9
actgcactccagcctgggtga

SEQ ID NO: 19490 - DNA, 20 bp, Artificial Sequence
  Synthetic: FXN 3 forward 9:69040628-69040654; SaCas9
ctgcactccagcctgggtga

SEQ ID NO: 19491 - DNA, 19 bp, Artificial Sequence
  Synthetic: FXN 3 forward 9:69040629-69040654; SaCas9
tgcactccagcctgggtga

SEQ ID NO: 19492 - DNA, 18 bp, Artificial Sequence
  Synthetic: FXN 3 forward 9:69040630-69040654; SaCas9
gcactccagcctgggtga

SEQ ID NO: 19493 - DNA, 25 bp, Artificial Sequence
  Synthetic: FXN 3 forward 9:69040627-69040658; SaCas9
actgcactccagcctgggtgacaga

SEQ ID NO: 19494 - DNA, 24 bp, Artificial Sequence
  Synthetic: FXN 3 forward 9:69040628-69040658; SaCas9
ctgcactccagcctgggtgacaga

SEQ ID NO: 19495 - DNA, 23 bp, Artificial Sequence
  Synthetic: FXN 3 forward 9:69040629-69040658; SaCas9
tgcactccagcctgggtgacaga

SEQ ID NO: 19496 - DNA, 22 bp, Artificial Sequence
  Synthetic: FXN 3 forward 9:69040630-69040658; SaCas9
gcactccagcctgggtgacaga

SEQ ID NO: 19497 - DNA, 21 bp, Artificial Sequence
  Synthetic: FXN 3 forward 9:69040631-69040658; SaCas9
cactccagcctgggtgacaga

SEQ ID NO: 19498 - DNA, 20 bp, Artificial Sequence
  Synthetic: FXN 3 forward 9:69040632-69040658; SaCas9
actccagcctgggtgacaga

SEQ ID NO: 19499 - DNA, 19 bp, Artificial Sequence
  Synthetic: FXN 3 forward 9:69040633-69040658; SaCas9
ctccagcctgggtgacaga

SEQ ID NO: 19500 - DNA, 18 bp, Artificial Sequence
  Synthetic: FXN 3 forward 9:69040634-69040658; SaCas9
tccagcctgggtgacaga

SEQ ID NO: 19501 - DNA, 25 bp, Artificial Sequence
  Synthetic: FXN 3 reverse 9:69040632-69040663; SaCas9
tgcagtctcgctctgtcacccaggc

SEQ ID NO: 19502 - DNA, 24 bp, Artificial Sequence
  Synthetic: FXN 3 reverse 9:69040633-69040663; SaCas9
gcagtctcgctctgtcacccaggc

SEQ ID NO: 19503 - DNA, 23 bp, Artificial Sequence
  Synthetic: FXN 3 reverse 9:69040634-69040663; SaCas9
cagtctcgctctgtcacccaggc

SEQ ID NO: 19504 - DNA, 22 bp, Artificial Sequence
  Synthetic: FXN 3 reverse 9:69040635-69040663; SaCas9
agtctcgctctgtcacccaggc

SEQ ID NO: 19505 - DNA, 21 bp, Artificial Sequence
  Synthetic: FXN 3 reverse 9:69040636-69040663; SaCas9
gtctcgctctgtcacccaggc

SEQ ID NO: 19506 - DNA, 20 bp, Artificial Sequence
  Synthetic: FXN 3 reverse 9:69040637-69040663; SaCas9
tctcgctctgtcacccaggc

SEQ ID NO: 19507 - DNA, 19 bp, Artificial Sequence
  Synthetic: FXN 3 reverse 9:69040638-69040663; SaCas9
ctcgctctgtcacccaggc

SEQ ID NO: 19508 - DNA, 18 bp, Artificial Sequence
  Synthetic: FXN 3 reverse 9:69040639-69040663; SaCas9
tcgctctgtcacccaggc

SEQ ID NO: 19509 - DNA, 25 bp, Artificial Sequence
  Synthetic: FXN 3 reverse 9:69040633-69040664; SaCas9
atgcagtctcgctctgtcacccagg

SEQ ID NO: 19510 - DNA, 24 bp, Artificial Sequence
  Synthetic: FXN 3 reverse 9:69040634-69040664; SaCas9
tgcagtctcgctctgtcacccagg

SEQ ID NO: 19511 - DNA, 23 bp, Artificial Sequence
  Synthetic: FXN 3 reverse 9:69040635-69040664; SaCas9
gcagtctcgctctgtcacccagg

SEQ ID NO: 19512 - DNA, 22 bp, Artificial Sequence
  Synthetic: FXN 3 reverse 9:69040636-69040664; SaCas9
cagtctcgctctgtcacccagg

SEQ ID NO: 19513 - DNA, 21 bp, Artificial Sequence
  Synthetic: FXN 3 reverse 9:69040637-69040664; SaCas9
agtctcgctctgtcacccagg

SEQ ID NO: 19514 - DNA, 20 bp, Artificial Sequence
  Synthetic: FXN 3 reverse 9:69040638-69040664; SaCas9
gtctcgctctgtcacccagg

SEQ ID NO: 19515 - DNA, 19 bp, Artificial Sequence
  Synthetic: FXN 3 reverse 9:69040639-69040664; SaCas9
tctcgctctgtcacccagg

SEQ ID NO: 19516 - DNA, 18 bp, Artificial Sequence
  Synthetic: FXN 3 reverse 9:69040640-69040664; SaCas9
ctcgctctgtcacccagg

SEQ ID NO: 19517 - DNA, 25 bp, Artificial Sequence
  Synthetic: FXN 3 forward 9:69040643-69040674; SaCas9
ggtgacagagcgagactgcatctca

SEQ ID NO: 19518 - DNA, 24 bp, Artificial Sequence
  Synthetic: FXN 3 forward 9:69040644-69040674; SaCas9
gtgacagagcgagactgcatctca

SEQ ID NO: 19519 - DNA, 23 bp, Artificial Sequence
  Synthetic: FXN 3 forward 9:69040645-69040674; SaCas9
tgacagagcgagactgcatctca

SEQ ID NO: 19520 - DNA, 22 bp, Artificial Sequence
  Synthetic: FXN 3 forward 9:69040646-69040674; SaCas9
gacagagcgagactgcatctca

SEQ ID NO: 19521 - DNA, 21 bp, Artificial Sequence
  Synthetic: FXN 3 forward 9:69040647-69040674; SaCas9
acagagcgagactgcatctca

SEQ ID NO: 19522 - DNA, 20 bp, Artificial Sequence
  Synthetic: FXN 3 forward 9:69040648-69040674; SaCas9
cagagcgagactgcatctca

SEQ ID NO: 19523 - DNA, 19 bp, Artificial Sequence
  Synthetic: FXN 3 forward 9:69040649-69040674; SaCas9
agagcgagactgcatctca

SEQ ID NO: 19524 - DNA, 18 bp, Artificial Sequence
  Synthetic: FXN 3 forward 9:69040650-69040674; SaCas9
gagcgagactgcatctca

SEQ ID NO: 19525 - DNA, 25 bp, Artificial Sequence
  Synthetic: FXN 3 reverse 9:69040663-69040694; SaCas9
tttatttatttatttatttttttct

SEQ ID NO: 19526 - DNA, 24 bp, Artificial Sequence
  Synthetic: FXN 3 reverse 9:69040664-69040694; SaCas9
ttatttatttatttatttttttct

SEQ ID NO: 19527 - DNA, 23 bp, Artificial Sequence
  Synthetic: FXN 3 reverse 9:69040665-69040694; SaCas9
tatttatttatttatttttttct

SEQ ID NO: 19528 - DNA, 22 bp, Artificial Sequence
  Synthetic: FXN 3 reverse 9:69040666-69040694; SaCas9
atttatttatttatttttttct

SEQ ID NO: 19529 - DNA, 21 bp, Artificial Sequence
  Synthetic: FXN 3 reverse 9:69040667-69040694; SaCas9
tttatttatttatttttttct

SEQ ID NO: 19530 - DNA, 20 bp, Artificial Sequence
  Synthetic: FXN 3 reverse 9:69040668-69040694; SaCas9
ttatttatttatttttttct

SEQ ID NO: 19531 - DNA, 19 bp, Artificial Sequence
  Synthetic: FXN 3 reverse 9:69040669-69040694; SaCas9
tatttatttatttttttct

SEQ ID NO: 19532 - DNA, 18 bp, Artificial Sequence
  Synthetic: FXN 3 reverse 9:69040670-69040694; SaCas9
atttatttatttttttct

SEQ ID NO: 19533 - DNA, 25 bp, Artificial Sequence
  Synthetic: FXN 3 reverse 9:69040748-69040779; SaCas9
tgattaggttttaacatatgaatgg

SEQ ID NO: 19534 - DNA, 24 bp, Artificial Sequence
  Synthetic: FXN 3 reverse 9:69040749-69040779; SaCas9
gattaggttttaacatatgaatgg

SEQ ID NO: 19535 - DNA, 23 bp, Artificial Sequence
  Synthetic: FXN 3 reverse 9:69040750-69040779; SaCas9
attaggttttaacatatgaatgg

SEQ ID NO: 19536 - DNA, 22 bp, Artificial Sequence
  Synthetic: FXN 3 reverse 9:69040751-69040779; SaCas9
ttaggttttaacatatgaatgg

SEQ ID NO: 19537 - DNA, 21 bp, Artificial Sequence
  Synthetic: FXN 3 reverse 9:69040752-69040779; SaCas9
taggttttaacatatgaatgg

SEQ ID NO: 19538 - DNA, 20 bp, Artificial Sequence
  Synthetic: FXN 3 reverse 9:69040753-69040779; SaCas9
aggttttaacatatgaatgg

SEQ ID NO: 19539 - DNA, 19 bp, Artificial Sequence
  Synthetic: FXN 3 reverse 9:69040754-69040779; SaCas9
ggttttaacatatgaatgg

SEQ ID NO: 19540 - DNA, 18 bp, Artificial Sequence
  Synthetic: FXN 3 reverse 9:69040755-69040779; SaCas9
gttttaacatatgaatgg

SEQ ID NO: 19541 - DNA, 25 bp, Artificial Sequence
  Synthetic: FXN 3 reverse 9:69040749-69040780; SaCas9
gtgattaggttttaacatatgaatg

SEQ ID NO: 19542 - DNA, 24 bp, Artificial Sequence
  Synthetic: FXN 3 reverse 9:69040750-69040780; SaCas9
tgattaggttttaacatatgaatg

SEQ ID NO: 19543 - DNA, 23 bp, Artificial Sequence
  Synthetic: FXN 3 reverse 9:69040751-69040780; SaCas9
gattaggttttaacatatgaatg

SEQ ID NO: 19544 - DNA, 22 bp, Artificial Sequence
  Synthetic: FXN 3 reverse 9:69040752-69040780; SaCas9
attaggttttaacatatgaatg

SEQ ID NO: 19545 - DNA, 21 bp, Artificial Sequence
  Synthetic: FXN 3 reverse 9:69040753-69040780; SaCas9
ttaggttttaacatatgaatg

SEQ ID NO: 19546 - DNA, 20 bp, Artificial Sequence
  Synthetic: FXN 3 reverse 9:69040754-69040780; SaCas9
taggttttaacatatgaatg

SEQ ID NO: 19547 - DNA, 19 bp, Artificial Sequence
  Synthetic: FXN 3 reverse 9:69040755-69040780; SaCas9
aggttttaacatatgaatg

SEQ ID NO: 19548 - DNA, 18 bp, Artificial Sequence
  Synthetic: FXN 3 reverse 9:69040756-69040780; SaCas9
ggttttaacatatgaatg

SEQ ID NO: 19549 - DNA, 25 bp, Artificial Sequence
  Synthetic: FXN 3 reverse 9:69040756-69040787; SaCas9
cactttggtgattaggttttaacat

SEQ ID NO: 19550 - DNA, 24 bp, Artificial Sequence
  Synthetic: FXN 3 reverse 9:69040757-69040787; SaCas9
actttggtgattaggttttaacat

SEQ ID NO: 19551 - DNA, 23 bp, Artificial Sequence
  Synthetic: FXN 3 reverse 9:69040758-69040787; SaCas9
ctttggtgattaggttttaacat

SEQ ID NO: 19552 - DNA, 22 bp, Artificial Sequence
  Synthetic: FXN 3 reverse 9:69040759-69040787; SaCas9
tttggtgattaggttttaacat

SEQ ID NO: 19553 - DNA, 21 bp, Artificial Sequence
  Synthetic: FXN 3 reverse 9:69040760-69040787; SaCas9
ttggtgattaggttttaacat

SEQ ID NO: 19554 - DNA, 20 bp, Artificial Sequence
  Synthetic: FXN 3 reverse 9:69040761-69040787; SaCas9
tggtgattaggttttaacat

SEQ ID NO: 19555 - DNA, 19 bp, Artificial Sequence
  Synthetic: FXN 3 reverse 9:69040762-69040787; SaCas9
ggtgattaggttttaacat

SEQ ID NO: 19556 - DNA, 18 bp, Artificial Sequence
  Synthetic: FXN 3 reverse 9:69040763-69040787; SaCas9
gtgattaggttttaacat

SEQ ID NO: 19557 - DNA, 25 bp, Artificial Sequence
  Synthetic: FXN 3 forward 9:69040766-69040797; SaCas9
taaaacctaatcaccaaagtgatat

SEQ ID NO: 19558 - DNA, 24 bp, Artificial Sequence
  Synthetic: FXN 3 forward 9:69040767-69040797; SaCas9
aaaacctaatcaccaaagtgatat

SEQ ID NO: 19559 - DNA, 23 bp, Artificial Sequence
  Synthetic: FXN 3 forward 9:69040768-69040797; SaCas9
aaacctaatcaccaaagtgatat

SEQ ID NO: 19560 - DNA, 22 bp, Artificial Sequence
  Synthetic: FXN 3 forward 9:69040769-69040797; SaCas9
aacctaatcaccaaagtgatat

SEQ ID NO: 19561 - DNA, 21 bp, Artificial Sequence
  Synthetic: FXN 3 forward 9:69040770-69040797; SaCas9
acctaatcaccaaagtgatat

SEQ ID NO: 19562 - DNA, 20 bp, Artificial Sequence
  Synthetic: FXN 3 forward 9:69040771-69040797; SaCas9
cctaatcaccaaagtgatat

SEQ ID NO: 19563 - DNA, 19 bp, Artificial Sequence
  Synthetic: FXN 3 forward 9:69040772-69040797; SaCas9
ctaatcaccaaagtgatat

SEQ ID NO: 19564 - DNA, 18 bp, Artificial Sequence
  Synthetic: FXN 3 forward 9:69040773-69040797; SaCas9
taatcaccaaagtgatat

SEQ ID NO: 19565 - DNA, 25 bp, Artificial Sequence
  Synthetic: FXN 3 forward 9:69040767-69040798; SaCas9
aaaacctaatcaccaaagtgatatt

SEQ ID NO: 19566 - DNA, 24 bp, Artificial Sequence
  Synthetic: FXN 3 forward 9:69040768-69040798; SaCas9
aaacctaatcaccaaagtgatatt

SEQ ID NO: 19567 - DNA, 23 bp, Artificial Sequence
  Synthetic: FXN 3 forward 9:69040769-69040798; SaCas9
aacctaatcaccaaagtgatatt

SEQ ID NO: 19568 - DNA, 22 bp, Artificial Sequence
  Synthetic: FXN 3 forward 9:69040770-69040798; SaCas9
acctaatcaccaaagtgatatt

SEQ ID NO: 19569 - DNA, 21 bp, Artificial Sequence
  Synthetic: FXN 3 forward 9:69040771-69040798; SaCas9
cctaatcaccaaagtgatatt

SEQ ID NO: 19570 - DNA, 20 bp, Artificial Sequence
  Synthetic: FXN 3 forward 9:69040772-69040798; SaCas9
ctaatcaccaaagtgatatt

SEQ ID NO: 19571 - DNA, 19 bp, Artificial Sequence
  Synthetic: FXN 3 forward 9:69040773-69040798; SaCas9
taatcaccaaagtgatatt

SEQ ID NO: 19572 - DNA, 18 bp, Artificial Sequence
  Synthetic: FXN 3 forward 9:69040774-69040798; SaCas9
aatcaccaaagtgatatt

SEQ ID NO: 19573 - DNA, 25 bp, Artificial Sequence
  Synthetic: FXN 3 forward 9:69040772-69040803; SaCas9
ctaatcaccaaagtgatattaggag

SEQ ID NO: 19574 - DNA, 24 bp, Artificial Sequence
  Synthetic: FXN 3 forward 9:69040773-69040803; SaCas9
taatcaccaaagtgatattaggag

SEQ ID NO: 19575 - DNA, 23 bp, Artificial Sequence
  Synthetic: FXN 3 forward 9:69040774-69040803; SaCas9
aatcaccaaagtgatattaggag

SEQ ID NO: 19576 - DNA, 22 bp, Artificial Sequence
  Synthetic: FXN 3 forward 9:69040775-69040803; SaCas9
atcaccaaagtgatattaggag

SEQ ID NO: 19577 - DNA, 21 bp, Artificial Sequence
  Synthetic: FXN 3 forward 9:69040776-69040803; SaCas9
tcaccaaagtgatattaggag

SEQ ID NO: 19578 - DNA, 20 bp, Artificial Sequence
  Synthetic: FXN 3 forward 9:69040777-69040803; SaCas9
caccaaagtgatattaggag

SEQ ID NO: 19579 - DNA, 19 bp, Artificial Sequence
  Synthetic: FXN 3 forward 9:69040778-69040803; SaCas9
accaaagtgatattaggag

SEQ ID NO: 19580 - DNA, 18 bp, Artificial Sequence
  Synthetic: FXN 3 forward 9:69040779-69040803; SaCas9
ccaaagtgatattaggag

SEQ ID NO: 19581 - DNA, 25 bp, Artificial Sequence
  Synthetic: FXN 3 forward 9:69040773-69040804; SaCas9
taatcaccaaagtgatattaggagg

SEQ ID NO: 19582 - DNA, 24 bp, Artificial Sequence
  Synthetic: FXN 3 forward 9:69040774-69040804; SaCas9
aatcaccaaagtgatattaggagg

SEQ ID NO: 19583 - DNA, 23 bp, Artificial Sequence
  Synthetic: FXN 3 forward 9:69040775-69040804; SaCas9
atcaccaaagtgatattaggagg

SEQ ID NO: 19584 - DNA, 22 bp, Artificial Sequence
  Synthetic: FXN 3 forward 9:69040776-69040804; SaCas9
tcaccaaagtgatattaggagg

SEQ ID NO: 19585 - DNA, 21 bp, Artificial Sequence
  Synthetic: FXN 3 forward 9:69040777-69040804; SaCas9
caccaaagtgatattaggagg

SEQ ID NO: 19586 - DNA, 20 bp, Artificial Sequence
  Synthetic: FXN 3 forward 9:69040778-69040804; SaCas9
accaaagtgatattaggagg

SEQ ID NO: 19587 - DNA, 19 bp, Artificial Sequence
  Synthetic: FXN 3 forward 9:69040779-69040804; SaCas9
ccaaagtgatattaggagg

SEQ ID NO: 19588 - DNA, 18 bp, Artificial Sequence
  Synthetic: FXN 3 forward 9:69040780-69040804; SaCas9
caaagtgatattaggagg

SEQ ID NO: 19589 - DNA, 25 bp, Artificial Sequence
  Synthetic: FXN 3 forward 9:69040781-69040812; SaCas9
aaagtgatattaggaggtggggccc

SEQ ID NO: 19590 - DNA, 24 bp, Artificial Sequence
  Synthetic: FXN 3 forward 9:69040782-69040812; SaCas9
aagtgatattaggaggtggggccc

SEQ ID NO: 19591 - DNA, 23 bp, Artificial Sequence
  Synthetic: FXN 3 forward 9:69040783-69040812; SaCas9
agtgatattaggaggtggggccc

SEQ ID NO: 19592 - DNA, 22 bp, Artificial Sequence
  Synthetic: FXN 3 forward 9:69040784-69040812; SaCas9
gtgatattaggaggtggggccc

SEQ ID NO: 19593 - DNA, 21 bp, Artificial Sequence
  Synthetic: FXN 3 forward 9:69040785-69040812; SaCas9
tgatattaggaggtggggccc

SEQ ID NO: 19594 - DNA, 20 bp, Artificial Sequence
  Synthetic: FXN 3 forward 9:69040786-69040812; SaCas9
gatattaggaggtggggccc

SEQ ID NO: 19595 - DNA, 19 bp, Artificial Sequence
  Synthetic: FXN 3 forward 9:69040787-69040812; SaCas9
atattaggaggtggggccc

SEQ ID NO: 19596 - DNA, 18 bp, Artificial Sequence
  Synthetic: FXN 3 forward 9:69040788-69040812; SaCas9
tattaggaggtggggccc

SEQ ID NO: 19597 - DNA, 25 bp, Artificial Sequence
  Synthetic: FXN 3 forward 9:69040782-69040813; SaCas9
aagtgatattaggaggtggggccct

SEQ ID NO: 19598 - DNA, 24 bp, Artificial Sequence
  Synthetic: FXN 3 forward 9:69040783-69040813; SaCas9
agtgatattaggaggtggggccct

SEQ ID NO: 19599 - DNA, 23 bp, Artificial Sequence
  Synthetic: FXN 3 forward 9:69040784-69040813; SaCas9
gtgatattaggaggtggggccct

SEQ ID NO: 19600 - DNA, 22 bp, Artificial Sequence
  Synthetic: FXN 3 forward 9:69040785-69040813; SaCas9
tgatattaggaggtggggccct

SEQ ID NO: 19601 - DNA, 21 bp, Artificial Sequence
  Synthetic: FXN 3 forward 9:69040786-69040813; SaCas9
gatattaggaggtggggccct

SEQ ID NO: 19602 - DNA, 20 bp, Artificial Sequence
  Synthetic: FXN 3 forward 9:69040787-69040813; SaCas9
atattaggaggtggggccct

SEQ ID NO: 19603 - DNA, 19 bp, Artificial Sequence
  Synthetic: FXN 3 forward 9:69040788-69040813; SaCas9
tattaggaggtggggccct

SEQ ID NO: 19604 - DNA, 18 bp, Artificial Sequence
  Synthetic: FXN 3 forward 9:69040789-69040813; SaCas9
attaggaggtggggccct

SEQ ID NO: 19605 - DNA, 25 bp, Artificial Sequence
  Synthetic: FXN 3 forward 9:69040783-69040814; SaCas9
agtgatattaggaggtggggccctt

SEQ ID NO: 19606 - DNA, 24 bp, Artificial Sequence
  Synthetic: FXN 3 forward 9:69040784-69040814; SaCas9
gtgatattaggaggtggggccctt

SEQ ID NO: 19607 - DNA, 23 bp, Artificial Sequence
  Synthetic: FXN 3 forward 9:69040785-69040814; SaCas9
tgatattaggaggtggggccctt

SEQ ID NO: 19608 - DNA, 22 bp, Artificial Sequence
  Synthetic: FXN 3 forward 9:69040786-69040814; SaCas9
gatattaggaggtggggccctt

SEQ ID NO: 19609 - DNA, 21 bp, Artificial Sequence
  Synthetic: FXN 3 forward 9:69040787-69040814; SaCas9
atattaggaggtggggccctt

SEQ ID NO: 19610 - DNA, 20 bp, Artificial Sequence
  Synthetic: FXN 3 forward 9:69040788-69040814; SaCas9
tattaggaggtggggccctt

SEQ ID NO: 19611 - DNA, 19 bp, Artificial Sequence
  Synthetic: FXN 3 forward 9:69040789-69040814; SaCas9
attaggaggtggggccctt

SEQ ID NO: 19612 - DNA, 18 bp, Artificial Sequence
  Synthetic: FXN 3 forward 9:69040790-69040814; SaCas9
ttaggaggtggggccctt

SEQ ID NO: 19613 - DNA, 25 bp, Artificial Sequence
  Synthetic: FXN 3 forward 9:69040791-69040822; SaCas9
taggaggtggggcccttgggaggtg

SEQ ID NO: 19614 - DNA, 24 bp, Artificial Sequence
  Synthetic: FXN 3 forward 9:69040792-69040822; SaCas9
aggaggtggggcccttgggaggtg

SEQ ID NO: 19615 - DNA, 23 bp, Artificial Sequence
  Synthetic: FXN 3 forward 9:69040793-69040822; SaCas9
ggaggtggggcccttgggaggtg

SEQ ID NO: 19616 - DNA, 22 bp, Artificial Sequence
  Synthetic: FXN 3 forward 9:69040794-69040822; SaCas9
gaggtggggcccttgggaggtg

SEQ ID NO: 19617 - DNA, 21 bp, Artificial Sequence
  Synthetic: FXN 3 forward 9:69040795-69040822; SaCas9
aggtggggcccttgggaggtg

SEQ ID NO: 19618 - DNA, 20 bp, Artificial Sequence
  Synthetic: FXN 3 forward 9:69040796-69040822; SaCas9
ggtggggcccttgggaggtg

SEQ ID NO: 19619 - DNA, 19 bp, Artificial Sequence
  Synthetic: FXN 3 forward 9:69040797-69040822; SaCas9
gtggggcccttgggaggtg

SEQ ID NO: 19620 - DNA, 18 bp, Artificial Sequence
  Synthetic: FXN 3 forward 9:69040798-69040822; SaCas9
tggggcccttgggaggtg

SEQ ID NO: 19621 - DNA, 25 bp, Artificial Sequence
  Synthetic: FXN 3 forward 9:69040798-69040829; SaCas9
tggggcccttgggaggtgatgaggt

SEQ ID NO: 19622 - DNA, 24 bp, Artificial Sequence
  Synthetic: FXN 3 forward 9:69040799-69040829; SaCas9
ggggcccttgggaggtgatgaggt

SEQ ID NO: 19623 - DNA, 23 bp, Artificial Sequence
  Synthetic: FXN 3 forward 9:69040800-69040829; SaCas9
gggcccttgggaggtgatgaggt

SEQ ID NO: 19624 - DNA, 22 bp, Artificial Sequence
  Synthetic: FXN 3 forward 9:69040801-69040829; SaCas9
ggcccttgggaggtgatgaggt

SEQ ID NO: 19625 - DNA, 21 bp, Artificial Sequence
  Synthetic: FXN 3 forward 9:69040802-69040829; SaCas9
gcccttgggaggtgatgaggt

SEQ ID NO: 19626 - DNA, 20 bp, Artificial Sequence
  Synthetic: FXN 3 forward 9:69040803-69040829; SaCas9
cccttgggaggtgatgaggt

SEQ ID NO: 19627 - DNA, 19 bp, Artificial Sequence
  Synthetic: FXN 3 forward 9:69040804-69040829; SaCas9
ccttgggaggtgatgaggt

SEQ ID NO: 19628 - DNA, 18 bp, Artificial Sequence
  Synthetic: FXN 3 forward 9:69040805-69040829; SaCas9
cttgggaggtgatgaggt

SEQ ID NO: 19629 - DNA, 25 bp, Artificial Sequence
  Synthetic: FXN 3 forward 9:69040800-69040831; SaCas9
gggcccttgggaggtgatgaggtat

SEQ ID NO: 19630 - DNA, 24 bp, Artificial Sequence
  Synthetic: FXN 3 forward 9:69040801-69040831; SaCas9
ggcccttgggaggtgatgaggtat

SEQ ID NO: 19631 - DNA, 23 bp, Artificial Sequence
  Synthetic: FXN 3 forward 9:69040802-69040831; SaCas9
gcccttgggaggtgatgaggtat

SEQ ID NO: 19632 - DNA, 22 bp, Artificial Sequence
  Synthetic: FXN 3 forward 9:69040803-69040831; SaCas9
cccttgggaggtgatgaggtat

SEQ ID NO: 19633 - DNA, 21 bp, Artificial Sequence
  Synthetic: FXN 3 forward 9:69040804-69040831; SaCas9
ccttgggaggtgatgaggtat

SEQ ID NO: 19634 - DNA, 20 bp, Artificial Sequence
  Synthetic: FXN 3 forward 9:69040805-69040831; SaCas9
cttgggaggtgatgaggtat

SEQ ID NO: 19635 - DNA, 19 bp, Artificial Sequence
  Synthetic: FXN 3 forward 9:69040806-69040831; SaCas9
ttgggaggtgatgaggtat

SEQ ID NO: 19636 - DNA, 18 bp, Artificial Sequence
  Synthetic: FXN 3 forward 9:69040807-69040831; SaCas9
tgggaggtgatgaggtat

SEQ ID NO: 19637 - DNA, 25 bp, Artificial Sequence
  Synthetic: FXN 3 reverse 9:69040802-69040833; SaCas9
ccaccctcatacctcatcacctccc

SEQ ID NO: 19638 - DNA, 24 bp, Artificial Sequence
  Synthetic: FXN 3 reverse 9:69040803-69040833; SaCas9
caccctcatacctcatcacctccc

SEQ ID NO: 19639 - DNA, 23 bp, Artificial Sequence
  Synthetic: FXN 3 reverse 9:69040804-69040833; SaCas9
accctcatacctcatcacctccc

SEQ ID NO: 19640 - DNA, 22 bp, Artificial Sequence
  Synthetic: FXN 3 reverse 9:69040805-69040833; SaCas9
ccctcatacctcatcacctccc

SEQ ID NO: 19641 - DNA, 21 bp, Artificial Sequence
  Synthetic: FXN 3 reverse 9:69040806-69040833; SaCas9
cctcatacctcatcacctccc

SEQ ID NO: 19642 - DNA, 20 bp, Artificial Sequence
  Synthetic: FXN 3 reverse 9:69040807-69040833; SaCas9
ctcatacctcatcacctccc

SEQ ID NO: 19643 - DNA, 19 bp, Artificial Sequence
  Synthetic: FXN 3 reverse 9:69040808-69040833; SaCas9
tcatacctcatcacctccc

SEQ ID NO: 19644 - DNA, 18 bp, Artificial Sequence
  Synthetic: FXN 3 reverse 9:69040809-69040833; SaCas9
catacctcatcacctccc

SEQ ID NO: 19645 - DNA, 25 bp, Artificial Sequence
  Synthetic: FXN 3 forward 9:69040804-69040835; SaCas9
ccttgggaggtgatgaggtatgagg

SEQ ID NO: 19646 - DNA, 24 bp, Artificial Sequence
  Synthetic: FXN 3 forward 9:69040805-69040835; SaCas9
cttgggaggtgatgaggtatgagg

SEQ ID NO: 19647 - DNA, 23 bp, Artificial Sequence
  Synthetic: FXN 3 forward 9:69040806-69040835; SaCas9
ttgggaggtgatgaggtatgagg

SEQ ID NO: 19648 - DNA, 22 bp, Artificial Sequence
  Synthetic: FXN 3 forward 9:69040807-69040835; SaCas9
tgggaggtgatgaggtatgagg

SEQ ID NO: 19649 - DNA, 21 bp, Artificial Sequence
  Synthetic: FXN 3 forward 9:69040808-69040835; SaCas9
gggaggtgatgaggtatgagg

SEQ ID NO: 19650 - DNA, 20 bp, Artificial Sequence
  Synthetic: FXN 3 forward 9:69040809-69040835; SaCas9
ggaggtgatgaggtatgagg

SEQ ID NO: 19651 - DNA, 19 bp, Artificial Sequence
  Synthetic: FXN 3 forward 9:69040810-69040835; SaCas9
gaggtgatgaggtatgagg

SEQ ID NO: 19652 - DNA, 18 bp, Artificial Sequence
  Synthetic: FXN 3 forward 9:69040811-69040835; SaCas9
aggtgatgaggtatgagg

SEQ ID NO: 19653 - DNA, 25 bp, Artificial Sequence
  Synthetic: FXN 3 forward 9:69040805-69040836; SaCas9
cttgggaggtgatgaggtatgaggg

SEQ ID NO: 19654 - DNA, 24 bp, Artificial Sequence
  Synthetic: FXN 3 forward 9:69040806-69040836; SaCas9
ttgggaggtgatgaggtatgaggg

SEQ ID NO: 19655 - DNA, 23 bp, Artificial Sequence
  Synthetic: FXN 3 forward 9:69040807-69040836; SaCas9
tgggaggtgatgaggtatgaggg

SEQ ID NO: 19656 - DNA, 22 bp, Artificial Sequence
  Synthetic: FXN 3 forward 9:69040808-69040836; SaCas9
gggaggtgatgaggtatgaggg

SEQ ID NO: 19657 - DNA, 21 bp, Artificial Sequence
  Synthetic: FXN 3 forward 9:69040809-69040836; SaCas9
ggaggtgatgaggtatgaggg

SEQ ID NO: 19658 - DNA, 20 bp, Artificial Sequence
  Synthetic: FXN 3 forward 9:69040810-69040836; SaCas9
gaggtgatgaggtatgaggg

SEQ ID NO: 19659 - DNA, 19 bp, Artificial Sequence
  Synthetic: FXN 3 forward 9:69040811-69040836; SaCas9
aggtgatgaggtatgaggg

SEQ ID NO: 19660 - DNA, 18 bp, Artificial Sequence
  Synthetic: FXN 3 forward 9:69040812-69040836; SaCas9
ggtgatgaggtatgaggg

SEQ ID NO: 19661 - DNA, 25 bp, Artificial Sequence
  Synthetic: FXN 3 forward 9:69040819-69040850; SaCas9
aggtatgagggtggagcccatatga

SEQ ID NO: 19662 - DNA, 24 bp, Artificial Sequence
  Synthetic: FXN 3 forward 9:69040820-69040850; SaCas9
ggtatgagggtggagcccatatga

SEQ ID NO: 19663 - DNA, 23 bp, Artificial Sequence
  Synthetic: FXN 3 forward 9:69040821-69040850; SaCas9
gtatgagggtggagcccatatga

SEQ ID NO: 19664 - DNA, 22 bp, Artificial Sequence
  Synthetic: FXN 3 forward 9:69040822-69040850; SaCas9
tatgagggtggagcccatatga

SEQ ID NO: 19665 - DNA, 21 bp, Artificial Sequence
  Synthetic: FXN 3 forward 9:69040823-69040850; SaCas9
atgagggtggagcccatatga

SEQ ID NO: 19666 - DNA, 20 bp, Artificial Sequence
  Synthetic: FXN 3 forward 9:69040824-69040850; SaCas9
tgagggtggagcccatatga

SEQ ID NO: 19667 - DNA, 19 bp, Artificial Sequence
  Synthetic: FXN 3 forward 9:69040825-69040850; SaCas9
gagggtggagcccatatga

SEQ ID NO: 19668 - DNA, 18 bp, Artificial Sequence
  Synthetic: FXN 3 forward 9:69040826-69040850; SaCas9
agggtggagcccatatga

SEQ ID NO: 19669 - DNA, 25 bp, Artificial Sequence
  Synthetic: FXN 3 forward 9:69040820-69040851; SaCas9
ggtatgagggtggagcccatatgat

SEQ ID NO: 19670 - DNA, 24 bp, Artificial Sequence
  Synthetic: FXN 3 forward 9:69040821-69040851; SaCas9
gtatgagggtggagcccatatgat

SEQ ID NO: 19671 - DNA, 23 bp, Artificial Sequence
  Synthetic: FXN 3 forward 9:69040822-69040851; SaCas9
tatgagggtggagcccatatgat

SEQ ID NO: 19672 - DNA, 22 bp, Artificial Sequence
  Synthetic: FXN 3 forward 9:69040823-69040851; SaCas9
atgagggtggagcccatatgat

SEQ ID NO: 19673 - DNA, 21 bp, Artificial Sequence
  Synthetic: FXN 3 forward 9:69040824-69040851; SaCas9
tgagggtggagcccatatgat

SEQ ID NO: 19674 - DNA, 20 bp, Artificial Sequence
  Synthetic: FXN 3 forward 9:69040825-69040851; SaCas9
gagggtggagcccatatgat

SEQ ID NO: 19675 - DNA, 19 bp, Artificial Sequence
  Synthetic: FXN 3 forward 9:69040826-69040851; SaCas9
agggtggagcccatatgat

SEQ ID NO: 19676 - DNA, 18 bp, Artificial Sequence
  Synthetic: FXN 3 forward 9:69040827-69040851; SaCas9
gggtggagcccatatgat

SEQ ID NO: 19677 - DNA, 25 bp, Artificial Sequence
  Synthetic: FXN 3 reverse 9:69040834-69040865; SaCas9
ttagaagggcactaatcccaatcat

SEQ ID NO: 19678 - DNA, 24 bp, Artificial Sequence
  Synthetic: FXN 3 reverse 9:69040835-69040865; SaCas9
tagaagggcactaatcccaatcat

SEQ ID NO: 19679 - DNA, 23 bp, Artificial Sequence
  Synthetic: FXN 3 reverse 9:69040836-69040865; SaCas9
agaagggcactaatcccaatcat

SEQ ID NO: 19680 - DNA, 22 bp, Artificial Sequence
  Synthetic: FXN 3 reverse 9:69040837-69040865; SaCas9
gaagggcactaatcccaatcat

SEQ ID NO: 19681 - DNA, 21 bp, Artificial Sequence
  Synthetic: FXN 3 reverse 9:69040838-69040865; SaCas9
aagggcactaatcccaatcat

SEQ ID NO: 19682 - DNA, 20 bp, Artificial Sequence
  Synthetic: FXN 3 reverse 9:69040839-69040865; SaCas9
agggcactaatcccaatcat

SEQ ID NO: 19683 - DNA, 19 bp, Artificial Sequence
  Synthetic: FXN 3 reverse 9:69040840-69040865; SaCas9
gggcactaatcccaatcat

SEQ ID NO: 19684 - DNA, 18 bp, Artificial Sequence
  Synthetic: FXN 3 reverse 9:69040841-69040865; SaCas9
ggcactaatcccaatcat

SEQ ID NO: 19685 - DNA, 25 bp, Artificial Sequence
  Synthetic: FXN 3 forward 9:69040849-69040880; SaCas9
attagtgcccttctaaaatagccca

SEQ ID NO: 19686 - DNA, 24 bp, Artificial Sequence
  Synthetic: FXN 3 forward 9:69040850-69040880; SaCas9
ttagtgcccttctaaaatagccca

SEQ ID NO: 19687 - DNA, 23 bp, Artificial Sequence
  Synthetic: FXN 3 forward 9:69040851-69040880; SaCas9
tagtgcccttctaaaatagccca

SEQ ID NO: 19688 - DNA, 22 bp, Artificial Sequence
  Synthetic: FXN 3 forward 9:69040852-69040880; SaCas9
agtgcccttctaaaatagccca

SEQ ID NO: 19689 - DNA, 21 bp, Artificial Sequence
  Synthetic: FXN 3 forward 9:69040853-69040880; SaCas9
gtgcccttctaaaatagccca

SEQ ID NO: 19690 - DNA, 20 bp, Artificial Sequence
  Synthetic: FXN 3 forward 9:69040854-69040880; SaCas9
tgcccttctaaaatagccca

SEQ ID NO: 19691 - DNA, 19 bp, Artificial Sequence
  Synthetic: FXN 3 forward 9:69040855-69040880; SaCas9
gcccttctaaaatagccca

SEQ ID NO: 19692 - DNA, 18 bp, Artificial Sequence
  Synthetic: FXN 3 forward 9:69040856-69040880; SaCas9
cccttctaaaatagccca

SEQ ID NO: 19693 - DNA, 25 bp, Artificial Sequence
  Synthetic: FXN 3 forward 9:69040850-69040881; SaCas9
ttagtgcccttctaaaatagcccaa

SEQ ID NO: 19694 - DNA, 24 bp, Artificial Sequence
  Synthetic: FXN 3 forward 9:69040851-69040881; SaCas9
tagtgcccttctaaaatagcccaa

SEQ ID NO: 19695 - DNA, 23 bp, Artificial Sequence
  Synthetic: FXN 3 forward 9:69040852-69040881; SaCas9
agtgcccttctaaaatagcccaa

SEQ ID NO: 19696 - DNA, 22 bp, Artificial Sequence
  Synthetic: FXN 3 forward 9:69040853-69040881; SaCas9
gtgcccttctaaaatagcccaa

SEQ ID NO: 19697 - DNA, 21 bp, Artificial Sequence
  Synthetic: FXN 3 forward 9:69040854-69040881; SaCas9
tgcccttctaaaatagcccaa

SEQ ID NO: 19698 - DNA, 20 bp, Artificial Sequence
  Synthetic: FXN 3 forward 9:69040855-69040881; SaCas9
gcccttctaaaatagcccaa

SEQ ID NO: 19699 - DNA, 19 bp, Artificial Sequence
  Synthetic: FXN 3 forward 9:69040856-69040881; SaCas9
cccttctaaaatagcccaa

SEQ ID NO: 19700 - DNA, 18 bp, Artificial Sequence
  Synthetic: FXN 3 forward 9:69040857-69040881; SaCas9
ccttctaaaatagcccaa

SEQ ID NO: 19701 - DNA, 25 bp, Artificial Sequence
  Synthetic: FXN 3 reverse 9:69040855-69040886; SaCas9
actgggctccgttgggctattttag

SEQ ID NO: 19702 - DNA, 24 bp, Artificial Sequence
  Synthetic: FXN 3 reverse 9:69040856-69040886; SaCas9
ctgggctccgttgggctattttag

SEQ ID NO: 19703 - DNA, 23 bp, Artificial Sequence
  Synthetic: FXN 3 reverse 9:69040857-69040886; SaCas9
tgggctccgttgggctattttag

SEQ ID NO: 19704 - DNA, 22 bp, Artificial Sequence
  Synthetic: FXN 3 reverse 9:69040858-69040886; SaCas9
gggctccgttgggctattttag

SEQ ID NO: 19705 - DNA, 21 bp, Artificial Sequence
  Synthetic: FXN 3 reverse 9:69040859-69040886; SaCas9
ggctccgttgggctattttag

SEQ ID NO: 19706 - DNA, 20 bp, Artificial Sequence
  Synthetic: FXN 3 reverse 9:69040860-69040886; SaCas9
gctccgttgggctattttag

SEQ ID NO: 19707 - DNA, 19 bp, Artificial Sequence
  Synthetic: FXN 3 reverse 9:69040861-69040886; SaCas9
ctccgttgggctattttag

SEQ ID NO: 19708 - DNA, 18 bp, Artificial Sequence
  Synthetic: FXN 3 reverse 9:69040862-69040886; SaCas9
tccgttgggctattttag

SEQ ID NO: 19709 - DNA, 25 bp, Artificial Sequence
  Synthetic: FXN 3 reverse 9:69040858-69040889; SaCas9
gtcactgggctccgttgggctattt

SEQ ID NO: 19710 - DNA, 24 bp, Artificial Sequence
  Synthetic: FXN 3 reverse 9:69040859-69040889; SaCas9
tcactgggctccgttgggctattt

SEQ ID NO: 19711 - DNA, 23 bp, Artificial Sequence
  Synthetic: FXN 3 reverse 9:69040860-69040889; SaCas9
cactgggctccgttgggctattt

SEQ ID NO: 19712 - DNA, 22 bp, Artificial Sequence
  Synthetic: FXN 3 reverse 9:69040861-69040889; SaCas9
actgggctccgttgggctattt

SEQ ID NO: 19713 - DNA, 21 bp, Artificial Sequence
  Synthetic: FXN 3 reverse 9:69040862-69040889; SaCas9
ctgggctccgttgggctattt

SEQ ID NO: 19714 - DNA, 20 bp, Artificial Sequence
  Synthetic: FXN 3 reverse 9:69040863-69040889; SaCas9
tgggctccgttgggctattt

SEQ ID NO: 19715 - DNA, 19 bp, Artificial Sequence
  Synthetic: FXN 3 reverse 9:69040864-69040889; SaCas9
gggctccgttgggctattt

SEQ ID NO: 19716 - DNA, 18 bp, Artificial Sequence
  Synthetic: FXN 3 reverse 9:69040865-69040889; SaCas9
ggctccgttgggctattt

SEQ ID NO: 19717 - DNA, 25 bp, Artificial Sequence
  Synthetic: FXN 3 reverse 9:69040869-69040900; SaCas9
gatgatgccttgtcactgggctccg

SEQ ID NO: 19718 - DNA, 24 bp, Artificial Sequence
  Synthetic: FXN 3 reverse 9:69040870-69040900; SaCas9
atgatgccttgtcactgggctccg

SEQ ID NO: 19719 - DNA, 23 bp, Artificial Sequence
  Synthetic: FXN 3 reverse 9:69040871-69040900; SaCas9
tgatgccttgtcactgggctccg

SEQ ID NO: 19720 - DNA, 22 bp, Artificial Sequence
  Synthetic: FXN 3 reverse 9:69040872-69040900; SaCas9
gatgccttgtcactgggctccg

SEQ ID NO: 19721 - DNA, 21 bp, Artificial Sequence
  Synthetic: FXN 3 reverse 9:69040873-69040900; SaCas9
atgccttgtcactgggctccg

SEQ ID NO: 19722 - DNA, 20 bp, Artificial Sequence
  Synthetic: FXN 3 reverse 9:69040874-69040900; SaCas9
tgccttgtcactgggctccg

SEQ ID NO: 19723 - DNA, 19 bp, Artificial Sequence
  Synthetic: FXN 3 reverse 9:69040875-69040900; SaCas9
gccttgtcactgggctccg

SEQ ID NO: 19724 - DNA, 18 bp, Artificial Sequence
  Synthetic: FXN 3 reverse 9:69040876-69040900; SaCas9
ccttgtcactgggctccg

SEQ ID NO: 19725 - DNA, 25 bp, Artificial Sequence
  Synthetic: FXN 3 forward 9:69040876-69040907; SaCas9
ggagcccagtgacaaggcatcatct

SEQ ID NO: 19726 - DNA, 24 bp, Artificial Sequence
  Synthetic: FXN 3 forward 9:69040877-69040907; SaCas9
gagcccagtgacaaggcatcatct

SEQ ID NO: 19727 - DNA, 23 bp, Artificial Sequence
  Synthetic: FXN 3 forward 9:69040878-69040907; SaCas9
agcccagtgacaaggcatcatct

SEQ ID NO: 19728 - DNA, 22 bp, Artificial Sequence
  Synthetic: FXN 3 forward 9:69040879-69040907; SaCas9
gcccagtgacaaggcatcatct

SEQ ID NO: 19729 - DNA, 21 bp, Artificial Sequence
  Synthetic: FXN 3 forward 9:69040880-69040907; SaCas9
cccagtgacaaggcatcatct

SEQ ID NO: 19730 - DNA, 20 bp, Artificial Sequence
  Synthetic: FXN 3 forward 9:69040881-69040907; SaCas9
ccagtgacaaggcatcatct

SEQ ID NO: 19731 - DNA, 19 bp, Artificial Sequence
  Synthetic: FXN 3 forward 9:69040882-69040907; SaCas9
cagtgacaaggcatcatct

SEQ ID NO: 19732 - DNA, 18 bp, Artificial Sequence
  Synthetic: FXN 3 forward 9:69040883-69040907; SaCas9
agtgacaaggcatcatct

SEQ ID NO: 19733 - DNA, 25 bp, Artificial Sequence
  Synthetic: FXN 3 reverse 9:69040879-69040910; SaCas9
ctggttcatagatgatgccttgtca

SEQ ID NO: 19734 - DNA, 24 bp, Artificial Sequence
  Synthetic: FXN 3 reverse 9:69040880-69040910; SaCas9
tggttcatagatgatgccttgtca

SEQ ID NO: 19735 - DNA, 23 bp, Artificial Sequence
  Synthetic: FXN 3 reverse 9:69040881-69040910; SaCas9
ggttcatagatgatgccttgtca

SEQ ID NO: 19736 - DNA, 22 bp, Artificial Sequence
  Synthetic: FXN 3 reverse 9:69040882-69040910; SaCas9
gttcatagatgatgccttgtca

SEQ ID NO: 19737 - DNA, 21 bp, Artificial Sequence
  Synthetic: FXN 3 reverse 9:69040883-69040910; SaCas9
ttcatagatgatgccttgtca

SEQ ID NO: 19738 - DNA, 20 bp, Artificial Sequence
  Synthetic: FXN 3 reverse 9:69040884-69040910; SaCas9
tcatagatgatgccttgtca

SEQ ID NO: 19739 - DNA, 19 bp, Artificial Sequence
  Synthetic: FXN 3 reverse 9:69040885-69040910; SaCas9
catagatgatgccttgtca

SEQ ID NO: 19740 - DNA, 18 bp, Artificial Sequence
  Synthetic: FXN 3 reverse 9:69040886-69040910; SaCas9
atagatgatgccttgtca

SEQ ID NO: 19741 - DNA, 25 bp, Artificial Sequence
  Synthetic: FXN 3 forward 9:69040882-69040913; SaCas9
cagtgacaaggcatcatctatgaac

SEQ ID NO: 19742 - DNA, 24 bp, Artificial Sequence
  Synthetic: FXN 3 forward 9:69040883-69040913; SaCas9
agtgacaaggcatcatctatgaac

SEQ ID NO: 19743 - DNA, 23 bp, Artificial Sequence
  Synthetic: FXN 3 forward 9:69040884-69040913; SaCas9
gtgacaaggcatcatctatgaac

SEQ ID NO: 19744 - DNA, 22 bp, Artificial Sequence
  Synthetic: FXN 3 forward 9:69040885-69040913; SaCas9
tgacaaggcatcatctatgaac

SEQ ID NO: 19745 - DNA, 21 bp, Artificial Sequence
  Synthetic: FXN 3 forward 9:69040886-69040913; SaCas9
gacaaggcatcatctatgaac

SEQ ID NO: 19746 - DNA, 20 bp, Artificial Sequence
  Synthetic: FXN 3 forward 9:69040887-69040913; SaCas9
acaaggcatcatctatgaac

SEQ ID NO: 19747 - DNA, 19 bp, Artificial Sequence
  Synthetic: FXN 3 forward 9:69040888-69040913; SaCas9
caaggcatcatctatgaac

SEQ ID NO: 19748 - DNA, 18 bp, Artificial Sequence
  Synthetic: FXN 3 forward 9:69040889-69040913; SaCas9
aaggcatcatctatgaac

SEQ ID NO: 19749 - DNA, 25 bp, Artificial Sequence
  Synthetic: FXN 3 forward 9:69040883-69040914; SaCas9
agtgacaaggcatcatctatgaacc

SEQ ID NO: 19750 - DNA, 24 bp, Artificial Sequence
  Synthetic: FXN 3 forward 9:69040884-69040914; SaCas9
gtgacaaggcatcatctatgaacc

SEQ ID NO: 19751 - DNA, 23 bp, Artificial Sequence
  Synthetic: FXN 3 forward 9:69040885-69040914; SaCas9
tgacaaggcatcatctatgaacc

SEQ ID NO: 19752 - DNA, 22 bp, Artificial Sequence
  Synthetic: FXN 3 forward 9:69040886-69040914; SaCas9
gacaaggcatcatctatgaacc

SEQ ID NO: 19753 - DNA, 21 bp, Artificial Sequence
  Synthetic: FXN 3 forward 9:69040887-69040914; SaCas9
acaaggcatcatctatgaacc

SEQ ID NO: 19754 - DNA, 20 bp, Artificial Sequence
  Synthetic: FXN 3 forward 9:69040888-69040914; SaCas9
caaggcatcatctatgaacc

SEQ ID NO: 19755 - DNA, 19 bp, Artificial Sequence
  Synthetic: FXN 3 forward 9:69040889-69040914; SaCas9
aaggcatcatctatgaacc

SEQ ID NO: 19756 - DNA, 18 bp, Artificial Sequence
  Synthetic: FXN 3 forward 9:69040890-69040914; SaCas9
aggcatcatctatgaacc

SEQ ID NO: 19757 - DNA, 25 bp, Artificial Sequence
  Synthetic: FXN 3 reverse 9:69040917-69040948; SaCas9
tgcaccaacagctttggtgtctggt

SEQ ID NO: 19758 - DNA, 24 bp, Artificial Sequence
  Synthetic: FXN 3 reverse 9:69040918-69040948; SaCas9
gcaccaacagctttggtgtctggt

SEQ ID NO: 19759 - DNA, 23 bp, Artificial Sequence
  Synthetic: FXN 3 reverse 9:69040919-69040948; SaCas9
caccaacagctttggtgtctggt

SEQ ID NO: 19760 - DNA, 22 bp, Artificial Sequence
  Synthetic: FXN 3 reverse 9:69040920-69040948; SaCas9
accaacagctttggtgtctggt

SEQ ID NO: 19761 - DNA, 21 bp, Artificial Sequence
  Synthetic: FXN 3 reverse 9:69040921-69040948; SaCas9
ccaacagctttggtgtctggt

SEQ ID NO: 19762 - DNA, 20 bp, Artificial Sequence
  Synthetic: FXN 3 reverse 9:69040922-69040948; SaCas9
caacagctttggtgtctggt

SEQ ID NO: 19763 - DNA, 19 bp, Artificial Sequence
  Synthetic: FXN 3 reverse 9:69040923-69040948; SaCas9
aacagctttggtgtctggt

SEQ ID NO: 19764 - DNA, 18 bp, Artificial Sequence
  Synthetic: FXN 3 reverse 9:69040924-69040948; SaCas9
acagctttggtgtctggt

SEQ ID NO: 19765 - DNA, 25 bp, Artificial Sequence
  Synthetic: FXN 3 reverse 9:69040919-69040950; SaCas9
aatgcaccaacagctttggtgtctg

SEQ ID NO: 19766 - DNA, 24 bp, Artificial Sequence
  Synthetic: FXN 3 reverse 9:69040920-69040950; SaCas9
atgcaccaacagctttggtgtctg

SEQ ID NO: 19767 - DNA, 23 bp, Artificial Sequence
  Synthetic: FXN 3 reverse 9:69040921-69040950; SaCas9
tgcaccaacagctttggtgtctg

SEQ ID NO: 19768 - DNA, 22 bp, Artificial Sequence
  Synthetic: FXN 3 reverse 9:69040922-69040950; SaCas9
gcaccaacagctttggtgtctg

SEQ ID NO: 19769 - DNA, 21 bp, Artificial Sequence
  Synthetic: FXN 3 reverse 9:69040923-69040950; SaCas9
caccaacagctttggtgtctg

SEQ ID NO: 19770 - DNA, 20 bp, Artificial Sequence
  Synthetic: FXN 3 reverse 9:69040924-69040950; SaCas9
accaacagctttggtgtctg

SEQ ID NO: 19771 - DNA, 19 bp, Artificial Sequence
  Synthetic: FXN 3 reverse 9:69040925-69040950; SaCas9
ccaacagctttggtgtctg

SEQ ID NO: 19772 - DNA, 18 bp, Artificial Sequence
  Synthetic: FXN 3 reverse 9:69040926-69040950; SaCas9
caacagctttggtgtctg

SEQ ID NO: 19773 - DNA, 25 bp, Artificial Sequence
  Synthetic: FXN 3 forward 9:69040929-69040960; SaCas9
caccaaagctgttggtgcattgatc

SEQ ID NO: 19774 - DNA, 24 bp, Artificial Sequence
  Synthetic: FXN 3 forward 9:69040930-69040960; SaCas9
accaaagctgttggtgcattgatc

SEQ ID NO: 19775 - DNA, 23 bp, Artificial Sequence
  Synthetic: FXN 3 forward 9:69040931-69040960; SaCas9
ccaaagctgttggtgcattgatc

SEQ ID NO: 19776 - DNA, 22 bp, Artificial Sequence
  Synthetic: FXN 3 forward 9:69040932-69040960; SaCas9
caaagctgttggtgcattgatc

SEQ ID NO: 19777 - DNA, 21 bp, Artificial Sequence
  Synthetic: FXN 3 forward 9:69040933-69040960; SaCas9
aaagctgttggtgcattgatc

SEQ ID NO: 19778 - DNA, 20 bp, Artificial Sequence
  Synthetic: FXN 3 forward 9:69040934-69040960; SaCas9
aagctgttggtgcattgatc

SEQ ID NO: 19779 - DNA, 19 bp, Artificial Sequence
  Synthetic: FXN 3 forward 9:69040935-69040960; SaCas9
agctgttggtgcattgatc

SEQ ID NO: 19780 - DNA, 18 bp, Artificial Sequence
  Synthetic: FXN 3 forward 9:69040936-69040960; SaCas9
gctgttggtgcattgatc

SEQ ID NO: 19781 - DNA, 25 bp, Artificial Sequence
  Synthetic: FXN 3 forward 9:69040946-69040977; SaCas9
cattgatcttggatttcccaccctc

SEQ ID NO: 19782 - DNA, 24 bp, Artificial Sequence
  Synthetic: FXN 3 forward 9:69040947-69040977; SaCas9
attgatcttggatttcccaccctc

SEQ ID NO: 19783 - DNA, 23 bp, Artificial Sequence
  Synthetic: FXN 3 forward 9:69040948-69040977; SaCas9
ttgatcttggatttcccaccctc

SEQ ID NO: 19784 - DNA, 22 bp, Artificial Sequence
  Synthetic: FXN 3 forward 9:69040949-69040977; SaCas9
tgatcttggatttcccaccctc

SEQ ID NO: 19785 - DNA, 21 bp, Artificial Sequence
  Synthetic: FXN 3 forward 9:69040950-69040977; SaCas9
gatcttggatttcccaccctc

SEQ ID NO: 19786 - DNA, 20 bp, Artificial Sequence
  Synthetic: FXN 3 forward 9:69040951-69040977; SaCas9
atcttggatttcccaccctc

SEQ ID NO: 19787 - DNA, 19 bp, Artificial Sequence
  Synthetic: FXN 3 forward 9:69040952-69040977; SaCas9
tcttggatttcccaccctc

SEQ ID NO: 19788 - DNA, 18 bp, Artificial Sequence
  Synthetic: FXN 3 forward 9:69040953-69040977; SaCas9
cttggatttcccaccctc

SEQ ID NO: 19789 - DNA, 25 bp, Artificial Sequence
  Synthetic: FXN 3 forward 9:69040955-69040986; SaCas9
tggatttcccaccctccaggactct

SEQ ID NO: 19790 - DNA, 24 bp, Artificial Sequence
  Synthetic: FXN 3 forward 9:69040956-69040986; SaCas9
ggatttcccaccctccaggactct

SEQ ID NO: 19791 - DNA, 23 bp, Artificial Sequence
  Synthetic: FXN 3 forward 9:69040957-69040986; SaCas9
gatttcccaccctccaggactct

SEQ ID NO: 19792 - DNA, 22 bp, Artificial Sequence
  Synthetic: FXN 3 forward 9:69040958-69040986; SaCas9
atttcccaccctccaggactct

SEQ ID NO: 19793 - DNA, 21 bp, Artificial Sequence
  Synthetic: FXN 3 forward 9:69040959-69040986; SaCas9
tttcccaccctccaggactct

SEQ ID NO: 19794 - DNA, 20 bp, Artificial Sequence
  Synthetic: FXN 3 forward 9:69040960-69040986; SaCas9
ttcccaccctccaggactct

SEQ ID NO: 19795 - DNA, 19 bp, Artificial Sequence
  Synthetic: FXN 3 forward 9:69040961-69040986; SaCas9
tcccaccctccaggactct

SEQ ID NO: 19796 - DNA, 18 bp, Artificial Sequence
  Synthetic: FXN 3 forward 9:69040962-69040986; SaCas9
cccaccctccaggactct

SEQ ID NO: 19797 - DNA, 25 bp, Artificial Sequence
  Synthetic: FXN 3 reverse 9:69040959-69040990; SaCas9
tgtgtttcttagagtcctggagggt

SEQ ID NO: 19798 - DNA, 24 bp, Artificial Sequence
  Synthetic: FXN 3 reverse 9:69040960-69040990; SaCas9
gtgtttcttagagtcctggagggt

SEQ ID NO: 19799 - DNA, 23 bp, Artificial Sequence
  Synthetic: FXN 3 reverse 9:69040961-69040990; SaCas9
tgtttcttagagtcctggagggt

SEQ ID NO: 19800 - DNA, 22 bp, Artificial Sequence
  Synthetic: FXN 3 reverse 9:69040962-69040990; SaCas9
gtttcttagagtcctggagggt

SEQ ID NO: 19801 - DNA, 21 bp, Artificial Sequence
  Synthetic: FXN 3 reverse 9:69040963-69040990; SaCas9
tttcttagagtcctggagggt

SEQ ID NO: 19802 - DNA, 20 bp, Artificial Sequence
  Synthetic: FXN 3 reverse 9:69040964-69040990; SaCas9
ttcttagagtcctggagggt

SEQ ID NO: 19803 - DNA, 19 bp, Artificial Sequence
  Synthetic: FXN 3 reverse 9:69040965-69040990; SaCas9
tcttagagtcctggagggt

SEQ ID NO: 19804 - DNA, 18 bp, Artificial Sequence
  Synthetic: FXN 3 reverse 9:69040966-69040990; SaCas9
cttagagtcctggagggt

SEQ ID NO: 19805 - DNA, 25 bp, Artificial Sequence
  Synthetic: FXN 3 reverse 9:69040960-69040991; SaCas9
atgtgtttcttagagtcctggaggg

SEQ ID NO: 19806 - DNA, 24 bp, Artificial Sequence
  Synthetic: FXN 3 reverse 9:69040961-69040991; SaCas9
tgtgtttcttagagtcctggaggg

SEQ ID NO: 19807 - DNA, 23 bp, Artificial Sequence
  Synthetic: FXN 3 reverse 9:69040962-69040991; SaCas9
gtgtttcttagagtcctggaggg

SEQ ID NO: 19808 - DNA, 22 bp, Artificial Sequence
  Synthetic: FXN 3 reverse 9:69040963-69040991; SaCas9
tgtttcttagagtcctggaggg

SEQ ID NO: 19809 - DNA, 21 bp, Artificial Sequence
  Synthetic: FXN 3 reverse 9:69040964-69040991; SaCas9
gtttcttagagtcctggaggg

SEQ ID NO: 19810 - DNA, 20 bp, Artificial Sequence
  Synthetic: FXN 3 reverse 9:69040965-69040991; SaCas9
tttcttagagtcctggaggg

SEQ ID NO: 19811 - DNA, 19 bp, Artificial Sequence
  Synthetic: FXN 3 reverse 9:69040966-69040991; SaCas9
ttcttagagtcctggaggg

SEQ ID NO: 19812 - DNA, 18 bp, Artificial Sequence
  Synthetic: FXN 3 reverse 9:69040967-69040991; SaCas9
tcttagagtcctggaggg

SEQ ID NO: 19813 - DNA, 25 bp, Artificial Sequence
  Synthetic: FXN 3 reverse 9:69040961-69040992; SaCas9
aatgtgtttcttagagtcctggagg

SEQ ID NO: 19814 - DNA, 24 bp, Artificial Sequence
  Synthetic: FXN 3 reverse 9:69040962-69040992; SaCas9
atgtgtttcttagagtcctggagg

SEQ ID NO: 19815 - DNA, 23 bp, Artificial Sequence
  Synthetic: FXN 3 reverse 9:69040963-69040992; SaCas9
tgtgtttcttagagtcctggagg

SEQ ID NO: 19816 - DNA, 22 bp, Artificial Sequence
  Synthetic: FXN 3 reverse 9:69040964-69040992; SaCas9
gtgtttcttagagtcctggagg

SEQ ID NO: 19817 - DNA, 21 bp, Artificial Sequence
  Synthetic: FXN 3 reverse 9:69040965-69040992; SaCas9
tgtttcttagagtcctggagg

SEQ ID NO: 19818 - DNA, 20 bp, Artificial Sequence
  Synthetic: FXN 3 reverse 9:69040966-69040992; SaCas9
gtttcttagagtcctggagg

SEQ ID NO: 19819 - DNA, 19 bp, Artificial Sequence
  Synthetic: FXN 3 reverse 9:69040967-69040992; SaCas9
tttcttagagtcctggagg

SEQ ID NO: 19820 - DNA, 18 bp, Artificial Sequence
  Synthetic: FXN 3 reverse 9:69040968-69040992; SaCas9
ttcttagagtcctggagg

SEQ ID NO: 19821 - DNA, 25 bp, Artificial Sequence
  Synthetic: FXN 3 reverse 9:69040965-69040996; SaCas9
tagaaatgtgtttcttagagtcctg

SEQ ID NO: 19822 - DNA, 24 bp, Artificial Sequence
  Synthetic: FXN 3 reverse 9:69040966-69040996; SaCas9
agaaatgtgtttcttagagtcctg

SEQ ID NO: 19823 - DNA, 23 bp, Artificial Sequence
  Synthetic: FXN 3 reverse 9:69040967-69040996; SaCas9
gaaatgtgtttcttagagtcctg

SEQ ID NO: 19824 - DNA, 22 bp, Artificial Sequence
  Synthetic: FXN 3 reverse 9:69040968-69040996; SaCas9
aaatgtgtttcttagagtcctg

SEQ ID NO: 19825 - DNA, 21 bp, Artificial Sequence
  Synthetic: FXN 3 reverse 9:69040969-69040996; SaCas9
aatgtgtttcttagagtcctg

SEQ ID NO: 19826 - DNA, 20 bp, Artificial Sequence
  Synthetic: FXN 3 reverse 9:69040970-69040996; SaCas9
atgtgtttcttagagtcctg

SEQ ID NO: 19827 - DNA, 19 bp, Artificial Sequence
  Synthetic: FXN 3 reverse 9:69040971-69040996; SaCas9
tgtgtttcttagagtcctg

SEQ ID NO: 19828 - DNA, 18 bp, Artificial Sequence
  Synthetic: FXN 3 reverse 9:69040972-69040996; SaCas9
gtgtttcttagagtcctg

SEQ ID NO: 19829 - DNA, 25 bp, Artificial Sequence
  Synthetic: FXN 3 reverse 9:69040967-69040998; SaCas9
aatagaaatgtgtttcttagagtcc

SEQ ID NO: 19830 - DNA, 24 bp, Artificial Sequence
  Synthetic: FXN 3 reverse 9:69040968-69040998; SaCas9
atagaaatgtgtttcttagagtcc

SEQ ID NO: 19831 - DNA, 23 bp, Artificial Sequence
  Synthetic: FXN 3 reverse 9:69040969-69040998; SaCas9
tagaaatgtgtttcttagagtcc

SEQ ID NO: 19832 - DNA, 22 bp, Artificial Sequence
  Synthetic: FXN 3 reverse 9:69040970-69040998; SaCas9
agaaatgtgtttcttagagtcc

SEQ ID NO: 19833 - DNA, 21 bp, Artificial Sequence
  Synthetic: FXN 3 reverse 9:69040971-69040998; SaCas9
gaaatgtgtttcttagagtcc

SEQ ID NO: 19834 - DNA, 20 bp, Artificial Sequence
  Synthetic: FXN 3 reverse 9:69040972-69040998; SaCas9
aaatgtgtttcttagagtcc

SEQ ID NO: 19835 - DNA, 19 bp, Artificial Sequence
  Synthetic: FXN 3 reverse 9:69040973-69040998; SaCas9
aatgtgtttcttagagtcc

SEQ ID NO: 19836 - DNA, 18 bp, Artificial Sequence
  Synthetic: FXN 3 reverse 9:69040974-69040998; SaCas9
atgtgtttcttagagtcc

SEQ ID NO: 19837 - DNA, 25 bp, Artificial Sequence
  Synthetic: FXN 3 reverse 9:69040968-69040999; SaCas9
caatagaaatgtgtttcttagagtc

SEQ ID NO: 19838 - DNA, 24 bp, Artificial Sequence
  Synthetic: FXN 3 reverse 9:69040969-69040999; SaCas9
aatagaaatgtgtttcttagagtc

SEQ ID NO: 19839 - DNA, 23 bp, Artificial Sequence
  Synthetic: FXN 3 reverse 9:69040970-69040999; SaCas9
atagaaatgtgtttcttagagtc

SEQ ID NO: 19840 - DNA, 22 bp, Artificial Sequence
  Synthetic: FXN 3 reverse 9:69040971-69040999; SaCas9
tagaaatgtgtttcttagagtc

SEQ ID NO: 19841 - DNA, 21 bp, Artificial Sequence
  Synthetic: FXN 3 reverse 9:69040972-69040999; SaCas9
agaaatgtgtttcttagagtc

SEQ ID NO: 19842 - DNA, 20 bp, Artificial Sequence
  Synthetic: FXN 3 reverse 9:69040973-69040999; SaCas9
gaaatgtgtttcttagagtc

SEQ ID NO: 19843 - DNA, 19 bp, Artificial Sequence
  Synthetic: FXN 3 reverse 9:69040974-69040999; SaCas9
aaatgtgtttcttagagtc

SEQ ID NO: 19844 - DNA, 18 bp, Artificial Sequence
  Synthetic: FXN 3 reverse 9:69040975-69040999; SaCas9
aatgtgtttcttagagtc

SEQ ID NO: 19845 - DNA, 25 bp, Artificial Sequence
  Synthetic: FXN 3 reverse 9:69040975-69041006; SaCas9
ttataaacaatagaaatgtgtttct

SEQ ID NO: 19846 - DNA, 24 bp, Artificial Sequence
  Synthetic: FXN 3 reverse 9:69040976-69041006; SaCas9
tataaacaatagaaatgtgtttct

SEQ ID NO: 19847 - DNA, 23 bp, Artificial Sequence
  Synthetic: FXN 3 reverse 9:69040977-69041006; SaCas9
ataaacaatagaaatgtgtttct

SEQ ID NO: 19848 - DNA, 22 bp, Artificial Sequence
  Synthetic: FXN 3 reverse 9:69040978-69041006; SaCas9
taaacaatagaaatgtgtttct

SEQ ID NO: 19849 - DNA, 21 bp, Artificial Sequence
  Synthetic: FXN 3 reverse 9:69040979-69041006; SaCas9
aaacaatagaaatgtgtttct

SEQ ID NO: 19850 - DNA, 20 bp, Artificial Sequence
  Synthetic: FXN 3 reverse 9:69040980-69041006; SaCas9
aacaatagaaatgtgtttct

SEQ ID NO: 19851 - DNA, 19 bp, Artificial Sequence
  Synthetic: FXN 3 reverse 9:69040981-69041006; SaCas9
acaatagaaatgtgtttct

SEQ ID NO: 19852 - DNA, 18 bp, Artificial Sequence
  Synthetic: FXN 3 reverse 9:69040982-69041006; SaCas9
caatagaaatgtgtttct

SEQ ID NO: 19853 - DNA, 25 bp, Artificial Sequence
  Synthetic: FXN 3 reverse 9:69040990-69041021; SaCas9
cagccactgggtggcttataaacaa

SEQ ID NO: 19854 - DNA, 24 bp, Artificial Sequence
  Synthetic: FXN 3 reverse 9:69040991-69041021; SaCas9
agccactgggtggcttataaacaa

SEQ ID NO: 19855 - DNA, 23 bp, Artificial Sequence
  Synthetic: FXN 3 reverse 9:69040992-69041021; SaCas9
gccactgggtggcttataaacaa

SEQ ID NO: 19856 - DNA, 22 bp, Artificial Sequence
  Synthetic: FXN 3 reverse 9:69040993-69041021; SaCas9
ccactgggtggcttataaacaa

SEQ ID NO: 19857 - DNA, 21 bp, Artificial Sequence
  Synthetic: FXN 3 reverse 9:69040994-69041021; SaCas9
cactgggtggcttataaacaa

SEQ ID NO: 19858 - DNA, 20 bp, Artificial Sequence
  Synthetic: FXN 3 reverse 9:69040995-69041021; SaCas9
actgggtggcttataaacaa

SEQ ID NO: 19859 - DNA, 19 bp, Artificial Sequence
  Synthetic: FXN 3 reverse 9:69040996-69041021; SaCas9
ctgggtggcttataaacaa

SEQ ID NO: 19860 - DNA, 18 bp, Artificial Sequence
  Synthetic: FXN 3 reverse 9:69040997-69041021; SaCas9
tgggtggcttataaacaa

SEQ ID NO: 19861 - DNA, 25 bp, Artificial Sequence
  Synthetic: FXN 3 reverse 9:69041009-69041040; SaCas9
ggatgttataacaaaataccagcca

SEQ ID NO: 19862 - DNA, 24 bp, Artificial Sequence
  Synthetic: FXN 3 reverse 9:69041010-69041040; SaCas9
gatgttataacaaaataccagcca

SEQ ID NO: 19863 - DNA, 23 bp, Artificial Sequence
  Synthetic: FXN 3 reverse 9:69041011-69041040; SaCas9
atgttataacaaaataccagcca

SEQ ID NO: 19864 - DNA, 22 bp, Artificial Sequence
  Synthetic: FXN 3 reverse 9:69041012-69041040; SaCas9
tgttataacaaaataccagcca

SEQ ID NO: 19865 - DNA, 21 bp, Artificial Sequence
  Synthetic: FXN 3 reverse 9:69041013-69041040; SaCas9
gttataacaaaataccagcca

SEQ ID NO: 19866 - DNA, 20 bp, Artificial Sequence
  Synthetic: FXN 3 reverse 9:69041014-69041040; SaCas9
ttataacaaaataccagcca

SEQ ID NO: 19867 - DNA, 19 bp, Artificial Sequence
  Synthetic: FXN 3 reverse 9:69041015-69041040; SaCas9
tataacaaaataccagcca

SEQ ID NO: 19868 - DNA, 18 bp, Artificial Sequence
  Synthetic: FXN 3 reverse 9:69041016-69041040; SaCas9
ataacaaaataccagcca

SEQ ID NO: 19869 - DNA, 25 bp, Artificial Sequence
  Synthetic: FXN 3 reverse 9:69041036-69041067; SaCas9
caagtatttgttatttgtcttagtc

SEQ ID NO: 19870 - DNA, 24 bp, Artificial Sequence
  Synthetic: FXN 3 reverse 9:69041037-69041067; SaCas9
aagtatttgttatttgtcttagtc

SEQ ID NO: 19871 - DNA, 23 bp, Artificial Sequence
  Synthetic: FXN 3 reverse 9:69041038-69041067; SaCas9
agtatttgttatttgtcttagtc

SEQ ID NO: 19872 - DNA, 22 bp, Artificial Sequence
  Synthetic: FXN 3 reverse 9:69041039-69041067; SaCas9
gtatttgttatttgtcttagtc

SEQ ID NO: 19873 - DNA, 21 bp, Artificial Sequence
  Synthetic: FXN 3 reverse 9:69041040-69041067; SaCas9
tatttgttatttgtcttagtc

SEQ ID NO: 19874 - DNA, 20 bp, Artificial Sequence
  Synthetic: FXN 3 reverse 9:69041041-69041067; SaCas9
atttgttatttgtcttagtc

SEQ ID NO: 19875 - DNA, 19 bp, Artificial Sequence
  Synthetic: FXN 3 reverse 9:69041042-69041067; SaCas9
tttgttatttgtcttagtc

SEQ ID NO: 19876 - DNA, 18 bp, Artificial Sequence
  Synthetic: FXN 3 reverse 9:69041043-69041067; SaCas9
ttgttatttgtcttagtc

SEQ ID NO: 19877 - DNA, 25 bp, Artificial Sequence
  Synthetic: FXN 3 reverse 9:69041037-69041068; SaCas9
acaagtatttgttatttgtcttagt

SEQ ID NO: 19878 - DNA, 24 bp, Artificial Sequence
  Synthetic: FXN 3 reverse 9:69041038-69041068; SaCas9
caagtatttgttatttgtcttagt

SEQ ID NO: 19879 - DNA, 23 bp, Artificial Sequence
  Synthetic: FXN 3 reverse 9:69041039-69041068; SaCas9
aagtatttgttatttgtcttagt

SEQ ID NO: 19880 - DNA, 22 bp, Artificial Sequence
  Synthetic: FXN 3 reverse 9:69041040-69041068; SaCas9
agtatttgttatttgtcttagt

SEQ ID NO: 19881 - DNA, 21 bp, Artificial Sequence
  Synthetic: FXN 3 reverse 9:69041041-69041068; SaCas9
gtatttgttatttgtcttagt

SEQ ID NO: 19882 - DNA, 20 bp, Artificial Sequence
  Synthetic: FXN 3 reverse 9:69041042-69041068; SaCas9
tatttgttatttgtcttagt

SEQ ID NO: 19883 - DNA, 19 bp, Artificial Sequence
  Synthetic: FXN 3 reverse 9:69041043-69041068; SaCas9
atttgttatttgtcttagt

SEQ ID NO: 19884 - DNA, 18 bp, Artificial Sequence
  Synthetic: FXN 3 reverse 9:69041044-69041068; SaCas9
tttgttatttgtcttagt

SEQ ID NO: 19885 - DNA, 25 bp, Artificial Sequence
  Synthetic: FXN 3 forward 9:69041060-69041091; SaCas9
atacttgtatccctgacaccaggtt

SEQ ID NO: 19886 - DNA, 24 bp, Artificial Sequence
  Synthetic: FXN 3 forward 9:69041061-69041091; SaCas9
tacttgtatccctgacaccaggtt

SEQ ID NO: 19887 - DNA, 23 bp, Artificial Sequence
  Synthetic: FXN 3 forward 9:69041062-69041091; SaCas9
acttgtatccctgacaccaggtt

SEQ ID NO: 19888 - DNA, 22 bp, Artificial Sequence
  Synthetic: FXN 3 forward 9:69041063-69041091; SaCas9
cttgtatccctgacaccaggtt

SEQ ID NO: 19889 - DNA, 21 bp, Artificial Sequence
  Synthetic: FXN 3 forward 9:69041064-69041091; SaCas9
ttgtatccctgacaccaggtt

SEQ ID NO: 19890 - DNA, 20 bp, Artificial Sequence
  Synthetic: FXN 3 forward 9:69041065-69041091; SaCas9
tgtatccctgacaccaggtt

SEQ ID NO: 19891 - DNA, 19 bp, Artificial Sequence
  Synthetic: FXN 3 forward 9:69041066-69041091; SaCas9
gtatccctgacaccaggtt

SEQ ID NO: 19892 - DNA, 18 bp, Artificial Sequence
  Synthetic: FXN 3 forward 9:69041067-69041091; SaCas9
tatccctgacaccaggtt

SEQ ID NO: 19893 - DNA, 25 bp, Artificial Sequence
  Synthetic: FXN 3 forward 9:69041066-69041097; SaCas9
gtatccctgacaccaggttaagaga

SEQ ID NO: 19894 - DNA, 24 bp, Artificial Sequence
  Synthetic: FXN 3 forward 9:69041067-69041097; SaCas9
tatccctgacaccaggttaagaga

SEQ ID NO: 19895 - DNA, 23 bp, Artificial Sequence
  Synthetic: FXN 3 forward 9:69041068-69041097; SaCas9
atccctgacaccaggttaagaga

SEQ ID NO: 19896 - DNA, 22 bp, Artificial Sequence
  Synthetic: FXN 3 forward 9:69041069-69041097; SaCas9
tccctgacaccaggttaagaga

SEQ ID NO: 19897 - DNA, 21 bp, Artificial Sequence
  Synthetic: FXN 3 forward 9:69041070-69041097; SaCas9
ccctgacaccaggttaagaga

SEQ ID NO: 19898 - DNA, 20 bp, Artificial Sequence
  Synthetic: FXN 3 forward 9:69041071-69041097; SaCas9
cctgacaccaggttaagaga

SEQ ID NO: 19899 - DNA, 19 bp, Artificial Sequence
  Synthetic: FXN 3 forward 9:69041072-69041097; SaCas9
ctgacaccaggttaagaga

SEQ ID NO: 19900 - DNA, 18 bp, Artificial Sequence
  Synthetic: FXN 3 forward 9:69041073-69041097; SaCas9
tgacaccaggttaagaga

SEQ ID NO: 19901 - DNA, 25 bp, Artificial Sequence
  Synthetic: FXN 3 reverse 9:69041068-69041099; SaCas9
aaattctatctcttaacctggtgtc

SEQ ID NO: 19902 - DNA, 24 bp, Artificial Sequence
  Synthetic: FXN 3 reverse 9:69041069-69041099; SaCas9
aattctatctcttaacctggtgtc

SEQ ID NO: 19903 - DNA, 23 bp, Artificial Sequence
  Synthetic: FXN 3 reverse 9:69041070-69041099; SaCas9
attctatctcttaacctggtgtc

SEQ ID NO: 19904 - DNA, 22 bp, Artificial Sequence
  Synthetic: FXN 3 reverse 9:69041071-69041099; SaCas9
ttctatctcttaacctggtgtc

SEQ ID NO: 19905 - DNA, 21 bp, Artificial Sequence
  Synthetic: FXN 3 reverse 9:69041072-69041099; SaCas9
tctatctcttaacctggtgtc

SEQ ID NO: 19906 - DNA, 20 bp, Artificial Sequence
  Synthetic: FXN 3 reverse 9:69041073-69041099; SaCas9
ctatctcttaacctggtgtc

SEQ ID NO: 19907 - DNA, 19 bp, Artificial Sequence
  Synthetic: FXN 3 reverse 9:69041074-69041099; SaCas9
tatctcttaacctggtgtc

SEQ ID NO: 19908 - DNA, 18 bp, Artificial Sequence
  Synthetic: FXN 3 reverse 9:69041075-69041099; SaCas9
atctcttaacctggtgtc

SEQ ID NO: 19909 - DNA, 25 bp, Artificial Sequence
  Synthetic: FXN 3 reverse 9:69041069-69041100; SaCas9
caaattctatctcttaacctggtgt

SEQ ID NO: 19910 - DNA, 24 bp, Artificial Sequence
  Synthetic: FXN 3 reverse 9:69041070-69041100; SaCas9
aaattctatctcttaacctggtgt

SEQ ID NO: 19911 - DNA, 23 bp, Artificial Sequence
  Synthetic: FXN 3 reverse 9:69041071-69041100; SaCas9
aattctatctcttaacctggtgt

SEQ ID NO: 19912 - DNA, 22 bp, Artificial Sequence
  Synthetic: FXN 3 reverse 9:69041072-69041100; SaCas9
attctatctcttaacctggtgt

SEQ ID NO: 19913 - DNA, 21 bp, Artificial Sequence
  Synthetic: FXN 3 reverse 9:69041073-69041100; SaCas9
ttctatctcttaacctggtgt

SEQ ID NO: 19914 - DNA, 20 bp, Artificial Sequence
  Synthetic: FXN 3 reverse 9:69041074-69041100; SaCas9
tctatctcttaacctggtgt

SEQ ID NO: 19915 - DNA, 19 bp, Artificial Sequence
  Synthetic: FXN 3 reverse 9:69041075-69041100; SaCas9
ctatctcttaacctggtgt

SEQ ID NO: 19916 - DNA, 18 bp, Artificial Sequence
  Synthetic: FXN 3 reverse 9:69041076-69041100; SaCas9
tatctcttaacctggtgt

SEQ ID NO: 19917 - DNA, 25 bp, Artificial Sequence
  Synthetic: FXN 3 forward 9:69041084-69041115; SaCas9
taagagatagaatttgtttgttcct

SEQ ID NO: 19918 - DNA, 24 bp, Artificial Sequence
  Synthetic: FXN 3 forward 9:69041085-69041115; SaCas9
aagagatagaatttgtttgttcct

SEQ ID NO: 19919 - DNA, 23 bp, Artificial Sequence
  Synthetic: FXN 3 forward 9:69041086-69041115; SaCas9
agagatagaatttgtttgttcct

SEQ ID NO: 19920 - DNA, 22 bp, Artificial Sequence
  Synthetic: FXN 3 forward 9:69041087-69041115; SaCas9
gagatagaatttgtttgttcct

SEQ ID NO: 19921 - DNA, 21 bp, Artificial Sequence
  Synthetic: FXN 3 forward 9:69041088-69041115; SaCas9
agatagaatttgtttgttcct

SEQ ID NO: 19922 - DNA, 20 bp, Artificial Sequence
  Synthetic: FXN 3 forward 9:69041089-69041115; SaCas9
gatagaatttgtttgttcct

SEQ ID NO: 19923 - DNA, 19 bp, Artificial Sequence
  Synthetic: FXN 3 forward 9:69041090-69041115; SaCas9
atagaatttgtttgttcct

SEQ ID NO: 19924 - DNA, 18 bp, Artificial Sequence
  Synthetic: FXN 3 forward 9:69041091-69041115; SaCas9
tagaatttgtttgttcct

SEQ ID NO: 19925 - DNA, 25 bp, Artificial Sequence
  Synthetic: FXN 3 forward 9:69041085-69041116; SaCas9
aagagatagaatttgtttgttcctc

SEQ ID NO: 19926 - DNA, 24 bp, Artificial Sequence
  Synthetic: FXN 3 forward 9:69041086-69041116; SaCas9
agagatagaatttgtttgttcctc

SEQ ID NO: 19927 - DNA, 23 bp, Artificial Sequence
  Synthetic: FXN 3 forward 9:69041087-69041116; SaCas9
gagatagaatttgtttgttcctc

SEQ ID NO: 19928 - DNA, 22 bp, Artificial Sequence
  Synthetic: FXN 3 forward 9:69041088-69041116; SaCas9
agatagaatttgtttgttcctc

SEQ ID NO: 19929 - DNA, 21 bp, Artificial Sequence
  Synthetic: FXN 3 forward 9:69041089-69041116; SaCas9
gatagaatttgtttgttcctc

SEQ ID NO: 19930 - DNA, 20 bp, Artificial Sequence
  Synthetic: FXN 3 forward 9:69041090-69041116; SaCas9
atagaatttgtttgttcctc

SEQ ID NO: 19931 - DNA, 19 bp, Artificial Sequence
  Synthetic: FXN 3 forward 9:69041091-69041116; SaCas9
tagaatttgtttgttcctc

SEQ ID NO: 19932 - DNA, 18 bp, Artificial Sequence
  Synthetic: FXN 3 forward 9:69041092-69041116; SaCas9
agaatttgtttgttcctc

SEQ ID NO: 19933 - DNA, 25 bp, Artificial Sequence
  Synthetic: FXN 3 reverse 9:69041103-69041134; SaCas9
atggggtgaagacaagggcctccag

SEQ ID NO: 19934 - DNA, 24 bp, Artificial Sequence
  Synthetic: FXN 3 reverse 9:69041104-69041134; SaCas9
tggggtgaagacaagggcctccag

SEQ ID NO: 19935 - DNA, 23 bp, Artificial Sequence
  Synthetic: FXN 3 reverse 9:69041105-69041134; SaCas9
ggggtgaagacaagggcctccag

SEQ ID NO: 19936 - DNA, 22 bp, Artificial Sequence
  Synthetic: FXN 3 reverse 9:69041106-69041134; SaCas9
gggtgaagacaagggcctccag

SEQ ID NO: 19937 - DNA, 21 bp, Artificial Sequence
  Synthetic: FXN 3 reverse 9:69041107-69041134; SaCas9
ggtgaagacaagggcctccag

SEQ ID NO: 19938 - DNA, 20 bp, Artificial Sequence
  Synthetic: FXN 3 reverse 9:69041108-69041134; SaCas9
gtgaagacaagggcctccag

SEQ ID NO: 19939 - DNA, 19 bp, Artificial Sequence
  Synthetic: FXN 3 reverse 9:69041109-69041134; SaCas9
tgaagacaagggcctccag

SEQ ID NO: 19940 - DNA, 18 bp, Artificial Sequence
  Synthetic: FXN 3 reverse 9:69041110-69041134; SaCas9
gaagacaagggcctccag

SEQ ID NO: 19941 - DNA, 25 bp, Artificial Sequence
  Synthetic: FXN 3 reverse 9:69041104-69041135; SaCas9
gatggggtgaagacaagggcctcca

SEQ ID NO: 19942 - DNA, 24 bp, Artificial Sequence
  Synthetic: FXN 3 reverse 9:69041105-69041135; SaCas9
atggggtgaagacaagggcctcca

SEQ ID NO: 19943 - DNA, 23 bp, Artificial Sequence
  Synthetic: FXN 3 reverse 9:69041106-69041135; SaCas9
tggggtgaagacaagggcctcca

SEQ ID NO: 19944 - DNA, 22 bp, Artificial Sequence
  Synthetic: FXN 3 reverse 9:69041107-69041135; SaCas9
ggggtgaagacaagggcctcca

SEQ ID NO: 19945 - DNA, 21 bp, Artificial Sequence
  Synthetic: FXN 3 reverse 9:69041108-69041135; SaCas9
gggtgaagacaagggcctcca

SEQ ID NO: 19946 - DNA, 20 bp, Artificial Sequence
  Synthetic: FXN 3 reverse 9:69041109-69041135; SaCas9
ggtgaagacaagggcctcca

SEQ ID NO: 19947 - DNA, 19 bp, Artificial Sequence
  Synthetic: FXN 3 reverse 9:69041110-69041135; SaCas9
gtgaagacaagggcctcca

SEQ ID NO: 19948 - DNA, 18 bp, Artificial Sequence
  Synthetic: FXN 3 reverse 9:69041111-69041135; SaCas9
tgaagacaagggcctcca

SEQ ID NO: 19949 - DNA, 25 bp, Artificial Sequence
  Synthetic: FXN 3 reverse 9:69041106-69041137; SaCas9
gtgatggggtgaagacaagggcctc

SEQ ID NO: 19950 - DNA, 24 bp, Artificial Sequence
  Synthetic: FXN 3 reverse 9:69041107-69041137; SaCas9
tgatggggtgaagacaagggcctc

SEQ ID NO: 19951 - DNA, 23 bp, Artificial Sequence
  Synthetic: FXN 3 reverse 9:69041108-69041137; SaCas9
gatggggtgaagacaagggcctc

SEQ ID NO: 19952 - DNA, 22 bp, Artificial Sequence
  Synthetic: FXN 3 reverse 9:69041109-69041137; SaCas9
atggggtgaagacaagggcctc

SEQ ID NO: 19953 - DNA, 21 bp, Artificial Sequence
  Synthetic: FXN 3 reverse 9:69041110-69041137; SaCas9
tggggtgaagacaagggcctc

SEQ ID NO: 19954 - DNA, 20 bp, Artificial Sequence
  Synthetic: FXN 3 reverse 9:69041111-69041137; SaCas9
ggggtgaagacaagggcctc

SEQ ID NO: 19955 - DNA, 19 bp, Artificial Sequence
  Synthetic: FXN 3 reverse 9:69041112-69041137; SaCas9
gggtgaagacaagggcctc

SEQ ID NO: 19956 - DNA, 18 bp, Artificial Sequence
  Synthetic: FXN 3 reverse 9:69041113-69041137; SaCas9
ggtgaagacaagggcctc

SEQ ID NO: 19957 - DNA, 25 bp, Artificial Sequence
  Synthetic: FXN 3 reverse 9:69041115-69041146; SaCas9
gacagggcagtgatggggtgaagac

SEQ ID NO: 19958 - DNA, 24 bp, Artificial Sequence
  Synthetic: FXN 3 reverse 9:69041116-69041146; SaCas9
acagggcagtgatggggtgaagac

SEQ ID NO: 19959 - DNA, 23 bp, Artificial Sequence
  Synthetic: FXN 3 reverse 9:69041117-69041146; SaCas9
cagggcagtgatggggtgaagac

SEQ ID NO: 19960 - DNA, 22 bp, Artificial Sequence
  Synthetic: FXN 3 reverse 9:69041118-69041146; SaCas9
agggcagtgatggggtgaagac

SEQ ID NO: 19961 - DNA, 21 bp, Artificial Sequence
  Synthetic: FXN 3 reverse 9:69041119-69041146; SaCas9
gggcagtgatggggtgaagac

SEQ ID NO: 19962 - DNA, 20 bp, Artificial Sequence
  Synthetic: FXN 3 reverse 9:69041120-69041146; SaCas9
ggcagtgatggggtgaagac

SEQ ID NO: 19963 - DNA, 19 bp, Artificial Sequence
  Synthetic: FXN 3 reverse 9:69041121-69041146; SaCas9
gcagtgatggggtgaagac

SEQ ID NO: 19964 - DNA, 18 bp, Artificial Sequence
  Synthetic: FXN 3 reverse 9:69041122-69041146; SaCas9
cagtgatggggtgaagac

SEQ ID NO: 19965 - DNA, 25 bp, Artificial Sequence
  Synthetic: FXN 3 reverse 9:69041123-69041154; SaCas9
ccagggaggacagggcagtgatggg

SEQ ID NO: 19966 - DNA, 24 bp, Artificial Sequence
  Synthetic: FXN 3 reverse 9:69041124-69041154; SaCas9
cagggaggacagggcagtgatggg

SEQ ID NO: 19967 - DNA, 23 bp, Artificial Sequence
  Synthetic: FXN 3 reverse 9:69041125-69041154; SaCas9
agggaggacagggcagtgatggg

SEQ ID NO: 19968 - DNA, 22 bp, Artificial Sequence
  Synthetic: FXN 3 reverse 9:69041126-69041154; SaCas9
gggaggacagggcagtgatggg

SEQ ID NO: 19969 - DNA, 21 bp, Artificial Sequence
  Synthetic: FXN 3 reverse 9:69041127-69041154; SaCas9
ggaggacagggcagtgatggg

SEQ ID NO: 19970 - DNA, 20 bp, Artificial Sequence
  Synthetic: FXN 3 reverse 9:69041128-69041154; SaCas9
gaggacagggcagtgatggg

SEQ ID NO: 19971 - DNA, 19 bp, Artificial Sequence
  Synthetic: FXN 3 reverse 9:69041129-69041154; SaCas9
aggacagggcagtgatggg

SEQ ID NO: 19972 - DNA, 18 bp, Artificial Sequence
  Synthetic: FXN 3 reverse 9:69041130-69041154; SaCas9
ggacagggcagtgatggg

SEQ ID NO: 19973 - DNA, 25 bp, Artificial Sequence
  Synthetic: FXN 3 forward 9:69041125-69041156; SaCas9
tcaccccatcactgccctgtcctcc

SEQ ID NO: 19974 - DNA, 24 bp, Artificial Sequence
  Synthetic: FXN 3 forward 9:69041126-69041156; SaCas9
caccccatcactgccctgtcctcc

SEQ ID NO: 19975 - DNA, 23 bp, Artificial Sequence
  Synthetic: FXN 3 forward 9:69041127-69041156; SaCas9
accccatcactgccctgtcctcc

SEQ ID NO: 19976 - DNA, 22 bp, Artificial Sequence
  Synthetic: FXN 3 forward 9:69041128-69041156; SaCas9
ccccatcactgccctgtcctcc

SEQ ID NO: 19977 - DNA, 21 bp, Artificial Sequence
  Synthetic: FXN 3 forward 9:69041129-69041156; SaCas9
cccatcactgccctgtcctcc

SEQ ID NO: 19978 - DNA, 20 bp, Artificial Sequence
  Synthetic: FXN 3 forward 9:69041130-69041156; SaCas9
ccatcactgccctgtcctcc

SEQ ID NO: 19979 - DNA, 19 bp, Artificial Sequence
  Synthetic: FXN 3 forward 9:69041131-69041156; SaCas9
catcactgccctgtcctcc

SEQ ID NO: 19980 - DNA, 18 bp, Artificial Sequence
  Synthetic: FXN 3 forward 9:69041132-69041156; SaCas9
atcactgccctgtcctcc

SEQ ID NO: 19981 - DNA, 25 bp, Artificial Sequence
  Synthetic: FXN 3 forward 9:69041126-69041157; SaCas9
caccccatcactgccctgtcctccc

SEQ ID NO: 19982 - DNA, 24 bp, Artificial Sequence
  Synthetic: FXN 3 forward 9:69041127-69041157; SaCas9
accccatcactgccctgtcctccc

SEQ ID NO: 19983 - DNA, 23 bp, Artificial Sequence
  Synthetic: FXN 3 forward 9:69041128-69041157; SaCas9
ccccatcactgccctgtcctccc

SEQ ID NO: 19984 - DNA, 22 bp, Artificial Sequence
  Synthetic: FXN 3 forward 9:69041129-69041157; SaCas9
cccatcactgccctgtcctccc

SEQ ID NO: 19985 - DNA, 21 bp, Artificial Sequence
  Synthetic: FXN 3 forward 9:69041130-69041157; SaCas9
ccatcactgccctgtcctccc

SEQ ID NO: 19986 - DNA, 20 bp, Artificial Sequence
  Synthetic: FXN 3 forward 9:69041131-69041157; SaCas9
catcactgccctgtcctccc

SEQ ID NO: 19987 - DNA, 19 bp, Artificial Sequence
  Synthetic: FXN 3 forward 9:69041132-69041157; SaCas9
atcactgccctgtcctccc

SEQ ID NO: 19988 - DNA, 18 bp, Artificial Sequence
  Synthetic: FXN 3 forward 9:69041133-69041157; SaCas9
tcactgccctgtcctccc

SEQ ID NO: 19989 - DNA, 25 bp, Artificial Sequence
  Synthetic: FXN 3 reverse 9:69041127-69041158; SaCas9
tcctccagggaggacagggcagtga

SEQ ID NO: 19990 - DNA, 24 bp, Artificial Sequence
  Synthetic: FXN 3 reverse 9:69041128-69041158; SaCas9
cctccagggaggacagggcagtga

SEQ ID NO: 19991 - DNA, 23 bp, Artificial Sequence
  Synthetic: FXN 3 reverse 9:69041129-69041158; SaCas9
ctccagggaggacagggcagtga

SEQ ID NO: 19992 - DNA, 22 bp, Artificial Sequence
  Synthetic: FXN 3 reverse 9:69041130-69041158; SaCas9
tccagggaggacagggcagtga

SEQ ID NO: 19993 - DNA, 21 bp, Artificial Sequence
  Synthetic: FXN 3 reverse 9:69041131-69041158; SaCas9
ccagggaggacagggcagtga

SEQ ID NO: 19994 - DNA, 20 bp, Artificial Sequence
  Synthetic: FXN 3 reverse 9:69041132-69041158; SaCas9
cagggaggacagggcagtga

SEQ ID NO: 19995 - DNA, 19 bp, Artificial Sequence
  Synthetic: FXN 3 reverse 9:69041133-69041158; SaCas9
agggaggacagggcagtga

SEQ ID NO: 19996 - DNA, 18 bp, Artificial Sequence
  Synthetic: FXN 3 reverse 9:69041134-69041158; SaCas9
gggaggacagggcagtga

SEQ ID NO: 19997 - DNA, 25 bp, Artificial Sequence
  Synthetic: FXN 3 forward 9:69041128-69041159; SaCas9
ccccatcactgccctgtcctccctg

SEQ ID NO: 19998 - DNA, 24 bp, Artificial Sequence
  Synthetic: FXN 3 forward 9:69041129-69041159; SaCas9
cccatcactgccctgtcctccctg

SEQ ID NO: 19999 - DNA, 23 bp, Artificial Sequence
  Synthetic: FXN 3 forward 9:69041130-69041159; SaCas9
ccatcactgccctgtcctccctg

SEQ ID NO: 20000 - DNA, 22 bp, Artificial Sequence
  Synthetic: FXN 3 forward 9:69041131-69041159; SaCas9
catcactgccctgtcctccctg

SEQ ID NO: 20001 - DNA, 21 bp, Artificial Sequence
  Synthetic: FXN 3 forward 9:69041132-69041159; SaCas9
atcactgccctgtcctccctg

SEQ ID NO: 20002 - DNA, 20 bp, Artificial Sequence
  Synthetic: FXN 3 forward 9:69041133-69041159; SaCas9
tcactgccctgtcctccctg

SEQ ID NO: 20003 - DNA, 19 bp, Artificial Sequence
  Synthetic: FXN 3 forward 9:69041134-69041159; SaCas9
cactgccctgtcctccctg

SEQ ID NO: 20004 - DNA, 18 bp, Artificial Sequence
  Synthetic: FXN 3 forward 9:69041135-69041159; SaCas9
actgccctgtcctccctg

SEQ ID NO: 20005 - DNA, 25 bp, Artificial Sequence
  Synthetic: FXN 3 reverse 9:69041128-69041159; SaCas9
ttcctccagggaggacagggcagtg

SEQ ID NO: 20006 - DNA, 24 bp, Artificial Sequence
  Synthetic: FXN 3 reverse 9:69041129-69041159; SaCas9
tcctccagggaggacagggcagtg

SEQ ID NO: 20007 - DNA, 23 bp, Artificial Sequence
  Synthetic: FXN 3 reverse 9:69041130-69041159; SaCas9
cctccagggaggacagggcagtg

SEQ ID NO: 20008 - DNA, 22 bp, Artificial Sequence
  Synthetic: FXN 3 reverse 9:69041131-69041159; SaCas9
ctccagggaggacagggcagtg

SEQ ID NO: 20009 - DNA, 21 bp, Artificial Sequence
  Synthetic: FXN 3 reverse 9:69041132-69041159; SaCas9
tccagggaggacagggcagtg

SEQ ID NO: 20010 - DNA, 20 bp, Artificial Sequence
  Synthetic: FXN 3 reverse 9:69041133-69041159; SaCas9
ccagggaggacagggcagtg

SEQ ID NO: 20011 - DNA, 19 bp, Artificial Sequence
  Synthetic: FXN 3 reverse 9:69041134-69041159; SaCas9
cagggaggacagggcagtg

SEQ ID NO: 20012 - DNA, 18 bp, Artificial Sequence
  Synthetic: FXN 3 reverse 9:69041135-69041159; SaCas9
agggaggacagggcagtg

SEQ ID NO: 20013 - DNA, 25 bp, Artificial Sequence
  Synthetic: FXN 3 forward 9:69041129-69041160; SaCas9
cccatcactgccctgtcctccctgg

SEQ ID NO: 20014 - DNA, 24 bp, Artificial Sequence
  Synthetic: FXN 3 forward 9:69041130-69041160; SaCas9
ccatcactgccctgtcctccctgg

SEQ ID NO: 20015 - DNA, 23 bp, Artificial Sequence
  Synthetic: FXN 3 forward 9:69041131-69041160; SaCas9
catcactgccctgtcctccctgg

SEQ ID NO: 20016 - DNA, 22 bp, Artificial Sequence
  Synthetic: FXN 3 forward 9:69041132-69041160; SaCas9
atcactgccctgtcctccctgg

SEQ ID NO: 20017 - DNA, 21 bp, Artificial Sequence
  Synthetic: FXN 3 forward 9:69041133-69041160; SaCas9
tcactgccctgtcctccctgg

SEQ ID NO: 20018 - DNA, 20 bp, Artificial Sequence
  Synthetic: FXN 3 forward 9:69041134-69041160; SaCas9
cactgccctgtcctccctgg

SEQ ID NO: 20019 - DNA, 19 bp, Artificial Sequence
  Synthetic: FXN 3 forward 9:69041135-69041160; SaCas9
actgccctgtcctccctgg

SEQ ID NO: 20020 - DNA, 18 bp, Artificial Sequence
  Synthetic: FXN 3 forward 9:69041136-69041160; SaCas9
ctgccctgtcctccctgg

SEQ ID NO: 20021 - DNA, 25 bp, Artificial Sequence
  Synthetic: FXN 3 reverse 9:69041138-69041169; SaCas9
ggctggcagattcctccagggagga

SEQ ID NO: 20022 - DNA, 24 bp, Artificial Sequence
  Synthetic: FXN 3 reverse 9:69041139-69041169; SaCas9
gctggcagattcctccagggagga

SEQ ID NO: 20023 - DNA, 23 bp, Artificial Sequence
  Synthetic: FXN 3 reverse 9:69041140-69041169; SaCas9
ctggcagattcctccagggagga

SEQ ID NO: 20024 - DNA, 22 bp, Artificial Sequence
  Synthetic: FXN 3 reverse 9:69041141-69041169; SaCas9
tggcagattcctccagggagga

SEQ ID NO: 20025 - DNA, 21 bp, Artificial Sequence
  Synthetic: FXN 3 reverse 9:69041142-69041169; SaCas9
ggcagattcctccagggagga

SEQ ID NO: 20026 - DNA, 20 bp, Artificial Sequence
  Synthetic: FXN 3 reverse 9:69041143-69041169; SaCas9
gcagattcctccagggagga

SEQ ID NO: 20027 - DNA, 19 bp, Artificial Sequence
  Synthetic: FXN 3 reverse 9:69041144-69041169; SaCas9
cagattcctccagggagga

SEQ ID NO: 20028 - DNA, 18 bp, Artificial Sequence
  Synthetic: FXN 3 reverse 9:69041145-69041169; SaCas9
agattcctccagggagga

SEQ ID NO: 20029 - DNA, 25 bp, Artificial Sequence
  Synthetic: FXN 3 forward 9:69041143-69041174; SaCas9
gtcctccctggaggaatctgccagc

SEQ ID NO: 20030 - DNA, 24 bp, Artificial Sequence
  Synthetic: FXN 3 forward 9:69041144-69041174; SaCas9
tcctccctggaggaatctgccagc

SEQ ID NO: 20031 - DNA, 23 bp, Artificial Sequence
  Synthetic: FXN 3 forward 9:69041145-69041174; SaCas9
cctccctggaggaatctgccagc

SEQ ID NO: 20032 - DNA, 22 bp, Artificial Sequence
  Synthetic: FXN 3 forward 9:69041146-69041174; SaCas9
ctccctggaggaatctgccagc

SEQ ID NO: 20033 - DNA, 21 bp, Artificial Sequence
  Synthetic: FXN 3 forward 9:69041147-69041174; SaCas9
tccctggaggaatctgccagc

SEQ ID NO: 20034 - DNA, 20 bp, Artificial Sequence
  Synthetic: FXN 3 forward 9:69041148-69041174; SaCas9
ccctggaggaatctgccagc

SEQ ID NO: 20035 - DNA, 19 bp, Artificial Sequence
  Synthetic: FXN 3 forward 9:69041149-69041174; SaCas9
cctggaggaatctgccagc

SEQ ID NO: 20036 - DNA, 18 bp, Artificial Sequence
  Synthetic: FXN 3 forward 9:69041150-69041174; SaCas9
ctggaggaatctgccagc

SEQ ID NO: 20037 - DNA, 25 bp, Artificial Sequence
  Synthetic: FXN 3 reverse 9:69041143-69041174; SaCas9
attcgggctggcagattcctccagg

SEQ ID NO: 20038 - DNA, 24 bp, Artificial Sequence
  Synthetic: FXN 3 reverse 9:69041144-69041174; SaCas9
ttcgggctggcagattcctccagg

SEQ ID NO: 20039 - DNA, 23 bp, Artificial Sequence
  Synthetic: FXN 3 reverse 9:69041145-69041174; SaCas9
tcgggctggcagattcctccagg

SEQ ID NO: 20040 - DNA, 22 bp, Artificial Sequence
  Synthetic: FXN 3 reverse 9:69041146-69041174; SaCas9
cgggctggcagattcctccagg

SEQ ID NO: 20041 - DNA, 21 bp, Artificial Sequence
  Synthetic: FXN 3 reverse 9:69041147-69041174; SaCas9
gggctggcagattcctccagg

SEQ ID NO: 20042 - DNA, 20 bp, Artificial Sequence
  Synthetic: FXN 3 reverse 9:69041148-69041174; SaCas9
ggctggcagattcctccagg

SEQ ID NO: 20043 - DNA, 19 bp, Artificial Sequence
  Synthetic: FXN 3 reverse 9:69041149-69041174; SaCas9
gctggcagattcctccagg

SEQ ID NO: 20044 - DNA, 18 bp, Artificial Sequence
  Synthetic: FXN 3 reverse 9:69041150-69041174; SaCas9
ctggcagattcctccagg

SEQ ID NO: 20045 - DNA, 25 bp, Artificial Sequence
  Synthetic: FXN 3 reverse 9:69041145-69041176; SaCas9
gaattcgggctggcagattcctcca

SEQ ID NO: 20046 - DNA, 24 bp, Artificial Sequence
  Synthetic: FXN 3 reverse 9:69041146-69041176; SaCas9
aattcgggctggcagattcctcca

SEQ ID NO: 20047 - DNA, 23 bp, Artificial Sequence
  Synthetic: FXN 3 reverse 9:69041147-69041176; SaCas9
attcgggctggcagattcctcca

SEQ ID NO: 20048 - DNA, 22 bp, Artificial Sequence
  Synthetic: FXN 3 reverse 9:69041148-69041176; SaCas9
ttcgggctggcagattcctcca

SEQ ID NO: 20049 - DNA, 21 bp, Artificial Sequence
  Synthetic: FXN 3 reverse 9:69041149-69041176; SaCas9
tcgggctggcagattcctcca

SEQ ID NO: 20050 - DNA, 20 bp, Artificial Sequence
  Synthetic: FXN 3 reverse 9:69041150-69041176; SaCas9
cgggctggcagattcctcca

SEQ ID NO: 20051 - DNA, 19 bp, Artificial Sequence
  Synthetic: FXN 3 reverse 9:69041151-69041176; SaCas9
gggctggcagattcctcca

SEQ ID NO: 20052 - DNA, 18 bp, Artificial Sequence
  Synthetic: FXN 3 reverse 9:69041152-69041176; SaCas9
ggctggcagattcctcca

SEQ ID NO: 20053 - DNA, 25 bp, Artificial Sequence
  Synthetic: FXN 3 reverse 9:69041146-69041177; SaCas9
agaattcgggctggcagattcctcc

SEQ ID NO: 20054 - DNA, 24 bp, Artificial Sequence
  Synthetic: FXN 3 reverse 9:69041147-69041177; SaCas9
gaattcgggctggcagattcctcc

SEQ ID NO: 20055 - DNA, 23 bp, Artificial Sequence
  Synthetic: FXN 3 reverse 9:69041148-69041177; SaCas9
aattcgggctggcagattcctcc

SEQ ID NO: 20056 - DNA, 22 bp, Artificial Sequence
  Synthetic: FXN 3 reverse 9:69041149-69041177; SaCas9
attcgggctggcagattcctcc

SEQ ID NO: 20057 - DNA, 21 bp, Artificial Sequence
  Synthetic: FXN 3 reverse 9:69041150-69041177; SaCas9
ttcgggctggcagattcctcc

SEQ ID NO: 20058 - DNA, 20 bp, Artificial Sequence
  Synthetic: FXN 3 reverse 9:69041151-69041177; SaCas9
tcgggctggcagattcctcc

SEQ ID NO: 20059 - DNA, 19 bp, Artificial Sequence
  Synthetic: FXN 3 reverse 9:69041152-69041177; SaCas9
cgggctggcagattcctcc

SEQ ID NO: 20060 - DNA, 18 bp, Artificial Sequence
  Synthetic: FXN 3 reverse 9:69041153-69041177; SaCas9
gggctggcagattcctcc

SEQ ID NO: 20061 - DNA, 25 bp, Artificial Sequence
  Synthetic: FXN 3 reverse 9:69041147-69041178; SaCas9
cagaattcgggctggcagattcctc

SEQ ID NO: 20062 - DNA, 24 bp, Artificial Sequence
  Synthetic: FXN 3 reverse 9:69041148-69041178; SaCas9
agaattcgggctggcagattcctc

SEQ ID NO: 20063 - DNA, 23 bp, Artificial Sequence
  Synthetic: FXN 3 reverse 9:69041149-69041178; SaCas9
gaattcgggctggcagattcctc

SEQ ID NO: 20064 - DNA, 22 bp, Artificial Sequence
  Synthetic: FXN 3 reverse 9:69041150-69041178; SaCas9
aattcgggctggcagattcctc

SEQ ID NO: 20065 - DNA, 21 bp, Artificial Sequence
  Synthetic: FXN 3 reverse 9:69041151-69041178; SaCas9
attcgggctggcagattcctc

SEQ ID NO: 20066 - DNA, 20 bp, Artificial Sequence
  Synthetic: FXN 3 reverse 9:69041152-69041178; SaCas9
ttcgggctggcagattcctc

SEQ ID NO: 20067 - DNA, 19 bp, Artificial Sequence
  Synthetic: FXN 3 reverse 9:69041153-69041178; SaCas9
tcgggctggcagattcctc

SEQ ID NO: 20068 - DNA, 18 bp, Artificial Sequence
  Synthetic: FXN 3 reverse 9:69041154-69041178; SaCas9
cgggctggcagattcctc

SEQ ID NO: 20069 - DNA, 25 bp, Artificial Sequence
  Synthetic: FXN 3 reverse 9:69041166-69041197; SaCas9
aaaaggagggtacgatgaacagaat

SEQ ID NO: 20070 - DNA, 24 bp, Artificial Sequence
  Synthetic: FXN 3 reverse 9:69041167-69041197; SaCas9
aaaggagggtacgatgaacagaat

SEQ ID NO: 20071 - DNA, 23 bp, Artificial Sequence
  Synthetic: FXN 3 reverse 9:69041168-69041197; SaCas9
aaggagggtacgatgaacagaat

SEQ ID NO: 20072 - DNA, 22 bp, Artificial Sequence
  Synthetic: FXN 3 reverse 9:69041169-69041197; SaCas9
aggagggtacgatgaacagaat

SEQ ID NO: 20073 - DNA, 21 bp, Artificial Sequence
  Synthetic: FXN 3 reverse 9:69041170-69041197; SaCas9
ggagggtacgatgaacagaat

SEQ ID NO: 20074 - DNA, 20 bp, Artificial Sequence
  Synthetic: FXN 3 reverse 9:69041171-69041197; SaCas9
gagggtacgatgaacagaat

SEQ ID NO: 20075 - DNA, 19 bp, Artificial Sequence
  Synthetic: FXN 3 reverse 9:69041172-69041197; SaCas9
agggtacgatgaacagaat

SEQ ID NO: 20076 - DNA, 18 bp, Artificial Sequence
  Synthetic: FXN 3 reverse 9:69041173-69041197; SaCas9
gggtacgatgaacagaat

SEQ ID NO: 20077 - DNA, 25 bp, Artificial Sequence
  Synthetic: FXN 3 reverse 9:69041172-69041203; SaCas9
tctaagaaaaggagggtacgatgaa

SEQ ID NO: 20078 - DNA, 24 bp, Artificial Sequence
  Synthetic: FXN 3 reverse 9:69041173-69041203; SaCas9
ctaagaaaaggagggtacgatgaa

SEQ ID NO: 20079 - DNA, 23 bp, Artificial Sequence
  Synthetic: FXN 3 reverse 9:69041174-69041203; SaCas9
taagaaaaggagggtacgatgaa

SEQ ID NO: 20080 - DNA, 22 bp, Artificial Sequence
  Synthetic: FXN 3 reverse 9:69041175-69041203; SaCas9
aagaaaaggagggtacgatgaa

SEQ ID NO: 20081 - DNA, 21 bp, Artificial Sequence
  Synthetic: FXN 3 reverse 9:69041176-69041203; SaCas9
agaaaaggagggtacgatgaa

SEQ ID NO: 20082 - DNA, 20 bp, Artificial Sequence
  Synthetic: FXN 3 reverse 9:69041177-69041203; SaCas9
gaaaaggagggtacgatgaa

SEQ ID NO: 20083 - DNA, 19 bp, Artificial Sequence
  Synthetic: FXN 3 reverse 9:69041178-69041203; SaCas9
aaaaggagggtacgatgaa

SEQ ID NO: 20084 - DNA, 18 bp, Artificial Sequence
  Synthetic: FXN 3 reverse 9:69041179-69041203; SaCas9
aaaggagggtacgatgaa

SEQ ID NO: 20085 - DNA, 25 bp, Artificial Sequence
  Synthetic: FXN 3 forward 9:69041174-69041205; SaCas9
tctgttcatcgtaccctccttttct

SEQ ID NO: 20086 - DNA, 24 bp, Artificial Sequence
  Synthetic: FXN 3 forward 9:69041175-69041205; SaCas9
ctgttcatcgtaccctccttttct

SEQ ID NO: 20087 - DNA, 23 bp, Artificial Sequence
  Synthetic: FXN 3 forward 9:69041176-69041205; SaCas9
tgttcatcgtaccctccttttct

SEQ ID NO: 20088 - DNA, 22 bp, Artificial Sequence
  Synthetic: FXN 3 forward 9:69041177-69041205; SaCas9
gttcatcgtaccctccttttct

SEQ ID NO: 20089 - DNA, 21 bp, Artificial Sequence
  Synthetic: FXN 3 forward 9:69041178-69041205; SaCas9
ttcatcgtaccctccttttct

SEQ ID NO: 20090 - DNA, 20 bp, Artificial Sequence
  Synthetic: FXN 3 forward 9:69041179-69041205; SaCas9
tcatcgtaccctccttttct

SEQ ID NO: 20091 - DNA, 19 bp, Artificial Sequence
  Synthetic: FXN 3 forward 9:69041180-69041205; SaCas9
catcgtaccctccttttct

SEQ ID NO: 20092 - DNA, 18 bp, Artificial Sequence
  Synthetic: FXN 3 forward 9:69041181-69041205; SaCas9
atcgtaccctccttttct

SEQ ID NO: 20093 - DNA, 25 bp, Artificial Sequence
  Synthetic: FXN 3 reverse 9:69041177-69041208; SaCas9
caaactctaagaaaaggagggtacg

SEQ ID NO: 20094 - DNA, 24 bp, Artificial Sequence
  Synthetic: FXN 3 reverse 9:69041178-69041208; SaCas9
aaactctaagaaaaggagggtacg

SEQ ID NO: 20095 - DNA, 23 bp, Artificial Sequence
  Synthetic: FXN 3 reverse 9:69041179-69041208; SaCas9
aactctaagaaaaggagggtacg

SEQ ID NO: 20096 - DNA, 22 bp, Artificial Sequence
  Synthetic: FXN 3 reverse 9:69041180-69041208; SaCas9
actctaagaaaaggagggtacg

SEQ ID NO: 20097 - DNA, 21 bp, Artificial Sequence
  Synthetic: FXN 3 reverse 9:69041181-69041208; SaCas9
ctctaagaaaaggagggtacg

SEQ ID NO: 20098 - DNA, 20 bp, Artificial Sequence
  Synthetic: FXN 3 reverse 9:69041182-69041208; SaCas9
tctaagaaaaggagggtacg

SEQ ID NO: 20099 - DNA, 19 bp, Artificial Sequence
  Synthetic: FXN 3 reverse 9:69041183-69041208; SaCas9
ctaagaaaaggagggtacg

SEQ ID NO: 20100 - DNA, 18 bp, Artificial Sequence
  Synthetic: FXN 3 reverse 9:69041184-69041208; SaCas9
taagaaaaggagggtacg

SEQ ID NO: 20101 - DNA, 25 bp, Artificial Sequence
  Synthetic: FXN 3 reverse 9:69041186-69041217; SaCas9
agaggaggtcaaactctaagaaaag

SEQ ID NO: 20102 - DNA, 24 bp, Artificial Sequence
  Synthetic: FXN 3 reverse 9:69041187-69041217; SaCas9
gaggaggtcaaactctaagaaaag

SEQ ID NO: 20103 - DNA, 23 bp, Artificial Sequence
  Synthetic: FXN 3 reverse 9:69041188-69041217; SaCas9
aggaggtcaaactctaagaaaag

SEQ ID NO: 20104 - DNA, 22 bp, Artificial Sequence
  Synthetic: FXN 3 reverse 9:69041189-69041217; SaCas9
ggaggtcaaactctaagaaaag

SEQ ID NO: 20105 - DNA, 21 bp, Artificial Sequence
  Synthetic: FXN 3 reverse 9:69041190-69041217; SaCas9
gaggtcaaactctaagaaaag

SEQ ID NO: 20106 - DNA, 20 bp, Artificial Sequence
  Synthetic: FXN 3 reverse 9:69041191-69041217; SaCas9
aggtcaaactctaagaaaag

SEQ ID NO: 20107 - DNA, 19 bp, Artificial Sequence
  Synthetic: FXN 3 reverse 9:69041192-69041217; SaCas9
ggtcaaactctaagaaaag

SEQ ID NO: 20108 - DNA, 18 bp, Artificial Sequence
  Synthetic: FXN 3 reverse 9:69041193-69041217; SaCas9
gtcaaactctaagaaaag

SEQ ID NO: 20109 - DNA, 25 bp, Artificial Sequence
  Synthetic: FXN 3 reverse 9:69041188-69041219; SaCas9
acagaggaggtcaaactctaagaaa

SEQ ID NO: 20110 - DNA, 24 bp, Artificial Sequence
  Synthetic: FXN 3 reverse 9:69041189-69041219; SaCas9
cagaggaggtcaaactctaagaaa

SEQ ID NO: 20111 - DNA, 23 bp, Artificial Sequence
  Synthetic: FXN 3 reverse 9:69041190-69041219; SaCas9
agaggaggtcaaactctaagaaa

SEQ ID NO: 20112 - DNA, 22 bp, Artificial Sequence
  Synthetic: FXN 3 reverse 9:69041191-69041219; SaCas9
gaggaggtcaaactctaagaaa

SEQ ID NO: 20113 - DNA, 21 bp, Artificial Sequence
  Synthetic: FXN 3 reverse 9:69041192-69041219; SaCas9
aggaggtcaaactctaagaaa

SEQ ID NO: 20114 - DNA, 20 bp, Artificial Sequence
  Synthetic: FXN 3 reverse 9:69041193-69041219; SaCas9
ggaggtcaaactctaagaaa

SEQ ID NO: 20115 - DNA, 19 bp, Artificial Sequence
  Synthetic: FXN 3 reverse 9:69041194-69041219; SaCas9
gaggtcaaactctaagaaa

SEQ ID NO: 20116 - DNA, 18 bp, Artificial Sequence
  Synthetic: FXN 3 reverse 9:69041195-69041219; SaCas9
aggtcaaactctaagaaa

SEQ ID NO: 20117 - DNA, 25 bp, Artificial Sequence
  Synthetic: FXN 3 reverse 9:69041189-69041220; SaCas9
tacagaggaggtcaaactctaagaa

SEQ ID NO: 20118 - DNA, 24 bp, Artificial Sequence
  Synthetic: FXN 3 reverse 9:69041190-69041220; SaCas9
acagaggaggtcaaactctaagaa

SEQ ID NO: 20119 - DNA, 23 bp, Artificial Sequence
  Synthetic: FXN 3 reverse 9:69041191-69041220; SaCas9
cagaggaggtcaaactctaagaa

SEQ ID NO: 20120 - DNA, 22 bp, Artificial Sequence
  Synthetic: FXN 3 reverse 9:69041192-69041220; SaCas9
agaggaggtcaaactctaagaa

SEQ ID NO: 20121 - DNA, 21 bp, Artificial Sequence
  Synthetic: FXN 3 reverse 9:69041193-69041220; SaCas9
gaggaggtcaaactctaagaa

SEQ ID NO: 20122 - DNA, 20 bp, Artificial Sequence
  Synthetic: FXN 3 reverse 9:69041194-69041220; SaCas9
aggaggtcaaactctaagaa

SEQ ID NO: 20123 - DNA, 19 bp, Artificial Sequence
  Synthetic: FXN 3 reverse 9:69041195-69041220; SaCas9
ggaggtcaaactctaagaa

SEQ ID NO: 20124 - DNA, 18 bp, Artificial Sequence
  Synthetic: FXN 3 reverse 9:69041196-69041220; SaCas9
gaggtcaaactctaagaa

SEQ ID NO: 20125 - DNA, 25 bp, Artificial Sequence
  Synthetic: FXN 3 reverse 9:69041194-69041225; SaCas9
ggagatacagaggaggtcaaactct

SEQ ID NO: 20126 - DNA, 24 bp, Artificial Sequence
  Synthetic: FXN 3 reverse 9:69041195-69041225; SaCas9
gagatacagaggaggtcaaactct

SEQ ID NO: 20127 - DNA, 23 bp, Artificial Sequence
  Synthetic: FXN 3 reverse 9:69041196-69041225; SaCas9
agatacagaggaggtcaaactct

SEQ ID NO: 20128 - DNA, 22 bp, Artificial Sequence
  Synthetic: FXN 3 reverse 9:69041197-69041225; SaCas9
gatacagaggaggtcaaactct

SEQ ID NO: 20129 - DNA, 21 bp, Artificial Sequence
  Synthetic: FXN 3 reverse 9:69041198-69041225; SaCas9
atacagaggaggtcaaactct

SEQ ID NO: 20130 - DNA, 20 bp, Artificial Sequence
  Synthetic: FXN 3 reverse 9:69041199-69041225; SaCas9
tacagaggaggtcaaactct

SEQ ID NO: 20131 - DNA, 19 bp, Artificial Sequence
  Synthetic: FXN 3 reverse 9:69041200-69041225; SaCas9
acagaggaggtcaaactct

SEQ ID NO: 20132 - DNA, 18 bp, Artificial Sequence
  Synthetic: FXN 3 reverse 9:69041201-69041225; SaCas9
cagaggaggtcaaactct

SEQ ID NO: 20133 - DNA, 25 bp, Artificial Sequence
  Synthetic: FXN 3 reverse 9:69041209-69041240; SaCas9
aatacatggattgggggagatacag

SEQ ID NO: 20134 - DNA, 24 bp, Artificial Sequence
  Synthetic: FXN 3 reverse 9:69041210-69041240; SaCas9
atacatggattgggggagatacag

SEQ ID NO: 20135 - DNA, 23 bp, Artificial Sequence
  Synthetic: FXN 3 reverse 9:69041211-69041240; SaCas9
tacatggattgggggagatacag

SEQ ID NO: 20136 - DNA, 22 bp, Artificial Sequence
  Synthetic: FXN 3 reverse 9:69041212-69041240; SaCas9
acatggattgggggagatacag

SEQ ID NO: 20137 - DNA, 21 bp, Artificial Sequence
  Synthetic: FXN 3 reverse 9:69041213-69041240; SaCas9
catggattgggggagatacag

SEQ ID NO: 20138 - DNA, 20 bp, Artificial Sequence
  Synthetic: FXN 3 reverse 9:69041214-69041240; SaCas9
atggattgggggagatacag

SEQ ID NO: 20139 - DNA, 19 bp, Artificial Sequence
  Synthetic: FXN 3 reverse 9:69041215-69041240; SaCas9
tggattgggggagatacag

SEQ ID NO: 20140 - DNA, 18 bp, Artificial Sequence
  Synthetic: FXN 3 reverse 9:69041216-69041240; SaCas9
ggattgggggagatacag

SEQ ID NO: 20141 - DNA, 25 bp, Artificial Sequence
  Synthetic: FXN 3 reverse 9:69041210-69041241; SaCas9
caatacatggattgggggagataca

SEQ ID NO: 20142 - DNA, 24 bp, Artificial Sequence
  Synthetic: FXN 3 reverse 9:69041211-69041241; SaCas9
aatacatggattgggggagataca

SEQ ID NO: 20143 - DNA, 23 bp, Artificial Sequence
  Synthetic: FXN 3 reverse 9:69041212-69041241; SaCas9
atacatggattgggggagataca

SEQ ID NO: 20144 - DNA, 22 bp, Artificial Sequence
  Synthetic: FXN 3 reverse 9:69041213-69041241; SaCas9
tacatggattgggggagataca

SEQ ID NO: 20145 - DNA, 21 bp, Artificial Sequence
  Synthetic: FXN 3 reverse 9:69041214-69041241; SaCas9
acatggattgggggagataca

SEQ ID NO: 20146 - DNA, 20 bp, Artificial Sequence
  Synthetic: FXN 3 reverse 9:69041215-69041241; SaCas9
catggattgggggagataca

SEQ ID NO: 20147 - DNA, 19 bp, Artificial Sequence
  Synthetic: FXN 3 reverse 9:69041216-69041241; SaCas9
atggattgggggagataca

SEQ ID NO: 20148 - DNA, 18 bp, Artificial Sequence
  Synthetic: FXN 3 reverse 9:69041217-69041241; SaCas9
tggattgggggagataca

SEQ ID NO: 20149 - DNA, 25 bp, Artificial Sequence
  Synthetic: FXN 3 reverse 9:69041212-69041243; SaCas9
agcaatacatggattgggggagata

SEQ ID NO: 20150 - DNA, 24 bp, Artificial Sequence
  Synthetic: FXN 3 reverse 9:69041213-69041243; SaCas9
gcaatacatggattgggggagata

SEQ ID NO: 20151 - DNA, 23 bp, Artificial Sequence
  Synthetic: FXN 3 reverse 9:69041214-69041243; SaCas9
caatacatggattgggggagata

SEQ ID NO: 20152 - DNA, 22 bp, Artificial Sequence
  Synthetic: FXN 3 reverse 9:69041215-69041243; SaCas9
aatacatggattgggggagata

SEQ ID NO: 20153 - DNA, 21 bp, Artificial Sequence
  Synthetic: FXN 3 reverse 9:69041216-69041243; SaCas9
atacatggattgggggagata

SEQ ID NO: 20154 - DNA, 20 bp, Artificial Sequence
  Synthetic: FXN 3 reverse 9:69041217-69041243; SaCas9
tacatggattgggggagata

SEQ ID NO: 20155 - DNA, 19 bp, Artificial Sequence
  Synthetic: FXN 3 reverse 9:69041218-69041243; SaCas9
acatggattgggggagata

SEQ ID NO: 20156 - DNA, 18 bp, Artificial Sequence
  Synthetic: FXN 3 reverse 9:69041219-69041243; SaCas9
catggattgggggagata

SEQ ID NO: 20157 - DNA, 25 bp, Artificial Sequence
  Synthetic: FXN 3 reverse 9:69041220-69041251; SaCas9
tgtatataagcaatacatggattgg

SEQ ID NO: 20158 - DNA, 24 bp, Artificial Sequence
  Synthetic: FXN 3 reverse 9:69041221-69041251; SaCas9
gtatataagcaatacatggattgg

SEQ ID NO: 20159 - DNA, 23 bp, Artificial Sequence
  Synthetic: FXN 3 reverse 9:69041222-69041251; SaCas9
tatataagcaatacatggattgg

SEQ ID NO: 20160 - DNA, 22 bp, Artificial Sequence
  Synthetic: FXN 3 reverse 9:69041223-69041251; SaCas9
atataagcaatacatggattgg

SEQ ID NO: 20161 - DNA, 21 bp, Artificial Sequence
  Synthetic: FXN 3 reverse 9:69041224-69041251; SaCas9
tataagcaatacatggattgg

SEQ ID NO: 20162 - DNA, 20 bp, Artificial Sequence
  Synthetic: FXN 3 reverse 9:69041225-69041251; SaCas9
ataagcaatacatggattgg

SEQ ID NO: 20163 - DNA, 19 bp, Artificial Sequence
  Synthetic: FXN 3 reverse 9:69041226-69041251; SaCas9
taagcaatacatggattgg

SEQ ID NO: 20164 - DNA, 18 bp, Artificial Sequence
  Synthetic: FXN 3 reverse 9:69041227-69041251; SaCas9
aagcaatacatggattgg

SEQ ID NO: 20165 - DNA, 25 bp, Artificial Sequence
  Synthetic: FXN 3 reverse 9:69041221-69041252; SaCas9
ttgtatataagcaatacatggattg

SEQ ID NO: 20166 - DNA, 24 bp, Artificial Sequence
  Synthetic: FXN 3 reverse 9:69041222-69041252; SaCas9
tgtatataagcaatacatggattg

SEQ ID NO: 20167 - DNA, 23 bp, Artificial Sequence
  Synthetic: FXN 3 reverse 9:69041223-69041252; SaCas9
gtatataagcaatacatggattg

SEQ ID NO: 20168 - DNA, 22 bp, Artificial Sequence
  Synthetic: FXN 3 reverse 9:69041224-69041252; SaCas9
tatataagcaatacatggattg

SEQ ID NO: 20169 - DNA, 21 bp, Artificial Sequence
  Synthetic: FXN 3 reverse 9:69041225-69041252; SaCas9
atataagcaatacatggattg

SEQ ID NO: 20170 - DNA, 20 bp, Artificial Sequence
  Synthetic: FXN 3 reverse 9:69041226-69041252; SaCas9
tataagcaatacatggattg

SEQ ID NO: 20171 - DNA, 19 bp, Artificial Sequence
  Synthetic: FXN 3 reverse 9:69041227-69041252; SaCas9
ataagcaatacatggattg

SEQ ID NO: 20172 - DNA, 18 bp, Artificial Sequence
  Synthetic: FXN 3 reverse 9:69041228-69041252; SaCas9
taagcaatacatggattg

SEQ ID NO: 20173 - DNA, 25 bp, Artificial Sequence
  Synthetic: FXN 3 reverse 9:69041222-69041253; SaCas9
cttgtatataagcaatacatggatt

SEQ ID NO: 20174 - DNA, 24 bp, Artificial Sequence
  Synthetic: FXN 3 reverse 9:69041223-69041253; SaCas9
ttgtatataagcaatacatggatt

SEQ ID NO: 20175 - DNA, 23 bp, Artificial Sequence
  Synthetic: FXN 3 reverse 9:69041224-69041253; SaCas9
tgtatataagcaatacatggatt

SEQ ID NO: 20176 - DNA, 22 bp, Artificial Sequence
  Synthetic: FXN 3 reverse 9:69041225-69041253; SaCas9
gtatataagcaatacatggatt

SEQ ID NO: 20177 - DNA, 21 bp, Artificial Sequence
  Synthetic: FXN 3 reverse 9:69041226-69041253; SaCas9
tatataagcaatacatggatt

SEQ ID NO: 20178 - DNA, 20 bp, Artificial Sequence
  Synthetic: FXN 3 reverse 9:69041227-69041253; SaCas9
atataagcaatacatggatt

SEQ ID NO: 20179 - DNA, 19 bp, Artificial Sequence
  Synthetic: FXN 3 reverse 9:69041228-69041253; SaCas9
tataagcaatacatggatt

SEQ ID NO: 20180 - DNA, 18 bp, Artificial Sequence
  Synthetic: FXN 3 reverse 9:69041229-69041253; SaCas9
ataagcaatacatggatt

SEQ ID NO: 20181 - DNA, 25 bp, Artificial Sequence
  Synthetic: FXN 3 reverse 9:69041223-69041254; SaCas9
ccttgtatataagcaatacatggat

SEQ ID NO: 20182 - DNA, 24 bp, Artificial Sequence
  Synthetic: FXN 3 reverse 9:69041224-69041254; SaCas9
cttgtatataagcaatacatggat

SEQ ID NO: 20183 - DNA, 23 bp, Artificial Sequence
  Synthetic: FXN 3 reverse 9:69041225-69041254; SaCas9
ttgtatataagcaatacatggat

SEQ ID NO: 20184 - DNA, 22 bp, Artificial Sequence
  Synthetic: FXN 3 reverse 9:69041226-69041254; SaCas9
tgtatataagcaatacatggat

SEQ ID NO: 20185 - DNA, 21 bp, Artificial Sequence
  Synthetic: FXN 3 reverse 9:69041227-69041254; SaCas9
gtatataagcaatacatggat

SEQ ID NO: 20186 - DNA, 20 bp, Artificial Sequence
  Synthetic: FXN 3 reverse 9:69041228-69041254; SaCas9
tatataagcaatacatggat

SEQ ID NO: 20187 - DNA, 19 bp, Artificial Sequence
  Synthetic: FXN 3 reverse 9:69041229-69041254; SaCas9
atataagcaatacatggat

SEQ ID NO: 20188 - DNA, 18 bp, Artificial Sequence
  Synthetic: FXN 3 reverse 9:69041230-69041254; SaCas9
tataagcaatacatggat

SEQ ID NO: 20189 - DNA, 25 bp, Artificial Sequence
  Synthetic: FXN 3 reverse 9:69041224-69041255; SaCas9
accttgtatataagcaatacatgga

SEQ ID NO: 20190 - DNA, 24 bp, Artificial Sequence
  Synthetic: FXN 3 reverse 9:69041225-69041255; SaCas9
ccttgtatataagcaatacatgga

SEQ ID NO: 20191 - DNA, 23 bp, Artificial Sequence
  Synthetic: FXN 3 reverse 9:69041226-69041255; SaCas9
cttgtatataagcaatacatgga

SEQ ID NO: 20192 - DNA, 22 bp, Artificial Sequence
  Synthetic: FXN 3 reverse 9:69041227-69041255; SaCas9
ttgtatataagcaatacatgga

SEQ ID NO: 20193 - DNA, 21 bp, Artificial Sequence
  Synthetic: FXN 3 reverse 9:69041228-69041255; SaCas9
tgtatataagcaatacatgga

SEQ ID NO: 20194 - DNA, 20 bp, Artificial Sequence
  Synthetic: FXN 3 reverse 9:69041229-69041255; SaCas9
gtatataagcaatacatgga

SEQ ID NO: 20195 - DNA, 19 bp, Artificial Sequence
  Synthetic: FXN 3 reverse 9:69041230-69041255; SaCas9
tatataagcaatacatgga

SEQ ID NO: 20196 - DNA, 18 bp, Artificial Sequence
  Synthetic: FXN 3 reverse 9:69041231-69041255; SaCas9
atataagcaatacatgga

SEQ ID NO: 20197 - DNA, 25 bp, Artificial Sequence
  Synthetic: FXN 3 reverse 9:69041229-69041260; SaCas9
agaataccttgtatataagcaatac

SEQ ID NO: 20198 - DNA, 24 bp, Artificial Sequence
  Synthetic: FXN 3 reverse 9:69041230-69041260; SaCas9
gaataccttgtatataagcaatac

SEQ ID NO: 20199 - DNA, 23 bp, Artificial Sequence
  Synthetic: FXN 3 reverse 9:69041231-69041260; SaCas9
aataccttgtatataagcaatac

SEQ ID NO: 20200 - DNA, 22 bp, Artificial Sequence
  Synthetic: FXN 3 reverse 9:69041232-69041260; SaCas9
ataccttgtatataagcaatac

SEQ ID NO: 20201 - DNA, 21 bp, Artificial Sequence
  Synthetic: FXN 3 reverse 9:69041233-69041260; SaCas9
taccttgtatataagcaatac

SEQ ID NO: 20202 - DNA, 20 bp, Artificial Sequence
  Synthetic: FXN 3 reverse 9:69041234-69041260; SaCas9
accttgtatataagcaatac

SEQ ID NO: 20203 - DNA, 19 bp, Artificial Sequence
  Synthetic: FXN 3 reverse 9:69041235-69041260; SaCas9
ccttgtatataagcaatac

SEQ ID NO: 20204 - DNA, 18 bp, Artificial Sequence
  Synthetic: FXN 3 reverse 9:69041236-69041260; SaCas9
cttgtatataagcaatac

SEQ ID NO: 20205 - DNA, 25 bp, Artificial Sequence
  Synthetic: FXN 3 reverse 9:69041255-69041286; SaCas9
gcaagccatagcagaacagatacag

SEQ ID NO: 20206 - DNA, 24 bp, Artificial Sequence
  Synthetic: FXN 3 reverse 9:69041256-69041286; SaCas9
caagccatagcagaacagatacag

SEQ ID NO: 20207 - DNA, 23 bp, Artificial Sequence
  Synthetic: FXN 3 reverse 9:69041257-69041286; SaCas9
aagccatagcagaacagatacag

SEQ ID NO: 20208 - DNA, 22 bp, Artificial Sequence
  Synthetic: FXN 3 reverse 9:69041258-69041286; SaCas9
agccatagcagaacagatacag

SEQ ID NO: 20209 - DNA, 21 bp, Artificial Sequence
  Synthetic: FXN 3 reverse 9:69041259-69041286; SaCas9
gccatagcagaacagatacag

SEQ ID NO: 20210 - DNA, 20 bp, Artificial Sequence
  Synthetic: FXN 3 reverse 9:69041260-69041286; SaCas9
ccatagcagaacagatacag

SEQ ID NO: 20211 - DNA, 19 bp, Artificial Sequence
  Synthetic: FXN 3 reverse 9:69041261-69041286; SaCas9
catagcagaacagatacag

SEQ ID NO: 20212 - DNA, 18 bp, Artificial Sequence
  Synthetic: FXN 3 reverse 9:69041262-69041286; SaCas9
atagcagaacagatacag

SEQ ID NO: 20213 - DNA, 25 bp, Artificial Sequence
  Synthetic: FXN 3 reverse 9:69041269-69041300; SaCas9
gttgaacaaaaggggcaagccatag

SEQ ID NO: 20214 - DNA, 24 bp, Artificial Sequence
  Synthetic: FXN 3 reverse 9:69041270-69041300; SaCas9
ttgaacaaaaggggcaagccatag

SEQ ID NO: 20215 - DNA, 23 bp, Artificial Sequence
  Synthetic: FXN 3 reverse 9:69041271-69041300; SaCas9
tgaacaaaaggggcaagccatag

SEQ ID NO: 20216 - DNA, 22 bp, Artificial Sequence
  Synthetic: FXN 3 reverse 9:69041272-69041300; SaCas9
gaacaaaaggggcaagccatag

SEQ ID NO: 20217 - DNA, 21 bp, Artificial Sequence
  Synthetic: FXN 3 reverse 9:69041273-69041300; SaCas9
aacaaaaggggcaagccatag

SEQ ID NO: 20218 - DNA, 20 bp, Artificial Sequence
  Synthetic: FXN 3 reverse 9:69041274-69041300; SaCas9
acaaaaggggcaagccatag

SEQ ID NO: 20219 - DNA, 19 bp, Artificial Sequence
  Synthetic: FXN 3 reverse 9:69041275-69041300; SaCas9
caaaaggggcaagccatag

SEQ ID NO: 20220 - DNA, 18 bp, Artificial Sequence
  Synthetic: FXN 3 reverse 9:69041276-69041300; SaCas9
aaaaggggcaagccatag

SEQ ID NO: 20221 - DNA, 25 bp, Artificial Sequence
  Synthetic: FXN 3 reverse 9:69041284-69041315; SaCas9
acgcacaaaaacagtgttgaacaaa

SEQ ID NO: 20222 - DNA, 24 bp, Artificial Sequence
  Synthetic: FXN 3 reverse 9:69041285-69041315; SaCas9
cgcacaaaaacagtgttgaacaaa

SEQ ID NO: 20223 - DNA, 23 bp, Artificial Sequence
  Synthetic: FXN 3 reverse 9:69041286-69041315; SaCas9
gcacaaaaacagtgttgaacaaa

SEQ ID NO: 20224 - DNA, 22 bp, Artificial Sequence
  Synthetic: FXN 3 reverse 9:69041287-69041315; SaCas9
cacaaaaacagtgttgaacaaa

SEQ ID NO: 20225 - DNA, 21 bp, Artificial Sequence
  Synthetic: FXN 3 reverse 9:69041288-69041315; SaCas9
acaaaaacagtgttgaacaaa

SEQ ID NO: 20226 - DNA, 20 bp, Artificial Sequence
  Synthetic: FXN 3 reverse 9:69041289-69041315; SaCas9
caaaaacagtgttgaacaaa

SEQ ID NO: 20227 - DNA, 19 bp, Artificial Sequence
  Synthetic: FXN 3 reverse 9:69041290-69041315; SaCas9
aaaaacagtgttgaacaaa

SEQ ID NO: 20228 - DNA, 18 bp, Artificial Sequence
  Synthetic: FXN 3 reverse 9:69041291-69041315; SaCas9
aaaacagtgttgaacaaa

SEQ ID NO: 20229 - DNA, 25 bp, Artificial Sequence
  Synthetic: FXN 3 reverse 9:69041285-69041316; SaCas9
gacgcacaaaaacagtgttgaacaa

SEQ ID NO: 20230 - DNA, 24 bp, Artificial Sequence
  Synthetic: FXN 3 reverse 9:69041286-69041316; SaCas9
acgcacaaaaacagtgttgaacaa

SEQ ID NO: 20231 - DNA, 23 bp, Artificial Sequence
  Synthetic: FXN 3 reverse 9:69041287-69041316; SaCas9
cgcacaaaaacagtgttgaacaa

SEQ ID NO: 20232 - DNA, 22 bp, Artificial Sequence
  Synthetic: FXN 3 reverse 9:69041288-69041316; SaCas9
gcacaaaaacagtgttgaacaa

SEQ ID NO: 20233 - DNA, 21 bp, Artificial Sequence
  Synthetic: FXN 3 reverse 9:69041289-69041316; SaCas9
cacaaaaacagtgttgaacaa

SEQ ID NO: 20234 - DNA, 20 bp, Artificial Sequence
  Synthetic: FXN 3 reverse 9:69041290-69041316; SaCas9
acaaaaacagtgttgaacaa

SEQ ID NO: 20235 - DNA, 19 bp, Artificial Sequence
  Synthetic: FXN 3 reverse 9:69041291-69041316; SaCas9
caaaaacagtgttgaacaa

SEQ ID NO: 20236 - DNA, 18 bp, Artificial Sequence
  Synthetic: FXN 3 reverse 9:69041292-69041316; SaCas9
aaaaacagtgttgaacaa

SEQ ID NO: 20237 - DNA, 25 bp, Artificial Sequence
  Synthetic: FXN 3 reverse 9:69041293-69041324; SaCas9
atgcagatgacgcacaaaaacagtg

SEQ ID NO: 20238 - DNA, 24 bp, Artificial Sequence
  Synthetic: FXN 3 reverse 9:69041294-69041324; SaCas9
tgcagatgacgcacaaaaacagtg

SEQ ID NO: 20239 - DNA, 23 bp, Artificial Sequence
  Synthetic: FXN 3 reverse 9:69041295-69041324; SaCas9
gcagatgacgcacaaaaacagtg

SEQ ID NO: 20240 - DNA, 22 bp, Artificial Sequence
  Synthetic: FXN 3 reverse 9:69041296-69041324; SaCas9
cagatgacgcacaaaaacagtg

SEQ ID NO: 20241 - DNA, 21 bp, Artificial Sequence
  Synthetic: FXN 3 reverse 9:69041297-69041324; SaCas9
agatgacgcacaaaaacagtg

SEQ ID NO: 20242 - DNA, 20 bp, Artificial Sequence
  Synthetic: FXN 3 reverse 9:69041298-69041324; SaCas9
gatgacgcacaaaaacagtg

SEQ ID NO: 20243 - DNA, 19 bp, Artificial Sequence
  Synthetic: FXN 3 reverse 9:69041299-69041324; SaCas9
atgacgcacaaaaacagtg

SEQ ID NO: 20244 - DNA, 18 bp, Artificial Sequence
  Synthetic: FXN 3 reverse 9:69041300-69041324; SaCas9
tgacgcacaaaaacagtg

SEQ ID NO: 20245 - DNA, 25 bp, Artificial Sequence
  Synthetic: FXN 3 forward 9:69041334-69041365; SaCas9
agttgtcctttatttgttctcactg

SEQ ID NO: 20246 - DNA, 24 bp, Artificial Sequence
  Synthetic: FXN 3 forward 9:69041335-69041365; SaCas9
gttgtcctttatttgttctcactg

SEQ ID NO: 20247 - DNA, 23 bp, Artificial Sequence
  Synthetic: FXN 3 forward 9:69041336-69041365; SaCas9
ttgtcctttatttgttctcactg

SEQ ID NO: 20248 - DNA, 22 bp, Artificial Sequence
  Synthetic: FXN 3 forward 9:69041337-69041365; SaCas9
tgtcctttatttgttctcactg

SEQ ID NO: 20249 - DNA, 21 bp, Artificial Sequence
  Synthetic: FXN 3 forward 9:69041338-69041365; SaCas9
gtcctttatttgttctcactg

SEQ ID NO: 20250 - DNA, 20 bp, Artificial Sequence
  Synthetic: FXN 3 forward 9:69041339-69041365; SaCas9
tcctttatttgttctcactg

SEQ ID NO: 20251 - DNA, 19 bp, Artificial Sequence
  Synthetic: FXN 3 forward 9:69041340-69041365; SaCas9
cctttatttgttctcactg

SEQ ID NO: 20252 - DNA, 18 bp, Artificial Sequence
  Synthetic: FXN 3 forward 9:69041341-69041365; SaCas9
ctttatttgttctcactg

SEQ ID NO: 20253 - DNA, 25 bp, Artificial Sequence
  Synthetic: FXN 3 reverse 9:69041338-69041369; SaCas9
tactatccagcagtgagaacaaata

SEQ ID NO: 20254 - DNA, 24 bp, Artificial Sequence
  Synthetic: FXN 3 reverse 9:69041339-69041369; SaCas9
actatccagcagtgagaacaaata

SEQ ID NO: 20255 - DNA, 23 bp, Artificial Sequence
  Synthetic: FXN 3 reverse 9:69041340-69041369; SaCas9
ctatccagcagtgagaacaaata

SEQ ID NO: 20256 - DNA, 22 bp, Artificial Sequence
  Synthetic: FXN 3 reverse 9:69041341-69041369; SaCas9
tatccagcagtgagaacaaata

SEQ ID NO: 20257 - DNA, 21 bp, Artificial Sequence
  Synthetic: FXN 3 reverse 9:69041342-69041369; SaCas9
atccagcagtgagaacaaata

SEQ ID NO: 20258 - DNA, 20 bp, Artificial Sequence
  Synthetic: FXN 3 reverse 9:69041343-69041369; SaCas9
tccagcagtgagaacaaata

SEQ ID NO: 20259 - DNA, 19 bp, Artificial Sequence
  Synthetic: FXN 3 reverse 9:69041344-69041369; SaCas9
ccagcagtgagaacaaata

SEQ ID NO: 20260 - DNA, 18 bp, Artificial Sequence
  Synthetic: FXN 3 reverse 9:69041345-69041369; SaCas9
cagcagtgagaacaaata

SEQ ID NO: 20261 - DNA, 25 bp, Artificial Sequence
  Synthetic: FXN 3 forward 9:69041349-69041380; SaCas9
gttctcactgctggatagtatctgg

SEQ ID NO: 20262 - DNA, 24 bp, Artificial Sequence
  Synthetic: FXN 3 forward 9:69041350-69041380; SaCas9
ttctcactgctggatagtatctgg

SEQ ID NO: 20263 - DNA, 23 bp, Artificial Sequence
  Synthetic: FXN 3 forward 9:69041351-69041380; SaCas9
tctcactgctggatagtatctgg

SEQ ID NO: 20264 - DNA, 22 bp, Artificial Sequence
  Synthetic: FXN 3 forward 9:69041352-69041380; SaCas9
ctcactgctggatagtatctgg

SEQ ID NO: 20265 - DNA, 21 bp, Artificial Sequence
  Synthetic: FXN 3 forward 9:69041353-69041380; SaCas9
tcactgctggatagtatctgg

SEQ ID NO: 20266 - DNA, 20 bp, Artificial Sequence
  Synthetic: FXN 3 forward 9:69041354-69041380; SaCas9
cactgctggatagtatctgg

SEQ ID NO: 20267 - DNA, 19 bp, Artificial Sequence
  Synthetic: FXN 3 forward 9:69041355-69041380; SaCas9
actgctggatagtatctgg

SEQ ID NO: 20268 - DNA, 18 bp, Artificial Sequence
  Synthetic: FXN 3 forward 9:69041356-69041380; SaCas9
ctgctggatagtatctgg

SEQ ID NO: 20269 - DNA, 25 bp, Artificial Sequence
  Synthetic: FXN 3 reverse 9:69041349-69041380; SaCas9
acccaaccagatactatccagcagt

SEQ ID NO: 20270 - DNA, 24 bp, Artificial Sequence
  Synthetic: FXN 3 reverse 9:69041350-69041380; SaCas9
cccaaccagatactatccagcagt

SEQ ID NO: 20271 - DNA, 23 bp, Artificial Sequence
  Synthetic: FXN 3 reverse 9:69041351-69041380; SaCas9
ccaaccagatactatccagcagt

SEQ ID NO: 20272 - DNA, 22 bp, Artificial Sequence
  Synthetic: FXN 3 reverse 9:69041352-69041380; SaCas9
caaccagatactatccagcagt

SEQ ID NO: 20273 - DNA, 21 bp, Artificial Sequence
  Synthetic: FXN 3 reverse 9:69041353-69041380; SaCas9
aaccagatactatccagcagt

SEQ ID NO: 20274 - DNA, 20 bp, Artificial Sequence
  Synthetic: FXN 3 reverse 9:69041354-69041380; SaCas9
accagatactatccagcagt

SEQ ID NO: 20275 - DNA, 19 bp, Artificial Sequence
  Synthetic: FXN 3 reverse 9:69041355-69041380; SaCas9
ccagatactatccagcagt

SEQ ID NO: 20276 - DNA, 18 bp, Artificial Sequence
  Synthetic: FXN 3 reverse 9:69041356-69041380; SaCas9
cagatactatccagcagt

SEQ ID NO: 20277 - DNA, 25 bp, Artificial Sequence
  Synthetic: FXN 3 reverse 9:69041351-69041382; SaCas9
ttacccaaccagatactatccagca

SEQ ID NO: 20278 - DNA, 24 bp, Artificial Sequence
  Synthetic: FXN 3 reverse 9:69041352-69041382; SaCas9
tacccaaccagatactatccagca

SEQ ID NO: 20279 - DNA, 23 bp, Artificial Sequence
  Synthetic: FXN 3 reverse 9:69041353-69041382; SaCas9
acccaaccagatactatccagca

SEQ ID NO: 20280 - DNA, 22 bp, Artificial Sequence
  Synthetic: FXN 3 reverse 9:69041354-69041382; SaCas9
cccaaccagatactatccagca

SEQ ID NO: 20281 - DNA, 21 bp, Artificial Sequence
  Synthetic: FXN 3 reverse 9:69041355-69041382; SaCas9
ccaaccagatactatccagca

SEQ ID NO: 20282 - DNA, 20 bp, Artificial Sequence
  Synthetic: FXN 3 reverse 9:69041356-69041382; SaCas9
caaccagatactatccagca

SEQ ID NO: 20283 - DNA, 19 bp, Artificial Sequence
  Synthetic: FXN 3 reverse 9:69041357-69041382; SaCas9
aaccagatactatccagca

SEQ ID NO: 20284 - DNA, 18 bp, Artificial Sequence
  Synthetic: FXN 3 reverse 9:69041358-69041382; SaCas9
accagatactatccagca

SEQ ID NO: 20285 - DNA, 25 bp, Artificial Sequence
  Synthetic: FXN 3 reverse 9:69041406-69041437; SaCas9
tcaaccaaatgtcacctaaaggaac

SEQ ID NO: 20286 - DNA, 24 bp, Artificial Sequence
  Synthetic: FXN 3 reverse 9:69041407-69041437; SaCas9
caaccaaatgtcacctaaaggaac

SEQ ID NO: 20287 - DNA, 23 bp, Artificial Sequence
  Synthetic: FXN 3 reverse 9:69041408-69041437; SaCas9
aaccaaatgtcacctaaaggaac

SEQ ID NO: 20288 - DNA, 22 bp, Artificial Sequence
  Synthetic: FXN 3 reverse 9:69041409-69041437; SaCas9
accaaatgtcacctaaaggaac

SEQ ID NO: 20289 - DNA, 21 bp, Artificial Sequence
  Synthetic: FXN 3 reverse 9:69041410-69041437; SaCas9
ccaaatgtcacctaaaggaac

SEQ ID NO: 20290 - DNA, 20 bp, Artificial Sequence
  Synthetic: FXN 3 reverse 9:69041411-69041437; SaCas9
caaatgtcacctaaaggaac

SEQ ID NO: 20291 - DNA, 19 bp, Artificial Sequence
  Synthetic: FXN 3 reverse 9:69041412-69041437; SaCas9
aaatgtcacctaaaggaac

SEQ ID NO: 20292 - DNA, 18 bp, Artificial Sequence
  Synthetic: FXN 3 reverse 9:69041413-69041437; SaCas9
aatgtcacctaaaggaac

SEQ ID NO: 20293 - DNA, 25 bp, Artificial Sequence
  Synthetic: FXN 3 reverse 9:69041412-69041443; SaCas9
ctgcaatcaaccaaatgtcacctaa

SEQ ID NO: 20294 - DNA, 24 bp, Artificial Sequence
  Synthetic: FXN 3 reverse 9:69041413-69041443; SaCas9
tgcaatcaaccaaatgtcacctaa

SEQ ID NO: 20295 - DNA, 23 bp, Artificial Sequence
  Synthetic: FXN 3 reverse 9:69041414-69041443; SaCas9
gcaatcaaccaaatgtcacctaa

SEQ ID NO: 20296 - DNA, 22 bp, Artificial Sequence
  Synthetic: FXN 3 reverse 9:69041415-69041443; SaCas9
caatcaaccaaatgtcacctaa

SEQ ID NO: 20297 - DNA, 21 bp, Artificial Sequence
  Synthetic: FXN 3 reverse 9:69041416-69041443; SaCas9
aatcaaccaaatgtcacctaa

SEQ ID NO: 20298 - DNA, 20 bp, Artificial Sequence
  Synthetic: FXN 3 reverse 9:69041417-69041443; SaCas9
atcaaccaaatgtcacctaa

SEQ ID NO: 20299 - DNA, 19 bp, Artificial Sequence
  Synthetic: FXN 3 reverse 9:69041418-69041443; SaCas9
tcaaccaaatgtcacctaa

SEQ ID NO: 20300 - DNA, 18 bp, Artificial Sequence
  Synthetic: FXN 3 reverse 9:69041419-69041443; SaCas9
caaccaaatgtcacctaa

SEQ ID NO: 20301 - DNA, 25 bp, Artificial Sequence
  Synthetic: FXN 3 reverse 9:69041413-69041444; SaCas9
actgcaatcaaccaaatgtcaccta

SEQ ID NO: 20302 - DNA, 24 bp, Artificial Sequence
  Synthetic: FXN 3 reverse 9:69041414-69041444; SaCas9
ctgcaatcaaccaaatgtcaccta

SEQ ID NO: 20303 - DNA, 23 bp, Artificial Sequence
  Synthetic: FXN 3 reverse 9:69041415-69041444; SaCas9
tgcaatcaaccaaatgtcaccta

SEQ ID NO: 20304 - DNA, 22 bp, Artificial Sequence
  Synthetic: FXN 3 reverse 9:69041416-69041444; SaCas9
gcaatcaaccaaatgtcaccta

SEQ ID NO: 20305 - DNA, 21 bp, Artificial Sequence
  Synthetic: FXN 3 reverse 9:69041417-69041444; SaCas9
caatcaaccaaatgtcaccta

SEQ ID NO: 20306 - DNA, 20 bp, Artificial Sequence
  Synthetic: FXN 3 reverse 9:69041418-69041444; SaCas9
aatcaaccaaatgtcaccta

SEQ ID NO: 20307 - DNA, 19 bp, Artificial Sequence
  Synthetic: FXN 3 reverse 9:69041419-69041444; SaCas9
atcaaccaaatgtcaccta

SEQ ID NO: 20308 - DNA, 18 bp, Artificial Sequence
  Synthetic: FXN 3 reverse 9:69041420-69041444; SaCas9
tcaaccaaatgtcaccta

SEQ ID NO: 20309 - DNA, 25 bp, Artificial Sequence
  Synthetic: FXN 3 reverse 9:69041444-69041475; SaCas9
agtcacagcagcaccatcgtaacaa

SEQ ID NO: 20310 - DNA, 24 bp, Artificial Sequence
  Synthetic: FXN 3 reverse 9:69041445-69041475; SaCas9
gtcacagcagcaccatcgtaacaa

SEQ ID NO: 20311 - DNA, 23 bp, Artificial Sequence
  Synthetic: FXN 3 reverse 9:69041446-69041475; SaCas9
tcacagcagcaccatcgtaacaa

SEQ ID NO: 20312 - DNA, 22 bp, Artificial Sequence
  Synthetic: FXN 3 reverse 9:69041447-69041475; SaCas9
cacagcagcaccatcgtaacaa

SEQ ID NO: 20313 - DNA, 21 bp, Artificial Sequence
  Synthetic: FXN 3 reverse 9:69041448-69041475; SaCas9
acagcagcaccatcgtaacaa

SEQ ID NO: 20314 - DNA, 20 bp, Artificial Sequence
  Synthetic: FXN 3 reverse 9:69041449-69041475; SaCas9
cagcagcaccatcgtaacaa

SEQ ID NO: 20315 - DNA, 19 bp, Artificial Sequence
  Synthetic: FXN 3 reverse 9:69041450-69041475; SaCas9
agcagcaccatcgtaacaa

SEQ ID NO: 20316 - DNA, 18 bp, Artificial Sequence
  Synthetic: FXN 3 reverse 9:69041451-69041475; SaCas9
gcagcaccatcgtaacaa

SEQ ID NO: 20317 - DNA, 25 bp, Artificial Sequence
  Synthetic: FXN 3 forward 9:69041460-69041491; SaCas9
ggtgctgctgtgactgttcttgtgc

SEQ ID NO: 20318 - DNA, 24 bp, Artificial Sequence
  Synthetic: FXN 3 forward 9:69041461-69041491; SaCas9
gtgctgctgtgactgttcttgtgc

SEQ ID NO: 20319 - DNA, 23 bp, Artificial Sequence
  Synthetic: FXN 3 forward 9:69041462-69041491; SaCas9
tgctgctgtgactgttcttgtgc

SEQ ID NO: 20320 - DNA, 22 bp, Artificial Sequence
  Synthetic: FXN 3 forward 9:69041463-69041491; SaCas9
gctgctgtgactgttcttgtgc

SEQ ID NO: 20321 - DNA, 21 bp, Artificial Sequence
  Synthetic: FXN 3 forward 9:69041464-69041491; SaCas9
ctgctgtgactgttcttgtgc

SEQ ID NO: 20322 - DNA, 20 bp, Artificial Sequence
  Synthetic: FXN 3 forward 9:69041465-69041491; SaCas9
tgctgtgactgttcttgtgc

SEQ ID NO: 20323 - DNA, 19 bp, Artificial Sequence
  Synthetic: FXN 3 forward 9:69041466-69041491; SaCas9
gctgtgactgttcttgtgc

SEQ ID NO: 20324 - DNA, 18 bp, Artificial Sequence
  Synthetic: FXN 3 forward 9:69041467-69041491; SaCas9
ctgtgactgttcttgtgc

SEQ ID NO: 20325 - DNA, 25 bp, Artificial Sequence
  Synthetic: FXN 3 forward 9:69041465-69041496; SaCas9
tgctgtgactgttcttgtgcatgga

SEQ ID NO: 20326 - DNA, 24 bp, Artificial Sequence
  Synthetic: FXN 3 forward 9:69041466-69041496; SaCas9
gctgtgactgttcttgtgcatgga

SEQ ID NO: 20327 - DNA, 23 bp, Artificial Sequence
  Synthetic: FXN 3 forward 9:69041467-69041496; SaCas9
ctgtgactgttcttgtgcatgga

SEQ ID NO: 20328 - DNA, 22 bp, Artificial Sequence
  Synthetic: FXN 3 forward 9:69041468-69041496; SaCas9
tgtgactgttcttgtgcatgga

SEQ ID NO: 20329 - DNA, 21 bp, Artificial Sequence
  Synthetic: FXN 3 forward 9:69041469-69041496; SaCas9
gtgactgttcttgtgcatgga

SEQ ID NO: 20330 - DNA, 20 bp, Artificial Sequence
  Synthetic: FXN 3 forward 9:69041470-69041496; SaCas9
tgactgttcttgtgcatgga

SEQ ID NO: 20331 - DNA, 19 bp, Artificial Sequence
  Synthetic: FXN 3 forward 9:69041471-69041496; SaCas9
gactgttcttgtgcatgga

SEQ ID NO: 20332 - DNA, 18 bp, Artificial Sequence
  Synthetic: FXN 3 forward 9:69041472-69041496; SaCas9
actgttcttgtgcatgga

SEQ ID NO: 20333 - DNA, 25 bp, Artificial Sequence
  Synthetic: FXN 3 reverse 9:69041475-69041506; SaCas9
ctgaaaggaacttctgtccatgcac

SEQ ID NO: 20334 - DNA, 24 bp, Artificial Sequence
  Synthetic: FXN 3 reverse 9:69041476-69041506; SaCas9
tgaaaggaacttctgtccatgcac

SEQ ID NO: 20335 - DNA, 23 bp, Artificial Sequence
  Synthetic: FXN 3 reverse 9:69041477-69041506; SaCas9
gaaaggaacttctgtccatgcac

SEQ ID NO: 20336 - DNA, 22 bp, Artificial Sequence
  Synthetic: FXN 3 reverse 9:69041478-69041506; SaCas9
aaaggaacttctgtccatgcac

SEQ ID NO: 20337 - DNA, 21 bp, Artificial Sequence
  Synthetic: FXN 3 reverse 9:69041479-69041506; SaCas9
aaggaacttctgtccatgcac

SEQ ID NO: 20338 - DNA, 20 bp, Artificial Sequence
  Synthetic: FXN 3 reverse 9:69041480-69041506; SaCas9
aggaacttctgtccatgcac

SEQ ID NO: 20339 - DNA, 19 bp, Artificial Sequence
  Synthetic: FXN 3 reverse 9:69041481-69041506; SaCas9
ggaacttctgtccatgcac

SEQ ID NO: 20340 - DNA, 18 bp, Artificial Sequence
  Synthetic: FXN 3 reverse 9:69041482-69041506; SaCas9
gaacttctgtccatgcac

SEQ ID NO: 20341 - DNA, 25 bp, Artificial Sequence
  Synthetic: FXN 3 forward 9:69041481-69041512; SaCas9
gtgcatggacagaagttcctttcag

SEQ ID NO: 20342 - DNA, 24 bp, Artificial Sequence
  Synthetic: FXN 3 forward 9:69041482-69041512; SaCas9
tgcatggacagaagttcctttcag

SEQ ID NO: 20343 - DNA, 23 bp, Artificial Sequence
  Synthetic: FXN 3 forward 9:69041483-69041512; SaCas9
gcatggacagaagttcctttcag

SEQ ID NO: 20344 - DNA, 22 bp, Artificial Sequence
  Synthetic: FXN 3 forward 9:69041484-69041512; SaCas9
catggacagaagttcctttcag

SEQ ID NO: 20345 - DNA, 21 bp, Artificial Sequence
  Synthetic: FXN 3 forward 9:69041485-69041512; SaCas9
atggacagaagttcctttcag

SEQ ID NO: 20346 - DNA, 20 bp, Artificial Sequence
  Synthetic: FXN 3 forward 9:69041486-69041512; SaCas9
tggacagaagttcctttcag

SEQ ID NO: 20347 - DNA, 19 bp, Artificial Sequence
  Synthetic: FXN 3 forward 9:69041487-69041512; SaCas9
ggacagaagttcctttcag

SEQ ID NO: 20348 - DNA, 18 bp, Artificial Sequence
  Synthetic: FXN 3 forward 9:69041488-69041512; SaCas9
gacagaagttcctttcag

SEQ ID NO: 20349 - DNA, 25 bp, Artificial Sequence
  Synthetic: FXN 3 forward 9:69041491-69041522; SaCas9
agaagttcctttcaggtgaatttct

SEQ ID NO: 20350 - DNA, 24 bp, Artificial Sequence
  Synthetic: FXN 3 forward 9:69041492-69041522; SaCas9
gaagttcctttcaggtgaatttct

SEQ ID NO: 20351 - DNA, 23 bp, Artificial Sequence
  Synthetic: FXN 3 forward 9:69041493-69041522; SaCas9
aagttcctttcaggtgaatttct

SEQ ID NO: 20352 - DNA, 22 bp, Artificial Sequence
  Synthetic: FXN 3 forward 9:69041494-69041522; SaCas9
agttcctttcaggtgaatttct

SEQ ID NO: 20353 - DNA, 21 bp, Artificial Sequence
  Synthetic: FXN 3 forward 9:69041495-69041522; SaCas9
gttcctttcaggtgaatttct

SEQ ID NO: 20354 - DNA, 20 bp, Artificial Sequence
  Synthetic: FXN 3 forward 9:69041496-69041522; SaCas9
ttcctttcaggtgaatttct

SEQ ID NO: 20355 - DNA, 19 bp, Artificial Sequence
  Synthetic: FXN 3 forward 9:69041497-69041522; SaCas9
tcctttcaggtgaatttct

SEQ ID NO: 20356 - DNA, 18 bp, Artificial Sequence
  Synthetic: FXN 3 forward 9:69041498-69041522; SaCas9
cctttcaggtgaatttct

SEQ ID NO: 20357 - DNA, 25 bp, Artificial Sequence
  Synthetic: FXN 3 forward 9:69041495-69041526; SaCas9
gttcctttcaggtgaatttctcaga

SEQ ID NO: 20358 - DNA, 24 bp, Artificial Sequence
  Synthetic: FXN 3 forward 9:69041496-69041526; SaCas9
ttcctttcaggtgaatttctcaga

SEQ ID NO: 20359 - DNA, 23 bp, Artificial Sequence
  Synthetic: FXN 3 forward 9:69041497-69041526; SaCas9
tcctttcaggtgaatttctcaga

SEQ ID NO: 20360 - DNA, 22 bp, Artificial Sequence
  Synthetic: FXN 3 forward 9:69041498-69041526; SaCas9
cctttcaggtgaatttctcaga

SEQ ID NO: 20361 - DNA, 21 bp, Artificial Sequence
  Synthetic: FXN 3 forward 9:69041499-69041526; SaCas9
ctttcaggtgaatttctcaga

SEQ ID NO: 20362 - DNA, 20 bp, Artificial Sequence
  Synthetic: FXN 3 forward 9:69041500-69041526; SaCas9
tttcaggtgaatttctcaga

SEQ ID NO: 20363 - DNA, 19 bp, Artificial Sequence
  Synthetic: FXN 3 forward 9:69041501-69041526; SaCas9
ttcaggtgaatttctcaga

SEQ ID NO: 20364 - DNA, 18 bp, Artificial Sequence
  Synthetic: FXN 3 forward 9:69041502-69041526; SaCas9
tcaggtgaatttctcaga

SEQ ID NO: 20365 - DNA, 25 bp, Artificial Sequence
  Synthetic: FXN 3 reverse 9:69041495-69041526; SaCas9
ttccattctgagaaattcacctgaa

SEQ ID NO: 20366 - DNA, 24 bp, Artificial Sequence
  Synthetic: FXN 3 reverse 9:69041496-69041526; SaCas9
tccattctgagaaattcacctgaa

SEQ ID NO: 20367 - DNA, 23 bp, Artificial Sequence
  Synthetic: FXN 3 reverse 9:69041497-69041526; SaCas9
ccattctgagaaattcacctgaa

SEQ ID NO: 20368 - DNA, 22 bp, Artificial Sequence
  Synthetic: FXN 3 reverse 9:69041498-69041526; SaCas9
cattctgagaaattcacctgaa

SEQ ID NO: 20369 - DNA, 21 bp, Artificial Sequence
  Synthetic: FXN 3 reverse 9:69041499-69041526; SaCas9
attctgagaaattcacctgaa

SEQ ID NO: 20370 - DNA, 20 bp, Artificial Sequence
  Synthetic: FXN 3 reverse 9:69041500-69041526; SaCas9
ttctgagaaattcacctgaa

SEQ ID NO: 20371 - DNA, 19 bp, Artificial Sequence
  Synthetic: FXN 3 reverse 9:69041501-69041526; SaCas9
tctgagaaattcacctgaa

SEQ ID NO: 20372 - DNA, 18 bp, Artificial Sequence
  Synthetic: FXN 3 reverse 9:69041502-69041526; SaCas9
ctgagaaattcacctgaa

SEQ ID NO: 20373 - DNA, 25 bp, Artificial Sequence
  Synthetic: FXN 3 forward 9:69041496-69041527; SaCas9
ttcctttcaggtgaatttctcagaa

SEQ ID NO: 20374 - DNA, 24 bp, Artificial Sequence
  Synthetic: FXN 3 forward 9:69041497-69041527; SaCas9
tcctttcaggtgaatttctcagaa

SEQ ID NO: 20375 - DNA, 23 bp, Artificial Sequence
  Synthetic: FXN 3 forward 9:69041498-69041527; SaCas9
cctttcaggtgaatttctcagaa

SEQ ID NO: 20376 - DNA, 22 bp, Artificial Sequence
  Synthetic: FXN 3 forward 9:69041499-69041527; SaCas9
ctttcaggtgaatttctcagaa

SEQ ID NO: 20377 - DNA, 21 bp, Artificial Sequence
  Synthetic: FXN 3 forward 9:69041500-69041527; SaCas9
tttcaggtgaatttctcagaa

SEQ ID NO: 20378 - DNA, 20 bp, Artificial Sequence
  Synthetic: FXN 3 forward 9:69041501-69041527; SaCas9
ttcaggtgaatttctcagaa

SEQ ID NO: 20379 - DNA, 19 bp, Artificial Sequence
  Synthetic: FXN 3 forward 9:69041502-69041527; SaCas9
tcaggtgaatttctcagaa

SEQ ID NO: 20380 - DNA, 18 bp, Artificial Sequence
  Synthetic: FXN 3 forward 9:69041503-69041527; SaCas9
caggtgaatttctcagaa

SEQ ID NO: 20381 - DNA, 25 bp, Artificial Sequence
  Synthetic: FXN 3 reverse 9:69041496-69041527; SaCas9
attccattctgagaaattcacctga

SEQ ID NO: 20382 - DNA, 24 bp, Artificial Sequence
  Synthetic: FXN 3 reverse 9:69041497-69041527; SaCas9
ttccattctgagaaattcacctga

SEQ ID NO: 20383 - DNA, 23 bp, Artificial Sequence
  Synthetic: FXN 3 reverse 9:69041498-69041527; SaCas9
tccattctgagaaattcacctga

SEQ ID NO: 20384 - DNA, 22 bp, Artificial Sequence
  Synthetic: FXN 3 reverse 9:69041499-69041527; SaCas9
ccattctgagaaattcacctga

SEQ ID NO: 20385 - DNA, 21 bp, Artificial Sequence
  Synthetic: FXN 3 reverse 9:69041500-69041527; SaCas9
cattctgagaaattcacctga

SEQ ID NO: 20386 - DNA, 20 bp, Artificial Sequence
  Synthetic: FXN 3 reverse 9:69041501-69041527; SaCas9
attctgagaaattcacctga

SEQ ID NO: 20387 - DNA, 19 bp, Artificial Sequence
  Synthetic: FXN 3 reverse 9:69041502-69041527; SaCas9
ttctgagaaattcacctga

SEQ ID NO: 20388 - DNA, 18 bp, Artificial Sequence
  Synthetic: FXN 3 reverse 9:69041503-69041527; SaCas9
tctgagaaattcacctga

SEQ ID NO: 20389 - DNA, 25 bp, Artificial Sequence
  Synthetic: FXN 3 reverse 9:69041500-69041531; SaCas9
agcaattccattctgagaaattcac

SEQ ID NO: 20390 - DNA, 24 bp, Artificial Sequence
  Synthetic: FXN 3 reverse 9:69041501-69041531; SaCas9
gcaattccattctgagaaattcac

SEQ ID NO: 20391 - DNA, 23 bp, Artificial Sequence
  Synthetic: FXN 3 reverse 9:69041502-69041531; SaCas9
caattccattctgagaaattcac

SEQ ID NO: 20392 - DNA, 22 bp, Artificial Sequence
  Synthetic: FXN 3 reverse 9:69041503-69041531; SaCas9
aattccattctgagaaattcac

SEQ ID NO: 20393 - DNA, 21 bp, Artificial Sequence
  Synthetic: FXN 3 reverse 9:69041504-69041531; SaCas9
attccattctgagaaattcac

SEQ ID NO: 20394 - DNA, 20 bp, Artificial Sequence
  Synthetic: FXN 3 reverse 9:69041505-69041531; SaCas9
ttccattctgagaaattcac

SEQ ID NO: 20395 - DNA, 19 bp, Artificial Sequence
  Synthetic: FXN 3 reverse 9:69041506-69041531; SaCas9
tccattctgagaaattcac

SEQ ID NO: 20396 - DNA, 18 bp, Artificial Sequence
  Synthetic: FXN 3 reverse 9:69041507-69041531; SaCas9
ccattctgagaaattcac

SEQ ID NO: 20397 - DNA, 25 bp, Artificial Sequence
  Synthetic: FXN 3 forward 9:69041504-69041535; SaCas9
aggtgaatttctcagaatggaattg

SEQ ID NO: 20398 - DNA, 24 bp, Artificial Sequence
  Synthetic: FXN 3 forward 9:69041505-69041535; SaCas9
ggtgaatttctcagaatggaattg

SEQ ID NO: 20399 - DNA, 23 bp, Artificial Sequence
  Synthetic: FXN 3 forward 9:69041506-69041535; SaCas9
gtgaatttctcagaatggaattg

SEQ ID NO: 20400 - DNA, 22 bp, Artificial Sequence
  Synthetic: FXN 3 forward 9:69041507-69041535; SaCas9
tgaatttctcagaatggaattg

SEQ ID NO: 20401 - DNA, 21 bp, Artificial Sequence
  Synthetic: FXN 3 forward 9:69041508-69041535; SaCas9
gaatttctcagaatggaattg

SEQ ID NO: 20402 - DNA, 20 bp, Artificial Sequence
  Synthetic: FXN 3 forward 9:69041509-69041535; SaCas9
aatttctcagaatggaattg

SEQ ID NO: 20403 - DNA, 19 bp, Artificial Sequence
  Synthetic: FXN 3 forward 9:69041510-69041535; SaCas9
atttctcagaatggaattg

SEQ ID NO: 20404 - DNA, 18 bp, Artificial Sequence
  Synthetic: FXN 3 forward 9:69041511-69041535; SaCas9
tttctcagaatggaattg

SEQ ID NO: 20405 - DNA, 25 bp, Artificial Sequence
  Synthetic: FXN 3 forward 9:69041511-69041542; SaCas9
tttctcagaatggaattgctgggca

SEQ ID NO: 20406 - DNA, 24 bp, Artificial Sequence
  Synthetic: FXN 3 forward 9:69041512-69041542; SaCas9
ttctcagaatggaattgctgggca

SEQ ID NO: 20407 - DNA, 23 bp, Artificial Sequence
  Synthetic: FXN 3 forward 9:69041513-69041542; SaCas9
tctcagaatggaattgctgggca

SEQ ID NO: 20408 - DNA, 22 bp, Artificial Sequence
  Synthetic: FXN 3 forward 9:69041514-69041542; SaCas9
ctcagaatggaattgctgggca

SEQ ID NO: 20409 - DNA, 21 bp, Artificial Sequence
  Synthetic: FXN 3 forward 9:69041515-69041542; SaCas9
tcagaatggaattgctgggca

SEQ ID NO: 20410 - DNA, 20 bp, Artificial Sequence
  Synthetic: FXN 3 forward 9:69041516-69041542; SaCas9
cagaatggaattgctgggca

SEQ ID NO: 20411 - DNA, 19 bp, Artificial Sequence
  Synthetic: FXN 3 forward 9:69041517-69041542; SaCas9
agaatggaattgctgggca

SEQ ID NO: 20412 - DNA, 18 bp, Artificial Sequence
  Synthetic: FXN 3 forward 9:69041518-69041542; SaCas9
gaatggaattgctgggca

SEQ ID NO: 20413 - DNA, 25 bp, Artificial Sequence
  Synthetic: FXN 3 reverse 9:69041511-69041542; SaCas9
cccctttgcccagcaattccattct

SEQ ID NO: 20414 - DNA, 24 bp, Artificial Sequence
  Synthetic: FXN 3 reverse 9:69041512-69041542; SaCas9
ccctttgcccagcaattccattct

SEQ ID NO: 20415 - DNA, 23 bp, Artificial Sequence
  Synthetic: FXN 3 reverse 9:69041513-69041542; SaCas9
cctttgcccagcaattccattct

SEQ ID NO: 20416 - DNA, 22 bp, Artificial Sequence
  Synthetic: FXN 3 reverse 9:69041514-69041542; SaCas9
ctttgcccagcaattccattct

SEQ ID NO: 20417 - DNA, 21 bp, Artificial Sequence
  Synthetic: FXN 3 reverse 9:69041515-69041542; SaCas9
tttgcccagcaattccattct

SEQ ID NO: 20418 - DNA, 20 bp, Artificial Sequence
  Synthetic: FXN 3 reverse 9:69041516-69041542; SaCas9
ttgcccagcaattccattct

SEQ ID NO: 20419 - DNA, 19 bp, Artificial Sequence
  Synthetic: FXN 3 reverse 9:69041517-69041542; SaCas9
tgcccagcaattccattct

SEQ ID NO: 20420 - DNA, 18 bp, Artificial Sequence
  Synthetic: FXN 3 reverse 9:69041518-69041542; SaCas9
gcccagcaattccattct

SEQ ID NO: 20421 - DNA, 25 bp, Artificial Sequence
  Synthetic: FXN 3 forward 9:69041512-69041543; SaCas9
ttctcagaatggaattgctgggcaa

SEQ ID NO: 20422 - DNA, 24 bp, Artificial Sequence
  Synthetic: FXN 3 forward 9:69041513-69041543; SaCas9
tctcagaatggaattgctgggcaa

SEQ ID NO: 20423 - DNA, 23 bp, Artificial Sequence
  Synthetic: FXN 3 forward 9:69041514-69041543; SaCas9
ctcagaatggaattgctgggcaa

SEQ ID NO: 20424 - DNA, 22 bp, Artificial Sequence
  Synthetic: FXN 3 forward 9:69041515-69041543; SaCas9
tcagaatggaattgctgggcaa

SEQ ID NO: 20425 - DNA, 21 bp, Artificial Sequence
  Synthetic: FXN 3 forward 9:69041516-69041543; SaCas9
cagaatggaattgctgggcaa

SEQ ID NO: 20426 - DNA, 20 bp, Artificial Sequence
  Synthetic: FXN 3 forward 9:69041517-69041543; SaCas9
agaatggaattgctgggcaa

SEQ ID NO: 20427 - DNA, 19 bp, Artificial Sequence
  Synthetic: FXN 3 forward 9:69041518-69041543; SaCas9
gaatggaattgctgggcaa

SEQ ID NO: 20428 - DNA, 18 bp, Artificial Sequence
  Synthetic: FXN 3 forward 9:69041519-69041543; SaCas9
aatggaattgctgggcaa

SEQ ID NO: 20429 - DNA, 25 bp, Artificial Sequence
  Synthetic: FXN 3 reverse 9:69041513-69041544; SaCas9
tgcccctttgcccagcaattccatt

SEQ ID NO: 20430 - DNA, 24 bp, Artificial Sequence
  Synthetic: FXN 3 reverse 9:69041514-69041544; SaCas9
gcccctttgcccagcaattccatt

SEQ ID NO: 20431 - DNA, 23 bp, Artificial Sequence
  Synthetic: FXN 3 reverse 9:69041515-69041544; SaCas9
cccctttgcccagcaattccatt

SEQ ID NO: 20432 - DNA, 22 bp, Artificial Sequence
  Synthetic: FXN 3 reverse 9:69041516-69041544; SaCas9
ccctttgcccagcaattccatt

SEQ ID NO: 20433 - DNA, 21 bp, Artificial Sequence
  Synthetic: FXN 3 reverse 9:69041517-69041544; SaCas9
cctttgcccagcaattccatt

SEQ ID NO: 20434 - DNA, 20 bp, Artificial Sequence
  Synthetic: FXN 3 reverse 9:69041518-69041544; SaCas9
ctttgcccagcaattccatt

SEQ ID NO: 20435 - DNA, 19 bp, Artificial Sequence
  Synthetic: FXN 3 reverse 9:69041519-69041544; SaCas9
tttgcccagcaattccatt

SEQ ID NO: 20436 - DNA, 18 bp, Artificial Sequence
  Synthetic: FXN 3 reverse 9:69041520-69041544; SaCas9
ttgcccagcaattccatt

SEQ ID NO: 20437 - DNA, 25 bp, Artificial Sequence
  Synthetic: FXN 3 reverse 9:69041555-69041586; SaCas9
ctggcaccaccacttttggcatcaa

SEQ ID NO: 20438 - DNA, 24 bp, Artificial Sequence
  Synthetic: FXN 3 reverse 9:69041556-69041586; SaCas9
tggcaccaccacttttggcatcaa

SEQ ID NO: 20439 - DNA, 23 bp, Artificial Sequence
  Synthetic: FXN 3 reverse 9:69041557-69041586; SaCas9
ggcaccaccacttttggcatcaa

SEQ ID NO: 20440 - DNA, 22 bp, Artificial Sequence
  Synthetic: FXN 3 reverse 9:69041558-69041586; SaCas9
gcaccaccacttttggcatcaa

SEQ ID NO: 20441 - DNA, 21 bp, Artificial Sequence
  Synthetic: FXN 3 reverse 9:69041559-69041586; SaCas9
caccaccacttttggcatcaa

SEQ ID NO: 20442 - DNA, 20 bp, Artificial Sequence
  Synthetic: FXN 3 reverse 9:69041560-69041586; SaCas9
accaccacttttggcatcaa

SEQ ID NO: 20443 - DNA, 19 bp, Artificial Sequence
  Synthetic: FXN 3 reverse 9:69041561-69041586; SaCas9
ccaccacttttggcatcaa

SEQ ID NO: 20444 - DNA, 18 bp, Artificial Sequence
  Synthetic: FXN 3 reverse 9:69041562-69041586; SaCas9
caccacttttggcatcaa

SEQ ID NO: 20445 - DNA, 25 bp, Artificial Sequence
  Synthetic: FXN 3 forward 9:69041574-69041605; SaCas9
tggtggtgccagttcatcctcccct

SEQ ID NO: 20446 - DNA, 24 bp, Artificial Sequence
  Synthetic: FXN 3 forward 9:69041575-69041605; SaCas9
ggtggtgccagttcatcctcccct

SEQ ID NO: 20447 - DNA, 23 bp, Artificial Sequence
  Synthetic: FXN 3 forward 9:69041576-69041605; SaCas9
gtggtgccagttcatcctcccct

SEQ ID NO: 20448 - DNA, 22 bp, Artificial Sequence
  Synthetic: FXN 3 forward 9:69041577-69041605; SaCas9
tggtgccagttcatcctcccct

SEQ ID NO: 20449 - DNA, 21 bp, Artificial Sequence
  Synthetic: FXN 3 forward 9:69041578-69041605; SaCas9
ggtgccagttcatcctcccct

SEQ ID NO: 20450 - DNA, 20 bp, Artificial Sequence
  Synthetic: FXN 3 forward 9:69041579-69041605; SaCas9
gtgccagttcatcctcccct

SEQ ID NO: 20451 - DNA, 19 bp, Artificial Sequence
  Synthetic: FXN 3 forward 9:69041580-69041605; SaCas9
tgccagttcatcctcccct

SEQ ID NO: 20452 - DNA, 18 bp, Artificial Sequence
  Synthetic: FXN 3 forward 9:69041581-69041605; SaCas9
gccagttcatcctcccct

SEQ ID NO: 20453 - DNA, 25 bp, Artificial Sequence
  Synthetic: FXN 3 forward 9:69041581-69041612; SaCas9
gccagttcatcctcccctgcgaggt

SEQ ID NO: 20454 - DNA, 24 bp, Artificial Sequence
  Synthetic: FXN 3 forward 9:69041582-69041612; SaCas9
ccagttcatcctcccctgcgaggt

SEQ ID NO: 20455 - DNA, 23 bp, Artificial Sequence
  Synthetic: FXN 3 forward 9:69041583-69041612; SaCas9
cagttcatcctcccctgcgaggt

SEQ ID NO: 20456 - DNA, 22 bp, Artificial Sequence
  Synthetic: FXN 3 forward 9:69041584-69041612; SaCas9
agttcatcctcccctgcgaggt

SEQ ID NO: 20457 - DNA, 21 bp, Artificial Sequence
  Synthetic: FXN 3 forward 9:69041585-69041612; SaCas9
gttcatcctcccctgcgaggt

SEQ ID NO: 20458 - DNA, 20 bp, Artificial Sequence
  Synthetic: FXN 3 forward 9:69041586-69041612; SaCas9
ttcatcctcccctgcgaggt

SEQ ID NO: 20459 - DNA, 19 bp, Artificial Sequence
  Synthetic: FXN 3 forward 9:69041587-69041612; SaCas9
tcatcctcccctgcgaggt

SEQ ID NO: 20460 - DNA, 18 bp, Artificial Sequence
  Synthetic: FXN 3 forward 9:69041588-69041612; SaCas9
catcctcccctgcgaggt

SEQ ID NO: 20461 - DNA, 25 bp, Artificial Sequence
  Synthetic: FXN 3 reverse 9:69041585-69041616; SaCas9
caggacccatacctcgcaggggagg

SEQ ID NO: 20462 - DNA, 24 bp, Artificial Sequence
  Synthetic: FXN 3 reverse 9:69041586-69041616; SaCas9
aggacccatacctcgcaggggagg

SEQ ID NO: 20463 - DNA, 23 bp, Artificial Sequence
  Synthetic: FXN 3 reverse 9:69041587-69041616; SaCas9
ggacccatacctcgcaggggagg

SEQ ID NO: 20464 - DNA, 22 bp, Artificial Sequence
  Synthetic: FXN 3 reverse 9:69041588-69041616; SaCas9
gacccatacctcgcaggggagg

SEQ ID NO: 20465 - DNA, 21 bp, Artificial Sequence
  Synthetic: FXN 3 reverse 9:69041589-69041616; SaCas9
acccatacctcgcaggggagg

SEQ ID NO: 20466 - DNA, 20 bp, Artificial Sequence
  Synthetic: FXN 3 reverse 9:69041590-69041616; SaCas9
cccatacctcgcaggggagg

SEQ ID NO: 20467 - DNA, 19 bp, Artificial Sequence
  Synthetic: FXN 3 reverse 9:69041591-69041616; SaCas9
ccatacctcgcaggggagg

SEQ ID NO: 20468 - DNA, 18 bp, Artificial Sequence
  Synthetic: FXN 3 reverse 9:69041592-69041616; SaCas9
catacctcgcaggggagg

SEQ ID NO: 20469 - DNA, 25 bp, Artificial Sequence
  Synthetic: FXN 3 reverse 9:69041589-69041620; SaCas9
gaatcaggacccatacctcgcaggg

SEQ ID NO: 20470 - DNA, 24 bp, Artificial Sequence
  Synthetic: FXN 3 reverse 9:69041590-69041620; SaCas9
aatcaggacccatacctcgcaggg

SEQ ID NO: 20471 - DNA, 23 bp, Artificial Sequence
  Synthetic: FXN 3 reverse 9:69041591-69041620; SaCas9
atcaggacccatacctcgcaggg

SEQ ID NO: 20472 - DNA, 22 bp, Artificial Sequence
  Synthetic: FXN 3 reverse 9:69041592-69041620; SaCas9
tcaggacccatacctcgcaggg

SEQ ID NO: 20473 - DNA, 21 bp, Artificial Sequence
  Synthetic: FXN 3 reverse 9:69041593-69041620; SaCas9
caggacccatacctcgcaggg

SEQ ID NO: 20474 - DNA, 20 bp, Artificial Sequence
  Synthetic: FXN 3 reverse 9:69041594-69041620; SaCas9
aggacccatacctcgcaggg

SEQ ID NO: 20475 - DNA, 19 bp, Artificial Sequence
  Synthetic: FXN 3 reverse 9:69041595-69041620; SaCas9
ggacccatacctcgcaggg

SEQ ID NO: 20476 - DNA, 18 bp, Artificial Sequence
  Synthetic: FXN 3 reverse 9:69041596-69041620; SaCas9
gacccatacctcgcaggg

SEQ ID NO: 20477 - DNA, 25 bp, Artificial Sequence
  Synthetic: FXN 3 reverse 9:69041591-69041622; SaCas9
gtgaatcaggacccatacctcgcag

SEQ ID NO: 20478 - DNA, 24 bp, Artificial Sequence
  Synthetic: FXN 3 reverse 9:69041592-69041622; SaCas9
tgaatcaggacccatacctcgcag

SEQ ID NO: 20479 - DNA, 23 bp, Artificial Sequence
  Synthetic: FXN 3 reverse 9:69041593-69041622; SaCas9
gaatcaggacccatacctcgcag

SEQ ID NO: 20480 - DNA, 22 bp, Artificial Sequence
  Synthetic: FXN 3 reverse 9:69041594-69041622; SaCas9
aatcaggacccatacctcgcag

SEQ ID NO: 20481 - DNA, 21 bp, Artificial Sequence
  Synthetic: FXN 3 reverse 9:69041595-69041622; SaCas9
atcaggacccatacctcgcag

SEQ ID NO: 20482 - DNA, 20 bp, Artificial Sequence
  Synthetic: FXN 3 reverse 9:69041596-69041622; SaCas9
tcaggacccatacctcgcag

SEQ ID NO: 20483 - DNA, 19 bp, Artificial Sequence
  Synthetic: FXN 3 reverse 9:69041597-69041622; SaCas9
caggacccatacctcgcag

SEQ ID NO: 20484 - DNA, 18 bp, Artificial Sequence
  Synthetic: FXN 3 reverse 9:69041598-69041622; SaCas9
aggacccatacctcgcag

SEQ ID NO: 20485 - DNA, 25 bp, Artificial Sequence
  Synthetic: FXN 3 reverse 9:69041592-69041623; SaCas9
agtgaatcaggacccatacctcgca

SEQ ID NO: 20486 - DNA, 24 bp, Artificial Sequence
  Synthetic: FXN 3 reverse 9:69041593-69041623; SaCas9
gtgaatcaggacccatacctcgca

SEQ ID NO: 20487 - DNA, 23 bp, Artificial Sequence
  Synthetic: FXN 3 reverse 9:69041594-69041623; SaCas9
tgaatcaggacccatacctcgca

SEQ ID NO: 20488 - DNA, 22 bp, Artificial Sequence
  Synthetic: FXN 3 reverse 9:69041595-69041623; SaCas9
gaatcaggacccatacctcgca

SEQ ID NO: 20489 - DNA, 21 bp, Artificial Sequence
  Synthetic: FXN 3 reverse 9:69041596-69041623; SaCas9
aatcaggacccatacctcgca

SEQ ID NO: 20490 - DNA, 20 bp, Artificial Sequence
  Synthetic: FXN 3 reverse 9:69041597-69041623; SaCas9
atcaggacccatacctcgca

SEQ ID NO: 20491 - DNA, 19 bp, Artificial Sequence
  Synthetic: FXN 3 reverse 9:69041598-69041623; SaCas9
tcaggacccatacctcgca

SEQ ID NO: 20492 - DNA, 18 bp, Artificial Sequence
  Synthetic: FXN 3 reverse 9:69041599-69041623; SaCas9
caggacccatacctcgca

SEQ ID NO: 20493 - DNA, 25 bp, Artificial Sequence
  Synthetic: FXN 3 reverse 9:69041593-69041624; SaCas9
gagtgaatcaggacccatacctcgc

SEQ ID NO: 20494 - DNA, 24 bp, Artificial Sequence
  Synthetic: FXN 3 reverse 9:69041594-69041624; SaCas9
agtgaatcaggacccatacctcgc

SEQ ID NO: 20495 - DNA, 23 bp, Artificial Sequence
  Synthetic: FXN 3 reverse 9:69041595-69041624; SaCas9
gtgaatcaggacccatacctcgc

SEQ ID NO: 20496 - DNA, 22 bp, Artificial Sequence
  Synthetic: FXN 3 reverse 9:69041596-69041624; SaCas9
tgaatcaggacccatacctcgc

SEQ ID NO: 20497 - DNA, 21 bp, Artificial Sequence
  Synthetic: FXN 3 reverse 9:69041597-69041624; SaCas9
gaatcaggacccatacctcgc

SEQ ID NO: 20498 - DNA, 20 bp, Artificial Sequence
  Synthetic: FXN 3 reverse 9:69041598-69041624; SaCas9
aatcaggacccatacctcgc

SEQ ID NO: 20499 - DNA, 19 bp, Artificial Sequence
  Synthetic: FXN 3 reverse 9:69041599-69041624; SaCas9
atcaggacccatacctcgc

SEQ ID NO: 20500 - DNA, 18 bp, Artificial Sequence
  Synthetic: FXN 3 reverse 9:69041600-69041624; SaCas9
tcaggacccatacctcgc

SEQ ID NO: 20501 - DNA, 25 bp, Artificial Sequence
  Synthetic: FXN 3 reverse 9:69041594-69041625; SaCas9
agagtgaatcaggacccatacctcg

SEQ ID NO: 20502 - DNA, 24 bp, Artificial Sequence
  Synthetic: FXN 3 reverse 9:69041595-69041625; SaCas9
gagtgaatcaggacccatacctcg

SEQ ID NO: 20503 - DNA, 23 bp, Artificial Sequence
  Synthetic: FXN 3 reverse 9:69041596-69041625; SaCas9
agtgaatcaggacccatacctcg

SEQ ID NO: 20504 - DNA, 22 bp, Artificial Sequence
  Synthetic: FXN 3 reverse 9:69041597-69041625; SaCas9
gtgaatcaggacccatacctcg

SEQ ID NO: 20505 - DNA, 21 bp, Artificial Sequence
  Synthetic: FXN 3 reverse 9:69041598-69041625; SaCas9
tgaatcaggacccatacctcg

SEQ ID NO: 20506 - DNA, 20 bp, Artificial Sequence
  Synthetic: FXN 3 reverse 9:69041599-69041625; SaCas9
gaatcaggacccatacctcg

SEQ ID NO: 20507 - DNA, 19 bp, Artificial Sequence
  Synthetic: FXN 3 reverse 9:69041600-69041625; SaCas9
aatcaggacccatacctcg

SEQ ID NO: 20508 - DNA, 18 bp, Artificial Sequence
  Synthetic: FXN 3 reverse 9:69041601-69041625; SaCas9
atcaggacccatacctcg

SEQ ID NO: 20509 - DNA, 25 bp, Artificial Sequence
  Synthetic: FXN 3 reverse 9:69041610-69041641; SaCas9
aaaccacagcacttgaagagtgaat

SEQ ID NO: 20510 - DNA, 24 bp, Artificial Sequence
  Synthetic: FXN 3 reverse 9:69041611-69041641; SaCas9
aaccacagcacttgaagagtgaat

SEQ ID NO: 20511 - DNA, 23 bp, Artificial Sequence
  Synthetic: FXN 3 reverse 9:69041612-69041641; SaCas9
accacagcacttgaagagtgaat

SEQ ID NO: 20512 - DNA, 22 bp, Artificial Sequence
  Synthetic: FXN 3 reverse 9:69041613-69041641; SaCas9
ccacagcacttgaagagtgaat

SEQ ID NO: 20513 - DNA, 21 bp, Artificial Sequence
  Synthetic: FXN 3 reverse 9:69041614-69041641; SaCas9
cacagcacttgaagagtgaat

SEQ ID NO: 20514 - DNA, 20 bp, Artificial Sequence
  Synthetic: FXN 3 reverse 9:69041615-69041641; SaCas9
acagcacttgaagagtgaat

SEQ ID NO: 20515 - DNA, 19 bp, Artificial Sequence
  Synthetic: FXN 3 reverse 9:69041616-69041641; SaCas9
cagcacttgaagagtgaat

SEQ ID NO: 20516 - DNA, 18 bp, Artificial Sequence
  Synthetic: FXN 3 reverse 9:69041617-69041641; SaCas9
agcacttgaagagtgaat

SEQ ID NO: 20517 - DNA, 25 bp, Artificial Sequence
  Synthetic: FXN 3 reverse 9:69041616-69041647; SaCas9
cctgtcaaaccacagcacttgaaga

SEQ ID NO: 20518 - DNA, 24 bp, Artificial Sequence
  Synthetic: FXN 3 reverse 9:69041617-69041647; SaCas9
ctgtcaaaccacagcacttgaaga

SEQ ID NO: 20519 - DNA, 23 bp, Artificial Sequence
  Synthetic: FXN 3 reverse 9:69041618-69041647; SaCas9
tgtcaaaccacagcacttgaaga

SEQ ID NO: 20520 - DNA, 22 bp, Artificial Sequence
  Synthetic: FXN 3 reverse 9:69041619-69041647; SaCas9
gtcaaaccacagcacttgaaga

SEQ ID NO: 20521 - DNA, 21 bp, Artificial Sequence
  Synthetic: FXN 3 reverse 9:69041620-69041647; SaCas9
tcaaaccacagcacttgaaga

SEQ ID NO: 20522 - DNA, 20 bp, Artificial Sequence
  Synthetic: FXN 3 reverse 9:69041621-69041647; SaCas9
caaaccacagcacttgaaga

SEQ ID NO: 20523 - DNA, 19 bp, Artificial Sequence
  Synthetic: FXN 3 reverse 9:69041622-69041647; SaCas9
aaaccacagcacttgaaga

SEQ ID NO: 20524 - DNA, 18 bp, Artificial Sequence
  Synthetic: FXN 3 reverse 9:69041623-69041647; SaCas9
aaccacagcacttgaaga

SEQ ID NO: 20525 - DNA, 25 bp, Artificial Sequence
  Synthetic: FXN 3 forward 9:69041618-69041649; SaCas9
tcactcttcaagtgctgtggtttga

SEQ ID NO: 20526 - DNA, 24 bp, Artificial Sequence
  Synthetic: FXN 3 forward 9:69041619-69041649; SaCas9
cactcttcaagtgctgtggtttga

SEQ ID NO: 20527 - DNA, 23 bp, Artificial Sequence
  Synthetic: FXN 3 forward 9:69041620-69041649; SaCas9
actcttcaagtgctgtggtttga

SEQ ID NO: 20528 - DNA, 22 bp, Artificial Sequence
  Synthetic: FXN 3 forward 9:69041621-69041649; SaCas9
ctcttcaagtgctgtggtttga

SEQ ID NO: 20529 - DNA, 21 bp, Artificial Sequence
  Synthetic: FXN 3 forward 9:69041622-69041649; SaCas9
tcttcaagtgctgtggtttga

SEQ ID NO: 20530 - DNA, 20 bp, Artificial Sequence
  Synthetic: FXN 3 forward 9:69041623-69041649; SaCas9
cttcaagtgctgtggtttga

SEQ ID NO: 20531 - DNA, 19 bp, Artificial Sequence
  Synthetic: FXN 3 forward 9:69041624-69041649; SaCas9
ttcaagtgctgtggtttga

SEQ ID NO: 20532 - DNA, 18 bp, Artificial Sequence
  Synthetic: FXN 3 forward 9:69041625-69041649; SaCas9
tcaagtgctgtggtttga

SEQ ID NO: 20533 - DNA, 25 bp, Artificial Sequence
  Synthetic: FXN 3 reverse 9:69041620-69041651; SaCas9
cggccctgtcaaaccacagcacttg

SEQ ID NO: 20534 - DNA, 24 bp, Artificial Sequence
  Synthetic: FXN 3 reverse 9:69041621-69041651; SaCas9
ggccctgtcaaaccacagcacttg

SEQ ID NO: 20535 - DNA, 23 bp, Artificial Sequence
  Synthetic: FXN 3 reverse 9:69041622-69041651; SaCas9
gccctgtcaaaccacagcacttg

SEQ ID NO: 20536 - DNA, 22 bp, Artificial Sequence
  Synthetic: FXN 3 reverse 9:69041623-69041651; SaCas9
ccctgtcaaaccacagcacttg

SEQ ID NO: 20537 - DNA, 21 bp, Artificial Sequence
  Synthetic: FXN 3 reverse 9:69041624-69041651; SaCas9
cctgtcaaaccacagcacttg

SEQ ID NO: 20538 - DNA, 20 bp, Artificial Sequence
  Synthetic: FXN 3 reverse 9:69041625-69041651; SaCas9
ctgtcaaaccacagcacttg

SEQ ID NO: 20539 - DNA, 19 bp, Artificial Sequence
  Synthetic: FXN 3 reverse 9:69041626-69041651; SaCas9
tgtcaaaccacagcacttg

SEQ ID NO: 20540 - DNA, 18 bp, Artificial Sequence
  Synthetic: FXN 3 reverse 9:69041627-69041651; SaCas9
gtcaaaccacagcacttg

SEQ ID NO: 20541 - DNA, 25 bp, Artificial Sequence
  Synthetic: FXN 3 forward 9:69041623-69041654; SaCas9
cttcaagtgctgtggtttgacaggg

SEQ ID NO: 20542 - DNA, 24 bp, Artificial Sequence
  Synthetic: FXN 3 forward 9:69041624-69041654; SaCas9
ttcaagtgctgtggtttgacaggg

SEQ ID NO: 20543 - DNA, 23 bp, Artificial Sequence
  Synthetic: FXN 3 forward 9:69041625-69041654; SaCas9
tcaagtgctgtggtttgacaggg

SEQ ID NO: 20544 - DNA, 22 bp, Artificial Sequence
  Synthetic: FXN 3 forward 9:69041626-69041654; SaCas9
caagtgctgtggtttgacaggg

SEQ ID NO: 20545 - DNA, 21 bp, Artificial Sequence
  Synthetic: FXN 3 forward 9:69041627-69041654; SaCas9
aagtgctgtggtttgacaggg

SEQ ID NO: 20546 - DNA, 20 bp, Artificial Sequence
  Synthetic: FXN 3 forward 9:69041628-69041654; SaCas9
agtgctgtggtttgacaggg

SEQ ID NO: 20547 - DNA, 19 bp, Artificial Sequence
  Synthetic: FXN 3 forward 9:69041629-69041654; SaCas9
gtgctgtggtttgacaggg

SEQ ID NO: 20548 - DNA, 18 bp, Artificial Sequence
  Synthetic: FXN 3 forward 9:69041630-69041654; SaCas9
tgctgtggtttgacaggg

SEQ ID NO: 20549 - DNA, 25 bp, Artificial Sequence
  Synthetic: FXN 3 reverse 9:69041623-69041654; SaCas9
ccccggccctgtcaaaccacagcac

SEQ ID NO: 20550 - DNA, 24 bp, Artificial Sequence
  Synthetic: FXN 3 reverse 9:69041624-69041654; SaCas9
cccggccctgtcaaaccacagcac

SEQ ID NO: 20551 - DNA, 23 bp, Artificial Sequence
  Synthetic: FXN 3 reverse 9:69041625-69041654; SaCas9
ccggccctgtcaaaccacagcac

SEQ ID NO: 20552 - DNA, 22 bp, Artificial Sequence
  Synthetic: FXN 3 reverse 9:69041626-69041654; SaCas9
cggccctgtcaaaccacagcac

SEQ ID NO: 20553 - DNA, 21 bp, Artificial Sequence
  Synthetic: FXN 3 reverse 9:69041627-69041654; SaCas9
ggccctgtcaaaccacagcac

SEQ ID NO: 20554 - DNA, 20 bp, Artificial Sequence
  Synthetic: FXN 3 reverse 9:69041628-69041654; SaCas9
gccctgtcaaaccacagcac

SEQ ID NO: 20555 - DNA, 19 bp, Artificial Sequence
  Synthetic: FXN 3 reverse 9:69041629-69041654; SaCas9
ccctgtcaaaccacagcac

SEQ ID NO: 20556 - DNA, 18 bp, Artificial Sequence
  Synthetic: FXN 3 reverse 9:69041630-69041654; SaCas9
cctgtcaaaccacagcac

SEQ ID NO: 20557 - DNA, 25 bp, Artificial Sequence
  Synthetic: FXN 3 forward 9:69041624-69041655; SaCas9
ttcaagtgctgtggtttgacagggc

SEQ ID NO: 20558 - DNA, 24 bp, Artificial Sequence
  Synthetic: FXN 3 forward 9:69041625-69041655; SaCas9
tcaagtgctgtggtttgacagggc

SEQ ID NO: 20559 - DNA, 23 bp, Artificial Sequence
  Synthetic: FXN 3 forward 9:69041626-69041655; SaCas9
caagtgctgtggtttgacagggc

SEQ ID NO: 20560 - DNA, 22 bp, Artificial Sequence
  Synthetic: FXN 3 forward 9:69041627-69041655; SaCas9
aagtgctgtggtttgacagggc

SEQ ID NO: 20561 - DNA, 21 bp, Artificial Sequence
  Synthetic: FXN 3 forward 9:69041628-69041655; SaCas9
agtgctgtggtttgacagggc

SEQ ID NO: 20562 - DNA, 20 bp, Artificial Sequence
  Synthetic: FXN 3 forward 9:69041629-69041655; SaCas9
gtgctgtggtttgacagggc

SEQ ID NO: 20563 - DNA, 19 bp, Artificial Sequence
  Synthetic: FXN 3 forward 9:69041630-69041655; SaCas9
tgctgtggtttgacagggc

SEQ ID NO: 20564 - DNA, 18 bp, Artificial Sequence
  Synthetic: FXN 3 forward 9:69041631-69041655; SaCas9
gctgtggtttgacagggc

SEQ ID NO: 20565 - DNA, 25 bp, Artificial Sequence
  Synthetic: FXN 3 forward 9:69041625-69041656; SaCas9
tcaagtgctgtggtttgacagggcc

SEQ ID NO: 20566 - DNA, 24 bp, Artificial Sequence
  Synthetic: FXN 3 forward 9:69041626-69041656; SaCas9
caagtgctgtggtttgacagggcc

SEQ ID NO: 20567 - DNA, 23 bp, Artificial Sequence
  Synthetic: FXN 3 forward 9:69041627-69041656; SaCas9
aagtgctgtggtttgacagggcc

SEQ ID NO: 20568 - DNA, 22 bp, Artificial Sequence
  Synthetic: FXN 3 forward 9:69041628-69041656; SaCas9
agtgctgtggtttgacagggcc

SEQ ID NO: 20569 - DNA, 21 bp, Artificial Sequence
  Synthetic: FXN 3 forward 9:69041629-69041656; SaCas9
gtgctgtggtttgacagggcc

SEQ ID NO: 20570 - DNA, 20 bp, Artificial Sequence
  Synthetic: FXN 3 forward 9:69041630-69041656; SaCas9
tgctgtggtttgacagggcc

SEQ ID NO: 20571 - DNA, 19 bp, Artificial Sequence
  Synthetic: FXN 3 forward 9:69041631-69041656; SaCas9
gctgtggtttgacagggcc

SEQ ID NO: 20572 - DNA, 18 bp, Artificial Sequence
  Synthetic: FXN 3 forward 9:69041632-69041656; SaCas9
ctgtggtttgacagggcc

SEQ ID NO: 20573 - DNA, 25 bp, Artificial Sequence
  Synthetic: FXN 3 forward 9:69041634-69041665; SaCas9
gtggtttgacagggccgggggtgac

SEQ ID NO: 20574 - DNA, 24 bp, Artificial Sequence
  Synthetic: FXN 3 forward 9:69041635-69041665; SaCas9
tggtttgacagggccgggggtgac

SEQ ID NO: 20575 - DNA, 23 bp, Artificial Sequence
  Synthetic: FXN 3 forward 9:69041636-69041665; SaCas9
ggtttgacagggccgggggtgac

SEQ ID NO: 20576 - DNA, 22 bp, Artificial Sequence
  Synthetic: FXN 3 forward 9:69041637-69041665; SaCas9
gtttgacagggccgggggtgac

SEQ ID NO: 20577 - DNA, 21 bp, Artificial Sequence
  Synthetic: FXN 3 forward 9:69041638-69041665; SaCas9
tttgacagggccgggggtgac

SEQ ID NO: 20578 - DNA, 20 bp, Artificial Sequence
  Synthetic: FXN 3 forward 9:69041639-69041665; SaCas9
ttgacagggccgggggtgac

SEQ ID NO: 20579 - DNA, 19 bp, Artificial Sequence
  Synthetic: FXN 3 forward 9:69041640-69041665; SaCas9
tgacagggccgggggtgac

SEQ ID NO: 20580 - DNA, 18 bp, Artificial Sequence
  Synthetic: FXN 3 forward 9:69041641-69041665; SaCas9
gacagggccgggggtgac

SEQ ID NO: 20581 - DNA, 25 bp, Artificial Sequence
  Synthetic: FXN 3 forward 9:69041635-69041666; SaCas9
tggtttgacagggccgggggtgaca

SEQ ID NO: 20582 - DNA, 24 bp, Artificial Sequence
  Synthetic: FXN 3 forward 9:69041636-69041666; SaCas9
ggtttgacagggccgggggtgaca

SEQ ID NO: 20583 - DNA, 23 bp, Artificial Sequence
  Synthetic: FXN 3 forward 9:69041637-69041666; SaCas9
gtttgacagggccgggggtgaca

SEQ ID NO: 20584 - DNA, 22 bp, Artificial Sequence
  Synthetic: FXN 3 forward 9:69041638-69041666; SaCas9
tttgacagggccgggggtgaca

SEQ ID NO: 20585 - DNA, 21 bp, Artificial Sequence
  Synthetic: FXN 3 forward 9:69041639-69041666; SaCas9
ttgacagggccgggggtgaca

SEQ ID NO: 20586 - DNA, 20 bp, Artificial Sequence
  Synthetic: FXN 3 forward 9:69041640-69041666; SaCas9
tgacagggccgggggtgaca

SEQ ID NO: 20587 - DNA, 19 bp, Artificial Sequence
  Synthetic: FXN 3 forward 9:69041641-69041666; SaCas9
gacagggccgggggtgaca

SEQ ID NO: 20588 - DNA, 18 bp, Artificial Sequence
  Synthetic: FXN 3 forward 9:69041642-69041666; SaCas9
acagggccgggggtgaca

SEQ ID NO: 20589 - DNA, 25 bp, Artificial Sequence
  Synthetic: FXN 3 forward 9:69041636-69041667; SaCas9
ggtttgacagggccgggggtgacaa

SEQ ID NO: 20590 - DNA, 24 bp, Artificial Sequence
  Synthetic: FXN 3 forward 9:69041637-69041667; SaCas9
gtttgacagggccgggggtgacaa

SEQ ID NO: 20591 - DNA, 23 bp, Artificial Sequence
  Synthetic: FXN 3 forward 9:69041638-69041667; SaCas9
tttgacagggccgggggtgacaa

SEQ ID NO: 20592 - DNA, 22 bp, Artificial Sequence
  Synthetic: FXN 3 forward 9:69041639-69041667; SaCas9
ttgacagggccgggggtgacaa

SEQ ID NO: 20593 - DNA, 21 bp, Artificial Sequence
  Synthetic: FXN 3 forward 9:69041640-69041667; SaCas9
tgacagggccgggggtgacaa

SEQ ID NO: 20594 - DNA, 20 bp, Artificial Sequence
  Synthetic: FXN 3 forward 9:69041641-69041667; SaCas9
gacagggccgggggtgacaa

SEQ ID NO: 20595 - DNA, 19 bp, Artificial Sequence
  Synthetic: FXN 3 forward 9:69041642-69041667; SaCas9
acagggccgggggtgacaa

SEQ ID NO: 20596 - DNA, 18 bp, Artificial Sequence
  Synthetic: FXN 3 forward 9:69041643-69041667; SaCas9
cagggccgggggtgacaa

SEQ ID NO: 20597 - DNA, 25 bp, Artificial Sequence
  Synthetic: FXN 3 forward 9:69041644-69041675; SaCas9
agggccgggggtgacaaggggacac

SEQ ID NO: 20598 - DNA, 24 bp, Artificial Sequence
  Synthetic: FXN 3 forward 9:69041645-69041675; SaCas9
gggccgggggtgacaaggggacac

SEQ ID NO: 20599 - DNA, 23 bp, Artificial Sequence
  Synthetic: FXN 3 forward 9:69041646-69041675; SaCas9
ggccgggggtgacaaggggacac

SEQ ID NO: 20600 - DNA, 22 bp, Artificial Sequence
  Synthetic: FXN 3 forward 9:69041647-69041675; SaCas9
gccgggggtgacaaggggacac

SEQ ID NO: 20601 - DNA, 21 bp, Artificial Sequence
  Synthetic: FXN 3 forward 9:69041648-69041675; SaCas9
ccgggggtgacaaggggacac

SEQ ID NO: 20602 - DNA, 20 bp, Artificial Sequence
  Synthetic: FXN 3 forward 9:69041649-69041675; SaCas9
cgggggtgacaaggggacac

SEQ ID NO: 20603 - DNA, 19 bp, Artificial Sequence
  Synthetic: FXN 3 forward 9:69041650-69041675; SaCas9
gggggtgacaaggggacac

SEQ ID NO: 20604 - DNA, 18 bp, Artificial Sequence
  Synthetic: FXN 3 forward 9:69041651-69041675; SaCas9
ggggtgacaaggggacac

SEQ ID NO: 20605 - DNA, 25 bp, Artificial Sequence
  Synthetic: FXN 3 forward 9:69041645-69041676; SaCas9
gggccgggggtgacaaggggacacc

SEQ ID NO: 20606 - DNA, 24 bp, Artificial Sequence
  Synthetic: FXN 3 forward 9:69041646-69041676; SaCas9
ggccgggggtgacaaggggacacc

SEQ ID NO: 20607 - DNA, 23 bp, Artificial Sequence
  Synthetic: FXN 3 forward 9:69041647-69041676; SaCas9
gccgggggtgacaaggggacacc

SEQ ID NO: 20608 - DNA, 22 bp, Artificial Sequence
  Synthetic: FXN 3 forward 9:69041648-69041676; SaCas9
ccgggggtgacaaggggacacc

SEQ ID NO: 20609 - DNA, 21 bp, Artificial Sequence
  Synthetic: FXN 3 forward 9:69041649-69041676; SaCas9
cgggggtgacaaggggacacc

SEQ ID NO: 20610 - DNA, 20 bp, Artificial Sequence
  Synthetic: FXN 3 forward 9:69041650-69041676; SaCas9
gggggtgacaaggggacacc

SEQ ID NO: 20611 - DNA, 19 bp, Artificial Sequence
  Synthetic: FXN 3 forward 9:69041651-69041676; SaCas9
ggggtgacaaggggacacc

SEQ ID NO: 20612 - DNA, 18 bp, Artificial Sequence
  Synthetic: FXN 3 forward 9:69041652-69041676; SaCas9
gggtgacaaggggacacc

SEQ ID NO: 20613 - DNA, 25 bp, Artificial Sequence
  Synthetic: FXN 3 forward 9:69041646-69041677; SaCas9
ggccgggggtgacaaggggacacct

SEQ ID NO: 20614 - DNA, 24 bp, Artificial Sequence
  Synthetic: FXN 3 forward 9:69041647-69041677; SaCas9
gccgggggtgacaaggggacacct

SEQ ID NO: 20615 - DNA, 23 bp, Artificial Sequence
  Synthetic: FXN 3 forward 9:69041648-69041677; SaCas9
ccgggggtgacaaggggacacct

SEQ ID NO: 20616 - DNA, 22 bp, Artificial Sequence
  Synthetic: FXN 3 forward 9:69041649-69041677; SaCas9
cgggggtgacaaggggacacct

SEQ ID NO: 20617 - DNA, 21 bp, Artificial Sequence
  Synthetic: FXN 3 forward 9:69041650-69041677; SaCas9
gggggtgacaaggggacacct

SEQ ID NO: 20618 - DNA, 20 bp, Artificial Sequence
  Synthetic: FXN 3 forward 9:69041651-69041677; SaCas9
ggggtgacaaggggacacct

SEQ ID NO: 20619 - DNA, 19 bp, Artificial Sequence
  Synthetic: FXN 3 forward 9:69041652-69041677; SaCas9
gggtgacaaggggacacct

SEQ ID NO: 20620 - DNA, 18 bp, Artificial Sequence
  Synthetic: FXN 3 forward 9:69041653-69041677; SaCas9
ggtgacaaggggacacct

SEQ ID NO: 20621 - DNA, 25 bp, Artificial Sequence
  Synthetic: FXN 3 forward 9:69041649-69041680; SaCas9
cgggggtgacaaggggacacctggg

SEQ ID NO: 20622 - DNA, 24 bp, Artificial Sequence
  Synthetic: FXN 3 forward 9:69041650-69041680; SaCas9
gggggtgacaaggggacacctggg

SEQ ID NO: 20623 - DNA, 23 bp, Artificial Sequence
  Synthetic: FXN 3 forward 9:69041651-69041680; SaCas9
ggggtgacaaggggacacctggg

SEQ ID NO: 20624 - DNA, 22 bp, Artificial Sequence
  Synthetic: FXN 3 forward 9:69041652-69041680; SaCas9
gggtgacaaggggacacctggg

SEQ ID NO: 20625 - DNA, 21 bp, Artificial Sequence
  Synthetic: FXN 3 forward 9:69041653-69041680; SaCas9
ggtgacaaggggacacctggg

SEQ ID NO: 20626 - DNA, 20 bp, Artificial Sequence
  Synthetic: FXN 3 forward 9:69041654-69041680; SaCas9
gtgacaaggggacacctggg

SEQ ID NO: 20627 - DNA, 19 bp, Artificial Sequence
  Synthetic: FXN 3 forward 9:69041655-69041680; SaCas9
tgacaaggggacacctggg

SEQ ID NO: 20628 - DNA, 18 bp, Artificial Sequence
  Synthetic: FXN 3 forward 9:69041656-69041680; SaCas9
gacaaggggacacctggg

SEQ ID NO: 20629 - DNA, 25 bp, Artificial Sequence
  Synthetic: FXN 3 forward 9:69041650-69041681; SaCas9
gggggtgacaaggggacacctggga

SEQ ID NO: 20630 - DNA, 24 bp, Artificial Sequence
  Synthetic: FXN 3 forward 9:69041651-69041681; SaCas9
ggggtgacaaggggacacctggga

SEQ ID NO: 20631 - DNA, 23 bp, Artificial Sequence
  Synthetic: FXN 3 forward 9:69041652-69041681; SaCas9
gggtgacaaggggacacctggga

SEQ ID NO: 20632 - DNA, 22 bp, Artificial Sequence
  Synthetic: FXN 3 forward 9:69041653-69041681; SaCas9
ggtgacaaggggacacctggga

SEQ ID NO: 20633 - DNA, 21 bp, Artificial Sequence
  Synthetic: FXN 3 forward 9:69041654-69041681; SaCas9
gtgacaaggggacacctggga

SEQ ID NO: 20634 - DNA, 20 bp, Artificial Sequence
  Synthetic: FXN 3 forward 9:69041655-69041681; SaCas9
tgacaaggggacacctggga

SEQ ID NO: 20635 - DNA, 19 bp, Artificial Sequence
  Synthetic: FXN 3 forward 9:69041656-69041681; SaCas9
gacaaggggacacctggga

SEQ ID NO: 20636 - DNA, 18 bp, Artificial Sequence
  Synthetic: FXN 3 forward 9:69041657-69041681; SaCas9
acaaggggacacctggga

SEQ ID NO: 20637 - DNA, 25 bp, Artificial Sequence
  Synthetic: FXN 3 forward 9:69041657-69041688; SaCas9
acaaggggacacctgggaaggaaag

SEQ ID NO: 20638 - DNA, 24 bp, Artificial Sequence
  Synthetic: FXN 3 forward 9:69041658-69041688; SaCas9
caaggggacacctgggaaggaaag

SEQ ID NO: 20639 - DNA, 23 bp, Artificial Sequence
  Synthetic: FXN 3 forward 9:69041659-69041688; SaCas9
aaggggacacctgggaaggaaag

SEQ ID NO: 20640 - DNA, 22 bp, Artificial Sequence
  Synthetic: FXN 3 forward 9:69041660-69041688; SaCas9
aggggacacctgggaaggaaag

SEQ ID NO: 20641 - DNA, 21 bp, Artificial Sequence
  Synthetic: FXN 3 forward 9:69041661-69041688; SaCas9
ggggacacctgggaaggaaag

SEQ ID NO: 20642 - DNA, 20 bp, Artificial Sequence
  Synthetic: FXN 3 forward 9:69041662-69041688; SaCas9
gggacacctgggaaggaaag

SEQ ID NO: 20643 - DNA, 19 bp, Artificial Sequence
  Synthetic: FXN 3 forward 9:69041663-69041688; SaCas9
ggacacctgggaaggaaag

SEQ ID NO: 20644 - DNA, 18 bp, Artificial Sequence
  Synthetic: FXN 3 forward 9:69041664-69041688; SaCas9
gacacctgggaaggaaag

SEQ ID NO: 20645 - DNA, 25 bp, Artificial Sequence
  Synthetic: FXN 3 reverse 9:69041686-69041717; SaCas9
taaggactggcctggatggccagca

SEQ ID NO: 20646 - DNA, 24 bp, Artificial Sequence
  Synthetic: FXN 3 reverse 9:69041687-69041717; SaCas9
aaggactggcctggatggccagca

SEQ ID NO: 20647 - DNA, 23 bp, Artificial Sequence
  Synthetic: FXN 3 reverse 9:69041688-69041717; SaCas9
aggactggcctggatggccagca

SEQ ID NO: 20648 - DNA, 22 bp, Artificial Sequence
  Synthetic: FXN 3 reverse 9:69041689-69041717; SaCas9
ggactggcctggatggccagca

SEQ ID NO: 20649 - DNA, 21 bp, Artificial Sequence
  Synthetic: FXN 3 reverse 9:69041690-69041717; SaCas9
gactggcctggatggccagca

SEQ ID NO: 20650 - DNA, 20 bp, Artificial Sequence
  Synthetic: FXN 3 reverse 9:69041691-69041717; SaCas9
actggcctggatggccagca

SEQ ID NO: 20651 - DNA, 19 bp, Artificial Sequence
  Synthetic: FXN 3 reverse 9:69041692-69041717; SaCas9
ctggcctggatggccagca

SEQ ID NO: 20652 - DNA, 18 bp, Artificial Sequence
  Synthetic: FXN 3 reverse 9:69041693-69041717; SaCas9
tggcctggatggccagca

SEQ ID NO: 20653 - DNA, 25 bp, Artificial Sequence
  Synthetic: FXN 3 reverse 9:69041687-69041718; SaCas9
gtaaggactggcctggatggccagc

SEQ ID NO: 20654 - DNA, 24 bp, Artificial Sequence
  Synthetic: FXN 3 reverse 9:69041688-69041718; SaCas9
taaggactggcctggatggccagc

SEQ ID NO: 20655 - DNA, 23 bp, Artificial Sequence
  Synthetic: FXN 3 reverse 9:69041689-69041718; SaCas9
aaggactggcctggatggccagc

SEQ ID NO: 20656 - DNA, 22 bp, Artificial Sequence
  Synthetic: FXN 3 reverse 9:69041690-69041718; SaCas9
aggactggcctggatggccagc

SEQ ID NO: 20657 - DNA, 21 bp, Artificial Sequence
  Synthetic: FXN 3 reverse 9:69041691-69041718; SaCas9
ggactggcctggatggccagc

SEQ ID NO: 20658 - DNA, 20 bp, Artificial Sequence
  Synthetic: FXN 3 reverse 9:69041692-69041718; SaCas9
gactggcctggatggccagc

SEQ ID NO: 20659 - DNA, 19 bp, Artificial Sequence
  Synthetic: FXN 3 reverse 9:69041693-69041718; SaCas9
actggcctggatggccagc

SEQ ID NO: 20660 - DNA, 18 bp, Artificial Sequence
  Synthetic: FXN 3 reverse 9:69041694-69041718; SaCas9
ctggcctggatggccagc

SEQ ID NO: 20661 - DNA, 25 bp, Artificial Sequence
  Synthetic: FXN 3 reverse 9:69041688-69041719; SaCas9
ggtaaggactggcctggatggccag

SEQ ID NO: 20662 - DNA, 24 bp, Artificial Sequence
  Synthetic: FXN 3 reverse 9:69041689-69041719; SaCas9
gtaaggactggcctggatggccag

SEQ ID NO: 20663 - DNA, 23 bp, Artificial Sequence
  Synthetic: FXN 3 reverse 9:69041690-69041719; SaCas9
taaggactggcctggatggccag

SEQ ID NO: 20664 - DNA, 22 bp, Artificial Sequence
  Synthetic: FXN 3 reverse 9:69041691-69041719; SaCas9
aaggactggcctggatggccag

SEQ ID NO: 20665 - DNA, 21 bp, Artificial Sequence
  Synthetic: FXN 3 reverse 9:69041692-69041719; SaCas9
aggactggcctggatggccag

SEQ ID NO: 20666 - DNA, 20 bp, Artificial Sequence
  Synthetic: FXN 3 reverse 9:69041693-69041719; SaCas9
ggactggcctggatggccag

SEQ ID NO: 20667 - DNA, 19 bp, Artificial Sequence
  Synthetic: FXN 3 reverse 9:69041694-69041719; SaCas9
gactggcctggatggccag

SEQ ID NO: 20668 - DNA, 18 bp, Artificial Sequence
  Synthetic: FXN 3 reverse 9:69041695-69041719; SaCas9
actggcctggatggccag

SEQ ID NO: 20669 - DNA, 25 bp, Artificial Sequence
  Synthetic: FXN 3 forward 9:69041693-69041724; SaCas9
gctggccatccaggccagtccttac

SEQ ID NO: 20670 - DNA, 24 bp, Artificial Sequence
  Synthetic: FXN 3 forward 9:69041694-69041724; SaCas9
ctggccatccaggccagtccttac

SEQ ID NO: 20671 - DNA, 23 bp, Artificial Sequence
  Synthetic: FXN 3 forward 9:69041695-69041724; SaCas9
tggccatccaggccagtccttac

SEQ ID NO: 20672 - DNA, 22 bp, Artificial Sequence
  Synthetic: FXN 3 forward 9:69041696-69041724; SaCas9
ggccatccaggccagtccttac

SEQ ID NO: 20673 - DNA, 21 bp, Artificial Sequence
  Synthetic: FXN 3 forward 9:69041697-69041724; SaCas9
gccatccaggccagtccttac

SEQ ID NO: 20674 - DNA, 20 bp, Artificial Sequence
  Synthetic: FXN 3 forward 9:69041698-69041724; SaCas9
ccatccaggccagtccttac

SEQ ID NO: 20675 - DNA, 19 bp, Artificial Sequence
  Synthetic: FXN 3 forward 9:69041699-69041724; SaCas9
catccaggccagtccttac

SEQ ID NO: 20676 - DNA, 18 bp, Artificial Sequence
  Synthetic: FXN 3 forward 9:69041700-69041724; SaCas9
atccaggccagtccttac

SEQ ID NO: 20677 - DNA, 25 bp, Artificial Sequence
  Synthetic: FXN 3 forward 9:69041694-69041725; SaCas9
ctggccatccaggccagtccttacc

SEQ ID NO: 20678 - DNA, 24 bp, Artificial Sequence
  Synthetic: FXN 3 forward 9:69041695-69041725; SaCas9
tggccatccaggccagtccttacc

SEQ ID NO: 20679 - DNA, 23 bp, Artificial Sequence
  Synthetic: FXN 3 forward 9:69041696-69041725; SaCas9
ggccatccaggccagtccttacc

SEQ ID NO: 20680 - DNA, 22 bp, Artificial Sequence
  Synthetic: FXN 3 forward 9:69041697-69041725; SaCas9
gccatccaggccagtccttacc

SEQ ID NO: 20681 - DNA, 21 bp, Artificial Sequence
  Synthetic: FXN 3 forward 9:69041698-69041725; SaCas9
ccatccaggccagtccttacc

SEQ ID NO: 20682 - DNA, 20 bp, Artificial Sequence
  Synthetic: FXN 3 forward 9:69041699-69041725; SaCas9
catccaggccagtccttacc

SEQ ID NO: 20683 - DNA, 19 bp, Artificial Sequence
  Synthetic: FXN 3 forward 9:69041700-69041725; SaCas9
atccaggccagtccttacc

SEQ ID NO: 20684 - DNA, 18 bp, Artificial Sequence
  Synthetic: FXN 3 forward 9:69041701-69041725; SaCas9
tccaggccagtccttacc

SEQ ID NO: 20685 - DNA, 25 bp, Artificial Sequence
  Synthetic: FXN 3 forward 9:69041695-69041726; SaCas9
tggccatccaggccagtccttacca

SEQ ID NO: 20686 - DNA, 24 bp, Artificial Sequence
  Synthetic: FXN 3 forward 9:69041696-69041726; SaCas9
ggccatccaggccagtccttacca

SEQ ID NO: 20687 - DNA, 23 bp, Artificial Sequence
  Synthetic: FXN 3 forward 9:69041697-69041726; SaCas9
gccatccaggccagtccttacca

SEQ ID NO: 20688 - DNA, 22 bp, Artificial Sequence
  Synthetic: FXN 3 forward 9:69041698-69041726; SaCas9
ccatccaggccagtccttacca

SEQ ID NO: 20689 - DNA, 21 bp, Artificial Sequence
  Synthetic: FXN 3 forward 9:69041699-69041726; SaCas9
catccaggccagtccttacca

SEQ ID NO: 20690 - DNA, 20 bp, Artificial Sequence
  Synthetic: FXN 3 forward 9:69041700-69041726; SaCas9
atccaggccagtccttacca

SEQ ID NO: 20691 - DNA, 19 bp, Artificial Sequence
  Synthetic: FXN 3 forward 9:69041701-69041726; SaCas9
tccaggccagtccttacca

SEQ ID NO: 20692 - DNA, 18 bp, Artificial Sequence
  Synthetic: FXN 3 forward 9:69041702-69041726; SaCas9
ccaggccagtccttacca

SEQ ID NO: 20693 - DNA, 25 bp, Artificial Sequence
  Synthetic: FXN 3 reverse 9:69041700-69041731; SaCas9
tgcctaccccctggtaaggactggc

SEQ ID NO: 20694 - DNA, 24 bp, Artificial Sequence
  Synthetic: FXN 3 reverse 9:69041701-69041731; SaCas9
gcctaccccctggtaaggactggc

SEQ ID NO: 20695 - DNA, 23 bp, Artificial Sequence
  Synthetic: FXN 3 reverse 9:69041702-69041731; SaCas9
cctaccccctggtaaggactggc

SEQ ID NO: 20696 - DNA, 22 bp, Artificial Sequence
  Synthetic: FXN 3 reverse 9:69041703-69041731; SaCas9
ctaccccctggtaaggactggc

SEQ ID NO: 20697 - DNA, 21 bp, Artificial Sequence
  Synthetic: FXN 3 reverse 9:69041704-69041731; SaCas9
taccccctggtaaggactggc

SEQ ID NO: 20698 - DNA, 20 bp, Artificial Sequence
  Synthetic: FXN 3 reverse 9:69041705-69041731; SaCas9
accccctggtaaggactggc

SEQ ID NO: 20699 - DNA, 19 bp, Artificial Sequence
  Synthetic: FXN 3 reverse 9:69041706-69041731; SaCas9
ccccctggtaaggactggc

SEQ ID NO: 20700 - DNA, 18 bp, Artificial Sequence
  Synthetic: FXN 3 reverse 9:69041707-69041731; SaCas9
cccctggtaaggactggc

SEQ ID NO: 20701 - DNA, 25 bp, Artificial Sequence
  Synthetic: FXN 3 forward 9:69041710-69041741; SaCas9
gtccttaccagggggtaggcaatga

SEQ ID NO: 20702 - DNA, 24 bp, Artificial Sequence
  Synthetic: FXN 3 forward 9:69041711-69041741; SaCas9
tccttaccagggggtaggcaatga

SEQ ID NO: 20703 - DNA, 23 bp, Artificial Sequence
  Synthetic: FXN 3 forward 9:69041712-69041741; SaCas9
ccttaccagggggtaggcaatga

SEQ ID NO: 20704 - DNA, 22 bp, Artificial Sequence
  Synthetic: FXN 3 forward 9:69041713-69041741; SaCas9
cttaccagggggtaggcaatga

SEQ ID NO: 20705 - DNA, 21 bp, Artificial Sequence
  Synthetic: FXN 3 forward 9:69041714-69041741; SaCas9
ttaccagggggtaggcaatga

SEQ ID NO: 20706 - DNA, 20 bp, Artificial Sequence
  Synthetic: FXN 3 forward 9:69041715-69041741; SaCas9
taccagggggtaggcaatga

SEQ ID NO: 20707 - DNA, 19 bp, Artificial Sequence
  Synthetic: FXN 3 forward 9:69041716-69041741; SaCas9
accagggggtaggcaatga

SEQ ID NO: 20708 - DNA, 18 bp, Artificial Sequence
  Synthetic: FXN 3 forward 9:69041717-69041741; SaCas9
ccagggggtaggcaatga

SEQ ID NO: 20709 - DNA, 25 bp, Artificial Sequence
  Synthetic: FXN 3 reverse 9:69041710-69041741; SaCas9
acccaatcattgcctaccccctggt

SEQ ID NO: 20710 - DNA, 24 bp, Artificial Sequence
  Synthetic: FXN 3 reverse 9:69041711-69041741; SaCas9
cccaatcattgcctaccccctggt

SEQ ID NO: 20711 - DNA, 23 bp, Artificial Sequence
  Synthetic: FXN 3 reverse 9:69041712-69041741; SaCas9
ccaatcattgcctaccccctggt

SEQ ID NO: 20712 - DNA, 22 bp, Artificial Sequence
  Synthetic: FXN 3 reverse 9:69041713-69041741; SaCas9
caatcattgcctaccccctggt

SEQ ID NO: 20713 - DNA, 21 bp, Artificial Sequence
  Synthetic: FXN 3 reverse 9:69041714-69041741; SaCas9
aatcattgcctaccccctggt

SEQ ID NO: 20714 - DNA, 20 bp, Artificial Sequence
  Synthetic: FXN 3 reverse 9:69041715-69041741; SaCas9
atcattgcctaccccctggt

SEQ ID NO: 20715 - DNA, 19 bp, Artificial Sequence
  Synthetic: FXN 3 reverse 9:69041716-69041741; SaCas9
tcattgcctaccccctggt

SEQ ID NO: 20716 - DNA, 18 bp, Artificial Sequence
  Synthetic: FXN 3 reverse 9:69041717-69041741; SaCas9
cattgcctaccccctggt

SEQ ID NO: 20717 - DNA, 25 bp, Artificial Sequence
  Synthetic: FXN 3 forward 9:69041733-69041764; SaCas9
gattgggtcaagtggttcctgacca

SEQ ID NO: 20718 - DNA, 24 bp, Artificial Sequence
  Synthetic: FXN 3 forward 9:69041734-69041764; SaCas9
attgggtcaagtggttcctgacca

SEQ ID NO: 20719 - DNA, 23 bp, Artificial Sequence
  Synthetic: FXN 3 forward 9:69041735-69041764; SaCas9
ttgggtcaagtggttcctgacca

SEQ ID NO: 20720 - DNA, 22 bp, Artificial Sequence
  Synthetic: FXN 3 forward 9:69041736-69041764; SaCas9
tgggtcaagtggttcctgacca

SEQ ID NO: 20721 - DNA, 21 bp, Artificial Sequence
  Synthetic: FXN 3 forward 9:69041737-69041764; SaCas9
gggtcaagtggttcctgacca

SEQ ID NO: 20722 - DNA, 20 bp, Artificial Sequence
  Synthetic: FXN 3 forward 9:69041738-69041764; SaCas9
ggtcaagtggttcctgacca

SEQ ID NO: 20723 - DNA, 19 bp, Artificial Sequence
  Synthetic: FXN 3 forward 9:69041739-69041764; SaCas9
gtcaagtggttcctgacca

SEQ ID NO: 20724 - DNA, 18 bp, Artificial Sequence
  Synthetic: FXN 3 forward 9:69041740-69041764; SaCas9
tcaagtggttcctgacca

SEQ ID NO: 20725 - DNA, 25 bp, Artificial Sequence
  Synthetic: FXN 3 forward 9:69041739-69041770; SaCas9
gtcaagtggttcctgaccactgggc

SEQ ID NO: 20726 - DNA, 24 bp, Artificial Sequence
  Synthetic: FXN 3 forward 9:69041740-69041770; SaCas9
tcaagtggttcctgaccactgggc

SEQ ID NO: 20727 - DNA, 23 bp, Artificial Sequence
  Synthetic: FXN 3 forward 9:69041741-69041770; SaCas9
caagtggttcctgaccactgggc

SEQ ID NO: 20728 - DNA, 22 bp, Artificial Sequence
  Synthetic: FXN 3 forward 9:69041742-69041770; SaCas9
aagtggttcctgaccactgggc

SEQ ID NO: 20729 - DNA, 21 bp, Artificial Sequence
  Synthetic: FXN 3 forward 9:69041743-69041770; SaCas9
agtggttcctgaccactgggc

SEQ ID NO: 20730 - DNA, 20 bp, Artificial Sequence
  Synthetic: FXN 3 forward 9:69041744-69041770; SaCas9
gtggttcctgaccactgggc

SEQ ID NO: 20731 - DNA, 19 bp, Artificial Sequence
  Synthetic: FXN 3 forward 9:69041745-69041770; SaCas9
tggttcctgaccactgggc

SEQ ID NO: 20732 - DNA, 18 bp, Artificial Sequence
  Synthetic: FXN 3 forward 9:69041746-69041770; SaCas9
ggttcctgaccactgggc

SEQ ID NO: 20733 - DNA, 25 bp, Artificial Sequence
  Synthetic: FXN 3 reverse 9:69041747-69041778; SaCas9
gcctgaagtctcaggcccagtggtc

SEQ ID NO: 20734 - DNA, 24 bp, Artificial Sequence
  Synthetic: FXN 3 reverse 9:69041748-69041778; SaCas9
cctgaagtctcaggcccagtggtc

SEQ ID NO: 20735 - DNA, 23 bp, Artificial Sequence
  Synthetic: FXN 3 reverse 9:69041749-69041778; SaCas9
ctgaagtctcaggcccagtggtc

SEQ ID NO: 20736 - DNA, 22 bp, Artificial Sequence
  Synthetic: FXN 3 reverse 9:69041750-69041778; SaCas9
tgaagtctcaggcccagtggtc

SEQ ID NO: 20737 - DNA, 21 bp, Artificial Sequence
  Synthetic: FXN 3 reverse 9:69041751-69041778; SaCas9
gaagtctcaggcccagtggtc

SEQ ID NO: 20738 - DNA, 20 bp, Artificial Sequence
  Synthetic: FXN 3 reverse 9:69041752-69041778; SaCas9
aagtctcaggcccagtggtc

SEQ ID NO: 20739 - DNA, 19 bp, Artificial Sequence
  Synthetic: FXN 3 reverse 9:69041753-69041778; SaCas9
agtctcaggcccagtggtc

SEQ ID NO: 20740 - DNA, 18 bp, Artificial Sequence
  Synthetic: FXN 3 reverse 9:69041754-69041778; SaCas9
gtctcaggcccagtggtc

SEQ ID NO: 20741 - DNA, 25 bp, Artificial Sequence
  Synthetic: FXN 3 reverse 9:69041748-69041779; SaCas9
ggcctgaagtctcaggcccagtggt

SEQ ID NO: 20742 - DNA, 24 bp, Artificial Sequence
  Synthetic: FXN 3 reverse 9:69041749-69041779; SaCas9
gcctgaagtctcaggcccagtggt

SEQ ID NO: 20743 - DNA, 23 bp, Artificial Sequence
  Synthetic: FXN 3 reverse 9:69041750-69041779; SaCas9
cctgaagtctcaggcccagtggt

SEQ ID NO: 20744 - DNA, 22 bp, Artificial Sequence
  Synthetic: FXN 3 reverse 9:69041751-69041779; SaCas9
ctgaagtctcaggcccagtggt

SEQ ID NO: 20745 - DNA, 21 bp, Artificial Sequence
  Synthetic: FXN 3 reverse 9:69041752-69041779; SaCas9
tgaagtctcaggcccagtggt

SEQ ID NO: 20746 - DNA, 20 bp, Artificial Sequence
  Synthetic: FXN 3 reverse 9:69041753-69041779; SaCas9
gaagtctcaggcccagtggt

SEQ ID NO: 20747 - DNA, 19 bp, Artificial Sequence
  Synthetic: FXN 3 reverse 9:69041754-69041779; SaCas9
aagtctcaggcccagtggt

SEQ ID NO: 20748 - DNA, 18 bp, Artificial Sequence
  Synthetic: FXN 3 reverse 9:69041755-69041779; SaCas9
agtctcaggcccagtggt

SEQ ID NO: 20749 - DNA, 25 bp, Artificial Sequence
  Synthetic: FXN 3 forward 9:69041754-69041785; SaCas9
accactgggcctgagacttcaggcc

SEQ ID NO: 20750 - DNA, 24 bp, Artificial Sequence
  Synthetic: FXN 3 forward 9:69041755-69041785; SaCas9
ccactgggcctgagacttcaggcc

SEQ ID NO: 20751 - DNA, 23 bp, Artificial Sequence
  Synthetic: FXN 3 forward 9:69041756-69041785; SaCas9
cactgggcctgagacttcaggcc

SEQ ID NO: 20752 - DNA, 22 bp, Artificial Sequence
  Synthetic: FXN 3 forward 9:69041757-69041785; SaCas9
actgggcctgagacttcaggcc

SEQ ID NO: 20753 - DNA, 21 bp, Artificial Sequence
  Synthetic: FXN 3 forward 9:69041758-69041785; SaCas9
ctgggcctgagacttcaggcc

SEQ ID NO: 20754 - DNA, 20 bp, Artificial Sequence
  Synthetic: FXN 3 forward 9:69041759-69041785; SaCas9
tgggcctgagacttcaggcc

SEQ ID NO: 20755 - DNA, 19 bp, Artificial Sequence
  Synthetic: FXN 3 forward 9:69041760-69041785; SaCas9
gggcctgagacttcaggcc

SEQ ID NO: 20756 - DNA, 18 bp, Artificial Sequence
  Synthetic: FXN 3 forward 9:69041761-69041785; SaCas9
ggcctgagacttcaggcc

SEQ ID NO: 20757 - DNA, 25 bp, Artificial Sequence
  Synthetic: FXN 3 reverse 9:69041770-69041801; SaCas9
aggaaatattagatagtttctgggc

SEQ ID NO: 20758 - DNA, 24 bp, Artificial Sequence
  Synthetic: FXN 3 reverse 9:69041771-69041801; SaCas9
ggaaatattagatagtttctgggc

SEQ ID NO: 20759 - DNA, 23 bp, Artificial Sequence
  Synthetic: FXN 3 reverse 9:69041772-69041801; SaCas9
gaaatattagatagtttctgggc

SEQ ID NO: 20760 - DNA, 22 bp, Artificial Sequence
  Synthetic: FXN 3 reverse 9:69041773-69041801; SaCas9
aaatattagatagtttctgggc

SEQ ID NO: 20761 - DNA, 21 bp, Artificial Sequence
  Synthetic: FXN 3 reverse 9:69041774-69041801; SaCas9
aatattagatagtttctgggc

SEQ ID NO: 20762 - DNA, 20 bp, Artificial Sequence
  Synthetic: FXN 3 reverse 9:69041775-69041801; SaCas9
atattagatagtttctgggc

SEQ ID NO: 20763 - DNA, 19 bp, Artificial Sequence
  Synthetic: FXN 3 reverse 9:69041776-69041801; SaCas9
tattagatagtttctgggc

SEQ ID NO: 20764 - DNA, 18 bp, Artificial Sequence
  Synthetic: FXN 3 reverse 9:69041777-69041801; SaCas9
attagatagtttctgggc

SEQ ID NO: 20765 - DNA, 25 bp, Artificial Sequence
  Synthetic: FXN 3 reverse 9:69041776-69041807; SaCas9
catttgaggaaatattagatagttt

SEQ ID NO: 20766 - DNA, 24 bp, Artificial Sequence
  Synthetic: FXN 3 reverse 9:69041777-69041807; SaCas9
atttgaggaaatattagatagttt

SEQ ID NO: 20767 - DNA, 23 bp, Artificial Sequence
  Synthetic: FXN 3 reverse 9:69041778-69041807; SaCas9
tttgaggaaatattagatagttt

SEQ ID NO: 20768 - DNA, 22 bp, Artificial Sequence
  Synthetic: FXN 3 reverse 9:69041779-69041807; SaCas9
ttgaggaaatattagatagttt

SEQ ID NO: 20769 - DNA, 21 bp, Artificial Sequence
  Synthetic: FXN 3 reverse 9:69041780-69041807; SaCas9
tgaggaaatattagatagttt

SEQ ID NO: 20770 - DNA, 20 bp, Artificial Sequence
  Synthetic: FXN 3 reverse 9:69041781-69041807; SaCas9
gaggaaatattagatagttt

SEQ ID NO: 20771 - DNA, 19 bp, Artificial Sequence
  Synthetic: FXN 3 reverse 9:69041782-69041807; SaCas9
aggaaatattagatagttt

SEQ ID NO: 20772 - DNA, 18 bp, Artificial Sequence
  Synthetic: FXN 3 reverse 9:69041783-69041807; SaCas9
ggaaatattagatagttt

SEQ ID NO: 20773 - DNA, 25 bp, Artificial Sequence
  Synthetic: FXN 3 forward 9:69041788-69041819; SaCas9
tctaatatttcctcaaatgcatccc

SEQ ID NO: 20774 - DNA, 24 bp, Artificial Sequence
  Synthetic: FXN 3 forward 9:69041789-69041819; SaCas9
ctaatatttcctcaaatgcatccc

SEQ ID NO: 20775 - DNA, 23 bp, Artificial Sequence
  Synthetic: FXN 3 forward 9:69041790-69041819; SaCas9
taatatttcctcaaatgcatccc

SEQ ID NO: 20776 - DNA, 22 bp, Artificial Sequence
  Synthetic: FXN 3 forward 9:69041791-69041819; SaCas9
aatatttcctcaaatgcatccc

SEQ ID NO: 20777 - DNA, 21 bp, Artificial Sequence
  Synthetic: FXN 3 forward 9:69041792-69041819; SaCas9
atatttcctcaaatgcatccc

SEQ ID NO: 20778 - DNA, 20 bp, Artificial Sequence
  Synthetic: FXN 3 forward 9:69041793-69041819; SaCas9
tatttcctcaaatgcatccc

SEQ ID NO: 20779 - DNA, 19 bp, Artificial Sequence
  Synthetic: FXN 3 forward 9:69041794-69041819; SaCas9
atttcctcaaatgcatccc

SEQ ID NO: 20780 - DNA, 18 bp, Artificial Sequence
  Synthetic: FXN 3 forward 9:69041795-69041819; SaCas9
tttcctcaaatgcatccc

SEQ ID NO: 20781 - DNA, 25 bp, Artificial Sequence
  Synthetic: FXN 3 reverse 9:69041795-69041826; SaCas9
agtgcctgctcatgggatgcatttg

SEQ ID NO: 20782 - DNA, 24 bp, Artificial Sequence
  Synthetic: FXN 3 reverse 9:69041796-69041826; SaCas9
gtgcctgctcatgggatgcatttg

SEQ ID NO: 20783 - DNA, 23 bp, Artificial Sequence
  Synthetic: FXN 3 reverse 9:69041797-69041826; SaCas9
tgcctgctcatgggatgcatttg

SEQ ID NO: 20784 - DNA, 22 bp, Artificial Sequence
  Synthetic: FXN 3 reverse 9:69041798-69041826; SaCas9
gcctgctcatgggatgcatttg

SEQ ID NO: 20785 - DNA, 21 bp, Artificial Sequence
  Synthetic: FXN 3 reverse 9:69041799-69041826; SaCas9
cctgctcatgggatgcatttg

SEQ ID NO: 20786 - DNA, 20 bp, Artificial Sequence
  Synthetic: FXN 3 reverse 9:69041800-69041826; SaCas9
ctgctcatgggatgcatttg

SEQ ID NO: 20787 - DNA, 19 bp, Artificial Sequence
  Synthetic: FXN 3 reverse 9:69041801-69041826; SaCas9
tgctcatgggatgcatttg

SEQ ID NO: 20788 - DNA, 18 bp, Artificial Sequence
  Synthetic: FXN 3 reverse 9:69041802-69041826; SaCas9
gctcatgggatgcatttg

SEQ ID NO: 20789 - DNA, 25 bp, Artificial Sequence
  Synthetic: FXN 3 reverse 9:69041796-69041827; SaCas9
cagtgcctgctcatgggatgcattt

SEQ ID NO: 20790 - DNA, 24 bp, Artificial Sequence
  Synthetic: FXN 3 reverse 9:69041797-69041827; SaCas9
agtgcctgctcatgggatgcattt

SEQ ID NO: 20791 - DNA, 23 bp, Artificial Sequence
  Synthetic: FXN 3 reverse 9:69041798-69041827; SaCas9
gtgcctgctcatgggatgcattt

SEQ ID NO: 20792 - DNA, 22 bp, Artificial Sequence
  Synthetic: FXN 3 reverse 9:69041799-69041827; SaCas9
tgcctgctcatgggatgcattt

SEQ ID NO: 20793 - DNA, 21 bp, Artificial Sequence
  Synthetic: FXN 3 reverse 9:69041800-69041827; SaCas9
gcctgctcatgggatgcattt

SEQ ID NO: 20794 - DNA, 20 bp, Artificial Sequence
  Synthetic: FXN 3 reverse 9:69041801-69041827; SaCas9
cctgctcatgggatgcattt

SEQ ID NO: 20795 - DNA, 19 bp, Artificial Sequence
  Synthetic: FXN 3 reverse 9:69041802-69041827; SaCas9
ctgctcatgggatgcattt

SEQ ID NO: 20796 - DNA, 18 bp, Artificial Sequence
  Synthetic: FXN 3 reverse 9:69041803-69041827; SaCas9
tgctcatgggatgcattt

SEQ ID NO: 20797 - DNA, 25 bp, Artificial Sequence
  Synthetic: FXN 3 reverse 9:69041798-69041829; SaCas9
cacagtgcctgctcatgggatgcat

SEQ ID NO: 20798 - DNA, 24 bp, Artificial Sequence
  Synthetic: FXN 3 reverse 9:69041799-69041829; SaCas9
acagtgcctgctcatgggatgcat

SEQ ID NO: 20799 - DNA, 23 bp, Artificial Sequence
  Synthetic: FXN 3 reverse 9:69041800-69041829; SaCas9
cagtgcctgctcatgggatgcat

SEQ ID NO: 20800 - DNA, 22 bp, Artificial Sequence
  Synthetic: FXN 3 reverse 9:69041801-69041829; SaCas9
agtgcctgctcatgggatgcat

SEQ ID NO: 20801 - DNA, 21 bp, Artificial Sequence
  Synthetic: FXN 3 reverse 9:69041802-69041829; SaCas9
gtgcctgctcatgggatgcat

SEQ ID NO: 20802 - DNA, 20 bp, Artificial Sequence
  Synthetic: FXN 3 reverse 9:69041803-69041829; SaCas9
tgcctgctcatgggatgcat

SEQ ID NO: 20803 - DNA, 19 bp, Artificial Sequence
  Synthetic: FXN 3 reverse 9:69041804-69041829; SaCas9
gcctgctcatgggatgcat

SEQ ID NO: 20804 - DNA, 18 bp, Artificial Sequence
  Synthetic: FXN 3 reverse 9:69041805-69041829; SaCas9
cctgctcatgggatgcat

SEQ ID NO: 20805 - DNA, 25 bp, Artificial Sequence
  Synthetic: FXN 3 forward 9:69041803-69041834; SaCas9
aatgcatcccatgagcaggcactgt

SEQ ID NO: 20806 - DNA, 24 bp, Artificial Sequence
  Synthetic: FXN 3 forward 9:69041804-69041834; SaCas9
atgcatcccatgagcaggcactgt

SEQ ID NO: 20807 - DNA, 23 bp, Artificial Sequence
  Synthetic: FXN 3 forward 9:69041805-69041834; SaCas9
tgcatcccatgagcaggcactgt

SEQ ID NO: 20808 - DNA, 22 bp, Artificial Sequence
  Synthetic: FXN 3 forward 9:69041806-69041834; SaCas9
gcatcccatgagcaggcactgt

SEQ ID NO: 20809 - DNA, 21 bp, Artificial Sequence
  Synthetic: FXN 3 forward 9:69041807-69041834; SaCas9
catcccatgagcaggcactgt

SEQ ID NO: 20810 - DNA, 20 bp, Artificial Sequence
  Synthetic: FXN 3 forward 9:69041808-69041834; SaCas9
atcccatgagcaggcactgt

SEQ ID NO: 20811 - DNA, 19 bp, Artificial Sequence
  Synthetic: FXN 3 forward 9:69041809-69041834; SaCas9
tcccatgagcaggcactgt

SEQ ID NO: 20812 - DNA, 18 bp, Artificial Sequence
  Synthetic: FXN 3 forward 9:69041810-69041834; SaCas9
cccatgagcaggcactgt

SEQ ID NO: 20813 - DNA, 25 bp, Artificial Sequence
  Synthetic: FXN 3 forward 9:69041807-69041838; SaCas9
catcccatgagcaggcactgtgtga

SEQ ID NO: 20814 - DNA, 24 bp, Artificial Sequence
  Synthetic: FXN 3 forward 9:69041808-69041838; SaCas9
atcccatgagcaggcactgtgtga

SEQ ID NO: 20815 - DNA, 23 bp, Artificial Sequence
  Synthetic: FXN 3 forward 9:69041809-69041838; SaCas9
tcccatgagcaggcactgtgtga

SEQ ID NO: 20816 - DNA, 22 bp, Artificial Sequence
  Synthetic: FXN 3 forward 9:69041810-69041838; SaCas9
cccatgagcaggcactgtgtga

SEQ ID NO: 20817 - DNA, 21 bp, Artificial Sequence
  Synthetic: FXN 3 forward 9:69041811-69041838; SaCas9
ccatgagcaggcactgtgtga

SEQ ID NO: 20818 - DNA, 20 bp, Artificial Sequence
  Synthetic: FXN 3 forward 9:69041812-69041838; SaCas9
catgagcaggcactgtgtga

SEQ ID NO: 20819 - DNA, 19 bp, Artificial Sequence
  Synthetic: FXN 3 forward 9:69041813-69041838; SaCas9
atgagcaggcactgtgtga

SEQ ID NO: 20820 - DNA, 18 bp, Artificial Sequence
  Synthetic: FXN 3 forward 9:69041814-69041838; SaCas9
tgagcaggcactgtgtga

SEQ ID NO: 20821 - DNA, 25 bp, Artificial Sequence
  Synthetic: FXN 3 reverse 9:69041808-69041839; SaCas9
tgctcactcacacagtgcctgctca

SEQ ID NO: 20822 - DNA, 24 bp, Artificial Sequence
  Synthetic: FXN 3 reverse 9:69041809-69041839; SaCas9
gctcactcacacagtgcctgctca

SEQ ID NO: 20823 - DNA, 23 bp, Artificial Sequence
  Synthetic: FXN 3 reverse 9:69041810-69041839; SaCas9
ctcactcacacagtgcctgctca

SEQ ID NO: 20824 - DNA, 22 bp, Artificial Sequence
  Synthetic: FXN 3 reverse 9:69041811-69041839; SaCas9
tcactcacacagtgcctgctca

SEQ ID NO: 20825 - DNA, 21 bp, Artificial Sequence
  Synthetic: FXN 3 reverse 9:69041812-69041839; SaCas9
cactcacacagtgcctgctca

SEQ ID NO: 20826 - DNA, 20 bp, Artificial Sequence
  Synthetic: FXN 3 reverse 9:69041813-69041839; SaCas9
actcacacagtgcctgctca

SEQ ID NO: 20827 - DNA, 19 bp, Artificial Sequence
  Synthetic: FXN 3 reverse 9:69041814-69041839; SaCas9
ctcacacagtgcctgctca

SEQ ID NO: 20828 - DNA, 18 bp, Artificial Sequence
  Synthetic: FXN 3 reverse 9:69041815-69041839; SaCas9
tcacacagtgcctgctca

SEQ ID NO: 20829 - DNA, 25 bp, Artificial Sequence
  Synthetic: FXN 3 reverse 9:69041809-69041840; SaCas9
gtgctcactcacacagtgcctgctc

SEQ ID NO: 20830 - DNA, 24 bp, Artificial Sequence
  Synthetic: FXN 3 reverse 9:69041810-69041840; SaCas9
tgctcactcacacagtgcctgctc

SEQ ID NO: 20831 - DNA, 23 bp, Artificial Sequence
  Synthetic: FXN 3 reverse 9:69041811-69041840; SaCas9
gctcactcacacagtgcctgctc

SEQ ID NO: 20832 - DNA, 22 bp, Artificial Sequence
  Synthetic: FXN 3 reverse 9:69041812-69041840; SaCas9
ctcactcacacagtgcctgctc

SEQ ID NO: 20833 - DNA, 21 bp, Artificial Sequence
  Synthetic: FXN 3 reverse 9:69041813-69041840; SaCas9
tcactcacacagtgcctgctc

SEQ ID NO: 20834 - DNA, 20 bp, Artificial Sequence
  Synthetic: FXN 3 reverse 9:69041814-69041840; SaCas9
cactcacacagtgcctgctc

SEQ ID NO: 20835 - DNA, 19 bp, Artificial Sequence
  Synthetic: FXN 3 reverse 9:69041815-69041840; SaCas9
actcacacagtgcctgctc

SEQ ID NO: 20836 - DNA, 18 bp, Artificial Sequence
  Synthetic: FXN 3 reverse 9:69041816-69041840; SaCas9
ctcacacagtgcctgctc

SEQ ID NO: 20837 - DNA, 25 bp, Artificial Sequence
  Synthetic: FXN 3 forward 9:69041821-69041852; SaCas9
gcactgtgtgagtgagcacacacat

SEQ ID NO: 20838 - DNA, 24 bp, Artificial Sequence
  Synthetic: FXN 3 forward 9:69041822-69041852; SaCas9
cactgtgtgagtgagcacacacat

SEQ ID NO: 20839 - DNA, 23 bp, Artificial Sequence
  Synthetic: FXN 3 forward 9:69041823-69041852; SaCas9
actgtgtgagtgagcacacacat

SEQ ID NO: 20840 - DNA, 22 bp, Artificial Sequence
  Synthetic: FXN 3 forward 9:69041824-69041852; SaCas9
ctgtgtgagtgagcacacacat

SEQ ID NO: 20841 - DNA, 21 bp, Artificial Sequence
  Synthetic: FXN 3 forward 9:69041825-69041852; SaCas9
tgtgtgagtgagcacacacat

SEQ ID NO: 20842 - DNA, 20 bp, Artificial Sequence
  Synthetic: FXN 3 forward 9:69041826-69041852; SaCas9
gtgtgagtgagcacacacat

SEQ ID NO: 20843 - DNA, 19 bp, Artificial Sequence
  Synthetic: FXN 3 forward 9:69041827-69041852; SaCas9
tgtgagtgagcacacacat

SEQ ID NO: 20844 - DNA, 18 bp, Artificial Sequence
  Synthetic: FXN 3 forward 9:69041828-69041852; SaCas9
gtgagtgagcacacacat

SEQ ID NO: 20845 - DNA, 25 bp, Artificial Sequence
  Synthetic: FXN 3 reverse 9:69041852-69041883; SaCas9
acaagtcatggtaggcttgcctagc

SEQ ID NO: 20846 - DNA, 24 bp, Artificial Sequence
  Synthetic: FXN 3 reverse 9:69041853-69041883; SaCas9
caagtcatggtaggcttgcctagc

SEQ ID NO: 20847 - DNA, 23 bp, Artificial Sequence
  Synthetic: FXN 3 reverse 9:69041854-69041883; SaCas9
aagtcatggtaggcttgcctagc

SEQ ID NO: 20848 - DNA, 22 bp, Artificial Sequence
  Synthetic: FXN 3 reverse 9:69041855-69041883; SaCas9
agtcatggtaggcttgcctagc

SEQ ID NO: 20849 - DNA, 21 bp, Artificial Sequence
  Synthetic: FXN 3 reverse 9:69041856-69041883; SaCas9
gtcatggtaggcttgcctagc

SEQ ID NO: 20850 - DNA, 20 bp, Artificial Sequence
  Synthetic: FXN 3 reverse 9:69041857-69041883; SaCas9
tcatggtaggcttgcctagc

SEQ ID NO: 20851 - DNA, 19 bp, Artificial Sequence
  Synthetic: FXN 3 reverse 9:69041858-69041883; SaCas9
catggtaggcttgcctagc

SEQ ID NO: 20852 - DNA, 18 bp, Artificial Sequence
  Synthetic: FXN 3 reverse 9:69041859-69041883; SaCas9
atggtaggcttgcctagc

SEQ ID NO: 20853 - DNA, 25 bp, Artificial Sequence
  Synthetic: FXN 3 forward 9:69041863-69041894; SaCas9
gcaagcctaccatgacttgtggtcc

SEQ ID NO: 20854 - DNA, 24 bp, Artificial Sequence
  Synthetic: FXN 3 forward 9:69041864-69041894; SaCas9
caagcctaccatgacttgtggtcc

SEQ ID NO: 20855 - DNA, 23 bp, Artificial Sequence
  Synthetic: FXN 3 forward 9:69041865-69041894; SaCas9
aagcctaccatgacttgtggtcc

SEQ ID NO: 20856 - DNA, 22 bp, Artificial Sequence
  Synthetic: FXN 3 forward 9:69041866-69041894; SaCas9
agcctaccatgacttgtggtcc

SEQ ID NO: 20857 - DNA, 21 bp, Artificial Sequence
  Synthetic: FXN 3 forward 9:69041867-69041894; SaCas9
gcctaccatgacttgtggtcc

SEQ ID NO: 20858 - DNA, 20 bp, Artificial Sequence
  Synthetic: FXN 3 forward 9:69041868-69041894; SaCas9
cctaccatgacttgtggtcc

SEQ ID NO: 20859 - DNA, 19 bp, Artificial Sequence
  Synthetic: FXN 3 forward 9:69041869-69041894; SaCas9
ctaccatgacttgtggtcc

SEQ ID NO: 20860 - DNA, 18 bp, Artificial Sequence
  Synthetic: FXN 3 forward 9:69041870-69041894; SaCas9
taccatgacttgtggtcc

SEQ ID NO: 20861 - DNA, 25 bp, Artificial Sequence
  Synthetic: FXN 3 forward 9:69041871-69041902; SaCas9
accatgacttgtggtccaagggctc

SEQ ID NO: 20862 - DNA, 24 bp, Artificial Sequence
  Synthetic: FXN 3 forward 9:69041872-69041902; SaCas9
ccatgacttgtggtccaagggctc

SEQ ID NO: 20863 - DNA, 23 bp, Artificial Sequence
  Synthetic: FXN 3 forward 9:69041873-69041902; SaCas9
catgacttgtggtccaagggctc

SEQ ID NO: 20864 - DNA, 22 bp, Artificial Sequence
  Synthetic: FXN 3 forward 9:69041874-69041902; SaCas9
atgacttgtggtccaagggctc

SEQ ID NO: 20865 - DNA, 21 bp, Artificial Sequence
  Synthetic: FXN 3 forward 9:69041875-69041902; SaCas9
tgacttgtggtccaagggctc

SEQ ID NO: 20866 - DNA, 20 bp, Artificial Sequence
  Synthetic: FXN 3 forward 9:69041876-69041902; SaCas9
gacttgtggtccaagggctc

SEQ ID NO: 20867 - DNA, 19 bp, Artificial Sequence
  Synthetic: FXN 3 forward 9:69041877-69041902; SaCas9
acttgtggtccaagggctc

SEQ ID NO: 20868 - DNA, 18 bp, Artificial Sequence
  Synthetic: FXN 3 forward 9:69041878-69041902; SaCas9
cttgtggtccaagggctc

SEQ ID NO: 20869 - DNA, 25 bp, Artificial Sequence
  Synthetic: FXN 3 forward 9:69041880-69041911; SaCas9
tgtggtccaagggctcacgggtgac

SEQ ID NO: 20870 - DNA, 24 bp, Artificial Sequence
  Synthetic: FXN 3 forward 9:69041881-69041911; SaCas9
gtggtccaagggctcacgggtgac

SEQ ID NO: 20871 - DNA, 23 bp, Artificial Sequence
  Synthetic: FXN 3 forward 9:69041882-69041911; SaCas9
tggtccaagggctcacgggtgac

SEQ ID NO: 20872 - DNA, 22 bp, Artificial Sequence
  Synthetic: FXN 3 forward 9:69041883-69041911; SaCas9
ggtccaagggctcacgggtgac

SEQ ID NO: 20873 - DNA, 21 bp, Artificial Sequence
  Synthetic: FXN 3 forward 9:69041884-69041911; SaCas9
gtccaagggctcacgggtgac

SEQ ID NO: 20874 - DNA, 20 bp, Artificial Sequence
  Synthetic: FXN 3 forward 9:69041885-69041911; SaCas9
tccaagggctcacgggtgac

SEQ ID NO: 20875 - DNA, 19 bp, Artificial Sequence
  Synthetic: FXN 3 forward 9:69041886-69041911; SaCas9
ccaagggctcacgggtgac

SEQ ID NO: 20876 - DNA, 18 bp, Artificial Sequence
  Synthetic: FXN 3 forward 9:69041887-69041911; SaCas9
caagggctcacgggtgac

SEQ ID NO: 20877 - DNA, 25 bp, Artificial Sequence
  Synthetic: FXN 3 forward 9:69041881-69041912; SaCas9
gtggtccaagggctcacgggtgacc

SEQ ID NO: 20878 - DNA, 24 bp, Artificial Sequence
  Synthetic: FXN 3 forward 9:69041882-69041912; SaCas9
tggtccaagggctcacgggtgacc

SEQ ID NO: 20879 - DNA, 23 bp, Artificial Sequence
  Synthetic: FXN 3 forward 9:69041883-69041912; SaCas9
ggtccaagggctcacgggtgacc

SEQ ID NO: 20880 - DNA, 22 bp, Artificial Sequence
  Synthetic: FXN 3 forward 9:69041884-69041912; SaCas9
gtccaagggctcacgggtgacc

SEQ ID NO: 20881 - DNA, 21 bp, Artificial Sequence
  Synthetic: FXN 3 forward 9:69041885-69041912; SaCas9
tccaagggctcacgggtgacc

SEQ ID NO: 20882 - DNA, 20 bp, Artificial Sequence
  Synthetic: FXN 3 forward 9:69041886-69041912; SaCas9
ccaagggctcacgggtgacc

SEQ ID NO: 20883 - DNA, 19 bp, Artificial Sequence
  Synthetic: FXN 3 forward 9:69041887-69041912; SaCas9
caagggctcacgggtgacc

SEQ ID NO: 20884 - DNA, 18 bp, Artificial Sequence
  Synthetic: FXN 3 forward 9:69041888-69041912; SaCas9
aagggctcacgggtgacc

SEQ ID NO: 20885 - DNA, 25 bp, Artificial Sequence
  Synthetic: FXN 3 reverse 9:69041884-69041915; SaCas9
ctaactccaggtcacccgtgagccc

SEQ ID NO: 20886 - DNA, 24 bp, Artificial Sequence
  Synthetic: FXN 3 reverse 9:69041885-69041915; SaCas9
taactccaggtcacccgtgagccc

SEQ ID NO: 20887 - DNA, 23 bp, Artificial Sequence
  Synthetic: FXN 3 reverse 9:69041886-69041915; SaCas9
aactccaggtcacccgtgagccc

SEQ ID NO: 20888 - DNA, 22 bp, Artificial Sequence
  Synthetic: FXN 3 reverse 9:69041887-69041915; SaCas9
actccaggtcacccgtgagccc

SEQ ID NO: 20889 - DNA, 21 bp, Artificial Sequence
  Synthetic: FXN 3 reverse 9:69041888-69041915; SaCas9
ctccaggtcacccgtgagccc

SEQ ID NO: 20890 - DNA, 20 bp, Artificial Sequence
  Synthetic: FXN 3 reverse 9:69041889-69041915; SaCas9
tccaggtcacccgtgagccc

SEQ ID NO: 20891 - DNA, 19 bp, Artificial Sequence
  Synthetic: FXN 3 reverse 9:69041890-69041915; SaCas9
ccaggtcacccgtgagccc

SEQ ID NO: 20892 - DNA, 18 bp, Artificial Sequence
  Synthetic: FXN 3 reverse 9:69041891-69041915; SaCas9
caggtcacccgtgagccc

SEQ ID NO: 20893 - DNA, 25 bp, Artificial Sequence
  Synthetic: FXN 3 forward 9:69041887-69041918; SaCas9
caagggctcacgggtgacctggagt

SEQ ID NO: 20894 - DNA, 24 bp, Artificial Sequence
  Synthetic: FXN 3 forward 9:69041888-69041918; SaCas9
aagggctcacgggtgacctggagt

SEQ ID NO: 20895 - DNA, 23 bp, Artificial Sequence
  Synthetic: FXN 3 forward 9:69041889-69041918; SaCas9
agggctcacgggtgacctggagt

SEQ ID NO: 20896 - DNA, 22 bp, Artificial Sequence
  Synthetic: FXN 3 forward 9:69041890-69041918; SaCas9
gggctcacgggtgacctggagt

SEQ ID NO: 20897 - DNA, 21 bp, Artificial Sequence
  Synthetic: FXN 3 forward 9:69041891-69041918; SaCas9
ggctcacgggtgacctggagt

SEQ ID NO: 20898 - DNA, 20 bp, Artificial Sequence
  Synthetic: FXN 3 forward 9:69041892-69041918; SaCas9
gctcacgggtgacctggagt

SEQ ID NO: 20899 - DNA, 19 bp, Artificial Sequence
  Synthetic: FXN 3 forward 9:69041893-69041918; SaCas9
ctcacgggtgacctggagt

SEQ ID NO: 20900 - DNA, 18 bp, Artificial Sequence
  Synthetic: FXN 3 forward 9:69041894-69041918; SaCas9
tcacgggtgacctggagt

SEQ ID NO: 20901 - DNA, 25 bp, Artificial Sequence
  Synthetic: FXN 3 forward 9:69041889-69041920; SaCas9
agggctcacgggtgacctggagtta

SEQ ID NO: 20902 - DNA, 24 bp, Artificial Sequence
  Synthetic: FXN 3 forward 9:69041890-69041920; SaCas9
gggctcacgggtgacctggagtta

SEQ ID NO: 20903 - DNA, 23 bp, Artificial Sequence
  Synthetic: FXN 3 forward 9:69041891-69041920; SaCas9
ggctcacgggtgacctggagtta

SEQ ID NO: 20904 - DNA, 22 bp, Artificial Sequence
  Synthetic: FXN 3 forward 9:69041892-69041920; SaCas9
gctcacgggtgacctggagtta

SEQ ID NO: 20905 - DNA, 21 bp, Artificial Sequence
  Synthetic: FXN 3 forward 9:69041893-69041920; SaCas9
ctcacgggtgacctggagtta

SEQ ID NO: 20906 - DNA, 20 bp, Artificial Sequence
  Synthetic: FXN 3 forward 9:69041894-69041920; SaCas9
tcacgggtgacctggagtta

SEQ ID NO: 20907 - DNA, 19 bp, Artificial Sequence
  Synthetic: FXN 3 forward 9:69041895-69041920; SaCas9
cacgggtgacctggagtta

SEQ ID NO: 20908 - DNA, 18 bp, Artificial Sequence
  Synthetic: FXN 3 forward 9:69041896-69041920; SaCas9
acgggtgacctggagtta

SEQ ID NO: 20909 - DNA, 25 bp, Artificial Sequence
  Synthetic: FXN 3 forward 9:69041890-69041921; SaCas9
gggctcacgggtgacctggagttag

SEQ ID NO: 20910 - DNA, 24 bp, Artificial Sequence
  Synthetic: FXN 3 forward 9:69041891-69041921; SaCas9
ggctcacgggtgacctggagttag

SEQ ID NO: 20911 - DNA, 23 bp, Artificial Sequence
  Synthetic: FXN 3 forward 9:69041892-69041921; SaCas9
gctcacgggtgacctggagttag

SEQ ID NO: 20912 - DNA, 22 bp, Artificial Sequence
  Synthetic: FXN 3 forward 9:69041893-69041921; SaCas9
ctcacgggtgacctggagttag

SEQ ID NO: 20913 - DNA, 21 bp, Artificial Sequence
  Synthetic: FXN 3 forward 9:69041894-69041921; SaCas9
tcacgggtgacctggagttag

SEQ ID NO: 20914 - DNA, 20 bp, Artificial Sequence
  Synthetic: FXN 3 forward 9:69041895-69041921; SaCas9
cacgggtgacctggagttag

SEQ ID NO: 20915 - DNA, 19 bp, Artificial Sequence
  Synthetic: FXN 3 forward 9:69041896-69041921; SaCas9
acgggtgacctggagttag

SEQ ID NO: 20916 - DNA, 18 bp, Artificial Sequence
  Synthetic: FXN 3 forward 9:69041897-69041921; SaCas9
cgggtgacctggagttag

SEQ ID NO: 20917 - DNA, 25 bp, Artificial Sequence
  Synthetic: FXN 3 forward 9:69041891-69041922; SaCas9
ggctcacgggtgacctggagttaga

SEQ ID NO: 20918 - DNA, 24 bp, Artificial Sequence
  Synthetic: FXN 3 forward 9:69041892-69041922; SaCas9
gctcacgggtgacctggagttaga

SEQ ID NO: 20919 - DNA, 23 bp, Artificial Sequence
  Synthetic: FXN 3 forward 9:69041893-69041922; SaCas9
ctcacgggtgacctggagttaga

SEQ ID NO: 20920 - DNA, 22 bp, Artificial Sequence
  Synthetic: FXN 3 forward 9:69041894-69041922; SaCas9
tcacgggtgacctggagttaga

SEQ ID NO: 20921 - DNA, 21 bp, Artificial Sequence
  Synthetic: FXN 3 forward 9:69041895-69041922; SaCas9
cacgggtgacctggagttaga

SEQ ID NO: 20922 - DNA, 20 bp, Artificial Sequence
  Synthetic: FXN 3 forward 9:69041896-69041922; SaCas9
acgggtgacctggagttaga

SEQ ID NO: 20923 - DNA, 19 bp, Artificial Sequence
  Synthetic: FXN 3 forward 9:69041897-69041922; SaCas9
cgggtgacctggagttaga

SEQ ID NO: 20924 - DNA, 18 bp, Artificial Sequence
  Synthetic: FXN 3 forward 9:69041898-69041922; SaCas9
gggtgacctggagttaga

SEQ ID NO: 20925 - DNA, 25 bp, Artificial Sequence
  Synthetic: FXN 3 reverse 9:69041892-69041923; SaCas9
gtctccctctaactccaggtcaccc

SEQ ID NO: 20926 - DNA, 24 bp, Artificial Sequence
  Synthetic: FXN 3 reverse 9:69041893-69041923; SaCas9
tctccctctaactccaggtcaccc

SEQ ID NO: 20927 - DNA, 23 bp, Artificial Sequence
  Synthetic: FXN 3 reverse 9:69041894-69041923; SaCas9
ctccctctaactccaggtcaccc

SEQ ID NO: 20928 - DNA, 22 bp, Artificial Sequence
  Synthetic: FXN 3 reverse 9:69041895-69041923; SaCas9
tccctctaactccaggtcaccc

SEQ ID NO: 20929 - DNA, 21 bp, Artificial Sequence
  Synthetic: FXN 3 reverse 9:69041896-69041923; SaCas9
ccctctaactccaggtcaccc

SEQ ID NO: 20930 - DNA, 20 bp, Artificial Sequence
  Synthetic: FXN 3 reverse 9:69041897-69041923; SaCas9
cctctaactccaggtcaccc

SEQ ID NO: 20931 - DNA, 19 bp, Artificial Sequence
  Synthetic: FXN 3 reverse 9:69041898-69041923; SaCas9
ctctaactccaggtcaccc

SEQ ID NO: 20932 - DNA, 18 bp, Artificial Sequence
  Synthetic: FXN 3 reverse 9:69041899-69041923; SaCas9
tctaactccaggtcaccc

SEQ ID NO: 20933 - DNA, 25 bp, Artificial Sequence
  Synthetic: FXN 3 forward 9:69041916-69041947; SaCas9
gggagacatggctgccaggtggctt

SEQ ID NO: 20934 - DNA, 24 bp, Artificial Sequence
  Synthetic: FXN 3 forward 9:69041917-69041947; SaCas9
ggagacatggctgccaggtggctt

SEQ ID NO: 20935 - DNA, 23 bp, Artificial Sequence
  Synthetic: FXN 3 forward 9:69041918-69041947; SaCas9
gagacatggctgccaggtggctt

SEQ ID NO: 20936 - DNA, 22 bp, Artificial Sequence
  Synthetic: FXN 3 forward 9:69041919-69041947; SaCas9
agacatggctgccaggtggctt

SEQ ID NO: 20937 - DNA, 21 bp, Artificial Sequence
  Synthetic: FXN 3 forward 9:69041920-69041947; SaCas9
gacatggctgccaggtggctt

SEQ ID NO: 20938 - DNA, 20 bp, Artificial Sequence
  Synthetic: FXN 3 forward 9:69041921-69041947; SaCas9
acatggctgccaggtggctt

SEQ ID NO: 20939 - DNA, 19 bp, Artificial Sequence
  Synthetic: FXN 3 forward 9:69041922-69041947; SaCas9
catggctgccaggtggctt

SEQ ID NO: 20940 - DNA, 18 bp, Artificial Sequence
  Synthetic: FXN 3 forward 9:69041923-69041947; SaCas9
atggctgccaggtggctt

SEQ ID NO: 20941 - DNA, 25 bp, Artificial Sequence
  Synthetic: FXN 3 forward 9:69041920-69041951; SaCas9
gacatggctgccaggtggctttaga

SEQ ID NO: 20942 - DNA, 24 bp, Artificial Sequence
  Synthetic: FXN 3 forward 9:69041921-69041951; SaCas9
acatggctgccaggtggctttaga

SEQ ID NO: 20943 - DNA, 23 bp, Artificial Sequence
  Synthetic: FXN 3 forward 9:69041922-69041951; SaCas9
catggctgccaggtggctttaga

SEQ ID NO: 20944 - DNA, 22 bp, Artificial Sequence
  Synthetic: FXN 3 forward 9:69041923-69041951; SaCas9
atggctgccaggtggctttaga

SEQ ID NO: 20945 - DNA, 21 bp, Artificial Sequence
  Synthetic: FXN 3 forward 9:69041924-69041951; SaCas9
tggctgccaggtggctttaga

SEQ ID NO: 20946 - DNA, 20 bp, Artificial Sequence
  Synthetic: FXN 3 forward 9:69041925-69041951; SaCas9
ggctgccaggtggctttaga

SEQ ID NO: 20947 - DNA, 19 bp, Artificial Sequence
  Synthetic: FXN 3 forward 9:69041926-69041951; SaCas9
gctgccaggtggctttaga

SEQ ID NO: 20948 - DNA, 18 bp, Artificial Sequence
  Synthetic: FXN 3 forward 9:69041927-69041951; SaCas9
ctgccaggtggctttaga

SEQ ID NO: 20949 - DNA, 25 bp, Artificial Sequence
  Synthetic: FXN 3 reverse 9:69041951-69041982; SaCas9
gcgtaagccaccgcacctggccatg

SEQ ID NO: 20950 - DNA, 24 bp, Artificial Sequence
  Synthetic: FXN 3 reverse 9:69041952-69041982; SaCas9
cgtaagccaccgcacctggccatg

SEQ ID NO: 20951 - DNA, 23 bp, Artificial Sequence
  Synthetic: FXN 3 reverse 9:69041953-69041982; SaCas9
gtaagccaccgcacctggccatg

SEQ ID NO: 20952 - DNA, 22 bp, Artificial Sequence
  Synthetic: FXN 3 reverse 9:69041954-69041982; SaCas9
taagccaccgcacctggccatg

SEQ ID NO: 20953 - DNA, 21 bp, Artificial Sequence
  Synthetic: FXN 3 reverse 9:69041955-69041982; SaCas9
aagccaccgcacctggccatg

SEQ ID NO: 20954 - DNA, 20 bp, Artificial Sequence
  Synthetic: FXN 3 reverse 9:69041956-69041982; SaCas9
agccaccgcacctggccatg

SEQ ID NO: 20955 - DNA, 19 bp, Artificial Sequence
  Synthetic: FXN 3 reverse 9:69041957-69041982; SaCas9
gccaccgcacctggccatg

SEQ ID NO: 20956 - DNA, 18 bp, Artificial Sequence
  Synthetic: FXN 3 reverse 9:69041958-69041982; SaCas9
ccaccgcacctggccatg

SEQ ID NO: 20957 - DNA, 25 bp, Artificial Sequence
  Synthetic: FXN 3 forward 9:69041973-69042004; SaCas9
ggcttacgcctgtaatcccagcact

SEQ ID NO: 20958 - DNA, 24 bp, Artificial Sequence
  Synthetic: FXN 3 forward 9:69041974-69042004; SaCas9
gcttacgcctgtaatcccagcact

SEQ ID NO: 20959 - DNA, 23 bp, Artificial Sequence
  Synthetic: FXN 3 forward 9:69041975-69042004; SaCas9
cttacgcctgtaatcccagcact

SEQ ID NO: 20960 - DNA, 22 bp, Artificial Sequence
  Synthetic: FXN 3 forward 9:69041976-69042004; SaCas9
ttacgcctgtaatcccagcact

SEQ ID NO: 20961 - DNA, 21 bp, Artificial Sequence
  Synthetic: FXN 3 forward 9:69041977-69042004; SaCas9
tacgcctgtaatcccagcact

SEQ ID NO: 20962 - DNA, 20 bp, Artificial Sequence
  Synthetic: FXN 3 forward 9:69041978-69042004; SaCas9
acgcctgtaatcccagcact

SEQ ID NO: 20963 - DNA, 19 bp, Artificial Sequence
  Synthetic: FXN 3 forward 9:69041979-69042004; SaCas9
cgcctgtaatcccagcact

SEQ ID NO: 20964 - DNA, 18 bp, Artificial Sequence
  Synthetic: FXN 3 forward 9:69041980-69042004; SaCas9
gcctgtaatcccagcact

SEQ ID NO: 20965 - DNA, 25 bp, Artificial Sequence
  Synthetic: FXN 3 forward 9:69041974-69042005; SaCas9
gcttacgcctgtaatcccagcactt

SEQ ID NO: 20966 - DNA, 24 bp, Artificial Sequence
  Synthetic: FXN 3 forward 9:69041975-69042005; SaCas9
cttacgcctgtaatcccagcactt

SEQ ID NO: 20967 - DNA, 23 bp, Artificial Sequence
  Synthetic: FXN 3 forward 9:69041976-69042005; SaCas9
ttacgcctgtaatcccagcactt

SEQ ID NO: 20968 - DNA, 22 bp, Artificial Sequence
  Synthetic: FXN 3 forward 9:69041977-69042005; SaCas9
tacgcctgtaatcccagcactt

SEQ ID NO: 20969 - DNA, 21 bp, Artificial Sequence
  Synthetic: FXN 3 forward 9:69041978-69042005; SaCas9
acgcctgtaatcccagcactt

SEQ ID NO: 20970 - DNA, 20 bp, Artificial Sequence
  Synthetic: FXN 3 forward 9:69041979-69042005; SaCas9
cgcctgtaatcccagcactt

SEQ ID NO: 20971 - DNA, 19 bp, Artificial Sequence
  Synthetic: FXN 3 forward 9:69041980-69042005; SaCas9
gcctgtaatcccagcactt

SEQ ID NO: 20972 - DNA, 18 bp, Artificial Sequence
  Synthetic: FXN 3 forward 9:69041981-69042005; SaCas9
cctgtaatcccagcactt

SEQ ID NO: 20973 - DNA, 25 bp, Artificial Sequence
  Synthetic: FXN 3 forward 9:69041975-69042006; SaCas9
cttacgcctgtaatcccagcacttt

SEQ ID NO: 20974 - DNA, 24 bp, Artificial Sequence
  Synthetic: FXN 3 forward 9:69041976-69042006; SaCas9
ttacgcctgtaatcccagcacttt

SEQ ID NO: 20975 - DNA, 23 bp, Artificial Sequence
  Synthetic: FXN 3 forward 9:69041977-69042006; SaCas9
tacgcctgtaatcccagcacttt

SEQ ID NO: 20976 - DNA, 22 bp, Artificial Sequence
  Synthetic: FXN 3 forward 9:69041978-69042006; SaCas9
acgcctgtaatcccagcacttt

SEQ ID NO: 20977 - DNA, 21 bp, Artificial Sequence
  Synthetic: FXN 3 forward 9:69041979-69042006; SaCas9
cgcctgtaatcccagcacttt

SEQ ID NO: 20978 - DNA, 20 bp, Artificial Sequence
  Synthetic: FXN 3 forward 9:69041980-69042006; SaCas9
gcctgtaatcccagcacttt

SEQ ID NO: 20979 - DNA, 19 bp, Artificial Sequence
  Synthetic: FXN 3 forward 9:69041981-69042006; SaCas9
cctgtaatcccagcacttt

SEQ ID NO: 20980 - DNA, 18 bp, Artificial Sequence
  Synthetic: FXN 3 forward 9:69041982-69042006; SaCas9
ctgtaatcccagcacttt

SEQ ID NO: 20981 - DNA, 25 bp, Artificial Sequence
  Synthetic: FXN 3 forward 9:69041986-69042017; SaCas9
aatcccagcactttgggaggccaag

SEQ ID NO: 20982 - DNA, 24 bp, Artificial Sequence
  Synthetic: FXN 3 forward 9:69041987-69042017; SaCas9
atcccagcactttgggaggccaag

SEQ ID NO: 20983 - DNA, 23 bp, Artificial Sequence
  Synthetic: FXN 3 forward 9:69041988-69042017; SaCas9
tcccagcactttgggaggccaag

SEQ ID NO: 20984 - DNA, 22 bp, Artificial Sequence
  Synthetic: FXN 3 forward 9:69041989-69042017; SaCas9
cccagcactttgggaggccaag

SEQ ID NO: 20985 - DNA, 21 bp, Artificial Sequence
  Synthetic: FXN 3 forward 9:69041990-69042017; SaCas9
ccagcactttgggaggccaag

SEQ ID NO: 20986 - DNA, 20 bp, Artificial Sequence
  Synthetic: FXN 3 forward 9:69041991-69042017; SaCas9
cagcactttgggaggccaag

SEQ ID NO: 20987 - DNA, 19 bp, Artificial Sequence
  Synthetic: FXN 3 forward 9:69041992-69042017; SaCas9
agcactttgggaggccaag

SEQ ID NO: 20988 - DNA, 18 bp, Artificial Sequence
  Synthetic: FXN 3 forward 9:69041993-69042017; SaCas9
gcactttgggaggccaag

SEQ ID NO: 20989 - DNA, 25 bp, Artificial Sequence
  Synthetic: FXN 3 reverse 9:69041987-69042018; SaCas9
cacccaccttggcctcccaaagtgc

SEQ ID NO: 20990 - DNA, 24 bp, Artificial Sequence
  Synthetic: FXN 3 reverse 9:69041988-69042018; SaCas9
acccaccttggcctcccaaagtgc

SEQ ID NO: 20991 - DNA, 23 bp, Artificial Sequence
  Synthetic: FXN 3 reverse 9:69041989-69042018; SaCas9
cccaccttggcctcccaaagtgc

SEQ ID NO: 20992 - DNA, 22 bp, Artificial Sequence
  Synthetic: FXN 3 reverse 9:69041990-69042018; SaCas9
ccaccttggcctcccaaagtgc

SEQ ID NO: 20993 - DNA, 21 bp, Artificial Sequence
  Synthetic: FXN 3 reverse 9:69041991-69042018; SaCas9
caccttggcctcccaaagtgc

SEQ ID NO: 20994 - DNA, 20 bp, Artificial Sequence
  Synthetic: FXN 3 reverse 9:69041992-69042018; SaCas9
accttggcctcccaaagtgc

SEQ ID NO: 20995 - DNA, 19 bp, Artificial Sequence
  Synthetic: FXN 3 reverse 9:69041993-69042018; SaCas9
ccttggcctcccaaagtgc

SEQ ID NO: 20996 - DNA, 18 bp, Artificial Sequence
  Synthetic: FXN 3 reverse 9:69041994-69042018; SaCas9
cttggcctcccaaagtgc

SEQ ID NO: 20997 - DNA, 25 bp, Artificial Sequence
  Synthetic: FXN 3 reverse 9:69041988-69042019; SaCas9
ccacccaccttggcctcccaaagtg

SEQ ID NO: 20998 - DNA, 24 bp, Artificial Sequence
  Synthetic: FXN 3 reverse 9:69041989-69042019; SaCas9
cacccaccttggcctcccaaagtg

SEQ ID NO: 20999 - DNA, 23 bp, Artificial Sequence
  Synthetic: FXN 3 reverse 9:69041990-69042019; SaCas9
acccaccttggcctcccaaagtg

SEQ ID NO: 21000 - DNA, 22 bp, Artificial Sequence
  Synthetic: FXN 3 reverse 9:69041991-69042019; SaCas9
cccaccttggcctcccaaagtg

SEQ ID NO: 21001 - DNA, 21 bp, Artificial Sequence
  Synthetic: FXN 3 reverse 9:69041992-69042019; SaCas9
ccaccttggcctcccaaagtg

SEQ ID NO: 21002 - DNA, 20 bp, Artificial Sequence
  Synthetic: FXN 3 reverse 9:69041993-69042019; SaCas9
caccttggcctcccaaagtg

SEQ ID NO: 21003 - DNA, 19 bp, Artificial Sequence
  Synthetic: FXN 3 reverse 9:69041994-69042019; SaCas9
accttggcctcccaaagtg

SEQ ID NO: 21004 - DNA, 18 bp, Artificial Sequence
  Synthetic: FXN 3 reverse 9:69041995-69042019; SaCas9
ccttggcctcccaaagtg

SEQ ID NO: 21005 - DNA, 25 bp, Artificial Sequence
  Synthetic: FXN 3 forward 9:69041990-69042021; SaCas9
ccagcactttgggaggccaaggtgg

SEQ ID NO: 21006 - DNA, 24 bp, Artificial Sequence
  Synthetic: FXN 3 forward 9:69041991-69042021; SaCas9
cagcactttgggaggccaaggtgg

SEQ ID NO: 21007 - DNA, 23 bp, Artificial Sequence
  Synthetic: FXN 3 forward 9:69041992-69042021; SaCas9
agcactttgggaggccaaggtgg

SEQ ID NO: 21008 - DNA, 22 bp, Artificial Sequence
  Synthetic: FXN 3 forward 9:69041993-69042021; SaCas9
gcactttgggaggccaaggtgg

SEQ ID NO: 21009 - DNA, 21 bp, Artificial Sequence
  Synthetic: FXN 3 forward 9:69041994-69042021; SaCas9
cactttgggaggccaaggtgg

SEQ ID NO: 21010 - DNA, 20 bp, Artificial Sequence
  Synthetic: FXN 3 forward 9:69041995-69042021; SaCas9
actttgggaggccaaggtgg

SEQ ID NO: 21011 - DNA, 19 bp, Artificial Sequence
  Synthetic: FXN 3 forward 9:69041996-69042021; SaCas9
ctttgggaggccaaggtgg

SEQ ID NO: 21012 - DNA, 18 bp, Artificial Sequence
  Synthetic: FXN 3 forward 9:69041997-69042021; SaCas9
tttgggaggccaaggtgg

SEQ ID NO: 21013 - DNA, 25 bp, Artificial Sequence
  Synthetic: FXN 3 forward 9:69041997-69042028; SaCas9
tttgggaggccaaggtgggtggatc

SEQ ID NO: 21014 - DNA, 24 bp, Artificial Sequence
  Synthetic: FXN 3 forward 9:69041998-69042028; SaCas9
ttgggaggccaaggtgggtggatc

SEQ ID NO: 21015 - DNA, 23 bp, Artificial Sequence
  Synthetic: FXN 3 forward 9:69041999-69042028; SaCas9
tgggaggccaaggtgggtggatc

SEQ ID NO: 21016 - DNA, 22 bp, Artificial Sequence
  Synthetic: FXN 3 forward 9:69042000-69042028; SaCas9
gggaggccaaggtgggtggatc

SEQ ID NO: 21017 - DNA, 21 bp, Artificial Sequence
  Synthetic: FXN 3 forward 9:69042001-69042028; SaCas9
ggaggccaaggtgggtggatc

SEQ ID NO: 21018 - DNA, 20 bp, Artificial Sequence
  Synthetic: FXN 3 forward 9:69042002-69042028; SaCas9
gaggccaaggtgggtggatc

SEQ ID NO: 21019 - DNA, 19 bp, Artificial Sequence
  Synthetic: FXN 3 forward 9:69042003-69042028; SaCas9
aggccaaggtgggtggatc

SEQ ID NO: 21020 - DNA, 18 bp, Artificial Sequence
  Synthetic: FXN 3 forward 9:69042004-69042028; SaCas9
ggccaaggtgggtggatc

SEQ ID NO: 21021 - DNA, 25 bp, Artificial Sequence
  Synthetic: FXN 3 forward 9:69042004-69042035; SaCas9
ggccaaggtgggtggatcatgaggt

SEQ ID NO: 21022 - DNA, 24 bp, Artificial Sequence
  Synthetic: FXN 3 forward 9:69042005-69042035; SaCas9
gccaaggtgggtggatcatgaggt

SEQ ID NO: 21023 - DNA, 23 bp, Artificial Sequence
  Synthetic: FXN 3 forward 9:69042006-69042035; SaCas9
ccaaggtgggtggatcatgaggt

SEQ ID NO: 21024 - DNA, 22 bp, Artificial Sequence
  Synthetic: FXN 3 forward 9:69042007-69042035; SaCas9
caaggtgggtggatcatgaggt

SEQ ID NO: 21025 - DNA, 21 bp, Artificial Sequence
  Synthetic: FXN 3 forward 9:69042008-69042035; SaCas9
aaggtgggtggatcatgaggt

SEQ ID NO: 21026 - DNA, 20 bp, Artificial Sequence
  Synthetic: FXN 3 forward 9:69042009-69042035; SaCas9
aggtgggtggatcatgaggt

SEQ ID NO: 21027 - DNA, 19 bp, Artificial Sequence
  Synthetic: FXN 3 forward 9:69042010-69042035; SaCas9
ggtgggtggatcatgaggt

SEQ ID NO: 21028 - DNA, 18 bp, Artificial Sequence
  Synthetic: FXN 3 forward 9:69042011-69042035; SaCas9
gtgggtggatcatgaggt

SEQ ID NO: 21029 - DNA, 25 bp, Artificial Sequence
  Synthetic: FXN 3 forward 9:69042005-69042036; SaCas9
gccaaggtgggtggatcatgaggtc

SEQ ID NO: 21030 - DNA, 24 bp, Artificial Sequence
  Synthetic: FXN 3 forward 9:69042006-69042036; SaCas9
ccaaggtgggtggatcatgaggtc

SEQ ID NO: 21031 - DNA, 23 bp, Artificial Sequence
  Synthetic: FXN 3 forward 9:69042007-69042036; SaCas9
caaggtgggtggatcatgaggtc

SEQ ID NO: 21032 - DNA, 22 bp, Artificial Sequence
  Synthetic: FXN 3 forward 9:69042008-69042036; SaCas9
aaggtgggtggatcatgaggtc

SEQ ID NO: 21033 - DNA, 21 bp, Artificial Sequence
  Synthetic: FXN 3 forward 9:69042009-69042036; SaCas9
aggtgggtggatcatgaggtc

SEQ ID NO: 21034 - DNA, 20 bp, Artificial Sequence
  Synthetic: FXN 3 forward 9:69042010-69042036; SaCas9
ggtgggtggatcatgaggtc

SEQ ID NO: 21035 - DNA, 19 bp, Artificial Sequence
  Synthetic: FXN 3 forward 9:69042011-69042036; SaCas9
gtgggtggatcatgaggtc

SEQ ID NO: 21036 - DNA, 18 bp, Artificial Sequence
  Synthetic: FXN 3 forward 9:69042012-69042036; SaCas9
tgggtggatcatgaggtc

SEQ ID NO: 21037 - DNA, 25 bp, Artificial Sequence
  Synthetic: FXN 3 forward 9:69042009-69042040; SaCas9
aggtgggtggatcatgaggtcagga

SEQ ID NO: 21038 - DNA, 24 bp, Artificial Sequence
  Synthetic: FXN 3 forward 9:69042010-69042040; SaCas9
ggtgggtggatcatgaggtcagga

SEQ ID NO: 21039 - DNA, 23 bp, Artificial Sequence
  Synthetic: FXN 3 forward 9:69042011-69042040; SaCas9
gtgggtggatcatgaggtcagga

SEQ ID NO: 21040 - DNA, 22 bp, Artificial Sequence
  Synthetic: FXN 3 forward 9:69042012-69042040; SaCas9
tgggtggatcatgaggtcagga

SEQ ID NO: 21041 - DNA, 21 bp, Artificial Sequence
  Synthetic: FXN 3 forward 9:69042013-69042040; SaCas9
gggtggatcatgaggtcagga

SEQ ID NO: 21042 - DNA, 20 bp, Artificial Sequence
  Synthetic: FXN 3 forward 9:69042014-69042040; SaCas9
ggtggatcatgaggtcagga

SEQ ID NO: 21043 - DNA, 19 bp, Artificial Sequence
  Synthetic: FXN 3 forward 9:69042015-69042040; SaCas9
gtggatcatgaggtcagga

SEQ ID NO: 21044 - DNA, 18 bp, Artificial Sequence
  Synthetic: FXN 3 forward 9:69042016-69042040; SaCas9
tggatcatgaggtcagga

SEQ ID NO: 21045 - DNA, 25 bp, Artificial Sequence
  Synthetic: FXN 3 forward 9:69042032-69042063; SaCas9
gagtgagaccagcctgaccaacatg

SEQ ID NO: 21046 - DNA, 24 bp, Artificial Sequence
  Synthetic: FXN 3 forward 9:69042033-69042063; SaCas9
agtgagaccagcctgaccaacatg

SEQ ID NO: 21047 - DNA, 23 bp, Artificial Sequence
  Synthetic: FXN 3 forward 9:69042034-69042063; SaCas9
gtgagaccagcctgaccaacatg

SEQ ID NO: 21048 - DNA, 22 bp, Artificial Sequence
  Synthetic: FXN 3 forward 9:69042035-69042063; SaCas9
tgagaccagcctgaccaacatg

SEQ ID NO: 21049 - DNA, 21 bp, Artificial Sequence
  Synthetic: FXN 3 forward 9:69042036-69042063; SaCas9
gagaccagcctgaccaacatg

SEQ ID NO: 21050 - DNA, 20 bp, Artificial Sequence
  Synthetic: FXN 3 forward 9:69042037-69042063; SaCas9
agaccagcctgaccaacatg

SEQ ID NO: 21051 - DNA, 19 bp, Artificial Sequence
  Synthetic: FXN 3 forward 9:69042038-69042063; SaCas9
gaccagcctgaccaacatg

SEQ ID NO: 21052 - DNA, 18 bp, Artificial Sequence
  Synthetic: FXN 3 forward 9:69042039-69042063; SaCas9
accagcctgaccaacatg

SEQ ID NO: 21053 - DNA, 25 bp, Artificial Sequence
  Synthetic: FXN 3 forward 9:69042067-69042098; SaCas9
tctctcctaaaaacacaaaaattag

SEQ ID NO: 21054 - DNA, 24 bp, Artificial Sequence
  Synthetic: FXN 3 forward 9:69042068-69042098; SaCas9
ctctcctaaaaacacaaaaattag

SEQ ID NO: 21055 - DNA, 23 bp, Artificial Sequence
  Synthetic: FXN 3 forward 9:69042069-69042098; SaCas9
tctcctaaaaacacaaaaattag

SEQ ID NO: 21056 - DNA, 22 bp, Artificial Sequence
  Synthetic: FXN 3 forward 9:69042070-69042098; SaCas9
ctcctaaaaacacaaaaattag

SEQ ID NO: 21057 - DNA, 21 bp, Artificial Sequence
  Synthetic: FXN 3 forward 9:69042071-69042098; SaCas9
tcctaaaaacacaaaaattag

SEQ ID NO: 21058 - DNA, 20 bp, Artificial Sequence
  Synthetic: FXN 3 forward 9:69042072-69042098; SaCas9
cctaaaaacacaaaaattag

SEQ ID NO: 21059 - DNA, 19 bp, Artificial Sequence
  Synthetic: FXN 3 forward 9:69042073-69042098; SaCas9
ctaaaaacacaaaaattag

SEQ ID NO: 21060 - DNA, 18 bp, Artificial Sequence
  Synthetic: FXN 3 forward 9:69042074-69042098; SaCas9
taaaaacacaaaaattag

SEQ ID NO: 21061 - DNA, 25 bp, Artificial Sequence
  Synthetic: FXN 3 reverse 9:69042067-69042098; SaCas9
gcccagctaatttttgtgtttttag

SEQ ID NO: 21062 - DNA, 24 bp, Artificial Sequence
  Synthetic: FXN 3 reverse 9:69042068-69042098; SaCas9
cccagctaatttttgtgtttttag

SEQ ID NO: 21063 - DNA, 23 bp, Artificial Sequence
  Synthetic: FXN 3 reverse 9:69042069-69042098; SaCas9
ccagctaatttttgtgtttttag

SEQ ID NO: 21064 - DNA, 22 bp, Artificial Sequence
  Synthetic: FXN 3 reverse 9:69042070-69042098; SaCas9
cagctaatttttgtgtttttag

SEQ ID NO: 21065 - DNA, 21 bp, Artificial Sequence
  Synthetic: FXN 3 reverse 9:69042071-69042098; SaCas9
agctaatttttgtgtttttag

SEQ ID NO: 21066 - DNA, 20 bp, Artificial Sequence
  Synthetic: FXN 3 reverse 9:69042072-69042098; SaCas9
gctaatttttgtgtttttag

SEQ ID NO: 21067 - DNA, 19 bp, Artificial Sequence
  Synthetic: FXN 3 reverse 9:69042073-69042098; SaCas9
ctaatttttgtgtttttag

SEQ ID NO: 21068 - DNA, 18 bp, Artificial Sequence
  Synthetic: FXN 3 reverse 9:69042074-69042098; SaCas9
taatttttgtgtttttag

SEQ ID NO: 21069 - DNA, 25 bp, Artificial Sequence
  Synthetic: FXN 3 reverse 9:69042069-69042100; SaCas9
atgcccagctaatttttgtgttttt

SEQ ID NO: 21070 - DNA, 24 bp, Artificial Sequence
  Synthetic: FXN 3 reverse 9:69042070-69042100; SaCas9
tgcccagctaatttttgtgttttt

SEQ ID NO: 21071 - DNA, 23 bp, Artificial Sequence
  Synthetic: FXN 3 reverse 9:69042071-69042100; SaCas9
gcccagctaatttttgtgttttt

SEQ ID NO: 21072 - DNA, 22 bp, Artificial Sequence
  Synthetic: FXN 3 reverse 9:69042072-69042100; SaCas9
cccagctaatttttgtgttttt

SEQ ID NO: 21073 - DNA, 21 bp, Artificial Sequence
  Synthetic: FXN 3 reverse 9:69042073-69042100; SaCas9
ccagctaatttttgtgttttt

SEQ ID NO: 21074 - DNA, 20 bp, Artificial Sequence
  Synthetic: FXN 3 reverse 9:69042074-69042100; SaCas9
cagctaatttttgtgttttt

SEQ ID NO: 21075 - DNA, 19 bp, Artificial Sequence
  Synthetic: FXN 3 reverse 9:69042075-69042100; SaCas9
agctaatttttgtgttttt

SEQ ID NO: 21076 - DNA, 18 bp, Artificial Sequence
  Synthetic: FXN 3 reverse 9:69042076-69042100; SaCas9
gctaatttttgtgttttt

SEQ ID NO: 21077 - DNA, 25 bp, Artificial Sequence
  Synthetic: FXN 3 reverse 9:69042070-69042101; SaCas9
catgcccagctaatttttgtgtttt

SEQ ID NO: 21078 - DNA, 24 bp, Artificial Sequence
  Synthetic: FXN 3 reverse 9:69042071-69042101; SaCas9
atgcccagctaatttttgtgtttt

SEQ ID NO: 21079 - DNA, 23 bp, Artificial Sequence
  Synthetic: FXN 3 reverse 9:69042072-69042101; SaCas9
tgcccagctaatttttgtgtttt

SEQ ID NO: 21080 - DNA, 22 bp, Artificial Sequence
  Synthetic: FXN 3 reverse 9:69042073-69042101; SaCas9
gcccagctaatttttgtgtttt

SEQ ID NO: 21081 - DNA, 21 bp, Artificial Sequence
  Synthetic: FXN 3 reverse 9:69042074-69042101; SaCas9
cccagctaatttttgtgtttt

SEQ ID NO: 21082 - DNA, 20 bp, Artificial Sequence
  Synthetic: FXN 3 reverse 9:69042075-69042101; SaCas9
ccagctaatttttgtgtttt

SEQ ID NO: 21083 - DNA, 19 bp, Artificial Sequence
  Synthetic: FXN 3 reverse 9:69042076-69042101; SaCas9
cagctaatttttgtgtttt

SEQ ID NO: 21084 - DNA, 18 bp, Artificial Sequence
  Synthetic: FXN 3 reverse 9:69042077-69042101; SaCas9
agctaatttttgtgtttt

SEQ ID NO: 21085 - DNA, 25 bp, Artificial Sequence
  Synthetic: FXN 3 forward 9:69042073-69042104; SaCas9
ctaaaaacacaaaaattagctgggc

SEQ ID NO: 21086 - DNA, 24 bp, Artificial Sequence
  Synthetic: FXN 3 forward 9:69042074-69042104; SaCas9
taaaaacacaaaaattagctgggc

SEQ ID NO: 21087 - DNA, 23 bp, Artificial Sequence
  Synthetic: FXN 3 forward 9:69042075-69042104; SaCas9
aaaaacacaaaaattagctgggc

SEQ ID NO: 21088 - DNA, 22 bp, Artificial Sequence
  Synthetic: FXN 3 forward 9:69042076-69042104; SaCas9
aaaacacaaaaattagctgggc

SEQ ID NO: 21089 - DNA, 21 bp, Artificial Sequence
  Synthetic: FXN 3 forward 9:69042077-69042104; SaCas9
aaacacaaaaattagctgggc

SEQ ID NO: 21090 - DNA, 20 bp, Artificial Sequence
  Synthetic: FXN 3 forward 9:69042078-69042104; SaCas9
aacacaaaaattagctgggc

SEQ ID NO: 21091 - DNA, 19 bp, Artificial Sequence
  Synthetic: FXN 3 forward 9:69042079-69042104; SaCas9
acacaaaaattagctgggc

SEQ ID NO: 21092 - DNA, 18 bp, Artificial Sequence
  Synthetic: FXN 3 forward 9:69042080-69042104; SaCas9
cacaaaaattagctgggc

SEQ ID NO: 21093 - DNA, 25 bp, Artificial Sequence
  Synthetic: FXN 3 forward 9:69042074-69042105; SaCas9
taaaaacacaaaaattagctgggca

SEQ ID NO: 21094 - DNA, 24 bp, Artificial Sequence
  Synthetic: FXN 3 forward 9:69042075-69042105; SaCas9
aaaaacacaaaaattagctgggca

SEQ ID NO: 21095 - DNA, 23 bp, Artificial Sequence
  Synthetic: FXN 3 forward 9:69042076-69042105; SaCas9
aaaacacaaaaattagctgggca

SEQ ID NO: 21096 - DNA, 22 bp, Artificial Sequence
  Synthetic: FXN 3 forward 9:69042077-69042105; SaCas9
aaacacaaaaattagctgggca

SEQ ID NO: 21097 - DNA, 21 bp, Artificial Sequence
  Synthetic: FXN 3 forward 9:69042078-69042105; SaCas9
aacacaaaaattagctgggca

SEQ ID NO: 21098 - DNA, 20 bp, Artificial Sequence
  Synthetic: FXN 3 forward 9:69042079-69042105; SaCas9
acacaaaaattagctgggca

SEQ ID NO: 21099 - DNA, 19 bp, Artificial Sequence
  Synthetic: FXN 3 forward 9:69042080-69042105; SaCas9
cacaaaaattagctgggca

SEQ ID NO: 21100 - DNA, 18 bp, Artificial Sequence
  Synthetic: FXN 3 forward 9:69042081-69042105; SaCas9
acaaaaattagctgggca

SEQ ID NO: 21101 - DNA, 25 bp, Artificial Sequence
  Synthetic: FXN 3 forward 9:69042104-69042135; SaCas9
gtgcacgcctgtaatcccagctact

SEQ ID NO: 21102 - DNA, 24 bp, Artificial Sequence
  Synthetic: FXN 3 forward 9:69042105-69042135; SaCas9
tgcacgcctgtaatcccagctact

SEQ ID NO: 21103 - DNA, 23 bp, Artificial Sequence
  Synthetic: FXN 3 forward 9:69042106-69042135; SaCas9
gcacgcctgtaatcccagctact

SEQ ID NO: 21104 - DNA, 22 bp, Artificial Sequence
  Synthetic: FXN 3 forward 9:69042107-69042135; SaCas9
cacgcctgtaatcccagctact

SEQ ID NO: 21105 - DNA, 21 bp, Artificial Sequence
  Synthetic: FXN 3 forward 9:69042108-69042135; SaCas9
acgcctgtaatcccagctact

SEQ ID NO: 21106 - DNA, 20 bp, Artificial Sequence
  Synthetic: FXN 3 forward 9:69042109-69042135; SaCas9
cgcctgtaatcccagctact

SEQ ID NO: 21107 - DNA, 19 bp, Artificial Sequence
  Synthetic: FXN 3 forward 9:69042110-69042135; SaCas9
gcctgtaatcccagctact

SEQ ID NO: 21108 - DNA, 18 bp, Artificial Sequence
  Synthetic: FXN 3 forward 9:69042111-69042135; SaCas9
cctgtaatcccagctact

SEQ ID NO: 21109 - DNA, 25 bp, Artificial Sequence
  Synthetic: FXN 3 forward 9:69042105-69042136; SaCas9
tgcacgcctgtaatcccagctactc

SEQ ID NO: 21110 - DNA, 24 bp, Artificial Sequence
  Synthetic: FXN 3 forward 9:69042106-69042136; SaCas9
gcacgcctgtaatcccagctactc

SEQ ID NO: 21111 - DNA, 23 bp, Artificial Sequence
  Synthetic: FXN 3 forward 9:69042107-69042136; SaCas9
cacgcctgtaatcccagctactc

SEQ ID NO: 21112 - DNA, 22 bp, Artificial Sequence
  Synthetic: FXN 3 forward 9:69042108-69042136; SaCas9
acgcctgtaatcccagctactc

SEQ ID NO: 21113 - DNA, 21 bp, Artificial Sequence
  Synthetic: FXN 3 forward 9:69042109-69042136; SaCas9
cgcctgtaatcccagctactc

SEQ ID NO: 21114 - DNA, 20 bp, Artificial Sequence
  Synthetic: FXN 3 forward 9:69042110-69042136; SaCas9
gcctgtaatcccagctactc

SEQ ID NO: 21115 - DNA, 19 bp, Artificial Sequence
  Synthetic: FXN 3 forward 9:69042111-69042136; SaCas9
cctgtaatcccagctactc

SEQ ID NO: 21116 - DNA, 18 bp, Artificial Sequence
  Synthetic: FXN 3 forward 9:69042112-69042136; SaCas9
ctgtaatcccagctactc

SEQ ID NO: 21117 - DNA, 25 bp, Artificial Sequence
  Synthetic: FXN 3 forward 9:69042111-69042142; SaCas9
cctgtaatcccagctactcaggagg

SEQ ID NO: 21118 - DNA, 24 bp, Artificial Sequence
  Synthetic: FXN 3 forward 9:69042112-69042142; SaCas9
ctgtaatcccagctactcaggagg

SEQ ID NO: 21119 - DNA, 23 bp, Artificial Sequence
  Synthetic: FXN 3 forward 9:69042113-69042142; SaCas9
tgtaatcccagctactcaggagg

SEQ ID NO: 21120 - DNA, 22 bp, Artificial Sequence
  Synthetic: FXN 3 forward 9:69042114-69042142; SaCas9
gtaatcccagctactcaggagg

SEQ ID NO: 21121 - DNA, 21 bp, Artificial Sequence
  Synthetic: FXN 3 forward 9:69042115-69042142; SaCas9
taatcccagctactcaggagg

SEQ ID NO: 21122 - DNA, 20 bp, Artificial Sequence
  Synthetic: FXN 3 forward 9:69042116-69042142; SaCas9
aatcccagctactcaggagg

SEQ ID NO: 21123 - DNA, 19 bp, Artificial Sequence
  Synthetic: FXN 3 forward 9:69042117-69042142; SaCas9
atcccagctactcaggagg

SEQ ID NO: 21124 - DNA, 18 bp, Artificial Sequence
  Synthetic: FXN 3 forward 9:69042118-69042142; SaCas9
tcccagctactcaggagg

SEQ ID NO: 21125 - DNA, 25 bp, Artificial Sequence
  Synthetic: FXN 3 forward 9:69042117-69042148; SaCas9
atcccagctactcaggaggctgagg

SEQ ID NO: 21126 - DNA, 24 bp, Artificial Sequence
  Synthetic: FXN 3 forward 9:69042118-69042148; SaCas9
tcccagctactcaggaggctgagg

SEQ ID NO: 21127 - DNA, 23 bp, Artificial Sequence
  Synthetic: FXN 3 forward 9:69042119-69042148; SaCas9
cccagctactcaggaggctgagg

SEQ ID NO: 21128 - DNA, 22 bp, Artificial Sequence
  Synthetic: FXN 3 forward 9:69042120-69042148; SaCas9
ccagctactcaggaggctgagg

SEQ ID NO: 21129 - DNA, 21 bp, Artificial Sequence
  Synthetic: FXN 3 forward 9:69042121-69042148; SaCas9
cagctactcaggaggctgagg

SEQ ID NO: 21130 - DNA, 20 bp, Artificial Sequence
  Synthetic: FXN 3 forward 9:69042122-69042148; SaCas9
agctactcaggaggctgagg

SEQ ID NO: 21131 - DNA, 19 bp, Artificial Sequence
  Synthetic: FXN 3 forward 9:69042123-69042148; SaCas9
gctactcaggaggctgagg

SEQ ID NO: 21132 - DNA, 18 bp, Artificial Sequence
  Synthetic: FXN 3 forward 9:69042124-69042148; SaCas9
ctactcaggaggctgagg

SEQ ID NO: 21133 - DNA, 25 bp, Artificial Sequence
  Synthetic: FXN 3 reverse 9:69042117-69042148; SaCas9
ctcctgcctcagcctcctgagtagc

SEQ ID NO: 21134 - DNA, 24 bp, Artificial Sequence
  Synthetic: FXN 3 reverse 9:69042118-69042148; SaCas9
tcctgcctcagcctcctgagtagc

SEQ ID NO: 21135 - DNA, 23 bp, Artificial Sequence
  Synthetic: FXN 3 reverse 9:69042119-69042148; SaCas9
cctgcctcagcctcctgagtagc

SEQ ID NO: 21136 - DNA, 22 bp, Artificial Sequence
  Synthetic: FXN 3 reverse 9:69042120-69042148; SaCas9
ctgcctcagcctcctgagtagc

SEQ ID NO: 21137 - DNA, 21 bp, Artificial Sequence
  Synthetic: FXN 3 reverse 9:69042121-69042148; SaCas9
tgcctcagcctcctgagtagc

SEQ ID NO: 21138 - DNA, 20 bp, Artificial Sequence
  Synthetic: FXN 3 reverse 9:69042122-69042148; SaCas9
gcctcagcctcctgagtagc

SEQ ID NO: 21139 - DNA, 19 bp, Artificial Sequence
  Synthetic: FXN 3 reverse 9:69042123-69042148; SaCas9
cctcagcctcctgagtagc

SEQ ID NO: 21140 - DNA, 18 bp, Artificial Sequence
  Synthetic: FXN 3 reverse 9:69042124-69042148; SaCas9
ctcagcctcctgagtagc

SEQ ID NO: 21141 - DNA, 25 bp, Artificial Sequence
  Synthetic: FXN 3 forward 9:69042118-69042149; SaCas9
tcccagctactcaggaggctgaggc

SEQ ID NO: 21142 - DNA, 24 bp, Artificial Sequence
  Synthetic: FXN 3 forward 9:69042119-69042149; SaCas9
cccagctactcaggaggctgaggc

SEQ ID NO: 21143 - DNA, 23 bp, Artificial Sequence
  Synthetic: FXN 3 forward 9:69042120-69042149; SaCas9
ccagctactcaggaggctgaggc

SEQ ID NO: 21144 - DNA, 22 bp, Artificial Sequence
  Synthetic: FXN 3 forward 9:69042121-69042149; SaCas9
cagctactcaggaggctgaggc

SEQ ID NO: 21145 - DNA, 21 bp, Artificial Sequence
  Synthetic: FXN 3 forward 9:69042122-69042149; SaCas9
agctactcaggaggctgaggc

SEQ ID NO: 21146 - DNA, 20 bp, Artificial Sequence
  Synthetic: FXN 3 forward 9:69042123-69042149; SaCas9
gctactcaggaggctgaggc

SEQ ID NO: 21147 - DNA, 19 bp, Artificial Sequence
  Synthetic: FXN 3 forward 9:69042124-69042149; SaCas9
ctactcaggaggctgaggc

SEQ ID NO: 21148 - DNA, 18 bp, Artificial Sequence
  Synthetic: FXN 3 forward 9:69042125-69042149; SaCas9
tactcaggaggctgaggc

SEQ ID NO: 21149 - DNA, 25 bp, Artificial Sequence
  Synthetic: FXN 3 reverse 9:69042118-69042149; SaCas9
tctcctgcctcagcctcctgagtag

SEQ ID NO: 21150 - DNA, 24 bp, Artificial Sequence
  Synthetic: FXN 3 reverse 9:69042119-69042149; SaCas9
ctcctgcctcagcctcctgagtag

SEQ ID NO: 21151 - DNA, 23 bp, Artificial Sequence
  Synthetic: FXN 3 reverse 9:69042120-69042149; SaCas9
tcctgcctcagcctcctgagtag

SEQ ID NO: 21152 - DNA, 22 bp, Artificial Sequence
  Synthetic: FXN 3 reverse 9:69042121-69042149; SaCas9
cctgcctcagcctcctgagtag

SEQ ID NO: 21153 - DNA, 21 bp, Artificial Sequence
  Synthetic: FXN 3 reverse 9:69042122-69042149; SaCas9
ctgcctcagcctcctgagtag

SEQ ID NO: 21154 - DNA, 20 bp, Artificial Sequence
  Synthetic: FXN 3 reverse 9:69042123-69042149; SaCas9
tgcctcagcctcctgagtag

SEQ ID NO: 21155 - DNA, 19 bp, Artificial Sequence
  Synthetic: FXN 3 reverse 9:69042124-69042149; SaCas9
gcctcagcctcctgagtag

SEQ ID NO: 21156 - DNA, 18 bp, Artificial Sequence
  Synthetic: FXN 3 reverse 9:69042125-69042149; SaCas9
cctcagcctcctgagtag

SEQ ID NO: 21157 - DNA, 25 bp, Artificial Sequence
  Synthetic: FXN 3 forward 9:69042120-69042151; SaCas9
ccagctactcaggaggctgaggcag

SEQ ID NO: 21158 - DNA, 24 bp, Artificial Sequence
  Synthetic: FXN 3 forward 9:69042121-69042151; SaCas9
cagctactcaggaggctgaggcag

SEQ ID NO: 21159 - DNA, 23 bp, Artificial Sequence
  Synthetic: FXN 3 forward 9:69042122-69042151; SaCas9
agctactcaggaggctgaggcag

SEQ ID NO: 21160 - DNA, 22 bp, Artificial Sequence
  Synthetic: FXN 3 forward 9:69042123-69042151; SaCas9
gctactcaggaggctgaggcag

SEQ ID NO: 21161 - DNA, 21 bp, Artificial Sequence
  Synthetic: FXN 3 forward 9:69042124-69042151; SaCas9
ctactcaggaggctgaggcag

SEQ ID NO: 21162 - DNA, 20 bp, Artificial Sequence
  Synthetic: FXN 3 forward 9:69042125-69042151; SaCas9
tactcaggaggctgaggcag

SEQ ID NO: 21163 - DNA, 19 bp, Artificial Sequence
  Synthetic: FXN 3 forward 9:69042126-69042151; SaCas9
actcaggaggctgaggcag

SEQ ID NO: 21164 - DNA, 18 bp, Artificial Sequence
  Synthetic: FXN 3 forward 9:69042127-69042151; SaCas9
ctcaggaggctgaggcag

SEQ ID NO: 21165 - DNA, 25 bp, Artificial Sequence
  Synthetic: FXN 3 reverse 9:69042126-69042157; SaCas9
caagtgattctcctgcctcagcctc

SEQ ID NO: 21166 - DNA, 24 bp, Artificial Sequence
  Synthetic: FXN 3 reverse 9:69042127-69042157; SaCas9
aagtgattctcctgcctcagcctc

SEQ ID NO: 21167 - DNA, 23 bp, Artificial Sequence
  Synthetic: FXN 3 reverse 9:69042128-69042157; SaCas9
agtgattctcctgcctcagcctc

SEQ ID NO: 21168 - DNA, 22 bp, Artificial Sequence
  Synthetic: FXN 3 reverse 9:69042129-69042157; SaCas9
gtgattctcctgcctcagcctc

SEQ ID NO: 21169 - DNA, 21 bp, Artificial Sequence
  Synthetic: FXN 3 reverse 9:69042130-69042157; SaCas9
tgattctcctgcctcagcctc

SEQ ID NO: 21170 - DNA, 20 bp, Artificial Sequence
  Synthetic: FXN 3 reverse 9:69042131-69042157; SaCas9
gattctcctgcctcagcctc

SEQ ID NO: 21171 - DNA, 19 bp, Artificial Sequence
  Synthetic: FXN 3 reverse 9:69042132-69042157; SaCas9
attctcctgcctcagcctc

SEQ ID NO: 21172 - DNA, 18 bp, Artificial Sequence
  Synthetic: FXN 3 reverse 9:69042133-69042157; SaCas9
ttctcctgcctcagcctc

SEQ ID NO: 21173 - DNA, 25 bp, Artificial Sequence
  Synthetic: FXN 3 forward 9:69042129-69042160; SaCas9
caggaggctgaggcaggagaatcac

SEQ ID NO: 21174 - DNA, 24 bp, Artificial Sequence
  Synthetic: FXN 3 forward 9:69042130-69042160; SaCas9
aggaggctgaggcaggagaatcac

SEQ ID NO: 21175 - DNA, 23 bp, Artificial Sequence
  Synthetic: FXN 3 forward 9:69042131-69042160; SaCas9
ggaggctgaggcaggagaatcac

SEQ ID NO: 21176 - DNA, 22 bp, Artificial Sequence
  Synthetic: FXN 3 forward 9:69042132-69042160; SaCas9
gaggctgaggcaggagaatcac

SEQ ID NO: 21177 - DNA, 21 bp, Artificial Sequence
  Synthetic: FXN 3 forward 9:69042133-69042160; SaCas9
aggctgaggcaggagaatcac

SEQ ID NO: 21178 - DNA, 20 bp, Artificial Sequence
  Synthetic: FXN 3 forward 9:69042134-69042160; SaCas9
ggctgaggcaggagaatcac

SEQ ID NO: 21179 - DNA, 19 bp, Artificial Sequence
  Synthetic: FXN 3 forward 9:69042135-69042160; SaCas9
gctgaggcaggagaatcac

SEQ ID NO: 21180 - DNA, 18 bp, Artificial Sequence
  Synthetic: FXN 3 forward 9:69042136-69042160; SaCas9
ctgaggcaggagaatcac

SEQ ID NO: 21181 - DNA, 25 bp, Artificial Sequence
  Synthetic: FXN 3 forward 9:69042135-69042166; SaCas9
gctgaggcaggagaatcacttgaac

SEQ ID NO: 21182 - DNA, 24 bp, Artificial Sequence
  Synthetic: FXN 3 forward 9:69042136-69042166; SaCas9
ctgaggcaggagaatcacttgaac

SEQ ID NO: 21183 - DNA, 23 bp, Artificial Sequence
  Synthetic: FXN 3 forward 9:69042137-69042166; SaCas9
tgaggcaggagaatcacttgaac

SEQ ID NO: 21184 - DNA, 22 bp, Artificial Sequence
  Synthetic: FXN 3 forward 9:69042138-69042166; SaCas9
gaggcaggagaatcacttgaac

SEQ ID NO: 21185 - DNA, 21 bp, Artificial Sequence
  Synthetic: FXN 3 forward 9:69042139-69042166; SaCas9
aggcaggagaatcacttgaac

SEQ ID NO: 21186 - DNA, 20 bp, Artificial Sequence
  Synthetic: FXN 3 forward 9:69042140-69042166; SaCas9
ggcaggagaatcacttgaac

SEQ ID NO: 21187 - DNA, 19 bp, Artificial Sequence
  Synthetic: FXN 3 forward 9:69042141-69042166; SaCas9
gcaggagaatcacttgaac

SEQ ID NO: 21188 - DNA, 18 bp, Artificial Sequence
  Synthetic: FXN 3 forward 9:69042142-69042166; SaCas9
caggagaatcacttgaac

SEQ ID NO: 21189 - DNA, 25 bp, Artificial Sequence
  Synthetic: FXN 3 forward 9:69042136-69042167; SaCas9
ctgaggcaggagaatcacttgaacc

SEQ ID NO: 21190 - DNA, 24 bp, Artificial Sequence
  Synthetic: FXN 3 forward 9:69042137-69042167; SaCas9
tgaggcaggagaatcacttgaacc

SEQ ID NO: 21191 - DNA, 23 bp, Artificial Sequence
  Synthetic: FXN 3 forward 9:69042138-69042167; SaCas9
gaggcaggagaatcacttgaacc

SEQ ID NO: 21192 - DNA, 22 bp, Artificial Sequence
  Synthetic: FXN 3 forward 9:69042139-69042167; SaCas9
aggcaggagaatcacttgaacc

SEQ ID NO: 21193 - DNA, 21 bp, Artificial Sequence
  Synthetic: FXN 3 forward 9:69042140-69042167; SaCas9
ggcaggagaatcacttgaacc

SEQ ID NO: 21194 - DNA, 20 bp, Artificial Sequence
  Synthetic: FXN 3 forward 9:69042141-69042167; SaCas9
gcaggagaatcacttgaacc

SEQ ID NO: 21195 - DNA, 19 bp, Artificial Sequence
  Synthetic: FXN 3 forward 9:69042142-69042167; SaCas9
caggagaatcacttgaacc

SEQ ID NO: 21196 - DNA, 18 bp, Artificial Sequence
  Synthetic: FXN 3 forward 9:69042143-69042167; SaCas9
aggagaatcacttgaacc

SEQ ID NO: 21197 - DNA, 25 bp, Artificial Sequence
  Synthetic: FXN 3 forward 9:69042137-69042168; SaCas9
tgaggcaggagaatcacttgaaccc

SEQ ID NO: 21198 - DNA, 24 bp, Artificial Sequence
  Synthetic: FXN 3 forward 9:69042138-69042168; SaCas9
gaggcaggagaatcacttgaaccc

SEQ ID NO: 21199 - DNA, 23 bp, Artificial Sequence
  Synthetic: FXN 3 forward 9:69042139-69042168; SaCas9
aggcaggagaatcacttgaaccc

SEQ ID NO: 21200 - DNA, 22 bp, Artificial Sequence
  Synthetic: FXN 3 forward 9:69042140-69042168; SaCas9
ggcaggagaatcacttgaaccc

SEQ ID NO: 21201 - DNA, 21 bp, Artificial Sequence
  Synthetic: FXN 3 forward 9:69042141-69042168; SaCas9
gcaggagaatcacttgaaccc

SEQ ID NO: 21202 - DNA, 20 bp, Artificial Sequence
  Synthetic: FXN 3 forward 9:69042142-69042168; SaCas9
caggagaatcacttgaaccc

SEQ ID NO: 21203 - DNA, 19 bp, Artificial Sequence
  Synthetic: FXN 3 forward 9:69042143-69042168; SaCas9
aggagaatcacttgaaccc

SEQ ID NO: 21204 - DNA, 18 bp, Artificial Sequence
  Synthetic: FXN 3 forward 9:69042144-69042168; SaCas9
ggagaatcacttgaaccc

SEQ ID NO: 21205 - DNA, 25 bp, Artificial Sequence
  Synthetic: FXN 3 forward 9:69042142-69042173; SaCas9
caggagaatcacttgaacccgggag

SEQ ID NO: 21206 - DNA, 24 bp, Artificial Sequence
  Synthetic: FXN 3 forward 9:69042143-69042173; SaCas9
aggagaatcacttgaacccgggag

SEQ ID NO: 21207 - DNA, 23 bp, Artificial Sequence
  Synthetic: FXN 3 forward 9:69042144-69042173; SaCas9
ggagaatcacttgaacccgggag

SEQ ID NO: 21208 - DNA, 22 bp, Artificial Sequence
  Synthetic: FXN 3 forward 9:69042145-69042173; SaCas9
gagaatcacttgaacccgggag

SEQ ID NO: 21209 - DNA, 21 bp, Artificial Sequence
  Synthetic: FXN 3 forward 9:69042146-69042173; SaCas9
agaatcacttgaacccgggag

SEQ ID NO: 21210 - DNA, 20 bp, Artificial Sequence
  Synthetic: FXN 3 forward 9:69042147-69042173; SaCas9
gaatcacttgaacccgggag

SEQ ID NO: 21211 - DNA, 19 bp, Artificial Sequence
  Synthetic: FXN 3 forward 9:69042148-69042173; SaCas9
aatcacttgaacccgggag

SEQ ID NO: 21212 - DNA, 18 bp, Artificial Sequence
  Synthetic: FXN 3 forward 9:69042149-69042173; SaCas9
atcacttgaacccgggag

SEQ ID NO: 21213 - DNA, 25 bp, Artificial Sequence
  Synthetic: FXN 3 forward 9:69042143-69042174; SaCas9
aggagaatcacttgaacccgggagg

SEQ ID NO: 21214 - DNA, 24 bp, Artificial Sequence
  Synthetic: FXN 3 forward 9:69042144-69042174; SaCas9
ggagaatcacttgaacccgggagg

SEQ ID NO: 21215 - DNA, 23 bp, Artificial Sequence
  Synthetic: FXN 3 forward 9:69042145-69042174; SaCas9
gagaatcacttgaacccgggagg

SEQ ID NO: 21216 - DNA, 22 bp, Artificial Sequence
  Synthetic: FXN 3 forward 9:69042146-69042174; SaCas9
agaatcacttgaacccgggagg

SEQ ID NO: 21217 - DNA, 21 bp, Artificial Sequence
  Synthetic: FXN 3 forward 9:69042147-69042174; SaCas9
gaatcacttgaacccgggagg

SEQ ID NO: 21218 - DNA, 20 bp, Artificial Sequence
  Synthetic: FXN 3 forward 9:69042148-69042174; SaCas9
aatcacttgaacccgggagg

SEQ ID NO: 21219 - DNA, 19 bp, Artificial Sequence
  Synthetic: FXN 3 forward 9:69042149-69042174; SaCas9
atcacttgaacccgggagg

SEQ ID NO: 21220 - DNA, 18 bp, Artificial Sequence
  Synthetic: FXN 3 forward 9:69042150-69042174; SaCas9
tcacttgaacccgggagg

SEQ ID NO: 21221 - DNA, 25 bp, Artificial Sequence
  Synthetic: FXN 3 reverse 9:69042158-69042189; SaCas9
ctaggcttattgcaacctccgcctc

SEQ ID NO: 21222 - DNA, 24 bp, Artificial Sequence
  Synthetic: FXN 3 reverse 9:69042159-69042189; SaCas9
taggcttattgcaacctccgcctc

SEQ ID NO: 21223 - DNA, 23 bp, Artificial Sequence
  Synthetic: FXN 3 reverse 9:69042160-69042189; SaCas9
aggcttattgcaacctccgcctc

SEQ ID NO: 21224 - DNA, 22 bp, Artificial Sequence
  Synthetic: FXN 3 reverse 9:69042161-69042189; SaCas9
ggcttattgcaacctccgcctc

SEQ ID NO: 21225 - DNA, 21 bp, Artificial Sequence
  Synthetic: FXN 3 reverse 9:69042162-69042189; SaCas9
gcttattgcaacctccgcctc

SEQ ID NO: 21226 - DNA, 20 bp, Artificial Sequence
  Synthetic: FXN 3 reverse 9:69042163-69042189; SaCas9
cttattgcaacctccgcctc

SEQ ID NO: 21227 - DNA, 19 bp, Artificial Sequence
  Synthetic: FXN 3 reverse 9:69042164-69042189; SaCas9
ttattgcaacctccgcctc

SEQ ID NO: 21228 - DNA, 18 bp, Artificial Sequence
  Synthetic: FXN 3 reverse 9:69042165-69042189; SaCas9
tattgcaacctccgcctc

SEQ ID NO: 21229 - DNA, 25 bp, Artificial Sequence
  Synthetic: FXN 3 forward 9:69042185-69042216; SaCas9
ctagattgtgccactgcattccagc

SEQ ID NO: 21230 - DNA, 24 bp, Artificial Sequence
  Synthetic: FXN 3 forward 9:69042186-69042216; SaCas9
tagattgtgccactgcattccagc

SEQ ID NO: 21231 - DNA, 23 bp, Artificial Sequence
  Synthetic: FXN 3 forward 9:69042187-69042216; SaCas9
agattgtgccactgcattccagc

SEQ ID NO: 21232 - DNA, 22 bp, Artificial Sequence
  Synthetic: FXN 3 forward 9:69042188-69042216; SaCas9
gattgtgccactgcattccagc

SEQ ID NO: 21233 - DNA, 21 bp, Artificial Sequence
  Synthetic: FXN 3 forward 9:69042189-69042216; SaCas9
attgtgccactgcattccagc

SEQ ID NO: 21234 - DNA, 20 bp, Artificial Sequence
  Synthetic: FXN 3 forward 9:69042190-69042216; SaCas9
ttgtgccactgcattccagc

SEQ ID NO: 21235 - DNA, 19 bp, Artificial Sequence
  Synthetic: FXN 3 forward 9:69042191-69042216; SaCas9
tgtgccactgcattccagc

SEQ ID NO: 21236 - DNA, 18 bp, Artificial Sequence
  Synthetic: FXN 3 forward 9:69042192-69042216; SaCas9
gtgccactgcattccagc

SEQ ID NO: 21237 - DNA, 25 bp, Artificial Sequence
  Synthetic: FXN 3 forward 9:69042193-69042224; SaCas9
tgccactgcattccagcctgggcaa

SEQ ID NO: 21238 - DNA, 24 bp, Artificial Sequence
  Synthetic: FXN 3 forward 9:69042194-69042224; SaCas9
gccactgcattccagcctgggcaa

SEQ ID NO: 21239 - DNA, 23 bp, Artificial Sequence
  Synthetic: FXN 3 forward 9:69042195-69042224; SaCas9
ccactgcattccagcctgggcaa

SEQ ID NO: 21240 - DNA, 22 bp, Artificial Sequence
  Synthetic: FXN 3 forward 9:69042196-69042224; SaCas9
cactgcattccagcctgggcaa

SEQ ID NO: 21241 - DNA, 21 bp, Artificial Sequence
  Synthetic: FXN 3 forward 9:69042197-69042224; SaCas9
actgcattccagcctgggcaa

SEQ ID NO: 21242 - DNA, 20 bp, Artificial Sequence
  Synthetic: FXN 3 forward 9:69042198-69042224; SaCas9
ctgcattccagcctgggcaa

SEQ ID NO: 21243 - DNA, 19 bp, Artificial Sequence
  Synthetic: FXN 3 forward 9:69042199-69042224; SaCas9
tgcattccagcctgggcaa

SEQ ID NO: 21244 - DNA, 18 bp, Artificial Sequence
  Synthetic: FXN 3 forward 9:69042200-69042224; SaCas9
gcattccagcctgggcaa

SEQ ID NO: 21245 - DNA, 25 bp, Artificial Sequence
  Synthetic: FXN 3 reverse 9:69042202-69042233; SaCas9
cggagtcttgctctgttgcccaggc

SEQ ID NO: 21246 - DNA, 24 bp, Artificial Sequence
  Synthetic: FXN 3 reverse 9:69042203-69042233; SaCas9
ggagtcttgctctgttgcccaggc

SEQ ID NO: 21247 - DNA, 23 bp, Artificial Sequence
  Synthetic: FXN 3 reverse 9:69042204-69042233; SaCas9
gagtcttgctctgttgcccaggc

SEQ ID NO: 21248 - DNA, 22 bp, Artificial Sequence
  Synthetic: FXN 3 reverse 9:69042205-69042233; SaCas9
agtcttgctctgttgcccaggc

SEQ ID NO: 21249 - DNA, 21 bp, Artificial Sequence
  Synthetic: FXN 3 reverse 9:69042206-69042233; SaCas9
gtcttgctctgttgcccaggc

SEQ ID NO: 21250 - DNA, 20 bp, Artificial Sequence
  Synthetic: FXN 3 reverse 9:69042207-69042233; SaCas9
tcttgctctgttgcccaggc

SEQ ID NO: 21251 - DNA, 19 bp, Artificial Sequence
  Synthetic: FXN 3 reverse 9:69042208-69042233; SaCas9
cttgctctgttgcccaggc

SEQ ID NO: 21252 - DNA, 18 bp, Artificial Sequence
  Synthetic: FXN 3 reverse 9:69042209-69042233; SaCas9
ttgctctgttgcccaggc

SEQ ID NO: 21253 - DNA, 25 bp, Artificial Sequence
  Synthetic: FXN 3 reverse 9:69042203-69042234; SaCas9
acggagtcttgctctgttgcccagg

SEQ ID NO: 21254 - DNA, 24 bp, Artificial Sequence
  Synthetic: FXN 3 reverse 9:69042204-69042234; SaCas9
cggagtcttgctctgttgcccagg

SEQ ID NO: 21255 - DNA, 23 bp, Artificial Sequence
  Synthetic: FXN 3 reverse 9:69042205-69042234; SaCas9
ggagtcttgctctgttgcccagg

SEQ ID NO: 21256 - DNA, 22 bp, Artificial Sequence
  Synthetic: FXN 3 reverse 9:69042206-69042234; SaCas9
gagtcttgctctgttgcccagg

SEQ ID NO: 21257 - DNA, 21 bp, Artificial Sequence
  Synthetic: FXN 3 reverse 9:69042207-69042234; SaCas9
agtcttgctctgttgcccagg

SEQ ID NO: 21258 - DNA, 20 bp, Artificial Sequence
  Synthetic: FXN 3 reverse 9:69042208-69042234; SaCas9
gtcttgctctgttgcccagg

SEQ ID NO: 21259 - DNA, 19 bp, Artificial Sequence
  Synthetic: FXN 3 reverse 9:69042209-69042234; SaCas9
tcttgctctgttgcccagg

SEQ ID NO: 21260 - DNA, 18 bp, Artificial Sequence
  Synthetic: FXN 3 reverse 9:69042210-69042234; SaCas9
cttgctctgttgcccagg

SEQ ID NO: 21261 - DNA, 25 bp, Artificial Sequence
  Synthetic: FXN 3 forward 9:69042211-69042242; SaCas9
tgggcaacagagcaagactccgtct

SEQ ID NO: 21262 - DNA, 24 bp, Artificial Sequence
  Synthetic: FXN 3 forward 9:69042212-69042242; SaCas9
gggcaacagagcaagactccgtct

SEQ ID NO: 21263 - DNA, 23 bp, Artificial Sequence
  Synthetic: FXN 3 forward 9:69042213-69042242; SaCas9
ggcaacagagcaagactccgtct

SEQ ID NO: 21264 - DNA, 22 bp, Artificial Sequence
  Synthetic: FXN 3 forward 9:69042214-69042242; SaCas9
gcaacagagcaagactccgtct

SEQ ID NO: 21265 - DNA, 21 bp, Artificial Sequence
  Synthetic: FXN 3 forward 9:69042215-69042242; SaCas9
caacagagcaagactccgtct

SEQ ID NO: 21266 - DNA, 20 bp, Artificial Sequence
  Synthetic: FXN 3 forward 9:69042216-69042242; SaCas9
aacagagcaagactccgtct

SEQ ID NO: 21267 - DNA, 19 bp, Artificial Sequence
  Synthetic: FXN 3 forward 9:69042217-69042242; SaCas9
acagagcaagactccgtct

SEQ ID NO: 21268 - DNA, 18 bp, Artificial Sequence
  Synthetic: FXN 3 forward 9:69042218-69042242; SaCas9
cagagcaagactccgtct

SEQ ID NO: 21269 - DNA, 25 bp, Artificial Sequence
  Synthetic: FXN 3 forward 9:69042227-69042258; SaCas9
actccgtctcagaaaaaaaaaaaaa

SEQ ID NO: 21270 - DNA, 24 bp, Artificial Sequence
  Synthetic: FXN 3 forward 9:69042228-69042258; SaCas9
ctccgtctcagaaaaaaaaaaaaa

SEQ ID NO: 21271 - DNA, 23 bp, Artificial Sequence
  Synthetic: FXN 3 forward 9:69042229-69042258; SaCas9
tccgtctcagaaaaaaaaaaaaa

SEQ ID NO: 21272 - DNA, 22 bp, Artificial Sequence
  Synthetic: FXN 3 forward 9:69042230-69042258; SaCas9
ccgtctcagaaaaaaaaaaaaa

SEQ ID NO: 21273 - DNA, 21 bp, Artificial Sequence
  Synthetic: FXN 3 forward 9:69042231-69042258; SaCas9
cgtctcagaaaaaaaaaaaaa

SEQ ID NO: 21274 - DNA, 20 bp, Artificial Sequence
  Synthetic: FXN 3 forward 9:69042232-69042258; SaCas9
gtctcagaaaaaaaaaaaaa

SEQ ID NO: 21275 - DNA, 19 bp, Artificial Sequence
  Synthetic: FXN 3 forward 9:69042233-69042258; SaCas9
tctcagaaaaaaaaaaaaa

SEQ ID NO: 21276 - DNA, 18 bp, Artificial Sequence
  Synthetic: FXN 3 forward 9:69042234-69042258; SaCas9
ctcagaaaaaaaaaaaaa

SEQ ID NO: 21277 - DNA, 25 bp, Artificial Sequence
  Synthetic: FXN 3 reverse 9:69042227-69042258; SaCas9
ttcctttttttttttttttctgaga

SEQ ID NO: 21278 - DNA, 24 bp, Artificial Sequence
  Synthetic: FXN 3 reverse 9:69042228-69042258; SaCas9
tcctttttttttttttttctgaga

SEQ ID NO: 21279 - DNA, 23 bp, Artificial Sequence
  Synthetic: FXN 3 reverse 9:69042229-69042258; SaCas9
cctttttttttttttttctgaga

SEQ ID NO: 21280 - DNA, 22 bp, Artificial Sequence
  Synthetic: FXN 3 reverse 9:69042230-69042258; SaCas9
ctttttttttttttttctgaga

SEQ ID NO: 21281 - DNA, 21 bp, Artificial Sequence
  Synthetic: FXN 3 reverse 9:69042231-69042258; SaCas9
tttttttttttttttctgaga

SEQ ID NO: 21282 - DNA, 20 bp, Artificial Sequence
  Synthetic: FXN 3 reverse 9:69042232-69042258; SaCas9
ttttttttttttttctgaga

SEQ ID NO: 21283 - DNA, 19 bp, Artificial Sequence
  Synthetic: FXN 3 reverse 9:69042233-69042258; SaCas9
tttttttttttttctgaga

SEQ ID NO: 21284 - DNA, 18 bp, Artificial Sequence
  Synthetic: FXN 3 reverse 9:69042234-69042258; SaCas9
ttttttttttttctgaga

SEQ ID NO: 21285 - DNA, 25 bp, Artificial Sequence
  Synthetic: FXN 3 forward 9:69042228-69042259; SaCas9
ctccgtctcagaaaaaaaaaaaaaa

SEQ ID NO: 21286 - DNA, 24 bp, Artificial Sequence
  Synthetic: FXN 3 forward 9:69042229-69042259; SaCas9
tccgtctcagaaaaaaaaaaaaaa

SEQ ID NO: 21287 - DNA, 23 bp, Artificial Sequence
  Synthetic: FXN 3 forward 9:69042230-69042259; SaCas9
ccgtctcagaaaaaaaaaaaaaa

SEQ ID NO: 21288 - DNA, 22 bp, Artificial Sequence
  Synthetic: FXN 3 forward 9:69042231-69042259; SaCas9
cgtctcagaaaaaaaaaaaaaa

SEQ ID NO: 21289 - DNA, 21 bp, Artificial Sequence
  Synthetic: FXN 3 forward 9:69042232-69042259; SaCas9
gtctcagaaaaaaaaaaaaaa

SEQ ID NO: 21290 - DNA, 20 bp, Artificial Sequence
  Synthetic: FXN 3 forward 9:69042233-69042259; SaCas9
tctcagaaaaaaaaaaaaaa

SEQ ID NO: 21291 - DNA, 19 bp, Artificial Sequence
  Synthetic: FXN 3 forward 9:69042234-69042259; SaCas9
ctcagaaaaaaaaaaaaaa

SEQ ID NO: 21292 - DNA, 18 bp, Artificial Sequence
  Synthetic: FXN 3 forward 9:69042235-69042259; SaCas9
tcagaaaaaaaaaaaaaa

SEQ ID NO: 21293 - DNA, 25 bp, Artificial Sequence
  Synthetic: FXN 3 reverse 9:69042228-69042259; SaCas9
cttcctttttttttttttttctgag

SEQ ID NO: 21294 - DNA, 24 bp, Artificial Sequence
  Synthetic: FXN 3 reverse 9:69042229-69042259; SaCas9
ttcctttttttttttttttctgag

SEQ ID NO: 21295 - DNA, 23 bp, Artificial Sequence
  Synthetic: FXN 3 reverse 9:69042230-69042259; SaCas9
tcctttttttttttttttctgag

SEQ ID NO: 21296 - DNA, 22 bp, Artificial Sequence
  Synthetic: FXN 3 reverse 9:69042231-69042259; SaCas9
cctttttttttttttttctgag

SEQ ID NO: 21297 - DNA, 21 bp, Artificial Sequence
  Synthetic: FXN 3 reverse 9:69042232-69042259; SaCas9
ctttttttttttttttctgag

SEQ ID NO: 21298 - DNA, 20 bp, Artificial Sequence
  Synthetic: FXN 3 reverse 9:69042233-69042259; SaCas9
tttttttttttttttctgag

SEQ ID NO: 21299 - DNA, 19 bp, Artificial Sequence
  Synthetic: FXN 3 reverse 9:69042234-69042259; SaCas9
ttttttttttttttctgag

SEQ ID NO: 21300 - DNA, 18 bp, Artificial Sequence
  Synthetic: FXN 3 reverse 9:69042235-69042259; SaCas9
tttttttttttttctgag

SEQ ID NO: 21301 - DNA, 25 bp, Artificial Sequence
  Synthetic: FXN 3 forward 9:69042231-69042262; SaCas9
cgtctcagaaaaaaaaaaaaaaagg

SEQ ID NO: 21302 - DNA, 24 bp, Artificial Sequence
  Synthetic: FXN 3 forward 9:69042232-69042262; SaCas9
gtctcagaaaaaaaaaaaaaaagg

SEQ ID NO: 21303 - DNA, 23 bp, Artificial Sequence
  Synthetic: FXN 3 forward 9:69042233-69042262; SaCas9
tctcagaaaaaaaaaaaaaaagg

SEQ ID NO: 21304 - DNA, 22 bp, Artificial Sequence
  Synthetic: FXN 3 forward 9:69042234-69042262; SaCas9
ctcagaaaaaaaaaaaaaaagg

SEQ ID NO: 21305 - DNA, 21 bp, Artificial Sequence
  Synthetic: FXN 3 forward 9:69042235-69042262; SaCas9
tcagaaaaaaaaaaaaaaagg

SEQ ID NO: 21306 - DNA, 20 bp, Artificial Sequence
  Synthetic: FXN 3 forward 9:69042236-69042262; SaCas9
cagaaaaaaaaaaaaaaagg

SEQ ID NO: 21307 - DNA, 19 bp, Artificial Sequence
  Synthetic: FXN 3 forward 9:69042237-69042262; SaCas9
agaaaaaaaaaaaaaaagg

SEQ ID NO: 21308 - DNA, 18 bp, Artificial Sequence
  Synthetic: FXN 3 forward 9:69042238-69042262; SaCas9
gaaaaaaaaaaaaaaagg

SEQ ID NO: 21309 - DNA, 25 bp, Artificial Sequence
  Synthetic: FXN 3 reverse 9:69042233-69042264; SaCas9
gtgttcttccttttttttttttttt

SEQ ID NO: 21310 - DNA, 24 bp, Artificial Sequence
  Synthetic: FXN 3 reverse 9:69042234-69042264; SaCas9
tgttcttccttttttttttttttt

SEQ ID NO: 21311 - DNA, 23 bp, Artificial Sequence
  Synthetic: FXN 3 reverse 9:69042235-69042264; SaCas9
gttcttccttttttttttttttt

SEQ ID NO: 21312 - DNA, 22 bp, Artificial Sequence
  Synthetic: FXN 3 reverse 9:69042236-69042264; SaCas9
ttcttccttttttttttttttt

SEQ ID NO: 21313 - DNA, 21 bp, Artificial Sequence
  Synthetic: FXN 3 reverse 9:69042237-69042264; SaCas9
tcttccttttttttttttttt

SEQ ID NO: 21314 - DNA, 20 bp, Artificial Sequence
  Synthetic: FXN 3 reverse 9:69042238-69042264; SaCas9
cttccttttttttttttttt

SEQ ID NO: 21315 - DNA, 19 bp, Artificial Sequence
  Synthetic: FXN 3 reverse 9:69042239-69042264; SaCas9
ttccttttttttttttttt

SEQ ID NO: 21316 - DNA, 18 bp, Artificial Sequence
  Synthetic: FXN 3 reverse 9:69042240-69042264; SaCas9
tccttttttttttttttt

SEQ ID NO: 21317 - DNA, 25 bp, Artificial Sequence
  Synthetic: FXN 3 reverse 9:69042262-69042293; SaCas9
aaagcttggaggtcaaggtcatagg

SEQ ID NO: 21318 - DNA, 24 bp, Artificial Sequence
  Synthetic: FXN 3 reverse 9:69042263-69042293; SaCas9
aagcttggaggtcaaggtcatagg

SEQ ID NO: 21319 - DNA, 23 bp, Artificial Sequence
  Synthetic: FXN 3 reverse 9:69042264-69042293; SaCas9
agcttggaggtcaaggtcatagg

SEQ ID NO: 21320 - DNA, 22 bp, Artificial Sequence
  Synthetic: FXN 3 reverse 9:69042265-69042293; SaCas9
gcttggaggtcaaggtcatagg

SEQ ID NO: 21321 - DNA, 21 bp, Artificial Sequence
  Synthetic: FXN 3 reverse 9:69042266-69042293; SaCas9
cttggaggtcaaggtcatagg

SEQ ID NO: 21322 - DNA, 20 bp, Artificial Sequence
  Synthetic: FXN 3 reverse 9:69042267-69042293; SaCas9
ttggaggtcaaggtcatagg

SEQ ID NO: 21323 - DNA, 19 bp, Artificial Sequence
  Synthetic: FXN 3 reverse 9:69042268-69042293; SaCas9
tggaggtcaaggtcatagg

SEQ ID NO: 21324 - DNA, 18 bp, Artificial Sequence
  Synthetic: FXN 3 reverse 9:69042269-69042293; SaCas9
ggaggtcaaggtcatagg

SEQ ID NO: 21325 - DNA, 25 bp, Artificial Sequence
  Synthetic: FXN 3 reverse 9:69042266-69042297; SaCas9
aggcaaagcttggaggtcaaggtca

SEQ ID NO: 21326 - DNA, 24 bp, Artificial Sequence
  Synthetic: FXN 3 reverse 9:69042267-69042297; SaCas9
ggcaaagcttggaggtcaaggtca

SEQ ID NO: 21327 - DNA, 23 bp, Artificial Sequence
  Synthetic: FXN 3 reverse 9:69042268-69042297; SaCas9
gcaaagcttggaggtcaaggtca

SEQ ID NO: 21328 - DNA, 22 bp, Artificial Sequence
  Synthetic: FXN 3 reverse 9:69042269-69042297; SaCas9
caaagcttggaggtcaaggtca

SEQ ID NO: 21329 - DNA, 21 bp, Artificial Sequence
  Synthetic: FXN 3 reverse 9:69042270-69042297; SaCas9
aaagcttggaggtcaaggtca

SEQ ID NO: 21330 - DNA, 20 bp, Artificial Sequence
  Synthetic: FXN 3 reverse 9:69042271-69042297; SaCas9
aagcttggaggtcaaggtca

SEQ ID NO: 21331 - DNA, 19 bp, Artificial Sequence
  Synthetic: FXN 3 reverse 9:69042272-69042297; SaCas9
agcttggaggtcaaggtca

SEQ ID NO: 21332 - DNA, 18 bp, Artificial Sequence
  Synthetic: FXN 3 reverse 9:69042273-69042297; SaCas9
gcttggaggtcaaggtca

SEQ ID NO: 21333 - DNA, 25 bp, Artificial Sequence
  Synthetic: FXN 3 forward 9:69042280-69042311; SaCas9
acctccaagctttgcctccctcaag

SEQ ID NO: 21334 - DNA, 24 bp, Artificial Sequence
  Synthetic: FXN 3 forward 9:69042281-69042311; SaCas9
cctccaagctttgcctccctcaag

SEQ ID NO: 21335 - DNA, 23 bp, Artificial Sequence
  Synthetic: FXN 3 forward 9:69042282-69042311; SaCas9
ctccaagctttgcctccctcaag

SEQ ID NO: 21336 - DNA, 22 bp, Artificial Sequence
  Synthetic: FXN 3 forward 9:69042283-69042311; SaCas9
tccaagctttgcctccctcaag

SEQ ID NO: 21337 - DNA, 21 bp, Artificial Sequence
  Synthetic: FXN 3 forward 9:69042284-69042311; SaCas9
ccaagctttgcctccctcaag

SEQ ID NO: 21338 - DNA, 20 bp, Artificial Sequence
  Synthetic: FXN 3 forward 9:69042285-69042311; SaCas9
caagctttgcctccctcaag

SEQ ID NO: 21339 - DNA, 19 bp, Artificial Sequence
  Synthetic: FXN 3 forward 9:69042286-69042311; SaCas9
aagctttgcctccctcaag

SEQ ID NO: 21340 - DNA, 18 bp, Artificial Sequence
  Synthetic: FXN 3 forward 9:69042287-69042311; SaCas9
agctttgcctccctcaag

SEQ ID NO: 21341 - DNA, 25 bp, Artificial Sequence
  Synthetic: FXN 3 reverse 9:69042281-69042312; SaCas9
tgttctgcttgagggaggcaaagct

SEQ ID NO: 21342 - DNA, 24 bp, Artificial Sequence
  Synthetic: FXN 3 reverse 9:69042282-69042312; SaCas9
gttctgcttgagggaggcaaagct

SEQ ID NO: 21343 - DNA, 23 bp, Artificial Sequence
  Synthetic: FXN 3 reverse 9:69042283-69042312; SaCas9
ttctgcttgagggaggcaaagct

SEQ ID NO: 21344 - DNA, 22 bp, Artificial Sequence
  Synthetic: FXN 3 reverse 9:69042284-69042312; SaCas9
tctgcttgagggaggcaaagct

SEQ ID NO: 21345 - DNA, 21 bp, Artificial Sequence
  Synthetic: FXN 3 reverse 9:69042285-69042312; SaCas9
ctgcttgagggaggcaaagct

SEQ ID NO: 21346 - DNA, 20 bp, Artificial Sequence
  Synthetic: FXN 3 reverse 9:69042286-69042312; SaCas9
tgcttgagggaggcaaagct

SEQ ID NO: 21347 - DNA, 19 bp, Artificial Sequence
  Synthetic: FXN 3 reverse 9:69042287-69042312; SaCas9
gcttgagggaggcaaagct

SEQ ID NO: 21348 - DNA, 18 bp, Artificial Sequence
  Synthetic: FXN 3 reverse 9:69042288-69042312; SaCas9
cttgagggaggcaaagct

SEQ ID NO: 21349 - DNA, 25 bp, Artificial Sequence
  Synthetic: FXN 3 reverse 9:69042282-69042313; SaCas9
ctgttctgcttgagggaggcaaagc

SEQ ID NO: 21350 - DNA, 24 bp, Artificial Sequence
  Synthetic: FXN 3 reverse 9:69042283-69042313; SaCas9
tgttctgcttgagggaggcaaagc

SEQ ID NO: 21351 - DNA, 23 bp, Artificial Sequence
  Synthetic: FXN 3 reverse 9:69042284-69042313; SaCas9
gttctgcttgagggaggcaaagc

SEQ ID NO: 21352 - DNA, 22 bp, Artificial Sequence
  Synthetic: FXN 3 reverse 9:69042285-69042313; SaCas9
ttctgcttgagggaggcaaagc

SEQ ID NO: 21353 - DNA, 21 bp, Artificial Sequence
  Synthetic: FXN 3 reverse 9:69042286-69042313; SaCas9
tctgcttgagggaggcaaagc

SEQ ID NO: 21354 - DNA, 20 bp, Artificial Sequence
  Synthetic: FXN 3 reverse 9:69042287-69042313; SaCas9
ctgcttgagggaggcaaagc

SEQ ID NO: 21355 - DNA, 19 bp, Artificial Sequence
  Synthetic: FXN 3 reverse 9:69042288-69042313; SaCas9
tgcttgagggaggcaaagc

SEQ ID NO: 21356 - DNA, 18 bp, Artificial Sequence
  Synthetic: FXN 3 reverse 9:69042289-69042313; SaCas9
gcttgagggaggcaaagc

SEQ ID NO: 21357 - DNA, 25 bp, Artificial Sequence
  Synthetic: FXN 3 forward 9:69042285-69042316; SaCas9
caagctttgcctccctcaagcagaa

SEQ ID NO: 21358 - DNA, 24 bp, Artificial Sequence
  Synthetic: FXN 3 forward 9:69042286-69042316; SaCas9
aagctttgcctccctcaagcagaa

SEQ ID NO: 21359 - DNA, 23 bp, Artificial Sequence
  Synthetic: FXN 3 forward 9:69042287-69042316; SaCas9
agctttgcctccctcaagcagaa

SEQ ID NO: 21360 - DNA, 22 bp, Artificial Sequence
  Synthetic: FXN 3 forward 9:69042288-69042316; SaCas9
gctttgcctccctcaagcagaa

SEQ ID NO: 21361 - DNA, 21 bp, Artificial Sequence
  Synthetic: FXN 3 forward 9:69042289-69042316; SaCas9
ctttgcctccctcaagcagaa

SEQ ID NO: 21362 - DNA, 20 bp, Artificial Sequence
  Synthetic: FXN 3 forward 9:69042290-69042316; SaCas9
tttgcctccctcaagcagaa

SEQ ID NO: 21363 - DNA, 19 bp, Artificial Sequence
  Synthetic: FXN 3 forward 9:69042291-69042316; SaCas9
ttgcctccctcaagcagaa

SEQ ID NO: 21364 - DNA, 18 bp, Artificial Sequence
  Synthetic: FXN 3 forward 9:69042292-69042316; SaCas9
tgcctccctcaagcagaa

SEQ ID NO: 21365 - DNA, 25 bp, Artificial Sequence
  Synthetic: FXN 3 forward 9:69042289-69042320; SaCas9
ctttgcctccctcaagcagaacaga

SEQ ID NO: 21366 - DNA, 24 bp, Artificial Sequence
  Synthetic: FXN 3 forward 9:69042290-69042320; SaCas9
tttgcctccctcaagcagaacaga

SEQ ID NO: 21367 - DNA, 23 bp, Artificial Sequence
  Synthetic: FXN 3 forward 9:69042291-69042320; SaCas9
ttgcctccctcaagcagaacaga

SEQ ID NO: 21368 - DNA, 22 bp, Artificial Sequence
  Synthetic: FXN 3 forward 9:69042292-69042320; SaCas9
tgcctccctcaagcagaacaga

SEQ ID NO: 21369 - DNA, 21 bp, Artificial Sequence
  Synthetic: FXN 3 forward 9:69042293-69042320; SaCas9
gcctccctcaagcagaacaga

SEQ ID NO: 21370 - DNA, 20 bp, Artificial Sequence
  Synthetic: FXN 3 forward 9:69042294-69042320; SaCas9
cctccctcaagcagaacaga

SEQ ID NO: 21371 - DNA, 19 bp, Artificial Sequence
  Synthetic: FXN 3 forward 9:69042295-69042320; SaCas9
ctccctcaagcagaacaga

SEQ ID NO: 21372 - DNA, 18 bp, Artificial Sequence
  Synthetic: FXN 3 forward 9:69042296-69042320; SaCas9
tccctcaagcagaacaga

SEQ ID NO: 21373 - DNA, 25 bp, Artificial Sequence
  Synthetic: FXN 3 forward 9:69042290-69042321; SaCas9
tttgcctccctcaagcagaacagaa

SEQ ID NO: 21374 - DNA, 24 bp, Artificial Sequence
  Synthetic: FXN 3 forward 9:69042291-69042321; SaCas9
ttgcctccctcaagcagaacagaa

SEQ ID NO: 21375 - DNA, 23 bp, Artificial Sequence
  Synthetic: FXN 3 forward 9:69042292-69042321; SaCas9
tgcctccctcaagcagaacagaa

SEQ ID NO: 21376 - DNA, 22 bp, Artificial Sequence
  Synthetic: FXN 3 forward 9:69042293-69042321; SaCas9
gcctccctcaagcagaacagaa

SEQ ID NO: 21377 - DNA, 21 bp, Artificial Sequence
  Synthetic: FXN 3 forward 9:69042294-69042321; SaCas9
cctccctcaagcagaacagaa

SEQ ID NO: 21378 - DNA, 20 bp, Artificial Sequence
  Synthetic: FXN 3 forward 9:69042295-69042321; SaCas9
ctccctcaagcagaacagaa

SEQ ID NO: 21379 - DNA, 19 bp, Artificial Sequence
  Synthetic: FXN 3 forward 9:69042296-69042321; SaCas9
tccctcaagcagaacagaa

SEQ ID NO: 21380 - DNA, 18 bp, Artificial Sequence
  Synthetic: FXN 3 forward 9:69042297-69042321; SaCas9
ccctcaagcagaacagaa

SEQ ID NO: 21381 - DNA, 25 bp, Artificial Sequence
  Synthetic: FXN 3 reverse 9:69042294-69042325; SaCas9
ggaggctccattctgttctgcttga

SEQ ID NO: 21382 - DNA, 24 bp, Artificial Sequence
  Synthetic: FXN 3 reverse 9:69042295-69042325; SaCas9
gaggctccattctgttctgcttga

SEQ ID NO: 21383 - DNA, 23 bp, Artificial Sequence
  Synthetic: FXN 3 reverse 9:69042296-69042325; SaCas9
aggctccattctgttctgcttga

SEQ ID NO: 21384 - DNA, 22 bp, Artificial Sequence
  Synthetic: FXN 3 reverse 9:69042297-69042325; SaCas9
ggctccattctgttctgcttga

SEQ ID NO: 21385 - DNA, 21 bp, Artificial Sequence
  Synthetic: FXN 3 reverse 9:69042298-69042325; SaCas9
gctccattctgttctgcttga

SEQ ID NO: 21386 - DNA, 20 bp, Artificial Sequence
  Synthetic: FXN 3 reverse 9:69042299-69042325; SaCas9
ctccattctgttctgcttga

SEQ ID NO: 21387 - DNA, 19 bp, Artificial Sequence
  Synthetic: FXN 3 reverse 9:69042300-69042325; SaCas9
tccattctgttctgcttga

SEQ ID NO: 21388 - DNA, 18 bp, Artificial Sequence
  Synthetic: FXN 3 reverse 9:69042301-69042325; SaCas9
ccattctgttctgcttga

SEQ ID NO: 21389 - DNA, 25 bp, Artificial Sequence
  Synthetic: FXN 3 reverse 9:69042295-69042326; SaCas9
gggaggctccattctgttctgcttg

SEQ ID NO: 21390 - DNA, 24 bp, Artificial Sequence
  Synthetic: FXN 3 reverse 9:69042296-69042326; SaCas9
ggaggctccattctgttctgcttg

SEQ ID NO: 21391 - DNA, 23 bp, Artificial Sequence
  Synthetic: FXN 3 reverse 9:69042297-69042326; SaCas9
gaggctccattctgttctgcttg

SEQ ID NO: 21392 - DNA, 22 bp, Artificial Sequence
  Synthetic: FXN 3 reverse 9:69042298-69042326; SaCas9
aggctccattctgttctgcttg

SEQ ID NO: 21393 - DNA, 21 bp, Artificial Sequence
  Synthetic: FXN 3 reverse 9:69042299-69042326; SaCas9
ggctccattctgttctgcttg

SEQ ID NO: 21394 - DNA, 20 bp, Artificial Sequence
  Synthetic: FXN 3 reverse 9:69042300-69042326; SaCas9
gctccattctgttctgcttg

SEQ ID NO: 21395 - DNA, 19 bp, Artificial Sequence
  Synthetic: FXN 3 reverse 9:69042301-69042326; SaCas9
ctccattctgttctgcttg

SEQ ID NO: 21396 - DNA, 18 bp, Artificial Sequence
  Synthetic: FXN 3 reverse 9:69042302-69042326; SaCas9
tccattctgttctgcttg

SEQ ID NO: 21397 - DNA, 25 bp, Artificial Sequence
  Synthetic: FXN 3 reverse 9:69042296-69042327; SaCas9
agggaggctccattctgttctgctt

SEQ ID NO: 21398 - DNA, 24 bp, Artificial Sequence
  Synthetic: FXN 3 reverse 9:69042297-69042327; SaCas9
gggaggctccattctgttctgctt

SEQ ID NO: 21399 - DNA, 23 bp, Artificial Sequence
  Synthetic: FXN 3 reverse 9:69042298-69042327; SaCas9
ggaggctccattctgttctgctt

SEQ ID NO: 21400 - DNA, 22 bp, Artificial Sequence
  Synthetic: FXN 3 reverse 9:69042299-69042327; SaCas9
gaggctccattctgttctgctt

SEQ ID NO: 21401 - DNA, 21 bp, Artificial Sequence
  Synthetic: FXN 3 reverse 9:69042300-69042327; SaCas9
aggctccattctgttctgctt

SEQ ID NO: 21402 - DNA, 20 bp, Artificial Sequence
  Synthetic: FXN 3 reverse 9:69042301-69042327; SaCas9
ggctccattctgttctgctt

SEQ ID NO: 21403 - DNA, 19 bp, Artificial Sequence
  Synthetic: FXN 3 reverse 9:69042302-69042327; SaCas9
gctccattctgttctgctt

SEQ ID NO: 21404 - DNA, 18 bp, Artificial Sequence
  Synthetic: FXN 3 reverse 9:69042303-69042327; SaCas9
ctccattctgttctgctt

SEQ ID NO: 21405 - DNA, 25 bp, Artificial Sequence
  Synthetic: FXN 3 reverse 9:69042298-69042329; SaCas9
taagggaggctccattctgttctgc

SEQ ID NO: 21406 - DNA, 24 bp, Artificial Sequence
  Synthetic: FXN 3 reverse 9:69042299-69042329; SaCas9
aagggaggctccattctgttctgc

SEQ ID NO: 21407 - DNA, 23 bp, Artificial Sequence
  Synthetic: FXN 3 reverse 9:69042300-69042329; SaCas9
agggaggctccattctgttctgc

SEQ ID NO: 21408 - DNA, 22 bp, Artificial Sequence
  Synthetic: FXN 3 reverse 9:69042301-69042329; SaCas9
gggaggctccattctgttctgc

SEQ ID NO: 21409 - DNA, 21 bp, Artificial Sequence
  Synthetic: FXN 3 reverse 9:69042302-69042329; SaCas9
ggaggctccattctgttctgc

SEQ ID NO: 21410 - DNA, 20 bp, Artificial Sequence
  Synthetic: FXN 3 reverse 9:69042303-69042329; SaCas9
gaggctccattctgttctgc

SEQ ID NO: 21411 - DNA, 19 bp, Artificial Sequence
  Synthetic: FXN 3 reverse 9:69042304-69042329; SaCas9
aggctccattctgttctgc

SEQ ID NO: 21412 - DNA, 18 bp, Artificial Sequence
  Synthetic: FXN 3 reverse 9:69042305-69042329; SaCas9
ggctccattctgttctgc

SEQ ID NO: 21413 - DNA, 25 bp, Artificial Sequence
  Synthetic: FXN 3 forward 9:69042306-69042337; SaCas9
agaacagaatggagcctcccttagg

SEQ ID NO: 21414 - DNA, 24 bp, Artificial Sequence
  Synthetic: FXN 3 forward 9:69042307-69042337; SaCas9
gaacagaatggagcctcccttagg

SEQ ID NO: 21415 - DNA, 23 bp, Artificial Sequence
  Synthetic: FXN 3 forward 9:69042308-69042337; SaCas9
aacagaatggagcctcccttagg

SEQ ID NO: 21416 - DNA, 22 bp, Artificial Sequence
  Synthetic: FXN 3 forward 9:69042309-69042337; SaCas9
acagaatggagcctcccttagg

SEQ ID NO: 21417 - DNA, 21 bp, Artificial Sequence
  Synthetic: FXN 3 forward 9:69042310-69042337; SaCas9
cagaatggagcctcccttagg

SEQ ID NO: 21418 - DNA, 20 bp, Artificial Sequence
  Synthetic: FXN 3 forward 9:69042311-69042337; SaCas9
agaatggagcctcccttagg

SEQ ID NO: 21419 - DNA, 19 bp, Artificial Sequence
  Synthetic: FXN 3 forward 9:69042312-69042337; SaCas9
gaatggagcctcccttagg

SEQ ID NO: 21420 - DNA, 18 bp, Artificial Sequence
  Synthetic: FXN 3 forward 9:69042313-69042337; SaCas9
aatggagcctcccttagg

SEQ ID NO: 21421 - DNA, 25 bp, Artificial Sequence
  Synthetic: FXN 3 forward 9:69042311-69042342; SaCas9
agaatggagcctcccttaggcagag

SEQ ID NO: 21422 - DNA, 24 bp, Artificial Sequence
  Synthetic: FXN 3 forward 9:69042312-69042342; SaCas9
gaatggagcctcccttaggcagag

SEQ ID NO: 21423 - DNA, 23 bp, Artificial Sequence
  Synthetic: FXN 3 forward 9:69042313-69042342; SaCas9
aatggagcctcccttaggcagag

SEQ ID NO: 21424 - DNA, 22 bp, Artificial Sequence
  Synthetic: FXN 3 forward 9:69042314-69042342; SaCas9
atggagcctcccttaggcagag

SEQ ID NO: 21425 - DNA, 21 bp, Artificial Sequence
  Synthetic: FXN 3 forward 9:69042315-69042342; SaCas9
tggagcctcccttaggcagag

SEQ ID NO: 21426 - DNA, 20 bp, Artificial Sequence
  Synthetic: FXN 3 forward 9:69042316-69042342; SaCas9
ggagcctcccttaggcagag

SEQ ID NO: 21427 - DNA, 19 bp, Artificial Sequence
  Synthetic: FXN 3 forward 9:69042317-69042342; SaCas9
gagcctcccttaggcagag

SEQ ID NO: 21428 - DNA, 18 bp, Artificial Sequence
  Synthetic: FXN 3 forward 9:69042318-69042342; SaCas9
agcctcccttaggcagag

SEQ ID NO: 21429 - DNA, 25 bp, Artificial Sequence
  Synthetic: FXN 3 forward 9:69042312-69042343; SaCas9
gaatggagcctcccttaggcagagg

SEQ ID NO: 21430 - DNA, 24 bp, Artificial Sequence
  Synthetic: FXN 3 forward 9:69042313-69042343; SaCas9
aatggagcctcccttaggcagagg

SEQ ID NO: 21431 - DNA, 23 bp, Artificial Sequence
  Synthetic: FXN 3 forward 9:69042314-69042343; SaCas9
atggagcctcccttaggcagagg

SEQ ID NO: 21432 - DNA, 22 bp, Artificial Sequence
  Synthetic: FXN 3 forward 9:69042315-69042343; SaCas9
tggagcctcccttaggcagagg

SEQ ID NO: 21433 - DNA, 21 bp, Artificial Sequence
  Synthetic: FXN 3 forward 9:69042316-69042343; SaCas9
ggagcctcccttaggcagagg

SEQ ID NO: 21434 - DNA, 20 bp, Artificial Sequence
  Synthetic: FXN 3 forward 9:69042317-69042343; SaCas9
gagcctcccttaggcagagg

SEQ ID NO: 21435 - DNA, 19 bp, Artificial Sequence
  Synthetic: FXN 3 forward 9:69042318-69042343; SaCas9
agcctcccttaggcagagg

SEQ ID NO: 21436 - DNA, 18 bp, Artificial Sequence
  Synthetic: FXN 3 forward 9:69042319-69042343; SaCas9
gcctcccttaggcagagg

SEQ ID NO: 21437 - DNA, 25 bp, Artificial Sequence
  Synthetic: FXN 3 reverse 9:69042320-69042351; SaCas9
gaggcaaacttccgcctctgcctaa

SEQ ID NO: 21438 - DNA, 24 bp, Artificial Sequence
  Synthetic: FXN 3 reverse 9:69042321-69042351; SaCas9
aggcaaacttccgcctctgcctaa

SEQ ID NO: 21439 - DNA, 23 bp, Artificial Sequence
  Synthetic: FXN 3 reverse 9:69042322-69042351; SaCas9
ggcaaacttccgcctctgcctaa

SEQ ID NO: 21440 - DNA, 22 bp, Artificial Sequence
  Synthetic: FXN 3 reverse 9:69042323-69042351; SaCas9
gcaaacttccgcctctgcctaa

SEQ ID NO: 21441 - DNA, 21 bp, Artificial Sequence
  Synthetic: FXN 3 reverse 9:69042324-69042351; SaCas9
caaacttccgcctctgcctaa

SEQ ID NO: 21442 - DNA, 20 bp, Artificial Sequence
  Synthetic: FXN 3 reverse 9:69042325-69042351; SaCas9
aaacttccgcctctgcctaa

SEQ ID NO: 21443 - DNA, 19 bp, Artificial Sequence
  Synthetic: FXN 3 reverse 9:69042326-69042351; SaCas9
aacttccgcctctgcctaa

SEQ ID NO: 21444 - DNA, 18 bp, Artificial Sequence
  Synthetic: FXN 3 reverse 9:69042327-69042351; SaCas9
acttccgcctctgcctaa

SEQ ID NO: 21445 - DNA, 25 bp, Artificial Sequence
  Synthetic: FXN 3 reverse 9:69042321-69042352; SaCas9
agaggcaaacttccgcctctgccta

SEQ ID NO: 21446 - DNA, 24 bp, Artificial Sequence
  Synthetic: FXN 3 reverse 9:69042322-69042352; SaCas9
gaggcaaacttccgcctctgccta

SEQ ID NO: 21447 - DNA, 23 bp, Artificial Sequence
  Synthetic: FXN 3 reverse 9:69042323-69042352; SaCas9
aggcaaacttccgcctctgccta

SEQ ID NO: 21448 - DNA, 22 bp, Artificial Sequence
  Synthetic: FXN 3 reverse 9:69042324-69042352; SaCas9
ggcaaacttccgcctctgccta

SEQ ID NO: 21449 - DNA, 21 bp, Artificial Sequence
  Synthetic: FXN 3 reverse 9:69042325-69042352; SaCas9
gcaaacttccgcctctgccta

SEQ ID NO: 21450 - DNA, 20 bp, Artificial Sequence
  Synthetic: FXN 3 reverse 9:69042326-69042352; SaCas9
caaacttccgcctctgccta

SEQ ID NO: 21451 - DNA, 19 bp, Artificial Sequence
  Synthetic: FXN 3 reverse 9:69042327-69042352; SaCas9
aaacttccgcctctgccta

SEQ ID NO: 21452 - DNA, 18 bp, Artificial Sequence
  Synthetic: FXN 3 reverse 9:69042328-69042352; SaCas9
aacttccgcctctgccta

SEQ ID NO: 21453 - DNA, 25 bp, Artificial Sequence
  Synthetic: FXN 3 reverse 9:69042322-69042353; SaCas9
gagaggcaaacttccgcctctgcct

SEQ ID NO: 21454 - DNA, 24 bp, Artificial Sequence
  Synthetic: FXN 3 reverse 9:69042323-69042353; SaCas9
agaggcaaacttccgcctctgcct

SEQ ID NO: 21455 - DNA, 23 bp, Artificial Sequence
  Synthetic: FXN 3 reverse 9:69042324-69042353; SaCas9
gaggcaaacttccgcctctgcct

SEQ ID NO: 21456 - DNA, 22 bp, Artificial Sequence
  Synthetic: FXN 3 reverse 9:69042325-69042353; SaCas9
aggcaaacttccgcctctgcct

SEQ ID NO: 21457 - DNA, 21 bp, Artificial Sequence
  Synthetic: FXN 3 reverse 9:69042326-69042353; SaCas9
ggcaaacttccgcctctgcct

SEQ ID NO: 21458 - DNA, 20 bp, Artificial Sequence
  Synthetic: FXN 3 reverse 9:69042327-69042353; SaCas9
gcaaacttccgcctctgcct

SEQ ID NO: 21459 - DNA, 19 bp, Artificial Sequence
  Synthetic: FXN 3 reverse 9:69042328-69042353; SaCas9
caaacttccgcctctgcct

SEQ ID NO: 21460 - DNA, 18 bp, Artificial Sequence
  Synthetic: FXN 3 reverse 9:69042329-69042353; SaCas9
aaacttccgcctctgcct

SEQ ID NO: 21461 - DNA, 25 bp, Artificial Sequence
  Synthetic: FXN 3 reverse 9:69042347-69042378; SaCas9
tgaacaaaagaatggagaactaggt

SEQ ID NO: 21462 - DNA, 24 bp, Artificial Sequence
  Synthetic: FXN 3 reverse 9:69042348-69042378; SaCas9
gaacaaaagaatggagaactaggt

SEQ ID NO: 21463 - DNA, 23 bp, Artificial Sequence
  Synthetic: FXN 3 reverse 9:69042349-69042378; SaCas9
aacaaaagaatggagaactaggt

SEQ ID NO: 21464 - DNA, 22 bp, Artificial Sequence
  Synthetic: FXN 3 reverse 9:69042350-69042378; SaCas9
acaaaagaatggagaactaggt

SEQ ID NO: 21465 - DNA, 21 bp, Artificial Sequence
  Synthetic: FXN 3 reverse 9:69042351-69042378; SaCas9
caaaagaatggagaactaggt

SEQ ID NO: 21466 - DNA, 20 bp, Artificial Sequence
  Synthetic: FXN 3 reverse 9:69042352-69042378; SaCas9
aaaagaatggagaactaggt

SEQ ID NO: 21467 - DNA, 19 bp, Artificial Sequence
  Synthetic: FXN 3 reverse 9:69042353-69042378; SaCas9
aaagaatggagaactaggt

SEQ ID NO: 21468 - DNA, 18 bp, Artificial Sequence
  Synthetic: FXN 3 reverse 9:69042354-69042378; SaCas9
aagaatggagaactaggt

SEQ ID NO: 21469 - DNA, 25 bp, Artificial Sequence
  Synthetic: FXN 3 reverse 9:69042349-69042380; SaCas9
tctgaacaaaagaatggagaactag

SEQ ID NO: 21470 - DNA, 24 bp, Artificial Sequence
  Synthetic: FXN 3 reverse 9:69042350-69042380; SaCas9
ctgaacaaaagaatggagaactag

SEQ ID NO: 21471 - DNA, 23 bp, Artificial Sequence
  Synthetic: FXN 3 reverse 9:69042351-69042380; SaCas9
tgaacaaaagaatggagaactag

SEQ ID NO: 21472 - DNA, 22 bp, Artificial Sequence
  Synthetic: FXN 3 reverse 9:69042352-69042380; SaCas9
gaacaaaagaatggagaactag

SEQ ID NO: 21473 - DNA, 21 bp, Artificial Sequence
  Synthetic: FXN 3 reverse 9:69042353-69042380; SaCas9
aacaaaagaatggagaactag

SEQ ID NO: 21474 - DNA, 20 bp, Artificial Sequence
  Synthetic: FXN 3 reverse 9:69042354-69042380; SaCas9
acaaaagaatggagaactag

SEQ ID NO: 21475 - DNA, 19 bp, Artificial Sequence
  Synthetic: FXN 3 reverse 9:69042355-69042380; SaCas9
caaaagaatggagaactag

SEQ ID NO: 21476 - DNA, 18 bp, Artificial Sequence
  Synthetic: FXN 3 reverse 9:69042356-69042380; SaCas9
aaaagaatggagaactag

SEQ ID NO: 21477 - DNA, 25 bp, Artificial Sequence
  Synthetic: FXN 3 forward 9:69042351-69042382; SaCas9
tcacctagttctccattcttttgtt

SEQ ID NO: 21478 - DNA, 24 bp, Artificial Sequence
  Synthetic: FXN 3 forward 9:69042352-69042382; SaCas9
cacctagttctccattcttttgtt

SEQ ID NO: 21479 - DNA, 23 bp, Artificial Sequence
  Synthetic: FXN 3 forward 9:69042353-69042382; SaCas9
acctagttctccattcttttgtt

SEQ ID NO: 21480 - DNA, 22 bp, Artificial Sequence
  Synthetic: FXN 3 forward 9:69042354-69042382; SaCas9
cctagttctccattcttttgtt

SEQ ID NO: 21481 - DNA, 21 bp, Artificial Sequence
  Synthetic: FXN 3 forward 9:69042355-69042382; SaCas9
ctagttctccattcttttgtt

SEQ ID NO: 21482 - DNA, 20 bp, Artificial Sequence
  Synthetic: FXN 3 forward 9:69042356-69042382; SaCas9
tagttctccattcttttgtt

SEQ ID NO: 21483 - DNA, 19 bp, Artificial Sequence
  Synthetic: FXN 3 forward 9:69042357-69042382; SaCas9
agttctccattcttttgtt

SEQ ID NO: 21484 - DNA, 18 bp, Artificial Sequence
  Synthetic: FXN 3 forward 9:69042358-69042382; SaCas9
gttctccattcttttgtt

SEQ ID NO: 21485 - DNA, 25 bp, Artificial Sequence
  Synthetic: FXN 3 forward 9:69042357-69042388; SaCas9
agttctccattcttttgttcagagc

SEQ ID NO: 21486 - DNA, 24 bp, Artificial Sequence
  Synthetic: FXN 3 forward 9:69042358-69042388; SaCas9
gttctccattcttttgttcagagc

SEQ ID NO: 21487 - DNA, 23 bp, Artificial Sequence
  Synthetic: FXN 3 forward 9:69042359-69042388; SaCas9
ttctccattcttttgttcagagc

SEQ ID NO: 21488 - DNA, 22 bp, Artificial Sequence
  Synthetic: FXN 3 forward 9:69042360-69042388; SaCas9
tctccattcttttgttcagagc

SEQ ID NO: 21489 - DNA, 21 bp, Artificial Sequence
  Synthetic: FXN 3 forward 9:69042361-69042388; SaCas9
ctccattcttttgttcagagc

SEQ ID NO: 21490 - DNA, 20 bp, Artificial Sequence
  Synthetic: FXN 3 forward 9:69042362-69042388; SaCas9
tccattcttttgttcagagc

SEQ ID NO: 21491 - DNA, 19 bp, Artificial Sequence
  Synthetic: FXN 3 forward 9:69042363-69042388; SaCas9
ccattcttttgttcagagc

SEQ ID NO: 21492 - DNA, 18 bp, Artificial Sequence
  Synthetic: FXN 3 forward 9:69042364-69042388; SaCas9
cattcttttgttcagagc

SEQ ID NO: 21493 - DNA, 25 bp, Artificial Sequence
  Synthetic: FXN 3 reverse 9:69042358-69042389; SaCas9
tattcaggctctgaacaaaagaatg

SEQ ID NO: 21494 - DNA, 24 bp, Artificial Sequence
  Synthetic: FXN 3 reverse 9:69042359-69042389; SaCas9
attcaggctctgaacaaaagaatg

SEQ ID NO: 21495 - DNA, 23 bp, Artificial Sequence
  Synthetic: FXN 3 reverse 9:69042360-69042389; SaCas9
ttcaggctctgaacaaaagaatg

SEQ ID NO: 21496 - DNA, 22 bp, Artificial Sequence
  Synthetic: FXN 3 reverse 9:69042361-69042389; SaCas9
tcaggctctgaacaaaagaatg

SEQ ID NO: 21497 - DNA, 21 bp, Artificial Sequence
  Synthetic: FXN 3 reverse 9:69042362-69042389; SaCas9
caggctctgaacaaaagaatg

SEQ ID NO: 21498 - DNA, 20 bp, Artificial Sequence
  Synthetic: FXN 3 reverse 9:69042363-69042389; SaCas9
aggctctgaacaaaagaatg

SEQ ID NO: 21499 - DNA, 19 bp, Artificial Sequence
  Synthetic: FXN 3 reverse 9:69042364-69042389; SaCas9
ggctctgaacaaaagaatg

SEQ ID NO: 21500 - DNA, 18 bp, Artificial Sequence
  Synthetic: FXN 3 reverse 9:69042365-69042389; SaCas9
gctctgaacaaaagaatg

SEQ ID NO: 21501 - DNA, 25 bp, Artificial Sequence
  Synthetic: FXN 3 reverse 9:69042360-69042391; SaCas9
ggtattcaggctctgaacaaaagaa

SEQ ID NO: 21502 - DNA, 24 bp, Artificial Sequence
  Synthetic: FXN 3 reverse 9:69042361-69042391; SaCas9
gtattcaggctctgaacaaaagaa

SEQ ID NO: 21503 - DNA, 23 bp, Artificial Sequence
  Synthetic: FXN 3 reverse 9:69042362-69042391; SaCas9
tattcaggctctgaacaaaagaa

SEQ ID NO: 21504 - DNA, 22 bp, Artificial Sequence
  Synthetic: FXN 3 reverse 9:69042363-69042391; SaCas9
attcaggctctgaacaaaagaa

SEQ ID NO: 21505 - DNA, 21 bp, Artificial Sequence
  Synthetic: FXN 3 reverse 9:69042364-69042391; SaCas9
ttcaggctctgaacaaaagaa

SEQ ID NO: 21506 - DNA, 20 bp, Artificial Sequence
  Synthetic: FXN 3 reverse 9:69042365-69042391; SaCas9
tcaggctctgaacaaaagaa

SEQ ID NO: 21507 - DNA, 19 bp, Artificial Sequence
  Synthetic: FXN 3 reverse 9:69042366-69042391; SaCas9
caggctctgaacaaaagaa

SEQ ID NO: 21508 - DNA, 18 bp, Artificial Sequence
  Synthetic: FXN 3 reverse 9:69042367-69042391; SaCas9
aggctctgaacaaaagaa

SEQ ID NO: 21509 - DNA, 25 bp, Artificial Sequence
  Synthetic: FXN 3 reverse 9:69042361-69042392; SaCas9
gggtattcaggctctgaacaaaaga

SEQ ID NO: 21510 - DNA, 24 bp, Artificial Sequence
  Synthetic: FXN 3 reverse 9:69042362-69042392; SaCas9
ggtattcaggctctgaacaaaaga

SEQ ID NO: 21511 - DNA, 23 bp, Artificial Sequence
  Synthetic: FXN 3 reverse 9:69042363-69042392; SaCas9
gtattcaggctctgaacaaaaga

SEQ ID NO: 21512 - DNA, 22 bp, Artificial Sequence
  Synthetic: FXN 3 reverse 9:69042364-69042392; SaCas9
tattcaggctctgaacaaaaga

SEQ ID NO: 21513 - DNA, 21 bp, Artificial Sequence
  Synthetic: FXN 3 reverse 9:69042365-69042392; SaCas9
attcaggctctgaacaaaaga

SEQ ID NO: 21514 - DNA, 20 bp, Artificial Sequence
  Synthetic: FXN 3 reverse 9:69042366-69042392; SaCas9
ttcaggctctgaacaaaaga

SEQ ID NO: 21515 - DNA, 19 bp, Artificial Sequence
  Synthetic: FXN 3 reverse 9:69042367-69042392; SaCas9
tcaggctctgaacaaaaga

SEQ ID NO: 21516 - DNA, 18 bp, Artificial Sequence
  Synthetic: FXN 3 reverse 9:69042368-69042392; SaCas9
caggctctgaacaaaaga

SEQ ID NO: 21517 - DNA, 25 bp, Artificial Sequence
  Synthetic: FXN 3 reverse 9:69042365-69042396; SaCas9
ctgagggtattcaggctctgaacaa

SEQ ID NO: 21518 - DNA, 24 bp, Artificial Sequence
  Synthetic: FXN 3 reverse 9:69042366-69042396; SaCas9
tgagggtattcaggctctgaacaa

SEQ ID NO: 21519 - DNA, 23 bp, Artificial Sequence
  Synthetic: FXN 3 reverse 9:69042367-69042396; SaCas9
gagggtattcaggctctgaacaa

SEQ ID NO: 21520 - DNA, 22 bp, Artificial Sequence
  Synthetic: FXN 3 reverse 9:69042368-69042396; SaCas9
agggtattcaggctctgaacaa

SEQ ID NO: 21521 - DNA, 21 bp, Artificial Sequence
  Synthetic: FXN 3 reverse 9:69042369-69042396; SaCas9
gggtattcaggctctgaacaa

SEQ ID NO: 21522 - DNA, 20 bp, Artificial Sequence
  Synthetic: FXN 3 reverse 9:69042370-69042396; SaCas9
ggtattcaggctctgaacaa

SEQ ID NO: 21523 - DNA, 19 bp, Artificial Sequence
  Synthetic: FXN 3 reverse 9:69042371-69042396; SaCas9
gtattcaggctctgaacaa

SEQ ID NO: 21524 - DNA, 18 bp, Artificial Sequence
  Synthetic: FXN 3 reverse 9:69042372-69042396; SaCas9
tattcaggctctgaacaa

SEQ ID NO: 21525 - DNA, 25 bp, Artificial Sequence
  Synthetic: FXN 3 reverse 9:69042373-69042404; SaCas9
tacagagcctgagggtattcaggct

SEQ ID NO: 21526 - DNA, 24 bp, Artificial Sequence
  Synthetic: FXN 3 reverse 9:69042374-69042404; SaCas9
acagagcctgagggtattcaggct

SEQ ID NO: 21527 - DNA, 23 bp, Artificial Sequence
  Synthetic: FXN 3 reverse 9:69042375-69042404; SaCas9
cagagcctgagggtattcaggct

SEQ ID NO: 21528 - DNA, 22 bp, Artificial Sequence
  Synthetic: FXN 3 reverse 9:69042376-69042404; SaCas9
agagcctgagggtattcaggct

SEQ ID NO: 21529 - DNA, 21 bp, Artificial Sequence
  Synthetic: FXN 3 reverse 9:69042377-69042404; SaCas9
gagcctgagggtattcaggct

SEQ ID NO: 21530 - DNA, 20 bp, Artificial Sequence
  Synthetic: FXN 3 reverse 9:69042378-69042404; SaCas9
agcctgagggtattcaggct

SEQ ID NO: 21531 - DNA, 19 bp, Artificial Sequence
  Synthetic: FXN 3 reverse 9:69042379-69042404; SaCas9
gcctgagggtattcaggct

SEQ ID NO: 21532 - DNA, 18 bp, Artificial Sequence
  Synthetic: FXN 3 reverse 9:69042380-69042404; SaCas9
cctgagggtattcaggct

SEQ ID NO: 21533 - DNA, 25 bp, Artificial Sequence
  Synthetic: FXN 3 forward 9:69042380-69042411; SaCas9
gcctgaataccctcaggctctgtac

SEQ ID NO: 21534 - DNA, 24 bp, Artificial Sequence
  Synthetic: FXN 3 forward 9:69042381-69042411; SaCas9
cctgaataccctcaggctctgtac

SEQ ID NO: 21535 - DNA, 23 bp, Artificial Sequence
  Synthetic: FXN 3 forward 9:69042382-69042411; SaCas9
ctgaataccctcaggctctgtac

SEQ ID NO: 21536 - DNA, 22 bp, Artificial Sequence
  Synthetic: FXN 3 forward 9:69042383-69042411; SaCas9
tgaataccctcaggctctgtac

SEQ ID NO: 21537 - DNA, 21 bp, Artificial Sequence
  Synthetic: FXN 3 forward 9:69042384-69042411; SaCas9
gaataccctcaggctctgtac

SEQ ID NO: 21538 - DNA, 20 bp, Artificial Sequence
  Synthetic: FXN 3 forward 9:69042385-69042411; SaCas9
aataccctcaggctctgtac

SEQ ID NO: 21539 - DNA, 19 bp, Artificial Sequence
  Synthetic: FXN 3 forward 9:69042386-69042411; SaCas9
ataccctcaggctctgtac

SEQ ID NO: 21540 - DNA, 18 bp, Artificial Sequence
  Synthetic: FXN 3 forward 9:69042387-69042411; SaCas9
taccctcaggctctgtac

SEQ ID NO: 21541 - DNA, 25 bp, Artificial Sequence
  Synthetic: FXN 3 forward 9:69042381-69042412; SaCas9
cctgaataccctcaggctctgtact

SEQ ID NO: 21542 - DNA, 24 bp, Artificial Sequence
  Synthetic: FXN 3 forward 9:69042382-69042412; SaCas9
ctgaataccctcaggctctgtact

SEQ ID NO: 21543 - DNA, 23 bp, Artificial Sequence
  Synthetic: FXN 3 forward 9:69042383-69042412; SaCas9
tgaataccctcaggctctgtact

SEQ ID NO: 21544 - DNA, 22 bp, Artificial Sequence
  Synthetic: FXN 3 forward 9:69042384-69042412; SaCas9
gaataccctcaggctctgtact

SEQ ID NO: 21545 - DNA, 21 bp, Artificial Sequence
  Synthetic: FXN 3 forward 9:69042385-69042412; SaCas9
aataccctcaggctctgtact

SEQ ID NO: 21546 - DNA, 20 bp, Artificial Sequence
  Synthetic: FXN 3 forward 9:69042386-69042412; SaCas9
ataccctcaggctctgtact

SEQ ID NO: 21547 - DNA, 19 bp, Artificial Sequence
  Synthetic: FXN 3 forward 9:69042387-69042412; SaCas9
taccctcaggctctgtact

SEQ ID NO: 21548 - DNA, 18 bp, Artificial Sequence
  Synthetic: FXN 3 forward 9:69042388-69042412; SaCas9
accctcaggctctgtact

SEQ ID NO: 21549 - DNA, 25 bp, Artificial Sequence
  Synthetic: FXN 3 reverse 9:69042388-69042419; SaCas9
cagaaataccccaagtacagagcct

SEQ ID NO: 21550 - DNA, 24 bp, Artificial Sequence
  Synthetic: FXN 3 reverse 9:69042389-69042419; SaCas9
agaaataccccaagtacagagcct

SEQ ID NO: 21551 - DNA, 23 bp, Artificial Sequence
  Synthetic: FXN 3 reverse 9:69042390-69042419; SaCas9
gaaataccccaagtacagagcct

SEQ ID NO: 21552 - DNA, 22 bp, Artificial Sequence
  Synthetic: FXN 3 reverse 9:69042391-69042419; SaCas9
aaataccccaagtacagagcct

SEQ ID NO: 21553 - DNA, 21 bp, Artificial Sequence
  Synthetic: FXN 3 reverse 9:69042392-69042419; SaCas9
aataccccaagtacagagcct

SEQ ID NO: 21554 - DNA, 20 bp, Artificial Sequence
  Synthetic: FXN 3 reverse 9:69042393-69042419; SaCas9
ataccccaagtacagagcct

SEQ ID NO: 21555 - DNA, 19 bp, Artificial Sequence
  Synthetic: FXN 3 reverse 9:69042394-69042419; SaCas9
taccccaagtacagagcct

SEQ ID NO: 21556 - DNA, 18 bp, Artificial Sequence
  Synthetic: FXN 3 reverse 9:69042395-69042419; SaCas9
accccaagtacagagcct

SEQ ID NO: 21557 - DNA, 25 bp, Artificial Sequence
  Synthetic: FXN 3 reverse 9:69042390-69042421; SaCas9
aacagaaataccccaagtacagagc

SEQ ID NO: 21558 - DNA, 24 bp, Artificial Sequence
  Synthetic: FXN 3 reverse 9:69042391-69042421; SaCas9
acagaaataccccaagtacagagc

SEQ ID NO: 21559 - DNA, 23 bp, Artificial Sequence
  Synthetic: FXN 3 reverse 9:69042392-69042421; SaCas9
cagaaataccccaagtacagagc

SEQ ID NO: 21560 - DNA, 22 bp, Artificial Sequence
  Synthetic: FXN 3 reverse 9:69042393-69042421; SaCas9
agaaataccccaagtacagagc

SEQ ID NO: 21561 - DNA, 21 bp, Artificial Sequence
  Synthetic: FXN 3 reverse 9:69042394-69042421; SaCas9
gaaataccccaagtacagagc

SEQ ID NO: 21562 - DNA, 20 bp, Artificial Sequence
  Synthetic: FXN 3 reverse 9:69042395-69042421; SaCas9
aaataccccaagtacagagc

SEQ ID NO: 21563 - DNA, 19 bp, Artificial Sequence
  Synthetic: FXN 3 reverse 9:69042396-69042421; SaCas9
aataccccaagtacagagc

SEQ ID NO: 21564 - DNA, 18 bp, Artificial Sequence
  Synthetic: FXN 3 reverse 9:69042397-69042421; SaCas9
ataccccaagtacagagc

SEQ ID NO: 21565 - DNA, 25 bp, Artificial Sequence
  Synthetic: FXN 3 reverse 9:69042396-69042427; SaCas9
caagagaacagaaataccccaagta

SEQ ID NO: 21566 - DNA, 24 bp, Artificial Sequence
  Synthetic: FXN 3 reverse 9:69042397-69042427; SaCas9
aagagaacagaaataccccaagta

SEQ ID NO: 21567 - DNA, 23 bp, Artificial Sequence
  Synthetic: FXN 3 reverse 9:69042398-69042427; SaCas9
agagaacagaaataccccaagta

SEQ ID NO: 21568 - DNA, 22 bp, Artificial Sequence
  Synthetic: FXN 3 reverse 9:69042399-69042427; SaCas9
gagaacagaaataccccaagta

SEQ ID NO: 21569 - DNA, 21 bp, Artificial Sequence
  Synthetic: FXN 3 reverse 9:69042400-69042427; SaCas9
agaacagaaataccccaagta

SEQ ID NO: 21570 - DNA, 20 bp, Artificial Sequence
  Synthetic: FXN 3 reverse 9:69042401-69042427; SaCas9
gaacagaaataccccaagta

SEQ ID NO: 21571 - DNA, 19 bp, Artificial Sequence
  Synthetic: FXN 3 reverse 9:69042402-69042427; SaCas9
aacagaaataccccaagta

SEQ ID NO: 21572 - DNA, 18 bp, Artificial Sequence
  Synthetic: FXN 3 reverse 9:69042403-69042427; SaCas9
acagaaataccccaagta

SEQ ID NO: 21573 - DNA, 25 bp, Artificial Sequence
  Synthetic: FXN 3 reverse 9:69042413-69042444; SaCas9
caaccgtgagcataaaacaagagaa

SEQ ID NO: 21574 - DNA, 24 bp, Artificial Sequence
  Synthetic: FXN 3 reverse 9:69042414-69042444; SaCas9
aaccgtgagcataaaacaagagaa

SEQ ID NO: 21575 - DNA, 23 bp, Artificial Sequence
  Synthetic: FXN 3 reverse 9:69042415-69042444; SaCas9
accgtgagcataaaacaagagaa

SEQ ID NO: 21576 - DNA, 22 bp, Artificial Sequence
  Synthetic: FXN 3 reverse 9:69042416-69042444; SaCas9
ccgtgagcataaaacaagagaa

SEQ ID NO: 21577 - DNA, 21 bp, Artificial Sequence
  Synthetic: FXN 3 reverse 9:69042417-69042444; SaCas9
cgtgagcataaaacaagagaa

SEQ ID NO: 21578 - DNA, 20 bp, Artificial Sequence
  Synthetic: FXN 3 reverse 9:69042418-69042444; SaCas9
gtgagcataaaacaagagaa

SEQ ID NO: 21579 - DNA, 19 bp, Artificial Sequence
  Synthetic: FXN 3 reverse 9:69042419-69042444; SaCas9
tgagcataaaacaagagaa

SEQ ID NO: 21580 - DNA, 18 bp, Artificial Sequence
  Synthetic: FXN 3 reverse 9:69042420-69042444; SaCas9
gagcataaaacaagagaa

SEQ ID NO: 21581 - DNA, 25 bp, Artificial Sequence
  Synthetic: FXN 3 forward 9:69042418-69042449; SaCas9
gttctcttgttttatgctcacggtt

SEQ ID NO: 21582 - DNA, 24 bp, Artificial Sequence
  Synthetic: FXN 3 forward 9:69042419-69042449; SaCas9
ttctcttgttttatgctcacggtt

SEQ ID NO: 21583 - DNA, 23 bp, Artificial Sequence
  Synthetic: FXN 3 forward 9:69042420-69042449; SaCas9
tctcttgttttatgctcacggtt

SEQ ID NO: 21584 - DNA, 22 bp, Artificial Sequence
  Synthetic: FXN 3 forward 9:69042421-69042449; SaCas9
ctcttgttttatgctcacggtt

SEQ ID NO: 21585 - DNA, 21 bp, Artificial Sequence
  Synthetic: FXN 3 forward 9:69042422-69042449; SaCas9
tcttgttttatgctcacggtt

SEQ ID NO: 21586 - DNA, 20 bp, Artificial Sequence
  Synthetic: FXN 3 forward 9:69042423-69042449; SaCas9
cttgttttatgctcacggtt

SEQ ID NO: 21587 - DNA, 19 bp, Artificial Sequence
  Synthetic: FXN 3 forward 9:69042424-69042449; SaCas9
ttgttttatgctcacggtt

SEQ ID NO: 21588 - DNA, 18 bp, Artificial Sequence
  Synthetic: FXN 3 forward 9:69042425-69042449; SaCas9
tgttttatgctcacggtt

SEQ ID NO: 21589 - DNA, 25 bp, Artificial Sequence
  Synthetic: FXN 3 reverse 9:69042418-69042449; SaCas9
cctcacaaccgtgagcataaaacaa

SEQ ID NO: 21590 - DNA, 24 bp, Artificial Sequence
  Synthetic: FXN 3 reverse 9:69042419-69042449; SaCas9
ctcacaaccgtgagcataaaacaa

SEQ ID NO: 21591 - DNA, 23 bp, Artificial Sequence
  Synthetic: FXN 3 reverse 9:69042420-69042449; SaCas9
tcacaaccgtgagcataaaacaa

SEQ ID NO: 21592 - DNA, 22 bp, Artificial Sequence
  Synthetic: FXN 3 reverse 9:69042421-69042449; SaCas9
cacaaccgtgagcataaaacaa

SEQ ID NO: 21593 - DNA, 21 bp, Artificial Sequence
  Synthetic: FXN 3 reverse 9:69042422-69042449; SaCas9
acaaccgtgagcataaaacaa

SEQ ID NO: 21594 - DNA, 20 bp, Artificial Sequence
  Synthetic: FXN 3 reverse 9:69042423-69042449; SaCas9
caaccgtgagcataaaacaa

SEQ ID NO: 21595 - DNA, 19 bp, Artificial Sequence
  Synthetic: FXN 3 reverse 9:69042424-69042449; SaCas9
aaccgtgagcataaaacaa

SEQ ID NO: 21596 - DNA, 18 bp, Artificial Sequence
  Synthetic: FXN 3 reverse 9:69042425-69042449; SaCas9
accgtgagcataaaacaa

SEQ ID NO: 21597 - DNA, 25 bp, Artificial Sequence
  Synthetic: FXN 3 reverse 9:69042420-69042451; SaCas9
aacctcacaaccgtgagcataaaac

SEQ ID NO: 21598 - DNA, 24 bp, Artificial Sequence
  Synthetic: FXN 3 reverse 9:69042421-69042451; SaCas9
acctcacaaccgtgagcataaaac

SEQ ID NO: 21599 - DNA, 23 bp, Artificial Sequence
  Synthetic: FXN 3 reverse 9:69042422-69042451; SaCas9
cctcacaaccgtgagcataaaac

SEQ ID NO: 21600 - DNA, 22 bp, Artificial Sequence
  Synthetic: FXN 3 reverse 9:69042423-69042451; SaCas9
ctcacaaccgtgagcataaaac

SEQ ID NO: 21601 - DNA, 21 bp, Artificial Sequence
  Synthetic: FXN 3 reverse 9:69042424-69042451; SaCas9
tcacaaccgtgagcataaaac

SEQ ID NO: 21602 - DNA, 20 bp, Artificial Sequence
  Synthetic: FXN 3 reverse 9:69042425-69042451; SaCas9
cacaaccgtgagcataaaac

SEQ ID NO: 21603 - DNA, 19 bp, Artificial Sequence
  Synthetic: FXN 3 reverse 9:69042426-69042451; SaCas9
acaaccgtgagcataaaac

SEQ ID NO: 21604 - DNA, 18 bp, Artificial Sequence
  Synthetic: FXN 3 reverse 9:69042427-69042451; SaCas9
caaccgtgagcataaaac

SEQ ID NO: 21605 - DNA, 25 bp, Artificial Sequence
  Synthetic: FXN 3 forward 9:69042430-69042461; SaCas9
tatgctcacggttgtgaggtttgtt

SEQ ID NO: 21606 - DNA, 24 bp, Artificial Sequence
  Synthetic: FXN 3 forward 9:69042431-69042461; SaCas9
atgctcacggttgtgaggtttgtt

SEQ ID NO: 21607 - DNA, 23 bp, Artificial Sequence
  Synthetic: FXN 3 forward 9:69042432-69042461; SaCas9
tgctcacggttgtgaggtttgtt

SEQ ID NO: 21608 - DNA, 22 bp, Artificial Sequence
  Synthetic: FXN 3 forward 9:69042433-69042461; SaCas9
gctcacggttgtgaggtttgtt

SEQ ID NO: 21609 - DNA, 21 bp, Artificial Sequence
  Synthetic: FXN 3 forward 9:69042434-69042461; SaCas9
ctcacggttgtgaggtttgtt

SEQ ID NO: 21610 - DNA, 20 bp, Artificial Sequence
  Synthetic: FXN 3 forward 9:69042435-69042461; SaCas9
tcacggttgtgaggtttgtt

SEQ ID NO: 21611 - DNA, 19 bp, Artificial Sequence
  Synthetic: FXN 3 forward 9:69042436-69042461; SaCas9
cacggttgtgaggtttgtt

SEQ ID NO: 21612 - DNA, 18 bp, Artificial Sequence
  Synthetic: FXN 3 forward 9:69042437-69042461; SaCas9
acggttgtgaggtttgtt

SEQ ID NO: 21613 - DNA, 25 bp, Artificial Sequence
  Synthetic: FXN 3 reverse 9:69042433-69042464; SaCas9
ggtactcacaacaaacctcacaacc

SEQ ID NO: 21614 - DNA, 24 bp, Artificial Sequence
  Synthetic: FXN 3 reverse 9:69042434-69042464; SaCas9
gtactcacaacaaacctcacaacc

SEQ ID NO: 21615 - DNA, 23 bp, Artificial Sequence
  Synthetic: FXN 3 reverse 9:69042435-69042464; SaCas9
tactcacaacaaacctcacaacc

SEQ ID NO: 21616 - DNA, 22 bp, Artificial Sequence
  Synthetic: FXN 3 reverse 9:69042436-69042464; SaCas9
actcacaacaaacctcacaacc

SEQ ID NO: 21617 - DNA, 21 bp, Artificial Sequence
  Synthetic: FXN 3 reverse 9:69042437-69042464; SaCas9
ctcacaacaaacctcacaacc

SEQ ID NO: 21618 - DNA, 20 bp, Artificial Sequence
  Synthetic: FXN 3 reverse 9:69042438-69042464; SaCas9
tcacaacaaacctcacaacc

SEQ ID NO: 21619 - DNA, 19 bp, Artificial Sequence
  Synthetic: FXN 3 reverse 9:69042439-69042464; SaCas9
cacaacaaacctcacaacc

SEQ ID NO: 21620 - DNA, 18 bp, Artificial Sequence
  Synthetic: FXN 3 reverse 9:69042440-69042464; SaCas9
acaacaaacctcacaacc

SEQ ID NO: 21621 - DNA, 25 bp, Artificial Sequence
  Synthetic: FXN 3 forward 9:69042453-69042484; SaCas9
ttgtgagtaccacgatcccttcctt

SEQ ID NO: 21622 - DNA, 24 bp, Artificial Sequence
  Synthetic: FXN 3 forward 9:69042454-69042484; SaCas9
tgtgagtaccacgatcccttcctt

SEQ ID NO: 21623 - DNA, 23 bp, Artificial Sequence
  Synthetic: FXN 3 forward 9:69042455-69042484; SaCas9
gtgagtaccacgatcccttcctt

SEQ ID NO: 21624 - DNA, 22 bp, Artificial Sequence
  Synthetic: FXN 3 forward 9:69042456-69042484; SaCas9
tgagtaccacgatcccttcctt

SEQ ID NO: 21625 - DNA, 21 bp, Artificial Sequence
  Synthetic: FXN 3 forward 9:69042457-69042484; SaCas9
gagtaccacgatcccttcctt

SEQ ID NO: 21626 - DNA, 20 bp, Artificial Sequence
  Synthetic: FXN 3 forward 9:69042458-69042484; SaCas9
agtaccacgatcccttcctt

SEQ ID NO: 21627 - DNA, 19 bp, Artificial Sequence
  Synthetic: FXN 3 forward 9:69042459-69042484; SaCas9
gtaccacgatcccttcctt

SEQ ID NO: 21628 - DNA, 18 bp, Artificial Sequence
  Synthetic: FXN 3 forward 9:69042460-69042484; SaCas9
taccacgatcccttcctt

SEQ ID NO: 21629 - DNA, 25 bp, Artificial Sequence
  Synthetic: FXN 3 forward 9:69042455-69042486; SaCas9
gtgagtaccacgatcccttccttca

SEQ ID NO: 21630 - DNA, 24 bp, Artificial Sequence
  Synthetic: FXN 3 forward 9:69042456-69042486; SaCas9
tgagtaccacgatcccttccttca

SEQ ID NO: 21631 - DNA, 23 bp, Artificial Sequence
  Synthetic: FXN 3 forward 9:69042457-69042486; SaCas9
gagtaccacgatcccttccttca

SEQ ID NO: 21632 - DNA, 22 bp, Artificial Sequence
  Synthetic: FXN 3 forward 9:69042458-69042486; SaCas9
agtaccacgatcccttccttca

SEQ ID NO: 21633 - DNA, 21 bp, Artificial Sequence
  Synthetic: FXN 3 forward 9:69042459-69042486; SaCas9
gtaccacgatcccttccttca

SEQ ID NO: 21634 - DNA, 20 bp, Artificial Sequence
  Synthetic: FXN 3 forward 9:69042460-69042486; SaCas9
taccacgatcccttccttca

SEQ ID NO: 21635 - DNA, 19 bp, Artificial Sequence
  Synthetic: FXN 3 forward 9:69042461-69042486; SaCas9
accacgatcccttccttca

SEQ ID NO: 21636 - DNA, 18 bp, Artificial Sequence
  Synthetic: FXN 3 forward 9:69042462-69042486; SaCas9
ccacgatcccttccttca

SEQ ID NO: 21637 - DNA, 25 bp, Artificial Sequence
  Synthetic: FXN 3 forward 9:69042456-69042487; SaCas9
tgagtaccacgatcccttccttcag

SEQ ID NO: 21638 - DNA, 24 bp, Artificial Sequence
  Synthetic: FXN 3 forward 9:69042457-69042487; SaCas9
gagtaccacgatcccttccttcag

SEQ ID NO: 21639 - DNA, 23 bp, Artificial Sequence
  Synthetic: FXN 3 forward 9:69042458-69042487; SaCas9
agtaccacgatcccttccttcag

SEQ ID NO: 21640 - DNA, 22 bp, Artificial Sequence
  Synthetic: FXN 3 forward 9:69042459-69042487; SaCas9
gtaccacgatcccttccttcag

SEQ ID NO: 21641 - DNA, 21 bp, Artificial Sequence
  Synthetic: FXN 3 forward 9:69042460-69042487; SaCas9
taccacgatcccttccttcag

SEQ ID NO: 21642 - DNA, 20 bp, Artificial Sequence
  Synthetic: FXN 3 forward 9:69042461-69042487; SaCas9
accacgatcccttccttcag

SEQ ID NO: 21643 - DNA, 19 bp, Artificial Sequence
  Synthetic: FXN 3 forward 9:69042462-69042487; SaCas9
ccacgatcccttccttcag

SEQ ID NO: 21644 - DNA, 18 bp, Artificial Sequence
  Synthetic: FXN 3 forward 9:69042463-69042487; SaCas9
cacgatcccttccttcag

SEQ ID NO: 21645 - DNA, 25 bp, Artificial Sequence
  Synthetic: FXN 3 forward 9:69042465-69042496; SaCas9
cgatcccttccttcagaggagtaaa

SEQ ID NO: 21646 - DNA, 24 bp, Artificial Sequence
  Synthetic: FXN 3 forward 9:69042466-69042496; SaCas9
gatcccttccttcagaggagtaaa

SEQ ID NO: 21647 - DNA, 23 bp, Artificial Sequence
  Synthetic: FXN 3 forward 9:69042467-69042496; SaCas9
atcccttccttcagaggagtaaa

SEQ ID NO: 21648 - DNA, 22 bp, Artificial Sequence
  Synthetic: FXN 3 forward 9:69042468-69042496; SaCas9
tcccttccttcagaggagtaaa

SEQ ID NO: 21649 - DNA, 21 bp, Artificial Sequence
  Synthetic: FXN 3 forward 9:69042469-69042496; SaCas9
cccttccttcagaggagtaaa

SEQ ID NO: 21650 - DNA, 20 bp, Artificial Sequence
  Synthetic: FXN 3 forward 9:69042470-69042496; SaCas9
ccttccttcagaggagtaaa

SEQ ID NO: 21651 - DNA, 19 bp, Artificial Sequence
  Synthetic: FXN 3 forward 9:69042471-69042496; SaCas9
cttccttcagaggagtaaa

SEQ ID NO: 21652 - DNA, 18 bp, Artificial Sequence
  Synthetic: FXN 3 forward 9:69042472-69042496; SaCas9
ttccttcagaggagtaaa

SEQ ID NO: 21653 - DNA, 25 bp, Artificial Sequence
  Synthetic: FXN 3 reverse 9:69042467-69042498; SaCas9
aacctcagtttactcctctgaagga

SEQ ID NO: 21654 - DNA, 24 bp, Artificial Sequence
  Synthetic: FXN 3 reverse 9:69042468-69042498; SaCas9
acctcagtttactcctctgaagga

SEQ ID NO: 21655 - DNA, 23 bp, Artificial Sequence
  Synthetic: FXN 3 reverse 9:69042469-69042498; SaCas9
cctcagtttactcctctgaagga

SEQ ID NO: 21656 - DNA, 22 bp, Artificial Sequence
  Synthetic: FXN 3 reverse 9:69042470-69042498; SaCas9
ctcagtttactcctctgaagga

SEQ ID NO: 21657 - DNA, 21 bp, Artificial Sequence
  Synthetic: FXN 3 reverse 9:69042471-69042498; SaCas9
tcagtttactcctctgaagga

SEQ ID NO: 21658 - DNA, 20 bp, Artificial Sequence
  Synthetic: FXN 3 reverse 9:69042472-69042498; SaCas9
cagtttactcctctgaagga

SEQ ID NO: 21659 - DNA, 19 bp, Artificial Sequence
  Synthetic: FXN 3 reverse 9:69042473-69042498; SaCas9
agtttactcctctgaagga

SEQ ID NO: 21660 - DNA, 18 bp, Artificial Sequence
  Synthetic: FXN 3 reverse 9:69042474-69042498; SaCas9
gtttactcctctgaagga

SEQ ID NO: 21661 - DNA, 25 bp, Artificial Sequence
  Synthetic: FXN 3 reverse 9:69042468-69042499; SaCas9
gaacctcagtttactcctctgaagg

SEQ ID NO: 21662 - DNA, 24 bp, Artificial Sequence
  Synthetic: FXN 3 reverse 9:69042469-69042499; SaCas9
aacctcagtttactcctctgaagg

SEQ ID NO: 21663 - DNA, 23 bp, Artificial Sequence
  Synthetic: FXN 3 reverse 9:69042470-69042499; SaCas9
acctcagtttactcctctgaagg

SEQ ID NO: 21664 - DNA, 22 bp, Artificial Sequence
  Synthetic: FXN 3 reverse 9:69042471-69042499; SaCas9
cctcagtttactcctctgaagg

SEQ ID NO: 21665 - DNA, 21 bp, Artificial Sequence
  Synthetic: FXN 3 reverse 9:69042472-69042499; SaCas9
ctcagtttactcctctgaagg

SEQ ID NO: 21666 - DNA, 20 bp, Artificial Sequence
  Synthetic: FXN 3 reverse 9:69042473-69042499; SaCas9
tcagtttactcctctgaagg

SEQ ID NO: 21667 - DNA, 19 bp, Artificial Sequence
  Synthetic: FXN 3 reverse 9:69042474-69042499; SaCas9
cagtttactcctctgaagg

SEQ ID NO: 21668 - DNA, 18 bp, Artificial Sequence
  Synthetic: FXN 3 reverse 9:69042475-69042499; SaCas9
agtttactcctctgaagg

SEQ ID NO: 21669 - DNA, 25 bp, Artificial Sequence
  Synthetic: FXN 3 reverse 9:69042471-69042502; SaCas9
ttggaacctcagtttactcctctga

SEQ ID NO: 21670 - DNA, 24 bp, Artificial Sequence
  Synthetic: FXN 3 reverse 9:69042472-69042502; SaCas9
tggaacctcagtttactcctctga

SEQ ID NO: 21671 - DNA, 23 bp, Artificial Sequence
  Synthetic: FXN 3 reverse 9:69042473-69042502; SaCas9
ggaacctcagtttactcctctga

SEQ ID NO: 21672 - DNA, 22 bp, Artificial Sequence
  Synthetic: FXN 3 reverse 9:69042474-69042502; SaCas9
gaacctcagtttactcctctga

SEQ ID NO: 21673 - DNA, 21 bp, Artificial Sequence
  Synthetic: FXN 3 reverse 9:69042475-69042502; SaCas9
aacctcagtttactcctctga

SEQ ID NO: 21674 - DNA, 20 bp, Artificial Sequence
  Synthetic: FXN 3 reverse 9:69042476-69042502; SaCas9
acctcagtttactcctctga

SEQ ID NO: 21675 - DNA, 19 bp, Artificial Sequence
  Synthetic: FXN 3 reverse 9:69042477-69042502; SaCas9
cctcagtttactcctctga

SEQ ID NO: 21676 - DNA, 18 bp, Artificial Sequence
  Synthetic: FXN 3 reverse 9:69042478-69042502; SaCas9
ctcagtttactcctctga

SEQ ID NO: 21677 - DNA, 25 bp, Artificial Sequence
  Synthetic: FXN 3 reverse 9:69042472-69042503; SaCas9
tttggaacctcagtttactcctctg

SEQ ID NO: 21678 - DNA, 24 bp, Artificial Sequence
  Synthetic: FXN 3 reverse 9:69042473-69042503; SaCas9
ttggaacctcagtttactcctctg

SEQ ID NO: 21679 - DNA, 23 bp, Artificial Sequence
  Synthetic: FXN 3 reverse 9:69042474-69042503; SaCas9
tggaacctcagtttactcctctg

SEQ ID NO: 21680 - DNA, 22 bp, Artificial Sequence
  Synthetic: FXN 3 reverse 9:69042475-69042503; SaCas9
ggaacctcagtttactcctctg

SEQ ID NO: 21681 - DNA, 21 bp, Artificial Sequence
  Synthetic: FXN 3 reverse 9:69042476-69042503; SaCas9
gaacctcagtttactcctctg

SEQ ID NO: 21682 - DNA, 20 bp, Artificial Sequence
  Synthetic: FXN 3 reverse 9:69042477-69042503; SaCas9
aacctcagtttactcctctg

SEQ ID NO: 21683 - DNA, 19 bp, Artificial Sequence
  Synthetic: FXN 3 reverse 9:69042478-69042503; SaCas9
acctcagtttactcctctg

SEQ ID NO: 21684 - DNA, 18 bp, Artificial Sequence
  Synthetic: FXN 3 reverse 9:69042479-69042503; SaCas9
cctcagtttactcctctg

SEQ ID NO: 21685 - DNA, 25 bp, Artificial Sequence
  Synthetic: FXN 3 reverse 9:69042475-69042506; SaCas9
ccttttggaacctcagtttactcct

SEQ ID NO: 21686 - DNA, 24 bp, Artificial Sequence
  Synthetic: FXN 3 reverse 9:69042476-69042506; SaCas9
cttttggaacctcagtttactcct

SEQ ID NO: 21687 - DNA, 23 bp, Artificial Sequence
  Synthetic: FXN 3 reverse 9:69042477-69042506; SaCas9
ttttggaacctcagtttactcct

SEQ ID NO: 21688 - DNA, 22 bp, Artificial Sequence
  Synthetic: FXN 3 reverse 9:69042478-69042506; SaCas9
tttggaacctcagtttactcct

SEQ ID NO: 21689 - DNA, 21 bp, Artificial Sequence
  Synthetic: FXN 3 reverse 9:69042479-69042506; SaCas9
ttggaacctcagtttactcct

SEQ ID NO: 21690 - DNA, 20 bp, Artificial Sequence
  Synthetic: FXN 3 reverse 9:69042480-69042506; SaCas9
tggaacctcagtttactcct

SEQ ID NO: 21691 - DNA, 19 bp, Artificial Sequence
  Synthetic: FXN 3 reverse 9:69042481-69042506; SaCas9
ggaacctcagtttactcct

SEQ ID NO: 21692 - DNA, 18 bp, Artificial Sequence
  Synthetic: FXN 3 reverse 9:69042482-69042506; SaCas9
gaacctcagtttactcct

SEQ ID NO: 21693 - DNA, 25 bp, Artificial Sequence
  Synthetic: FXN 3 forward 9:69042493-69042524; SaCas9
aggttccaaaaggtttagcagttgc

SEQ ID NO: 21694 - DNA, 24 bp, Artificial Sequence
  Synthetic: FXN 3 forward 9:69042494-69042524; SaCas9
ggttccaaaaggtttagcagttgc

SEQ ID NO: 21695 - DNA, 23 bp, Artificial Sequence
  Synthetic: FXN 3 forward 9:69042495-69042524; SaCas9
gttccaaaaggtttagcagttgc

SEQ ID NO: 21696 - DNA, 22 bp, Artificial Sequence
  Synthetic: FXN 3 forward 9:69042496-69042524; SaCas9
ttccaaaaggtttagcagttgc

SEQ ID NO: 21697 - DNA, 21 bp, Artificial Sequence
  Synthetic: FXN 3 forward 9:69042497-69042524; SaCas9
tccaaaaggtttagcagttgc

SEQ ID NO: 21698 - DNA, 20 bp, Artificial Sequence
  Synthetic: FXN 3 forward 9:69042498-69042524; SaCas9
ccaaaaggtttagcagttgc

SEQ ID NO: 21699 - DNA, 19 bp, Artificial Sequence
  Synthetic: FXN 3 forward 9:69042499-69042524; SaCas9
caaaaggtttagcagttgc

SEQ ID NO: 21700 - DNA, 18 bp, Artificial Sequence
  Synthetic: FXN 3 forward 9:69042500-69042524; SaCas9
aaaaggtttagcagttgc

SEQ ID NO: 21701 - DNA, 25 bp, Artificial Sequence
  Synthetic: FXN 3 forward 9:69042495-69042526; SaCas9
gttccaaaaggtttagcagttgccc

SEQ ID NO: 21702 - DNA, 24 bp, Artificial Sequence
  Synthetic: FXN 3 forward 9:69042496-69042526; SaCas9
ttccaaaaggtttagcagttgccc

SEQ ID NO: 21703 - DNA, 23 bp, Artificial Sequence
  Synthetic: FXN 3 forward 9:69042497-69042526; SaCas9
tccaaaaggtttagcagttgccc

SEQ ID NO: 21704 - DNA, 22 bp, Artificial Sequence
  Synthetic: FXN 3 forward 9:69042498-69042526; SaCas9
ccaaaaggtttagcagttgccc

SEQ ID NO: 21705 - DNA, 21 bp, Artificial Sequence
  Synthetic: FXN 3 forward 9:69042499-69042526; SaCas9
caaaaggtttagcagttgccc

SEQ ID NO: 21706 - DNA, 20 bp, Artificial Sequence
  Synthetic: FXN 3 forward 9:69042500-69042526; SaCas9
aaaaggtttagcagttgccc

SEQ ID NO: 21707 - DNA, 19 bp, Artificial Sequence
  Synthetic: FXN 3 forward 9:69042501-69042526; SaCas9
aaaggtttagcagttgccc

SEQ ID NO: 21708 - DNA, 18 bp, Artificial Sequence
  Synthetic: FXN 3 forward 9:69042502-69042526; SaCas9
aaggtttagcagttgccc

SEQ ID NO: 21709 - DNA, 25 bp, Artificial Sequence
  Synthetic: FXN 3 reverse 9:69042495-69042526; SaCas9
ttcctcgggcaactgctaaaccttt

SEQ ID NO: 21710 - DNA, 24 bp, Artificial Sequence
  Synthetic: FXN 3 reverse 9:69042496-69042526; SaCas9
tcctcgggcaactgctaaaccttt

SEQ ID NO: 21711 - DNA, 23 bp, Artificial Sequence
  Synthetic: FXN 3 reverse 9:69042497-69042526; SaCas9
cctcgggcaactgctaaaccttt

SEQ ID NO: 21712 - DNA, 22 bp, Artificial Sequence
  Synthetic: FXN 3 reverse 9:69042498-69042526; SaCas9
ctcgggcaactgctaaaccttt

SEQ ID NO: 21713 - DNA, 21 bp, Artificial Sequence
  Synthetic: FXN 3 reverse 9:69042499-69042526; SaCas9
tcgggcaactgctaaaccttt

SEQ ID NO: 21714 - DNA, 20 bp, Artificial Sequence
  Synthetic: FXN 3 reverse 9:69042500-69042526; SaCas9
cgggcaactgctaaaccttt

SEQ ID NO: 21715 - DNA, 19 bp, Artificial Sequence
  Synthetic: FXN 3 reverse 9:69042501-69042526; SaCas9
gggcaactgctaaaccttt

SEQ ID NO: 21716 - DNA, 18 bp, Artificial Sequence
  Synthetic: FXN 3 reverse 9:69042502-69042526; SaCas9
ggcaactgctaaaccttt

SEQ ID NO: 21717 - DNA, 25 bp, Artificial Sequence
  Synthetic: FXN 3 forward 9:69042496-69042527; SaCas9
ttccaaaaggtttagcagttgcccg

SEQ ID NO: 21718 - DNA, 24 bp, Artificial Sequence
  Synthetic: FXN 3 forward 9:69042497-69042527; SaCas9
tccaaaaggtttagcagttgcccg

SEQ ID NO: 21719 - DNA, 23 bp, Artificial Sequence
  Synthetic: FXN 3 forward 9:69042498-69042527; SaCas9
ccaaaaggtttagcagttgcccg

SEQ ID NO: 21720 - DNA, 22 bp, Artificial Sequence
  Synthetic: FXN 3 forward 9:69042499-69042527; SaCas9
caaaaggtttagcagttgcccg

SEQ ID NO: 21721 - DNA, 21 bp, Artificial Sequence
  Synthetic: FXN 3 forward 9:69042500-69042527; SaCas9
aaaaggtttagcagttgcccg

SEQ ID NO: 21722 - DNA, 20 bp, Artificial Sequence
  Synthetic: FXN 3 forward 9:69042501-69042527; SaCas9
aaaggtttagcagttgcccg

SEQ ID NO: 21723 - DNA, 19 bp, Artificial Sequence
  Synthetic: FXN 3 forward 9:69042502-69042527; SaCas9
aaggtttagcagttgcccg

SEQ ID NO: 21724 - DNA, 18 bp, Artificial Sequence
  Synthetic: FXN 3 forward 9:69042503-69042527; SaCas9
aggtttagcagttgcccg

SEQ ID NO: 21725 - DNA, 25 bp, Artificial Sequence
  Synthetic: FXN 3 reverse 9:69042496-69042527; SaCas9
attcctcgggcaactgctaaacctt

SEQ ID NO: 21726 - DNA, 24 bp, Artificial Sequence
  Synthetic: FXN 3 reverse 9:69042497-69042527; SaCas9
ttcctcgggcaactgctaaacctt

SEQ ID NO: 21727 - DNA, 23 bp, Artificial Sequence
  Synthetic: FXN 3 reverse 9:69042498-69042527; SaCas9
tcctcgggcaactgctaaacctt

SEQ ID NO: 21728 - DNA, 22 bp, Artificial Sequence
  Synthetic: FXN 3 reverse 9:69042499-69042527; SaCas9
cctcgggcaactgctaaacctt

SEQ ID NO: 21729 - DNA, 21 bp, Artificial Sequence
  Synthetic: FXN 3 reverse 9:69042500-69042527; SaCas9
ctcgggcaactgctaaacctt

SEQ ID NO: 21730 - DNA, 20 bp, Artificial Sequence
  Synthetic: FXN 3 reverse 9:69042501-69042527; SaCas9
tcgggcaactgctaaacctt

SEQ ID NO: 21731 - DNA, 19 bp, Artificial Sequence
  Synthetic: FXN 3 reverse 9:69042502-69042527; SaCas9
cgggcaactgctaaacctt

SEQ ID NO: 21732 - DNA, 18 bp, Artificial Sequence
  Synthetic: FXN 3 reverse 9:69042503-69042527; SaCas9
gggcaactgctaaacctt

SEQ ID NO: 21733 - DNA, 25 bp, Artificial Sequence
  Synthetic: FXN 3 reverse 9:69042516-69042547; SaCas9
cctgcttttgccaatttaatattcc

SEQ ID NO: 21734 - DNA, 24 bp, Artificial Sequence
  Synthetic: FXN 3 reverse 9:69042517-69042547; SaCas9
ctgcttttgccaatttaatattcc

SEQ ID NO: 21735 - DNA, 23 bp, Artificial Sequence
  Synthetic: FXN 3 reverse 9:69042518-69042547; SaCas9
tgcttttgccaatttaatattcc

SEQ ID NO: 21736 - DNA, 22 bp, Artificial Sequence
  Synthetic: FXN 3 reverse 9:69042519-69042547; SaCas9
gcttttgccaatttaatattcc

SEQ ID NO: 21737 - DNA, 21 bp, Artificial Sequence
  Synthetic: FXN 3 reverse 9:69042520-69042547; SaCas9
cttttgccaatttaatattcc

SEQ ID NO: 21738 - DNA, 20 bp, Artificial Sequence
  Synthetic: FXN 3 reverse 9:69042521-69042547; SaCas9
ttttgccaatttaatattcc

SEQ ID NO: 21739 - DNA, 19 bp, Artificial Sequence
  Synthetic: FXN 3 reverse 9:69042522-69042547; SaCas9
tttgccaatttaatattcc

SEQ ID NO: 21740 - DNA, 18 bp, Artificial Sequence
  Synthetic: FXN 3 reverse 9:69042523-69042547; SaCas9
ttgccaatttaatattcc

SEQ ID NO: 21741 - DNA, 25 bp, Artificial Sequence
  Synthetic: FXN 3 forward 9:69042522-69042553; SaCas9
ggaatattaaattggcaaaagcagg

SEQ ID NO: 21742 - DNA, 24 bp, Artificial Sequence
  Synthetic: FXN 3 forward 9:69042523-69042553; SaCas9
gaatattaaattggcaaaagcagg

SEQ ID NO: 21743 - DNA, 23 bp, Artificial Sequence
  Synthetic: FXN 3 forward 9:69042524-69042553; SaCas9
aatattaaattggcaaaagcagg

SEQ ID NO: 21744 - DNA, 22 bp, Artificial Sequence
  Synthetic: FXN 3 forward 9:69042525-69042553; SaCas9
atattaaattggcaaaagcagg

SEQ ID NO: 21745 - DNA, 21 bp, Artificial Sequence
  Synthetic: FXN 3 forward 9:69042526-69042553; SaCas9
tattaaattggcaaaagcagg

SEQ ID NO: 21746 - DNA, 20 bp, Artificial Sequence
  Synthetic: FXN 3 forward 9:69042527-69042553; SaCas9
attaaattggcaaaagcagg

SEQ ID NO: 21747 - DNA, 19 bp, Artificial Sequence
  Synthetic: FXN 3 forward 9:69042528-69042553; SaCas9
ttaaattggcaaaagcagg

SEQ ID NO: 21748 - DNA, 18 bp, Artificial Sequence
  Synthetic: FXN 3 forward 9:69042529-69042553; SaCas9
taaattggcaaaagcagg

SEQ ID NO: 21749 - DNA, 25 bp, Artificial Sequence
  Synthetic: FXN 3 forward 9:69042535-69042566; SaCas9
ggcaaaagcaggtagaatataaagc

SEQ ID NO: 21750 - DNA, 24 bp, Artificial Sequence
  Synthetic: FXN 3 forward 9:69042536-69042566; SaCas9
gcaaaagcaggtagaatataaagc

SEQ ID NO: 21751 - DNA, 23 bp, Artificial Sequence
  Synthetic: FXN 3 forward 9:69042537-69042566; SaCas9
caaaagcaggtagaatataaagc

SEQ ID NO: 21752 - DNA, 22 bp, Artificial Sequence
  Synthetic: FXN 3 forward 9:69042538-69042566; SaCas9
aaaagcaggtagaatataaagc

SEQ ID NO: 21753 - DNA, 21 bp, Artificial Sequence
  Synthetic: FXN 3 forward 9:69042539-69042566; SaCas9
aaagcaggtagaatataaagc

SEQ ID NO: 21754 - DNA, 20 bp, Artificial Sequence
  Synthetic: FXN 3 forward 9:69042540-69042566; SaCas9
aagcaggtagaatataaagc

SEQ ID NO: 21755 - DNA, 19 bp, Artificial Sequence
  Synthetic: FXN 3 forward 9:69042541-69042566; SaCas9
agcaggtagaatataaagc

SEQ ID NO: 21756 - DNA, 18 bp, Artificial Sequence
  Synthetic: FXN 3 forward 9:69042542-69042566; SaCas9
gcaggtagaatataaagc

SEQ ID NO: 21757 - DNA, 25 bp, Artificial Sequence
  Synthetic: FXN 3 forward 9:69042536-69042567; SaCas9
gcaaaagcaggtagaatataaagca

SEQ ID NO: 21758 - DNA, 24 bp, Artificial Sequence
  Synthetic: FXN 3 forward 9:69042537-69042567; SaCas9
caaaagcaggtagaatataaagca

SEQ ID NO: 21759 - DNA, 23 bp, Artificial Sequence
  Synthetic: FXN 3 forward 9:69042538-69042567; SaCas9
aaaagcaggtagaatataaagca

SEQ ID NO: 21760 - DNA, 22 bp, Artificial Sequence
  Synthetic: FXN 3 forward 9:69042539-69042567; SaCas9
aaagcaggtagaatataaagca

SEQ ID NO: 21761 - DNA, 21 bp, Artificial Sequence
  Synthetic: FXN 3 forward 9:69042540-69042567; SaCas9
aagcaggtagaatataaagca

SEQ ID NO: 21762 - DNA, 20 bp, Artificial Sequence
  Synthetic: FXN 3 forward 9:69042541-69042567; SaCas9
agcaggtagaatataaagca

SEQ ID NO: 21763 - DNA, 19 bp, Artificial Sequence
  Synthetic: FXN 3 forward 9:69042542-69042567; SaCas9
gcaggtagaatataaagca

SEQ ID NO: 21764 - DNA, 18 bp, Artificial Sequence
  Synthetic: FXN 3 forward 9:69042543-69042567; SaCas9
caggtagaatataaagca

SEQ ID NO: 21765 - DNA, 25 bp, Artificial Sequence
  Synthetic: FXN 3 forward 9:69042577-69042608; SaCas9
ggttcttttttatgattaaaaacag

SEQ ID NO: 21766 - DNA, 24 bp, Artificial Sequence
  Synthetic: FXN 3 forward 9:69042578-69042608; SaCas9
gttcttttttatgattaaaaacag

SEQ ID NO: 21767 - DNA, 23 bp, Artificial Sequence
  Synthetic: FXN 3 forward 9:69042579-69042608; SaCas9
ttcttttttatgattaaaaacag

SEQ ID NO: 21768 - DNA, 22 bp, Artificial Sequence
  Synthetic: FXN 3 forward 9:69042580-69042608; SaCas9
tcttttttatgattaaaaacag

SEQ ID NO: 21769 - DNA, 21 bp, Artificial Sequence
  Synthetic: FXN 3 forward 9:69042581-69042608; SaCas9
cttttttatgattaaaaacag

SEQ ID NO: 21770 - DNA, 20 bp, Artificial Sequence
  Synthetic: FXN 3 forward 9:69042582-69042608; SaCas9
ttttttatgattaaaaacag

SEQ ID NO: 21771 - DNA, 19 bp, Artificial Sequence
  Synthetic: FXN 3 forward 9:69042583-69042608; SaCas9
tttttatgattaaaaacag

SEQ ID NO: 21772 - DNA, 18 bp, Artificial Sequence
  Synthetic: FXN 3 forward 9:69042584-69042608; SaCas9
ttttatgattaaaaacag

SEQ ID NO: 21773 - DNA, 25 bp, Artificial Sequence
  Synthetic: FXN 3 reverse 9:69042578-69042609; SaCas9
tcttcggctgtttttaatcataaaa

SEQ ID NO: 21774 - DNA, 24 bp, Artificial Sequence
  Synthetic: FXN 3 reverse 9:69042579-69042609; SaCas9
cttcggctgtttttaatcataaaa

SEQ ID NO: 21775 - DNA, 23 bp, Artificial Sequence
  Synthetic: FXN 3 reverse 9:69042580-69042609; SaCas9
ttcggctgtttttaatcataaaa

SEQ ID NO: 21776 - DNA, 22 bp, Artificial Sequence
  Synthetic: FXN 3 reverse 9:69042581-69042609; SaCas9
tcggctgtttttaatcataaaa

SEQ ID NO: 21777 - DNA, 21 bp, Artificial Sequence
  Synthetic: FXN 3 reverse 9:69042582-69042609; SaCas9
cggctgtttttaatcataaaa

SEQ ID NO: 21778 - DNA, 20 bp, Artificial Sequence
  Synthetic: FXN 3 reverse 9:69042583-69042609; SaCas9
ggctgtttttaatcataaaa

SEQ ID NO: 21779 - DNA, 19 bp, Artificial Sequence
  Synthetic: FXN 3 reverse 9:69042584-69042609; SaCas9
gctgtttttaatcataaaa

SEQ ID NO: 21780 - DNA, 18 bp, Artificial Sequence
  Synthetic: FXN 3 reverse 9:69042585-69042609; SaCas9
ctgtttttaatcataaaa

SEQ ID NO: 21781 - DNA, 25 bp, Artificial Sequence
  Synthetic: FXN 3 forward 9:69042580-69042611; SaCas9
tcttttttatgattaaaaacagccg

SEQ ID NO: 21782 - DNA, 24 bp, Artificial Sequence
  Synthetic: FXN 3 forward 9:69042581-69042611; SaCas9
cttttttatgattaaaaacagccg

SEQ ID NO: 21783 - DNA, 23 bp, Artificial Sequence
  Synthetic: FXN 3 forward 9:69042582-69042611; SaCas9
ttttttatgattaaaaacagccg

SEQ ID NO: 21784 - DNA, 22 bp, Artificial Sequence
  Synthetic: FXN 3 forward 9:69042583-69042611; SaCas9
tttttatgattaaaaacagccg

SEQ ID NO: 21785 - DNA, 21 bp, Artificial Sequence
  Synthetic: FXN 3 forward 9:69042584-69042611; SaCas9
ttttatgattaaaaacagccg

SEQ ID NO: 21786 - DNA, 20 bp, Artificial Sequence
  Synthetic: FXN 3 forward 9:69042585-69042611; SaCas9
tttatgattaaaaacagccg

SEQ ID NO: 21787 - DNA, 19 bp, Artificial Sequence
  Synthetic: FXN 3 forward 9:69042586-69042611; SaCas9
ttatgattaaaaacagccg

SEQ ID NO: 21788 - DNA, 18 bp, Artificial Sequence
  Synthetic: FXN 3 forward 9:69042587-69042611; SaCas9
tatgattaaaaacagccg

SEQ ID NO: 21789 - DNA, 25 bp, Artificial Sequence
  Synthetic: FXN 3 forward 9:69042603-69042634; SaCas9
cgaagaaagacttctacttgtgcct

SEQ ID NO: 21790 - DNA, 24 bp, Artificial Sequence
  Synthetic: FXN 3 forward 9:69042604-69042634; SaCas9
gaagaaagacttctacttgtgcct

SEQ ID NO: 21791 - DNA, 23 bp, Artificial Sequence
  Synthetic: FXN 3 forward 9:69042605-69042634; SaCas9
aagaaagacttctacttgtgcct

SEQ ID NO: 21792 - DNA, 22 bp, Artificial Sequence
  Synthetic: FXN 3 forward 9:69042606-69042634; SaCas9
agaaagacttctacttgtgcct

SEQ ID NO: 21793 - DNA, 21 bp, Artificial Sequence
  Synthetic: FXN 3 forward 9:69042607-69042634; SaCas9
gaaagacttctacttgtgcct

SEQ ID NO: 21794 - DNA, 20 bp, Artificial Sequence
  Synthetic: FXN 3 forward 9:69042608-69042634; SaCas9
aaagacttctacttgtgcct

SEQ ID NO: 21795 - DNA, 19 bp, Artificial Sequence
  Synthetic: FXN 3 forward 9:69042609-69042634; SaCas9
aagacttctacttgtgcct

SEQ ID NO: 21796 - DNA, 18 bp, Artificial Sequence
  Synthetic: FXN 3 forward 9:69042610-69042634; SaCas9
agacttctacttgtgcct

SEQ ID NO: 21797 - DNA, 25 bp, Artificial Sequence
  Synthetic: FXN 3 forward 9:69042606-69042637; SaCas9
agaaagacttctacttgtgcctttg

SEQ ID NO: 21798 - DNA, 24 bp, Artificial Sequence
  Synthetic: FXN 3 forward 9:69042607-69042637; SaCas9
gaaagacttctacttgtgcctttg

SEQ ID NO: 21799 - DNA, 23 bp, Artificial Sequence
  Synthetic: FXN 3 forward 9:69042608-69042637; SaCas9
aaagacttctacttgtgcctttg

SEQ ID NO: 21800 - DNA, 22 bp, Artificial Sequence
  Synthetic: FXN 3 forward 9:69042609-69042637; SaCas9
aagacttctacttgtgcctttg

SEQ ID NO: 21801 - DNA, 21 bp, Artificial Sequence
  Synthetic: FXN 3 forward 9:69042610-69042637; SaCas9
agacttctacttgtgcctttg

SEQ ID NO: 21802 - DNA, 20 bp, Artificial Sequence
  Synthetic: FXN 3 forward 9:69042611-69042637; SaCas9
gacttctacttgtgcctttg

SEQ ID NO: 21803 - DNA, 19 bp, Artificial Sequence
  Synthetic: FXN 3 forward 9:69042612-69042637; SaCas9
acttctacttgtgcctttg

SEQ ID NO: 21804 - DNA, 18 bp, Artificial Sequence
  Synthetic: FXN 3 forward 9:69042613-69042637; SaCas9
cttctacttgtgcctttg

SEQ ID NO: 21805 - DNA, 25 bp, Artificial Sequence
  Synthetic: FXN 3 forward 9:69042607-69042638; SaCas9
gaaagacttctacttgtgcctttga

SEQ ID NO: 21806 - DNA, 24 bp, Artificial Sequence
  Synthetic: FXN 3 forward 9:69042608-69042638; SaCas9
aaagacttctacttgtgcctttga

SEQ ID NO: 21807 - DNA, 23 bp, Artificial Sequence
  Synthetic: FXN 3 forward 9:69042609-69042638; SaCas9
aagacttctacttgtgcctttga

SEQ ID NO: 21808 - DNA, 22 bp, Artificial Sequence
  Synthetic: FXN 3 forward 9:69042610-69042638; SaCas9
agacttctacttgtgcctttga

SEQ ID NO: 21809 - DNA, 21 bp, Artificial Sequence
  Synthetic: FXN 3 forward 9:69042611-69042638; SaCas9
gacttctacttgtgcctttga

SEQ ID NO: 21810 - DNA, 20 bp, Artificial Sequence
  Synthetic: FXN 3 forward 9:69042612-69042638; SaCas9
acttctacttgtgcctttga

SEQ ID NO: 21811 - DNA, 19 bp, Artificial Sequence
  Synthetic: FXN 3 forward 9:69042613-69042638; SaCas9
cttctacttgtgcctttga

SEQ ID NO: 21812 - DNA, 18 bp, Artificial Sequence
  Synthetic: FXN 3 forward 9:69042614-69042638; SaCas9
ttctacttgtgcctttga

SEQ ID NO: 21813 - DNA, 25 bp, Artificial Sequence
  Synthetic: FXN 3 reverse 9:69042613-69042644; SaCas9
gcagttactccttcaaaggcacaag

SEQ ID NO: 21814 - DNA, 24 bp, Artificial Sequence
  Synthetic: FXN 3 reverse 9:69042614-69042644; SaCas9
cagttactccttcaaaggcacaag

SEQ ID NO: 21815 - DNA, 23 bp, Artificial Sequence
  Synthetic: FXN 3 reverse 9:69042615-69042644; SaCas9
agttactccttcaaaggcacaag

SEQ ID NO: 21816 - DNA, 22 bp, Artificial Sequence
  Synthetic: FXN 3 reverse 9:69042616-69042644; SaCas9
gttactccttcaaaggcacaag

SEQ ID NO: 21817 - DNA, 21 bp, Artificial Sequence
  Synthetic: FXN 3 reverse 9:69042617-69042644; SaCas9
ttactccttcaaaggcacaag

SEQ ID NO: 21818 - DNA, 20 bp, Artificial Sequence
  Synthetic: FXN 3 reverse 9:69042618-69042644; SaCas9
tactccttcaaaggcacaag

SEQ ID NO: 21819 - DNA, 19 bp, Artificial Sequence
  Synthetic: FXN 3 reverse 9:69042619-69042644; SaCas9
actccttcaaaggcacaag

SEQ ID NO: 21820 - DNA, 18 bp, Artificial Sequence
  Synthetic: FXN 3 reverse 9:69042620-69042644; SaCas9
ctccttcaaaggcacaag

SEQ ID NO: 21821 - DNA, 25 bp, Artificial Sequence
  Synthetic: FXN 3 reverse 9:69042651-69042682; SaCas9
tagagatttgatggttgttactggt

SEQ ID NO: 21822 - DNA, 24 bp, Artificial Sequence
  Synthetic: FXN 3 reverse 9:69042652-69042682; SaCas9
agagatttgatggttgttactggt

SEQ ID NO: 21823 - DNA, 23 bp, Artificial Sequence
  Synthetic: FXN 3 reverse 9:69042653-69042682; SaCas9
gagatttgatggttgttactggt

SEQ ID NO: 21824 - DNA, 22 bp, Artificial Sequence
  Synthetic: FXN 3 reverse 9:69042654-69042682; SaCas9
agatttgatggttgttactggt

SEQ ID NO: 21825 - DNA, 21 bp, Artificial Sequence
  Synthetic: FXN 3 reverse 9:69042655-69042682; SaCas9
gatttgatggttgttactggt

SEQ ID NO: 21826 - DNA, 20 bp, Artificial Sequence
  Synthetic: FXN 3 reverse 9:69042656-69042682; SaCas9
atttgatggttgttactggt

SEQ ID NO: 21827 - DNA, 19 bp, Artificial Sequence
  Synthetic: FXN 3 reverse 9:69042657-69042682; SaCas9
tttgatggttgttactggt

SEQ ID NO: 21828 - DNA, 18 bp, Artificial Sequence
  Synthetic: FXN 3 reverse 9:69042658-69042682; SaCas9
ttgatggttgttactggt

SEQ ID NO: 21829 - DNA, 25 bp, Artificial Sequence
  Synthetic: FXN 3 reverse 9:69042652-69042683; SaCas9
atagagatttgatggttgttactgg

SEQ ID NO: 21830 - DNA, 24 bp, Artificial Sequence
  Synthetic: FXN 3 reverse 9:69042653-69042683; SaCas9
tagagatttgatggttgttactgg

SEQ ID NO: 21831 - DNA, 23 bp, Artificial Sequence
  Synthetic: FXN 3 reverse 9:69042654-69042683; SaCas9
agagatttgatggttgttactgg

SEQ ID NO: 21832 - DNA, 22 bp, Artificial Sequence
  Synthetic: FXN 3 reverse 9:69042655-69042683; SaCas9
gagatttgatggttgttactgg

SEQ ID NO: 21833 - DNA, 21 bp, Artificial Sequence
  Synthetic: FXN 3 reverse 9:69042656-69042683; SaCas9
agatttgatggttgttactgg

SEQ ID NO: 21834 - DNA, 20 bp, Artificial Sequence
  Synthetic: FXN 3 reverse 9:69042657-69042683; SaCas9
gatttgatggttgttactgg

SEQ ID NO: 21835 - DNA, 19 bp, Artificial Sequence
  Synthetic: FXN 3 reverse 9:69042658-69042683; SaCas9
atttgatggttgttactgg

SEQ ID NO: 21836 - DNA, 18 bp, Artificial Sequence
  Synthetic: FXN 3 reverse 9:69042659-69042683; SaCas9
tttgatggttgttactgg

SEQ ID NO: 21837 - DNA, 25 bp, Artificial Sequence
  Synthetic: FXN 3 reverse 9:69042653-69042684; SaCas9
aatagagatttgatggttgttactg

SEQ ID NO: 21838 - DNA, 24 bp, Artificial Sequence
  Synthetic: FXN 3 reverse 9:69042654-69042684; SaCas9
atagagatttgatggttgttactg

SEQ ID NO: 21839 - DNA, 23 bp, Artificial Sequence
  Synthetic: FXN 3 reverse 9:69042655-69042684; SaCas9
tagagatttgatggttgttactg

SEQ ID NO: 21840 - DNA, 22 bp, Artificial Sequence
  Synthetic: FXN 3 reverse 9:69042656-69042684; SaCas9
agagatttgatggttgttactg

SEQ ID NO: 21841 - DNA, 21 bp, Artificial Sequence
  Synthetic: FXN 3 reverse 9:69042657-69042684; SaCas9
gagatttgatggttgttactg

SEQ ID NO: 21842 - DNA, 20 bp, Artificial Sequence
  Synthetic: FXN 3 reverse 9:69042658-69042684; SaCas9
agatttgatggttgttactg

SEQ ID NO: 21843 - DNA, 19 bp, Artificial Sequence
  Synthetic: FXN 3 reverse 9:69042659-69042684; SaCas9
gatttgatggttgttactg

SEQ ID NO: 21844 - DNA, 18 bp, Artificial Sequence
  Synthetic: FXN 3 reverse 9:69042660-69042684; SaCas9
atttgatggttgttactg

SEQ ID NO: 21845 - DNA, 25 bp, Artificial Sequence
  Synthetic: FXN 3 reverse 9:69042676-69042707; SaCas9
ttgtgtgtgtgtgtgtttaatttaa

SEQ ID NO: 21846 - DNA, 24 bp, Artificial Sequence
  Synthetic: FXN 3 reverse 9:69042677-69042707; SaCas9
tgtgtgtgtgtgtgtttaatttaa

SEQ ID NO: 21847 - DNA, 23 bp, Artificial Sequence
  Synthetic: FXN 3 reverse 9:69042678-69042707; SaCas9
gtgtgtgtgtgtgtttaatttaa

SEQ ID NO: 21848 - DNA, 22 bp, Artificial Sequence
  Synthetic: FXN 3 reverse 9:69042679-69042707; SaCas9
tgtgtgtgtgtgtttaatttaa

SEQ ID NO: 21849 - DNA, 21 bp, Artificial Sequence
  Synthetic: FXN 3 reverse 9:69042680-69042707; SaCas9
gtgtgtgtgtgtttaatttaa

SEQ ID NO: 21850 - DNA, 20 bp, Artificial Sequence
  Synthetic: FXN 3 reverse 9:69042681-69042707; SaCas9
tgtgtgtgtgtttaatttaa

SEQ ID NO: 21851 - DNA, 19 bp, Artificial Sequence
  Synthetic: FXN 3 reverse 9:69042682-69042707; SaCas9
gtgtgtgtgtttaatttaa

SEQ ID NO: 21852 - DNA, 18 bp, Artificial Sequence
  Synthetic: FXN 3 reverse 9:69042683-69042707; SaCas9
tgtgtgtgtttaatttaa

SEQ ID NO: 21853 - DNA, 25 bp, Artificial Sequence
  Synthetic: FXN 3 forward 9:69042697-69042728; SaCas9
acacacacaaacaaaaacagctatt

SEQ ID NO: 21854 - DNA, 24 bp, Artificial Sequence
  Synthetic: FXN 3 forward 9:69042698-69042728; SaCas9
cacacacaaacaaaaacagctatt

SEQ ID NO: 21855 - DNA, 23 bp, Artificial Sequence
  Synthetic: FXN 3 forward 9:69042699-69042728; SaCas9
acacacaaacaaaaacagctatt

SEQ ID NO: 21856 - DNA, 22 bp, Artificial Sequence
  Synthetic: FXN 3 forward 9:69042700-69042728; SaCas9
cacacaaacaaaaacagctatt

SEQ ID NO: 21857 - DNA, 21 bp, Artificial Sequence
  Synthetic: FXN 3 forward 9:69042701-69042728; SaCas9
acacaaacaaaaacagctatt

SEQ ID NO: 21858 - DNA, 20 bp, Artificial Sequence
  Synthetic: FXN 3 forward 9:69042702-69042728; SaCas9
cacaaacaaaaacagctatt

SEQ ID NO: 21859 - DNA, 19 bp, Artificial Sequence
  Synthetic: FXN 3 forward 9:69042703-69042728; SaCas9
acaaacaaaaacagctatt

SEQ ID NO: 21860 - DNA, 18 bp, Artificial Sequence
  Synthetic: FXN 3 forward 9:69042704-69042728; SaCas9
caaacaaaaacagctatt

SEQ ID NO: 21861 - DNA, 25 bp, Artificial Sequence
  Synthetic: FXN 3 forward 9:69042729-69042760; SaCas9
tatcagcgactaagacaactaaggt

SEQ ID NO: 21862 - DNA, 24 bp, Artificial Sequence
  Synthetic: FXN 3 forward 9:69042730-69042760; SaCas9
atcagcgactaagacaactaaggt

SEQ ID NO: 21863 - DNA, 23 bp, Artificial Sequence
  Synthetic: FXN 3 forward 9:69042731-69042760; SaCas9
tcagcgactaagacaactaaggt

SEQ ID NO: 21864 - DNA, 22 bp, Artificial Sequence
  Synthetic: FXN 3 forward 9:69042732-69042760; SaCas9
cagcgactaagacaactaaggt

SEQ ID NO: 21865 - DNA, 21 bp, Artificial Sequence
  Synthetic: FXN 3 forward 9:69042733-69042760; SaCas9
agcgactaagacaactaaggt

SEQ ID NO: 21866 - DNA, 20 bp, Artificial Sequence
  Synthetic: FXN 3 forward 9:69042734-69042760; SaCas9
gcgactaagacaactaaggt

SEQ ID NO: 21867 - DNA, 19 bp, Artificial Sequence
  Synthetic: FXN 3 forward 9:69042735-69042760; SaCas9
cgactaagacaactaaggt

SEQ ID NO: 21868 - DNA, 18 bp, Artificial Sequence
  Synthetic: FXN 3 forward 9:69042736-69042760; SaCas9
gactaagacaactaaggt

SEQ ID NO: 21869 - DNA, 25 bp, Artificial Sequence
  Synthetic: FXN 3 forward 9:69042731-69042762; SaCas9
tcagcgactaagacaactaaggttt

SEQ ID NO: 21870 - DNA, 24 bp, Artificial Sequence
  Synthetic: FXN 3 forward 9:69042732-69042762; SaCas9
cagcgactaagacaactaaggttt

SEQ ID NO: 21871 - DNA, 23 bp, Artificial Sequence
  Synthetic: FXN 3 forward 9:69042733-69042762; SaCas9
agcgactaagacaactaaggttt

SEQ ID NO: 21872 - DNA, 22 bp, Artificial Sequence
  Synthetic: FXN 3 forward 9:69042734-69042762; SaCas9
gcgactaagacaactaaggttt

SEQ ID NO: 21873 - DNA, 21 bp, Artificial Sequence
  Synthetic: FXN 3 forward 9:69042735-69042762; SaCas9
cgactaagacaactaaggttt

SEQ ID NO: 21874 - DNA, 20 bp, Artificial Sequence
  Synthetic: FXN 3 forward 9:69042736-69042762; SaCas9
gactaagacaactaaggttt

SEQ ID NO: 21875 - DNA, 19 bp, Artificial Sequence
  Synthetic: FXN 3 forward 9:69042737-69042762; SaCas9
actaagacaactaaggttt

SEQ ID NO: 21876 - DNA, 18 bp, Artificial Sequence
  Synthetic: FXN 3 forward 9:69042738-69042762; SaCas9
ctaagacaactaaggttt

SEQ ID NO: 21877 - DNA, 25 bp, Artificial Sequence
  Synthetic: FXN 3 forward 9:69042732-69042763; SaCas9
cagcgactaagacaactaaggtttg

SEQ ID NO: 21878 - DNA, 24 bp, Artificial Sequence
  Synthetic: FXN 3 forward 9:69042733-69042763; SaCas9
agcgactaagacaactaaggtttg

SEQ ID NO: 21879 - DNA, 23 bp, Artificial Sequence
  Synthetic: FXN 3 forward 9:69042734-69042763; SaCas9
gcgactaagacaactaaggtttg

SEQ ID NO: 21880 - DNA, 22 bp, Artificial Sequence
  Synthetic: FXN 3 forward 9:69042735-69042763; SaCas9
cgactaagacaactaaggtttg

SEQ ID NO: 21881 - DNA, 21 bp, Artificial Sequence
  Synthetic: FXN 3 forward 9:69042736-69042763; SaCas9
gactaagacaactaaggtttg

SEQ ID NO: 21882 - DNA, 20 bp, Artificial Sequence
  Synthetic: FXN 3 forward 9:69042737-69042763; SaCas9
actaagacaactaaggtttg

SEQ ID NO: 21883 - DNA, 19 bp, Artificial Sequence
  Synthetic: FXN 3 forward 9:69042738-69042763; SaCas9
ctaagacaactaaggtttg

SEQ ID NO: 21884 - DNA, 18 bp, Artificial Sequence
  Synthetic: FXN 3 forward 9:69042739-69042763; SaCas9
taagacaactaaggtttg

SEQ ID NO: 21885 - DNA, 25 bp, Artificial Sequence
  Synthetic: FXN 3 forward 9:69042738-69042769; SaCas9
ctaagacaactaaggtttgaggggc

SEQ ID NO: 21886 - DNA, 24 bp, Artificial Sequence
  Synthetic: FXN 3 forward 9:69042739-69042769; SaCas9
taagacaactaaggtttgaggggc

SEQ ID NO: 21887 - DNA, 23 bp, Artificial Sequence
  Synthetic: FXN 3 forward 9:69042740-69042769; SaCas9
aagacaactaaggtttgaggggc

SEQ ID NO: 21888 - DNA, 22 bp, Artificial Sequence
  Synthetic: FXN 3 forward 9:69042741-69042769; SaCas9
agacaactaaggtttgaggggc

SEQ ID NO: 21889 - DNA, 21 bp, Artificial Sequence
  Synthetic: FXN 3 forward 9:69042742-69042769; SaCas9
gacaactaaggtttgaggggc

SEQ ID NO: 21890 - DNA, 20 bp, Artificial Sequence
  Synthetic: FXN 3 forward 9:69042743-69042769; SaCas9
acaactaaggtttgaggggc

SEQ ID NO: 21891 - DNA, 19 bp, Artificial Sequence
  Synthetic: FXN 3 forward 9:69042744-69042769; SaCas9
caactaaggtttgaggggc

SEQ ID NO: 21892 - DNA, 18 bp, Artificial Sequence
  Synthetic: FXN 3 forward 9:69042745-69042769; SaCas9
aactaaggtttgaggggc

SEQ ID NO: 21893 - DNA, 25 bp, Artificial Sequence
  Synthetic: FXN 3 forward 9:69042745-69042776; SaCas9
aactaaggtttgaggggccaggatc

SEQ ID NO: 21894 - DNA, 24 bp, Artificial Sequence
  Synthetic: FXN 3 forward 9:69042746-69042776; SaCas9
actaaggtttgaggggccaggatc

SEQ ID NO: 21895 - DNA, 23 bp, Artificial Sequence
  Synthetic: FXN 3 forward 9:69042747-69042776; SaCas9
ctaaggtttgaggggccaggatc

SEQ ID NO: 21896 - DNA, 22 bp, Artificial Sequence
  Synthetic: FXN 3 forward 9:69042748-69042776; SaCas9
taaggtttgaggggccaggatc

SEQ ID NO: 21897 - DNA, 21 bp, Artificial Sequence
  Synthetic: FXN 3 forward 9:69042749-69042776; SaCas9
aaggtttgaggggccaggatc

SEQ ID NO: 21898 - DNA, 20 bp, Artificial Sequence
  Synthetic: FXN 3 forward 9:69042750-69042776; SaCas9
aggtttgaggggccaggatc

SEQ ID NO: 21899 - DNA, 19 bp, Artificial Sequence
  Synthetic: FXN 3 forward 9:69042751-69042776; SaCas9
ggtttgaggggccaggatc

SEQ ID NO: 21900 - DNA, 18 bp, Artificial Sequence
  Synthetic: FXN 3 forward 9:69042752-69042776; SaCas9
gtttgaggggccaggatc

SEQ ID NO: 21901 - DNA, 25 bp, Artificial Sequence
  Synthetic: FXN 3 forward 9:69042746-69042777; SaCas9
actaaggtttgaggggccaggatcc

SEQ ID NO: 21902 - DNA, 24 bp, Artificial Sequence
  Synthetic: FXN 3 forward 9:69042747-69042777; SaCas9
ctaaggtttgaggggccaggatcc

SEQ ID NO: 21903 - DNA, 23 bp, Artificial Sequence
  Synthetic: FXN 3 forward 9:69042748-69042777; SaCas9
taaggtttgaggggccaggatcc

SEQ ID NO: 21904 - DNA, 22 bp, Artificial Sequence
  Synthetic: FXN 3 forward 9:69042749-69042777; SaCas9
aaggtttgaggggccaggatcc

SEQ ID NO: 21905 - DNA, 21 bp, Artificial Sequence
  Synthetic: FXN 3 forward 9:69042750-69042777; SaCas9
aggtttgaggggccaggatcc

SEQ ID NO: 21906 - DNA, 20 bp, Artificial Sequence
  Synthetic: FXN 3 forward 9:69042751-69042777; SaCas9
ggtttgaggggccaggatcc

SEQ ID NO: 21907 - DNA, 19 bp, Artificial Sequence
  Synthetic: FXN 3 forward 9:69042752-69042777; SaCas9
gtttgaggggccaggatcc

SEQ ID NO: 21908 - DNA, 18 bp, Artificial Sequence
  Synthetic: FXN 3 forward 9:69042753-69042777; SaCas9
tttgaggggccaggatcc

SEQ ID NO: 21909 - DNA, 25 bp, Artificial Sequence
  Synthetic: FXN 3 forward 9:69042748-69042779; SaCas9
taaggtttgaggggccaggatcctg

SEQ ID NO: 21910 - DNA, 24 bp, Artificial Sequence
  Synthetic: FXN 3 forward 9:69042749-69042779; SaCas9
aaggtttgaggggccaggatcctg

SEQ ID NO: 21911 - DNA, 23 bp, Artificial Sequence
  Synthetic: FXN 3 forward 9:69042750-69042779; SaCas9
aggtttgaggggccaggatcctg

SEQ ID NO: 21912 - DNA, 22 bp, Artificial Sequence
  Synthetic: FXN 3 forward 9:69042751-69042779; SaCas9
ggtttgaggggccaggatcctg

SEQ ID NO: 21913 - DNA, 21 bp, Artificial Sequence
  Synthetic: FXN 3 forward 9:69042752-69042779; SaCas9
gtttgaggggccaggatcctg

SEQ ID NO: 21914 - DNA, 20 bp, Artificial Sequence
  Synthetic: FXN 3 forward 9:69042753-69042779; SaCas9
tttgaggggccaggatcctg

SEQ ID NO: 21915 - DNA, 19 bp, Artificial Sequence
  Synthetic: FXN 3 forward 9:69042754-69042779; SaCas9
ttgaggggccaggatcctg

SEQ ID NO: 21916 - DNA, 18 bp, Artificial Sequence
  Synthetic: FXN 3 forward 9:69042755-69042779; SaCas9
tgaggggccaggatcctg

SEQ ID NO: 21917 - DNA, 25 bp, Artificial Sequence
  Synthetic: FXN 3 forward 9:69042753-69042784; SaCas9
tttgaggggccaggatcctggagag

SEQ ID NO: 21918 - DNA, 24 bp, Artificial Sequence
  Synthetic: FXN 3 forward 9:69042754-69042784; SaCas9
ttgaggggccaggatcctggagag

SEQ ID NO: 21919 - DNA, 23 bp, Artificial Sequence
  Synthetic: FXN 3 forward 9:69042755-69042784; SaCas9
tgaggggccaggatcctggagag

SEQ ID NO: 21920 - DNA, 22 bp, Artificial Sequence
  Synthetic: FXN 3 forward 9:69042756-69042784; SaCas9
gaggggccaggatcctggagag

SEQ ID NO: 21921 - DNA, 21 bp, Artificial Sequence
  Synthetic: FXN 3 forward 9:69042757-69042784; SaCas9
aggggccaggatcctggagag

SEQ ID NO: 21922 - DNA, 20 bp, Artificial Sequence
  Synthetic: FXN 3 forward 9:69042758-69042784; SaCas9
ggggccaggatcctggagag

SEQ ID NO: 21923 - DNA, 19 bp, Artificial Sequence
  Synthetic: FXN 3 forward 9:69042759-69042784; SaCas9
gggccaggatcctggagag

SEQ ID NO: 21924 - DNA, 18 bp, Artificial Sequence
  Synthetic: FXN 3 forward 9:69042760-69042784; SaCas9
ggccaggatcctggagag

SEQ ID NO: 21925 - DNA, 25 bp, Artificial Sequence
  Synthetic: FXN 3 forward 9:69042754-69042785; SaCas9
ttgaggggccaggatcctggagaga

SEQ ID NO: 21926 - DNA, 24 bp, Artificial Sequence
  Synthetic: FXN 3 forward 9:69042755-69042785; SaCas9
tgaggggccaggatcctggagaga

SEQ ID NO: 21927 - DNA, 23 bp, Artificial Sequence
  Synthetic: FXN 3 forward 9:69042756-69042785; SaCas9
gaggggccaggatcctggagaga

SEQ ID NO: 21928 - DNA, 22 bp, Artificial Sequence
  Synthetic: FXN 3 forward 9:69042757-69042785; SaCas9
aggggccaggatcctggagaga

SEQ ID NO: 21929 - DNA, 21 bp, Artificial Sequence
  Synthetic: FXN 3 forward 9:69042758-69042785; SaCas9
ggggccaggatcctggagaga

SEQ ID NO: 21930 - DNA, 20 bp, Artificial Sequence
  Synthetic: FXN 3 forward 9:69042759-69042785; SaCas9
gggccaggatcctggagaga

SEQ ID NO: 21931 - DNA, 19 bp, Artificial Sequence
  Synthetic: FXN 3 forward 9:69042760-69042785; SaCas9
ggccaggatcctggagaga

SEQ ID NO: 21932 - DNA, 18 bp, Artificial Sequence
  Synthetic: FXN 3 forward 9:69042761-69042785; SaCas9
gccaggatcctggagaga

SEQ ID NO: 21933 - DNA, 25 bp, Artificial Sequence
  Synthetic: FXN 3 forward 9:69042765-69042796; SaCas9
ggatcctggagagatggaaacttcc

SEQ ID NO: 21934 - DNA, 24 bp, Artificial Sequence
  Synthetic: FXN 3 forward 9:69042766-69042796; SaCas9
gatcctggagagatggaaacttcc

SEQ ID NO: 21935 - DNA, 23 bp, Artificial Sequence
  Synthetic: FXN 3 forward 9:69042767-69042796; SaCas9
atcctggagagatggaaacttcc

SEQ ID NO: 21936 - DNA, 22 bp, Artificial Sequence
  Synthetic: FXN 3 forward 9:69042768-69042796; SaCas9
tcctggagagatggaaacttcc

SEQ ID NO: 21937 - DNA, 21 bp, Artificial Sequence
  Synthetic: FXN 3 forward 9:69042769-69042796; SaCas9
cctggagagatggaaacttcc

SEQ ID NO: 21938 - DNA, 20 bp, Artificial Sequence
  Synthetic: FXN 3 forward 9:69042770-69042796; SaCas9
ctggagagatggaaacttcc

SEQ ID NO: 21939 - DNA, 19 bp, Artificial Sequence
  Synthetic: FXN 3 forward 9:69042771-69042796; SaCas9
tggagagatggaaacttcc

SEQ ID NO: 21940 - DNA, 18 bp, Artificial Sequence
  Synthetic: FXN 3 forward 9:69042772-69042796; SaCas9
ggagagatggaaacttcc

SEQ ID NO: 21941 - DNA, 25 bp, Artificial Sequence
  Synthetic: FXN 3 reverse 9:69042767-69042798; SaCas9
cacctcagggaagtttccatctctc

SEQ ID NO: 21942 - DNA, 24 bp, Artificial Sequence
  Synthetic: FXN 3 reverse 9:69042768-69042798; SaCas9
acctcagggaagtttccatctctc

SEQ ID NO: 21943 - DNA, 23 bp, Artificial Sequence
  Synthetic: FXN 3 reverse 9:69042769-69042798; SaCas9
cctcagggaagtttccatctctc

SEQ ID NO: 21944 - DNA, 22 bp, Artificial Sequence
  Synthetic: FXN 3 reverse 9:69042770-69042798; SaCas9
ctcagggaagtttccatctctc

SEQ ID NO: 21945 - DNA, 21 bp, Artificial Sequence
  Synthetic: FXN 3 reverse 9:69042771-69042798; SaCas9
tcagggaagtttccatctctc

SEQ ID NO: 21946 - DNA, 20 bp, Artificial Sequence
  Synthetic: FXN 3 reverse 9:69042772-69042798; SaCas9
cagggaagtttccatctctc

SEQ ID NO: 21947 - DNA, 19 bp, Artificial Sequence
  Synthetic: FXN 3 reverse 9:69042773-69042798; SaCas9
agggaagtttccatctctc

SEQ ID NO: 21948 - DNA, 18 bp, Artificial Sequence
  Synthetic: FXN 3 reverse 9:69042774-69042798; SaCas9
gggaagtttccatctctc

SEQ ID NO: 21949 - DNA, 25 bp, Artificial Sequence
  Synthetic: FXN 3 forward 9:69042770-69042801; SaCas9
ctggagagatggaaacttccctgag

SEQ ID NO: 21950 - DNA, 24 bp, Artificial Sequence
  Synthetic: FXN 3 forward 9:69042771-69042801; SaCas9
tggagagatggaaacttccctgag

SEQ ID NO: 21951 - DNA, 23 bp, Artificial Sequence
  Synthetic: FXN 3 forward 9:69042772-69042801; SaCas9
ggagagatggaaacttccctgag

SEQ ID NO: 21952 - DNA, 22 bp, Artificial Sequence
  Synthetic: FXN 3 forward 9:69042773-69042801; SaCas9
gagagatggaaacttccctgag

SEQ ID NO: 21953 - DNA, 21 bp, Artificial Sequence
  Synthetic: FXN 3 forward 9:69042774-69042801; SaCas9
agagatggaaacttccctgag

SEQ ID NO: 21954 - DNA, 20 bp, Artificial Sequence
  Synthetic: FXN 3 forward 9:69042775-69042801; SaCas9
gagatggaaacttccctgag

SEQ ID NO: 21955 - DNA, 19 bp, Artificial Sequence
  Synthetic: FXN 3 forward 9:69042776-69042801; SaCas9
agatggaaacttccctgag

SEQ ID NO: 21956 - DNA, 18 bp, Artificial Sequence
  Synthetic: FXN 3 forward 9:69042777-69042801; SaCas9
gatggaaacttccctgag

SEQ ID NO: 21957 - DNA, 25 bp, Artificial Sequence
  Synthetic: FXN 3 reverse 9:69042785-69042816; SaCas9
gtctgagaatgtggggctcacctca

SEQ ID NO: 21958 - DNA, 24 bp, Artificial Sequence
  Synthetic: FXN 3 reverse 9:69042786-69042816; SaCas9
tctgagaatgtggggctcacctca

SEQ ID NO: 21959 - DNA, 23 bp, Artificial Sequence
  Synthetic: FXN 3 reverse 9:69042787-69042816; SaCas9
ctgagaatgtggggctcacctca

SEQ ID NO: 21960 - DNA, 22 bp, Artificial Sequence
  Synthetic: FXN 3 reverse 9:69042788-69042816; SaCas9
tgagaatgtggggctcacctca

SEQ ID NO: 21961 - DNA, 21 bp, Artificial Sequence
  Synthetic: FXN 3 reverse 9:69042789-69042816; SaCas9
gagaatgtggggctcacctca

SEQ ID NO: 21962 - DNA, 20 bp, Artificial Sequence
  Synthetic: FXN 3 reverse 9:69042790-69042816; SaCas9
agaatgtggggctcacctca

SEQ ID NO: 21963 - DNA, 19 bp, Artificial Sequence
  Synthetic: FXN 3 reverse 9:69042791-69042816; SaCas9
gaatgtggggctcacctca

SEQ ID NO: 21964 - DNA, 18 bp, Artificial Sequence
  Synthetic: FXN 3 reverse 9:69042792-69042816; SaCas9
aatgtggggctcacctca

SEQ ID NO: 21965 - DNA, 25 bp, Artificial Sequence
  Synthetic: FXN 3 reverse 9:69042786-69042817; SaCas9
tgtctgagaatgtggggctcacctc

SEQ ID NO: 21966 - DNA, 24 bp, Artificial Sequence
  Synthetic: FXN 3 reverse 9:69042787-69042817; SaCas9
gtctgagaatgtggggctcacctc

SEQ ID NO: 21967 - DNA, 23 bp, Artificial Sequence
  Synthetic: FXN 3 reverse 9:69042788-69042817; SaCas9
tctgagaatgtggggctcacctc

SEQ ID NO: 21968 - DNA, 22 bp, Artificial Sequence
  Synthetic: FXN 3 reverse 9:69042789-69042817; SaCas9
ctgagaatgtggggctcacctc

SEQ ID NO: 21969 - DNA, 21 bp, Artificial Sequence
  Synthetic: FXN 3 reverse 9:69042790-69042817; SaCas9
tgagaatgtggggctcacctc

SEQ ID NO: 21970 - DNA, 20 bp, Artificial Sequence
  Synthetic: FXN 3 reverse 9:69042791-69042817; SaCas9
gagaatgtggggctcacctc

SEQ ID NO: 21971 - DNA, 19 bp, Artificial Sequence
  Synthetic: FXN 3 reverse 9:69042792-69042817; SaCas9
agaatgtggggctcacctc

SEQ ID NO: 21972 - DNA, 18 bp, Artificial Sequence
  Synthetic: FXN 3 reverse 9:69042793-69042817; SaCas9
gaatgtggggctcacctc

SEQ ID NO: 21973 - DNA, 25 bp, Artificial Sequence
  Synthetic: FXN 3 reverse 9:69042787-69042818; SaCas9
gtgtctgagaatgtggggctcacct

SEQ ID NO: 21974 - DNA, 24 bp, Artificial Sequence
  Synthetic: FXN 3 reverse 9:69042788-69042818; SaCas9
tgtctgagaatgtggggctcacct

SEQ ID NO: 21975 - DNA, 23 bp, Artificial Sequence
  Synthetic: FXN 3 reverse 9:69042789-69042818; SaCas9
gtctgagaatgtggggctcacct

SEQ ID NO: 21976 - DNA, 22 bp, Artificial Sequence
  Synthetic: FXN 3 reverse 9:69042790-69042818; SaCas9
tctgagaatgtggggctcacct

SEQ ID NO: 21977 - DNA, 21 bp, Artificial Sequence
  Synthetic: FXN 3 reverse 9:69042791-69042818; SaCas9
ctgagaatgtggggctcacct

SEQ ID NO: 21978 - DNA, 20 bp, Artificial Sequence
  Synthetic: FXN 3 reverse 9:69042792-69042818; SaCas9
tgagaatgtggggctcacct

SEQ ID NO: 21979 - DNA, 19 bp, Artificial Sequence
  Synthetic: FXN 3 reverse 9:69042793-69042818; SaCas9
gagaatgtggggctcacct

SEQ ID NO: 21980 - DNA, 18 bp, Artificial Sequence
  Synthetic: FXN 3 reverse 9:69042794-69042818; SaCas9
agaatgtggggctcacct

SEQ ID NO: 21981 - DNA, 25 bp, Artificial Sequence
  Synthetic: FXN 3 forward 9:69042799-69042830; SaCas9
gccccacattctcagacacttttcc

SEQ ID NO: 21982 - DNA, 24 bp, Artificial Sequence
  Synthetic: FXN 3 forward 9:69042800-69042830; SaCas9
ccccacattctcagacacttttcc

SEQ ID NO: 21983 - DNA, 23 bp, Artificial Sequence
  Synthetic: FXN 3 forward 9:69042801-69042830; SaCas9
cccacattctcagacacttttcc

SEQ ID NO: 21984 - DNA, 22 bp, Artificial Sequence
  Synthetic: FXN 3 forward 9:69042802-69042830; SaCas9
ccacattctcagacacttttcc

SEQ ID NO: 21985 - DNA, 21 bp, Artificial Sequence
  Synthetic: FXN 3 forward 9:69042803-69042830; SaCas9
cacattctcagacacttttcc

SEQ ID NO: 21986 - DNA, 20 bp, Artificial Sequence
  Synthetic: FXN 3 forward 9:69042804-69042830; SaCas9
acattctcagacacttttcc

SEQ ID NO: 21987 - DNA, 19 bp, Artificial Sequence
  Synthetic: FXN 3 forward 9:69042805-69042830; SaCas9
cattctcagacacttttcc

SEQ ID NO: 21988 - DNA, 18 bp, Artificial Sequence
  Synthetic: FXN 3 forward 9:69042806-69042830; SaCas9
attctcagacacttttcc

SEQ ID NO: 21989 - DNA, 25 bp, Artificial Sequence
  Synthetic: FXN 3 reverse 9:69042799-69042830; SaCas9
atccaaggaaaagtgtctgagaatg

SEQ ID NO: 21990 - DNA, 24 bp, Artificial Sequence
  Synthetic: FXN 3 reverse 9:69042800-69042830; SaCas9
tccaaggaaaagtgtctgagaatg

SEQ ID NO: 21991 - DNA, 23 bp, Artificial Sequence
  Synthetic: FXN 3 reverse 9:69042801-69042830; SaCas9
ccaaggaaaagtgtctgagaatg

SEQ ID NO: 21992 - DNA, 22 bp, Artificial Sequence
  Synthetic: FXN 3 reverse 9:69042802-69042830; SaCas9
caaggaaaagtgtctgagaatg

SEQ ID NO: 21993 - DNA, 21 bp, Artificial Sequence
  Synthetic: FXN 3 reverse 9:69042803-69042830; SaCas9
aaggaaaagtgtctgagaatg

SEQ ID NO: 21994 - DNA, 20 bp, Artificial Sequence
  Synthetic: FXN 3 reverse 9:69042804-69042830; SaCas9
aggaaaagtgtctgagaatg

SEQ ID NO: 21995 - DNA, 19 bp, Artificial Sequence
  Synthetic: FXN 3 reverse 9:69042805-69042830; SaCas9
ggaaaagtgtctgagaatg

SEQ ID NO: 21996 - DNA, 18 bp, Artificial Sequence
  Synthetic: FXN 3 reverse 9:69042806-69042830; SaCas9
gaaaagtgtctgagaatg

SEQ ID NO: 21997 - DNA, 25 bp, Artificial Sequence
  Synthetic: FXN 3 reverse 9:69042800-69042831; SaCas9
catccaaggaaaagtgtctgagaat

SEQ ID NO: 21998 - DNA, 24 bp, Artificial Sequence
  Synthetic: FXN 3 reverse 9:69042801-69042831; SaCas9
atccaaggaaaagtgtctgagaat

SEQ ID NO: 21999 - DNA, 23 bp, Artificial Sequence
  Synthetic: FXN 3 reverse 9:69042802-69042831; SaCas9
tccaaggaaaagtgtctgagaat

SEQ ID NO: 22000 - DNA, 22 bp, Artificial Sequence
  Synthetic: FXN 3 reverse 9:69042803-69042831; SaCas9
ccaaggaaaagtgtctgagaat

SEQ ID NO: 22001 - DNA, 21 bp, Artificial Sequence
  Synthetic: FXN 3 reverse 9:69042804-69042831; SaCas9
caaggaaaagtgtctgagaat

SEQ ID NO: 22002 - DNA, 20 bp, Artificial Sequence
  Synthetic: FXN 3 reverse 9:69042805-69042831; SaCas9
aaggaaaagtgtctgagaat

SEQ ID NO: 22003 - DNA, 19 bp, Artificial Sequence
  Synthetic: FXN 3 reverse 9:69042806-69042831; SaCas9
aggaaaagtgtctgagaat

SEQ ID NO: 22004 - DNA, 18 bp, Artificial Sequence
  Synthetic: FXN 3 reverse 9:69042807-69042831; SaCas9
ggaaaagtgtctgagaat

SEQ ID NO: 22005 - DNA, 25 bp, Artificial Sequence
  Synthetic: FXN 3 reverse 9:69042806-69042837; SaCas9
tcaaaacatccaaggaaaagtgtct

SEQ ID NO: 22006 - DNA, 24 bp, Artificial Sequence
  Synthetic: FXN 3 reverse 9:69042807-69042837; SaCas9
caaaacatccaaggaaaagtgtct

SEQ ID NO: 22007 - DNA, 23 bp, Artificial Sequence
  Synthetic: FXN 3 reverse 9:69042808-69042837; SaCas9
aaaacatccaaggaaaagtgtct

SEQ ID NO: 22008 - DNA, 22 bp, Artificial Sequence
  Synthetic: FXN 3 reverse 9:69042809-69042837; SaCas9
aaacatccaaggaaaagtgtct

SEQ ID NO: 22009 - DNA, 21 bp, Artificial Sequence
  Synthetic: FXN 3 reverse 9:69042810-69042837; SaCas9
aacatccaaggaaaagtgtct

SEQ ID NO: 22010 - DNA, 20 bp, Artificial Sequence
  Synthetic: FXN 3 reverse 9:69042811-69042837; SaCas9
acatccaaggaaaagtgtct

SEQ ID NO: 22011 - DNA, 19 bp, Artificial Sequence
  Synthetic: FXN 3 reverse 9:69042812-69042837; SaCas9
catccaaggaaaagtgtct

SEQ ID NO: 22012 - DNA, 18 bp, Artificial Sequence
  Synthetic: FXN 3 reverse 9:69042813-69042837; SaCas9
atccaaggaaaagtgtct

SEQ ID NO: 22013 - DNA, 25 bp, Artificial Sequence
  Synthetic: FXN 3 forward 9:69042808-69042839; SaCas9
tctcagacacttttccttggatgtt

SEQ ID NO: 22014 - DNA, 24 bp, Artificial Sequence
  Synthetic: FXN 3 forward 9:69042809-69042839; SaCas9
ctcagacacttttccttggatgtt

SEQ ID NO: 22015 - DNA, 23 bp, Artificial Sequence
  Synthetic: FXN 3 forward 9:69042810-69042839; SaCas9
tcagacacttttccttggatgtt

SEQ ID NO: 22016 - DNA, 22 bp, Artificial Sequence
  Synthetic: FXN 3 forward 9:69042811-69042839; SaCas9
cagacacttttccttggatgtt

SEQ ID NO: 22017 - DNA, 21 bp, Artificial Sequence
  Synthetic: FXN 3 forward 9:69042812-69042839; SaCas9
agacacttttccttggatgtt

SEQ ID NO: 22018 - DNA, 20 bp, Artificial Sequence
  Synthetic: FXN 3 forward 9:69042813-69042839; SaCas9
gacacttttccttggatgtt

SEQ ID NO: 22019 - DNA, 19 bp, Artificial Sequence
  Synthetic: FXN 3 forward 9:69042814-69042839; SaCas9
acacttttccttggatgtt

SEQ ID NO: 22020 - DNA, 18 bp, Artificial Sequence
  Synthetic: FXN 3 forward 9:69042815-69042839; SaCas9
cacttttccttggatgtt

SEQ ID NO: 22021 - DNA, 25 bp, Artificial Sequence
  Synthetic: FXN 3 reverse 9:69042808-69042839; SaCas9
gctcaaaacatccaaggaaaagtgt

SEQ ID NO: 22022 - DNA, 24 bp, Artificial Sequence
  Synthetic: FXN 3 reverse 9:69042809-69042839; SaCas9
ctcaaaacatccaaggaaaagtgt

SEQ ID NO: 22023 - DNA, 23 bp, Artificial Sequence
  Synthetic: FXN 3 reverse 9:69042810-69042839; SaCas9
tcaaaacatccaaggaaaagtgt

SEQ ID NO: 22024 - DNA, 22 bp, Artificial Sequence
  Synthetic: FXN 3 reverse 9:69042811-69042839; SaCas9
caaaacatccaaggaaaagtgt

SEQ ID NO: 22025 - DNA, 21 bp, Artificial Sequence
  Synthetic: FXN 3 reverse 9:69042812-69042839; SaCas9
aaaacatccaaggaaaagtgt

SEQ ID NO: 22026 - DNA, 20 bp, Artificial Sequence
  Synthetic: FXN 3 reverse 9:69042813-69042839; SaCas9
aaacatccaaggaaaagtgt

SEQ ID NO: 22027 - DNA, 19 bp, Artificial Sequence
  Synthetic: FXN 3 reverse 9:69042814-69042839; SaCas9
aacatccaaggaaaagtgt

SEQ ID NO: 22028 - DNA, 18 bp, Artificial Sequence
  Synthetic: FXN 3 reverse 9:69042815-69042839; SaCas9
acatccaaggaaaagtgt

SEQ ID NO: 22029 - DNA, 25 bp, Artificial Sequence
  Synthetic: FXN 3 reverse 9:69042819-69042850; SaCas9
attaaagcagtgctcaaaacatcca

SEQ ID NO: 22030 - DNA, 24 bp, Artificial Sequence
  Synthetic: FXN 3 reverse 9:69042820-69042850; SaCas9
ttaaagcagtgctcaaaacatcca

SEQ ID NO: 22031 - DNA, 23 bp, Artificial Sequence
  Synthetic: FXN 3 reverse 9:69042821-69042850; SaCas9
taaagcagtgctcaaaacatcca

SEQ ID NO: 22032 - DNA, 22 bp, Artificial Sequence
  Synthetic: FXN 3 reverse 9:69042822-69042850; SaCas9
aaagcagtgctcaaaacatcca

SEQ ID NO: 22033 - DNA, 21 bp, Artificial Sequence
  Synthetic: FXN 3 reverse 9:69042823-69042850; SaCas9
aagcagtgctcaaaacatcca

SEQ ID NO: 22034 - DNA, 20 bp, Artificial Sequence
  Synthetic: FXN 3 reverse 9:69042824-69042850; SaCas9
agcagtgctcaaaacatcca

SEQ ID NO: 22035 - DNA, 19 bp, Artificial Sequence
  Synthetic: FXN 3 reverse 9:69042825-69042850; SaCas9
gcagtgctcaaaacatcca

SEQ ID NO: 22036 - DNA, 18 bp, Artificial Sequence
  Synthetic: FXN 3 reverse 9:69042826-69042850; SaCas9
cagtgctcaaaacatcca

SEQ ID NO: 22037 - DNA, 25 bp, Artificial Sequence
  Synthetic: FXN 3 reverse 9:69042820-69042851; SaCas9
aattaaagcagtgctcaaaacatcc

SEQ ID NO: 22038 - DNA, 24 bp, Artificial Sequence
  Synthetic: FXN 3 reverse 9:69042821-69042851; SaCas9
attaaagcagtgctcaaaacatcc

SEQ ID NO: 22039 - DNA, 23 bp, Artificial Sequence
  Synthetic: FXN 3 reverse 9:69042822-69042851; SaCas9
ttaaagcagtgctcaaaacatcc

SEQ ID NO: 22040 - DNA, 22 bp, Artificial Sequence
  Synthetic: FXN 3 reverse 9:69042823-69042851; SaCas9
taaagcagtgctcaaaacatcc

SEQ ID NO: 22041 - DNA, 21 bp, Artificial Sequence
  Synthetic: FXN 3 reverse 9:69042824-69042851; SaCas9
aaagcagtgctcaaaacatcc

SEQ ID NO: 22042 - DNA, 20 bp, Artificial Sequence
  Synthetic: FXN 3 reverse 9:69042825-69042851; SaCas9
aagcagtgctcaaaacatcc

SEQ ID NO: 22043 - DNA, 19 bp, Artificial Sequence
  Synthetic: FXN 3 reverse 9:69042826-69042851; SaCas9
agcagtgctcaaaacatcc

SEQ ID NO: 22044 - DNA, 18 bp, Artificial Sequence
  Synthetic: FXN 3 reverse 9:69042827-69042851; SaCas9
gcagtgctcaaaacatcc

SEQ ID NO: 22045 - DNA, 25 bp, Artificial Sequence
  Synthetic: FXN 3 forward 9:69042827-69042858; SaCas9
gatgttttgagcactgctttaattc

SEQ ID NO: 22046 - DNA, 24 bp, Artificial Sequence
  Synthetic: FXN 3 forward 9:69042828-69042858; SaCas9
atgttttgagcactgctttaattc

SEQ ID NO: 22047 - DNA, 23 bp, Artificial Sequence
  Synthetic: FXN 3 forward 9:69042829-69042858; SaCas9
tgttttgagcactgctttaattc

SEQ ID NO: 22048 - DNA, 22 bp, Artificial Sequence
  Synthetic: FXN 3 forward 9:69042830-69042858; SaCas9
gttttgagcactgctttaattc

SEQ ID NO: 22049 - DNA, 21 bp, Artificial Sequence
  Synthetic: FXN 3 forward 9:69042831-69042858; SaCas9
ttttgagcactgctttaattc

SEQ ID NO: 22050 - DNA, 20 bp, Artificial Sequence
  Synthetic: FXN 3 forward 9:69042832-69042858; SaCas9
tttgagcactgctttaattc

SEQ ID NO: 22051 - DNA, 19 bp, Artificial Sequence
  Synthetic: FXN 3 forward 9:69042833-69042858; SaCas9
ttgagcactgctttaattc

SEQ ID NO: 22052 - DNA, 18 bp, Artificial Sequence
  Synthetic: FXN 3 forward 9:69042834-69042858; SaCas9
tgagcactgctttaattc

SEQ ID NO: 22053 - DNA, 25 bp, Artificial Sequence
  Synthetic: FXN 3 forward 9:69042828-69042859; SaCas9
atgttttgagcactgctttaattcc

SEQ ID NO: 22054 - DNA, 24 bp, Artificial Sequence
  Synthetic: FXN 3 forward 9:69042829-69042859; SaCas9
tgttttgagcactgctttaattcc

SEQ ID NO: 22055 - DNA, 23 bp, Artificial Sequence
  Synthetic: FXN 3 forward 9:69042830-69042859; SaCas9
gttttgagcactgctttaattcc

SEQ ID NO: 22056 - DNA, 22 bp, Artificial Sequence
  Synthetic: FXN 3 forward 9:69042831-69042859; SaCas9
ttttgagcactgctttaattcc

SEQ ID NO: 22057 - DNA, 21 bp, Artificial Sequence
  Synthetic: FXN 3 forward 9:69042832-69042859; SaCas9
tttgagcactgctttaattcc

SEQ ID NO: 22058 - DNA, 20 bp, Artificial Sequence
  Synthetic: FXN 3 forward 9:69042833-69042859; SaCas9
ttgagcactgctttaattcc

SEQ ID NO: 22059 - DNA, 19 bp, Artificial Sequence
  Synthetic: FXN 3 forward 9:69042834-69042859; SaCas9
tgagcactgctttaattcc

SEQ ID NO: 22060 - DNA, 18 bp, Artificial Sequence
  Synthetic: FXN 3 forward 9:69042835-69042859; SaCas9
gagcactgctttaattcc

SEQ ID NO: 22061 - DNA, 25 bp, Artificial Sequence
  Synthetic: FXN 3 forward 9:69042829-69042860; SaCas9
tgttttgagcactgctttaattcct

SEQ ID NO: 22062 - DNA, 24 bp, Artificial Sequence
  Synthetic: FXN 3 forward 9:69042830-69042860; SaCas9
gttttgagcactgctttaattcct

SEQ ID NO: 22063 - DNA, 23 bp, Artificial Sequence
  Synthetic: FXN 3 forward 9:69042831-69042860; SaCas9
ttttgagcactgctttaattcct

SEQ ID NO: 22064 - DNA, 22 bp, Artificial Sequence
  Synthetic: FXN 3 forward 9:69042832-69042860; SaCas9
tttgagcactgctttaattcct

SEQ ID NO: 22065 - DNA, 21 bp, Artificial Sequence
  Synthetic: FXN 3 forward 9:69042833-69042860; SaCas9
ttgagcactgctttaattcct

SEQ ID NO: 22066 - DNA, 20 bp, Artificial Sequence
  Synthetic: FXN 3 forward 9:69042834-69042860; SaCas9
tgagcactgctttaattcct

SEQ ID NO: 22067 - DNA, 19 bp, Artificial Sequence
  Synthetic: FXN 3 forward 9:69042835-69042860; SaCas9
gagcactgctttaattcct

SEQ ID NO: 22068 - DNA, 18 bp, Artificial Sequence
  Synthetic: FXN 3 forward 9:69042836-69042860; SaCas9
agcactgctttaattcct

SEQ ID NO: 22069 - DNA, 25 bp, Artificial Sequence
  Synthetic: FXN 3 reverse 9:69042848-69042879; SaCas9
gcacagtggaaggaattgttttccc

SEQ ID NO: 22070 - DNA, 24 bp, Artificial Sequence
  Synthetic: FXN 3 reverse 9:69042849-69042879; SaCas9
cacagtggaaggaattgttttccc

SEQ ID NO: 22071 - DNA, 23 bp, Artificial Sequence
  Synthetic: FXN 3 reverse 9:69042850-69042879; SaCas9
acagtggaaggaattgttttccc

SEQ ID NO: 22072 - DNA, 22 bp, Artificial Sequence
  Synthetic: FXN 3 reverse 9:69042851-69042879; SaCas9
cagtggaaggaattgttttccc

SEQ ID NO: 22073 - DNA, 21 bp, Artificial Sequence
  Synthetic: FXN 3 reverse 9:69042852-69042879; SaCas9
agtggaaggaattgttttccc

SEQ ID NO: 22074 - DNA, 20 bp, Artificial Sequence
  Synthetic: FXN 3 reverse 9:69042853-69042879; SaCas9
gtggaaggaattgttttccc

SEQ ID NO: 22075 - DNA, 19 bp, Artificial Sequence
  Synthetic: FXN 3 reverse 9:69042854-69042879; SaCas9
tggaaggaattgttttccc

SEQ ID NO: 22076 - DNA, 18 bp, Artificial Sequence
  Synthetic: FXN 3 reverse 9:69042855-69042879; SaCas9
ggaaggaattgttttccc

SEQ ID NO: 22077 - DNA, 25 bp, Artificial Sequence
  Synthetic: FXN 3 reverse 9:69042849-69042880; SaCas9
tgcacagtggaaggaattgttttcc

SEQ ID NO: 22078 - DNA, 24 bp, Artificial Sequence
  Synthetic: FXN 3 reverse 9:69042850-69042880; SaCas9
gcacagtggaaggaattgttttcc

SEQ ID NO: 22079 - DNA, 23 bp, Artificial Sequence
  Synthetic: FXN 3 reverse 9:69042851-69042880; SaCas9
cacagtggaaggaattgttttcc

SEQ ID NO: 22080 - DNA, 22 bp, Artificial Sequence
  Synthetic: FXN 3 reverse 9:69042852-69042880; SaCas9
acagtggaaggaattgttttcc

SEQ ID NO: 22081 - DNA, 21 bp, Artificial Sequence
  Synthetic: FXN 3 reverse 9:69042853-69042880; SaCas9
cagtggaaggaattgttttcc

SEQ ID NO: 22082 - DNA, 20 bp, Artificial Sequence
  Synthetic: FXN 3 reverse 9:69042854-69042880; SaCas9
agtggaaggaattgttttcc

SEQ ID NO: 22083 - DNA, 19 bp, Artificial Sequence
  Synthetic: FXN 3 reverse 9:69042855-69042880; SaCas9
gtggaaggaattgttttcc

SEQ ID NO: 22084 - DNA, 18 bp, Artificial Sequence
  Synthetic: FXN 3 reverse 9:69042856-69042880; SaCas9
tggaaggaattgttttcc

SEQ ID NO: 22085 - DNA, 25 bp, Artificial Sequence
  Synthetic: FXN 3 forward 9:69042861-69042892; SaCas9
caattccttccactgtgcacagact

SEQ ID NO: 22086 - DNA, 24 bp, Artificial Sequence
  Synthetic: FXN 3 forward 9:69042862-69042892; SaCas9
aattccttccactgtgcacagact

SEQ ID NO: 22087 - DNA, 23 bp, Artificial Sequence
  Synthetic: FXN 3 forward 9:69042863-69042892; SaCas9
attccttccactgtgcacagact

SEQ ID NO: 22088 - DNA, 22 bp, Artificial Sequence
  Synthetic: FXN 3 forward 9:69042864-69042892; SaCas9
ttccttccactgtgcacagact

SEQ ID NO: 22089 - DNA, 21 bp, Artificial Sequence
  Synthetic: FXN 3 forward 9:69042865-69042892; SaCas9
tccttccactgtgcacagact

SEQ ID NO: 22090 - DNA, 20 bp, Artificial Sequence
  Synthetic: FXN 3 forward 9:69042866-69042892; SaCas9
ccttccactgtgcacagact

SEQ ID NO: 22091 - DNA, 19 bp, Artificial Sequence
  Synthetic: FXN 3 forward 9:69042867-69042892; SaCas9
cttccactgtgcacagact

SEQ ID NO: 22092 - DNA, 18 bp, Artificial Sequence
  Synthetic: FXN 3 forward 9:69042868-69042892; SaCas9
ttccactgtgcacagact

SEQ ID NO: 22093 - DNA, 25 bp, Artificial Sequence
  Synthetic: FXN 3 forward 9:69042862-69042893; SaCas9
aattccttccactgtgcacagactc

SEQ ID NO: 22094 - DNA, 24 bp, Artificial Sequence
  Synthetic: FXN 3 forward 9:69042863-69042893; SaCas9
attccttccactgtgcacagactc

SEQ ID NO: 22095 - DNA, 23 bp, Artificial Sequence
  Synthetic: FXN 3 forward 9:69042864-69042893; SaCas9
ttccttccactgtgcacagactc

SEQ ID NO: 22096 - DNA, 22 bp, Artificial Sequence
  Synthetic: FXN 3 forward 9:69042865-69042893; SaCas9
tccttccactgtgcacagactc

SEQ ID NO: 22097 - DNA, 21 bp, Artificial Sequence
  Synthetic: FXN 3 forward 9:69042866-69042893; SaCas9
ccttccactgtgcacagactc

SEQ ID NO: 22098 - DNA, 20 bp, Artificial Sequence
  Synthetic: FXN 3 forward 9:69042867-69042893; SaCas9
cttccactgtgcacagactc

SEQ ID NO: 22099 - DNA, 19 bp, Artificial Sequence
  Synthetic: FXN 3 forward 9:69042868-69042893; SaCas9
ttccactgtgcacagactc

SEQ ID NO: 22100 - DNA, 18 bp, Artificial Sequence
  Synthetic: FXN 3 forward 9:69042869-69042893; SaCas9
tccactgtgcacagactc

SEQ ID NO: 22101 - DNA, 25 bp, Artificial Sequence
  Synthetic: FXN 3 reverse 9:69042863-69042894; SaCas9
ggccccagagtctgtgcacagtgga

SEQ ID NO: 22102 - DNA, 24 bp, Artificial Sequence
  Synthetic: FXN 3 reverse 9:69042864-69042894; SaCas9
gccccagagtctgtgcacagtgga

SEQ ID NO: 22103 - DNA, 23 bp, Artificial Sequence
  Synthetic: FXN 3 reverse 9:69042865-69042894; SaCas9
ccccagagtctgtgcacagtgga

SEQ ID NO: 22104 - DNA, 22 bp, Artificial Sequence
  Synthetic: FXN 3 reverse 9:69042866-69042894; SaCas9
cccagagtctgtgcacagtgga

SEQ ID NO: 22105 - DNA, 21 bp, Artificial Sequence
  Synthetic: FXN 3 reverse 9:69042867-69042894; SaCas9
ccagagtctgtgcacagtgga

SEQ ID NO: 22106 - DNA, 20 bp, Artificial Sequence
  Synthetic: FXN 3 reverse 9:69042868-69042894; SaCas9
cagagtctgtgcacagtgga

SEQ ID NO: 22107 - DNA, 19 bp, Artificial Sequence
  Synthetic: FXN 3 reverse 9:69042869-69042894; SaCas9
agagtctgtgcacagtgga

SEQ ID NO: 22108 - DNA, 18 bp, Artificial Sequence
  Synthetic: FXN 3 reverse 9:69042870-69042894; SaCas9
gagtctgtgcacagtgga

SEQ ID NO: 22109 - DNA, 25 bp, Artificial Sequence
  Synthetic: FXN 3 reverse 9:69042864-69042895; SaCas9
tggccccagagtctgtgcacagtgg

SEQ ID NO: 22110 - DNA, 24 bp, Artificial Sequence
  Synthetic: FXN 3 reverse 9:69042865-69042895; SaCas9
ggccccagagtctgtgcacagtgg

SEQ ID NO: 22111 - DNA, 23 bp, Artificial Sequence
  Synthetic: FXN 3 reverse 9:69042866-69042895; SaCas9
gccccagagtctgtgcacagtgg

SEQ ID NO: 22112 - DNA, 22 bp, Artificial Sequence
  Synthetic: FXN 3 reverse 9:69042867-69042895; SaCas9
ccccagagtctgtgcacagtgg

SEQ ID NO: 22113 - DNA, 21 bp, Artificial Sequence
  Synthetic: FXN 3 reverse 9:69042868-69042895; SaCas9
cccagagtctgtgcacagtgg

SEQ ID NO: 22114 - DNA, 20 bp, Artificial Sequence
  Synthetic: FXN 3 reverse 9:69042869-69042895; SaCas9
ccagagtctgtgcacagtgg

SEQ ID NO: 22115 - DNA, 19 bp, Artificial Sequence
  Synthetic: FXN 3 reverse 9:69042870-69042895; SaCas9
cagagtctgtgcacagtgg

SEQ ID NO: 22116 - DNA, 18 bp, Artificial Sequence
  Synthetic: FXN 3 reverse 9:69042871-69042895; SaCas9
agagtctgtgcacagtgg

SEQ ID NO: 22117 - DNA, 25 bp, Artificial Sequence
  Synthetic: FXN 3 reverse 9:69042867-69042898; SaCas9
gtctggccccagagtctgtgcacag

SEQ ID NO: 22118 - DNA, 24 bp, Artificial Sequence
  Synthetic: FXN 3 reverse 9:69042868-69042898; SaCas9
tctggccccagagtctgtgcacag

SEQ ID NO: 22119 - DNA, 23 bp, Artificial Sequence
  Synthetic: FXN 3 reverse 9:69042869-69042898; SaCas9
ctggccccagagtctgtgcacag

SEQ ID NO: 22120 - DNA, 22 bp, Artificial Sequence
  Synthetic: FXN 3 reverse 9:69042870-69042898; SaCas9
tggccccagagtctgtgcacag

SEQ ID NO: 22121 - DNA, 21 bp, Artificial Sequence
  Synthetic: FXN 3 reverse 9:69042871-69042898; SaCas9
ggccccagagtctgtgcacag

SEQ ID NO: 22122 - DNA, 20 bp, Artificial Sequence
  Synthetic: FXN 3 reverse 9:69042872-69042898; SaCas9
gccccagagtctgtgcacag

SEQ ID NO: 22123 - DNA, 19 bp, Artificial Sequence
  Synthetic: FXN 3 reverse 9:69042873-69042898; SaCas9
ccccagagtctgtgcacag

SEQ ID NO: 22124 - DNA, 18 bp, Artificial Sequence
  Synthetic: FXN 3 reverse 9:69042874-69042898; SaCas9
cccagagtctgtgcacag

SEQ ID NO: 22125 - DNA, 25 bp, Artificial Sequence
  Synthetic: FXN 3 reverse 9:69042868-69042899; SaCas9
tgtctggccccagagtctgtgcaca

SEQ ID NO: 22126 - DNA, 24 bp, Artificial Sequence
  Synthetic: FXN 3 reverse 9:69042869-69042899; SaCas9
gtctggccccagagtctgtgcaca

SEQ ID NO: 22127 - DNA, 23 bp, Artificial Sequence
  Synthetic: FXN 3 reverse 9:69042870-69042899; SaCas9
tctggccccagagtctgtgcaca

SEQ ID NO: 22128 - DNA, 22 bp, Artificial Sequence
  Synthetic: FXN 3 reverse 9:69042871-69042899; SaCas9
ctggccccagagtctgtgcaca

SEQ ID NO: 22129 - DNA, 21 bp, Artificial Sequence
  Synthetic: FXN 3 reverse 9:69042872-69042899; SaCas9
tggccccagagtctgtgcaca

SEQ ID NO: 22130 - DNA, 20 bp, Artificial Sequence
  Synthetic: FXN 3 reverse 9:69042873-69042899; SaCas9
ggccccagagtctgtgcaca

SEQ ID NO: 22131 - DNA, 19 bp, Artificial Sequence
  Synthetic: FXN 3 reverse 9:69042874-69042899; SaCas9
gccccagagtctgtgcaca

SEQ ID NO: 22132 - DNA, 18 bp, Artificial Sequence
  Synthetic: FXN 3 reverse 9:69042875-69042899; SaCas9
ccccagagtctgtgcaca

SEQ ID NO: 22133 - DNA, 25 bp, Artificial Sequence
  Synthetic: FXN 3 forward 9:69042876-69042907; SaCas9
tgcacagactctggggccagacagc

SEQ ID NO: 22134 - DNA, 24 bp, Artificial Sequence
  Synthetic: FXN 3 forward 9:69042877-69042907; SaCas9
gcacagactctggggccagacagc

SEQ ID NO: 22135 - DNA, 23 bp, Artificial Sequence
  Synthetic: FXN 3 forward 9:69042878-69042907; SaCas9
cacagactctggggccagacagc

SEQ ID NO: 22136 - DNA, 22 bp, Artificial Sequence
  Synthetic: FXN 3 forward 9:69042879-69042907; SaCas9
acagactctggggccagacagc

SEQ ID NO: 22137 - DNA, 21 bp, Artificial Sequence
  Synthetic: FXN 3 forward 9:69042880-69042907; SaCas9
cagactctggggccagacagc

SEQ ID NO: 22138 - DNA, 20 bp, Artificial Sequence
  Synthetic: FXN 3 forward 9:69042881-69042907; SaCas9
agactctggggccagacagc

SEQ ID NO: 22139 - DNA, 19 bp, Artificial Sequence
  Synthetic: FXN 3 forward 9:69042882-69042907; SaCas9
gactctggggccagacagc

SEQ ID NO: 22140 - DNA, 18 bp, Artificial Sequence
  Synthetic: FXN 3 forward 9:69042883-69042907; SaCas9
actctggggccagacagc

SEQ ID NO: 22141 - DNA, 25 bp, Artificial Sequence
  Synthetic: FXN 3 reverse 9:69042883-69042914; SaCas9
ggattgaacccaagctgtctggccc

SEQ ID NO: 22142 - DNA, 24 bp, Artificial Sequence
  Synthetic: FXN 3 reverse 9:69042884-69042914; SaCas9
gattgaacccaagctgtctggccc

SEQ ID NO: 22143 - DNA, 23 bp, Artificial Sequence
  Synthetic: FXN 3 reverse 9:69042885-69042914; SaCas9
attgaacccaagctgtctggccc

SEQ ID NO: 22144 - DNA, 22 bp, Artificial Sequence
  Synthetic: FXN 3 reverse 9:69042886-69042914; SaCas9
ttgaacccaagctgtctggccc

SEQ ID NO: 22145 - DNA, 21 bp, Artificial Sequence
  Synthetic: FXN 3 reverse 9:69042887-69042914; SaCas9
tgaacccaagctgtctggccc

SEQ ID NO: 22146 - DNA, 20 bp, Artificial Sequence
  Synthetic: FXN 3 reverse 9:69042888-69042914; SaCas9
gaacccaagctgtctggccc

SEQ ID NO: 22147 - DNA, 19 bp, Artificial Sequence
  Synthetic: FXN 3 reverse 9:69042889-69042914; SaCas9
aacccaagctgtctggccc

SEQ ID NO: 22148 - DNA, 18 bp, Artificial Sequence
  Synthetic: FXN 3 reverse 9:69042890-69042914; SaCas9
acccaagctgtctggccc

SEQ ID NO: 22149 - DNA, 25 bp, Artificial Sequence
  Synthetic: FXN 3 reverse 9:69042905-69042936; SaCas9
cagacattaagtggcagagctggga

SEQ ID NO: 22150 - DNA, 24 bp, Artificial Sequence
  Synthetic: FXN 3 reverse 9:69042906-69042936; SaCas9
agacattaagtggcagagctggga

SEQ ID NO: 22151 - DNA, 23 bp, Artificial Sequence
  Synthetic: FXN 3 reverse 9:69042907-69042936; SaCas9
gacattaagtggcagagctggga

SEQ ID NO: 22152 - DNA, 22 bp, Artificial Sequence
  Synthetic: FXN 3 reverse 9:69042908-69042936; SaCas9
acattaagtggcagagctggga

SEQ ID NO: 22153 - DNA, 21 bp, Artificial Sequence
  Synthetic: FXN 3 reverse 9:69042909-69042936; SaCas9
cattaagtggcagagctggga

SEQ ID NO: 22154 - DNA, 20 bp, Artificial Sequence
  Synthetic: FXN 3 reverse 9:69042910-69042936; SaCas9
attaagtggcagagctggga

SEQ ID NO: 22155 - DNA, 19 bp, Artificial Sequence
  Synthetic: FXN 3 reverse 9:69042911-69042936; SaCas9
ttaagtggcagagctggga

SEQ ID NO: 22156 - DNA, 18 bp, Artificial Sequence
  Synthetic: FXN 3 reverse 9:69042912-69042936; SaCas9
taagtggcagagctggga

SEQ ID NO: 22157 - DNA, 25 bp, Artificial Sequence
  Synthetic: FXN 3 reverse 9:69042910-69042941; SaCas9
atacacagacattaagtggcagagc

SEQ ID NO: 22158 - DNA, 24 bp, Artificial Sequence
  Synthetic: FXN 3 reverse 9:69042911-69042941; SaCas9
tacacagacattaagtggcagagc

SEQ ID NO: 22159 - DNA, 23 bp, Artificial Sequence
  Synthetic: FXN 3 reverse 9:69042912-69042941; SaCas9
acacagacattaagtggcagagc

SEQ ID NO: 22160 - DNA, 22 bp, Artificial Sequence
  Synthetic: FXN 3 reverse 9:69042913-69042941; SaCas9
cacagacattaagtggcagagc

SEQ ID NO: 22161 - DNA, 21 bp, Artificial Sequence
  Synthetic: FXN 3 reverse 9:69042914-69042941; SaCas9
acagacattaagtggcagagc

SEQ ID NO: 22162 - DNA, 20 bp, Artificial Sequence
  Synthetic: FXN 3 reverse 9:69042915-69042941; SaCas9
cagacattaagtggcagagc

SEQ ID NO: 22163 - DNA, 19 bp, Artificial Sequence
  Synthetic: FXN 3 reverse 9:69042916-69042941; SaCas9
agacattaagtggcagagc

SEQ ID NO: 22164 - DNA, 18 bp, Artificial Sequence
  Synthetic: FXN 3 reverse 9:69042917-69042941; SaCas9
gacattaagtggcagagc

SEQ ID NO: 22165 - DNA, 25 bp, Artificial Sequence
  Synthetic: FXN 3 reverse 9:69042911-69042942; SaCas9
gatacacagacattaagtggcagag

SEQ ID NO: 22166 - DNA, 24 bp, Artificial Sequence
  Synthetic: FXN 3 reverse 9:69042912-69042942; SaCas9
atacacagacattaagtggcagag

SEQ ID NO: 22167 - DNA, 23 bp, Artificial Sequence
  Synthetic: FXN 3 reverse 9:69042913-69042942; SaCas9
tacacagacattaagtggcagag

SEQ ID NO: 22168 - DNA, 22 bp, Artificial Sequence
  Synthetic: FXN 3 reverse 9:69042914-69042942; SaCas9
acacagacattaagtggcagag

SEQ ID NO: 22169 - DNA, 21 bp, Artificial Sequence
  Synthetic: FXN 3 reverse 9:69042915-69042942; SaCas9
cacagacattaagtggcagag

SEQ ID NO: 22170 - DNA, 20 bp, Artificial Sequence
  Synthetic: FXN 3 reverse 9:69042916-69042942; SaCas9
acagacattaagtggcagag

SEQ ID NO: 22171 - DNA, 19 bp, Artificial Sequence
  Synthetic: FXN 3 reverse 9:69042917-69042942; SaCas9
cagacattaagtggcagag

SEQ ID NO: 22172 - DNA, 18 bp, Artificial Sequence
  Synthetic: FXN 3 reverse 9:69042918-69042942; SaCas9
agacattaagtggcagag

SEQ ID NO: 22173 - DNA, 25 bp, Artificial Sequence
  Synthetic: FXN 3 reverse 9:69042916-69042947; SaCas9
acacagatacacagacattaagtgg

SEQ ID NO: 22174 - DNA, 24 bp, Artificial Sequence
  Synthetic: FXN 3 reverse 9:69042917-69042947; SaCas9
cacagatacacagacattaagtgg

SEQ ID NO: 22175 - DNA, 23 bp, Artificial Sequence
  Synthetic: FXN 3 reverse 9:69042918-69042947; SaCas9
acagatacacagacattaagtgg

SEQ ID NO: 22176 - DNA, 22 bp, Artificial Sequence
  Synthetic: FXN 3 reverse 9:69042919-69042947; SaCas9
cagatacacagacattaagtgg

SEQ ID NO: 22177 - DNA, 21 bp, Artificial Sequence
  Synthetic: FXN 3 reverse 9:69042920-69042947; SaCas9
agatacacagacattaagtgg

SEQ ID NO: 22178 - DNA, 20 bp, Artificial Sequence
  Synthetic: FXN 3 reverse 9:69042921-69042947; SaCas9
gatacacagacattaagtgg

SEQ ID NO: 22179 - DNA, 19 bp, Artificial Sequence
  Synthetic: FXN 3 reverse 9:69042922-69042947; SaCas9
atacacagacattaagtgg

SEQ ID NO: 22180 - DNA, 18 bp, Artificial Sequence
  Synthetic: FXN 3 reverse 9:69042923-69042947; SaCas9
tacacagacattaagtgg

SEQ ID NO: 22181 - DNA, 25 bp, Artificial Sequence
  Synthetic: FXN 3 reverse 9:69042956-69042987; SaCas9
tacagatgaggaaactgacgcacca

SEQ ID NO: 22182 - DNA, 24 bp, Artificial Sequence
  Synthetic: FXN 3 reverse 9:69042957-69042987; SaCas9
acagatgaggaaactgacgcacca

SEQ ID NO: 22183 - DNA, 23 bp, Artificial Sequence
  Synthetic: FXN 3 reverse 9:69042958-69042987; SaCas9
cagatgaggaaactgacgcacca

SEQ ID NO: 22184 - DNA, 22 bp, Artificial Sequence
  Synthetic: FXN 3 reverse 9:69042959-69042987; SaCas9
agatgaggaaactgacgcacca

SEQ ID NO: 22185 - DNA, 21 bp, Artificial Sequence
  Synthetic: FXN 3 reverse 9:69042960-69042987; SaCas9
gatgaggaaactgacgcacca

SEQ ID NO: 22186 - DNA, 20 bp, Artificial Sequence
  Synthetic: FXN 3 reverse 9:69042961-69042987; SaCas9
atgaggaaactgacgcacca

SEQ ID NO: 22187 - DNA, 19 bp, Artificial Sequence
  Synthetic: FXN 3 reverse 9:69042962-69042987; SaCas9
tgaggaaactgacgcacca

SEQ ID NO: 22188 - DNA, 18 bp, Artificial Sequence
  Synthetic: FXN 3 reverse 9:69042963-69042987; SaCas9
gaggaaactgacgcacca

SEQ ID NO: 22189 - DNA, 25 bp, Artificial Sequence
  Synthetic: FXN 3 reverse 9:69042973-69043004; SaCas9
caactatagttgtgttttacagatg

SEQ ID NO: 22190 - DNA, 24 bp, Artificial Sequence
  Synthetic: FXN 3 reverse 9:69042974-69043004; SaCas9
aactatagttgtgttttacagatg

SEQ ID NO: 22191 - DNA, 23 bp, Artificial Sequence
  Synthetic: FXN 3 reverse 9:69042975-69043004; SaCas9
actatagttgtgttttacagatg

SEQ ID NO: 22192 - DNA, 22 bp, Artificial Sequence
  Synthetic: FXN 3 reverse 9:69042976-69043004; SaCas9
ctatagttgtgttttacagatg

SEQ ID NO: 22193 - DNA, 21 bp, Artificial Sequence
  Synthetic: FXN 3 reverse 9:69042977-69043004; SaCas9
tatagttgtgttttacagatg

SEQ ID NO: 22194 - DNA, 20 bp, Artificial Sequence
  Synthetic: FXN 3 reverse 9:69042978-69043004; SaCas9
atagttgtgttttacagatg

SEQ ID NO: 22195 - DNA, 19 bp, Artificial Sequence
  Synthetic: FXN 3 reverse 9:69042979-69043004; SaCas9
tagttgtgttttacagatg

SEQ ID NO: 22196 - DNA, 18 bp, Artificial Sequence
  Synthetic: FXN 3 reverse 9:69042980-69043004; SaCas9
agttgtgttttacagatg

SEQ ID NO: 22197 - DNA, 25 bp, Artificial Sequence
  Synthetic: FXN 3 reverse 9:69042974-69043005; SaCas9
tcaactatagttgtgttttacagat

SEQ ID NO: 22198 - DNA, 24 bp, Artificial Sequence
  Synthetic: FXN 3 reverse 9:69042975-69043005; SaCas9
caactatagttgtgttttacagat

SEQ ID NO: 22199 - DNA, 23 bp, Artificial Sequence
  Synthetic: FXN 3 reverse 9:69042976-69043005; SaCas9
aactatagttgtgttttacagat

SEQ ID NO: 22200 - DNA, 22 bp, Artificial Sequence
  Synthetic: FXN 3 reverse 9:69042977-69043005; SaCas9
actatagttgtgttttacagat

SEQ ID NO: 22201 - DNA, 21 bp, Artificial Sequence
  Synthetic: FXN 3 reverse 9:69042978-69043005; SaCas9
ctatagttgtgttttacagat

SEQ ID NO: 22202 - DNA, 20 bp, Artificial Sequence
  Synthetic: FXN 3 reverse 9:69042979-69043005; SaCas9
tatagttgtgttttacagat

SEQ ID NO: 22203 - DNA, 19 bp, Artificial Sequence
  Synthetic: FXN 3 reverse 9:69042980-69043005; SaCas9
atagttgtgttttacagat

SEQ ID NO: 22204 - DNA, 18 bp, Artificial Sequence
  Synthetic: FXN 3 reverse 9:69042981-69043005; SaCas9
tagttgtgttttacagat

SEQ ID NO: 22205 - DNA, 25 bp, Artificial Sequence
  Synthetic: FXN 3 reverse 9:69042976-69043007; SaCas9
gatcaactatagttgtgttttacag

SEQ ID NO: 22206 - DNA, 24 bp, Artificial Sequence
  Synthetic: FXN 3 reverse 9:69042977-69043007; SaCas9
atcaactatagttgtgttttacag

SEQ ID NO: 22207 - DNA, 23 bp, Artificial Sequence
  Synthetic: FXN 3 reverse 9:69042978-69043007; SaCas9
tcaactatagttgtgttttacag

SEQ ID NO: 22208 - DNA, 22 bp, Artificial Sequence
  Synthetic: FXN 3 reverse 9:69042979-69043007; SaCas9
caactatagttgtgttttacag

SEQ ID NO: 22209 - DNA, 21 bp, Artificial Sequence
  Synthetic: FXN 3 reverse 9:69042980-69043007; SaCas9
aactatagttgtgttttacag

SEQ ID NO: 22210 - DNA, 20 bp, Artificial Sequence
  Synthetic: FXN 3 reverse 9:69042981-69043007; SaCas9
actatagttgtgttttacag

SEQ ID NO: 22211 - DNA, 19 bp, Artificial Sequence
  Synthetic: FXN 3 reverse 9:69042982-69043007; SaCas9
ctatagttgtgttttacag

SEQ ID NO: 22212 - DNA, 18 bp, Artificial Sequence
  Synthetic: FXN 3 reverse 9:69042983-69043007; SaCas9
tatagttgtgttttacag

SEQ ID NO: 22213 - DNA, 25 bp, Artificial Sequence
  Synthetic: FXN 3 forward 9:69042992-69043023; SaCas9
caactatagttgatcctcattcgtt

SEQ ID NO: 22214 - DNA, 24 bp, Artificial Sequence
  Synthetic: FXN 3 forward 9:69042993-69043023; SaCas9
aactatagttgatcctcattcgtt

SEQ ID NO: 22215 - DNA, 23 bp, Artificial Sequence
  Synthetic: FXN 3 forward 9:69042994-69043023; SaCas9
actatagttgatcctcattcgtt

SEQ ID NO: 22216 - DNA, 22 bp, Artificial Sequence
  Synthetic: FXN 3 forward 9:69042995-69043023; SaCas9
ctatagttgatcctcattcgtt

SEQ ID NO: 22217 - DNA, 21 bp, Artificial Sequence
  Synthetic: FXN 3 forward 9:69042996-69043023; SaCas9
tatagttgatcctcattcgtt

SEQ ID NO: 22218 - DNA, 20 bp, Artificial Sequence
  Synthetic: FXN 3 forward 9:69042997-69043023; SaCas9
atagttgatcctcattcgtt

SEQ ID NO: 22219 - DNA, 19 bp, Artificial Sequence
  Synthetic: FXN 3 forward 9:69042998-69043023; SaCas9
tagttgatcctcattcgtt

SEQ ID NO: 22220 - DNA, 18 bp, Artificial Sequence
  Synthetic: FXN 3 forward 9:69042999-69043023; SaCas9
agttgatcctcattcgtt

SEQ ID NO: 22221 - DNA, 25 bp, Artificial Sequence
  Synthetic: FXN 3 reverse 9:69043004-69043035; SaCas9
taacaagtacagactcttaacgaat

SEQ ID NO: 22222 - DNA, 24 bp, Artificial Sequence
  Synthetic: FXN 3 reverse 9:69043005-69043035; SaCas9
aacaagtacagactcttaacgaat

SEQ ID NO: 22223 - DNA, 23 bp, Artificial Sequence
  Synthetic: FXN 3 reverse 9:69043006-69043035; SaCas9
acaagtacagactcttaacgaat

SEQ ID NO: 22224 - DNA, 22 bp, Artificial Sequence
  Synthetic: FXN 3 reverse 9:69043007-69043035; SaCas9
caagtacagactcttaacgaat

SEQ ID NO: 22225 - DNA, 21 bp, Artificial Sequence
  Synthetic: FXN 3 reverse 9:69043008-69043035; SaCas9
aagtacagactcttaacgaat

SEQ ID NO: 22226 - DNA, 20 bp, Artificial Sequence
  Synthetic: FXN 3 reverse 9:69043009-69043035; SaCas9
agtacagactcttaacgaat

SEQ ID NO: 22227 - DNA, 19 bp, Artificial Sequence
  Synthetic: FXN 3 reverse 9:69043010-69043035; SaCas9
gtacagactcttaacgaat

SEQ ID NO: 22228 - DNA, 18 bp, Artificial Sequence
  Synthetic: FXN 3 reverse 9:69043011-69043035; SaCas9
tacagactcttaacgaat

SEQ ID NO: 22229 - DNA, 25 bp, Artificial Sequence
  Synthetic: FXN 3 reverse 9:69043006-69043037; SaCas9
attaacaagtacagactcttaacga

SEQ ID NO: 22230 - DNA, 24 bp, Artificial Sequence
  Synthetic: FXN 3 reverse 9:69043007-69043037; SaCas9
ttaacaagtacagactcttaacga

SEQ ID NO: 22231 - DNA, 23 bp, Artificial Sequence
  Synthetic: FXN 3 reverse 9:69043008-69043037; SaCas9
taacaagtacagactcttaacga

SEQ ID NO: 22232 - DNA, 22 bp, Artificial Sequence
  Synthetic: FXN 3 reverse 9:69043009-69043037; SaCas9
aacaagtacagactcttaacga

SEQ ID NO: 22233 - DNA, 21 bp, Artificial Sequence
  Synthetic: FXN 3 reverse 9:69043010-69043037; SaCas9
acaagtacagactcttaacga

SEQ ID NO: 22234 - DNA, 20 bp, Artificial Sequence
  Synthetic: FXN 3 reverse 9:69043011-69043037; SaCas9
caagtacagactcttaacga

SEQ ID NO: 22235 - DNA, 19 bp, Artificial Sequence
  Synthetic: FXN 3 reverse 9:69043012-69043037; SaCas9
aagtacagactcttaacga

SEQ ID NO: 22236 - DNA, 18 bp, Artificial Sequence
  Synthetic: FXN 3 reverse 9:69043013-69043037; SaCas9
agtacagactcttaacga

SEQ ID NO: 22237 - DNA, 25 bp, Artificial Sequence
  Synthetic: FXN 3 reverse 9:69043010-69043041; SaCas9
gcaaattaacaagtacagactctta

SEQ ID NO: 22238 - DNA, 24 bp, Artificial Sequence
  Synthetic: FXN 3 reverse 9:69043011-69043041; SaCas9
caaattaacaagtacagactctta

SEQ ID NO: 22239 - DNA, 23 bp, Artificial Sequence
  Synthetic: FXN 3 reverse 9:69043012-69043041; SaCas9
aaattaacaagtacagactctta

SEQ ID NO: 22240 - DNA, 22 bp, Artificial Sequence
  Synthetic: FXN 3 reverse 9:69043013-69043041; SaCas9
aattaacaagtacagactctta

SEQ ID NO: 22241 - DNA, 21 bp, Artificial Sequence
  Synthetic: FXN 3 reverse 9:69043014-69043041; SaCas9
attaacaagtacagactctta

SEQ ID NO: 22242 - DNA, 20 bp, Artificial Sequence
  Synthetic: FXN 3 reverse 9:69043015-69043041; SaCas9
ttaacaagtacagactctta

SEQ ID NO: 22243 - DNA, 19 bp, Artificial Sequence
  Synthetic: FXN 3 reverse 9:69043016-69043041; SaCas9
taacaagtacagactctta

SEQ ID NO: 22244 - DNA, 18 bp, Artificial Sequence
  Synthetic: FXN 3 reverse 9:69043017-69043041; SaCas9
aacaagtacagactctta

SEQ ID NO: 22245 - DNA, 25 bp, Artificial Sequence
  Synthetic: FXN 3 reverse 9:69043039-69043070; SaCas9
attttggggtaacaaattttagcaa

SEQ ID NO: 22246 - DNA, 24 bp, Artificial Sequence
  Synthetic: FXN 3 reverse 9:69043040-69043070; SaCas9
ttttggggtaacaaattttagcaa

SEQ ID NO: 22247 - DNA, 23 bp, Artificial Sequence
  Synthetic: FXN 3 reverse 9:69043041-69043070; SaCas9
tttggggtaacaaattttagcaa

SEQ ID NO: 22248 - DNA, 22 bp, Artificial Sequence
  Synthetic: FXN 3 reverse 9:69043042-69043070; SaCas9
ttggggtaacaaattttagcaa

SEQ ID NO: 22249 - DNA, 21 bp, Artificial Sequence
  Synthetic: FXN 3 reverse 9:69043043-69043070; SaCas9
tggggtaacaaattttagcaa

SEQ ID NO: 22250 - DNA, 20 bp, Artificial Sequence
  Synthetic: FXN 3 reverse 9:69043044-69043070; SaCas9
ggggtaacaaattttagcaa

SEQ ID NO: 22251 - DNA, 19 bp, Artificial Sequence
  Synthetic: FXN 3 reverse 9:69043045-69043070; SaCas9
gggtaacaaattttagcaa

SEQ ID NO: 22252 - DNA, 18 bp, Artificial Sequence
  Synthetic: FXN 3 reverse 9:69043046-69043070; SaCas9
ggtaacaaattttagcaa

SEQ ID NO: 22253 - DNA, 25 bp, Artificial Sequence
  Synthetic: FXN 3 reverse 9:69043060-69043091; SaCas9
cccaaaaggctaggggtactgattt

SEQ ID NO: 22254 - DNA, 24 bp, Artificial Sequence
  Synthetic: FXN 3 reverse 9:69043061-69043091; SaCas9
ccaaaaggctaggggtactgattt

SEQ ID NO: 22255 - DNA, 23 bp, Artificial Sequence
  Synthetic: FXN 3 reverse 9:69043062-69043091; SaCas9
caaaaggctaggggtactgattt

SEQ ID NO: 22256 - DNA, 22 bp, Artificial Sequence
  Synthetic: FXN 3 reverse 9:69043063-69043091; SaCas9
aaaaggctaggggtactgattt

SEQ ID NO: 22257 - DNA, 21 bp, Artificial Sequence
  Synthetic: FXN 3 reverse 9:69043064-69043091; SaCas9
aaaggctaggggtactgattt

SEQ ID NO: 22258 - DNA, 20 bp, Artificial Sequence
  Synthetic: FXN 3 reverse 9:69043065-69043091; SaCas9
aaggctaggggtactgattt

SEQ ID NO: 22259 - DNA, 19 bp, Artificial Sequence
  Synthetic: FXN 3 reverse 9:69043066-69043091; SaCas9
aggctaggggtactgattt

SEQ ID NO: 22260 - DNA, 18 bp, Artificial Sequence
  Synthetic: FXN 3 reverse 9:69043067-69043091; SaCas9
ggctaggggtactgattt

SEQ ID NO: 22261 - DNA, 25 bp, Artificial Sequence
  Synthetic: FXN 3 forward 9:69043061-69043092; SaCas9
ccccaaaatcagtacccctagcctt

SEQ ID NO: 22262 - DNA, 24 bp, Artificial Sequence
  Synthetic: FXN 3 forward 9:69043062-69043092; SaCas9
cccaaaatcagtacccctagcctt

SEQ ID NO: 22263 - DNA, 23 bp, Artificial Sequence
  Synthetic: FXN 3 forward 9:69043063-69043092; SaCas9
ccaaaatcagtacccctagcctt

SEQ ID NO: 22264 - DNA, 22 bp, Artificial Sequence
  Synthetic: FXN 3 forward 9:69043064-69043092; SaCas9
caaaatcagtacccctagcctt

SEQ ID NO: 22265 - DNA, 21 bp, Artificial Sequence
  Synthetic: FXN 3 forward 9:69043065-69043092; SaCas9
aaaatcagtacccctagcctt

SEQ ID NO: 22266 - DNA, 20 bp, Artificial Sequence
  Synthetic: FXN 3 forward 9:69043066-69043092; SaCas9
aaatcagtacccctagcctt

SEQ ID NO: 22267 - DNA, 19 bp, Artificial Sequence
  Synthetic: FXN 3 forward 9:69043067-69043092; SaCas9
aatcagtacccctagcctt

SEQ ID NO: 22268 - DNA, 18 bp, Artificial Sequence
  Synthetic: FXN 3 forward 9:69043068-69043092; SaCas9
atcagtacccctagcctt

SEQ ID NO: 22269 - DNA, 25 bp, Artificial Sequence
  Synthetic: FXN 3 reverse 9:69043061-69043092; SaCas9
ccccaaaaggctaggggtactgatt

SEQ ID NO: 22270 - DNA, 24 bp, Artificial Sequence
  Synthetic: FXN 3 reverse 9:69043062-69043092; SaCas9
cccaaaaggctaggggtactgatt

SEQ ID NO: 22271 - DNA, 23 bp, Artificial Sequence
  Synthetic: FXN 3 reverse 9:69043063-69043092; SaCas9
ccaaaaggctaggggtactgatt

SEQ ID NO: 22272 - DNA, 22 bp, Artificial Sequence
  Synthetic: FXN 3 reverse 9:69043064-69043092; SaCas9
caaaaggctaggggtactgatt

SEQ ID NO: 22273 - DNA, 21 bp, Artificial Sequence
  Synthetic: FXN 3 reverse 9:69043065-69043092; SaCas9
aaaaggctaggggtactgatt

SEQ ID NO: 22274 - DNA, 20 bp, Artificial Sequence
  Synthetic: FXN 3 reverse 9:69043066-69043092; SaCas9
aaaggctaggggtactgatt

SEQ ID NO: 22275 - DNA, 19 bp, Artificial Sequence
  Synthetic: FXN 3 reverse 9:69043067-69043092; SaCas9
aaggctaggggtactgatt

SEQ ID NO: 22276 - DNA, 18 bp, Artificial Sequence
  Synthetic: FXN 3 reverse 9:69043068-69043092; SaCas9
aggctaggggtactgatt

SEQ ID NO: 22277 - DNA, 25 bp, Artificial Sequence
  Synthetic: FXN 3 forward 9:69043062-69043093; SaCas9
cccaaaatcagtacccctagccttt

SEQ ID NO: 22278 - DNA, 24 bp, Artificial Sequence
  Synthetic: FXN 3 forward 9:69043063-69043093; SaCas9
ccaaaatcagtacccctagccttt

SEQ ID NO: 22279 - DNA, 23 bp, Artificial Sequence
  Synthetic: FXN 3 forward 9:69043064-69043093; SaCas9
caaaatcagtacccctagccttt

SEQ ID NO: 22280 - DNA, 22 bp, Artificial Sequence
  Synthetic: FXN 3 forward 9:69043065-69043093; SaCas9
aaaatcagtacccctagccttt

SEQ ID NO: 22281 - DNA, 21 bp, Artificial Sequence
  Synthetic: FXN 3 forward 9:69043066-69043093; SaCas9
aaatcagtacccctagccttt

SEQ ID NO: 22282 - DNA, 20 bp, Artificial Sequence
  Synthetic: FXN 3 forward 9:69043067-69043093; SaCas9
aatcagtacccctagccttt

SEQ ID NO: 22283 - DNA, 19 bp, Artificial Sequence
  Synthetic: FXN 3 forward 9:69043068-69043093; SaCas9
atcagtacccctagccttt

SEQ ID NO: 22284 - DNA, 18 bp, Artificial Sequence
  Synthetic: FXN 3 forward 9:69043069-69043093; SaCas9
tcagtacccctagccttt

SEQ ID NO: 22285 - DNA, 25 bp, Artificial Sequence
  Synthetic: FXN 3 reverse 9:69043074-69043105; SaCas9
atctttgaaacgaccccaaaaggct

SEQ ID NO: 22286 - DNA, 24 bp, Artificial Sequence
  Synthetic: FXN 3 reverse 9:69043075-69043105; SaCas9
tctttgaaacgaccccaaaaggct

SEQ ID NO: 22287 - DNA, 23 bp, Artificial Sequence
  Synthetic: FXN 3 reverse 9:69043076-69043105; SaCas9
ctttgaaacgaccccaaaaggct

SEQ ID NO: 22288 - DNA, 22 bp, Artificial Sequence
  Synthetic: FXN 3 reverse 9:69043077-69043105; SaCas9
tttgaaacgaccccaaaaggct

SEQ ID NO: 22289 - DNA, 21 bp, Artificial Sequence
  Synthetic: FXN 3 reverse 9:69043078-69043105; SaCas9
ttgaaacgaccccaaaaggct

SEQ ID NO: 22290 - DNA, 20 bp, Artificial Sequence
  Synthetic: FXN 3 reverse 9:69043079-69043105; SaCas9
tgaaacgaccccaaaaggct

SEQ ID NO: 22291 - DNA, 19 bp, Artificial Sequence
  Synthetic: FXN 3 reverse 9:69043080-69043105; SaCas9
gaaacgaccccaaaaggct

SEQ ID NO: 22292 - DNA, 18 bp, Artificial Sequence
  Synthetic: FXN 3 reverse 9:69043081-69043105; SaCas9
aaacgaccccaaaaggct

SEQ ID NO: 22293 - DNA, 25 bp, Artificial Sequence
  Synthetic: FXN 3 reverse 9:69043075-69043106; SaCas9
catctttgaaacgaccccaaaaggc

SEQ ID NO: 22294 - DNA, 24 bp, Artificial Sequence
  Synthetic: FXN 3 reverse 9:69043076-69043106; SaCas9
atctttgaaacgaccccaaaaggc

SEQ ID NO: 22295 - DNA, 23 bp, Artificial Sequence
  Synthetic: FXN 3 reverse 9:69043077-69043106; SaCas9
tctttgaaacgaccccaaaaggc

SEQ ID NO: 22296 - DNA, 22 bp, Artificial Sequence
  Synthetic: FXN 3 reverse 9:69043078-69043106; SaCas9
ctttgaaacgaccccaaaaggc

SEQ ID NO: 22297 - DNA, 21 bp, Artificial Sequence
  Synthetic: FXN 3 reverse 9:69043079-69043106; SaCas9
tttgaaacgaccccaaaaggc

SEQ ID NO: 22298 - DNA, 20 bp, Artificial Sequence
  Synthetic: FXN 3 reverse 9:69043080-69043106; SaCas9
ttgaaacgaccccaaaaggc

SEQ ID NO: 22299 - DNA, 19 bp, Artificial Sequence
  Synthetic: FXN 3 reverse 9:69043081-69043106; SaCas9
tgaaacgaccccaaaaggc

SEQ ID NO: 22300 - DNA, 18 bp, Artificial Sequence
  Synthetic: FXN 3 reverse 9:69043082-69043106; SaCas9
gaaacgaccccaaaaggc

SEQ ID NO: 22301 - DNA, 25 bp, Artificial Sequence
  Synthetic: FXN 3 forward 9:69043085-69043116; SaCas9
tttggggtcgtttcaaagatgtgtg

SEQ ID NO: 22302 - DNA, 24 bp, Artificial Sequence
  Synthetic: FXN 3 forward 9:69043086-69043116; SaCas9
ttggggtcgtttcaaagatgtgtg

SEQ ID NO: 22303 - DNA, 23 bp, Artificial Sequence
  Synthetic: FXN 3 forward 9:69043087-69043116; SaCas9
tggggtcgtttcaaagatgtgtg

SEQ ID NO: 22304 - DNA, 22 bp, Artificial Sequence
  Synthetic: FXN 3 forward 9:69043088-69043116; SaCas9
ggggtcgtttcaaagatgtgtg

SEQ ID NO: 22305 - DNA, 21 bp, Artificial Sequence
  Synthetic: FXN 3 forward 9:69043089-69043116; SaCas9
gggtcgtttcaaagatgtgtg

SEQ ID NO: 22306 - DNA, 20 bp, Artificial Sequence
  Synthetic: FXN 3 forward 9:69043090-69043116; SaCas9
ggtcgtttcaaagatgtgtg

SEQ ID NO: 22307 - DNA, 19 bp, Artificial Sequence
  Synthetic: FXN 3 forward 9:69043091-69043116; SaCas9
gtcgtttcaaagatgtgtg

SEQ ID NO: 22308 - DNA, 18 bp, Artificial Sequence
  Synthetic: FXN 3 forward 9:69043092-69043116; SaCas9
tcgtttcaaagatgtgtg

SEQ ID NO: 22309 - DNA, 25 bp, Artificial Sequence
  Synthetic: FXN 3 reverse 9:69043095-69043126; SaCas9
tttttttgccgctctgcacacatct

SEQ ID NO: 22310 - DNA, 24 bp, Artificial Sequence
  Synthetic: FXN 3 reverse 9:69043096-69043126; SaCas9
ttttttgccgctctgcacacatct

SEQ ID NO: 22311 - DNA, 23 bp, Artificial Sequence
  Synthetic: FXN 3 reverse 9:69043097-69043126; SaCas9
tttttgccgctctgcacacatct

SEQ ID NO: 22312 - DNA, 22 bp, Artificial Sequence
  Synthetic: FXN 3 reverse 9:69043098-69043126; SaCas9
ttttgccgctctgcacacatct

SEQ ID NO: 22313 - DNA, 21 bp, Artificial Sequence
  Synthetic: FXN 3 reverse 9:69043099-69043126; SaCas9
tttgccgctctgcacacatct

SEQ ID NO: 22314 - DNA, 20 bp, Artificial Sequence
  Synthetic: FXN 3 reverse 9:69043100-69043126; SaCas9
ttgccgctctgcacacatct

SEQ ID NO: 22315 - DNA, 19 bp, Artificial Sequence
  Synthetic: FXN 3 reverse 9:69043101-69043126; SaCas9
tgccgctctgcacacatct

SEQ ID NO: 22316 - DNA, 18 bp, Artificial Sequence
  Synthetic: FXN 3 reverse 9:69043102-69043126; SaCas9
gccgctctgcacacatct

SEQ ID NO: 22317 - DNA, 25 bp, Artificial Sequence
  Synthetic: FXN 3 forward 9:69043102-69043133; SaCas9
gatgtgtgcagagcggcaaaaaaat

SEQ ID NO: 22318 - DNA, 24 bp, Artificial Sequence
  Synthetic: FXN 3 forward 9:69043103-69043133; SaCas9
atgtgtgcagagcggcaaaaaaat

SEQ ID NO: 22319 - DNA, 23 bp, Artificial Sequence
  Synthetic: FXN 3 forward 9:69043104-69043133; SaCas9
tgtgtgcagagcggcaaaaaaat

SEQ ID NO: 22320 - DNA, 22 bp, Artificial Sequence
  Synthetic: FXN 3 forward 9:69043105-69043133; SaCas9
gtgtgcagagcggcaaaaaaat

SEQ ID NO: 22321 - DNA, 21 bp, Artificial Sequence
  Synthetic: FXN 3 forward 9:69043106-69043133; SaCas9
tgtgcagagcggcaaaaaaat

SEQ ID NO: 22322 - DNA, 20 bp, Artificial Sequence
  Synthetic: FXN 3 forward 9:69043107-69043133; SaCas9
gtgcagagcggcaaaaaaat

SEQ ID NO: 22323 - DNA, 19 bp, Artificial Sequence
  Synthetic: FXN 3 forward 9:69043108-69043133; SaCas9
tgcagagcggcaaaaaaat

SEQ ID NO: 22324 - DNA, 18 bp, Artificial Sequence
  Synthetic: FXN 3 forward 9:69043109-69043133; SaCas9
gcagagcggcaaaaaaat

SEQ ID NO: 22325 - DNA, 25 bp, Artificial Sequence
  Synthetic: FXN 3 reverse 9:69043131-69043162; SaCas9
accttggctgggaacatgagcctgg

SEQ ID NO: 22326 - DNA, 24 bp, Artificial Sequence
  Synthetic: FXN 3 reverse 9:69043132-69043162; SaCas9
ccttggctgggaacatgagcctgg

SEQ ID NO: 22327 - DNA, 23 bp, Artificial Sequence
  Synthetic: FXN 3 reverse 9:69043133-69043162; SaCas9
cttggctgggaacatgagcctgg

SEQ ID NO: 22328 - DNA, 22 bp, Artificial Sequence
  Synthetic: FXN 3 reverse 9:69043134-69043162; SaCas9
ttggctgggaacatgagcctgg

SEQ ID NO: 22329 - DNA, 21 bp, Artificial Sequence
  Synthetic: FXN 3 reverse 9:69043135-69043162; SaCas9
tggctgggaacatgagcctgg

SEQ ID NO: 22330 - DNA, 20 bp, Artificial Sequence
  Synthetic: FXN 3 reverse 9:69043136-69043162; SaCas9
ggctgggaacatgagcctgg

SEQ ID NO: 22331 - DNA, 19 bp, Artificial Sequence
  Synthetic: FXN 3 reverse 9:69043137-69043162; SaCas9
gctgggaacatgagcctgg

SEQ ID NO: 22332 - DNA, 18 bp, Artificial Sequence
  Synthetic: FXN 3 reverse 9:69043138-69043162; SaCas9
ctgggaacatgagcctgg

SEQ ID NO: 22333 - DNA, 25 bp, Artificial Sequence
  Synthetic: FXN 3 reverse 9:69043132-69043163; SaCas9
gaccttggctgggaacatgagcctg

SEQ ID NO: 22334 - DNA, 24 bp, Artificial Sequence
  Synthetic: FXN 3 reverse 9:69043133-69043163; SaCas9
accttggctgggaacatgagcctg

SEQ ID NO: 22335 - DNA, 23 bp, Artificial Sequence
  Synthetic: FXN 3 reverse 9:69043134-69043163; SaCas9
ccttggctgggaacatgagcctg

SEQ ID NO: 22336 - DNA, 22 bp, Artificial Sequence
  Synthetic: FXN 3 reverse 9:69043135-69043163; SaCas9
cttggctgggaacatgagcctg

SEQ ID NO: 22337 - DNA, 21 bp, Artificial Sequence
  Synthetic: FXN 3 reverse 9:69043136-69043163; SaCas9
ttggctgggaacatgagcctg

SEQ ID NO: 22338 - DNA, 20 bp, Artificial Sequence
  Synthetic: FXN 3 reverse 9:69043137-69043163; SaCas9
tggctgggaacatgagcctg

SEQ ID NO: 22339 - DNA, 19 bp, Artificial Sequence
  Synthetic: FXN 3 reverse 9:69043138-69043163; SaCas9
ggctgggaacatgagcctg

SEQ ID NO: 22340 - DNA, 18 bp, Artificial Sequence
  Synthetic: FXN 3 reverse 9:69043139-69043163; SaCas9
gctgggaacatgagcctg

SEQ ID NO: 22341 - DNA, 25 bp, Artificial Sequence
  Synthetic: FXN 3 reverse 9:69043134-69043165; SaCas9
tggaccttggctgggaacatgagcc

SEQ ID NO: 22342 - DNA, 24 bp, Artificial Sequence
  Synthetic: FXN 3 reverse 9:69043135-69043165; SaCas9
ggaccttggctgggaacatgagcc

SEQ ID NO: 22343 - DNA, 23 bp, Artificial Sequence
  Synthetic: FXN 3 reverse 9:69043136-69043165; SaCas9
gaccttggctgggaacatgagcc

SEQ ID NO: 22344 - DNA, 22 bp, Artificial Sequence
  Synthetic: FXN 3 reverse 9:69043137-69043165; SaCas9
accttggctgggaacatgagcc

SEQ ID NO: 22345 - DNA, 21 bp, Artificial Sequence
  Synthetic: FXN 3 reverse 9:69043138-69043165; SaCas9
ccttggctgggaacatgagcc

SEQ ID NO: 22346 - DNA, 20 bp, Artificial Sequence
  Synthetic: FXN 3 reverse 9:69043139-69043165; SaCas9
cttggctgggaacatgagcc

SEQ ID NO: 22347 - DNA, 19 bp, Artificial Sequence
  Synthetic: FXN 3 reverse 9:69043140-69043165; SaCas9
ttggctgggaacatgagcc

SEQ ID NO: 22348 - DNA, 18 bp, Artificial Sequence
  Synthetic: FXN 3 reverse 9:69043141-69043165; SaCas9
tggctgggaacatgagcc

SEQ ID NO: 22349 - DNA, 25 bp, Artificial Sequence
  Synthetic: FXN 3 reverse 9:69043135-69043166; SaCas9
ttggaccttggctgggaacatgagc

SEQ ID NO: 22350 - DNA, 24 bp, Artificial Sequence
  Synthetic: FXN 3 reverse 9:69043136-69043166; SaCas9
tggaccttggctgggaacatgagc

SEQ ID NO: 22351 - DNA, 23 bp, Artificial Sequence
  Synthetic: FXN 3 reverse 9:69043137-69043166; SaCas9
ggaccttggctgggaacatgagc

SEQ ID NO: 22352 - DNA, 22 bp, Artificial Sequence
  Synthetic: FXN 3 reverse 9:69043138-69043166; SaCas9
gaccttggctgggaacatgagc

SEQ ID NO: 22353 - DNA, 21 bp, Artificial Sequence
  Synthetic: FXN 3 reverse 9:69043139-69043166; SaCas9
accttggctgggaacatgagc

SEQ ID NO: 22354 - DNA, 20 bp, Artificial Sequence
  Synthetic: FXN 3 reverse 9:69043140-69043166; SaCas9
ccttggctgggaacatgagc

SEQ ID NO: 22355 - DNA, 19 bp, Artificial Sequence
  Synthetic: FXN 3 reverse 9:69043141-69043166; SaCas9
cttggctgggaacatgagc

SEQ ID NO: 22356 - DNA, 18 bp, Artificial Sequence
  Synthetic: FXN 3 reverse 9:69043142-69043166; SaCas9
ttggctgggaacatgagc

SEQ ID NO: 22357 - DNA, 25 bp, Artificial Sequence
  Synthetic: FXN 3 reverse 9:69043141-69043172; SaCas9
actttgttggaccttggctgggaac

SEQ ID NO: 22358 - DNA, 24 bp, Artificial Sequence
  Synthetic: FXN 3 reverse 9:69043142-69043172; SaCas9
ctttgttggaccttggctgggaac

SEQ ID NO: 22359 - DNA, 23 bp, Artificial Sequence
  Synthetic: FXN 3 reverse 9:69043143-69043172; SaCas9
tttgttggaccttggctgggaac

SEQ ID NO: 22360 - DNA, 22 bp, Artificial Sequence
  Synthetic: FXN 3 reverse 9:69043144-69043172; SaCas9
ttgttggaccttggctgggaac

SEQ ID NO: 22361 - DNA, 21 bp, Artificial Sequence
  Synthetic: FXN 3 reverse 9:69043145-69043172; SaCas9
tgttggaccttggctgggaac

SEQ ID NO: 22362 - DNA, 20 bp, Artificial Sequence
  Synthetic: FXN 3 reverse 9:69043146-69043172; SaCas9
gttggaccttggctgggaac

SEQ ID NO: 22363 - DNA, 19 bp, Artificial Sequence
  Synthetic: FXN 3 reverse 9:69043147-69043172; SaCas9
ttggaccttggctgggaac

SEQ ID NO: 22364 - DNA, 18 bp, Artificial Sequence
  Synthetic: FXN 3 reverse 9:69043148-69043172; SaCas9
tggaccttggctgggaac

SEQ ID NO: 22365 - DNA, 25 bp, Artificial Sequence
  Synthetic: FXN 3 reverse 9:69043147-69043178; SaCas9
ggcagcactttgttggaccttggct

SEQ ID NO: 22366 - DNA, 24 bp, Artificial Sequence
  Synthetic: FXN 3 reverse 9:69043148-69043178; SaCas9
gcagcactttgttggaccttggct

SEQ ID NO: 22367 - DNA, 23 bp, Artificial Sequence
  Synthetic: FXN 3 reverse 9:69043149-69043178; SaCas9
cagcactttgttggaccttggct

SEQ ID NO: 22368 - DNA, 22 bp, Artificial Sequence
  Synthetic: FXN 3 reverse 9:69043150-69043178; SaCas9
agcactttgttggaccttggct

SEQ ID NO: 22369 - DNA, 21 bp, Artificial Sequence
  Synthetic: FXN 3 reverse 9:69043151-69043178; SaCas9
gcactttgttggaccttggct

SEQ ID NO: 22370 - DNA, 20 bp, Artificial Sequence
  Synthetic: FXN 3 reverse 9:69043152-69043178; SaCas9
cactttgttggaccttggct

SEQ ID NO: 22371 - DNA, 19 bp, Artificial Sequence
  Synthetic: FXN 3 reverse 9:69043153-69043178; SaCas9
actttgttggaccttggct

SEQ ID NO: 22372 - DNA, 18 bp, Artificial Sequence
  Synthetic: FXN 3 reverse 9:69043154-69043178; SaCas9
ctttgttggaccttggct

SEQ ID NO: 22373 - DNA, 25 bp, Artificial Sequence
  Synthetic: FXN 3 reverse 9:69043148-69043179; SaCas9
gggcagcactttgttggaccttggc

SEQ ID NO: 22374 - DNA, 24 bp, Artificial Sequence
  Synthetic: FXN 3 reverse 9:69043149-69043179; SaCas9
ggcagcactttgttggaccttggc

SEQ ID NO: 22375 - DNA, 23 bp, Artificial Sequence
  Synthetic: FXN 3 reverse 9:69043150-69043179; SaCas9
gcagcactttgttggaccttggc

SEQ ID NO: 22376 - DNA, 22 bp, Artificial Sequence
  Synthetic: FXN 3 reverse 9:69043151-69043179; SaCas9
cagcactttgttggaccttggc

SEQ ID NO: 22377 - DNA, 21 bp, Artificial Sequence
  Synthetic: FXN 3 reverse 9:69043152-69043179; SaCas9
agcactttgttggaccttggc

SEQ ID NO: 22378 - DNA, 20 bp, Artificial Sequence
  Synthetic: FXN 3 reverse 9:69043153-69043179; SaCas9
gcactttgttggaccttggc

SEQ ID NO: 22379 - DNA, 19 bp, Artificial Sequence
  Synthetic: FXN 3 reverse 9:69043154-69043179; SaCas9
cactttgttggaccttggc

SEQ ID NO: 22380 - DNA, 18 bp, Artificial Sequence
  Synthetic: FXN 3 reverse 9:69043155-69043179; SaCas9
actttgttggaccttggc

SEQ ID NO: 22381 - DNA, 25 bp, Artificial Sequence
  Synthetic: FXN 3 reverse 9:69043149-69043180; SaCas9
agggcagcactttgttggaccttgg

SEQ ID NO: 22382 - DNA, 24 bp, Artificial Sequence
  Synthetic: FXN 3 reverse 9:69043150-69043180; SaCas9
gggcagcactttgttggaccttgg

SEQ ID NO: 22383 - DNA, 23 bp, Artificial Sequence
  Synthetic: FXN 3 reverse 9:69043151-69043180; SaCas9
ggcagcactttgttggaccttgg

SEQ ID NO: 22384 - DNA, 22 bp, Artificial Sequence
  Synthetic: FXN 3 reverse 9:69043152-69043180; SaCas9
gcagcactttgttggaccttgg

SEQ ID NO: 22385 - DNA, 21 bp, Artificial Sequence
  Synthetic: FXN 3 reverse 9:69043153-69043180; SaCas9
cagcactttgttggaccttgg

SEQ ID NO: 22386 - DNA, 20 bp, Artificial Sequence
  Synthetic: FXN 3 reverse 9:69043154-69043180; SaCas9
agcactttgttggaccttgg

SEQ ID NO: 22387 - DNA, 19 bp, Artificial Sequence
  Synthetic: FXN 3 reverse 9:69043155-69043180; SaCas9
gcactttgttggaccttgg

SEQ ID NO: 22388 - DNA, 18 bp, Artificial Sequence
  Synthetic: FXN 3 reverse 9:69043156-69043180; SaCas9
cactttgttggaccttgg

SEQ ID NO: 22389 - DNA, 25 bp, Artificial Sequence
  Synthetic: FXN 3 reverse 9:69043160-69043191; SaCas9
aataagaaggcagggcagcactttg

SEQ ID NO: 22390 - DNA, 24 bp, Artificial Sequence
  Synthetic: FXN 3 reverse 9:69043161-69043191; SaCas9
ataagaaggcagggcagcactttg

SEQ ID NO: 22391 - DNA, 23 bp, Artificial Sequence
  Synthetic: FXN 3 reverse 9:69043162-69043191; SaCas9
taagaaggcagggcagcactttg

SEQ ID NO: 22392 - DNA, 22 bp, Artificial Sequence
  Synthetic: FXN 3 reverse 9:69043163-69043191; SaCas9
aagaaggcagggcagcactttg

SEQ ID NO: 22393 - DNA, 21 bp, Artificial Sequence
  Synthetic: FXN 3 reverse 9:69043164-69043191; SaCas9
agaaggcagggcagcactttg

SEQ ID NO: 22394 - DNA, 20 bp, Artificial Sequence
  Synthetic: FXN 3 reverse 9:69043165-69043191; SaCas9
gaaggcagggcagcactttg

SEQ ID NO: 22395 - DNA, 19 bp, Artificial Sequence
  Synthetic: FXN 3 reverse 9:69043166-69043191; SaCas9
aaggcagggcagcactttg

SEQ ID NO: 22396 - DNA, 18 bp, Artificial Sequence
  Synthetic: FXN 3 reverse 9:69043167-69043191; SaCas9
aggcagggcagcactttg

SEQ ID NO: 22397 - DNA, 25 bp, Artificial Sequence
  Synthetic: FXN 3 reverse 9:69043175-69043206; SaCas9
cactatgacagctgaaataagaagg

SEQ ID NO: 22398 - DNA, 24 bp, Artificial Sequence
  Synthetic: FXN 3 reverse 9:69043176-69043206; SaCas9
actatgacagctgaaataagaagg

SEQ ID NO: 22399 - DNA, 23 bp, Artificial Sequence
  Synthetic: FXN 3 reverse 9:69043177-69043206; SaCas9
ctatgacagctgaaataagaagg

SEQ ID NO: 22400 - DNA, 22 bp, Artificial Sequence
  Synthetic: FXN 3 reverse 9:69043178-69043206; SaCas9
tatgacagctgaaataagaagg

SEQ ID NO: 22401 - DNA, 21 bp, Artificial Sequence
  Synthetic: FXN 3 reverse 9:69043179-69043206; SaCas9
atgacagctgaaataagaagg

SEQ ID NO: 22402 - DNA, 20 bp, Artificial Sequence
  Synthetic: FXN 3 reverse 9:69043180-69043206; SaCas9
tgacagctgaaataagaagg

SEQ ID NO: 22403 - DNA, 19 bp, Artificial Sequence
  Synthetic: FXN 3 reverse 9:69043181-69043206; SaCas9
gacagctgaaataagaagg

SEQ ID NO: 22404 - DNA, 18 bp, Artificial Sequence
  Synthetic: FXN 3 reverse 9:69043182-69043206; SaCas9
acagctgaaataagaagg

SEQ ID NO: 22405 - DNA, 25 bp, Artificial Sequence
  Synthetic: FXN 3 reverse 9:69043182-69043213; SaCas9
cagtttacactatgacagctgaaat

SEQ ID NO: 22406 - DNA, 24 bp, Artificial Sequence
  Synthetic: FXN 3 reverse 9:69043183-69043213; SaCas9
agtttacactatgacagctgaaat

SEQ ID NO: 22407 - DNA, 23 bp, Artificial Sequence
  Synthetic: FXN 3 reverse 9:69043184-69043213; SaCas9
gtttacactatgacagctgaaat

SEQ ID NO: 22408 - DNA, 22 bp, Artificial Sequence
  Synthetic: FXN 3 reverse 9:69043185-69043213; SaCas9
tttacactatgacagctgaaat

SEQ ID NO: 22409 - DNA, 21 bp, Artificial Sequence
  Synthetic: FXN 3 reverse 9:69043186-69043213; SaCas9
ttacactatgacagctgaaat

SEQ ID NO: 22410 - DNA, 20 bp, Artificial Sequence
  Synthetic: FXN 3 reverse 9:69043187-69043213; SaCas9
tacactatgacagctgaaat

SEQ ID NO: 22411 - DNA, 19 bp, Artificial Sequence
  Synthetic: FXN 3 reverse 9:69043188-69043213; SaCas9
acactatgacagctgaaat

SEQ ID NO: 22412 - DNA, 18 bp, Artificial Sequence
  Synthetic: FXN 3 reverse 9:69043189-69043213; SaCas9
cactatgacagctgaaat

SEQ ID NO: 22413 - DNA, 25 bp, Artificial Sequence
  Synthetic: FXN 3 reverse 9:69043189-69043220; SaCas9
aaggacacagtttacactatgacag

SEQ ID NO: 22414 - DNA, 24 bp, Artificial Sequence
  Synthetic: FXN 3 reverse 9:69043190-69043220; SaCas9
aggacacagtttacactatgacag

SEQ ID NO: 22415 - DNA, 23 bp, Artificial Sequence
  Synthetic: FXN 3 reverse 9:69043191-69043220; SaCas9
ggacacagtttacactatgacag

SEQ ID NO: 22416 - DNA, 22 bp, Artificial Sequence
  Synthetic: FXN 3 reverse 9:69043192-69043220; SaCas9
gacacagtttacactatgacag

SEQ ID NO: 22417 - DNA, 21 bp, Artificial Sequence
  Synthetic: FXN 3 reverse 9:69043193-69043220; SaCas9
acacagtttacactatgacag

SEQ ID NO: 22418 - DNA, 20 bp, Artificial Sequence
  Synthetic: FXN 3 reverse 9:69043194-69043220; SaCas9
cacagtttacactatgacag

SEQ ID NO: 22419 - DNA, 19 bp, Artificial Sequence
  Synthetic: FXN 3 reverse 9:69043195-69043220; SaCas9
acagtttacactatgacag

SEQ ID NO: 22420 - DNA, 18 bp, Artificial Sequence
  Synthetic: FXN 3 reverse 9:69043196-69043220; SaCas9
cagtttacactatgacag

SEQ ID NO: 22421 - DNA, 25 bp, Artificial Sequence
  Synthetic: FXN 3 reverse 9:69043214-69043245; SaCas9
aacatggcactaatcagactgtgaa

SEQ ID NO: 22422 - DNA, 24 bp, Artificial Sequence
  Synthetic: FXN 3 reverse 9:69043215-69043245; SaCas9
acatggcactaatcagactgtgaa

SEQ ID NO: 22423 - DNA, 23 bp, Artificial Sequence
  Synthetic: FXN 3 reverse 9:69043216-69043245; SaCas9
catggcactaatcagactgtgaa

SEQ ID NO: 22424 - DNA, 22 bp, Artificial Sequence
  Synthetic: FXN 3 reverse 9:69043217-69043245; SaCas9
atggcactaatcagactgtgaa

SEQ ID NO: 22425 - DNA, 21 bp, Artificial Sequence
  Synthetic: FXN 3 reverse 9:69043218-69043245; SaCas9
tggcactaatcagactgtgaa

SEQ ID NO: 22426 - DNA, 20 bp, Artificial Sequence
  Synthetic: FXN 3 reverse 9:69043219-69043245; SaCas9
ggcactaatcagactgtgaa

SEQ ID NO: 22427 - DNA, 19 bp, Artificial Sequence
  Synthetic: FXN 3 reverse 9:69043220-69043245; SaCas9
gcactaatcagactgtgaa

SEQ ID NO: 22428 - DNA, 18 bp, Artificial Sequence
  Synthetic: FXN 3 reverse 9:69043221-69043245; SaCas9
cactaatcagactgtgaa

SEQ ID NO: 22429 - DNA, 25 bp, Artificial Sequence
  Synthetic: FXN 3 reverse 9:69043219-69043250; SaCas9
tgaaaaacatggcactaatcagact

SEQ ID NO: 22430 - DNA, 24 bp, Artificial Sequence
  Synthetic: FXN 3 reverse 9:69043220-69043250; SaCas9
gaaaaacatggcactaatcagact

SEQ ID NO: 22431 - DNA, 23 bp, Artificial Sequence
  Synthetic: FXN 3 reverse 9:69043221-69043250; SaCas9
aaaaacatggcactaatcagact

SEQ ID NO: 22432 - DNA, 22 bp, Artificial Sequence
  Synthetic: FXN 3 reverse 9:69043222-69043250; SaCas9
aaaacatggcactaatcagact

SEQ ID NO: 22433 - DNA, 21 bp, Artificial Sequence
  Synthetic: FXN 3 reverse 9:69043223-69043250; SaCas9
aaacatggcactaatcagact

SEQ ID NO: 22434 - DNA, 20 bp, Artificial Sequence
  Synthetic: FXN 3 reverse 9:69043224-69043250; SaCas9
aacatggcactaatcagact

SEQ ID NO: 22435 - DNA, 19 bp, Artificial Sequence
  Synthetic: FXN 3 reverse 9:69043225-69043250; SaCas9
acatggcactaatcagact

SEQ ID NO: 22436 - DNA, 18 bp, Artificial Sequence
  Synthetic: FXN 3 reverse 9:69043226-69043250; SaCas9
catggcactaatcagact

SEQ ID NO: 22437 - DNA, 25 bp, Artificial Sequence
  Synthetic: FXN 3 reverse 9:69043245-69043276; SaCas9
ataaccaagaaaaaagcataaaaat

SEQ ID NO: 22438 - DNA, 24 bp, Artificial Sequence
  Synthetic: FXN 3 reverse 9:69043246-69043276; SaCas9
taaccaagaaaaaagcataaaaat

SEQ ID NO: 22439 - DNA, 23 bp, Artificial Sequence
  Synthetic: FXN 3 reverse 9:69043247-69043276; SaCas9
aaccaagaaaaaagcataaaaat

SEQ ID NO: 22440 - DNA, 22 bp, Artificial Sequence
  Synthetic: FXN 3 reverse 9:69043248-69043276; SaCas9
accaagaaaaaagcataaaaat

SEQ ID NO: 22441 - DNA, 21 bp, Artificial Sequence
  Synthetic: FXN 3 reverse 9:69043249-69043276; SaCas9
ccaagaaaaaagcataaaaat

SEQ ID NO: 22442 - DNA, 20 bp, Artificial Sequence
  Synthetic: FXN 3 reverse 9:69043250-69043276; SaCas9
caagaaaaaagcataaaaat

SEQ ID NO: 22443 - DNA, 19 bp, Artificial Sequence
  Synthetic: FXN 3 reverse 9:69043251-69043276; SaCas9
aagaaaaaagcataaaaat

SEQ ID NO: 22444 - DNA, 18 bp, Artificial Sequence
  Synthetic: FXN 3 reverse 9:69043252-69043276; SaCas9
agaaaaaagcataaaaat

SEQ ID NO: 22445 - DNA, 25 bp, Artificial Sequence
  Synthetic: FXN 3 reverse 9:69043264-69043295; SaCas9
agacaattttaacagagaaataacc

SEQ ID NO: 22446 - DNA, 24 bp, Artificial Sequence
  Synthetic: FXN 3 reverse 9:69043265-69043295; SaCas9
gacaattttaacagagaaataacc

SEQ ID NO: 22447 - DNA, 23 bp, Artificial Sequence
  Synthetic: FXN 3 reverse 9:69043266-69043295; SaCas9
acaattttaacagagaaataacc

SEQ ID NO: 22448 - DNA, 22 bp, Artificial Sequence
  Synthetic: FXN 3 reverse 9:69043267-69043295; SaCas9
caattttaacagagaaataacc

SEQ ID NO: 22449 - DNA, 21 bp, Artificial Sequence
  Synthetic: FXN 3 reverse 9:69043268-69043295; SaCas9
aattttaacagagaaataacc

SEQ ID NO: 22450 - DNA, 20 bp, Artificial Sequence
  Synthetic: FXN 3 reverse 9:69043269-69043295; SaCas9
attttaacagagaaataacc

SEQ ID NO: 22451 - DNA, 19 bp, Artificial Sequence
  Synthetic: FXN 3 reverse 9:69043270-69043295; SaCas9
ttttaacagagaaataacc

SEQ ID NO: 22452 - DNA, 18 bp, Artificial Sequence
  Synthetic: FXN 3 reverse 9:69043271-69043295; SaCas9
tttaacagagaaataacc

SEQ ID NO: 22453 - DNA, 25 bp, Artificial Sequence
  Synthetic: FXN 3 reverse 9:69043275-69043306; SaCas9
actacacttggagacaattttaaca

SEQ ID NO: 22454 - DNA, 24 bp, Artificial Sequence
  Synthetic: FXN 3 reverse 9:69043276-69043306; SaCas9
ctacacttggagacaattttaaca

SEQ ID NO: 22455 - DNA, 23 bp, Artificial Sequence
  Synthetic: FXN 3 reverse 9:69043277-69043306; SaCas9
tacacttggagacaattttaaca

SEQ ID NO: 22456 - DNA, 22 bp, Artificial Sequence
  Synthetic: FXN 3 reverse 9:69043278-69043306; SaCas9
acacttggagacaattttaaca

SEQ ID NO: 22457 - DNA, 21 bp, Artificial Sequence
  Synthetic: FXN 3 reverse 9:69043279-69043306; SaCas9
cacttggagacaattttaaca

SEQ ID NO: 22458 - DNA, 20 bp, Artificial Sequence
  Synthetic: FXN 3 reverse 9:69043280-69043306; SaCas9
acttggagacaattttaaca

SEQ ID NO: 22459 - DNA, 19 bp, Artificial Sequence
  Synthetic: FXN 3 reverse 9:69043281-69043306; SaCas9
cttggagacaattttaaca

SEQ ID NO: 22460 - DNA, 18 bp, Artificial Sequence
  Synthetic: FXN 3 reverse 9:69043282-69043306; SaCas9
ttggagacaattttaaca

SEQ ID NO: 22461 - DNA, 25 bp, Artificial Sequence
  Synthetic: FXN 3 reverse 9:69043277-69043308; SaCas9
gcactacacttggagacaattttaa

SEQ ID NO: 22462 - DNA, 24 bp, Artificial Sequence
  Synthetic: FXN 3 reverse 9:69043278-69043308; SaCas9
cactacacttggagacaattttaa

SEQ ID NO: 22463 - DNA, 23 bp, Artificial Sequence
  Synthetic: FXN 3 reverse 9:69043279-69043308; SaCas9
actacacttggagacaattttaa

SEQ ID NO: 22464 - DNA, 22 bp, Artificial Sequence
  Synthetic: FXN 3 reverse 9:69043280-69043308; SaCas9
ctacacttggagacaattttaa

SEQ ID NO: 22465 - DNA, 21 bp, Artificial Sequence
  Synthetic: FXN 3 reverse 9:69043281-69043308; SaCas9
tacacttggagacaattttaa

SEQ ID NO: 22466 - DNA, 20 bp, Artificial Sequence
  Synthetic: FXN 3 reverse 9:69043282-69043308; SaCas9
acacttggagacaattttaa

SEQ ID NO: 22467 - DNA, 19 bp, Artificial Sequence
  Synthetic: FXN 3 reverse 9:69043283-69043308; SaCas9
cacttggagacaattttaa

SEQ ID NO: 22468 - DNA, 18 bp, Artificial Sequence
  Synthetic: FXN 3 reverse 9:69043284-69043308; SaCas9
acttggagacaattttaa

SEQ ID NO: 22469 - DNA, 25 bp, Artificial Sequence
  Synthetic: FXN 3 reverse 9:69043292-69043323; SaCas9
ctcgtgctaaactttgcactacact

SEQ ID NO: 22470 - DNA, 24 bp, Artificial Sequence
  Synthetic: FXN 3 reverse 9:69043293-69043323; SaCas9
tcgtgctaaactttgcactacact

SEQ ID NO: 22471 - DNA, 23 bp, Artificial Sequence
  Synthetic: FXN 3 reverse 9:69043294-69043323; SaCas9
cgtgctaaactttgcactacact

SEQ ID NO: 22472 - DNA, 22 bp, Artificial Sequence
  Synthetic: FXN 3 reverse 9:69043295-69043323; SaCas9
gtgctaaactttgcactacact

SEQ ID NO: 22473 - DNA, 21 bp, Artificial Sequence
  Synthetic: FXN 3 reverse 9:69043296-69043323; SaCas9
tgctaaactttgcactacact

SEQ ID NO: 22474 - DNA, 20 bp, Artificial Sequence
  Synthetic: FXN 3 reverse 9:69043297-69043323; SaCas9
gctaaactttgcactacact

SEQ ID NO: 22475 - DNA, 19 bp, Artificial Sequence
  Synthetic: FXN 3 reverse 9:69043298-69043323; SaCas9
ctaaactttgcactacact

SEQ ID NO: 22476 - DNA, 18 bp, Artificial Sequence
  Synthetic: FXN 3 reverse 9:69043299-69043323; SaCas9
taaactttgcactacact

SEQ ID NO: 22477 - DNA, 25 bp, Artificial Sequence
  Synthetic: FXN 3 forward 9:69043293-69043324; SaCas9
ctccaagtgtagtgcaaagtttagc

SEQ ID NO: 22478 - DNA, 24 bp, Artificial Sequence
  Synthetic: FXN 3 forward 9:69043294-69043324; SaCas9
tccaagtgtagtgcaaagtttagc

SEQ ID NO: 22479 - DNA, 23 bp, Artificial Sequence
  Synthetic: FXN 3 forward 9:69043295-69043324; SaCas9
ccaagtgtagtgcaaagtttagc

SEQ ID NO: 22480 - DNA, 22 bp, Artificial Sequence
  Synthetic: FXN 3 forward 9:69043296-69043324; SaCas9
caagtgtagtgcaaagtttagc

SEQ ID NO: 22481 - DNA, 21 bp, Artificial Sequence
  Synthetic: FXN 3 forward 9:69043297-69043324; SaCas9
aagtgtagtgcaaagtttagc

SEQ ID NO: 22482 - DNA, 20 bp, Artificial Sequence
  Synthetic: FXN 3 forward 9:69043298-69043324; SaCas9
agtgtagtgcaaagtttagc

SEQ ID NO: 22483 - DNA, 19 bp, Artificial Sequence
  Synthetic: FXN 3 forward 9:69043299-69043324; SaCas9
gtgtagtgcaaagtttagc

SEQ ID NO: 22484 - DNA, 18 bp, Artificial Sequence
  Synthetic: FXN 3 forward 9:69043300-69043324; SaCas9
tgtagtgcaaagtttagc

SEQ ID NO: 22485 - DNA, 25 bp, Artificial Sequence
  Synthetic: FXN 3 reverse 9:69043293-69043324; SaCas9
cctcgtgctaaactttgcactacac

SEQ ID NO: 22486 - DNA, 24 bp, Artificial Sequence
  Synthetic: FXN 3 reverse 9:69043294-69043324; SaCas9
ctcgtgctaaactttgcactacac

SEQ ID NO: 22487 - DNA, 23 bp, Artificial Sequence
  Synthetic: FXN 3 reverse 9:69043295-69043324; SaCas9
tcgtgctaaactttgcactacac

SEQ ID NO: 22488 - DNA, 22 bp, Artificial Sequence
  Synthetic: FXN 3 reverse 9:69043296-69043324; SaCas9
cgtgctaaactttgcactacac

SEQ ID NO: 22489 - DNA, 21 bp, Artificial Sequence
  Synthetic: FXN 3 reverse 9:69043297-69043324; SaCas9
gtgctaaactttgcactacac

SEQ ID NO: 22490 - DNA, 20 bp, Artificial Sequence
  Synthetic: FXN 3 reverse 9:69043298-69043324; SaCas9
tgctaaactttgcactacac

SEQ ID NO: 22491 - DNA, 19 bp, Artificial Sequence
  Synthetic: FXN 3 reverse 9:69043299-69043324; SaCas9
gctaaactttgcactacac

SEQ ID NO: 22492 - DNA, 18 bp, Artificial Sequence
  Synthetic: FXN 3 reverse 9:69043300-69043324; SaCas9
ctaaactttgcactacac

SEQ ID NO: 22493 - DNA, 25 bp, Artificial Sequence
  Synthetic: FXN 3 forward 9:69043295-69043326; SaCas9
ccaagtgtagtgcaaagtttagcac

SEQ ID NO: 22494 - DNA, 24 bp, Artificial Sequence
  Synthetic: FXN 3 forward 9:69043296-69043326; SaCas9
caagtgtagtgcaaagtttagcac

SEQ ID NO: 22495 - DNA, 23 bp, Artificial Sequence
  Synthetic: FXN 3 forward 9:69043297-69043326; SaCas9
aagtgtagtgcaaagtttagcac

SEQ ID NO: 22496 - DNA, 22 bp, Artificial Sequence
  Synthetic: FXN 3 forward 9:69043298-69043326; SaCas9
agtgtagtgcaaagtttagcac

SEQ ID NO: 22497 - DNA, 21 bp, Artificial Sequence
  Synthetic: FXN 3 forward 9:69043299-69043326; SaCas9
gtgtagtgcaaagtttagcac

SEQ ID NO: 22498 - DNA, 20 bp, Artificial Sequence
  Synthetic: FXN 3 forward 9:69043300-69043326; SaCas9
tgtagtgcaaagtttagcac

SEQ ID NO: 22499 - DNA, 19 bp, Artificial Sequence
  Synthetic: FXN 3 forward 9:69043301-69043326; SaCas9
gtagtgcaaagtttagcac

SEQ ID NO: 22500 - DNA, 18 bp, Artificial Sequence
  Synthetic: FXN 3 forward 9:69043302-69043326; SaCas9
tagtgcaaagtttagcac

SEQ ID NO: 22501 - DNA, 25 bp, Artificial Sequence
  Synthetic: FXN 3 forward 9:69043296-69043327; SaCas9
caagtgtagtgcaaagtttagcacg

SEQ ID NO: 22502 - DNA, 24 bp, Artificial Sequence
  Synthetic: FXN 3 forward 9:69043297-69043327; SaCas9
aagtgtagtgcaaagtttagcacg

SEQ ID NO: 22503 - DNA, 23 bp, Artificial Sequence
  Synthetic: FXN 3 forward 9:69043298-69043327; SaCas9
agtgtagtgcaaagtttagcacg

SEQ ID NO: 22504 - DNA, 22 bp, Artificial Sequence
  Synthetic: FXN 3 forward 9:69043299-69043327; SaCas9
gtgtagtgcaaagtttagcacg

SEQ ID NO: 22505 - DNA, 21 bp, Artificial Sequence
  Synthetic: FXN 3 forward 9:69043300-69043327; SaCas9
tgtagtgcaaagtttagcacg

SEQ ID NO: 22506 - DNA, 20 bp, Artificial Sequence
  Synthetic: FXN 3 forward 9:69043301-69043327; SaCas9
gtagtgcaaagtttagcacg

SEQ ID NO: 22507 - DNA, 19 bp, Artificial Sequence
  Synthetic: FXN 3 forward 9:69043302-69043327; SaCas9
tagtgcaaagtttagcacg

SEQ ID NO: 22508 - DNA, 18 bp, Artificial Sequence
  Synthetic: FXN 3 forward 9:69043303-69043327; SaCas9
agtgcaaagtttagcacg

SEQ ID NO: 22509 - DNA, 25 bp, Artificial Sequence
  Synthetic: FXN 3 forward 9:69043317-69043348; SaCas9
cacgaggaggctgtgatgttcctta

SEQ ID NO: 22510 - DNA, 24 bp, Artificial Sequence
  Synthetic: FXN 3 forward 9:69043318-69043348; SaCas9
acgaggaggctgtgatgttcctta

SEQ ID NO: 22511 - DNA, 23 bp, Artificial Sequence
  Synthetic: FXN 3 forward 9:69043319-69043348; SaCas9
cgaggaggctgtgatgttcctta

SEQ ID NO: 22512 - DNA, 22 bp, Artificial Sequence
  Synthetic: FXN 3 forward 9:69043320-69043348; SaCas9
gaggaggctgtgatgttcctta

SEQ ID NO: 22513 - DNA, 21 bp, Artificial Sequence
  Synthetic: FXN 3 forward 9:69043321-69043348; SaCas9
aggaggctgtgatgttcctta

SEQ ID NO: 22514 - DNA, 20 bp, Artificial Sequence
  Synthetic: FXN 3 forward 9:69043322-69043348; SaCas9
ggaggctgtgatgttcctta

SEQ ID NO: 22515 - DNA, 19 bp, Artificial Sequence
  Synthetic: FXN 3 forward 9:69043323-69043348; SaCas9
gaggctgtgatgttcctta

SEQ ID NO: 22516 - DNA, 18 bp, Artificial Sequence
  Synthetic: FXN 3 forward 9:69043324-69043348; SaCas9
aggctgtgatgttcctta

SEQ ID NO: 22517 - DNA, 25 bp, Artificial Sequence
  Synthetic: FXN 3 forward 9:69043319-69043350; SaCas9
cgaggaggctgtgatgttccttaca

SEQ ID NO: 22518 - DNA, 24 bp, Artificial Sequence
  Synthetic: FXN 3 forward 9:69043320-69043350; SaCas9
gaggaggctgtgatgttccttaca

SEQ ID NO: 22519 - DNA, 23 bp, Artificial Sequence
  Synthetic: FXN 3 forward 9:69043321-69043350; SaCas9
aggaggctgtgatgttccttaca

SEQ ID NO: 22520 - DNA, 22 bp, Artificial Sequence
  Synthetic: FXN 3 forward 9:69043322-69043350; SaCas9
ggaggctgtgatgttccttaca

SEQ ID NO: 22521 - DNA, 21 bp, Artificial Sequence
  Synthetic: FXN 3 forward 9:69043323-69043350; SaCas9
gaggctgtgatgttccttaca

SEQ ID NO: 22522 - DNA, 20 bp, Artificial Sequence
  Synthetic: FXN 3 forward 9:69043324-69043350; SaCas9
aggctgtgatgttccttaca

SEQ ID NO: 22523 - DNA, 19 bp, Artificial Sequence
  Synthetic: FXN 3 forward 9:69043325-69043350; SaCas9
ggctgtgatgttccttaca

SEQ ID NO: 22524 - DNA, 18 bp, Artificial Sequence
  Synthetic: FXN 3 forward 9:69043326-69043350; SaCas9
gctgtgatgttccttaca

SEQ ID NO: 22525 - DNA, 25 bp, Artificial Sequence
  Synthetic: FXN 3 reverse 9:69043334-69043365; SaCas9
ctctaacacatgcattttctctgta

SEQ ID NO: 22526 - DNA, 24 bp, Artificial Sequence
  Synthetic: FXN 3 reverse 9:69043335-69043365; SaCas9
tctaacacatgcattttctctgta

SEQ ID NO: 22527 - DNA, 23 bp, Artificial Sequence
  Synthetic: FXN 3 reverse 9:69043336-69043365; SaCas9
ctaacacatgcattttctctgta

SEQ ID NO: 22528 - DNA, 22 bp, Artificial Sequence
  Synthetic: FXN 3 reverse 9:69043337-69043365; SaCas9
taacacatgcattttctctgta

SEQ ID NO: 22529 - DNA, 21 bp, Artificial Sequence
  Synthetic: FXN 3 reverse 9:69043338-69043365; SaCas9
aacacatgcattttctctgta

SEQ ID NO: 22530 - DNA, 20 bp, Artificial Sequence
  Synthetic: FXN 3 reverse 9:69043339-69043365; SaCas9
acacatgcattttctctgta

SEQ ID NO: 22531 - DNA, 19 bp, Artificial Sequence
  Synthetic: FXN 3 reverse 9:69043340-69043365; SaCas9
cacatgcattttctctgta

SEQ ID NO: 22532 - DNA, 18 bp, Artificial Sequence
  Synthetic: FXN 3 reverse 9:69043341-69043365; SaCas9
acatgcattttctctgta

SEQ ID NO: 22533 - DNA, 25 bp, Artificial Sequence
  Synthetic: FXN 3 forward 9:69043335-69043366; SaCas9
ttccttacagagaaaatgcatgtgt

SEQ ID NO: 22534 - DNA, 24 bp, Artificial Sequence
  Synthetic: FXN 3 forward 9:69043336-69043366; SaCas9
tccttacagagaaaatgcatgtgt

SEQ ID NO: 22535 - DNA, 23 bp, Artificial Sequence
  Synthetic: FXN 3 forward 9:69043337-69043366; SaCas9
ccttacagagaaaatgcatgtgt

SEQ ID NO: 22536 - DNA, 22 bp, Artificial Sequence
  Synthetic: FXN 3 forward 9:69043338-69043366; SaCas9
cttacagagaaaatgcatgtgt

SEQ ID NO: 22537 - DNA, 21 bp, Artificial Sequence
  Synthetic: FXN 3 forward 9:69043339-69043366; SaCas9
ttacagagaaaatgcatgtgt

SEQ ID NO: 22538 - DNA, 20 bp, Artificial Sequence
  Synthetic: FXN 3 forward 9:69043340-69043366; SaCas9
tacagagaaaatgcatgtgt

SEQ ID NO: 22539 - DNA, 19 bp, Artificial Sequence
  Synthetic: FXN 3 forward 9:69043341-69043366; SaCas9
acagagaaaatgcatgtgt

SEQ ID NO: 22540 - DNA, 18 bp, Artificial Sequence
  Synthetic: FXN 3 forward 9:69043342-69043366; SaCas9
cagagaaaatgcatgtgt

SEQ ID NO: 22541 - DNA, 25 bp, Artificial Sequence
  Synthetic: FXN 3 reverse 9:69043335-69043366; SaCas9
tctctaacacatgcattttctctgt

SEQ ID NO: 22542 - DNA, 24 bp, Artificial Sequence
  Synthetic: FXN 3 reverse 9:69043336-69043366; SaCas9
ctctaacacatgcattttctctgt

SEQ ID NO: 22543 - DNA, 23 bp, Artificial Sequence
  Synthetic: FXN 3 reverse 9:69043337-69043366; SaCas9
tctaacacatgcattttctctgt

SEQ ID NO: 22544 - DNA, 22 bp, Artificial Sequence
  Synthetic: FXN 3 reverse 9:69043338-69043366; SaCas9
ctaacacatgcattttctctgt

SEQ ID NO: 22545 - DNA, 21 bp, Artificial Sequence
  Synthetic: FXN 3 reverse 9:69043339-69043366; SaCas9
taacacatgcattttctctgt

SEQ ID NO: 22546 - DNA, 20 bp, Artificial Sequence
  Synthetic: FXN 3 reverse 9:69043340-69043366; SaCas9
aacacatgcattttctctgt

SEQ ID NO: 22547 - DNA, 19 bp, Artificial Sequence
  Synthetic: FXN 3 reverse 9:69043341-69043366; SaCas9
acacatgcattttctctgt

SEQ ID NO: 22548 - DNA, 18 bp, Artificial Sequence
  Synthetic: FXN 3 reverse 9:69043342-69043366; SaCas9
cacatgcattttctctgt

SEQ ID NO: 22549 - DNA, 25 bp, Artificial Sequence
  Synthetic: FXN 3 forward 9:69043337-69043368; SaCas9
ccttacagagaaaatgcatgtgtta

SEQ ID NO: 22550 - DNA, 24 bp, Artificial Sequence
  Synthetic: FXN 3 forward 9:69043338-69043368; SaCas9
cttacagagaaaatgcatgtgtta

SEQ ID NO: 22551 - DNA, 23 bp, Artificial Sequence
  Synthetic: FXN 3 forward 9:69043339-69043368; SaCas9
ttacagagaaaatgcatgtgtta

SEQ ID NO: 22552 - DNA, 22 bp, Artificial Sequence
  Synthetic: FXN 3 forward 9:69043340-69043368; SaCas9
tacagagaaaatgcatgtgtta

SEQ ID NO: 22553 - DNA, 21 bp, Artificial Sequence
  Synthetic: FXN 3 forward 9:69043341-69043368; SaCas9
acagagaaaatgcatgtgtta

SEQ ID NO: 22554 - DNA, 20 bp, Artificial Sequence
  Synthetic: FXN 3 forward 9:69043342-69043368; SaCas9
cagagaaaatgcatgtgtta

SEQ ID NO: 22555 - DNA, 19 bp, Artificial Sequence
  Synthetic: FXN 3 forward 9:69043343-69043368; SaCas9
agagaaaatgcatgtgtta

SEQ ID NO: 22556 - DNA, 18 bp, Artificial Sequence
  Synthetic: FXN 3 forward 9:69043344-69043368; SaCas9
gagaaaatgcatgtgtta

SEQ ID NO: 22557 - DNA, 25 bp, Artificial Sequence
  Synthetic: FXN 3 forward 9:69043354-69043385; SaCas9
atgtgttagagaagctttgtcaggc

SEQ ID NO: 22558 - DNA, 24 bp, Artificial Sequence
  Synthetic: FXN 3 forward 9:69043355-69043385; SaCas9
tgtgttagagaagctttgtcaggc

SEQ ID NO: 22559 - DNA, 23 bp, Artificial Sequence
  Synthetic: FXN 3 forward 9:69043356-69043385; SaCas9
gtgttagagaagctttgtcaggc

SEQ ID NO: 22560 - DNA, 22 bp, Artificial Sequence
  Synthetic: FXN 3 forward 9:69043357-69043385; SaCas9
tgttagagaagctttgtcaggc

SEQ ID NO: 22561 - DNA, 21 bp, Artificial Sequence
  Synthetic: FXN 3 forward 9:69043358-69043385; SaCas9
gttagagaagctttgtcaggc

SEQ ID NO: 22562 - DNA, 20 bp, Artificial Sequence
  Synthetic: FXN 3 forward 9:69043359-69043385; SaCas9
ttagagaagctttgtcaggc

SEQ ID NO: 22563 - DNA, 19 bp, Artificial Sequence
  Synthetic: FXN 3 forward 9:69043360-69043385; SaCas9
tagagaagctttgtcaggc

SEQ ID NO: 22564 - DNA, 18 bp, Artificial Sequence
  Synthetic: FXN 3 forward 9:69043361-69043385; SaCas9
agagaagctttgtcaggc

SEQ ID NO: 22565 - DNA, 25 bp, Artificial Sequence
  Synthetic: FXN 3 forward 9:69043375-69043406; SaCas9
aggcatgagttaaggtgctgttgtc

SEQ ID NO: 22566 - DNA, 24 bp, Artificial Sequence
  Synthetic: FXN 3 forward 9:69043376-69043406; SaCas9
ggcatgagttaaggtgctgttgtc

SEQ ID NO: 22567 - DNA, 23 bp, Artificial Sequence
  Synthetic: FXN 3 forward 9:69043377-69043406; SaCas9
gcatgagttaaggtgctgttgtc

SEQ ID NO: 22568 - DNA, 22 bp, Artificial Sequence
  Synthetic: FXN 3 forward 9:69043378-69043406; SaCas9
catgagttaaggtgctgttgtc

SEQ ID NO: 22569 - DNA, 21 bp, Artificial Sequence
  Synthetic: FXN 3 forward 9:69043379-69043406; SaCas9
atgagttaaggtgctgttgtc

SEQ ID NO: 22570 - DNA, 20 bp, Artificial Sequence
  Synthetic: FXN 3 forward 9:69043380-69043406; SaCas9
tgagttaaggtgctgttgtc

SEQ ID NO: 22571 - DNA, 19 bp, Artificial Sequence
  Synthetic: FXN 3 forward 9:69043381-69043406; SaCas9
gagttaaggtgctgttgtc

SEQ ID NO: 22572 - DNA, 18 bp, Artificial Sequence
  Synthetic: FXN 3 forward 9:69043382-69043406; SaCas9
agttaaggtgctgttgtc

SEQ ID NO: 22573 - DNA, 25 bp, Artificial Sequence
  Synthetic: FXN 3 reverse 9:69043397-69043428; SaCas9
acaacaacaacaaattaattgatct

SEQ ID NO: 22574 - DNA, 24 bp, Artificial Sequence
  Synthetic: FXN 3 reverse 9:69043398-69043428; SaCas9
caacaacaacaaattaattgatct

SEQ ID NO: 22575 - DNA, 23 bp, Artificial Sequence
  Synthetic: FXN 3 reverse 9:69043399-69043428; SaCas9
aacaacaacaaattaattgatct

SEQ ID NO: 22576 - DNA, 22 bp, Artificial Sequence
  Synthetic: FXN 3 reverse 9:69043400-69043428; SaCas9
acaacaacaaattaattgatct

SEQ ID NO: 22577 - DNA, 21 bp, Artificial Sequence
  Synthetic: FXN 3 reverse 9:69043401-69043428; SaCas9
caacaacaaattaattgatct

SEQ ID NO: 22578 - DNA, 20 bp, Artificial Sequence
  Synthetic: FXN 3 reverse 9:69043402-69043428; SaCas9
aacaacaaattaattgatct

SEQ ID NO: 22579 - DNA, 19 bp, Artificial Sequence
  Synthetic: FXN 3 reverse 9:69043403-69043428; SaCas9
acaacaaattaattgatct

SEQ ID NO: 22580 - DNA, 18 bp, Artificial Sequence
  Synthetic: FXN 3 reverse 9:69043404-69043428; SaCas9
caacaaattaattgatct

SEQ ID NO: 22581 - DNA, 25 bp, Artificial Sequence
  Synthetic: FXN 3 forward 9:69043406-69043437; SaCas9
tcaattaatttgttgttgttgttgt

SEQ ID NO: 22582 - DNA, 24 bp, Artificial Sequence
  Synthetic: FXN 3 forward 9:69043407-69043437; SaCas9
caattaatttgttgttgttgttgt

SEQ ID NO: 22583 - DNA, 23 bp, Artificial Sequence
  Synthetic: FXN 3 forward 9:69043408-69043437; SaCas9
aattaatttgttgttgttgttgt

SEQ ID NO: 22584 - DNA, 22 bp, Artificial Sequence
  Synthetic: FXN 3 forward 9:69043409-69043437; SaCas9
attaatttgttgttgttgttgt

SEQ ID NO: 22585 - DNA, 21 bp, Artificial Sequence
  Synthetic: FXN 3 forward 9:69043410-69043437; SaCas9
ttaatttgttgttgttgttgt

SEQ ID NO: 22586 - DNA, 20 bp, Artificial Sequence
  Synthetic: FXN 3 forward 9:69043411-69043437; SaCas9
taatttgttgttgttgttgt

SEQ ID NO: 22587 - DNA, 19 bp, Artificial Sequence
  Synthetic: FXN 3 forward 9:69043412-69043437; SaCas9
aatttgttgttgttgttgt

SEQ ID NO: 22588 - DNA, 18 bp, Artificial Sequence
  Synthetic: FXN 3 forward 9:69043413-69043437; SaCas9
atttgttgttgttgttgt

SEQ ID NO: 22589 - DNA, 25 bp, Artificial Sequence
  Synthetic: FXN 3 forward 9:69043412-69043443; SaCas9
aatttgttgttgttgttgtttgaga

SEQ ID NO: 22590 - DNA, 24 bp, Artificial Sequence
  Synthetic: FXN 3 forward 9:69043413-69043443; SaCas9
atttgttgttgttgttgtttgaga

SEQ ID NO: 22591 - DNA, 23 bp, Artificial Sequence
  Synthetic: FXN 3 forward 9:69043414-69043443; SaCas9
tttgttgttgttgttgtttgaga

SEQ ID NO: 22592 - DNA, 22 bp, Artificial Sequence
  Synthetic: FXN 3 forward 9:69043415-69043443; SaCas9
ttgttgttgttgttgtttgaga

SEQ ID NO: 22593 - DNA, 21 bp, Artificial Sequence
  Synthetic: FXN 3 forward 9:69043416-69043443; SaCas9
tgttgttgttgttgtttgaga

SEQ ID NO: 22594 - DNA, 20 bp, Artificial Sequence
  Synthetic: FXN 3 forward 9:69043417-69043443; SaCas9
gttgttgttgttgtttgaga

SEQ ID NO: 22595 - DNA, 19 bp, Artificial Sequence
  Synthetic: FXN 3 forward 9:69043418-69043443; SaCas9
ttgttgttgttgtttgaga

SEQ ID NO: 22596 - DNA, 18 bp, Artificial Sequence
  Synthetic: FXN 3 forward 9:69043419-69043443; SaCas9
tgttgttgttgtttgaga

SEQ ID NO: 22597 - DNA, 25 bp, Artificial Sequence
  Synthetic: FXN 3 forward 9:69043439-69043470; SaCas9
gggtctccctctgttgcccaggctg

SEQ ID NO: 22598 - DNA, 24 bp, Artificial Sequence
  Synthetic: FXN 3 forward 9:69043440-69043470; SaCas9
ggtctccctctgttgcccaggctg

SEQ ID NO: 22599 - DNA, 23 bp, Artificial Sequence
  Synthetic: FXN 3 forward 9:69043441-69043470; SaCas9
gtctccctctgttgcccaggctg

SEQ ID NO: 22600 - DNA, 22 bp, Artificial Sequence
  Synthetic: FXN 3 forward 9:69043442-69043470; SaCas9
tctccctctgttgcccaggctg

SEQ ID NO: 22601 - DNA, 21 bp, Artificial Sequence
  Synthetic: FXN 3 forward 9:69043443-69043470; SaCas9
ctccctctgttgcccaggctg

SEQ ID NO: 22602 - DNA, 20 bp, Artificial Sequence
  Synthetic: FXN 3 forward 9:69043444-69043470; SaCas9
tccctctgttgcccaggctg

SEQ ID NO: 22603 - DNA, 19 bp, Artificial Sequence
  Synthetic: FXN 3 forward 9:69043445-69043470; SaCas9
ccctctgttgcccaggctg

SEQ ID NO: 22604 - DNA, 18 bp, Artificial Sequence
  Synthetic: FXN 3 forward 9:69043446-69043470; SaCas9
cctctgttgcccaggctg

SEQ ID NO: 22605 - DNA, 25 bp, Artificial Sequence
  Synthetic: FXN 3 forward 9:69043440-69043471; SaCas9
ggtctccctctgttgcccaggctgc

SEQ ID NO: 22606 - DNA, 24 bp, Artificial Sequence
  Synthetic: FXN 3 forward 9:69043441-69043471; SaCas9
gtctccctctgttgcccaggctgc

SEQ ID NO: 22607 - DNA, 23 bp, Artificial Sequence
  Synthetic: FXN 3 forward 9:69043442-69043471; SaCas9
tctccctctgttgcccaggctgc

SEQ ID NO: 22608 - DNA, 22 bp, Artificial Sequence
  Synthetic: FXN 3 forward 9:69043443-69043471; SaCas9
ctccctctgttgcccaggctgc

SEQ ID NO: 22609 - DNA, 21 bp, Artificial Sequence
  Synthetic: FXN 3 forward 9:69043444-69043471; SaCas9
tccctctgttgcccaggctgc

SEQ ID NO: 22610 - DNA, 20 bp, Artificial Sequence
  Synthetic: FXN 3 forward 9:69043445-69043471; SaCas9
ccctctgttgcccaggctgc

SEQ ID NO: 22611 - DNA, 19 bp, Artificial Sequence
  Synthetic: FXN 3 forward 9:69043446-69043471; SaCas9
cctctgttgcccaggctgc

SEQ ID NO: 22612 - DNA, 18 bp, Artificial Sequence
  Synthetic: FXN 3 forward 9:69043447-69043471; SaCas9
ctctgttgcccaggctgc

SEQ ID NO: 22613 - DNA, 25 bp, Artificial Sequence
  Synthetic: FXN 3 reverse 9:69043442-69043473; SaCas9
gcactccagcagcctgggcaacaga

SEQ ID NO: 22614 - DNA, 24 bp, Artificial Sequence
  Synthetic: FXN 3 reverse 9:69043443-69043473; SaCas9
cactccagcagcctgggcaacaga

SEQ ID NO: 22615 - DNA, 23 bp, Artificial Sequence
  Synthetic: FXN 3 reverse 9:69043444-69043473; SaCas9
actccagcagcctgggcaacaga

SEQ ID NO: 22616 - DNA, 22 bp, Artificial Sequence
  Synthetic: FXN 3 reverse 9:69043445-69043473; SaCas9
ctccagcagcctgggcaacaga

SEQ ID NO: 22617 - DNA, 21 bp, Artificial Sequence
  Synthetic: FXN 3 reverse 9:69043446-69043473; SaCas9
tccagcagcctgggcaacaga

SEQ ID NO: 22618 - DNA, 20 bp, Artificial Sequence
  Synthetic: FXN 3 reverse 9:69043447-69043473; SaCas9
ccagcagcctgggcaacaga

SEQ ID NO: 22619 - DNA, 19 bp, Artificial Sequence
  Synthetic: FXN 3 reverse 9:69043448-69043473; SaCas9
cagcagcctgggcaacaga

SEQ ID NO: 22620 - DNA, 18 bp, Artificial Sequence
  Synthetic: FXN 3 reverse 9:69043449-69043473; SaCas9
agcagcctgggcaacaga

SEQ ID NO: 22621 - DNA, 25 bp, Artificial Sequence
  Synthetic: FXN 3 reverse 9:69043443-69043474; SaCas9
tgcactccagcagcctgggcaacag

SEQ ID NO: 22622 - DNA, 24 bp, Artificial Sequence
  Synthetic: FXN 3 reverse 9:69043444-69043474; SaCas9
gcactccagcagcctgggcaacag

SEQ ID NO: 22623 - DNA, 23 bp, Artificial Sequence
  Synthetic: FXN 3 reverse 9:69043445-69043474; SaCas9
cactccagcagcctgggcaacag

SEQ ID NO: 22624 - DNA, 22 bp, Artificial Sequence
  Synthetic: FXN 3 reverse 9:69043446-69043474; SaCas9
actccagcagcctgggcaacag

SEQ ID NO: 22625 - DNA, 21 bp, Artificial Sequence
  Synthetic: FXN 3 reverse 9:69043447-69043474; SaCas9
ctccagcagcctgggcaacag

SEQ ID NO: 22626 - DNA, 20 bp, Artificial Sequence
  Synthetic: FXN 3 reverse 9:69043448-69043474; SaCas9
tccagcagcctgggcaacag

SEQ ID NO: 22627 - DNA, 19 bp, Artificial Sequence
  Synthetic: FXN 3 reverse 9:69043449-69043474; SaCas9
ccagcagcctgggcaacag

SEQ ID NO: 22628 - DNA, 18 bp, Artificial Sequence
  Synthetic: FXN 3 reverse 9:69043450-69043474; SaCas9
cagcagcctgggcaacag

SEQ ID NO: 22629 - DNA, 25 bp, Artificial Sequence
  Synthetic: FXN 3 reverse 9:69043444-69043475; SaCas9
ttgcactccagcagcctgggcaaca

SEQ ID NO: 22630 - DNA, 24 bp, Artificial Sequence
  Synthetic: FXN 3 reverse 9:69043445-69043475; SaCas9
tgcactccagcagcctgggcaaca

SEQ ID NO: 22631 - DNA, 23 bp, Artificial Sequence
  Synthetic: FXN 3 reverse 9:69043446-69043475; SaCas9
gcactccagcagcctgggcaaca

SEQ ID NO: 22632 - DNA, 22 bp, Artificial Sequence
  Synthetic: FXN 3 reverse 9:69043447-69043475; SaCas9
cactccagcagcctgggcaaca

SEQ ID NO: 22633 - DNA, 21 bp, Artificial Sequence
  Synthetic: FXN 3 reverse 9:69043448-69043475; SaCas9
actccagcagcctgggcaaca

SEQ ID NO: 22634 - DNA, 20 bp, Artificial Sequence
  Synthetic: FXN 3 reverse 9:69043449-69043475; SaCas9
ctccagcagcctgggcaaca

SEQ ID NO: 22635 - DNA, 19 bp, Artificial Sequence
  Synthetic: FXN 3 reverse 9:69043450-69043475; SaCas9
tccagcagcctgggcaaca

SEQ ID NO: 22636 - DNA, 18 bp, Artificial Sequence
  Synthetic: FXN 3 reverse 9:69043451-69043475; SaCas9
ccagcagcctgggcaaca

SEQ ID NO: 22637 - DNA, 25 bp, Artificial Sequence
  Synthetic: FXN 3 reverse 9:69043446-69043477; SaCas9
cattgcactccagcagcctgggcaa

SEQ ID NO: 22638 - DNA, 24 bp, Artificial Sequence
  Synthetic: FXN 3 reverse 9:69043447-69043477; SaCas9
attgcactccagcagcctgggcaa

SEQ ID NO: 22639 - DNA, 23 bp, Artificial Sequence
  Synthetic: FXN 3 reverse 9:69043448-69043477; SaCas9
ttgcactccagcagcctgggcaa

SEQ ID NO: 22640 - DNA, 22 bp, Artificial Sequence
  Synthetic: FXN 3 reverse 9:69043449-69043477; SaCas9
tgcactccagcagcctgggcaa

SEQ ID NO: 22641 - DNA, 21 bp, Artificial Sequence
  Synthetic: FXN 3 reverse 9:69043450-69043477; SaCas9
gcactccagcagcctgggcaa

SEQ ID NO: 22642 - DNA, 20 bp, Artificial Sequence
  Synthetic: FXN 3 reverse 9:69043451-69043477; SaCas9
cactccagcagcctgggcaa

SEQ ID NO: 22643 - DNA, 19 bp, Artificial Sequence
  Synthetic: FXN 3 reverse 9:69043452-69043477; SaCas9
actccagcagcctgggcaa

SEQ ID NO: 22644 - DNA, 18 bp, Artificial Sequence
  Synthetic: FXN 3 reverse 9:69043453-69043477; SaCas9
ctccagcagcctgggcaa

SEQ ID NO: 22645 - DNA, 25 bp, Artificial Sequence
  Synthetic: FXN 3 reverse 9:69043454-69043485; SaCas9
gattacaccattgcactccagcagc

SEQ ID NO: 22646 - DNA, 24 bp, Artificial Sequence
  Synthetic: FXN 3 reverse 9:69043455-69043485; SaCas9
attacaccattgcactccagcagc

SEQ ID NO: 22647 - DNA, 23 bp, Artificial Sequence
  Synthetic: FXN 3 reverse 9:69043456-69043485; SaCas9
ttacaccattgcactccagcagc

SEQ ID NO: 22648 - DNA, 22 bp, Artificial Sequence
  Synthetic: FXN 3 reverse 9:69043457-69043485; SaCas9
tacaccattgcactccagcagc

SEQ ID NO: 22649 - DNA, 21 bp, Artificial Sequence
  Synthetic: FXN 3 reverse 9:69043458-69043485; SaCas9
acaccattgcactccagcagc

SEQ ID NO: 22650 - DNA, 20 bp, Artificial Sequence
  Synthetic: FXN 3 reverse 9:69043459-69043485; SaCas9
caccattgcactccagcagc

SEQ ID NO: 22651 - DNA, 19 bp, Artificial Sequence
  Synthetic: FXN 3 reverse 9:69043460-69043485; SaCas9
accattgcactccagcagc

SEQ ID NO: 22652 - DNA, 18 bp, Artificial Sequence
  Synthetic: FXN 3 reverse 9:69043461-69043485; SaCas9
ccattgcactccagcagc

SEQ ID NO: 22653 - DNA, 25 bp, Artificial Sequence
  Synthetic: FXN 3 reverse 9:69043488-69043519; SaCas9
ttgagccagagaggtagaggctgca

SEQ ID NO: 22654 - DNA, 24 bp, Artificial Sequence
  Synthetic: FXN 3 reverse 9:69043489-69043519; SaCas9
tgagccagagaggtagaggctgca

SEQ ID NO: 22655 - DNA, 23 bp, Artificial Sequence
  Synthetic: FXN 3 reverse 9:69043490-69043519; SaCas9
gagccagagaggtagaggctgca

SEQ ID NO: 22656 - DNA, 22 bp, Artificial Sequence
  Synthetic: FXN 3 reverse 9:69043491-69043519; SaCas9
agccagagaggtagaggctgca

SEQ ID NO: 22657 - DNA, 21 bp, Artificial Sequence
  Synthetic: FXN 3 reverse 9:69043492-69043519; SaCas9
gccagagaggtagaggctgca

SEQ ID NO: 22658 - DNA, 20 bp, Artificial Sequence
  Synthetic: FXN 3 reverse 9:69043493-69043519; SaCas9
ccagagaggtagaggctgca

SEQ ID NO: 22659 - DNA, 19 bp, Artificial Sequence
  Synthetic: FXN 3 reverse 9:69043494-69043519; SaCas9
cagagaggtagaggctgca

SEQ ID NO: 22660 - DNA, 18 bp, Artificial Sequence
  Synthetic: FXN 3 reverse 9:69043495-69043519; SaCas9
agagaggtagaggctgca

SEQ ID NO: 22661 - DNA, 25 bp, Artificial Sequence
  Synthetic: FXN 3 reverse 9:69043499-69043530; SaCas9
gggaggattgcttgagccagagagg

SEQ ID NO: 22662 - DNA, 24 bp, Artificial Sequence
  Synthetic: FXN 3 reverse 9:69043500-69043530; SaCas9
ggaggattgcttgagccagagagg

SEQ ID NO: 22663 - DNA, 23 bp, Artificial Sequence
  Synthetic: FXN 3 reverse 9:69043501-69043530; SaCas9
gaggattgcttgagccagagagg

SEQ ID NO: 22664 - DNA, 22 bp, Artificial Sequence
  Synthetic: FXN 3 reverse 9:69043502-69043530; SaCas9
aggattgcttgagccagagagg

SEQ ID NO: 22665 - DNA, 21 bp, Artificial Sequence
  Synthetic: FXN 3 reverse 9:69043503-69043530; SaCas9
ggattgcttgagccagagagg

SEQ ID NO: 22666 - DNA, 20 bp, Artificial Sequence
  Synthetic: FXN 3 reverse 9:69043504-69043530; SaCas9
gattgcttgagccagagagg

SEQ ID NO: 22667 - DNA, 19 bp, Artificial Sequence
  Synthetic: FXN 3 reverse 9:69043505-69043530; SaCas9
attgcttgagccagagagg

SEQ ID NO: 22668 - DNA, 18 bp, Artificial Sequence
  Synthetic: FXN 3 reverse 9:69043506-69043530; SaCas9
ttgcttgagccagagagg

SEQ ID NO: 22669 - DNA, 25 bp, Artificial Sequence
  Synthetic: FXN 3 reverse 9:69043505-69043536; SaCas9
cgaggtgggaggattgcttgagcca

SEQ ID NO: 22670 - DNA, 24 bp, Artificial Sequence
  Synthetic: FXN 3 reverse 9:69043506-69043536; SaCas9
gaggtgggaggattgcttgagcca

SEQ ID NO: 22671 - DNA, 23 bp, Artificial Sequence
  Synthetic: FXN 3 reverse 9:69043507-69043536; SaCas9
aggtgggaggattgcttgagcca

SEQ ID NO: 22672 - DNA, 22 bp, Artificial Sequence
  Synthetic: FXN 3 reverse 9:69043508-69043536; SaCas9
ggtgggaggattgcttgagcca

SEQ ID NO: 22673 - DNA, 21 bp, Artificial Sequence
  Synthetic: FXN 3 reverse 9:69043509-69043536; SaCas9
gtgggaggattgcttgagcca

SEQ ID NO: 22674 - DNA, 20 bp, Artificial Sequence
  Synthetic: FXN 3 reverse 9:69043510-69043536; SaCas9
tgggaggattgcttgagcca

SEQ ID NO: 22675 - DNA, 19 bp, Artificial Sequence
  Synthetic: FXN 3 reverse 9:69043511-69043536; SaCas9
gggaggattgcttgagcca

SEQ ID NO: 22676 - DNA, 18 bp, Artificial Sequence
  Synthetic: FXN 3 reverse 9:69043512-69043536; SaCas9
ggaggattgcttgagcca

SEQ ID NO: 22677 - DNA, 25 bp, Artificial Sequence
  Synthetic: FXN 3 reverse 9:69043507-69043538; SaCas9
gccgaggtgggaggattgcttgagc

SEQ ID NO: 22678 - DNA, 24 bp, Artificial Sequence
  Synthetic: FXN 3 reverse 9:69043508-69043538; SaCas9
ccgaggtgggaggattgcttgagc

SEQ ID NO: 22679 - DNA, 23 bp, Artificial Sequence
  Synthetic: FXN 3 reverse 9:69043509-69043538; SaCas9
cgaggtgggaggattgcttgagc

SEQ ID NO: 22680 - DNA, 22 bp, Artificial Sequence
  Synthetic: FXN 3 reverse 9:69043510-69043538; SaCas9
gaggtgggaggattgcttgagc

SEQ ID NO: 22681 - DNA, 21 bp, Artificial Sequence
  Synthetic: FXN 3 reverse 9:69043511-69043538; SaCas9
aggtgggaggattgcttgagc

SEQ ID NO: 22682 - DNA, 20 bp, Artificial Sequence
  Synthetic: FXN 3 reverse 9:69043512-69043538; SaCas9
ggtgggaggattgcttgagc

SEQ ID NO: 22683 - DNA, 19 bp, Artificial Sequence
  Synthetic: FXN 3 reverse 9:69043513-69043538; SaCas9
gtgggaggattgcttgagc

SEQ ID NO: 22684 - DNA, 18 bp, Artificial Sequence
  Synthetic: FXN 3 reverse 9:69043514-69043538; SaCas9
tgggaggattgcttgagc

SEQ ID NO: 22685 - DNA, 25 bp, Artificial Sequence
  Synthetic: FXN 3 reverse 9:69043513-69043544; SaCas9
caggaggccgaggtgggaggattgc

SEQ ID NO: 22686 - DNA, 24 bp, Artificial Sequence
  Synthetic: FXN 3 reverse 9:69043514-69043544; SaCas9
aggaggccgaggtgggaggattgc

SEQ ID NO: 22687 - DNA, 23 bp, Artificial Sequence
  Synthetic: FXN 3 reverse 9:69043515-69043544; SaCas9
ggaggccgaggtgggaggattgc

SEQ ID NO: 22688 - DNA, 22 bp, Artificial Sequence
  Synthetic: FXN 3 reverse 9:69043516-69043544; SaCas9
gaggccgaggtgggaggattgc

SEQ ID NO: 22689 - DNA, 21 bp, Artificial Sequence
  Synthetic: FXN 3 reverse 9:69043517-69043544; SaCas9
aggccgaggtgggaggattgc

SEQ ID NO: 22690 - DNA, 20 bp, Artificial Sequence
  Synthetic: FXN 3 reverse 9:69043518-69043544; SaCas9
ggccgaggtgggaggattgc

SEQ ID NO: 22691 - DNA, 19 bp, Artificial Sequence
  Synthetic: FXN 3 reverse 9:69043519-69043544; SaCas9
gccgaggtgggaggattgc

SEQ ID NO: 22692 - DNA, 18 bp, Artificial Sequence
  Synthetic: FXN 3 reverse 9:69043520-69043544; SaCas9
ccgaggtgggaggattgc

SEQ ID NO: 22693 - DNA, 25 bp, Artificial Sequence
  Synthetic: FXN 3 forward 9:69043516-69043547; SaCas9
caagcaatcctcccacctcggcctc

SEQ ID NO: 22694 - DNA, 24 bp, Artificial Sequence
  Synthetic: FXN 3 forward 9:69043517-69043547; SaCas9
aagcaatcctcccacctcggcctc

SEQ ID NO: 22695 - DNA, 23 bp, Artificial Sequence
  Synthetic: FXN 3 forward 9:69043518-69043547; SaCas9
agcaatcctcccacctcggcctc

SEQ ID NO: 22696 - DNA, 22 bp, Artificial Sequence
  Synthetic: FXN 3 forward 9:69043519-69043547; SaCas9
gcaatcctcccacctcggcctc

SEQ ID NO: 22697 - DNA, 21 bp, Artificial Sequence
  Synthetic: FXN 3 forward 9:69043520-69043547; SaCas9
caatcctcccacctcggcctc

SEQ ID NO: 22698 - DNA, 20 bp, Artificial Sequence
  Synthetic: FXN 3 forward 9:69043521-69043547; SaCas9
aatcctcccacctcggcctc

SEQ ID NO: 22699 - DNA, 19 bp, Artificial Sequence
  Synthetic: FXN 3 forward 9:69043522-69043547; SaCas9
atcctcccacctcggcctc

SEQ ID NO: 22700 - DNA, 18 bp, Artificial Sequence
  Synthetic: FXN 3 forward 9:69043523-69043547; SaCas9
tcctcccacctcggcctc

SEQ ID NO: 22701 - DNA, 25 bp, Artificial Sequence
  Synthetic: FXN 3 reverse 9:69043522-69043553; SaCas9
ccagctactcaggaggccgaggtgg

SEQ ID NO: 22702 - DNA, 24 bp, Artificial Sequence
  Synthetic: FXN 3 reverse 9:69043523-69043553; SaCas9
cagctactcaggaggccgaggtgg

SEQ ID NO: 22703 - DNA, 23 bp, Artificial Sequence
  Synthetic: FXN 3 reverse 9:69043524-69043553; SaCas9
agctactcaggaggccgaggtgg

SEQ ID NO: 22704 - DNA, 22 bp, Artificial Sequence
  Synthetic: FXN 3 reverse 9:69043525-69043553; SaCas9
gctactcaggaggccgaggtgg

SEQ ID NO: 22705 - DNA, 21 bp, Artificial Sequence
  Synthetic: FXN 3 reverse 9:69043526-69043553; SaCas9
ctactcaggaggccgaggtgg

SEQ ID NO: 22706 - DNA, 20 bp, Artificial Sequence
  Synthetic: FXN 3 reverse 9:69043527-69043553; SaCas9
tactcaggaggccgaggtgg

SEQ ID NO: 22707 - DNA, 19 bp, Artificial Sequence
  Synthetic: FXN 3 reverse 9:69043528-69043553; SaCas9
actcaggaggccgaggtgg

SEQ ID NO: 22708 - DNA, 18 bp, Artificial Sequence
  Synthetic: FXN 3 reverse 9:69043529-69043553; SaCas9
ctcaggaggccgaggtgg

SEQ ID NO: 22709 - DNA, 25 bp, Artificial Sequence
  Synthetic: FXN 3 forward 9:69043524-69043555; SaCas9
cctcccacctcggcctcctgagtag

SEQ ID NO: 22710 - DNA, 24 bp, Artificial Sequence
  Synthetic: FXN 3 forward 9:69043525-69043555; SaCas9
ctcccacctcggcctcctgagtag

SEQ ID NO: 22711 - DNA, 23 bp, Artificial Sequence
  Synthetic: FXN 3 forward 9:69043526-69043555; SaCas9
tcccacctcggcctcctgagtag

SEQ ID NO: 22712 - DNA, 22 bp, Artificial Sequence
  Synthetic: FXN 3 forward 9:69043527-69043555; SaCas9
cccacctcggcctcctgagtag

SEQ ID NO: 22713 - DNA, 21 bp, Artificial Sequence
  Synthetic: FXN 3 forward 9:69043528-69043555; SaCas9
ccacctcggcctcctgagtag

SEQ ID NO: 22714 - DNA, 20 bp, Artificial Sequence
  Synthetic: FXN 3 forward 9:69043529-69043555; SaCas9
cacctcggcctcctgagtag

SEQ ID NO: 22715 - DNA, 19 bp, Artificial Sequence
  Synthetic: FXN 3 forward 9:69043530-69043555; SaCas9
acctcggcctcctgagtag

SEQ ID NO: 22716 - DNA, 18 bp, Artificial Sequence
  Synthetic: FXN 3 forward 9:69043531-69043555; SaCas9
cctcggcctcctgagtag

SEQ ID NO: 22717 - DNA, 25 bp, Artificial Sequence
  Synthetic: FXN 3 reverse 9:69043524-69043555; SaCas9
tcccagctactcaggaggccgaggt

SEQ ID NO: 22718 - DNA, 24 bp, Artificial Sequence
  Synthetic: FXN 3 reverse 9:69043525-69043555; SaCas9
cccagctactcaggaggccgaggt

SEQ ID NO: 22719 - DNA, 23 bp, Artificial Sequence
  Synthetic: FXN 3 reverse 9:69043526-69043555; SaCas9
ccagctactcaggaggccgaggt

SEQ ID NO: 22720 - DNA, 22 bp, Artificial Sequence
  Synthetic: FXN 3 reverse 9:69043527-69043555; SaCas9
cagctactcaggaggccgaggt

SEQ ID NO: 22721 - DNA, 21 bp, Artificial Sequence
  Synthetic: FXN 3 reverse 9:69043528-69043555; SaCas9
agctactcaggaggccgaggt

SEQ ID NO: 22722 - DNA, 20 bp, Artificial Sequence
  Synthetic: FXN 3 reverse 9:69043529-69043555; SaCas9
gctactcaggaggccgaggt

SEQ ID NO: 22723 - DNA, 19 bp, Artificial Sequence
  Synthetic: FXN 3 reverse 9:69043530-69043555; SaCas9
ctactcaggaggccgaggt

SEQ ID NO: 22724 - DNA, 18 bp, Artificial Sequence
  Synthetic: FXN 3 reverse 9:69043531-69043555; SaCas9
tactcaggaggccgaggt

SEQ ID NO: 22725 - DNA, 25 bp, Artificial Sequence
  Synthetic: FXN 3 forward 9:69043525-69043556; SaCas9
ctcccacctcggcctcctgagtagc

SEQ ID NO: 22726 - DNA, 24 bp, Artificial Sequence
  Synthetic: FXN 3 forward 9:69043526-69043556; SaCas9
tcccacctcggcctcctgagtagc

SEQ ID NO: 22727 - DNA, 23 bp, Artificial Sequence
  Synthetic: FXN 3 forward 9:69043527-69043556; SaCas9
cccacctcggcctcctgagtagc

SEQ ID NO: 22728 - DNA, 22 bp, Artificial Sequence
  Synthetic: FXN 3 forward 9:69043528-69043556; SaCas9
ccacctcggcctcctgagtagc

SEQ ID NO: 22729 - DNA, 21 bp, Artificial Sequence
  Synthetic: FXN 3 forward 9:69043529-69043556; SaCas9
cacctcggcctcctgagtagc

SEQ ID NO: 22730 - DNA, 20 bp, Artificial Sequence
  Synthetic: FXN 3 forward 9:69043530-69043556; SaCas9
acctcggcctcctgagtagc

SEQ ID NO: 22731 - DNA, 19 bp, Artificial Sequence
  Synthetic: FXN 3 forward 9:69043531-69043556; SaCas9
cctcggcctcctgagtagc

SEQ ID NO: 22732 - DNA, 18 bp, Artificial Sequence
  Synthetic: FXN 3 forward 9:69043532-69043556; SaCas9
ctcggcctcctgagtagc

SEQ ID NO: 22733 - DNA, 25 bp, Artificial Sequence
  Synthetic: FXN 3 reverse 9:69043525-69043556; SaCas9
gtcccagctactcaggaggccgagg

SEQ ID NO: 22734 - DNA, 24 bp, Artificial Sequence
  Synthetic: FXN 3 reverse 9:69043526-69043556; SaCas9
tcccagctactcaggaggccgagg

SEQ ID NO: 22735 - DNA, 23 bp, Artificial Sequence
  Synthetic: FXN 3 reverse 9:69043527-69043556; SaCas9
cccagctactcaggaggccgagg

SEQ ID NO: 22736 - DNA, 22 bp, Artificial Sequence
  Synthetic: FXN 3 reverse 9:69043528-69043556; SaCas9
ccagctactcaggaggccgagg

SEQ ID NO: 22737 - DNA, 21 bp, Artificial Sequence
  Synthetic: FXN 3 reverse 9:69043529-69043556; SaCas9
cagctactcaggaggccgagg

SEQ ID NO: 22738 - DNA, 20 bp, Artificial Sequence
  Synthetic: FXN 3 reverse 9:69043530-69043556; SaCas9
agctactcaggaggccgagg

SEQ ID NO: 22739 - DNA, 19 bp, Artificial Sequence
  Synthetic: FXN 3 reverse 9:69043531-69043556; SaCas9
gctactcaggaggccgagg

SEQ ID NO: 22740 - DNA, 18 bp, Artificial Sequence
  Synthetic: FXN 3 reverse 9:69043532-69043556; SaCas9
ctactcaggaggccgagg

SEQ ID NO: 22741 - DNA, 25 bp, Artificial Sequence
  Synthetic: FXN 3 reverse 9:69043526-69043557; SaCas9
agtcccagctactcaggaggccgag

SEQ ID NO: 22742 - DNA, 24 bp, Artificial Sequence
  Synthetic: FXN 3 reverse 9:69043527-69043557; SaCas9
gtcccagctactcaggaggccgag

SEQ ID NO: 22743 - DNA, 23 bp, Artificial Sequence
  Synthetic: FXN 3 reverse 9:69043528-69043557; SaCas9
tcccagctactcaggaggccgag

SEQ ID NO: 22744 - DNA, 22 bp, Artificial Sequence
  Synthetic: FXN 3 reverse 9:69043529-69043557; SaCas9
cccagctactcaggaggccgag

SEQ ID NO: 22745 - DNA, 21 bp, Artificial Sequence
  Synthetic: FXN 3 reverse 9:69043530-69043557; SaCas9
ccagctactcaggaggccgag

SEQ ID NO: 22746 - DNA, 20 bp, Artificial Sequence
  Synthetic: FXN 3 reverse 9:69043531-69043557; SaCas9
cagctactcaggaggccgag

SEQ ID NO: 22747 - DNA, 19 bp, Artificial Sequence
  Synthetic: FXN 3 reverse 9:69043532-69043557; SaCas9
agctactcaggaggccgag

SEQ ID NO: 22748 - DNA, 18 bp, Artificial Sequence
  Synthetic: FXN 3 reverse 9:69043533-69043557; SaCas9
gctactcaggaggccgag

SEQ ID NO: 22749 - DNA, 25 bp, Artificial Sequence
  Synthetic: FXN 3 reverse 9:69043531-69043562; SaCas9
cctgtagtcccagctactcaggagg

SEQ ID NO: 22750 - DNA, 24 bp, Artificial Sequence
  Synthetic: FXN 3 reverse 9:69043532-69043562; SaCas9
ctgtagtcccagctactcaggagg

SEQ ID NO: 22751 - DNA, 23 bp, Artificial Sequence
  Synthetic: FXN 3 reverse 9:69043533-69043562; SaCas9
tgtagtcccagctactcaggagg

SEQ ID NO: 22752 - DNA, 22 bp, Artificial Sequence
  Synthetic: FXN 3 reverse 9:69043534-69043562; SaCas9
gtagtcccagctactcaggagg

SEQ ID NO: 22753 - DNA, 21 bp, Artificial Sequence
  Synthetic: FXN 3 reverse 9:69043535-69043562; SaCas9
tagtcccagctactcaggagg

SEQ ID NO: 22754 - DNA, 20 bp, Artificial Sequence
  Synthetic: FXN 3 reverse 9:69043536-69043562; SaCas9
agtcccagctactcaggagg

SEQ ID NO: 22755 - DNA, 19 bp, Artificial Sequence
  Synthetic: FXN 3 reverse 9:69043537-69043562; SaCas9
gtcccagctactcaggagg

SEQ ID NO: 22756 - DNA, 18 bp, Artificial Sequence
  Synthetic: FXN 3 reverse 9:69043538-69043562; SaCas9
tcccagctactcaggagg

SEQ ID NO: 22757 - DNA, 25 bp, Artificial Sequence
  Synthetic: FXN 3 reverse 9:69043537-69043568; SaCas9
ggtgtacctgtagtcccagctactc

SEQ ID NO: 22758 - DNA, 24 bp, Artificial Sequence
  Synthetic: FXN 3 reverse 9:69043538-69043568; SaCas9
gtgtacctgtagtcccagctactc

SEQ ID NO: 22759 - DNA, 23 bp, Artificial Sequence
  Synthetic: FXN 3 reverse 9:69043539-69043568; SaCas9
tgtacctgtagtcccagctactc

SEQ ID NO: 22760 - DNA, 22 bp, Artificial Sequence
  Synthetic: FXN 3 reverse 9:69043540-69043568; SaCas9
gtacctgtagtcccagctactc

SEQ ID NO: 22761 - DNA, 21 bp, Artificial Sequence
  Synthetic: FXN 3 reverse 9:69043541-69043568; SaCas9
tacctgtagtcccagctactc

SEQ ID NO: 22762 - DNA, 20 bp, Artificial Sequence
  Synthetic: FXN 3 reverse 9:69043542-69043568; SaCas9
acctgtagtcccagctactc

SEQ ID NO: 22763 - DNA, 19 bp, Artificial Sequence
  Synthetic: FXN 3 reverse 9:69043543-69043568; SaCas9
cctgtagtcccagctactc

SEQ ID NO: 22764 - DNA, 18 bp, Artificial Sequence
  Synthetic: FXN 3 reverse 9:69043544-69043568; SaCas9
ctgtagtcccagctactc

SEQ ID NO: 22765 - DNA, 25 bp, Artificial Sequence
  Synthetic: FXN 3 reverse 9:69043538-69043569; SaCas9
gggtgtacctgtagtcccagctact

SEQ ID NO: 22766 - DNA, 24 bp, Artificial Sequence
  Synthetic: FXN 3 reverse 9:69043539-69043569; SaCas9
ggtgtacctgtagtcccagctact

SEQ ID NO: 22767 - DNA, 23 bp, Artificial Sequence
  Synthetic: FXN 3 reverse 9:69043540-69043569; SaCas9
gtgtacctgtagtcccagctact

SEQ ID NO: 22768 - DNA, 22 bp, Artificial Sequence
  Synthetic: FXN 3 reverse 9:69043541-69043569; SaCas9
tgtacctgtagtcccagctact

SEQ ID NO: 22769 - DNA, 21 bp, Artificial Sequence
  Synthetic: FXN 3 reverse 9:69043542-69043569; SaCas9
gtacctgtagtcccagctact

SEQ ID NO: 22770 - DNA, 20 bp, Artificial Sequence
  Synthetic: FXN 3 reverse 9:69043543-69043569; SaCas9
tacctgtagtcccagctact

SEQ ID NO: 22771 - DNA, 19 bp, Artificial Sequence
  Synthetic: FXN 3 reverse 9:69043544-69043569; SaCas9
acctgtagtcccagctact

SEQ ID NO: 22772 - DNA, 18 bp, Artificial Sequence
  Synthetic: FXN 3 reverse 9:69043545-69043569; SaCas9
cctgtagtcccagctact

SEQ ID NO: 22773 - DNA, 25 bp, Artificial Sequence
  Synthetic: FXN 3 reverse 9:69043565-69043596; SaCas9
tatcaaaaacattatctgggtgtgg

SEQ ID NO: 22774 - DNA, 24 bp, Artificial Sequence
  Synthetic: FXN 3 reverse 9:69043566-69043596; SaCas9
atcaaaaacattatctgggtgtgg

SEQ ID NO: 22775 - DNA, 23 bp, Artificial Sequence
  Synthetic: FXN 3 reverse 9:69043567-69043596; SaCas9
tcaaaaacattatctgggtgtgg

SEQ ID NO: 22776 - DNA, 22 bp, Artificial Sequence
  Synthetic: FXN 3 reverse 9:69043568-69043596; SaCas9
caaaaacattatctgggtgtgg

SEQ ID NO: 22777 - DNA, 21 bp, Artificial Sequence
  Synthetic: FXN 3 reverse 9:69043569-69043596; SaCas9
aaaaacattatctgggtgtgg

SEQ ID NO: 22778 - DNA, 20 bp, Artificial Sequence
  Synthetic: FXN 3 reverse 9:69043570-69043596; SaCas9
aaaacattatctgggtgtgg

SEQ ID NO: 22779 - DNA, 19 bp, Artificial Sequence
  Synthetic: FXN 3 reverse 9:69043571-69043596; SaCas9
aaacattatctgggtgtgg

SEQ ID NO: 22780 - DNA, 18 bp, Artificial Sequence
  Synthetic: FXN 3 reverse 9:69043572-69043596; SaCas9
aacattatctgggtgtgg

SEQ ID NO: 22781 - DNA, 25 bp, Artificial Sequence
  Synthetic: FXN 3 reverse 9:69043566-69043597; SaCas9
atatcaaaaacattatctgggtgtg

SEQ ID NO: 22782 - DNA, 24 bp, Artificial Sequence
  Synthetic: FXN 3 reverse 9:69043567-69043597; SaCas9
tatcaaaaacattatctgggtgtg

SEQ ID NO: 22783 - DNA, 23 bp, Artificial Sequence
  Synthetic: FXN 3 reverse 9:69043568-69043597; SaCas9
atcaaaaacattatctgggtgtg

SEQ ID NO: 22784 - DNA, 22 bp, Artificial Sequence
  Synthetic: FXN 3 reverse 9:69043569-69043597; SaCas9
tcaaaaacattatctgggtgtg

SEQ ID NO: 22785 - DNA, 21 bp, Artificial Sequence
  Synthetic: FXN 3 reverse 9:69043570-69043597; SaCas9
caaaaacattatctgggtgtg

SEQ ID NO: 22786 - DNA, 20 bp, Artificial Sequence
  Synthetic: FXN 3 reverse 9:69043571-69043597; SaCas9
aaaaacattatctgggtgtg

SEQ ID NO: 22787 - DNA, 19 bp, Artificial Sequence
  Synthetic: FXN 3 reverse 9:69043572-69043597; SaCas9
aaaacattatctgggtgtg

SEQ ID NO: 22788 - DNA, 18 bp, Artificial Sequence
  Synthetic: FXN 3 reverse 9:69043573-69043597; SaCas9
aaacattatctgggtgtg

SEQ ID NO: 22789 - DNA, 25 bp, Artificial Sequence
  Synthetic: FXN 3 reverse 9:69043575-69043606; SaCas9
cctaaaaaaatatcaaaaacattat

SEQ ID NO: 22790 - DNA, 24 bp, Artificial Sequence
  Synthetic: FXN 3 reverse 9:69043576-69043606; SaCas9
ctaaaaaaatatcaaaaacattat

SEQ ID NO: 22791 - DNA, 23 bp, Artificial Sequence
  Synthetic: FXN 3 reverse 9:69043577-69043606; SaCas9
taaaaaaatatcaaaaacattat

SEQ ID NO: 22792 - DNA, 22 bp, Artificial Sequence
  Synthetic: FXN 3 reverse 9:69043578-69043606; SaCas9
aaaaaaatatcaaaaacattat

SEQ ID NO: 22793 - DNA, 21 bp, Artificial Sequence
  Synthetic: FXN 3 reverse 9:69043579-69043606; SaCas9
aaaaaatatcaaaaacattat

SEQ ID NO: 22794 - DNA, 20 bp, Artificial Sequence
  Synthetic: FXN 3 reverse 9:69043580-69043606; SaCas9
aaaaatatcaaaaacattat

SEQ ID NO: 22795 - DNA, 19 bp, Artificial Sequence
  Synthetic: FXN 3 reverse 9:69043581-69043606; SaCas9
aaaatatcaaaaacattat

SEQ ID NO: 22796 - DNA, 18 bp, Artificial Sequence
  Synthetic: FXN 3 reverse 9:69043582-69043606; SaCas9
aaatatcaaaaacattat

SEQ ID NO: 22797 - DNA, 25 bp, Artificial Sequence
  Synthetic: FXN 3 forward 9:69043580-69043611; SaCas9
gataatgtttttgatatttttttag

SEQ ID NO: 22798 - DNA, 24 bp, Artificial Sequence
  Synthetic: FXN 3 forward 9:69043581-69043611; SaCas9
ataatgtttttgatatttttttag

SEQ ID NO: 22799 - DNA, 23 bp, Artificial Sequence
  Synthetic: FXN 3 forward 9:69043582-69043611; SaCas9
taatgtttttgatatttttttag

SEQ ID NO: 22800 - DNA, 22 bp, Artificial Sequence
  Synthetic: FXN 3 forward 9:69043583-69043611; SaCas9
aatgtttttgatatttttttag

SEQ ID NO: 22801 - DNA, 21 bp, Artificial Sequence
  Synthetic: FXN 3 forward 9:69043584-69043611; SaCas9
atgtttttgatatttttttag

SEQ ID NO: 22802 - DNA, 20 bp, Artificial Sequence
  Synthetic: FXN 3 forward 9:69043585-69043611; SaCas9
tgtttttgatatttttttag

SEQ ID NO: 22803 - DNA, 19 bp, Artificial Sequence
  Synthetic: FXN 3 forward 9:69043586-69043611; SaCas9
gtttttgatatttttttag

SEQ ID NO: 22804 - DNA, 18 bp, Artificial Sequence
  Synthetic: FXN 3 forward 9:69043587-69043611; SaCas9
tttttgatatttttttag

SEQ ID NO: 22805 - DNA, 25 bp, Artificial Sequence
  Synthetic: FXN 3 forward 9:69043581-69043612; SaCas9
ataatgtttttgatatttttttagg

SEQ ID NO: 22806 - DNA, 24 bp, Artificial Sequence
  Synthetic: FXN 3 forward 9:69043582-69043612; SaCas9
taatgtttttgatatttttttagg

SEQ ID NO: 22807 - DNA, 23 bp, Artificial Sequence
  Synthetic: FXN 3 forward 9:69043583-69043612; SaCas9
aatgtttttgatatttttttagg

SEQ ID NO: 22808 - DNA, 22 bp, Artificial Sequence
  Synthetic: FXN 3 forward 9:69043584-69043612; SaCas9
atgtttttgatatttttttagg

SEQ ID NO: 22809 - DNA, 21 bp, Artificial Sequence
  Synthetic: FXN 3 forward 9:69043585-69043612; SaCas9
tgtttttgatatttttttagg

SEQ ID NO: 22810 - DNA, 20 bp, Artificial Sequence
  Synthetic: FXN 3 forward 9:69043586-69043612; SaCas9
gtttttgatatttttttagg

SEQ ID NO: 22811 - DNA, 19 bp, Artificial Sequence
  Synthetic: FXN 3 forward 9:69043587-69043612; SaCas9
tttttgatatttttttagg

SEQ ID NO: 22812 - DNA, 18 bp, Artificial Sequence
  Synthetic: FXN 3 forward 9:69043588-69043612; SaCas9
ttttgatatttttttagg

SEQ ID NO: 22813 - DNA, 25 bp, Artificial Sequence
  Synthetic: FXN 3 forward 9:69043604-69043635; SaCas9
ggtggaattttgctcatcacccagg

SEQ ID NO: 22814 - DNA, 24 bp, Artificial Sequence
  Synthetic: FXN 3 forward 9:69043605-69043635; SaCas9
gtggaattttgctcatcacccagg

SEQ ID NO: 22815 - DNA, 23 bp, Artificial Sequence
  Synthetic: FXN 3 forward 9:69043606-69043635; SaCas9
tggaattttgctcatcacccagg

SEQ ID NO: 22816 - DNA, 22 bp, Artificial Sequence
  Synthetic: FXN 3 forward 9:69043607-69043635; SaCas9
ggaattttgctcatcacccagg

SEQ ID NO: 22817 - DNA, 21 bp, Artificial Sequence
  Synthetic: FXN 3 forward 9:69043608-69043635; SaCas9
gaattttgctcatcacccagg

SEQ ID NO: 22818 - DNA, 20 bp, Artificial Sequence
  Synthetic: FXN 3 forward 9:69043609-69043635; SaCas9
aattttgctcatcacccagg

SEQ ID NO: 22819 - DNA, 19 bp, Artificial Sequence
  Synthetic: FXN 3 forward 9:69043610-69043635; SaCas9
attttgctcatcacccagg

SEQ ID NO: 22820 - DNA, 18 bp, Artificial Sequence
  Synthetic: FXN 3 forward 9:69043611-69043635; SaCas9
ttttgctcatcacccagg

SEQ ID NO: 22821 - DNA, 25 bp, Artificial Sequence
  Synthetic: FXN 3 forward 9:69043605-69043636; SaCas9
gtggaattttgctcatcacccaggc

SEQ ID NO: 22822 - DNA, 24 bp, Artificial Sequence
  Synthetic: FXN 3 forward 9:69043606-69043636; SaCas9
tggaattttgctcatcacccaggc

SEQ ID NO: 22823 - DNA, 23 bp, Artificial Sequence
  Synthetic: FXN 3 forward 9:69043607-69043636; SaCas9
ggaattttgctcatcacccaggc

SEQ ID NO: 22824 - DNA, 22 bp, Artificial Sequence
  Synthetic: FXN 3 forward 9:69043608-69043636; SaCas9
gaattttgctcatcacccaggc

SEQ ID NO: 22825 - DNA, 21 bp, Artificial Sequence
  Synthetic: FXN 3 forward 9:69043609-69043636; SaCas9
aattttgctcatcacccaggc

SEQ ID NO: 22826 - DNA, 20 bp, Artificial Sequence
  Synthetic: FXN 3 forward 9:69043610-69043636; SaCas9
attttgctcatcacccaggc

SEQ ID NO: 22827 - DNA, 19 bp, Artificial Sequence
  Synthetic: FXN 3 forward 9:69043611-69043636; SaCas9
ttttgctcatcacccaggc

SEQ ID NO: 22828 - DNA, 18 bp, Artificial Sequence
  Synthetic: FXN 3 forward 9:69043612-69043636; SaCas9
tttgctcatcacccaggc

SEQ ID NO: 22829 - DNA, 25 bp, Artificial Sequence
  Synthetic: FXN 3 reverse 9:69043615-69043646; SaCas9
gcaccattgcactccagcctgggtg

SEQ ID NO: 22830 - DNA, 24 bp, Artificial Sequence
  Synthetic: FXN 3 reverse 9:69043616-69043646; SaCas9
caccattgcactccagcctgggtg

SEQ ID NO: 22831 - DNA, 23 bp, Artificial Sequence
  Synthetic: FXN 3 reverse 9:69043617-69043646; SaCas9
accattgcactccagcctgggtg

SEQ ID NO: 22832 - DNA, 22 bp, Artificial Sequence
  Synthetic: FXN 3 reverse 9:69043618-69043646; SaCas9
ccattgcactccagcctgggtg

SEQ ID NO: 22833 - DNA, 21 bp, Artificial Sequence
  Synthetic: FXN 3 reverse 9:69043619-69043646; SaCas9
cattgcactccagcctgggtg

SEQ ID NO: 22834 - DNA, 20 bp, Artificial Sequence
  Synthetic: FXN 3 reverse 9:69043620-69043646; SaCas9
attgcactccagcctgggtg

SEQ ID NO: 22835 - DNA, 19 bp, Artificial Sequence
  Synthetic: FXN 3 reverse 9:69043621-69043646; SaCas9
ttgcactccagcctgggtg

SEQ ID NO: 22836 - DNA, 18 bp, Artificial Sequence
  Synthetic: FXN 3 reverse 9:69043622-69043646; SaCas9
tgcactccagcctgggtg

SEQ ID NO: 22837 - DNA, 25 bp, Artificial Sequence
  Synthetic: FXN 3 reverse 9:69043622-69043653; SaCas9
caggatcgcaccattgcactccagc

SEQ ID NO: 22838 - DNA, 24 bp, Artificial Sequence
  Synthetic: FXN 3 reverse 9:69043623-69043653; SaCas9
aggatcgcaccattgcactccagc

SEQ ID NO: 22839 - DNA, 23 bp, Artificial Sequence
  Synthetic: FXN 3 reverse 9:69043624-69043653; SaCas9
ggatcgcaccattgcactccagc

SEQ ID NO: 22840 - DNA, 22 bp, Artificial Sequence
  Synthetic: FXN 3 reverse 9:69043625-69043653; SaCas9
gatcgcaccattgcactccagc

SEQ ID NO: 22841 - DNA, 21 bp, Artificial Sequence
  Synthetic: FXN 3 reverse 9:69043626-69043653; SaCas9
atcgcaccattgcactccagc

SEQ ID NO: 22842 - DNA, 20 bp, Artificial Sequence
  Synthetic: FXN 3 reverse 9:69043627-69043653; SaCas9
tcgcaccattgcactccagc

SEQ ID NO: 22843 - DNA, 19 bp, Artificial Sequence
  Synthetic: FXN 3 reverse 9:69043628-69043653; SaCas9
cgcaccattgcactccagc

SEQ ID NO: 22844 - DNA, 18 bp, Artificial Sequence
  Synthetic: FXN 3 reverse 9:69043629-69043653; SaCas9
gcaccattgcactccagc

SEQ ID NO: 22845 - DNA, 25 bp, Artificial Sequence
  Synthetic: FXN 3 reverse 9:69043647-69043678; SaCas9
ccgggaggtggaggttgcagtgagc

SEQ ID NO: 22846 - DNA, 24 bp, Artificial Sequence
  Synthetic: FXN 3 reverse 9:69043648-69043678; SaCas9
cgggaggtggaggttgcagtgagc

SEQ ID NO: 22847 - DNA, 23 bp, Artificial Sequence
  Synthetic: FXN 3 reverse 9:69043649-69043678; SaCas9
gggaggtggaggttgcagtgagc

SEQ ID NO: 22848 - DNA, 22 bp, Artificial Sequence
  Synthetic: FXN 3 reverse 9:69043650-69043678; SaCas9
ggaggtggaggttgcagtgagc

SEQ ID NO: 22849 - DNA, 21 bp, Artificial Sequence
  Synthetic: FXN 3 reverse 9:69043651-69043678; SaCas9
gaggtggaggttgcagtgagc

SEQ ID NO: 22850 - DNA, 20 bp, Artificial Sequence
  Synthetic: FXN 3 reverse 9:69043652-69043678; SaCas9
aggtggaggttgcagtgagc

SEQ ID NO: 22851 - DNA, 19 bp, Artificial Sequence
  Synthetic: FXN 3 reverse 9:69043653-69043678; SaCas9
ggtggaggttgcagtgagc

SEQ ID NO: 22852 - DNA, 18 bp, Artificial Sequence
  Synthetic: FXN 3 reverse 9:69043654-69043678; SaCas9
gtggaggttgcagtgagc

SEQ ID NO: 22853 - DNA, 25 bp, Artificial Sequence
  Synthetic: FXN 3 forward 9:69043649-69043680; SaCas9
cctggctcactgcaacctccacctc

SEQ ID NO: 22854 - DNA, 24 bp, Artificial Sequence
  Synthetic: FXN 3 forward 9:69043650-69043680; SaCas9
ctggctcactgcaacctccacctc

SEQ ID NO: 22855 - DNA, 23 bp, Artificial Sequence
  Synthetic: FXN 3 forward 9:69043651-69043680; SaCas9
tggctcactgcaacctccacctc

SEQ ID NO: 22856 - DNA, 22 bp, Artificial Sequence
  Synthetic: FXN 3 forward 9:69043652-69043680; SaCas9
ggctcactgcaacctccacctc

SEQ ID NO: 22857 - DNA, 21 bp, Artificial Sequence
  Synthetic: FXN 3 forward 9:69043653-69043680; SaCas9
gctcactgcaacctccacctc

SEQ ID NO: 22858 - DNA, 20 bp, Artificial Sequence
  Synthetic: FXN 3 forward 9:69043654-69043680; SaCas9
ctcactgcaacctccacctc

SEQ ID NO: 22859 - DNA, 19 bp, Artificial Sequence
  Synthetic: FXN 3 forward 9:69043655-69043680; SaCas9
tcactgcaacctccacctc

SEQ ID NO: 22860 - DNA, 18 bp, Artificial Sequence
  Synthetic: FXN 3 forward 9:69043656-69043680; SaCas9
cactgcaacctccacctc

SEQ ID NO: 22861 - DNA, 25 bp, Artificial Sequence
  Synthetic: FXN 3 reverse 9:69043653-69043684; SaCas9
ttgaatccgggaggtggaggttgca

SEQ ID NO: 22862 - DNA, 24 bp, Artificial Sequence
  Synthetic: FXN 3 reverse 9:69043654-69043684; SaCas9
tgaatccgggaggtggaggttgca

SEQ ID NO: 22863 - DNA, 23 bp, Artificial Sequence
  Synthetic: FXN 3 reverse 9:69043655-69043684; SaCas9
gaatccgggaggtggaggttgca

SEQ ID NO: 22864 - DNA, 22 bp, Artificial Sequence
  Synthetic: FXN 3 reverse 9:69043656-69043684; SaCas9
aatccgggaggtggaggttgca

SEQ ID NO: 22865 - DNA, 21 bp, Artificial Sequence
  Synthetic: FXN 3 reverse 9:69043657-69043684; SaCas9
atccgggaggtggaggttgca

SEQ ID NO: 22866 - DNA, 20 bp, Artificial Sequence
  Synthetic: FXN 3 reverse 9:69043658-69043684; SaCas9
tccgggaggtggaggttgca

SEQ ID NO: 22867 - DNA, 19 bp, Artificial Sequence
  Synthetic: FXN 3 reverse 9:69043659-69043684; SaCas9
ccgggaggtggaggttgca

SEQ ID NO: 22868 - DNA, 18 bp, Artificial Sequence
  Synthetic: FXN 3 reverse 9:69043660-69043684; SaCas9
cgggaggtggaggttgca

SEQ ID NO: 22869 - DNA, 25 bp, Artificial Sequence
  Synthetic: FXN 3 reverse 9:69043664-69043695; SaCas9
agaagaattgcttgaatccgggagg

SEQ ID NO: 22870 - DNA, 24 bp, Artificial Sequence
  Synthetic: FXN 3 reverse 9:69043665-69043695; SaCas9
gaagaattgcttgaatccgggagg

SEQ ID NO: 22871 - DNA, 23 bp, Artificial Sequence
  Synthetic: FXN 3 reverse 9:69043666-69043695; SaCas9
aagaattgcttgaatccgggagg

SEQ ID NO: 22872 - DNA, 22 bp, Artificial Sequence
  Synthetic: FXN 3 reverse 9:69043667-69043695; SaCas9
agaattgcttgaatccgggagg

SEQ ID NO: 22873 - DNA, 21 bp, Artificial Sequence
  Synthetic: FXN 3 reverse 9:69043668-69043695; SaCas9
gaattgcttgaatccgggagg

SEQ ID NO: 22874 - DNA, 20 bp, Artificial Sequence
  Synthetic: FXN 3 reverse 9:69043669-69043695; SaCas9
aattgcttgaatccgggagg

SEQ ID NO: 22875 - DNA, 19 bp, Artificial Sequence
  Synthetic: FXN 3 reverse 9:69043670-69043695; SaCas9
attgcttgaatccgggagg

SEQ ID NO: 22876 - DNA, 18 bp, Artificial Sequence
  Synthetic: FXN 3 reverse 9:69043671-69043695; SaCas9
ttgcttgaatccgggagg

SEQ ID NO: 22877 - DNA, 25 bp, Artificial Sequence
  Synthetic: FXN 3 reverse 9:69043665-69043696; SaCas9
cagaagaattgcttgaatccgggag

SEQ ID NO: 22878 - DNA, 24 bp, Artificial Sequence
  Synthetic: FXN 3 reverse 9:69043666-69043696; SaCas9
agaagaattgcttgaatccgggag

SEQ ID NO: 22879 - DNA, 23 bp, Artificial Sequence
  Synthetic: FXN 3 reverse 9:69043667-69043696; SaCas9
gaagaattgcttgaatccgggag

SEQ ID NO: 22880 - DNA, 22 bp, Artificial Sequence
  Synthetic: FXN 3 reverse 9:69043668-69043696; SaCas9
aagaattgcttgaatccgggag

SEQ ID NO: 22881 - DNA, 21 bp, Artificial Sequence
  Synthetic: FXN 3 reverse 9:69043669-69043696; SaCas9
agaattgcttgaatccgggag

SEQ ID NO: 22882 - DNA, 20 bp, Artificial Sequence
  Synthetic: FXN 3 reverse 9:69043670-69043696; SaCas9
gaattgcttgaatccgggag

SEQ ID NO: 22883 - DNA, 19 bp, Artificial Sequence
  Synthetic: FXN 3 reverse 9:69043671-69043696; SaCas9
aattgcttgaatccgggag

SEQ ID NO: 22884 - DNA, 18 bp, Artificial Sequence
  Synthetic: FXN 3 reverse 9:69043672-69043696; SaCas9
attgcttgaatccgggag

SEQ ID NO: 22885 - DNA, 25 bp, Artificial Sequence
  Synthetic: FXN 3 reverse 9:69043670-69043701; SaCas9
tgaggcagaagaattgcttgaatcc

SEQ ID NO: 22886 - DNA, 24 bp, Artificial Sequence
  Synthetic: FXN 3 reverse 9:69043671-69043701; SaCas9
gaggcagaagaattgcttgaatcc

SEQ ID NO: 22887 - DNA, 23 bp, Artificial Sequence
  Synthetic: FXN 3 reverse 9:69043672-69043701; SaCas9
aggcagaagaattgcttgaatcc

SEQ ID NO: 22888 - DNA, 22 bp, Artificial Sequence
  Synthetic: FXN 3 reverse 9:69043673-69043701; SaCas9
ggcagaagaattgcttgaatcc

SEQ ID NO: 22889 - DNA, 21 bp, Artificial Sequence
  Synthetic: FXN 3 reverse 9:69043674-69043701; SaCas9
gcagaagaattgcttgaatcc

SEQ ID NO: 22890 - DNA, 20 bp, Artificial Sequence
  Synthetic: FXN 3 reverse 9:69043675-69043701; SaCas9
cagaagaattgcttgaatcc

SEQ ID NO: 22891 - DNA, 19 bp, Artificial Sequence
  Synthetic: FXN 3 reverse 9:69043676-69043701; SaCas9
agaagaattgcttgaatcc

SEQ ID NO: 22892 - DNA, 18 bp, Artificial Sequence
  Synthetic: FXN 3 reverse 9:69043677-69043701; SaCas9
gaagaattgcttgaatcc

SEQ ID NO: 22893 - DNA, 25 bp, Artificial Sequence
  Synthetic: FXN 3 reverse 9:69043671-69043702; SaCas9
ctgaggcagaagaattgcttgaatc

SEQ ID NO: 22894 - DNA, 24 bp, Artificial Sequence
  Synthetic: FXN 3 reverse 9:69043672-69043702; SaCas9
tgaggcagaagaattgcttgaatc

SEQ ID NO: 22895 - DNA, 23 bp, Artificial Sequence
  Synthetic: FXN 3 reverse 9:69043673-69043702; SaCas9
gaggcagaagaattgcttgaatc

SEQ ID NO: 22896 - DNA, 22 bp, Artificial Sequence
  Synthetic: FXN 3 reverse 9:69043674-69043702; SaCas9
aggcagaagaattgcttgaatc

SEQ ID NO: 22897 - DNA, 21 bp, Artificial Sequence
  Synthetic: FXN 3 reverse 9:69043675-69043702; SaCas9
ggcagaagaattgcttgaatc

SEQ ID NO: 22898 - DNA, 20 bp, Artificial Sequence
  Synthetic: FXN 3 reverse 9:69043676-69043702; SaCas9
gcagaagaattgcttgaatc

SEQ ID NO: 22899 - DNA, 19 bp, Artificial Sequence
  Synthetic: FXN 3 reverse 9:69043677-69043702; SaCas9
cagaagaattgcttgaatc

SEQ ID NO: 22900 - DNA, 18 bp, Artificial Sequence
  Synthetic: FXN 3 reverse 9:69043678-69043702; SaCas9
agaagaattgcttgaatc

SEQ ID NO: 22901 - DNA, 25 bp, Artificial Sequence
  Synthetic: FXN 3 reverse 9:69043672-69043703; SaCas9
gctgaggcagaagaattgcttgaat

SEQ ID NO: 22902 - DNA, 24 bp, Artificial Sequence
  Synthetic: FXN 3 reverse 9:69043673-69043703; SaCas9
ctgaggcagaagaattgcttgaat

SEQ ID NO: 22903 - DNA, 23 bp, Artificial Sequence
  Synthetic: FXN 3 reverse 9:69043674-69043703; SaCas9
tgaggcagaagaattgcttgaat

SEQ ID NO: 22904 - DNA, 22 bp, Artificial Sequence
  Synthetic: FXN 3 reverse 9:69043675-69043703; SaCas9
gaggcagaagaattgcttgaat

SEQ ID NO: 22905 - DNA, 21 bp, Artificial Sequence
  Synthetic: FXN 3 reverse 9:69043676-69043703; SaCas9
aggcagaagaattgcttgaat

SEQ ID NO: 22906 - DNA, 20 bp, Artificial Sequence
  Synthetic: FXN 3 reverse 9:69043677-69043703; SaCas9
ggcagaagaattgcttgaat

SEQ ID NO: 22907 - DNA, 19 bp, Artificial Sequence
  Synthetic: FXN 3 reverse 9:69043678-69043703; SaCas9
gcagaagaattgcttgaat

SEQ ID NO: 22908 - DNA, 18 bp, Artificial Sequence
  Synthetic: FXN 3 reverse 9:69043679-69043703; SaCas9
cagaagaattgcttgaat

SEQ ID NO: 22909 - DNA, 25 bp, Artificial Sequence
  Synthetic: FXN 3 reverse 9:69043678-69043709; SaCas9
caggaggctgaggcagaagaattgc

SEQ ID NO: 22910 - DNA, 24 bp, Artificial Sequence
  Synthetic: FXN 3 reverse 9:69043679-69043709; SaCas9
aggaggctgaggcagaagaattgc

SEQ ID NO: 22911 - DNA, 23 bp, Artificial Sequence
  Synthetic: FXN 3 reverse 9:69043680-69043709; SaCas9
ggaggctgaggcagaagaattgc

SEQ ID NO: 22912 - DNA, 22 bp, Artificial Sequence
  Synthetic: FXN 3 reverse 9:69043681-69043709; SaCas9
gaggctgaggcagaagaattgc

SEQ ID NO: 22913 - DNA, 21 bp, Artificial Sequence
  Synthetic: FXN 3 reverse 9:69043682-69043709; SaCas9
aggctgaggcagaagaattgc

SEQ ID NO: 22914 - DNA, 20 bp, Artificial Sequence
  Synthetic: FXN 3 reverse 9:69043683-69043709; SaCas9
ggctgaggcagaagaattgc

SEQ ID NO: 22915 - DNA, 19 bp, Artificial Sequence
  Synthetic: FXN 3 reverse 9:69043684-69043709; SaCas9
gctgaggcagaagaattgc

SEQ ID NO: 22916 - DNA, 18 bp, Artificial Sequence
  Synthetic: FXN 3 reverse 9:69043685-69043709; SaCas9
ctgaggcagaagaattgc

SEQ ID NO: 22917 - DNA, 25 bp, Artificial Sequence
  Synthetic: FXN 3 forward 9:69043681-69043712; SaCas9
caagcaattcttctgcctcagcctc

SEQ ID NO: 22918 - DNA, 24 bp, Artificial Sequence
  Synthetic: FXN 3 forward 9:69043682-69043712; SaCas9
aagcaattcttctgcctcagcctc

SEQ ID NO: 22919 - DNA, 23 bp, Artificial Sequence
  Synthetic: FXN 3 forward 9:69043683-69043712; SaCas9
agcaattcttctgcctcagcctc

SEQ ID NO: 22920 - DNA, 22 bp, Artificial Sequence
  Synthetic: FXN 3 forward 9:69043684-69043712; SaCas9
gcaattcttctgcctcagcctc

SEQ ID NO: 22921 - DNA, 21 bp, Artificial Sequence
  Synthetic: FXN 3 forward 9:69043685-69043712; SaCas9
caattcttctgcctcagcctc

SEQ ID NO: 22922 - DNA, 20 bp, Artificial Sequence
  Synthetic: FXN 3 forward 9:69043686-69043712; SaCas9
aattcttctgcctcagcctc

SEQ ID NO: 22923 - DNA, 19 bp, Artificial Sequence
  Synthetic: FXN 3 forward 9:69043687-69043712; SaCas9
attcttctgcctcagcctc

SEQ ID NO: 22924 - DNA, 18 bp, Artificial Sequence
  Synthetic: FXN 3 forward 9:69043688-69043712; SaCas9
ttcttctgcctcagcctc

SEQ ID NO: 22925 - DNA, 25 bp, Artificial Sequence
  Synthetic: FXN 3 reverse 9:69043687-69043718; SaCas9
tgtgctactcaggaggctgaggcag

SEQ ID NO: 22926 - DNA, 24 bp, Artificial Sequence
  Synthetic: FXN 3 reverse 9:69043688-69043718; SaCas9
gtgctactcaggaggctgaggcag

SEQ ID NO: 22927 - DNA, 23 bp, Artificial Sequence
  Synthetic: FXN 3 reverse 9:69043689-69043718; SaCas9
tgctactcaggaggctgaggcag

SEQ ID NO: 22928 - DNA, 22 bp, Artificial Sequence
  Synthetic: FXN 3 reverse 9:69043690-69043718; SaCas9
gctactcaggaggctgaggcag

SEQ ID NO: 22929 - DNA, 21 bp, Artificial Sequence
  Synthetic: FXN 3 reverse 9:69043691-69043718; SaCas9
ctactcaggaggctgaggcag

SEQ ID NO: 22930 - DNA, 20 bp, Artificial Sequence
  Synthetic: FXN 3 reverse 9:69043692-69043718; SaCas9
tactcaggaggctgaggcag

SEQ ID NO: 22931 - DNA, 19 bp, Artificial Sequence
  Synthetic: FXN 3 reverse 9:69043693-69043718; SaCas9
actcaggaggctgaggcag

SEQ ID NO: 22932 - DNA, 18 bp, Artificial Sequence
  Synthetic: FXN 3 reverse 9:69043694-69043718; SaCas9
ctcaggaggctgaggcag

SEQ ID NO: 22933 - DNA, 25 bp, Artificial Sequence
  Synthetic: FXN 3 reverse 9:69043690-69043721; SaCas9
atctgtgctactcaggaggctgagg

SEQ ID NO: 22934 - DNA, 24 bp, Artificial Sequence
  Synthetic: FXN 3 reverse 9:69043691-69043721; SaCas9
tctgtgctactcaggaggctgagg

SEQ ID NO: 22935 - DNA, 23 bp, Artificial Sequence
  Synthetic: FXN 3 reverse 9:69043692-69043721; SaCas9
ctgtgctactcaggaggctgagg

SEQ ID NO: 22936 - DNA, 22 bp, Artificial Sequence
  Synthetic: FXN 3 reverse 9:69043693-69043721; SaCas9
tgtgctactcaggaggctgagg

SEQ ID NO: 22937 - DNA, 21 bp, Artificial Sequence
  Synthetic: FXN 3 reverse 9:69043694-69043721; SaCas9
gtgctactcaggaggctgagg

SEQ ID NO: 22938 - DNA, 20 bp, Artificial Sequence
  Synthetic: FXN 3 reverse 9:69043695-69043721; SaCas9
tgctactcaggaggctgagg

SEQ ID NO: 22939 - DNA, 19 bp, Artificial Sequence
  Synthetic: FXN 3 reverse 9:69043696-69043721; SaCas9
gctactcaggaggctgagg

SEQ ID NO: 22940 - DNA, 18 bp, Artificial Sequence
  Synthetic: FXN 3 reverse 9:69043697-69043721; SaCas9
ctactcaggaggctgagg

SEQ ID NO: 22941 - DNA, 25 bp, Artificial Sequence
  Synthetic: FXN 3 reverse 9:69043696-69043727; SaCas9
cctgtaatctgtgctactcaggagg

SEQ ID NO: 22942 - DNA, 24 bp, Artificial Sequence
  Synthetic: FXN 3 reverse 9:69043697-69043727; SaCas9
ctgtaatctgtgctactcaggagg

SEQ ID NO: 22943 - DNA, 23 bp, Artificial Sequence
  Synthetic: FXN 3 reverse 9:69043698-69043727; SaCas9
tgtaatctgtgctactcaggagg

SEQ ID NO: 22944 - DNA, 22 bp, Artificial Sequence
  Synthetic: FXN 3 reverse 9:69043699-69043727; SaCas9
gtaatctgtgctactcaggagg

SEQ ID NO: 22945 - DNA, 21 bp, Artificial Sequence
  Synthetic: FXN 3 reverse 9:69043700-69043727; SaCas9
taatctgtgctactcaggagg

SEQ ID NO: 22946 - DNA, 20 bp, Artificial Sequence
  Synthetic: FXN 3 reverse 9:69043701-69043727; SaCas9
aatctgtgctactcaggagg

SEQ ID NO: 22947 - DNA, 19 bp, Artificial Sequence
  Synthetic: FXN 3 reverse 9:69043702-69043727; SaCas9
atctgtgctactcaggagg

SEQ ID NO: 22948 - DNA, 18 bp, Artificial Sequence
  Synthetic: FXN 3 reverse 9:69043703-69043727; SaCas9
tctgtgctactcaggagg

SEQ ID NO: 22949 - DNA, 25 bp, Artificial Sequence
  Synthetic: FXN 3 reverse 9:69043702-69043733; SaCas9
catgtgcctgtaatctgtgctactc

SEQ ID NO: 22950 - DNA, 24 bp, Artificial Sequence
  Synthetic: FXN 3 reverse 9:69043703-69043733; SaCas9
atgtgcctgtaatctgtgctactc

SEQ ID NO: 22951 - DNA, 23 bp, Artificial Sequence
  Synthetic: FXN 3 reverse 9:69043704-69043733; SaCas9
tgtgcctgtaatctgtgctactc

SEQ ID NO: 22952 - DNA, 22 bp, Artificial Sequence
  Synthetic: FXN 3 reverse 9:69043705-69043733; SaCas9
gtgcctgtaatctgtgctactc

SEQ ID NO: 22953 - DNA, 21 bp, Artificial Sequence
  Synthetic: FXN 3 reverse 9:69043706-69043733; SaCas9
tgcctgtaatctgtgctactc

SEQ ID NO: 22954 - DNA, 20 bp, Artificial Sequence
  Synthetic: FXN 3 reverse 9:69043707-69043733; SaCas9
gcctgtaatctgtgctactc

SEQ ID NO: 22955 - DNA, 19 bp, Artificial Sequence
  Synthetic: FXN 3 reverse 9:69043708-69043733; SaCas9
cctgtaatctgtgctactc

SEQ ID NO: 22956 - DNA, 18 bp, Artificial Sequence
  Synthetic: FXN 3 reverse 9:69043709-69043733; SaCas9
ctgtaatctgtgctactc

SEQ ID NO: 22957 - DNA, 25 bp, Artificial Sequence
  Synthetic: FXN 3 reverse 9:69043703-69043734; SaCas9
acatgtgcctgtaatctgtgctact

SEQ ID NO: 22958 - DNA, 24 bp, Artificial Sequence
  Synthetic: FXN 3 reverse 9:69043704-69043734; SaCas9
catgtgcctgtaatctgtgctact

SEQ ID NO: 22959 - DNA, 23 bp, Artificial Sequence
  Synthetic: FXN 3 reverse 9:69043705-69043734; SaCas9
atgtgcctgtaatctgtgctact

SEQ ID NO: 22960 - DNA, 22 bp, Artificial Sequence
  Synthetic: FXN 3 reverse 9:69043706-69043734; SaCas9
tgtgcctgtaatctgtgctact

SEQ ID NO: 22961 - DNA, 21 bp, Artificial Sequence
  Synthetic: FXN 3 reverse 9:69043707-69043734; SaCas9
gtgcctgtaatctgtgctact

SEQ ID NO: 22962 - DNA, 20 bp, Artificial Sequence
  Synthetic: FXN 3 reverse 9:69043708-69043734; SaCas9
tgcctgtaatctgtgctact

SEQ ID NO: 22963 - DNA, 19 bp, Artificial Sequence
  Synthetic: FXN 3 reverse 9:69043709-69043734; SaCas9
gcctgtaatctgtgctact

SEQ ID NO: 22964 - DNA, 18 bp, Artificial Sequence
  Synthetic: FXN 3 reverse 9:69043710-69043734; SaCas9
cctgtaatctgtgctact

SEQ ID NO: 22965 - DNA, 25 bp, Artificial Sequence
  Synthetic: FXN 3 forward 9:69043740-69043771; SaCas9
gccttgctaatttttgtgtttttag

SEQ ID NO: 22966 - DNA, 24 bp, Artificial Sequence
  Synthetic: FXN 3 forward 9:69043741-69043771; SaCas9
ccttgctaatttttgtgtttttag

SEQ ID NO: 22967 - DNA, 23 bp, Artificial Sequence
  Synthetic: FXN 3 forward 9:69043742-69043771; SaCas9
cttgctaatttttgtgtttttag

SEQ ID NO: 22968 - DNA, 22 bp, Artificial Sequence
  Synthetic: FXN 3 forward 9:69043743-69043771; SaCas9
ttgctaatttttgtgtttttag

SEQ ID NO: 22969 - DNA, 21 bp, Artificial Sequence
  Synthetic: FXN 3 forward 9:69043744-69043771; SaCas9
tgctaatttttgtgtttttag

SEQ ID NO: 22970 - DNA, 20 bp, Artificial Sequence
  Synthetic: FXN 3 forward 9:69043745-69043771; SaCas9
gctaatttttgtgtttttag

SEQ ID NO: 22971 - DNA, 19 bp, Artificial Sequence
  Synthetic: FXN 3 forward 9:69043746-69043771; SaCas9
ctaatttttgtgtttttag

SEQ ID NO: 22972 - DNA, 18 bp, Artificial Sequence
  Synthetic: FXN 3 forward 9:69043747-69043771; SaCas9
taatttttgtgtttttag

SEQ ID NO: 22973 - DNA, 25 bp, Artificial Sequence
  Synthetic: FXN 3 forward 9:69043745-69043776; SaCas9
gctaatttttgtgtttttagtagag

SEQ ID NO: 22974 - DNA, 24 bp, Artificial Sequence
  Synthetic: FXN 3 forward 9:69043746-69043776; SaCas9
ctaatttttgtgtttttagtagag

SEQ ID NO: 22975 - DNA, 23 bp, Artificial Sequence
  Synthetic: FXN 3 forward 9:69043747-69043776; SaCas9
taatttttgtgtttttagtagag

SEQ ID NO: 22976 - DNA, 22 bp, Artificial Sequence
  Synthetic: FXN 3 forward 9:69043748-69043776; SaCas9
aatttttgtgtttttagtagag

SEQ ID NO: 22977 - DNA, 21 bp, Artificial Sequence
  Synthetic: FXN 3 forward 9:69043749-69043776; SaCas9
atttttgtgtttttagtagag

SEQ ID NO: 22978 - DNA, 20 bp, Artificial Sequence
  Synthetic: FXN 3 forward 9:69043750-69043776; SaCas9
tttttgtgtttttagtagag

SEQ ID NO: 22979 - DNA, 19 bp, Artificial Sequence
  Synthetic: FXN 3 forward 9:69043751-69043776; SaCas9
ttttgtgtttttagtagag

SEQ ID NO: 22980 - DNA, 18 bp, Artificial Sequence
  Synthetic: FXN 3 forward 9:69043752-69043776; SaCas9
tttgtgtttttagtagag

SEQ ID NO: 22981 - DNA, 25 bp, Artificial Sequence
  Synthetic: FXN 3 forward 9:69043746-69043777; SaCas9
ctaatttttgtgtttttagtagagg

SEQ ID NO: 22982 - DNA, 24 bp, Artificial Sequence
  Synthetic: FXN 3 forward 9:69043747-69043777; SaCas9
taatttttgtgtttttagtagagg

SEQ ID NO: 22983 - DNA, 23 bp, Artificial Sequence
  Synthetic: FXN 3 forward 9:69043748-69043777; SaCas9
aatttttgtgtttttagtagagg

SEQ ID NO: 22984 - DNA, 22 bp, Artificial Sequence
  Synthetic: FXN 3 forward 9:69043749-69043777; SaCas9
atttttgtgtttttagtagagg

SEQ ID NO: 22985 - DNA, 21 bp, Artificial Sequence
  Synthetic: FXN 3 forward 9:69043750-69043777; SaCas9
tttttgtgtttttagtagagg

SEQ ID NO: 22986 - DNA, 20 bp, Artificial Sequence
  Synthetic: FXN 3 forward 9:69043751-69043777; SaCas9
ttttgtgtttttagtagagg

SEQ ID NO: 22987 - DNA, 19 bp, Artificial Sequence
  Synthetic: FXN 3 forward 9:69043752-69043777; SaCas9
tttgtgtttttagtagagg

SEQ ID NO: 22988 - DNA, 18 bp, Artificial Sequence
  Synthetic: FXN 3 forward 9:69043753-69043777; SaCas9
ttgtgtttttagtagagg

SEQ ID NO: 22989 - DNA, 25 bp, Artificial Sequence
  Synthetic: FXN 3 forward 9:69043776-69043807; SaCas9
tttcaccatgttggccaggctagtc

SEQ ID NO: 22990 - DNA, 24 bp, Artificial Sequence
  Synthetic: FXN 3 forward 9:69043777-69043807; SaCas9
ttcaccatgttggccaggctagtc

SEQ ID NO: 22991 - DNA, 23 bp, Artificial Sequence
  Synthetic: FXN 3 forward 9:69043778-69043807; SaCas9
tcaccatgttggccaggctagtc

SEQ ID NO: 22992 - DNA, 22 bp, Artificial Sequence
  Synthetic: FXN 3 forward 9:69043779-69043807; SaCas9
caccatgttggccaggctagtc

SEQ ID NO: 22993 - DNA, 21 bp, Artificial Sequence
  Synthetic: FXN 3 forward 9:69043780-69043807; SaCas9
accatgttggccaggctagtc

SEQ ID NO: 22994 - DNA, 20 bp, Artificial Sequence
  Synthetic: FXN 3 forward 9:69043781-69043807; SaCas9
ccatgttggccaggctagtc

SEQ ID NO: 22995 - DNA, 19 bp, Artificial Sequence
  Synthetic: FXN 3 forward 9:69043782-69043807; SaCas9
catgttggccaggctagtc

SEQ ID NO: 22996 - DNA, 18 bp, Artificial Sequence
  Synthetic: FXN 3 forward 9:69043783-69043807; SaCas9
atgttggccaggctagtc

SEQ ID NO: 22997 - DNA, 25 bp, Artificial Sequence
  Synthetic: FXN 3 reverse 9:69043776-69043807; SaCas9
gttcaagactagcctggccaacatg

SEQ ID NO: 22998 - DNA, 24 bp, Artificial Sequence
  Synthetic: FXN 3 reverse 9:69043777-69043807; SaCas9
ttcaagactagcctggccaacatg

SEQ ID NO: 22999 - DNA, 23 bp, Artificial Sequence
  Synthetic: FXN 3 reverse 9:69043778-69043807; SaCas9
tcaagactagcctggccaacatg

SEQ ID NO: 23000 - DNA, 22 bp, Artificial Sequence
  Synthetic: FXN 3 reverse 9:69043779-69043807; SaCas9
caagactagcctggccaacatg

SEQ ID NO: 23001 - DNA, 21 bp, Artificial Sequence
  Synthetic: FXN 3 reverse 9:69043780-69043807; SaCas9
aagactagcctggccaacatg

SEQ ID NO: 23002 - DNA, 20 bp, Artificial Sequence
  Synthetic: FXN 3 reverse 9:69043781-69043807; SaCas9
agactagcctggccaacatg

SEQ ID NO: 23003 - DNA, 19 bp, Artificial Sequence
  Synthetic: FXN 3 reverse 9:69043782-69043807; SaCas9
gactagcctggccaacatg

SEQ ID NO: 23004 - DNA, 18 bp, Artificial Sequence
  Synthetic: FXN 3 reverse 9:69043783-69043807; SaCas9
actagcctggccaacatg

SEQ ID NO: 23005 - DNA, 25 bp, Artificial Sequence
  Synthetic: FXN 3 reverse 9:69043805-69043836; SaCas9
ggaggcgggtggatcacctgaggtc

SEQ ID NO: 23006 - DNA, 24 bp, Artificial Sequence
  Synthetic: FXN 3 reverse 9:69043806-69043836; SaCas9
gaggcgggtggatcacctgaggtc

SEQ ID NO: 23007 - DNA, 23 bp, Artificial Sequence
  Synthetic: FXN 3 reverse 9:69043807-69043836; SaCas9
aggcgggtggatcacctgaggtc

SEQ ID NO: 23008 - DNA, 22 bp, Artificial Sequence
  Synthetic: FXN 3 reverse 9:69043808-69043836; SaCas9
ggcgggtggatcacctgaggtc

SEQ ID NO: 23009 - DNA, 21 bp, Artificial Sequence
  Synthetic: FXN 3 reverse 9:69043809-69043836; SaCas9
gcgggtggatcacctgaggtc

SEQ ID NO: 23010 - DNA, 20 bp, Artificial Sequence
  Synthetic: FXN 3 reverse 9:69043810-69043836; SaCas9
cgggtggatcacctgaggtc

SEQ ID NO: 23011 - DNA, 19 bp, Artificial Sequence
  Synthetic: FXN 3 reverse 9:69043811-69043836; SaCas9
gggtggatcacctgaggtc

SEQ ID NO: 23012 - DNA, 18 bp, Artificial Sequence
  Synthetic: FXN 3 reverse 9:69043812-69043836; SaCas9
ggtggatcacctgaggtc

SEQ ID NO: 23013 - DNA, 25 bp, Artificial Sequence
  Synthetic: FXN 3 reverse 9:69043806-69043837; SaCas9
cggaggcgggtggatcacctgaggt

SEQ ID NO: 23014 - DNA, 24 bp, Artificial Sequence
  Synthetic: FXN 3 reverse 9:69043807-69043837; SaCas9
ggaggcgggtggatcacctgaggt

SEQ ID NO: 23015 - DNA, 23 bp, Artificial Sequence
  Synthetic: FXN 3 reverse 9:69043808-69043837; SaCas9
gaggcgggtggatcacctgaggt

SEQ ID NO: 23016 - DNA, 22 bp, Artificial Sequence
  Synthetic: FXN 3 reverse 9:69043809-69043837; SaCas9
aggcgggtggatcacctgaggt

SEQ ID NO: 23017 - DNA, 21 bp, Artificial Sequence
  Synthetic: FXN 3 reverse 9:69043810-69043837; SaCas9
ggcgggtggatcacctgaggt

SEQ ID NO: 23018 - DNA, 20 bp, Artificial Sequence
  Synthetic: FXN 3 reverse 9:69043811-69043837; SaCas9
gcgggtggatcacctgaggt

SEQ ID NO: 23019 - DNA, 19 bp, Artificial Sequence
  Synthetic: FXN 3 reverse 9:69043812-69043837; SaCas9
cgggtggatcacctgaggt

SEQ ID NO: 23020 - DNA, 18 bp, Artificial Sequence
  Synthetic: FXN 3 reverse 9:69043813-69043837; SaCas9
gggtggatcacctgaggt

SEQ ID NO: 23021 - DNA, 25 bp, Artificial Sequence
  Synthetic: FXN 3 reverse 9:69043813-69043844; SaCas9
tgggaggcggaggcgggtggatcac

SEQ ID NO: 23022 - DNA, 24 bp, Artificial Sequence
  Synthetic: FXN 3 reverse 9:69043814-69043844; SaCas9
gggaggcggaggcgggtggatcac

SEQ ID NO: 23023 - DNA, 23 bp, Artificial Sequence
  Synthetic: FXN 3 reverse 9:69043815-69043844; SaCas9
ggaggcggaggcgggtggatcac

SEQ ID NO: 23024 - DNA, 22 bp, Artificial Sequence
  Synthetic: FXN 3 reverse 9:69043816-69043844; SaCas9
gaggcggaggcgggtggatcac

SEQ ID NO: 23025 - DNA, 21 bp, Artificial Sequence
  Synthetic: FXN 3 reverse 9:69043817-69043844; SaCas9
aggcggaggcgggtggatcac

SEQ ID NO: 23026 - DNA, 20 bp, Artificial Sequence
  Synthetic: FXN 3 reverse 9:69043818-69043844; SaCas9
ggcggaggcgggtggatcac

SEQ ID NO: 23027 - DNA, 19 bp, Artificial Sequence
  Synthetic: FXN 3 reverse 9:69043819-69043844; SaCas9
gcggaggcgggtggatcac

SEQ ID NO: 23028 - DNA, 18 bp, Artificial Sequence
  Synthetic: FXN 3 reverse 9:69043820-69043844; SaCas9
cggaggcgggtggatcac

SEQ ID NO: 23029 - DNA, 25 bp, Artificial Sequence
  Synthetic: FXN 3 reverse 9:69043822-69043853; SaCas9
tctgcagtttgggaggcggaggcgg

SEQ ID NO: 23030 - DNA, 24 bp, Artificial Sequence
  Synthetic: FXN 3 reverse 9:69043823-69043853; SaCas9
ctgcagtttgggaggcggaggcgg

SEQ ID NO: 23031 - DNA, 23 bp, Artificial Sequence
  Synthetic: FXN 3 reverse 9:69043824-69043853; SaCas9
tgcagtttgggaggcggaggcgg

SEQ ID NO: 23032 - DNA, 22 bp, Artificial Sequence
  Synthetic: FXN 3 reverse 9:69043825-69043853; SaCas9
gcagtttgggaggcggaggcgg

SEQ ID NO: 23033 - DNA, 21 bp, Artificial Sequence
  Synthetic: FXN 3 reverse 9:69043826-69043853; SaCas9
cagtttgggaggcggaggcgg

SEQ ID NO: 23034 - DNA, 20 bp, Artificial Sequence
  Synthetic: FXN 3 reverse 9:69043827-69043853; SaCas9
agtttgggaggcggaggcgg

SEQ ID NO: 23035 - DNA, 19 bp, Artificial Sequence
  Synthetic: FXN 3 reverse 9:69043828-69043853; SaCas9
gtttgggaggcggaggcgg

SEQ ID NO: 23036 - DNA, 18 bp, Artificial Sequence
  Synthetic: FXN 3 reverse 9:69043829-69043853; SaCas9
tttgggaggcggaggcgg

SEQ ID NO: 23037 - DNA, 25 bp, Artificial Sequence
  Synthetic: FXN 3 forward 9:69043824-69043855; SaCas9
ccacccgcctccgcctcccaaactg

SEQ ID NO: 23038 - DNA, 24 bp, Artificial Sequence
  Synthetic: FXN 3 forward 9:69043825-69043855; SaCas9
cacccgcctccgcctcccaaactg

SEQ ID NO: 23039 - DNA, 23 bp, Artificial Sequence
  Synthetic: FXN 3 forward 9:69043826-69043855; SaCas9
acccgcctccgcctcccaaactg

SEQ ID NO: 23040 - DNA, 22 bp, Artificial Sequence
  Synthetic: FXN 3 forward 9:69043827-69043855; SaCas9
cccgcctccgcctcccaaactg

SEQ ID NO: 23041 - DNA, 21 bp, Artificial Sequence
  Synthetic: FXN 3 forward 9:69043828-69043855; SaCas9
ccgcctccgcctcccaaactg

SEQ ID NO: 23042 - DNA, 20 bp, Artificial Sequence
  Synthetic: FXN 3 forward 9:69043829-69043855; SaCas9
cgcctccgcctcccaaactg

SEQ ID NO: 23043 - DNA, 19 bp, Artificial Sequence
  Synthetic: FXN 3 forward 9:69043830-69043855; SaCas9
gcctccgcctcccaaactg

SEQ ID NO: 23044 - DNA, 18 bp, Artificial Sequence
  Synthetic: FXN 3 forward 9:69043831-69043855; SaCas9
cctccgcctcccaaactg

SEQ ID NO: 23045 - DNA, 25 bp, Artificial Sequence
  Synthetic: FXN 3 reverse 9:69043826-69043857; SaCas9
aatctctgcagtttgggaggcggag

SEQ ID NO: 23046 - DNA, 24 bp, Artificial Sequence
  Synthetic: FXN 3 reverse 9:69043827-69043857; SaCas9
atctctgcagtttgggaggcggag

SEQ ID NO: 23047 - DNA, 23 bp, Artificial Sequence
  Synthetic: FXN 3 reverse 9:69043828-69043857; SaCas9
tctctgcagtttgggaggcggag

SEQ ID NO: 23048 - DNA, 22 bp, Artificial Sequence
  Synthetic: FXN 3 reverse 9:69043829-69043857; SaCas9
ctctgcagtttgggaggcggag

SEQ ID NO: 23049 - DNA, 21 bp, Artificial Sequence
  Synthetic: FXN 3 reverse 9:69043830-69043857; SaCas9
tctgcagtttgggaggcggag

SEQ ID NO: 23050 - DNA, 20 bp, Artificial Sequence
  Synthetic: FXN 3 reverse 9:69043831-69043857; SaCas9
ctgcagtttgggaggcggag

SEQ ID NO: 23051 - DNA, 19 bp, Artificial Sequence
  Synthetic: FXN 3 reverse 9:69043832-69043857; SaCas9
tgcagtttgggaggcggag

SEQ ID NO: 23052 - DNA, 18 bp, Artificial Sequence
  Synthetic: FXN 3 reverse 9:69043833-69043857; SaCas9
gcagtttgggaggcggag

SEQ ID NO: 23053 - DNA, 25 bp, Artificial Sequence
  Synthetic: FXN 3 reverse 9:69043831-69043862; SaCas9
cctataatctctgcagtttgggagg

SEQ ID NO: 23054 - DNA, 24 bp, Artificial Sequence
  Synthetic: FXN 3 reverse 9:69043832-69043862; SaCas9
ctataatctctgcagtttgggagg

SEQ ID NO: 23055 - DNA, 23 bp, Artificial Sequence
  Synthetic: FXN 3 reverse 9:69043833-69043862; SaCas9
tataatctctgcagtttgggagg

SEQ ID NO: 23056 - DNA, 22 bp, Artificial Sequence
  Synthetic: FXN 3 reverse 9:69043834-69043862; SaCas9
ataatctctgcagtttgggagg

SEQ ID NO: 23057 - DNA, 21 bp, Artificial Sequence
  Synthetic: FXN 3 reverse 9:69043835-69043862; SaCas9
taatctctgcagtttgggagg

SEQ ID NO: 23058 - DNA, 20 bp, Artificial Sequence
  Synthetic: FXN 3 reverse 9:69043836-69043862; SaCas9
aatctctgcagtttgggagg

SEQ ID NO: 23059 - DNA, 19 bp, Artificial Sequence
  Synthetic: FXN 3 reverse 9:69043837-69043862; SaCas9
atctctgcagtttgggagg

SEQ ID NO: 23060 - DNA, 18 bp, Artificial Sequence
  Synthetic: FXN 3 reverse 9:69043838-69043862; SaCas9
tctctgcagtttgggagg

SEQ ID NO: 23061 - DNA, 25 bp, Artificial Sequence
  Synthetic: FXN 3 reverse 9:69043832-69043863; SaCas9
gcctataatctctgcagtttgggag

SEQ ID NO: 23062 - DNA, 24 bp, Artificial Sequence
  Synthetic: FXN 3 reverse 9:69043833-69043863; SaCas9
cctataatctctgcagtttgggag

SEQ ID NO: 23063 - DNA, 23 bp, Artificial Sequence
  Synthetic: FXN 3 reverse 9:69043834-69043863; SaCas9
ctataatctctgcagtttgggag

SEQ ID NO: 23064 - DNA, 22 bp, Artificial Sequence
  Synthetic: FXN 3 reverse 9:69043835-69043863; SaCas9
tataatctctgcagtttgggag

SEQ ID NO: 23065 - DNA, 21 bp, Artificial Sequence
  Synthetic: FXN 3 reverse 9:69043836-69043863; SaCas9
ataatctctgcagtttgggag

SEQ ID NO: 23066 - DNA, 20 bp, Artificial Sequence
  Synthetic: FXN 3 reverse 9:69043837-69043863; SaCas9
taatctctgcagtttgggag

SEQ ID NO: 23067 - DNA, 19 bp, Artificial Sequence
  Synthetic: FXN 3 reverse 9:69043838-69043863; SaCas9
aatctctgcagtttgggag

SEQ ID NO: 23068 - DNA, 18 bp, Artificial Sequence
  Synthetic: FXN 3 reverse 9:69043839-69043863; SaCas9
atctctgcagtttgggag

SEQ ID NO: 23069 - DNA, 25 bp, Artificial Sequence
  Synthetic: FXN 3 reverse 9:69043837-69043868; SaCas9
ttcgtgcctataatctctgcagttt

SEQ ID NO: 23070 - DNA, 24 bp, Artificial Sequence
  Synthetic: FXN 3 reverse 9:69043838-69043868; SaCas9
tcgtgcctataatctctgcagttt

SEQ ID NO: 23071 - DNA, 23 bp, Artificial Sequence
  Synthetic: FXN 3 reverse 9:69043839-69043868; SaCas9
cgtgcctataatctctgcagttt

SEQ ID NO: 23072 - DNA, 22 bp, Artificial Sequence
  Synthetic: FXN 3 reverse 9:69043840-69043868; SaCas9
gtgcctataatctctgcagttt

SEQ ID NO: 23073 - DNA, 21 bp, Artificial Sequence
  Synthetic: FXN 3 reverse 9:69043841-69043868; SaCas9
tgcctataatctctgcagttt

SEQ ID NO: 23074 - DNA, 20 bp, Artificial Sequence
  Synthetic: FXN 3 reverse 9:69043842-69043868; SaCas9
gcctataatctctgcagttt

SEQ ID NO: 23075 - DNA, 19 bp, Artificial Sequence
  Synthetic: FXN 3 reverse 9:69043843-69043868; SaCas9
cctataatctctgcagttt

SEQ ID NO: 23076 - DNA, 18 bp, Artificial Sequence
  Synthetic: FXN 3 reverse 9:69043844-69043868; SaCas9
ctataatctctgcagttt

SEQ ID NO: 23077 - DNA, 25 bp, Artificial Sequence
  Synthetic: FXN 3 forward 9:69043838-69043869; SaCas9
ctcccaaactgcagagattataggc

SEQ ID NO: 23078 - DNA, 24 bp, Artificial Sequence
  Synthetic: FXN 3 forward 9:69043839-69043869; SaCas9
tcccaaactgcagagattataggc

SEQ ID NO: 23079 - DNA, 23 bp, Artificial Sequence
  Synthetic: FXN 3 forward 9:69043840-69043869; SaCas9
cccaaactgcagagattataggc

SEQ ID NO: 23080 - DNA, 22 bp, Artificial Sequence
  Synthetic: FXN 3 forward 9:69043841-69043869; SaCas9
ccaaactgcagagattataggc

SEQ ID NO: 23081 - DNA, 21 bp, Artificial Sequence
  Synthetic: FXN 3 forward 9:69043842-69043869; SaCas9
caaactgcagagattataggc

SEQ ID NO: 23082 - DNA, 20 bp, Artificial Sequence
  Synthetic: FXN 3 forward 9:69043843-69043869; SaCas9
aaactgcagagattataggc

SEQ ID NO: 23083 - DNA, 19 bp, Artificial Sequence
  Synthetic: FXN 3 forward 9:69043844-69043869; SaCas9
aactgcagagattataggc

SEQ ID NO: 23084 - DNA, 18 bp, Artificial Sequence
  Synthetic: FXN 3 forward 9:69043845-69043869; SaCas9
actgcagagattataggc

SEQ ID NO: 23085 - DNA, 25 bp, Artificial Sequence
  Synthetic: FXN 3 reverse 9:69043838-69043869; SaCas9
gttcgtgcctataatctctgcagtt

SEQ ID NO: 23086 - DNA, 24 bp, Artificial Sequence
  Synthetic: FXN 3 reverse 9:69043839-69043869; SaCas9
ttcgtgcctataatctctgcagtt

SEQ ID NO: 23087 - DNA, 23 bp, Artificial Sequence
  Synthetic: FXN 3 reverse 9:69043840-69043869; SaCas9
tcgtgcctataatctctgcagtt

SEQ ID NO: 23088 - DNA, 22 bp, Artificial Sequence
  Synthetic: FXN 3 reverse 9:69043841-69043869; SaCas9
cgtgcctataatctctgcagtt

SEQ ID NO: 23089 - DNA, 21 bp, Artificial Sequence
  Synthetic: FXN 3 reverse 9:69043842-69043869; SaCas9
gtgcctataatctctgcagtt

SEQ ID NO: 23090 - DNA, 20 bp, Artificial Sequence
  Synthetic: FXN 3 reverse 9:69043843-69043869; SaCas9
tgcctataatctctgcagtt

SEQ ID NO: 23091 - DNA, 19 bp, Artificial Sequence
  Synthetic: FXN 3 reverse 9:69043844-69043869; SaCas9
gcctataatctctgcagtt

SEQ ID NO: 23092 - DNA, 18 bp, Artificial Sequence
  Synthetic: FXN 3 reverse 9:69043845-69043869; SaCas9
cctataatctctgcagtt

SEQ ID NO: 23093 - DNA, 25 bp, Artificial Sequence
  Synthetic: FXN 3 reverse 9:69043839-69043870; SaCas9
ggttcgtgcctataatctctgcagt

SEQ ID NO: 23094 - DNA, 24 bp, Artificial Sequence
  Synthetic: FXN 3 reverse 9:69043840-69043870; SaCas9
gttcgtgcctataatctctgcagt

SEQ ID NO: 23095 - DNA, 23 bp, Artificial Sequence
  Synthetic: FXN 3 reverse 9:69043841-69043870; SaCas9
ttcgtgcctataatctctgcagt

SEQ ID NO: 23096 - DNA, 22 bp, Artificial Sequence
  Synthetic: FXN 3 reverse 9:69043842-69043870; SaCas9
tcgtgcctataatctctgcagt

SEQ ID NO: 23097 - DNA, 21 bp, Artificial Sequence
  Synthetic: FXN 3 reverse 9:69043843-69043870; SaCas9
cgtgcctataatctctgcagt

SEQ ID NO: 23098 - DNA, 20 bp, Artificial Sequence
  Synthetic: FXN 3 reverse 9:69043844-69043870; SaCas9
gtgcctataatctctgcagt

SEQ ID NO: 23099 - DNA, 19 bp, Artificial Sequence
  Synthetic: FXN 3 reverse 9:69043845-69043870; SaCas9
tgcctataatctctgcagt

SEQ ID NO: 23100 - DNA, 18 bp, Artificial Sequence
  Synthetic: FXN 3 reverse 9:69043846-69043870; SaCas9
gcctataatctctgcagt

SEQ ID NO: 23101 - DNA, 25 bp, Artificial Sequence
  Synthetic: FXN 3 reverse 9:69043875-69043906; SaCas9
aacttgaaaaataaaaaacatgagg

SEQ ID NO: 23102 - DNA, 24 bp, Artificial Sequence
  Synthetic: FXN 3 reverse 9:69043876-69043906; SaCas9
acttgaaaaataaaaaacatgagg

SEQ ID NO: 23103 - DNA, 23 bp, Artificial Sequence
  Synthetic: FXN 3 reverse 9:69043877-69043906; SaCas9
cttgaaaaataaaaaacatgagg

SEQ ID NO: 23104 - DNA, 22 bp, Artificial Sequence
  Synthetic: FXN 3 reverse 9:69043878-69043906; SaCas9
ttgaaaaataaaaaacatgagg

SEQ ID NO: 23105 - DNA, 21 bp, Artificial Sequence
  Synthetic: FXN 3 reverse 9:69043879-69043906; SaCas9
tgaaaaataaaaaacatgagg

SEQ ID NO: 23106 - DNA, 20 bp, Artificial Sequence
  Synthetic: FXN 3 reverse 9:69043880-69043906; SaCas9
gaaaaataaaaaacatgagg

SEQ ID NO: 23107 - DNA, 19 bp, Artificial Sequence
  Synthetic: FXN 3 reverse 9:69043881-69043906; SaCas9
aaaaataaaaaacatgagg

SEQ ID NO: 23108 - DNA, 18 bp, Artificial Sequence
  Synthetic: FXN 3 reverse 9:69043882-69043906; SaCas9
aaaataaaaaacatgagg

SEQ ID NO: 23109 - DNA, 25 bp, Artificial Sequence
  Synthetic: FXN 3 forward 9:69043879-69043910; SaCas9
ggcctcatgttttttatttttcaag

SEQ ID NO: 23110 - DNA, 24 bp, Artificial Sequence
  Synthetic: FXN 3 forward 9:69043880-69043910; SaCas9
gcctcatgttttttatttttcaag

SEQ ID NO: 23111 - DNA, 23 bp, Artificial Sequence
  Synthetic: FXN 3 forward 9:69043881-69043910; SaCas9
cctcatgttttttatttttcaag

SEQ ID NO: 23112 - DNA, 22 bp, Artificial Sequence
  Synthetic: FXN 3 forward 9:69043882-69043910; SaCas9
ctcatgttttttatttttcaag

SEQ ID NO: 23113 - DNA, 21 bp, Artificial Sequence
  Synthetic: FXN 3 forward 9:69043883-69043910; SaCas9
tcatgttttttatttttcaag

SEQ ID NO: 23114 - DNA, 20 bp, Artificial Sequence
  Synthetic: FXN 3 forward 9:69043884-69043910; SaCas9
catgttttttatttttcaag

SEQ ID NO: 23115 - DNA, 19 bp, Artificial Sequence
  Synthetic: FXN 3 forward 9:69043885-69043910; SaCas9
atgttttttatttttcaag

SEQ ID NO: 23116 - DNA, 18 bp, Artificial Sequence
  Synthetic: FXN 3 forward 9:69043886-69043910; SaCas9
tgttttttatttttcaag

SEQ ID NO: 23117 - DNA, 25 bp, Artificial Sequence
  Synthetic: FXN 3 reverse 9:69043881-69043912; SaCas9
catttcaacttgaaaaataaaaaac

SEQ ID NO: 23118 - DNA, 24 bp, Artificial Sequence
  Synthetic: FXN 3 reverse 9:69043882-69043912; SaCas9
atttcaacttgaaaaataaaaaac

SEQ ID NO: 23119 - DNA, 23 bp, Artificial Sequence
  Synthetic: FXN 3 reverse 9:69043883-69043912; SaCas9
tttcaacttgaaaaataaaaaac

SEQ ID NO: 23120 - DNA, 22 bp, Artificial Sequence
  Synthetic: FXN 3 reverse 9:69043884-69043912; SaCas9
ttcaacttgaaaaataaaaaac

SEQ ID NO: 23121 - DNA, 21 bp, Artificial Sequence
  Synthetic: FXN 3 reverse 9:69043885-69043912; SaCas9
tcaacttgaaaaataaaaaac

SEQ ID NO: 23122 - DNA, 20 bp, Artificial Sequence
  Synthetic: FXN 3 reverse 9:69043886-69043912; SaCas9
caacttgaaaaataaaaaac

SEQ ID NO: 23123 - DNA, 19 bp, Artificial Sequence
  Synthetic: FXN 3 reverse 9:69043887-69043912; SaCas9
aacttgaaaaataaaaaac

SEQ ID NO: 23124 - DNA, 18 bp, Artificial Sequence
  Synthetic: FXN 3 reverse 9:69043888-69043912; SaCas9
acttgaaaaataaaaaac

SEQ ID NO: 23125 - DNA, 25 bp, Artificial Sequence
  Synthetic: FXN 3 forward 9:69043884-69043915; SaCas9
catgttttttatttttcaagttgaa

SEQ ID NO: 23126 - DNA, 24 bp, Artificial Sequence
  Synthetic: FXN 3 forward 9:69043885-69043915; SaCas9
atgttttttatttttcaagttgaa

SEQ ID NO: 23127 - DNA, 23 bp, Artificial Sequence
  Synthetic: FXN 3 forward 9:69043886-69043915; SaCas9
tgttttttatttttcaagttgaa

SEQ ID NO: 23128 - DNA, 22 bp, Artificial Sequence
  Synthetic: FXN 3 forward 9:69043887-69043915; SaCas9
gttttttatttttcaagttgaa

SEQ ID NO: 23129 - DNA, 21 bp, Artificial Sequence
  Synthetic: FXN 3 forward 9:69043888-69043915; SaCas9
ttttttatttttcaagttgaa

SEQ ID NO: 23130 - DNA, 20 bp, Artificial Sequence
  Synthetic: FXN 3 forward 9:69043889-69043915; SaCas9
tttttatttttcaagttgaa

SEQ ID NO: 23131 - DNA, 19 bp, Artificial Sequence
  Synthetic: FXN 3 forward 9:69043890-69043915; SaCas9
ttttatttttcaagttgaa

SEQ ID NO: 23132 - DNA, 18 bp, Artificial Sequence
  Synthetic: FXN 3 forward 9:69043891-69043915; SaCas9
tttatttttcaagttgaa

SEQ ID NO: 23133 - DNA, 25 bp, Artificial Sequence
  Synthetic: FXN 3 reverse 9:69043897-69043928; SaCas9
caacatagagagacctcatttcaac

SEQ ID NO: 23134 - DNA, 24 bp, Artificial Sequence
  Synthetic: FXN 3 reverse 9:69043898-69043928; SaCas9
aacatagagagacctcatttcaac

SEQ ID NO: 23135 - DNA, 23 bp, Artificial Sequence
  Synthetic: FXN 3 reverse 9:69043899-69043928; SaCas9
acatagagagacctcatttcaac

SEQ ID NO: 23136 - DNA, 22 bp, Artificial Sequence
  Synthetic: FXN 3 reverse 9:69043900-69043928; SaCas9
catagagagacctcatttcaac

SEQ ID NO: 23137 - DNA, 21 bp, Artificial Sequence
  Synthetic: FXN 3 reverse 9:69043901-69043928; SaCas9
atagagagacctcatttcaac

SEQ ID NO: 23138 - DNA, 20 bp, Artificial Sequence
  Synthetic: FXN 3 reverse 9:69043902-69043928; SaCas9
tagagagacctcatttcaac

SEQ ID NO: 23139 - DNA, 19 bp, Artificial Sequence
  Synthetic: FXN 3 reverse 9:69043903-69043928; SaCas9
agagagacctcatttcaac

SEQ ID NO: 23140 - DNA, 18 bp, Artificial Sequence
  Synthetic: FXN 3 reverse 9:69043904-69043928; SaCas9
gagagacctcatttcaac

SEQ ID NO: 23141 - DNA, 25 bp, Artificial Sequence
  Synthetic: FXN 3 reverse 9:69043915-69043946; SaCas9
gtttgagaccaacctgggcaacata

SEQ ID NO: 23142 - DNA, 24 bp, Artificial Sequence
  Synthetic: FXN 3 reverse 9:69043916-69043946; SaCas9
tttgagaccaacctgggcaacata

SEQ ID NO: 23143 - DNA, 23 bp, Artificial Sequence
  Synthetic: FXN 3 reverse 9:69043917-69043946; SaCas9
ttgagaccaacctgggcaacata

SEQ ID NO: 23144 - DNA, 22 bp, Artificial Sequence
  Synthetic: FXN 3 reverse 9:69043918-69043946; SaCas9
tgagaccaacctgggcaacata

SEQ ID NO: 23145 - DNA, 21 bp, Artificial Sequence
  Synthetic: FXN 3 reverse 9:69043919-69043946; SaCas9
gagaccaacctgggcaacata

SEQ ID NO: 23146 - DNA, 20 bp, Artificial Sequence
  Synthetic: FXN 3 reverse 9:69043920-69043946; SaCas9
agaccaacctgggcaacata

SEQ ID NO: 23147 - DNA, 19 bp, Artificial Sequence
  Synthetic: FXN 3 reverse 9:69043921-69043946; SaCas9
gaccaacctgggcaacata

SEQ ID NO: 23148 - DNA, 18 bp, Artificial Sequence
  Synthetic: FXN 3 reverse 9:69043922-69043946; SaCas9
accaacctgggcaacata

SEQ ID NO: 23149 - DNA, 25 bp, Artificial Sequence
  Synthetic: FXN 3 reverse 9:69043917-69043948; SaCas9
gagtttgagaccaacctgggcaaca

SEQ ID NO: 23150 - DNA, 24 bp, Artificial Sequence
  Synthetic: FXN 3 reverse 9:69043918-69043948; SaCas9
agtttgagaccaacctgggcaaca

SEQ ID NO: 23151 - DNA, 23 bp, Artificial Sequence
  Synthetic: FXN 3 reverse 9:69043919-69043948; SaCas9
gtttgagaccaacctgggcaaca

SEQ ID NO: 23152 - DNA, 22 bp, Artificial Sequence
  Synthetic: FXN 3 reverse 9:69043920-69043948; SaCas9
tttgagaccaacctgggcaaca

SEQ ID NO: 23153 - DNA, 21 bp, Artificial Sequence
  Synthetic: FXN 3 reverse 9:69043921-69043948; SaCas9
ttgagaccaacctgggcaaca

SEQ ID NO: 23154 - DNA, 20 bp, Artificial Sequence
  Synthetic: FXN 3 reverse 9:69043922-69043948; SaCas9
tgagaccaacctgggcaaca

SEQ ID NO: 23155 - DNA, 19 bp, Artificial Sequence
  Synthetic: FXN 3 reverse 9:69043923-69043948; SaCas9
gagaccaacctgggcaaca

SEQ ID NO: 23156 - DNA, 18 bp, Artificial Sequence
  Synthetic: FXN 3 reverse 9:69043924-69043948; SaCas9
agaccaacctgggcaaca

SEQ ID NO: 23157 - DNA, 25 bp, Artificial Sequence
  Synthetic: FXN 3 forward 9:69043923-69043954; SaCas9
tgttgcccaggttggtctcaaactc

SEQ ID NO: 23158 - DNA, 24 bp, Artificial Sequence
  Synthetic: FXN 3 forward 9:69043924-69043954; SaCas9
gttgcccaggttggtctcaaactc

SEQ ID NO: 23159 - DNA, 23 bp, Artificial Sequence
  Synthetic: FXN 3 forward 9:69043925-69043954; SaCas9
ttgcccaggttggtctcaaactc

SEQ ID NO: 23160 - DNA, 22 bp, Artificial Sequence
  Synthetic: FXN 3 forward 9:69043926-69043954; SaCas9
tgcccaggttggtctcaaactc

SEQ ID NO: 23161 - DNA, 21 bp, Artificial Sequence
  Synthetic: FXN 3 forward 9:69043927-69043954; SaCas9
gcccaggttggtctcaaactc

SEQ ID NO: 23162 - DNA, 20 bp, Artificial Sequence
  Synthetic: FXN 3 forward 9:69043928-69043954; SaCas9
cccaggttggtctcaaactc

SEQ ID NO: 23163 - DNA, 19 bp, Artificial Sequence
  Synthetic: FXN 3 forward 9:69043929-69043954; SaCas9
ccaggttggtctcaaactc

SEQ ID NO: 23164 - DNA, 18 bp, Artificial Sequence
  Synthetic: FXN 3 forward 9:69043930-69043954; SaCas9
caggttggtctcaaactc

SEQ ID NO: 23165 - DNA, 25 bp, Artificial Sequence
  Synthetic: FXN 3 reverse 9:69043927-69043958; SaCas9
ttgagctcaagagtttgagaccaac

SEQ ID NO: 23166 - DNA, 24 bp, Artificial Sequence
  Synthetic: FXN 3 reverse 9:69043928-69043958; SaCas9
tgagctcaagagtttgagaccaac

SEQ ID NO: 23167 - DNA, 23 bp, Artificial Sequence
  Synthetic: FXN 3 reverse 9:69043929-69043958; SaCas9
gagctcaagagtttgagaccaac

SEQ ID NO: 23168 - DNA, 22 bp, Artificial Sequence
  Synthetic: FXN 3 reverse 9:69043930-69043958; SaCas9
agctcaagagtttgagaccaac

SEQ ID NO: 23169 - DNA, 21 bp, Artificial Sequence
  Synthetic: FXN 3 reverse 9:69043931-69043958; SaCas9
gctcaagagtttgagaccaac

SEQ ID NO: 23170 - DNA, 20 bp, Artificial Sequence
  Synthetic: FXN 3 reverse 9:69043932-69043958; SaCas9
ctcaagagtttgagaccaac

SEQ ID NO: 23171 - DNA, 19 bp, Artificial Sequence
  Synthetic: FXN 3 reverse 9:69043933-69043958; SaCas9
tcaagagtttgagaccaac

SEQ ID NO: 23172 - DNA, 18 bp, Artificial Sequence
  Synthetic: FXN 3 reverse 9:69043934-69043958; SaCas9
caagagtttgagaccaac

SEQ ID NO: 23173 - DNA, 25 bp, Artificial Sequence
  Synthetic: FXN 3 reverse 9:69043938-69043969; SaCas9
gggaggattacttgagctcaagagt

SEQ ID NO: 23174 - DNA, 24 bp, Artificial Sequence
  Synthetic: FXN 3 reverse 9:69043939-69043969; SaCas9
ggaggattacttgagctcaagagt

SEQ ID NO: 23175 - DNA, 23 bp, Artificial Sequence
  Synthetic: FXN 3 reverse 9:69043940-69043969; SaCas9
gaggattacttgagctcaagagt

SEQ ID NO: 23176 - DNA, 22 bp, Artificial Sequence
  Synthetic: FXN 3 reverse 9:69043941-69043969; SaCas9
aggattacttgagctcaagagt

SEQ ID NO: 23177 - DNA, 21 bp, Artificial Sequence
  Synthetic: FXN 3 reverse 9:69043942-69043969; SaCas9
ggattacttgagctcaagagt

SEQ ID NO: 23178 - DNA, 20 bp, Artificial Sequence
  Synthetic: FXN 3 reverse 9:69043943-69043969; SaCas9
gattacttgagctcaagagt

SEQ ID NO: 23179 - DNA, 19 bp, Artificial Sequence
  Synthetic: FXN 3 reverse 9:69043944-69043969; SaCas9
attacttgagctcaagagt

SEQ ID NO: 23180 - DNA, 18 bp, Artificial Sequence
  Synthetic: FXN 3 reverse 9:69043945-69043969; SaCas9
ttacttgagctcaagagt

SEQ ID NO: 23181 - DNA, 25 bp, Artificial Sequence
  Synthetic: FXN 3 reverse 9:69043944-69043975; SaCas9
caaggtgggaggattacttgagctc

SEQ ID NO: 23182 - DNA, 24 bp, Artificial Sequence
  Synthetic: FXN 3 reverse 9:69043945-69043975; SaCas9
aaggtgggaggattacttgagctc

SEQ ID NO: 23183 - DNA, 23 bp, Artificial Sequence
  Synthetic: FXN 3 reverse 9:69043946-69043975; SaCas9
aggtgggaggattacttgagctc

SEQ ID NO: 23184 - DNA, 22 bp, Artificial Sequence
  Synthetic: FXN 3 reverse 9:69043947-69043975; SaCas9
ggtgggaggattacttgagctc

SEQ ID NO: 23185 - DNA, 21 bp, Artificial Sequence
  Synthetic: FXN 3 reverse 9:69043948-69043975; SaCas9
gtgggaggattacttgagctc

SEQ ID NO: 23186 - DNA, 20 bp, Artificial Sequence
  Synthetic: FXN 3 reverse 9:69043949-69043975; SaCas9
tgggaggattacttgagctc

SEQ ID NO: 23187 - DNA, 19 bp, Artificial Sequence
  Synthetic: FXN 3 reverse 9:69043950-69043975; SaCas9
gggaggattacttgagctc

SEQ ID NO: 23188 - DNA, 18 bp, Artificial Sequence
  Synthetic: FXN 3 reverse 9:69043951-69043975; SaCas9
ggaggattacttgagctc

SEQ ID NO: 23189 - DNA, 25 bp, Artificial Sequence
  Synthetic: FXN 3 reverse 9:69043952-69043983; SaCas9
tgggaggccaaggtgggaggattac

SEQ ID NO: 23190 - DNA, 24 bp, Artificial Sequence
  Synthetic: FXN 3 reverse 9:69043953-69043983; SaCas9
gggaggccaaggtgggaggattac

SEQ ID NO: 23191 - DNA, 23 bp, Artificial Sequence
  Synthetic: FXN 3 reverse 9:69043954-69043983; SaCas9
ggaggccaaggtgggaggattac

SEQ ID NO: 23192 - DNA, 22 bp, Artificial Sequence
  Synthetic: FXN 3 reverse 9:69043955-69043983; SaCas9
gaggccaaggtgggaggattac

SEQ ID NO: 23193 - DNA, 21 bp, Artificial Sequence
  Synthetic: FXN 3 reverse 9:69043956-69043983; SaCas9
aggccaaggtgggaggattac

SEQ ID NO: 23194 - DNA, 20 bp, Artificial Sequence
  Synthetic: FXN 3 reverse 9:69043957-69043983; SaCas9
ggccaaggtgggaggattac

SEQ ID NO: 23195 - DNA, 19 bp, Artificial Sequence
  Synthetic: FXN 3 reverse 9:69043958-69043983; SaCas9
gccaaggtgggaggattac

SEQ ID NO: 23196 - DNA, 18 bp, Artificial Sequence
  Synthetic: FXN 3 reverse 9:69043959-69043983; SaCas9
ccaaggtgggaggattac

SEQ ID NO: 23197 - DNA, 25 bp, Artificial Sequence
  Synthetic: FXN 3 reverse 9:69043961-69043992; SaCas9
cccgcactttgggaggccaaggtgg

SEQ ID NO: 23198 - DNA, 24 bp, Artificial Sequence
  Synthetic: FXN 3 reverse 9:69043962-69043992; SaCas9
ccgcactttgggaggccaaggtgg

SEQ ID NO: 23199 - DNA, 23 bp, Artificial Sequence
  Synthetic: FXN 3 reverse 9:69043963-69043992; SaCas9
cgcactttgggaggccaaggtgg

SEQ ID NO: 23200 - DNA, 22 bp, Artificial Sequence
  Synthetic: FXN 3 reverse 9:69043964-69043992; SaCas9
gcactttgggaggccaaggtgg

SEQ ID NO: 23201 - DNA, 21 bp, Artificial Sequence
  Synthetic: FXN 3 reverse 9:69043965-69043992; SaCas9
cactttgggaggccaaggtgg

SEQ ID NO: 23202 - DNA, 20 bp, Artificial Sequence
  Synthetic: FXN 3 reverse 9:69043966-69043992; SaCas9
actttgggaggccaaggtgg

SEQ ID NO: 23203 - DNA, 19 bp, Artificial Sequence
  Synthetic: FXN 3 reverse 9:69043967-69043992; SaCas9
ctttgggaggccaaggtgg

SEQ ID NO: 23204 - DNA, 18 bp, Artificial Sequence
  Synthetic: FXN 3 reverse 9:69043968-69043992; SaCas9
tttgggaggccaaggtgg

SEQ ID NO: 23205 - DNA, 25 bp, Artificial Sequence
  Synthetic: FXN 3 forward 9:69043962-69043993; SaCas9
tcctcccaccttggcctcccaaagt

SEQ ID NO: 23206 - DNA, 24 bp, Artificial Sequence
  Synthetic: FXN 3 forward 9:69043963-69043993; SaCas9
cctcccaccttggcctcccaaagt

SEQ ID NO: 23207 - DNA, 23 bp, Artificial Sequence
  Synthetic: FXN 3 forward 9:69043964-69043993; SaCas9
ctcccaccttggcctcccaaagt

SEQ ID NO: 23208 - DNA, 22 bp, Artificial Sequence
  Synthetic: FXN 3 forward 9:69043965-69043993; SaCas9
tcccaccttggcctcccaaagt

SEQ ID NO: 23209 - DNA, 21 bp, Artificial Sequence
  Synthetic: FXN 3 forward 9:69043966-69043993; SaCas9
cccaccttggcctcccaaagt

SEQ ID NO: 23210 - DNA, 20 bp, Artificial Sequence
  Synthetic: FXN 3 forward 9:69043967-69043993; SaCas9
ccaccttggcctcccaaagt

SEQ ID NO: 23211 - DNA, 19 bp, Artificial Sequence
  Synthetic: FXN 3 forward 9:69043968-69043993; SaCas9
caccttggcctcccaaagt

SEQ ID NO: 23212 - DNA, 18 bp, Artificial Sequence
  Synthetic: FXN 3 forward 9:69043969-69043993; SaCas9
accttggcctcccaaagt

SEQ ID NO: 23213 - DNA, 25 bp, Artificial Sequence
  Synthetic: FXN 3 forward 9:69043963-69043994; SaCas9
cctcccaccttggcctcccaaagtg

SEQ ID NO: 23214 - DNA, 24 bp, Artificial Sequence
  Synthetic: FXN 3 forward 9:69043964-69043994; SaCas9
ctcccaccttggcctcccaaagtg

SEQ ID NO: 23215 - DNA, 23 bp, Artificial Sequence
  Synthetic: FXN 3 forward 9:69043965-69043994; SaCas9
tcccaccttggcctcccaaagtg

SEQ ID NO: 23216 - DNA, 22 bp, Artificial Sequence
  Synthetic: FXN 3 forward 9:69043966-69043994; SaCas9
cccaccttggcctcccaaagtg

SEQ ID NO: 23217 - DNA, 21 bp, Artificial Sequence
  Synthetic: FXN 3 forward 9:69043967-69043994; SaCas9
ccaccttggcctcccaaagtg

SEQ ID NO: 23218 - DNA, 20 bp, Artificial Sequence
  Synthetic: FXN 3 forward 9:69043968-69043994; SaCas9
caccttggcctcccaaagtg

SEQ ID NO: 23219 - DNA, 19 bp, Artificial Sequence
  Synthetic: FXN 3 forward 9:69043969-69043994; SaCas9
accttggcctcccaaagtg

SEQ ID NO: 23220 - DNA, 18 bp, Artificial Sequence
  Synthetic: FXN 3 forward 9:69043970-69043994; SaCas9
ccttggcctcccaaagtg

SEQ ID NO: 23221 - DNA, 25 bp, Artificial Sequence
  Synthetic: FXN 3 reverse 9:69043963-69043994; SaCas9
tccccgcactttgggaggccaaggt

SEQ ID NO: 23222 - DNA, 24 bp, Artificial Sequence
  Synthetic: FXN 3 reverse 9:69043964-69043994; SaCas9
ccccgcactttgggaggccaaggt

SEQ ID NO: 23223 - DNA, 23 bp, Artificial Sequence
  Synthetic: FXN 3 reverse 9:69043965-69043994; SaCas9
cccgcactttgggaggccaaggt

SEQ ID NO: 23224 - DNA, 22 bp, Artificial Sequence
  Synthetic: FXN 3 reverse 9:69043966-69043994; SaCas9
ccgcactttgggaggccaaggt

SEQ ID NO: 23225 - DNA, 21 bp, Artificial Sequence
  Synthetic: FXN 3 reverse 9:69043967-69043994; SaCas9
cgcactttgggaggccaaggt

SEQ ID NO: 23226 - DNA, 20 bp, Artificial Sequence
  Synthetic: FXN 3 reverse 9:69043968-69043994; SaCas9
gcactttgggaggccaaggt

SEQ ID NO: 23227 - DNA, 19 bp, Artificial Sequence
  Synthetic: FXN 3 reverse 9:69043969-69043994; SaCas9
cactttgggaggccaaggt

SEQ ID NO: 23228 - DNA, 18 bp, Artificial Sequence
  Synthetic: FXN 3 reverse 9:69043970-69043994; SaCas9
actttgggaggccaaggt

SEQ ID NO: 23229 - DNA, 25 bp, Artificial Sequence
  Synthetic: FXN 3 forward 9:69043964-69043995; SaCas9
ctcccaccttggcctcccaaagtgc

SEQ ID NO: 23230 - DNA, 24 bp, Artificial Sequence
  Synthetic: FXN 3 forward 9:69043965-69043995; SaCas9
tcccaccttggcctcccaaagtgc

SEQ ID NO: 23231 - DNA, 23 bp, Artificial Sequence
  Synthetic: FXN 3 forward 9:69043966-69043995; SaCas9
cccaccttggcctcccaaagtgc

SEQ ID NO: 23232 - DNA, 22 bp, Artificial Sequence
  Synthetic: FXN 3 forward 9:69043967-69043995; SaCas9
ccaccttggcctcccaaagtgc

SEQ ID NO: 23233 - DNA, 21 bp, Artificial Sequence
  Synthetic: FXN 3 forward 9:69043968-69043995; SaCas9
caccttggcctcccaaagtgc

SEQ ID NO: 23234 - DNA, 20 bp, Artificial Sequence
  Synthetic: FXN 3 forward 9:69043969-69043995; SaCas9
accttggcctcccaaagtgc

SEQ ID NO: 23235 - DNA, 19 bp, Artificial Sequence
  Synthetic: FXN 3 forward 9:69043970-69043995; SaCas9
ccttggcctcccaaagtgc

SEQ ID NO: 23236 - DNA, 18 bp, Artificial Sequence
  Synthetic: FXN 3 forward 9:69043971-69043995; SaCas9
cttggcctcccaaagtgc

SEQ ID NO: 23237 - DNA, 25 bp, Artificial Sequence
  Synthetic: FXN 3 reverse 9:69043964-69043995; SaCas9
atccccgcactttgggaggccaagg

SEQ ID NO: 23238 - DNA, 24 bp, Artificial Sequence
  Synthetic: FXN 3 reverse 9:69043965-69043995; SaCas9
tccccgcactttgggaggccaagg

SEQ ID NO: 23239 - DNA, 23 bp, Artificial Sequence
  Synthetic: FXN 3 reverse 9:69043966-69043995; SaCas9
ccccgcactttgggaggccaagg

SEQ ID NO: 23240 - DNA, 22 bp, Artificial Sequence
  Synthetic: FXN 3 reverse 9:69043967-69043995; SaCas9
cccgcactttgggaggccaagg

SEQ ID NO: 23241 - DNA, 21 bp, Artificial Sequence
  Synthetic: FXN 3 reverse 9:69043968-69043995; SaCas9
ccgcactttgggaggccaagg

SEQ ID NO: 23242 - DNA, 20 bp, Artificial Sequence
  Synthetic: FXN 3 reverse 9:69043969-69043995; SaCas9
cgcactttgggaggccaagg

SEQ ID NO: 23243 - DNA, 19 bp, Artificial Sequence
  Synthetic: FXN 3 reverse 9:69043970-69043995; SaCas9
gcactttgggaggccaagg

SEQ ID NO: 23244 - DNA, 18 bp, Artificial Sequence
  Synthetic: FXN 3 reverse 9:69043971-69043995; SaCas9
cactttgggaggccaagg

SEQ ID NO: 23245 - DNA, 25 bp, Artificial Sequence
  Synthetic: FXN 3 reverse 9:69043965-69043996; SaCas9
aatccccgcactttgggaggccaag

SEQ ID NO: 23246 - DNA, 24 bp, Artificial Sequence
  Synthetic: FXN 3 reverse 9:69043966-69043996; SaCas9
atccccgcactttgggaggccaag

SEQ ID NO: 23247 - DNA, 23 bp, Artificial Sequence
  Synthetic: FXN 3 reverse 9:69043967-69043996; SaCas9
tccccgcactttgggaggccaag

SEQ ID NO: 23248 - DNA, 22 bp, Artificial Sequence
  Synthetic: FXN 3 reverse 9:69043968-69043996; SaCas9
ccccgcactttgggaggccaag

SEQ ID NO: 23249 - DNA, 21 bp, Artificial Sequence
  Synthetic: FXN 3 reverse 9:69043969-69043996; SaCas9
cccgcactttgggaggccaag

SEQ ID NO: 23250 - DNA, 20 bp, Artificial Sequence
  Synthetic: FXN 3 reverse 9:69043970-69043996; SaCas9
ccgcactttgggaggccaag

SEQ ID NO: 23251 - DNA, 19 bp, Artificial Sequence
  Synthetic: FXN 3 reverse 9:69043971-69043996; SaCas9
cgcactttgggaggccaag

SEQ ID NO: 23252 - DNA, 18 bp, Artificial Sequence
  Synthetic: FXN 3 reverse 9:69043972-69043996; SaCas9
gcactttgggaggccaag

SEQ ID NO: 23253 - DNA, 25 bp, Artificial Sequence
  Synthetic: FXN 3 reverse 9:69043976-69044007; SaCas9
ctcacacctgtaatccccgcacttt

SEQ ID NO: 23254 - DNA, 24 bp, Artificial Sequence
  Synthetic: FXN 3 reverse 9:69043977-69044007; SaCas9
tcacacctgtaatccccgcacttt

SEQ ID NO: 23255 - DNA, 23 bp, Artificial Sequence
  Synthetic: FXN 3 reverse 9:69043978-69044007; SaCas9
cacacctgtaatccccgcacttt

SEQ ID NO: 23256 - DNA, 22 bp, Artificial Sequence
  Synthetic: FXN 3 reverse 9:69043979-69044007; SaCas9
acacctgtaatccccgcacttt

SEQ ID NO: 23257 - DNA, 21 bp, Artificial Sequence
  Synthetic: FXN 3 reverse 9:69043980-69044007; SaCas9
cacctgtaatccccgcacttt

SEQ ID NO: 23258 - DNA, 20 bp, Artificial Sequence
  Synthetic: FXN 3 reverse 9:69043981-69044007; SaCas9
acctgtaatccccgcacttt

SEQ ID NO: 23259 - DNA, 19 bp, Artificial Sequence
  Synthetic: FXN 3 reverse 9:69043982-69044007; SaCas9
cctgtaatccccgcacttt

SEQ ID NO: 23260 - DNA, 18 bp, Artificial Sequence
  Synthetic: FXN 3 reverse 9:69043983-69044007; SaCas9
ctgtaatccccgcacttt

SEQ ID NO: 23261 - DNA, 25 bp, Artificial Sequence
  Synthetic: FXN 3 forward 9:69043977-69044008; SaCas9
ctcccaaagtgcggggattacaggt

SEQ ID NO: 23262 - DNA, 24 bp, Artificial Sequence
  Synthetic: FXN 3 forward 9:69043978-69044008; SaCas9
tcccaaagtgcggggattacaggt

SEQ ID NO: 23263 - DNA, 23 bp, Artificial Sequence
  Synthetic: FXN 3 forward 9:69043979-69044008; SaCas9
cccaaagtgcggggattacaggt

SEQ ID NO: 23264 - DNA, 22 bp, Artificial Sequence
  Synthetic: FXN 3 forward 9:69043980-69044008; SaCas9
ccaaagtgcggggattacaggt

SEQ ID NO: 23265 - DNA, 21 bp, Artificial Sequence
  Synthetic: FXN 3 forward 9:69043981-69044008; SaCas9
caaagtgcggggattacaggt

SEQ ID NO: 23266 - DNA, 20 bp, Artificial Sequence
  Synthetic: FXN 3 forward 9:69043982-69044008; SaCas9
aaagtgcggggattacaggt

SEQ ID NO: 23267 - DNA, 19 bp, Artificial Sequence
  Synthetic: FXN 3 forward 9:69043983-69044008; SaCas9
aagtgcggggattacaggt

SEQ ID NO: 23268 - DNA, 18 bp, Artificial Sequence
  Synthetic: FXN 3 forward 9:69043984-69044008; SaCas9
agtgcggggattacaggt

SEQ ID NO: 23269 - DNA, 25 bp, Artificial Sequence
  Synthetic: FXN 3 reverse 9:69043977-69044008; SaCas9
gctcacacctgtaatccccgcactt

SEQ ID NO: 23270 - DNA, 24 bp, Artificial Sequence
  Synthetic: FXN 3 reverse 9:69043978-69044008; SaCas9
ctcacacctgtaatccccgcactt

SEQ ID NO: 23271 - DNA, 23 bp, Artificial Sequence
  Synthetic: FXN 3 reverse 9:69043979-69044008; SaCas9
tcacacctgtaatccccgcactt

SEQ ID NO: 23272 - DNA, 22 bp, Artificial Sequence
  Synthetic: FXN 3 reverse 9:69043980-69044008; SaCas9
cacacctgtaatccccgcactt

SEQ ID NO: 23273 - DNA, 21 bp, Artificial Sequence
  Synthetic: FXN 3 reverse 9:69043981-69044008; SaCas9
acacctgtaatccccgcactt

SEQ ID NO: 23274 - DNA, 20 bp, Artificial Sequence
  Synthetic: FXN 3 reverse 9:69043982-69044008; SaCas9
cacctgtaatccccgcactt

SEQ ID NO: 23275 - DNA, 19 bp, Artificial Sequence
  Synthetic: FXN 3 reverse 9:69043983-69044008; SaCas9
acctgtaatccccgcactt

SEQ ID NO: 23276 - DNA, 18 bp, Artificial Sequence
  Synthetic: FXN 3 reverse 9:69043984-69044008; SaCas9
cctgtaatccccgcactt

SEQ ID NO: 23277 - DNA, 25 bp, Artificial Sequence
  Synthetic: FXN 3 reverse 9:69043978-69044009; SaCas9
agctcacacctgtaatccccgcact

SEQ ID NO: 23278 - DNA, 24 bp, Artificial Sequence
  Synthetic: FXN 3 reverse 9:69043979-69044009; SaCas9
gctcacacctgtaatccccgcact

SEQ ID NO: 23279 - DNA, 23 bp, Artificial Sequence
  Synthetic: FXN 3 reverse 9:69043980-69044009; SaCas9
ctcacacctgtaatccccgcact

SEQ ID NO: 23280 - DNA, 22 bp, Artificial Sequence
  Synthetic: FXN 3 reverse 9:69043981-69044009; SaCas9
tcacacctgtaatccccgcact

SEQ ID NO: 23281 - DNA, 21 bp, Artificial Sequence
  Synthetic: FXN 3 reverse 9:69043982-69044009; SaCas9
cacacctgtaatccccgcact

SEQ ID NO: 23282 - DNA, 20 bp, Artificial Sequence
  Synthetic: FXN 3 reverse 9:69043983-69044009; SaCas9
acacctgtaatccccgcact

SEQ ID NO: 23283 - DNA, 19 bp, Artificial Sequence
  Synthetic: FXN 3 reverse 9:69043984-69044009; SaCas9
cacctgtaatccccgcact

SEQ ID NO: 23284 - DNA, 18 bp, Artificial Sequence
  Synthetic: FXN 3 reverse 9:69043985-69044009; SaCas9
acctgtaatccccgcact

SEQ ID NO: 23285 - DNA, 25 bp, Artificial Sequence
  Synthetic: FXN 3 forward 9:69044010-69044041; SaCas9
ccatgcccagccaagatcagtgtta

SEQ ID NO: 23286 - DNA, 24 bp, Artificial Sequence
  Synthetic: FXN 3 forward 9:69044011-69044041; SaCas9
catgcccagccaagatcagtgtta

SEQ ID NO: 23287 - DNA, 23 bp, Artificial Sequence
  Synthetic: FXN 3 forward 9:69044012-69044041; SaCas9
atgcccagccaagatcagtgtta

SEQ ID NO: 23288 - DNA, 22 bp, Artificial Sequence
  Synthetic: FXN 3 forward 9:69044013-69044041; SaCas9
tgcccagccaagatcagtgtta

SEQ ID NO: 23289 - DNA, 21 bp, Artificial Sequence
  Synthetic: FXN 3 forward 9:69044014-69044041; SaCas9
gcccagccaagatcagtgtta

SEQ ID NO: 23290 - DNA, 20 bp, Artificial Sequence
  Synthetic: FXN 3 forward 9:69044015-69044041; SaCas9
cccagccaagatcagtgtta

SEQ ID NO: 23291 - DNA, 19 bp, Artificial Sequence
  Synthetic: FXN 3 forward 9:69044016-69044041; SaCas9
ccagccaagatcagtgtta

SEQ ID NO: 23292 - DNA, 18 bp, Artificial Sequence
  Synthetic: FXN 3 forward 9:69044017-69044041; SaCas9
cagccaagatcagtgtta

SEQ ID NO: 23293 - DNA, 25 bp, Artificial Sequence
  Synthetic: FXN 3 reverse 9:69044014-69044045; SaCas9
gttgattcattaacactgatcttgg

SEQ ID NO: 23294 - DNA, 24 bp, Artificial Sequence
  Synthetic: FXN 3 reverse 9:69044015-69044045; SaCas9
ttgattcattaacactgatcttgg

SEQ ID NO: 23295 - DNA, 23 bp, Artificial Sequence
  Synthetic: FXN 3 reverse 9:69044016-69044045; SaCas9
tgattcattaacactgatcttgg

SEQ ID NO: 23296 - DNA, 22 bp, Artificial Sequence
  Synthetic: FXN 3 reverse 9:69044017-69044045; SaCas9
gattcattaacactgatcttgg

SEQ ID NO: 23297 - DNA, 21 bp, Artificial Sequence
  Synthetic: FXN 3 reverse 9:69044018-69044045; SaCas9
attcattaacactgatcttgg

SEQ ID NO: 23298 - DNA, 20 bp, Artificial Sequence
  Synthetic: FXN 3 reverse 9:69044019-69044045; SaCas9
ttcattaacactgatcttgg

SEQ ID NO: 23299 - DNA, 19 bp, Artificial Sequence
  Synthetic: FXN 3 reverse 9:69044020-69044045; SaCas9
tcattaacactgatcttgg

SEQ ID NO: 23300 - DNA, 18 bp, Artificial Sequence
  Synthetic: FXN 3 reverse 9:69044021-69044045; SaCas9
cattaacactgatcttgg

SEQ ID NO: 23301 - DNA, 25 bp, Artificial Sequence
  Synthetic: FXN 3 forward 9:69044048-69044079; SaCas9
atatattacataaggtgtctttaaa

SEQ ID NO: 23302 - DNA, 24 bp, Artificial Sequence
  Synthetic: FXN 3 forward 9:69044049-69044079; SaCas9
tatattacataaggtgtctttaaa

SEQ ID NO: 23303 - DNA, 23 bp, Artificial Sequence
  Synthetic: FXN 3 forward 9:69044050-69044079; SaCas9
atattacataaggtgtctttaaa

SEQ ID NO: 23304 - DNA, 22 bp, Artificial Sequence
  Synthetic: FXN 3 forward 9:69044051-69044079; SaCas9
tattacataaggtgtctttaaa

SEQ ID NO: 23305 - DNA, 21 bp, Artificial Sequence
  Synthetic: FXN 3 forward 9:69044052-69044079; SaCas9
attacataaggtgtctttaaa

SEQ ID NO: 23306 - DNA, 20 bp, Artificial Sequence
  Synthetic: FXN 3 forward 9:69044053-69044079; SaCas9
ttacataaggtgtctttaaa

SEQ ID NO: 23307 - DNA, 19 bp, Artificial Sequence
  Synthetic: FXN 3 forward 9:69044054-69044079; SaCas9
tacataaggtgtctttaaa

SEQ ID NO: 23308 - DNA, 18 bp, Artificial Sequence
  Synthetic: FXN 3 forward 9:69044055-69044079; SaCas9
acataaggtgtctttaaa

SEQ ID NO: 23309 - DNA, 25 bp, Artificial Sequence
  Synthetic: FXN 3 forward 9:69044103-69044134; SaCas9
taacaatgttgtgaccagcagctta

SEQ ID NO: 23310 - DNA, 24 bp, Artificial Sequence
  Synthetic: FXN 3 forward 9:69044104-69044134; SaCas9
aacaatgttgtgaccagcagctta

SEQ ID NO: 23311 - DNA, 23 bp, Artificial Sequence
  Synthetic: FXN 3 forward 9:69044105-69044134; SaCas9
acaatgttgtgaccagcagctta

SEQ ID NO: 23312 - DNA, 22 bp, Artificial Sequence
  Synthetic: FXN 3 forward 9:69044106-69044134; SaCas9
caatgttgtgaccagcagctta

SEQ ID NO: 23313 - DNA, 21 bp, Artificial Sequence
  Synthetic: FXN 3 forward 9:69044107-69044134; SaCas9
aatgttgtgaccagcagctta

SEQ ID NO: 23314 - DNA, 20 bp, Artificial Sequence
  Synthetic: FXN 3 forward 9:69044108-69044134; SaCas9
atgttgtgaccagcagctta

SEQ ID NO: 23315 - DNA, 19 bp, Artificial Sequence
  Synthetic: FXN 3 forward 9:69044109-69044134; SaCas9
tgttgtgaccagcagctta

SEQ ID NO: 23316 - DNA, 18 bp, Artificial Sequence
  Synthetic: FXN 3 forward 9:69044110-69044134; SaCas9
gttgtgaccagcagctta

SEQ ID NO: 23317 - DNA, 25 bp, Artificial Sequence
  Synthetic: FXN 3 forward 9:69044146-69044177; SaCas9
atttctcctataaataatttgctcg

SEQ ID NO: 23318 - DNA, 24 bp, Artificial Sequence
  Synthetic: FXN 3 forward 9:69044147-69044177; SaCas9
tttctcctataaataatttgctcg

SEQ ID NO: 23319 - DNA, 23 bp, Artificial Sequence
  Synthetic: FXN 3 forward 9:69044148-69044177; SaCas9
ttctcctataaataatttgctcg

SEQ ID NO: 23320 - DNA, 22 bp, Artificial Sequence
  Synthetic: FXN 3 forward 9:69044149-69044177; SaCas9
tctcctataaataatttgctcg

SEQ ID NO: 23321 - DNA, 21 bp, Artificial Sequence
  Synthetic: FXN 3 forward 9:69044150-69044177; SaCas9
ctcctataaataatttgctcg

SEQ ID NO: 23322 - DNA, 20 bp, Artificial Sequence
  Synthetic: FXN 3 forward 9:69044151-69044177; SaCas9
tcctataaataatttgctcg

SEQ ID NO: 23323 - DNA, 19 bp, Artificial Sequence
  Synthetic: FXN 3 forward 9:69044152-69044177; SaCas9
cctataaataatttgctcg

SEQ ID NO: 23324 - DNA, 18 bp, Artificial Sequence
  Synthetic: FXN 3 forward 9:69044153-69044177; SaCas9
ctataaataatttgctcg

SEQ ID NO: 23325 - DNA, 25 bp, Artificial Sequence
  Synthetic: FXN 3 reverse 9:69044147-69044178; SaCas9
cactcaacgagcaaattatttatag

SEQ ID NO: 23326 - DNA, 24 bp, Artificial Sequence
  Synthetic: FXN 3 reverse 9:69044148-69044178; SaCas9
actcaacgagcaaattatttatag

SEQ ID NO: 23327 - DNA, 23 bp, Artificial Sequence
  Synthetic: FXN 3 reverse 9:69044149-69044178; SaCas9
ctcaacgagcaaattatttatag

SEQ ID NO: 23328 - DNA, 22 bp, Artificial Sequence
  Synthetic: FXN 3 reverse 9:69044150-69044178; SaCas9
tcaacgagcaaattatttatag

SEQ ID NO: 23329 - DNA, 21 bp, Artificial Sequence
  Synthetic: FXN 3 reverse 9:69044151-69044178; SaCas9
caacgagcaaattatttatag

SEQ ID NO: 23330 - DNA, 20 bp, Artificial Sequence
  Synthetic: FXN 3 reverse 9:69044152-69044178; SaCas9
aacgagcaaattatttatag

SEQ ID NO: 23331 - DNA, 19 bp, Artificial Sequence
  Synthetic: FXN 3 reverse 9:69044153-69044178; SaCas9
acgagcaaattatttatag

SEQ ID NO: 23332 - DNA, 18 bp, Artificial Sequence
  Synthetic: FXN 3 reverse 9:69044154-69044178; SaCas9
cgagcaaattatttatag

SEQ ID NO: 23333 - DNA, 25 bp, Artificial Sequence
  Synthetic: FXN 3 reverse 9:69044149-69044180; SaCas9
aacactcaacgagcaaattatttat

SEQ ID NO: 23334 - DNA, 24 bp, Artificial Sequence
  Synthetic: FXN 3 reverse 9:69044150-69044180; SaCas9
acactcaacgagcaaattatttat

SEQ ID NO: 23335 - DNA, 23 bp, Artificial Sequence
  Synthetic: FXN 3 reverse 9:69044151-69044180; SaCas9
cactcaacgagcaaattatttat

SEQ ID NO: 23336 - DNA, 22 bp, Artificial Sequence
  Synthetic: FXN 3 reverse 9:69044152-69044180; SaCas9
actcaacgagcaaattatttat

SEQ ID NO: 23337 - DNA, 21 bp, Artificial Sequence
  Synthetic: FXN 3 reverse 9:69044153-69044180; SaCas9
ctcaacgagcaaattatttat

SEQ ID NO: 23338 - DNA, 20 bp, Artificial Sequence
  Synthetic: FXN 3 reverse 9:69044154-69044180; SaCas9
tcaacgagcaaattatttat

SEQ ID NO: 23339 - DNA, 19 bp, Artificial Sequence
  Synthetic: FXN 3 reverse 9:69044155-69044180; SaCas9
caacgagcaaattatttat

SEQ ID NO: 23340 - DNA, 18 bp, Artificial Sequence
  Synthetic: FXN 3 reverse 9:69044156-69044180; SaCas9
aacgagcaaattatttat

SEQ ID NO: 23341 - DNA, 25 bp, Artificial Sequence
  Synthetic: FXN 3 reverse 9:69044150-69044181; SaCas9
aaacactcaacgagcaaattattta

SEQ ID NO: 23342 - DNA, 24 bp, Artificial Sequence
  Synthetic: FXN 3 reverse 9:69044151-69044181; SaCas9
aacactcaacgagcaaattattta

SEQ ID NO: 23343 - DNA, 23 bp, Artificial Sequence
  Synthetic: FXN 3 reverse 9:69044152-69044181; SaCas9
acactcaacgagcaaattattta

SEQ ID NO: 23344 - DNA, 22 bp, Artificial Sequence
  Synthetic: FXN 3 reverse 9:69044153-69044181; SaCas9
cactcaacgagcaaattattta

SEQ ID NO: 23345 - DNA, 21 bp, Artificial Sequence
  Synthetic: FXN 3 reverse 9:69044154-69044181; SaCas9
actcaacgagcaaattattta

SEQ ID NO: 23346 - DNA, 20 bp, Artificial Sequence
  Synthetic: FXN 3 reverse 9:69044155-69044181; SaCas9
ctcaacgagcaaattattta

SEQ ID NO: 23347 - DNA, 19 bp, Artificial Sequence
  Synthetic: FXN 3 reverse 9:69044156-69044181; SaCas9
tcaacgagcaaattattta

SEQ ID NO: 23348 - DNA, 18 bp, Artificial Sequence
  Synthetic: FXN 3 reverse 9:69044157-69044181; SaCas9
caacgagcaaattattta

SEQ ID NO: 23349 - DNA, 25 bp, Artificial Sequence
  Synthetic: FXN 3 reverse 9:69044166-69044197; SaCas9
gctacaaagttgccacaaacactca

SEQ ID NO: 23350 - DNA, 24 bp, Artificial Sequence
  Synthetic: FXN 3 reverse 9:69044167-69044197; SaCas9
ctacaaagttgccacaaacactca

SEQ ID NO: 23351 - DNA, 23 bp, Artificial Sequence
  Synthetic: FXN 3 reverse 9:69044168-69044197; SaCas9
tacaaagttgccacaaacactca

SEQ ID NO: 23352 - DNA, 22 bp, Artificial Sequence
  Synthetic: FXN 3 reverse 9:69044169-69044197; SaCas9
acaaagttgccacaaacactca

SEQ ID NO: 23353 - DNA, 21 bp, Artificial Sequence
  Synthetic: FXN 3 reverse 9:69044170-69044197; SaCas9
caaagttgccacaaacactca

SEQ ID NO: 23354 - DNA, 20 bp, Artificial Sequence
  Synthetic: FXN 3 reverse 9:69044171-69044197; SaCas9
aaagttgccacaaacactca

SEQ ID NO: 23355 - DNA, 19 bp, Artificial Sequence
  Synthetic: FXN 3 reverse 9:69044172-69044197; SaCas9
aagttgccacaaacactca

SEQ ID NO: 23356 - DNA, 18 bp, Artificial Sequence
  Synthetic: FXN 3 reverse 9:69044173-69044197; SaCas9
agttgccacaaacactca

SEQ ID NO: 23357 - DNA, 25 bp, Artificial Sequence
  Synthetic: FXN 3 forward 9:69044183-69044214; SaCas9
ggcaactttgtagcacataactacc

SEQ ID NO: 23358 - DNA, 24 bp, Artificial Sequence
  Synthetic: FXN 3 forward 9:69044184-69044214; SaCas9
gcaactttgtagcacataactacc

SEQ ID NO: 23359 - DNA, 23 bp, Artificial Sequence
  Synthetic: FXN 3 forward 9:69044185-69044214; SaCas9
caactttgtagcacataactacc

SEQ ID NO: 23360 - DNA, 22 bp, Artificial Sequence
  Synthetic: FXN 3 forward 9:69044186-69044214; SaCas9
aactttgtagcacataactacc

SEQ ID NO: 23361 - DNA, 21 bp, Artificial Sequence
  Synthetic: FXN 3 forward 9:69044187-69044214; SaCas9
actttgtagcacataactacc

SEQ ID NO: 23362 - DNA, 20 bp, Artificial Sequence
  Synthetic: FXN 3 forward 9:69044188-69044214; SaCas9
ctttgtagcacataactacc

SEQ ID NO: 23363 - DNA, 19 bp, Artificial Sequence
  Synthetic: FXN 3 forward 9:69044189-69044214; SaCas9
tttgtagcacataactacc

SEQ ID NO: 23364 - DNA, 18 bp, Artificial Sequence
  Synthetic: FXN 3 forward 9:69044190-69044214; SaCas9
ttgtagcacataactacc

SEQ ID NO: 23365 - DNA, 25 bp, Artificial Sequence
  Synthetic: FXN 3 forward 9:69044189-69044220; SaCas9
tttgtagcacataactaccaagaat

SEQ ID NO: 23366 - DNA, 24 bp, Artificial Sequence
  Synthetic: FXN 3 forward 9:69044190-69044220; SaCas9
ttgtagcacataactaccaagaat

SEQ ID NO: 23367 - DNA, 23 bp, Artificial Sequence
  Synthetic: FXN 3 forward 9:69044191-69044220; SaCas9
tgtagcacataactaccaagaat

SEQ ID NO: 23368 - DNA, 22 bp, Artificial Sequence
  Synthetic: FXN 3 forward 9:69044192-69044220; SaCas9
gtagcacataactaccaagaat

SEQ ID NO: 23369 - DNA, 21 bp, Artificial Sequence
  Synthetic: FXN 3 forward 9:69044193-69044220; SaCas9
tagcacataactaccaagaat

SEQ ID NO: 23370 - DNA, 20 bp, Artificial Sequence
  Synthetic: FXN 3 forward 9:69044194-69044220; SaCas9
agcacataactaccaagaat

SEQ ID NO: 23371 - DNA, 19 bp, Artificial Sequence
  Synthetic: FXN 3 forward 9:69044195-69044220; SaCas9
gcacataactaccaagaat

SEQ ID NO: 23372 - DNA, 18 bp, Artificial Sequence
  Synthetic: FXN 3 forward 9:69044196-69044220; SaCas9
cacataactaccaagaat

SEQ ID NO: 23373 - DNA, 25 bp, Artificial Sequence
  Synthetic: FXN 3 forward 9:69044201-69044232; SaCas9
aactaccaagaataaggactgtaat

SEQ ID NO: 23374 - DNA, 24 bp, Artificial Sequence
  Synthetic: FXN 3 forward 9:69044202-69044232; SaCas9
actaccaagaataaggactgtaat

SEQ ID NO: 23375 - DNA, 23 bp, Artificial Sequence
  Synthetic: FXN 3 forward 9:69044203-69044232; SaCas9
ctaccaagaataaggactgtaat

SEQ ID NO: 23376 - DNA, 22 bp, Artificial Sequence
  Synthetic: FXN 3 forward 9:69044204-69044232; SaCas9
taccaagaataaggactgtaat

SEQ ID NO: 23377 - DNA, 21 bp, Artificial Sequence
  Synthetic: FXN 3 forward 9:69044205-69044232; SaCas9
accaagaataaggactgtaat

SEQ ID NO: 23378 - DNA, 20 bp, Artificial Sequence
  Synthetic: FXN 3 forward 9:69044206-69044232; SaCas9
ccaagaataaggactgtaat

SEQ ID NO: 23379 - DNA, 19 bp, Artificial Sequence
  Synthetic: FXN 3 forward 9:69044207-69044232; SaCas9
caagaataaggactgtaat

SEQ ID NO: 23380 - DNA, 18 bp, Artificial Sequence
  Synthetic: FXN 3 forward 9:69044208-69044232; SaCas9
aagaataaggactgtaat

SEQ ID NO: 23381 - DNA, 25 bp, Artificial Sequence
  Synthetic: FXN 3 forward 9:69044217-69044248; SaCas9
gactgtaataagagtacgtccctca

SEQ ID NO: 23382 - DNA, 24 bp, Artificial Sequence
  Synthetic: FXN 3 forward 9:69044218-69044248; SaCas9
actgtaataagagtacgtccctca

SEQ ID NO: 23383 - DNA, 23 bp, Artificial Sequence
  Synthetic: FXN 3 forward 9:69044219-69044248; SaCas9
ctgtaataagagtacgtccctca

SEQ ID NO: 23384 - DNA, 22 bp, Artificial Sequence
  Synthetic: FXN 3 forward 9:69044220-69044248; SaCas9
tgtaataagagtacgtccctca

SEQ ID NO: 23385 - DNA, 21 bp, Artificial Sequence
  Synthetic: FXN 3 forward 9:69044221-69044248; SaCas9
gtaataagagtacgtccctca

SEQ ID NO: 23386 - DNA, 20 bp, Artificial Sequence
  Synthetic: FXN 3 forward 9:69044222-69044248; SaCas9
taataagagtacgtccctca

SEQ ID NO: 23387 - DNA, 19 bp, Artificial Sequence
  Synthetic: FXN 3 forward 9:69044223-69044248; SaCas9
aataagagtacgtccctca

SEQ ID NO: 23388 - DNA, 18 bp, Artificial Sequence
  Synthetic: FXN 3 forward 9:69044224-69044248; SaCas9
ataagagtacgtccctca

SEQ ID NO: 23389 - DNA, 25 bp, Artificial Sequence
  Synthetic: FXN 3 forward 9:69044227-69044258; SaCas9
agagtacgtccctcacaggattgta

SEQ ID NO: 23390 - DNA, 24 bp, Artificial Sequence
  Synthetic: FXN 3 forward 9:69044228-69044258; SaCas9
gagtacgtccctcacaggattgta

SEQ ID NO: 23391 - DNA, 23 bp, Artificial Sequence
  Synthetic: FXN 3 forward 9:69044229-69044258; SaCas9
agtacgtccctcacaggattgta

SEQ ID NO: 23392 - DNA, 22 bp, Artificial Sequence
  Synthetic: FXN 3 forward 9:69044230-69044258; SaCas9
gtacgtccctcacaggattgta

SEQ ID NO: 23393 - DNA, 21 bp, Artificial Sequence
  Synthetic: FXN 3 forward 9:69044231-69044258; SaCas9
tacgtccctcacaggattgta

SEQ ID NO: 23394 - DNA, 20 bp, Artificial Sequence
  Synthetic: FXN 3 forward 9:69044232-69044258; SaCas9
acgtccctcacaggattgta

SEQ ID NO: 23395 - DNA, 19 bp, Artificial Sequence
  Synthetic: FXN 3 forward 9:69044233-69044258; SaCas9
cgtccctcacaggattgta

SEQ ID NO: 23396 - DNA, 18 bp, Artificial Sequence
  Synthetic: FXN 3 forward 9:69044234-69044258; SaCas9
gtccctcacaggattgta

SEQ ID NO: 23397 - DNA, 25 bp, Artificial Sequence
  Synthetic: FXN 3 forward 9:69044234-69044265; SaCas9
gtccctcacaggattgtaatgaaga

SEQ ID NO: 23398 - DNA, 24 bp, Artificial Sequence
  Synthetic: FXN 3 forward 9:69044235-69044265; SaCas9
tccctcacaggattgtaatgaaga

SEQ ID NO: 23399 - DNA, 23 bp, Artificial Sequence
  Synthetic: FXN 3 forward 9:69044236-69044265; SaCas9
ccctcacaggattgtaatgaaga

SEQ ID NO: 23400 - DNA, 22 bp, Artificial Sequence
  Synthetic: FXN 3 forward 9:69044237-69044265; SaCas9
cctcacaggattgtaatgaaga

SEQ ID NO: 23401 - DNA, 21 bp, Artificial Sequence
  Synthetic: FXN 3 forward 9:69044238-69044265; SaCas9
ctcacaggattgtaatgaaga

SEQ ID NO: 23402 - DNA, 20 bp, Artificial Sequence
  Synthetic: FXN 3 forward 9:69044239-69044265; SaCas9
tcacaggattgtaatgaaga

SEQ ID NO: 23403 - DNA, 19 bp, Artificial Sequence
  Synthetic: FXN 3 forward 9:69044240-69044265; SaCas9
cacaggattgtaatgaaga

SEQ ID NO: 23404 - DNA, 18 bp, Artificial Sequence
  Synthetic: FXN 3 forward 9:69044241-69044265; SaCas9
acaggattgtaatgaaga

SEQ ID NO: 23405 - DNA, 25 bp, Artificial Sequence
  Synthetic: FXN 3 reverse 9:69044234-69044265; SaCas9
actcagtcttcattacaatcctgtg

SEQ ID NO: 23406 - DNA, 24 bp, Artificial Sequence
  Synthetic: FXN 3 reverse 9:69044235-69044265; SaCas9
ctcagtcttcattacaatcctgtg

SEQ ID NO: 23407 - DNA, 23 bp, Artificial Sequence
  Synthetic: FXN 3 reverse 9:69044236-69044265; SaCas9
tcagtcttcattacaatcctgtg

SEQ ID NO: 23408 - DNA, 22 bp, Artificial Sequence
  Synthetic: FXN 3 reverse 9:69044237-69044265; SaCas9
cagtcttcattacaatcctgtg

SEQ ID NO: 23409 - DNA, 21 bp, Artificial Sequence
  Synthetic: FXN 3 reverse 9:69044238-69044265; SaCas9
agtcttcattacaatcctgtg

SEQ ID NO: 23410 - DNA, 20 bp, Artificial Sequence
  Synthetic: FXN 3 reverse 9:69044239-69044265; SaCas9
gtcttcattacaatcctgtg

SEQ ID NO: 23411 - DNA, 19 bp, Artificial Sequence
  Synthetic: FXN 3 reverse 9:69044240-69044265; SaCas9
tcttcattacaatcctgtg

SEQ ID NO: 23412 - DNA, 18 bp, Artificial Sequence
  Synthetic: FXN 3 reverse 9:69044241-69044265; SaCas9
cttcattacaatcctgtg

SEQ ID NO: 23413 - DNA, 25 bp, Artificial Sequence
  Synthetic: FXN 3 reverse 9:69044235-69044266; SaCas9
gactcagtcttcattacaatcctgt

SEQ ID NO: 23414 - DNA, 24 bp, Artificial Sequence
  Synthetic: FXN 3 reverse 9:69044236-69044266; SaCas9
actcagtcttcattacaatcctgt

SEQ ID NO: 23415 - DNA, 23 bp, Artificial Sequence
  Synthetic: FXN 3 reverse 9:69044237-69044266; SaCas9
ctcagtcttcattacaatcctgt

SEQ ID NO: 23416 - DNA, 22 bp, Artificial Sequence
  Synthetic: FXN 3 reverse 9:69044238-69044266; SaCas9
tcagtcttcattacaatcctgt

SEQ ID NO: 23417 - DNA, 21 bp, Artificial Sequence
  Synthetic: FXN 3 reverse 9:69044239-69044266; SaCas9
cagtcttcattacaatcctgt

SEQ ID NO: 23418 - DNA, 20 bp, Artificial Sequence
  Synthetic: FXN 3 reverse 9:69044240-69044266; SaCas9
agtcttcattacaatcctgt

SEQ ID NO: 23419 - DNA, 19 bp, Artificial Sequence
  Synthetic: FXN 3 reverse 9:69044241-69044266; SaCas9
gtcttcattacaatcctgt

SEQ ID NO: 23420 - DNA, 18 bp, Artificial Sequence
  Synthetic: FXN 3 reverse 9:69044242-69044266; SaCas9
tcttcattacaatcctgt

SEQ ID NO: 23421 - DNA, 25 bp, Artificial Sequence
  Synthetic: FXN 3 reverse 9:69044237-69044268; SaCas9
tggactcagtcttcattacaatcct

SEQ ID NO: 23422 - DNA, 24 bp, Artificial Sequence
  Synthetic: FXN 3 reverse 9:69044238-69044268; SaCas9
ggactcagtcttcattacaatcct

SEQ ID NO: 23423 - DNA, 23 bp, Artificial Sequence
  Synthetic: FXN 3 reverse 9:69044239-69044268; SaCas9
gactcagtcttcattacaatcct

SEQ ID NO: 23424 - DNA, 22 bp, Artificial Sequence
  Synthetic: FXN 3 reverse 9:69044240-69044268; SaCas9
actcagtcttcattacaatcct

SEQ ID NO: 23425 - DNA, 21 bp, Artificial Sequence
  Synthetic: FXN 3 reverse 9:69044241-69044268; SaCas9
ctcagtcttcattacaatcct

SEQ ID NO: 23426 - DNA, 20 bp, Artificial Sequence
  Synthetic: FXN 3 reverse 9:69044242-69044268; SaCas9
tcagtcttcattacaatcct

SEQ ID NO: 23427 - DNA, 19 bp, Artificial Sequence
  Synthetic: FXN 3 reverse 9:69044243-69044268; SaCas9
cagtcttcattacaatcct

SEQ ID NO: 23428 - DNA, 18 bp, Artificial Sequence
  Synthetic: FXN 3 reverse 9:69044244-69044268; SaCas9
agtcttcattacaatcct

SEQ ID NO: 23429 - DNA, 25 bp, Artificial Sequence
  Synthetic: FXN 3 forward 9:69044255-69044286; SaCas9
aagactgagtccatttacataaagg

SEQ ID NO: 23430 - DNA, 24 bp, Artificial Sequence
  Synthetic: FXN 3 forward 9:69044256-69044286; SaCas9
agactgagtccatttacataaagg

SEQ ID NO: 23431 - DNA, 23 bp, Artificial Sequence
  Synthetic: FXN 3 forward 9:69044257-69044286; SaCas9
gactgagtccatttacataaagg

SEQ ID NO: 23432 - DNA, 22 bp, Artificial Sequence
  Synthetic: FXN 3 forward 9:69044258-69044286; SaCas9
actgagtccatttacataaagg

SEQ ID NO: 23433 - DNA, 21 bp, Artificial Sequence
  Synthetic: FXN 3 forward 9:69044259-69044286; SaCas9
ctgagtccatttacataaagg

SEQ ID NO: 23434 - DNA, 20 bp, Artificial Sequence
  Synthetic: FXN 3 forward 9:69044260-69044286; SaCas9
tgagtccatttacataaagg

SEQ ID NO: 23435 - DNA, 19 bp, Artificial Sequence
  Synthetic: FXN 3 forward 9:69044261-69044286; SaCas9
gagtccatttacataaagg

SEQ ID NO: 23436 - DNA, 18 bp, Artificial Sequence
  Synthetic: FXN 3 forward 9:69044262-69044286; SaCas9
agtccatttacataaagg

SEQ ID NO: 23437 - DNA, 25 bp, Artificial Sequence
  Synthetic: FXN 3 forward 9:69044257-69044288; SaCas9
gactgagtccatttacataaaggct

SEQ ID NO: 23438 - DNA, 24 bp, Artificial Sequence
  Synthetic: FXN 3 forward 9:69044258-69044288; SaCas9
actgagtccatttacataaaggct

SEQ ID NO: 23439 - DNA, 23 bp, Artificial Sequence
  Synthetic: FXN 3 forward 9:69044259-69044288; SaCas9
ctgagtccatttacataaaggct

SEQ ID NO: 23440 - DNA, 22 bp, Artificial Sequence
  Synthetic: FXN 3 forward 9:69044260-69044288; SaCas9
tgagtccatttacataaaggct

SEQ ID NO: 23441 - DNA, 21 bp, Artificial Sequence
  Synthetic: FXN 3 forward 9:69044261-69044288; SaCas9
gagtccatttacataaaggct

SEQ ID NO: 23442 - DNA, 20 bp, Artificial Sequence
  Synthetic: FXN 3 forward 9:69044262-69044288; SaCas9
agtccatttacataaaggct

SEQ ID NO: 23443 - DNA, 19 bp, Artificial Sequence
  Synthetic: FXN 3 forward 9:69044263-69044288; SaCas9
gtccatttacataaaggct

SEQ ID NO: 23444 - DNA, 18 bp, Artificial Sequence
  Synthetic: FXN 3 forward 9:69044264-69044288; SaCas9
tccatttacataaaggct

SEQ ID NO: 23445 - DNA, 25 bp, Artificial Sequence
  Synthetic: FXN 3 reverse 9:69044263-69044294; SaCas9
gacactgctctcagcctttatgtaa

SEQ ID NO: 23446 - DNA, 24 bp, Artificial Sequence
  Synthetic: FXN 3 reverse 9:69044264-69044294; SaCas9
acactgctctcagcctttatgtaa

SEQ ID NO: 23447 - DNA, 23 bp, Artificial Sequence
  Synthetic: FXN 3 reverse 9:69044265-69044294; SaCas9
cactgctctcagcctttatgtaa

SEQ ID NO: 23448 - DNA, 22 bp, Artificial Sequence
  Synthetic: FXN 3 reverse 9:69044266-69044294; SaCas9
actgctctcagcctttatgtaa

SEQ ID NO: 23449 - DNA, 21 bp, Artificial Sequence
  Synthetic: FXN 3 reverse 9:69044267-69044294; SaCas9
ctgctctcagcctttatgtaa

SEQ ID NO: 23450 - DNA, 20 bp, Artificial Sequence
  Synthetic: FXN 3 reverse 9:69044268-69044294; SaCas9
tgctctcagcctttatgtaa

SEQ ID NO: 23451 - DNA, 19 bp, Artificial Sequence
  Synthetic: FXN 3 reverse 9:69044269-69044294; SaCas9
gctctcagcctttatgtaa

SEQ ID NO: 23452 - DNA, 18 bp, Artificial Sequence
  Synthetic: FXN 3 reverse 9:69044270-69044294; SaCas9
ctctcagcctttatgtaa

SEQ ID NO: 23453 - DNA, 25 bp, Artificial Sequence
  Synthetic: FXN 3 forward 9:69044275-69044306; SaCas9
aaaggctgagagcagtgtcaagcag

SEQ ID NO: 23454 - DNA, 24 bp, Artificial Sequence
  Synthetic: FXN 3 forward 9:69044276-69044306; SaCas9
aaggctgagagcagtgtcaagcag

SEQ ID NO: 23455 - DNA, 23 bp, Artificial Sequence
  Synthetic: FXN 3 forward 9:69044277-69044306; SaCas9
aggctgagagcagtgtcaagcag

SEQ ID NO: 23456 - DNA, 22 bp, Artificial Sequence
  Synthetic: FXN 3 forward 9:69044278-69044306; SaCas9
ggctgagagcagtgtcaagcag

SEQ ID NO: 23457 - DNA, 21 bp, Artificial Sequence
  Synthetic: FXN 3 forward 9:69044279-69044306; SaCas9
gctgagagcagtgtcaagcag

SEQ ID NO: 23458 - DNA, 20 bp, Artificial Sequence
  Synthetic: FXN 3 forward 9:69044280-69044306; SaCas9
ctgagagcagtgtcaagcag

SEQ ID NO: 23459 - DNA, 19 bp, Artificial Sequence
  Synthetic: FXN 3 forward 9:69044281-69044306; SaCas9
tgagagcagtgtcaagcag

SEQ ID NO: 23460 - DNA, 18 bp, Artificial Sequence
  Synthetic: FXN 3 forward 9:69044282-69044306; SaCas9
gagagcagtgtcaagcag

SEQ ID NO: 23461 - DNA, 25 bp, Artificial Sequence
  Synthetic: FXN 3 forward 9:69044276-69044307; SaCas9
aaggctgagagcagtgtcaagcaga

SEQ ID NO: 23462 - DNA, 24 bp, Artificial Sequence
  Synthetic: FXN 3 forward 9:69044277-69044307; SaCas9
aggctgagagcagtgtcaagcaga

SEQ ID NO: 23463 - DNA, 23 bp, Artificial Sequence
  Synthetic: FXN 3 forward 9:69044278-69044307; SaCas9
ggctgagagcagtgtcaagcaga

SEQ ID NO: 23464 - DNA, 22 bp, Artificial Sequence
  Synthetic: FXN 3 forward 9:69044279-69044307; SaCas9
gctgagagcagtgtcaagcaga

SEQ ID NO: 23465 - DNA, 21 bp, Artificial Sequence
  Synthetic: FXN 3 forward 9:69044280-69044307; SaCas9
ctgagagcagtgtcaagcaga

SEQ ID NO: 23466 - DNA, 20 bp, Artificial Sequence
  Synthetic: FXN 3 forward 9:69044281-69044307; SaCas9
tgagagcagtgtcaagcaga

SEQ ID NO: 23467 - DNA, 19 bp, Artificial Sequence
  Synthetic: FXN 3 forward 9:69044282-69044307; SaCas9
gagagcagtgtcaagcaga

SEQ ID NO: 23468 - DNA, 18 bp, Artificial Sequence
  Synthetic: FXN 3 forward 9:69044283-69044307; SaCas9
agagcagtgtcaagcaga

SEQ ID NO: 23469 - DNA, 25 bp, Artificial Sequence
  Synthetic: FXN 3 forward 9:69044278-69044309; SaCas9
ggctgagagcagtgtcaagcagatg

SEQ ID NO: 23470 - DNA, 24 bp, Artificial Sequence
  Synthetic: FXN 3 forward 9:69044279-69044309; SaCas9
gctgagagcagtgtcaagcagatg

SEQ ID NO: 23471 - DNA, 23 bp, Artificial Sequence
  Synthetic: FXN 3 forward 9:69044280-69044309; SaCas9
ctgagagcagtgtcaagcagatg

SEQ ID NO: 23472 - DNA, 22 bp, Artificial Sequence
  Synthetic: FXN 3 forward 9:69044281-69044309; SaCas9
tgagagcagtgtcaagcagatg

SEQ ID NO: 23473 - DNA, 21 bp, Artificial Sequence
  Synthetic: FXN 3 forward 9:69044282-69044309; SaCas9
gagagcagtgtcaagcagatg

SEQ ID NO: 23474 - DNA, 20 bp, Artificial Sequence
  Synthetic: FXN 3 forward 9:69044283-69044309; SaCas9
agagcagtgtcaagcagatg

SEQ ID NO: 23475 - DNA, 19 bp, Artificial Sequence
  Synthetic: FXN 3 forward 9:69044284-69044309; SaCas9
gagcagtgtcaagcagatg

SEQ ID NO: 23476 - DNA, 18 bp, Artificial Sequence
  Synthetic: FXN 3 forward 9:69044285-69044309; SaCas9
agcagtgtcaagcagatg

SEQ ID NO: 23477 - DNA, 25 bp, Artificial Sequence
  Synthetic: FXN 3 forward 9:69044288-69044319; SaCas9
agtgtcaagcagatggagaacactg

SEQ ID NO: 23478 - DNA, 24 bp, Artificial Sequence
  Synthetic: FXN 3 forward 9:69044289-69044319; SaCas9
gtgtcaagcagatggagaacactg

SEQ ID NO: 23479 - DNA, 23 bp, Artificial Sequence
  Synthetic: FXN 3 forward 9:69044290-69044319; SaCas9
tgtcaagcagatggagaacactg

SEQ ID NO: 23480 - DNA, 22 bp, Artificial Sequence
  Synthetic: FXN 3 forward 9:69044291-69044319; SaCas9
gtcaagcagatggagaacactg

SEQ ID NO: 23481 - DNA, 21 bp, Artificial Sequence
  Synthetic: FXN 3 forward 9:69044292-69044319; SaCas9
tcaagcagatggagaacactg

SEQ ID NO: 23482 - DNA, 20 bp, Artificial Sequence
  Synthetic: FXN 3 forward 9:69044293-69044319; SaCas9
caagcagatggagaacactg

SEQ ID NO: 23483 - DNA, 19 bp, Artificial Sequence
  Synthetic: FXN 3 forward 9:69044294-69044319; SaCas9
aagcagatggagaacactg

SEQ ID NO: 23484 - DNA, 18 bp, Artificial Sequence
  Synthetic: FXN 3 forward 9:69044295-69044319; SaCas9
agcagatggagaacactg

SEQ ID NO: 23485 - DNA, 25 bp, Artificial Sequence
  Synthetic: FXN 3 reverse 9:69044327-69044358; SaCas9
agagggcagccatgataaccactgt

SEQ ID NO: 23486 - DNA, 24 bp, Artificial Sequence
  Synthetic: FXN 3 reverse 9:69044328-69044358; SaCas9
gagggcagccatgataaccactgt

SEQ ID NO: 23487 - DNA, 23 bp, Artificial Sequence
  Synthetic: FXN 3 reverse 9:69044329-69044358; SaCas9
agggcagccatgataaccactgt

SEQ ID NO: 23488 - DNA, 22 bp, Artificial Sequence
  Synthetic: FXN 3 reverse 9:69044330-69044358; SaCas9
gggcagccatgataaccactgt

SEQ ID NO: 23489 - DNA, 21 bp, Artificial Sequence
  Synthetic: FXN 3 reverse 9:69044331-69044358; SaCas9
ggcagccatgataaccactgt

SEQ ID NO: 23490 - DNA, 20 bp, Artificial Sequence
  Synthetic: FXN 3 reverse 9:69044332-69044358; SaCas9
gcagccatgataaccactgt

SEQ ID NO: 23491 - DNA, 19 bp, Artificial Sequence
  Synthetic: FXN 3 reverse 9:69044333-69044358; SaCas9
cagccatgataaccactgt

SEQ ID NO: 23492 - DNA, 18 bp, Artificial Sequence
  Synthetic: FXN 3 reverse 9:69044334-69044358; SaCas9
agccatgataaccactgt

SEQ ID NO: 23493 - DNA, 25 bp, Artificial Sequence
  Synthetic: FXN 3 forward 9:69044341-69044372; SaCas9
tatcatggctgccctctcacttctt

SEQ ID NO: 23494 - DNA, 24 bp, Artificial Sequence
  Synthetic: FXN 3 forward 9:69044342-69044372; SaCas9
atcatggctgccctctcacttctt

SEQ ID NO: 23495 - DNA, 23 bp, Artificial Sequence
  Synthetic: FXN 3 forward 9:69044343-69044372; SaCas9
tcatggctgccctctcacttctt

SEQ ID NO: 23496 - DNA, 22 bp, Artificial Sequence
  Synthetic: FXN 3 forward 9:69044344-69044372; SaCas9
catggctgccctctcacttctt

SEQ ID NO: 23497 - DNA, 21 bp, Artificial Sequence
  Synthetic: FXN 3 forward 9:69044345-69044372; SaCas9
atggctgccctctcacttctt

SEQ ID NO: 23498 - DNA, 20 bp, Artificial Sequence
  Synthetic: FXN 3 forward 9:69044346-69044372; SaCas9
tggctgccctctcacttctt

SEQ ID NO: 23499 - DNA, 19 bp, Artificial Sequence
  Synthetic: FXN 3 forward 9:69044347-69044372; SaCas9
ggctgccctctcacttctt

SEQ ID NO: 23500 - DNA, 18 bp, Artificial Sequence
  Synthetic: FXN 3 forward 9:69044348-69044372; SaCas9
gctgccctctcacttctt

SEQ ID NO: 23501 - DNA, 25 bp, Artificial Sequence
  Synthetic: FXN 3 reverse 9:69044351-69044382; SaCas9
gaaacacatgtctctgaagaagtga

SEQ ID NO: 23502 - DNA, 24 bp, Artificial Sequence
  Synthetic: FXN 3 reverse 9:69044352-69044382; SaCas9
aaacacatgtctctgaagaagtga

SEQ ID NO: 23503 - DNA, 23 bp, Artificial Sequence
  Synthetic: FXN 3 reverse 9:69044353-69044382; SaCas9
aacacatgtctctgaagaagtga

SEQ ID NO: 23504 - DNA, 22 bp, Artificial Sequence
  Synthetic: FXN 3 reverse 9:69044354-69044382; SaCas9
acacatgtctctgaagaagtga

SEQ ID NO: 23505 - DNA, 21 bp, Artificial Sequence
  Synthetic: FXN 3 reverse 9:69044355-69044382; SaCas9
cacatgtctctgaagaagtga

SEQ ID NO: 23506 - DNA, 20 bp, Artificial Sequence
  Synthetic: FXN 3 reverse 9:69044356-69044382; SaCas9
acatgtctctgaagaagtga

SEQ ID NO: 23507 - DNA, 19 bp, Artificial Sequence
  Synthetic: FXN 3 reverse 9:69044357-69044382; SaCas9
catgtctctgaagaagtga

SEQ ID NO: 23508 - DNA, 18 bp, Artificial Sequence
  Synthetic: FXN 3 reverse 9:69044358-69044382; SaCas9
atgtctctgaagaagtga

SEQ ID NO: 23509 - DNA, 25 bp, Artificial Sequence
  Synthetic: FXN 3 reverse 9:69044353-69044384; SaCas9
tagaaacacatgtctctgaagaagt

SEQ ID NO: 23510 - DNA, 24 bp, Artificial Sequence
  Synthetic: FXN 3 reverse 9:69044354-69044384; SaCas9
agaaacacatgtctctgaagaagt

SEQ ID NO: 23511 - DNA, 23 bp, Artificial Sequence
  Synthetic: FXN 3 reverse 9:69044355-69044384; SaCas9
gaaacacatgtctctgaagaagt

SEQ ID NO: 23512 - DNA, 22 bp, Artificial Sequence
  Synthetic: FXN 3 reverse 9:69044356-69044384; SaCas9
aaacacatgtctctgaagaagt

SEQ ID NO: 23513 - DNA, 21 bp, Artificial Sequence
  Synthetic: FXN 3 reverse 9:69044357-69044384; SaCas9
aacacatgtctctgaagaagt

SEQ ID NO: 23514 - DNA, 20 bp, Artificial Sequence
  Synthetic: FXN 3 reverse 9:69044358-69044384; SaCas9
acacatgtctctgaagaagt

SEQ ID NO: 23515 - DNA, 19 bp, Artificial Sequence
  Synthetic: FXN 3 reverse 9:69044359-69044384; SaCas9
cacatgtctctgaagaagt

SEQ ID NO: 23516 - DNA, 18 bp, Artificial Sequence
  Synthetic: FXN 3 reverse 9:69044360-69044384; SaCas9
acatgtctctgaagaagt

SEQ ID NO: 23517 - DNA, 25 bp, Artificial Sequence
  Synthetic: FXN 3 reverse 9:69044355-69044386; SaCas9
cttagaaacacatgtctctgaagaa

SEQ ID NO: 23518 - DNA, 24 bp, Artificial Sequence
  Synthetic: FXN 3 reverse 9:69044356-69044386; SaCas9
ttagaaacacatgtctctgaagaa

SEQ ID NO: 23519 - DNA, 23 bp, Artificial Sequence
  Synthetic: FXN 3 reverse 9:69044357-69044386; SaCas9
tagaaacacatgtctctgaagaa

SEQ ID NO: 23520 - DNA, 22 bp, Artificial Sequence
  Synthetic: FXN 3 reverse 9:69044358-69044386; SaCas9
agaaacacatgtctctgaagaa

SEQ ID NO: 23521 - DNA, 21 bp, Artificial Sequence
  Synthetic: FXN 3 reverse 9:69044359-69044386; SaCas9
gaaacacatgtctctgaagaa

SEQ ID NO: 23522 - DNA, 20 bp, Artificial Sequence
  Synthetic: FXN 3 reverse 9:69044360-69044386; SaCas9
aaacacatgtctctgaagaa

SEQ ID NO: 23523 - DNA, 19 bp, Artificial Sequence
  Synthetic: FXN 3 reverse 9:69044361-69044386; SaCas9
aacacatgtctctgaagaa

SEQ ID NO: 23524 - DNA, 18 bp, Artificial Sequence
  Synthetic: FXN 3 reverse 9:69044362-69044386; SaCas9
acacatgtctctgaagaa

SEQ ID NO: 23525 - DNA, 25 bp, Artificial Sequence
  Synthetic: FXN 3 reverse 9:69044360-69044391; SaCas9
cagaccttagaaacacatgtctctg

SEQ ID NO: 23526 - DNA, 24 bp, Artificial Sequence
  Synthetic: FXN 3 reverse 9:69044361-69044391; SaCas9
agaccttagaaacacatgtctctg

SEQ ID NO: 23527 - DNA, 23 bp, Artificial Sequence
  Synthetic: FXN 3 reverse 9:69044362-69044391; SaCas9
gaccttagaaacacatgtctctg

SEQ ID NO: 23528 - DNA, 22 bp, Artificial Sequence
  Synthetic: FXN 3 reverse 9:69044363-69044391; SaCas9
accttagaaacacatgtctctg

SEQ ID NO: 23529 - DNA, 21 bp, Artificial Sequence
  Synthetic: FXN 3 reverse 9:69044364-69044391; SaCas9
ccttagaaacacatgtctctg

SEQ ID NO: 23530 - DNA, 20 bp, Artificial Sequence
  Synthetic: FXN 3 reverse 9:69044365-69044391; SaCas9
cttagaaacacatgtctctg

SEQ ID NO: 23531 - DNA, 19 bp, Artificial Sequence
  Synthetic: FXN 3 reverse 9:69044366-69044391; SaCas9
ttagaaacacatgtctctg

SEQ ID NO: 23532 - DNA, 18 bp, Artificial Sequence
  Synthetic: FXN 3 reverse 9:69044367-69044391; SaCas9
tagaaacacatgtctctg

SEQ ID NO: 23533 - DNA, 25 bp, Artificial Sequence
  Synthetic: FXN 3 reverse 9:69044363-69044394; SaCas9
gtgcagaccttagaaacacatgtct

SEQ ID NO: 23534 - DNA, 24 bp, Artificial Sequence
  Synthetic: FXN 3 reverse 9:69044364-69044394; SaCas9
tgcagaccttagaaacacatgtct

SEQ ID NO: 23535 - DNA, 23 bp, Artificial Sequence
  Synthetic: FXN 3 reverse 9:69044365-69044394; SaCas9
gcagaccttagaaacacatgtct

SEQ ID NO: 23536 - DNA, 22 bp, Artificial Sequence
  Synthetic: FXN 3 reverse 9:69044366-69044394; SaCas9
cagaccttagaaacacatgtct

SEQ ID NO: 23537 - DNA, 21 bp, Artificial Sequence
  Synthetic: FXN 3 reverse 9:69044367-69044394; SaCas9
agaccttagaaacacatgtct

SEQ ID NO: 23538 - DNA, 20 bp, Artificial Sequence
  Synthetic: FXN 3 reverse 9:69044368-69044394; SaCas9
gaccttagaaacacatgtct

SEQ ID NO: 23539 - DNA, 19 bp, Artificial Sequence
  Synthetic: FXN 3 reverse 9:69044369-69044394; SaCas9
accttagaaacacatgtct

SEQ ID NO: 23540 - DNA, 18 bp, Artificial Sequence
  Synthetic: FXN 3 reverse 9:69044370-69044394; SaCas9
ccttagaaacacatgtct

SEQ ID NO: 23541 - DNA, 25 bp, Artificial Sequence
  Synthetic: FXN 3 reverse 9:69044378-69044409; SaCas9
ggagggtggggcagagtgcagacct

SEQ ID NO: 23542 - DNA, 24 bp, Artificial Sequence
  Synthetic: FXN 3 reverse 9:69044379-69044409; SaCas9
gagggtggggcagagtgcagacct

SEQ ID NO: 23543 - DNA, 23 bp, Artificial Sequence
  Synthetic: FXN 3 reverse 9:69044380-69044409; SaCas9
agggtggggcagagtgcagacct

SEQ ID NO: 23544 - DNA, 22 bp, Artificial Sequence
  Synthetic: FXN 3 reverse 9:69044381-69044409; SaCas9
gggtggggcagagtgcagacct

SEQ ID NO: 23545 - DNA, 21 bp, Artificial Sequence
  Synthetic: FXN 3 reverse 9:69044382-69044409; SaCas9
ggtggggcagagtgcagacct

SEQ ID NO: 23546 - DNA, 20 bp, Artificial Sequence
  Synthetic: FXN 3 reverse 9:69044383-69044409; SaCas9
gtggggcagagtgcagacct

SEQ ID NO: 23547 - DNA, 19 bp, Artificial Sequence
  Synthetic: FXN 3 reverse 9:69044384-69044409; SaCas9
tggggcagagtgcagacct

SEQ ID NO: 23548 - DNA, 18 bp, Artificial Sequence
  Synthetic: FXN 3 reverse 9:69044385-69044409; SaCas9
ggggcagagtgcagacct

SEQ ID NO: 23549 - DNA, 25 bp, Artificial Sequence
  Synthetic: FXN 3 reverse 9:69044392-69044423; SaCas9
gggacagtggatggggagggtgggg

SEQ ID NO: 23550 - DNA, 24 bp, Artificial Sequence
  Synthetic: FXN 3 reverse 9:69044393-69044423; SaCas9
ggacagtggatggggagggtgggg

SEQ ID NO: 23551 - DNA, 23 bp, Artificial Sequence
  Synthetic: FXN 3 reverse 9:69044394-69044423; SaCas9
gacagtggatggggagggtgggg

SEQ ID NO: 23552 - DNA, 22 bp, Artificial Sequence
  Synthetic: FXN 3 reverse 9:69044395-69044423; SaCas9
acagtggatggggagggtgggg

SEQ ID NO: 23553 - DNA, 21 bp, Artificial Sequence
  Synthetic: FXN 3 reverse 9:69044396-69044423; SaCas9
cagtggatggggagggtgggg

SEQ ID NO: 23554 - DNA, 20 bp, Artificial Sequence
  Synthetic: FXN 3 reverse 9:69044397-69044423; SaCas9
agtggatggggagggtgggg

SEQ ID NO: 23555 - DNA, 19 bp, Artificial Sequence
  Synthetic: FXN 3 reverse 9:69044398-69044423; SaCas9
gtggatggggagggtgggg

SEQ ID NO: 23556 - DNA, 18 bp, Artificial Sequence
  Synthetic: FXN 3 reverse 9:69044399-69044423; SaCas9
tggatggggagggtgggg

SEQ ID NO: 23557 - DNA, 25 bp, Artificial Sequence
  Synthetic: FXN 3 reverse 9:69044397-69044428; SaCas9
gctgggggacagtggatggggaggg

SEQ ID NO: 23558 - DNA, 24 bp, Artificial Sequence
  Synthetic: FXN 3 reverse 9:69044398-69044428; SaCas9
ctgggggacagtggatggggaggg

SEQ ID NO: 23559 - DNA, 23 bp, Artificial Sequence
  Synthetic: FXN 3 reverse 9:69044399-69044428; SaCas9
tgggggacagtggatggggaggg

SEQ ID NO: 23560 - DNA, 22 bp, Artificial Sequence
  Synthetic: FXN 3 reverse 9:69044400-69044428; SaCas9
gggggacagtggatggggaggg

SEQ ID NO: 23561 - DNA, 21 bp, Artificial Sequence
  Synthetic: FXN 3 reverse 9:69044401-69044428; SaCas9
ggggacagtggatggggaggg

SEQ ID NO: 23562 - DNA, 20 bp, Artificial Sequence
  Synthetic: FXN 3 reverse 9:69044402-69044428; SaCas9
gggacagtggatggggaggg

SEQ ID NO: 23563 - DNA, 19 bp, Artificial Sequence
  Synthetic: FXN 3 reverse 9:69044403-69044428; SaCas9
ggacagtggatggggaggg

SEQ ID NO: 23564 - DNA, 18 bp, Artificial Sequence
  Synthetic: FXN 3 reverse 9:69044404-69044428; SaCas9
gacagtggatggggaggg

SEQ ID NO: 23565 - DNA, 25 bp, Artificial Sequence
  Synthetic: FXN 3 reverse 9:69044398-69044429; SaCas9
ggctgggggacagtggatggggagg

SEQ ID NO: 23566 - DNA, 24 bp, Artificial Sequence
  Synthetic: FXN 3 reverse 9:69044399-69044429; SaCas9
gctgggggacagtggatggggagg

SEQ ID NO: 23567 - DNA, 23 bp, Artificial Sequence
  Synthetic: FXN 3 reverse 9:69044400-69044429; SaCas9
ctgggggacagtggatggggagg

SEQ ID NO: 23568 - DNA, 22 bp, Artificial Sequence
  Synthetic: FXN 3 reverse 9:69044401-69044429; SaCas9
tgggggacagtggatggggagg

SEQ ID NO: 23569 - DNA, 21 bp, Artificial Sequence
  Synthetic: FXN 3 reverse 9:69044402-69044429; SaCas9
gggggacagtggatggggagg

SEQ ID NO: 23570 - DNA, 20 bp, Artificial Sequence
  Synthetic: FXN 3 reverse 9:69044403-69044429; SaCas9
ggggacagtggatggggagg

SEQ ID NO: 23571 - DNA, 19 bp, Artificial Sequence
  Synthetic: FXN 3 reverse 9:69044404-69044429; SaCas9
gggacagtggatggggagg

SEQ ID NO: 23572 - DNA, 18 bp, Artificial Sequence
  Synthetic: FXN 3 reverse 9:69044405-69044429; SaCas9
ggacagtggatggggagg

SEQ ID NO: 23573 - DNA, 25 bp, Artificial Sequence
  Synthetic: FXN 3 reverse 9:69044402-69044433; SaCas9
aacgggctgggggacagtggatggg

SEQ ID NO: 23574 - DNA, 24 bp, Artificial Sequence
  Synthetic: FXN 3 reverse 9:69044403-69044433; SaCas9
acgggctgggggacagtggatggg

SEQ ID NO: 23575 - DNA, 23 bp, Artificial Sequence
  Synthetic: FXN 3 reverse 9:69044404-69044433; SaCas9
cgggctgggggacagtggatggg

SEQ ID NO: 23576 - DNA, 22 bp, Artificial Sequence
  Synthetic: FXN 3 reverse 9:69044405-69044433; SaCas9
gggctgggggacagtggatggg

SEQ ID NO: 23577 - DNA, 21 bp, Artificial Sequence
  Synthetic: FXN 3 reverse 9:69044406-69044433; SaCas9
ggctgggggacagtggatggg

SEQ ID NO: 23578 - DNA, 20 bp, Artificial Sequence
  Synthetic: FXN 3 reverse 9:69044407-69044433; SaCas9
gctgggggacagtggatggg

SEQ ID NO: 23579 - DNA, 19 bp, Artificial Sequence
  Synthetic: FXN 3 reverse 9:69044408-69044433; SaCas9
ctgggggacagtggatggg

SEQ ID NO: 23580 - DNA, 18 bp, Artificial Sequence
  Synthetic: FXN 3 reverse 9:69044409-69044433; SaCas9
tgggggacagtggatggg

SEQ ID NO: 23581 - DNA, 25 bp, Artificial Sequence
  Synthetic: FXN 3 reverse 9:69044404-69044435; SaCas9
gaaacgggctgggggacagtggatg

SEQ ID NO: 23582 - DNA, 24 bp, Artificial Sequence
  Synthetic: FXN 3 reverse 9:69044405-69044435; SaCas9
aaacgggctgggggacagtggatg

SEQ ID NO: 23583 - DNA, 23 bp, Artificial Sequence
  Synthetic: FXN 3 reverse 9:69044406-69044435; SaCas9
aacgggctgggggacagtggatg

SEQ ID NO: 23584 - DNA, 22 bp, Artificial Sequence
  Synthetic: FXN 3 reverse 9:69044407-69044435; SaCas9
acgggctgggggacagtggatg

SEQ ID NO: 23585 - DNA, 21 bp, Artificial Sequence
  Synthetic: FXN 3 reverse 9:69044408-69044435; SaCas9
cgggctgggggacagtggatg

SEQ ID NO: 23586 - DNA, 20 bp, Artificial Sequence
  Synthetic: FXN 3 reverse 9:69044409-69044435; SaCas9
gggctgggggacagtggatg

SEQ ID NO: 23587 - DNA, 19 bp, Artificial Sequence
  Synthetic: FXN 3 reverse 9:69044410-69044435; SaCas9
ggctgggggacagtggatg

SEQ ID NO: 23588 - DNA, 18 bp, Artificial Sequence
  Synthetic: FXN 3 reverse 9:69044411-69044435; SaCas9
gctgggggacagtggatg

SEQ ID NO: 23589 - DNA, 25 bp, Artificial Sequence
  Synthetic: FXN 3 reverse 9:69044405-69044436; SaCas9
ggaaacgggctgggggacagtggat

SEQ ID NO: 23590 - DNA, 24 bp, Artificial Sequence
  Synthetic: FXN 3 reverse 9:69044406-69044436; SaCas9
gaaacgggctgggggacagtggat

SEQ ID NO: 23591 - DNA, 23 bp, Artificial Sequence
  Synthetic: FXN 3 reverse 9:69044407-69044436; SaCas9
aaacgggctgggggacagtggat

SEQ ID NO: 23592 - DNA, 22 bp, Artificial Sequence
  Synthetic: FXN 3 reverse 9:69044408-69044436; SaCas9
aacgggctgggggacagtggat

SEQ ID NO: 23593 - DNA, 21 bp, Artificial Sequence
  Synthetic: FXN 3 reverse 9:69044409-69044436; SaCas9
acgggctgggggacagtggat

SEQ ID NO: 23594 - DNA, 20 bp, Artificial Sequence
  Synthetic: FXN 3 reverse 9:69044410-69044436; SaCas9
cgggctgggggacagtggat

SEQ ID NO: 23595 - DNA, 19 bp, Artificial Sequence
  Synthetic: FXN 3 reverse 9:69044411-69044436; SaCas9
gggctgggggacagtggat

SEQ ID NO: 23596 - DNA, 18 bp, Artificial Sequence
  Synthetic: FXN 3 reverse 9:69044412-69044436; SaCas9
ggctgggggacagtggat

SEQ ID NO: 23597 - DNA, 25 bp, Artificial Sequence
  Synthetic: FXN 3 reverse 9:69044406-69044437; SaCas9
aggaaacgggctgggggacagtgga

SEQ ID NO: 23598 - DNA, 24 bp, Artificial Sequence
  Synthetic: FXN 3 reverse 9:69044407-69044437; SaCas9
ggaaacgggctgggggacagtgga

SEQ ID NO: 23599 - DNA, 23 bp, Artificial Sequence
  Synthetic: FXN 3 reverse 9:69044408-69044437; SaCas9
gaaacgggctgggggacagtgga

SEQ ID NO: 23600 - DNA, 22 bp, Artificial Sequence
  Synthetic: FXN 3 reverse 9:69044409-69044437; SaCas9
aaacgggctgggggacagtgga

SEQ ID NO: 23601 - DNA, 21 bp, Artificial Sequence
  Synthetic: FXN 3 reverse 9:69044410-69044437; SaCas9
aacgggctgggggacagtgga

SEQ ID NO: 23602 - DNA, 20 bp, Artificial Sequence
  Synthetic: FXN 3 reverse 9:69044411-69044437; SaCas9
acgggctgggggacagtgga

SEQ ID NO: 23603 - DNA, 19 bp, Artificial Sequence
  Synthetic: FXN 3 reverse 9:69044412-69044437; SaCas9
cgggctgggggacagtgga

SEQ ID NO: 23604 - DNA, 18 bp, Artificial Sequence
  Synthetic: FXN 3 reverse 9:69044413-69044437; SaCas9
gggctgggggacagtgga

SEQ ID NO: 23605 - DNA, 25 bp, Artificial Sequence
  Synthetic: FXN 3 reverse 9:69044407-69044438; SaCas9
gaggaaacgggctgggggacagtgg

SEQ ID NO: 23606 - DNA, 24 bp, Artificial Sequence
  Synthetic: FXN 3 reverse 9:69044408-69044438; SaCas9
aggaaacgggctgggggacagtgg

SEQ ID NO: 23607 - DNA, 23 bp, Artificial Sequence
  Synthetic: FXN 3 reverse 9:69044409-69044438; SaCas9
ggaaacgggctgggggacagtgg

SEQ ID NO: 23608 - DNA, 22 bp, Artificial Sequence
  Synthetic: FXN 3 reverse 9:69044410-69044438; SaCas9
gaaacgggctgggggacagtgg

SEQ ID NO: 23609 - DNA, 21 bp, Artificial Sequence
  Synthetic: FXN 3 reverse 9:69044411-69044438; SaCas9
aaacgggctgggggacagtgg

SEQ ID NO: 23610 - DNA, 20 bp, Artificial Sequence
  Synthetic: FXN 3 reverse 9:69044412-69044438; SaCas9
aacgggctgggggacagtgg

SEQ ID NO: 23611 - DNA, 19 bp, Artificial Sequence
  Synthetic: FXN 3 reverse 9:69044413-69044438; SaCas9
acgggctgggggacagtgg

SEQ ID NO: 23612 - DNA, 18 bp, Artificial Sequence
  Synthetic: FXN 3 reverse 9:69044414-69044438; SaCas9
cgggctgggggacagtgg

SEQ ID NO: 23613 - DNA, 25 bp, Artificial Sequence
  Synthetic: FXN 3 reverse 9:69044411-69044442; SaCas9
ggaggaggaaacgggctgggggaca

SEQ ID NO: 23614 - DNA, 24 bp, Artificial Sequence
  Synthetic: FXN 3 reverse 9:69044412-69044442; SaCas9
gaggaggaaacgggctgggggaca

SEQ ID NO: 23615 - DNA, 23 bp, Artificial Sequence
  Synthetic: FXN 3 reverse 9:69044413-69044442; SaCas9
aggaggaaacgggctgggggaca

SEQ ID NO: 23616 - DNA, 22 bp, Artificial Sequence
  Synthetic: FXN 3 reverse 9:69044414-69044442; SaCas9
ggaggaaacgggctgggggaca

SEQ ID NO: 23617 - DNA, 21 bp, Artificial Sequence
  Synthetic: FXN 3 reverse 9:69044415-69044442; SaCas9
gaggaaacgggctgggggaca

SEQ ID NO: 23618 - DNA, 20 bp, Artificial Sequence
  Synthetic: FXN 3 reverse 9:69044416-69044442; SaCas9
aggaaacgggctgggggaca

SEQ ID NO: 23619 - DNA, 19 bp, Artificial Sequence
  Synthetic: FXN 3 reverse 9:69044417-69044442; SaCas9
ggaaacgggctgggggaca

SEQ ID NO: 23620 - DNA, 18 bp, Artificial Sequence
  Synthetic: FXN 3 reverse 9:69044418-69044442; SaCas9
gaaacgggctgggggaca

SEQ ID NO: 23621 - DNA, 25 bp, Artificial Sequence
  Synthetic: FXN 3 reverse 9:69044418-69044449; SaCas9
agtaagtggaggaggaaacgggctg

SEQ ID NO: 23622 - DNA, 24 bp, Artificial Sequence
  Synthetic: FXN 3 reverse 9:69044419-69044449; SaCas9
gtaagtggaggaggaaacgggctg

SEQ ID NO: 23623 - DNA, 23 bp, Artificial Sequence
  Synthetic: FXN 3 reverse 9:69044420-69044449; SaCas9
taagtggaggaggaaacgggctg

SEQ ID NO: 23624 - DNA, 22 bp, Artificial Sequence
  Synthetic: FXN 3 reverse 9:69044421-69044449; SaCas9
aagtggaggaggaaacgggctg

SEQ ID NO: 23625 - DNA, 21 bp, Artificial Sequence
  Synthetic: FXN 3 reverse 9:69044422-69044449; SaCas9
agtggaggaggaaacgggctg

SEQ ID NO: 23626 - DNA, 20 bp, Artificial Sequence
  Synthetic: FXN 3 reverse 9:69044423-69044449; SaCas9
gtggaggaggaaacgggctg

SEQ ID NO: 23627 - DNA, 19 bp, Artificial Sequence
  Synthetic: FXN 3 reverse 9:69044424-69044449; SaCas9
tggaggaggaaacgggctg

SEQ ID NO: 23628 - DNA, 18 bp, Artificial Sequence
  Synthetic: FXN 3 reverse 9:69044425-69044449; SaCas9
ggaggaggaaacgggctg

SEQ ID NO: 23629 - DNA, 25 bp, Artificial Sequence
  Synthetic: FXN 3 reverse 9:69044419-69044450; SaCas9
aagtaagtggaggaggaaacgggct

SEQ ID NO: 23630 - DNA, 24 bp, Artificial Sequence
  Synthetic: FXN 3 reverse 9:69044420-69044450; SaCas9
agtaagtggaggaggaaacgggct

SEQ ID NO: 23631 - DNA, 23 bp, Artificial Sequence
  Synthetic: FXN 3 reverse 9:69044421-69044450; SaCas9
gtaagtggaggaggaaacgggct

SEQ ID NO: 23632 - DNA, 22 bp, Artificial Sequence
  Synthetic: FXN 3 reverse 9:69044422-69044450; SaCas9
taagtggaggaggaaacgggct

SEQ ID NO: 23633 - DNA, 21 bp, Artificial Sequence
  Synthetic: FXN 3 reverse 9:69044423-69044450; SaCas9
aagtggaggaggaaacgggct

SEQ ID NO: 23634 - DNA, 20 bp, Artificial Sequence
  Synthetic: FXN 3 reverse 9:69044424-69044450; SaCas9
agtggaggaggaaacgggct

SEQ ID NO: 23635 - DNA, 19 bp, Artificial Sequence
  Synthetic: FXN 3 reverse 9:69044425-69044450; SaCas9
gtggaggaggaaacgggct

SEQ ID NO: 23636 - DNA, 18 bp, Artificial Sequence
  Synthetic: FXN 3 reverse 9:69044426-69044450; SaCas9
tggaggaggaaacgggct

SEQ ID NO: 23637 - DNA, 25 bp, Artificial Sequence
  Synthetic: FXN 3 reverse 9:69044420-69044451; SaCas9
gaagtaagtggaggaggaaacgggc

SEQ ID NO: 23638 - DNA, 24 bp, Artificial Sequence
  Synthetic: FXN 3 reverse 9:69044421-69044451; SaCas9
aagtaagtggaggaggaaacgggc

SEQ ID NO: 23639 - DNA, 23 bp, Artificial Sequence
  Synthetic: FXN 3 reverse 9:69044422-69044451; SaCas9
agtaagtggaggaggaaacgggc

SEQ ID NO: 23640 - DNA, 22 bp, Artificial Sequence
  Synthetic: FXN 3 reverse 9:69044423-69044451; SaCas9
gtaagtggaggaggaaacgggc

SEQ ID NO: 23641 - DNA, 21 bp, Artificial Sequence
  Synthetic: FXN 3 reverse 9:69044424-69044451; SaCas9
taagtggaggaggaaacgggc

SEQ ID NO: 23642 - DNA, 20 bp, Artificial Sequence
  Synthetic: FXN 3 reverse 9:69044425-69044451; SaCas9
aagtggaggaggaaacgggc

SEQ ID NO: 23643 - DNA, 19 bp, Artificial Sequence
  Synthetic: FXN 3 reverse 9:69044426-69044451; SaCas9
agtggaggaggaaacgggc

SEQ ID NO: 23644 - DNA, 18 bp, Artificial Sequence
  Synthetic: FXN 3 reverse 9:69044427-69044451; SaCas9
gtggaggaggaaacgggc

SEQ ID NO: 23645 - DNA, 25 bp, Artificial Sequence
  Synthetic: FXN 3 reverse 9:69044421-69044452; SaCas9
ggaagtaagtggaggaggaaacggg

SEQ ID NO: 23646 - DNA, 24 bp, Artificial Sequence
  Synthetic: FXN 3 reverse 9:69044422-69044452; SaCas9
gaagtaagtggaggaggaaacggg

SEQ ID NO: 23647 - DNA, 23 bp, Artificial Sequence
  Synthetic: FXN 3 reverse 9:69044423-69044452; SaCas9
aagtaagtggaggaggaaacggg

SEQ ID NO: 23648 - DNA, 22 bp, Artificial Sequence
  Synthetic: FXN 3 reverse 9:69044424-69044452; SaCas9
agtaagtggaggaggaaacggg

SEQ ID NO: 23649 - DNA, 21 bp, Artificial Sequence
  Synthetic: FXN 3 reverse 9:69044425-69044452; SaCas9
gtaagtggaggaggaaacggg

SEQ ID NO: 23650 - DNA, 20 bp, Artificial Sequence
  Synthetic: FXN 3 reverse 9:69044426-69044452; SaCas9
taagtggaggaggaaacggg

SEQ ID NO: 23651 - DNA, 19 bp, Artificial Sequence
  Synthetic: FXN 3 reverse 9:69044427-69044452; SaCas9
aagtggaggaggaaacggg

SEQ ID NO: 23652 - DNA, 18 bp, Artificial Sequence
  Synthetic: FXN 3 reverse 9:69044428-69044452; SaCas9
agtggaggaggaaacggg

SEQ ID NO: 23653 - DNA, 25 bp, Artificial Sequence
  Synthetic: FXN 3 reverse 9:69044426-69044457; SaCas9
ggctgggaagtaagtggaggaggaa

SEQ ID NO: 23654 - DNA, 24 bp, Artificial Sequence
  Synthetic: FXN 3 reverse 9:69044427-69044457; SaCas9
gctgggaagtaagtggaggaggaa

SEQ ID NO: 23655 - DNA, 23 bp, Artificial Sequence
  Synthetic: FXN 3 reverse 9:69044428-69044457; SaCas9
ctgggaagtaagtggaggaggaa

SEQ ID NO: 23656 - DNA, 22 bp, Artificial Sequence
  Synthetic: FXN 3 reverse 9:69044429-69044457; SaCas9
tgggaagtaagtggaggaggaa

SEQ ID NO: 23657 - DNA, 21 bp, Artificial Sequence
  Synthetic: FXN 3 reverse 9:69044430-69044457; SaCas9
gggaagtaagtggaggaggaa

SEQ ID NO: 23658 - DNA, 20 bp, Artificial Sequence
  Synthetic: FXN 3 reverse 9:69044431-69044457; SaCas9
ggaagtaagtggaggaggaa

SEQ ID NO: 23659 - DNA, 19 bp, Artificial Sequence
  Synthetic: FXN 3 reverse 9:69044432-69044457; SaCas9
gaagtaagtggaggaggaa

SEQ ID NO: 23660 - DNA, 18 bp, Artificial Sequence
  Synthetic: FXN 3 reverse 9:69044433-69044457; SaCas9
aagtaagtggaggaggaa

SEQ ID NO: 23661 - DNA, 25 bp, Artificial Sequence
  Synthetic: FXN 3 reverse 9:69044431-69044462; SaCas9
cacagggctgggaagtaagtggagg

SEQ ID NO: 23662 - DNA, 24 bp, Artificial Sequence
  Synthetic: FXN 3 reverse 9:69044432-69044462; SaCas9
acagggctgggaagtaagtggagg

SEQ ID NO: 23663 - DNA, 23 bp, Artificial Sequence
  Synthetic: FXN 3 reverse 9:69044433-69044462; SaCas9
cagggctgggaagtaagtggagg

SEQ ID NO: 23664 - DNA, 22 bp, Artificial Sequence
  Synthetic: FXN 3 reverse 9:69044434-69044462; SaCas9
agggctgggaagtaagtggagg

SEQ ID NO: 23665 - DNA, 21 bp, Artificial Sequence
  Synthetic: FXN 3 reverse 9:69044435-69044462; SaCas9
gggctgggaagtaagtggagg

SEQ ID NO: 23666 - DNA, 20 bp, Artificial Sequence
  Synthetic: FXN 3 reverse 9:69044436-69044462; SaCas9
ggctgggaagtaagtggagg

SEQ ID NO: 23667 - DNA, 19 bp, Artificial Sequence
  Synthetic: FXN 3 reverse 9:69044437-69044462; SaCas9
gctgggaagtaagtggagg

SEQ ID NO: 23668 - DNA, 18 bp, Artificial Sequence
  Synthetic: FXN 3 reverse 9:69044438-69044462; SaCas9
ctgggaagtaagtggagg

SEQ ID NO: 23669 - DNA, 25 bp, Artificial Sequence
  Synthetic: FXN 3 reverse 9:69044432-69044463; SaCas9
gcacagggctgggaagtaagtggag

SEQ ID NO: 23670 - DNA, 24 bp, Artificial Sequence
  Synthetic: FXN 3 reverse 9:69044433-69044463; SaCas9
cacagggctgggaagtaagtggag

SEQ ID NO: 23671 - DNA, 23 bp, Artificial Sequence
  Synthetic: FXN 3 reverse 9:69044434-69044463; SaCas9
acagggctgggaagtaagtggag

SEQ ID NO: 23672 - DNA, 22 bp, Artificial Sequence
  Synthetic: FXN 3 reverse 9:69044435-69044463; SaCas9
cagggctgggaagtaagtggag

SEQ ID NO: 23673 - DNA, 21 bp, Artificial Sequence
  Synthetic: FXN 3 reverse 9:69044436-69044463; SaCas9
agggctgggaagtaagtggag

SEQ ID NO: 23674 - DNA, 20 bp, Artificial Sequence
  Synthetic: FXN 3 reverse 9:69044437-69044463; SaCas9
gggctgggaagtaagtggag

SEQ ID NO: 23675 - DNA, 19 bp, Artificial Sequence
  Synthetic: FXN 3 reverse 9:69044438-69044463; SaCas9
ggctgggaagtaagtggag

SEQ ID NO: 23676 - DNA, 18 bp, Artificial Sequence
  Synthetic: FXN 3 reverse 9:69044439-69044463; SaCas9
gctgggaagtaagtggag

SEQ ID NO: 23677 - DNA, 25 bp, Artificial Sequence
  Synthetic: FXN 3 reverse 9:69044434-69044465; SaCas9
aggcacagggctgggaagtaagtgg

SEQ ID NO: 23678 - DNA, 24 bp, Artificial Sequence
  Synthetic: FXN 3 reverse 9:69044435-69044465; SaCas9
ggcacagggctgggaagtaagtgg

SEQ ID NO: 23679 - DNA, 23 bp, Artificial Sequence
  Synthetic: FXN 3 reverse 9:69044436-69044465; SaCas9
gcacagggctgggaagtaagtgg

SEQ ID NO: 23680 - DNA, 22 bp, Artificial Sequence
  Synthetic: FXN 3 reverse 9:69044437-69044465; SaCas9
cacagggctgggaagtaagtgg

SEQ ID NO: 23681 - DNA, 21 bp, Artificial Sequence
  Synthetic: FXN 3 reverse 9:69044438-69044465; SaCas9
acagggctgggaagtaagtgg

SEQ ID NO: 23682 - DNA, 20 bp, Artificial Sequence
  Synthetic: FXN 3 reverse 9:69044439-69044465; SaCas9
cagggctgggaagtaagtgg

SEQ ID NO: 23683 - DNA, 19 bp, Artificial Sequence
  Synthetic: FXN 3 reverse 9:69044440-69044465; SaCas9
agggctgggaagtaagtgg

SEQ ID NO: 23684 - DNA, 18 bp, Artificial Sequence
  Synthetic: FXN 3 reverse 9:69044441-69044465; SaCas9
gggctgggaagtaagtgg

SEQ ID NO: 23685 - DNA, 25 bp, Artificial Sequence
  Synthetic: FXN 3 reverse 9:69044435-69044466; SaCas9
aaggcacagggctgggaagtaagtg

SEQ ID NO: 23686 - DNA, 24 bp, Artificial Sequence
  Synthetic: FXN 3 reverse 9:69044436-69044466; SaCas9
aggcacagggctgggaagtaagtg

SEQ ID NO: 23687 - DNA, 23 bp, Artificial Sequence
  Synthetic: FXN 3 reverse 9:69044437-69044466; SaCas9
ggcacagggctgggaagtaagtg

SEQ ID NO: 23688 - DNA, 22 bp, Artificial Sequence
  Synthetic: FXN 3 reverse 9:69044438-69044466; SaCas9
gcacagggctgggaagtaagtg

SEQ ID NO: 23689 - DNA, 21 bp, Artificial Sequence
  Synthetic: FXN 3 reverse 9:69044439-69044466; SaCas9
cacagggctgggaagtaagtg

SEQ ID NO: 23690 - DNA, 20 bp, Artificial Sequence
  Synthetic: FXN 3 reverse 9:69044440-69044466; SaCas9
acagggctgggaagtaagtg

SEQ ID NO: 23691 - DNA, 19 bp, Artificial Sequence
  Synthetic: FXN 3 reverse 9:69044441-69044466; SaCas9
cagggctgggaagtaagtg

SEQ ID NO: 23692 - DNA, 18 bp, Artificial Sequence
  Synthetic: FXN 3 reverse 9:69044442-69044466; SaCas9
agggctgggaagtaagtg

SEQ ID NO: 23693 - DNA, 25 bp, Artificial Sequence
  Synthetic: FXN 3 reverse 9:69044437-69044468; SaCas9
agaaggcacagggctgggaagtaag

SEQ ID NO: 23694 - DNA, 24 bp, Artificial Sequence
  Synthetic: FXN 3 reverse 9:69044438-69044468; SaCas9
gaaggcacagggctgggaagtaag

SEQ ID NO: 23695 - DNA, 23 bp, Artificial Sequence
  Synthetic: FXN 3 reverse 9:69044439-69044468; SaCas9
aaggcacagggctgggaagtaag

SEQ ID NO: 23696 - DNA, 22 bp, Artificial Sequence
  Synthetic: FXN 3 reverse 9:69044440-69044468; SaCas9
aggcacagggctgggaagtaag

SEQ ID NO: 23697 - DNA, 21 bp, Artificial Sequence
  Synthetic: FXN 3 reverse 9:69044441-69044468; SaCas9
ggcacagggctgggaagtaag

SEQ ID NO: 23698 - DNA, 20 bp, Artificial Sequence
  Synthetic: FXN 3 reverse 9:69044442-69044468; SaCas9
gcacagggctgggaagtaag

SEQ ID NO: 23699 - DNA, 19 bp, Artificial Sequence
  Synthetic: FXN 3 reverse 9:69044443-69044468; SaCas9
cacagggctgggaagtaag

SEQ ID NO: 23700 - DNA, 18 bp, Artificial Sequence
  Synthetic: FXN 3 reverse 9:69044444-69044468; SaCas9
acagggctgggaagtaag

SEQ ID NO: 23701 - DNA, 25 bp, Artificial Sequence
  Synthetic: FXN 3 reverse 9:69044438-69044469; SaCas9
cagaaggcacagggctgggaagtaa

SEQ ID NO: 23702 - DNA, 24 bp, Artificial Sequence
  Synthetic: FXN 3 reverse 9:69044439-69044469; SaCas9
agaaggcacagggctgggaagtaa

SEQ ID NO: 23703 - DNA, 23 bp, Artificial Sequence
  Synthetic: FXN 3 reverse 9:69044440-69044469; SaCas9
gaaggcacagggctgggaagtaa

SEQ ID NO: 23704 - DNA, 22 bp, Artificial Sequence
  Synthetic: FXN 3 reverse 9:69044441-69044469; SaCas9
aaggcacagggctgggaagtaa

SEQ ID NO: 23705 - DNA, 21 bp, Artificial Sequence
  Synthetic: FXN 3 reverse 9:69044442-69044469; SaCas9
aggcacagggctgggaagtaa

SEQ ID NO: 23706 - DNA, 20 bp, Artificial Sequence
  Synthetic: FXN 3 reverse 9:69044443-69044469; SaCas9
ggcacagggctgggaagtaa

SEQ ID NO: 23707 - DNA, 19 bp, Artificial Sequence
  Synthetic: FXN 3 reverse 9:69044444-69044469; SaCas9
gcacagggctgggaagtaa

SEQ ID NO: 23708 - DNA, 18 bp, Artificial Sequence
  Synthetic: FXN 3 reverse 9:69044445-69044469; SaCas9
cacagggctgggaagtaa

SEQ ID NO: 23709 - DNA, 25 bp, Artificial Sequence
  Synthetic: FXN 3 reverse 9:69044447-69044478; SaCas9
aagagaaggcagaaggcacagggct

SEQ ID NO: 23710 - DNA, 24 bp, Artificial Sequence
  Synthetic: FXN 3 reverse 9:69044448-69044478; SaCas9
agagaaggcagaaggcacagggct

SEQ ID NO: 23711 - DNA, 23 bp, Artificial Sequence
  Synthetic: FXN 3 reverse 9:69044449-69044478; SaCas9
gagaaggcagaaggcacagggct

SEQ ID NO: 23712 - DNA, 22 bp, Artificial Sequence
  Synthetic: FXN 3 reverse 9:69044450-69044478; SaCas9
agaaggcagaaggcacagggct

SEQ ID NO: 23713 - DNA, 21 bp, Artificial Sequence
  Synthetic: FXN 3 reverse 9:69044451-69044478; SaCas9
gaaggcagaaggcacagggct

SEQ ID NO: 23714 - DNA, 20 bp, Artificial Sequence
  Synthetic: FXN 3 reverse 9:69044452-69044478; SaCas9
aaggcagaaggcacagggct

SEQ ID NO: 23715 - DNA, 19 bp, Artificial Sequence
  Synthetic: FXN 3 reverse 9:69044453-69044478; SaCas9
aggcagaaggcacagggct

SEQ ID NO: 23716 - DNA, 18 bp, Artificial Sequence
  Synthetic: FXN 3 reverse 9:69044454-69044478; SaCas9
ggcagaaggcacagggct

SEQ ID NO: 23717 - DNA, 25 bp, Artificial Sequence
  Synthetic: FXN 3 reverse 9:69044448-69044479; SaCas9
aaagagaaggcagaaggcacagggc

SEQ ID NO: 23718 - DNA, 24 bp, Artificial Sequence
  Synthetic: FXN 3 reverse 9:69044449-69044479; SaCas9
aagagaaggcagaaggcacagggc

SEQ ID NO: 23719 - DNA, 23 bp, Artificial Sequence
  Synthetic: FXN 3 reverse 9:69044450-69044479; SaCas9
agagaaggcagaaggcacagggc

SEQ ID NO: 23720 - DNA, 22 bp, Artificial Sequence
  Synthetic: FXN 3 reverse 9:69044451-69044479; SaCas9
gagaaggcagaaggcacagggc

SEQ ID NO: 23721 - DNA, 21 bp, Artificial Sequence
  Synthetic: FXN 3 reverse 9:69044452-69044479; SaCas9
agaaggcagaaggcacagggc

SEQ ID NO: 23722 - DNA, 20 bp, Artificial Sequence
  Synthetic: FXN 3 reverse 9:69044453-69044479; SaCas9
gaaggcagaaggcacagggc

SEQ ID NO: 23723 - DNA, 19 bp, Artificial Sequence
  Synthetic: FXN 3 reverse 9:69044454-69044479; SaCas9
aaggcagaaggcacagggc

SEQ ID NO: 23724 - DNA, 18 bp, Artificial Sequence
  Synthetic: FXN 3 reverse 9:69044455-69044479; SaCas9
aggcagaaggcacagggc

SEQ ID NO: 23725 - DNA, 25 bp, Artificial Sequence
  Synthetic: FXN 3 reverse 9:69044449-69044480; SaCas9
aaaagagaaggcagaaggcacaggg

SEQ ID NO: 23726 - DNA, 24 bp, Artificial Sequence
  Synthetic: FXN 3 reverse 9:69044450-69044480; SaCas9
aaagagaaggcagaaggcacaggg

SEQ ID NO: 23727 - DNA, 23 bp, Artificial Sequence
  Synthetic: FXN 3 reverse 9:69044451-69044480; SaCas9
aagagaaggcagaaggcacaggg

SEQ ID NO: 23728 - DNA, 22 bp, Artificial Sequence
  Synthetic: FXN 3 reverse 9:69044452-69044480; SaCas9
agagaaggcagaaggcacaggg

SEQ ID NO: 23729 - DNA, 21 bp, Artificial Sequence
  Synthetic: FXN 3 reverse 9:69044453-69044480; SaCas9
gagaaggcagaaggcacaggg

SEQ ID NO: 23730 - DNA, 20 bp, Artificial Sequence
  Synthetic: FXN 3 reverse 9:69044454-69044480; SaCas9
agaaggcagaaggcacaggg

SEQ ID NO: 23731 - DNA, 19 bp, Artificial Sequence
  Synthetic: FXN 3 reverse 9:69044455-69044480; SaCas9
gaaggcagaaggcacaggg

SEQ ID NO: 23732 - DNA, 18 bp, Artificial Sequence
  Synthetic: FXN 3 reverse 9:69044456-69044480; SaCas9
aaggcagaaggcacaggg

SEQ ID NO: 23733 - DNA, 25 bp, Artificial Sequence
  Synthetic: FXN 3 reverse 9:69044454-69044485; SaCas9
ctcagaaaagagaaggcagaaggca

SEQ ID NO: 23734 - DNA, 24 bp, Artificial Sequence
  Synthetic: FXN 3 reverse 9:69044455-69044485; SaCas9
tcagaaaagagaaggcagaaggca

SEQ ID NO: 23735 - DNA, 23 bp, Artificial Sequence
  Synthetic: FXN 3 reverse 9:69044456-69044485; SaCas9
cagaaaagagaaggcagaaggca

SEQ ID NO: 23736 - DNA, 22 bp, Artificial Sequence
  Synthetic: FXN 3 reverse 9:69044457-69044485; SaCas9
agaaaagagaaggcagaaggca

SEQ ID NO: 23737 - DNA, 21 bp, Artificial Sequence
  Synthetic: FXN 3 reverse 9:69044458-69044485; SaCas9
gaaaagagaaggcagaaggca

SEQ ID NO: 23738 - DNA, 20 bp, Artificial Sequence
  Synthetic: FXN 3 reverse 9:69044459-69044485; SaCas9
aaaagagaaggcagaaggca

SEQ ID NO: 23739 - DNA, 19 bp, Artificial Sequence
  Synthetic: FXN 3 reverse 9:69044460-69044485; SaCas9
aaagagaaggcagaaggca

SEQ ID NO: 23740 - DNA, 18 bp, Artificial Sequence
  Synthetic: FXN 3 reverse 9:69044461-69044485; SaCas9
aagagaaggcagaaggca

SEQ ID NO: 23741 - DNA, 25 bp, Artificial Sequence
  Synthetic: FXN 3 forward 9:69044455-69044486; SaCas9
ccctgtgccttctgccttctctttt

SEQ ID NO: 23742 - DNA, 24 bp, Artificial Sequence
  Synthetic: FXN 3 forward 9:69044456-69044486; SaCas9
cctgtgccttctgccttctctttt

SEQ ID NO: 23743 - DNA, 23 bp, Artificial Sequence
  Synthetic: FXN 3 forward 9:69044457-69044486; SaCas9
ctgtgccttctgccttctctttt

SEQ ID NO: 23744 - DNA, 22 bp, Artificial Sequence
  Synthetic: FXN 3 forward 9:69044458-69044486; SaCas9
tgtgccttctgccttctctttt

SEQ ID NO: 23745 - DNA, 21 bp, Artificial Sequence
  Synthetic: FXN 3 forward 9:69044459-69044486; SaCas9
gtgccttctgccttctctttt

SEQ ID NO: 23746 - DNA, 20 bp, Artificial Sequence
  Synthetic: FXN 3 forward 9:69044460-69044486; SaCas9
tgccttctgccttctctttt

SEQ ID NO: 23747 - DNA, 19 bp, Artificial Sequence
  Synthetic: FXN 3 forward 9:69044461-69044486; SaCas9
gccttctgccttctctttt

SEQ ID NO: 23748 - DNA, 18 bp, Artificial Sequence
  Synthetic: FXN 3 forward 9:69044462-69044486; SaCas9
ccttctgccttctctttt

SEQ ID NO: 23749 - DNA, 25 bp, Artificial Sequence
  Synthetic: FXN 3 reverse 9:69044463-69044494; SaCas9
cttagcaaactcagaaaagagaagg

SEQ ID NO: 23750 - DNA, 24 bp, Artificial Sequence
  Synthetic: FXN 3 reverse 9:69044464-69044494; SaCas9
ttagcaaactcagaaaagagaagg

SEQ ID NO: 23751 - DNA, 23 bp, Artificial Sequence
  Synthetic: FXN 3 reverse 9:69044465-69044494; SaCas9
tagcaaactcagaaaagagaagg

SEQ ID NO: 23752 - DNA, 22 bp, Artificial Sequence
  Synthetic: FXN 3 reverse 9:69044466-69044494; SaCas9
agcaaactcagaaaagagaagg

SEQ ID NO: 23753 - DNA, 21 bp, Artificial Sequence
  Synthetic: FXN 3 reverse 9:69044467-69044494; SaCas9
gcaaactcagaaaagagaagg

SEQ ID NO: 23754 - DNA, 20 bp, Artificial Sequence
  Synthetic: FXN 3 reverse 9:69044468-69044494; SaCas9
caaactcagaaaagagaagg

SEQ ID NO: 23755 - DNA, 19 bp, Artificial Sequence
  Synthetic: FXN 3 reverse 9:69044469-69044494; SaCas9
aaactcagaaaagagaagg

SEQ ID NO: 23756 - DNA, 18 bp, Artificial Sequence
  Synthetic: FXN 3 reverse 9:69044470-69044494; SaCas9
aactcagaaaagagaagg

SEQ ID NO: 23757 - DNA, 25 bp, Artificial Sequence
  Synthetic: FXN 3 forward 9:69044466-69044497; SaCas9
ctgccttctcttttctgagtttgct

SEQ ID NO: 23758 - DNA, 24 bp, Artificial Sequence
  Synthetic: FXN 3 forward 9:69044467-69044497; SaCas9
tgccttctcttttctgagtttgct

SEQ ID NO: 23759 - DNA, 23 bp, Artificial Sequence
  Synthetic: FXN 3 forward 9:69044468-69044497; SaCas9
gccttctcttttctgagtttgct

SEQ ID NO: 23760 - DNA, 22 bp, Artificial Sequence
  Synthetic: FXN 3 forward 9:69044469-69044497; SaCas9
ccttctcttttctgagtttgct

SEQ ID NO: 23761 - DNA, 21 bp, Artificial Sequence
  Synthetic: FXN 3 forward 9:69044470-69044497; SaCas9
cttctcttttctgagtttgct

SEQ ID NO: 23762 - DNA, 20 bp, Artificial Sequence
  Synthetic: FXN 3 forward 9:69044471-69044497; SaCas9
ttctcttttctgagtttgct

SEQ ID NO: 23763 - DNA, 19 bp, Artificial Sequence
  Synthetic: FXN 3 forward 9:69044472-69044497; SaCas9
tctcttttctgagtttgct

SEQ ID NO: 23764 - DNA, 18 bp, Artificial Sequence
  Synthetic: FXN 3 forward 9:69044473-69044497; SaCas9
ctcttttctgagtttgct

SEQ ID NO: 23765 - DNA, 25 bp, Artificial Sequence
  Synthetic: FXN 3 reverse 9:69044470-69044501; SaCas9
cagtgcccttagcaaactcagaaaa

SEQ ID NO: 23766 - DNA, 24 bp, Artificial Sequence
  Synthetic: FXN 3 reverse 9:69044471-69044501; SaCas9
agtgcccttagcaaactcagaaaa

SEQ ID NO: 23767 - DNA, 23 bp, Artificial Sequence
  Synthetic: FXN 3 reverse 9:69044472-69044501; SaCas9
gtgcccttagcaaactcagaaaa

SEQ ID NO: 23768 - DNA, 22 bp, Artificial Sequence
  Synthetic: FXN 3 reverse 9:69044473-69044501; SaCas9
tgcccttagcaaactcagaaaa

SEQ ID NO: 23769 - DNA, 21 bp, Artificial Sequence
  Synthetic: FXN 3 reverse 9:69044474-69044501; SaCas9
gcccttagcaaactcagaaaa

SEQ ID NO: 23770 - DNA, 20 bp, Artificial Sequence
  Synthetic: FXN 3 reverse 9:69044475-69044501; SaCas9
cccttagcaaactcagaaaa

SEQ ID NO: 23771 - DNA, 19 bp, Artificial Sequence
  Synthetic: FXN 3 reverse 9:69044476-69044501; SaCas9
ccttagcaaactcagaaaa

SEQ ID NO: 23772 - DNA, 18 bp, Artificial Sequence
  Synthetic: FXN 3 reverse 9:69044477-69044501; SaCas9
cttagcaaactcagaaaa

SEQ ID NO: 23773 - DNA, 25 bp, Artificial Sequence
  Synthetic: FXN 3 reverse 9:69044472-69044503; SaCas9
agcagtgcccttagcaaactcagaa

SEQ ID NO: 23774 - DNA, 24 bp, Artificial Sequence
  Synthetic: FXN 3 reverse 9:69044473-69044503; SaCas9
gcagtgcccttagcaaactcagaa

SEQ ID NO: 23775 - DNA, 23 bp, Artificial Sequence
  Synthetic: FXN 3 reverse 9:69044474-69044503; SaCas9
cagtgcccttagcaaactcagaa

SEQ ID NO: 23776 - DNA, 22 bp, Artificial Sequence
  Synthetic: FXN 3 reverse 9:69044475-69044503; SaCas9
agtgcccttagcaaactcagaa

SEQ ID NO: 23777 - DNA, 21 bp, Artificial Sequence
  Synthetic: FXN 3 reverse 9:69044476-69044503; SaCas9
gtgcccttagcaaactcagaa

SEQ ID NO: 23778 - DNA, 20 bp, Artificial Sequence
  Synthetic: FXN 3 reverse 9:69044477-69044503; SaCas9
tgcccttagcaaactcagaa

SEQ ID NO: 23779 - DNA, 19 bp, Artificial Sequence
  Synthetic: FXN 3 reverse 9:69044478-69044503; SaCas9
gcccttagcaaactcagaa

SEQ ID NO: 23780 - DNA, 18 bp, Artificial Sequence
  Synthetic: FXN 3 reverse 9:69044479-69044503; SaCas9
cccttagcaaactcagaa

SEQ ID NO: 23781 - DNA, 25 bp, Artificial Sequence
  Synthetic: FXN 3 reverse 9:69044477-69044508; SaCas9
gagccagcagtgcccttagcaaact

SEQ ID NO: 23782 - DNA, 24 bp, Artificial Sequence
  Synthetic: FXN 3 reverse 9:69044478-69044508; SaCas9
agccagcagtgcccttagcaaact

SEQ ID NO: 23783 - DNA, 23 bp, Artificial Sequence
  Synthetic: FXN 3 reverse 9:69044479-69044508; SaCas9
gccagcagtgcccttagcaaact

SEQ ID NO: 23784 - DNA, 22 bp, Artificial Sequence
  Synthetic: FXN 3 reverse 9:69044480-69044508; SaCas9
ccagcagtgcccttagcaaact

SEQ ID NO: 23785 - DNA, 21 bp, Artificial Sequence
  Synthetic: FXN 3 reverse 9:69044481-69044508; SaCas9
cagcagtgcccttagcaaact

SEQ ID NO: 23786 - DNA, 20 bp, Artificial Sequence
  Synthetic: FXN 3 reverse 9:69044482-69044508; SaCas9
agcagtgcccttagcaaact

SEQ ID NO: 23787 - DNA, 19 bp, Artificial Sequence
  Synthetic: FXN 3 reverse 9:69044483-69044508; SaCas9
gcagtgcccttagcaaact

SEQ ID NO: 23788 - DNA, 18 bp, Artificial Sequence
  Synthetic: FXN 3 reverse 9:69044484-69044508; SaCas9
cagtgcccttagcaaact

SEQ ID NO: 23789 - DNA, 25 bp, Artificial Sequence
  Synthetic: FXN 3 forward 9:69044483-69044514; SaCas9
agtttgctaagggcactgctggctc

SEQ ID NO: 23790 - DNA, 24 bp, Artificial Sequence
  Synthetic: FXN 3 forward 9:69044484-69044514; SaCas9
gtttgctaagggcactgctggctc

SEQ ID NO: 23791 - DNA, 23 bp, Artificial Sequence
  Synthetic: FXN 3 forward 9:69044485-69044514; SaCas9
tttgctaagggcactgctggctc

SEQ ID NO: 23792 - DNA, 22 bp, Artificial Sequence
  Synthetic: FXN 3 forward 9:69044486-69044514; SaCas9
ttgctaagggcactgctggctc

SEQ ID NO: 23793 - DNA, 21 bp, Artificial Sequence
  Synthetic: FXN 3 forward 9:69044487-69044514; SaCas9
tgctaagggcactgctggctc

SEQ ID NO: 23794 - DNA, 20 bp, Artificial Sequence
  Synthetic: FXN 3 forward 9:69044488-69044514; SaCas9
gctaagggcactgctggctc

SEQ ID NO: 23795 - DNA, 19 bp, Artificial Sequence
  Synthetic: FXN 3 forward 9:69044489-69044514; SaCas9
ctaagggcactgctggctc

SEQ ID NO: 23796 - DNA, 18 bp, Artificial Sequence
  Synthetic: FXN 3 forward 9:69044490-69044514; SaCas9
taagggcactgctggctc

SEQ ID NO: 23797 - DNA, 25 bp, Artificial Sequence
  Synthetic: FXN 3 reverse 9:69044504-69044535; SaCas9
ggcgagagactgttagttactgctc

SEQ ID NO: 23798 - DNA, 24 bp, Artificial Sequence
  Synthetic: FXN 3 reverse 9:69044505-69044535; SaCas9
gcgagagactgttagttactgctc

SEQ ID NO: 23799 - DNA, 23 bp, Artificial Sequence
  Synthetic: FXN 3 reverse 9:69044506-69044535; SaCas9
cgagagactgttagttactgctc

SEQ ID NO: 23800 - DNA, 22 bp, Artificial Sequence
  Synthetic: FXN 3 reverse 9:69044507-69044535; SaCas9
gagagactgttagttactgctc

SEQ ID NO: 23801 - DNA, 21 bp, Artificial Sequence
  Synthetic: FXN 3 reverse 9:69044508-69044535; SaCas9
agagactgttagttactgctc

SEQ ID NO: 23802 - DNA, 20 bp, Artificial Sequence
  Synthetic: FXN 3 reverse 9:69044509-69044535; SaCas9
gagactgttagttactgctc

SEQ ID NO: 23803 - DNA, 19 bp, Artificial Sequence
  Synthetic: FXN 3 reverse 9:69044510-69044535; SaCas9
agactgttagttactgctc

SEQ ID NO: 23804 - DNA, 18 bp, Artificial Sequence
  Synthetic: FXN 3 reverse 9:69044511-69044535; SaCas9
gactgttagttactgctc

SEQ ID NO: 23805 - DNA, 25 bp, Artificial Sequence
  Synthetic: FXN 3 reverse 9:69044526-69044557; SaCas9
actggttgccatggagagaagaggc

SEQ ID NO: 23806 - DNA, 24 bp, Artificial Sequence
  Synthetic: FXN 3 reverse 9:69044527-69044557; SaCas9
ctggttgccatggagagaagaggc

SEQ ID NO: 23807 - DNA, 23 bp, Artificial Sequence
  Synthetic: FXN 3 reverse 9:69044528-69044557; SaCas9
tggttgccatggagagaagaggc

SEQ ID NO: 23808 - DNA, 22 bp, Artificial Sequence
  Synthetic: FXN 3 reverse 9:69044529-69044557; SaCas9
ggttgccatggagagaagaggc

SEQ ID NO: 23809 - DNA, 21 bp, Artificial Sequence
  Synthetic: FXN 3 reverse 9:69044530-69044557; SaCas9
gttgccatggagagaagaggc

SEQ ID NO: 23810 - DNA, 20 bp, Artificial Sequence
  Synthetic: FXN 3 reverse 9:69044531-69044557; SaCas9
ttgccatggagagaagaggc

SEQ ID NO: 23811 - DNA, 19 bp, Artificial Sequence
  Synthetic: FXN 3 reverse 9:69044532-69044557; SaCas9
tgccatggagagaagaggc

SEQ ID NO: 23812 - DNA, 18 bp, Artificial Sequence
  Synthetic: FXN 3 reverse 9:69044533-69044557; SaCas9
gccatggagagaagaggc

SEQ ID NO: 23813 - DNA, 25 bp, Artificial Sequence
  Synthetic: FXN 3 reverse 9:69044528-69044559; SaCas9
tcactggttgccatggagagaagag

SEQ ID NO: 23814 - DNA, 24 bp, Artificial Sequence
  Synthetic: FXN 3 reverse 9:69044529-69044559; SaCas9
cactggttgccatggagagaagag

SEQ ID NO: 23815 - DNA, 23 bp, Artificial Sequence
  Synthetic: FXN 3 reverse 9:69044530-69044559; SaCas9
actggttgccatggagagaagag

SEQ ID NO: 23816 - DNA, 22 bp, Artificial Sequence
  Synthetic: FXN 3 reverse 9:69044531-69044559; SaCas9
ctggttgccatggagagaagag

SEQ ID NO: 23817 - DNA, 21 bp, Artificial Sequence
  Synthetic: FXN 3 reverse 9:69044532-69044559; SaCas9
tggttgccatggagagaagag

SEQ ID NO: 23818 - DNA, 20 bp, Artificial Sequence
  Synthetic: FXN 3 reverse 9:69044533-69044559; SaCas9
ggttgccatggagagaagag

SEQ ID NO: 23819 - DNA, 19 bp, Artificial Sequence
  Synthetic: FXN 3 reverse 9:69044534-69044559; SaCas9
gttgccatggagagaagag

SEQ ID NO: 23820 - DNA, 18 bp, Artificial Sequence
  Synthetic: FXN 3 reverse 9:69044535-69044559; SaCas9
ttgccatggagagaagag

SEQ ID NO: 23821 - DNA, 25 bp, Artificial Sequence
  Synthetic: FXN 3 reverse 9:69044533-69044564; SaCas9
aaaggtcactggttgccatggagag

SEQ ID NO: 23822 - DNA, 24 bp, Artificial Sequence
  Synthetic: FXN 3 reverse 9:69044534-69044564; SaCas9
aaggtcactggttgccatggagag

SEQ ID NO: 23823 - DNA, 23 bp, Artificial Sequence
  Synthetic: FXN 3 reverse 9:69044535-69044564; SaCas9
aggtcactggttgccatggagag

SEQ ID NO: 23824 - DNA, 22 bp, Artificial Sequence
  Synthetic: FXN 3 reverse 9:69044536-69044564; SaCas9
ggtcactggttgccatggagag

SEQ ID NO: 23825 - DNA, 21 bp, Artificial Sequence
  Synthetic: FXN 3 reverse 9:69044537-69044564; SaCas9
gtcactggttgccatggagag

SEQ ID NO: 23826 - DNA, 20 bp, Artificial Sequence
  Synthetic: FXN 3 reverse 9:69044538-69044564; SaCas9
tcactggttgccatggagag

SEQ ID NO: 23827 - DNA, 19 bp, Artificial Sequence
  Synthetic: FXN 3 reverse 9:69044539-69044564; SaCas9
cactggttgccatggagag

SEQ ID NO: 23828 - DNA, 18 bp, Artificial Sequence
  Synthetic: FXN 3 reverse 9:69044540-69044564; SaCas9
actggttgccatggagag

SEQ ID NO: 23829 - DNA, 25 bp, Artificial Sequence
  Synthetic: FXN 3 reverse 9:69044536-69044567; SaCas9
tccaaaggtcactggttgccatgga

SEQ ID NO: 23830 - DNA, 24 bp, Artificial Sequence
  Synthetic: FXN 3 reverse 9:69044537-69044567; SaCas9
ccaaaggtcactggttgccatgga

SEQ ID NO: 23831 - DNA, 23 bp, Artificial Sequence
  Synthetic: FXN 3 reverse 9:69044538-69044567; SaCas9
caaaggtcactggttgccatgga

SEQ ID NO: 23832 - DNA, 22 bp, Artificial Sequence
  Synthetic: FXN 3 reverse 9:69044539-69044567; SaCas9
aaaggtcactggttgccatgga

SEQ ID NO: 23833 - DNA, 21 bp, Artificial Sequence
  Synthetic: FXN 3 reverse 9:69044540-69044567; SaCas9
aaggtcactggttgccatgga

SEQ ID NO: 23834 - DNA, 20 bp, Artificial Sequence
  Synthetic: FXN 3 reverse 9:69044541-69044567; SaCas9
aggtcactggttgccatgga

SEQ ID NO: 23835 - DNA, 19 bp, Artificial Sequence
  Synthetic: FXN 3 reverse 9:69044542-69044567; SaCas9
ggtcactggttgccatgga

SEQ ID NO: 23836 - DNA, 18 bp, Artificial Sequence
  Synthetic: FXN 3 reverse 9:69044543-69044567; SaCas9
gtcactggttgccatgga

SEQ ID NO: 23837 - DNA, 25 bp, Artificial Sequence
  Synthetic: FXN 3 forward 9:69044537-69044568; SaCas9
ttctctccatggcaaccagtgacct

SEQ ID NO: 23838 - DNA, 24 bp, Artificial Sequence
  Synthetic: FXN 3 forward 9:69044538-69044568; SaCas9
tctctccatggcaaccagtgacct

SEQ ID NO: 23839 - DNA, 23 bp, Artificial Sequence
  Synthetic: FXN 3 forward 9:69044539-69044568; SaCas9
ctctccatggcaaccagtgacct

SEQ ID NO: 23840 - DNA, 22 bp, Artificial Sequence
  Synthetic: FXN 3 forward 9:69044540-69044568; SaCas9
tctccatggcaaccagtgacct

SEQ ID NO: 23841 - DNA, 21 bp, Artificial Sequence
  Synthetic: FXN 3 forward 9:69044541-69044568; SaCas9
ctccatggcaaccagtgacct

SEQ ID NO: 23842 - DNA, 20 bp, Artificial Sequence
  Synthetic: FXN 3 forward 9:69044542-69044568; SaCas9
tccatggcaaccagtgacct

SEQ ID NO: 23843 - DNA, 19 bp, Artificial Sequence
  Synthetic: FXN 3 forward 9:69044543-69044568; SaCas9
ccatggcaaccagtgacct

SEQ ID NO: 23844 - DNA, 18 bp, Artificial Sequence
  Synthetic: FXN 3 forward 9:69044544-69044568; SaCas9
catggcaaccagtgacct

SEQ ID NO: 23845 - DNA, 25 bp, Artificial Sequence
  Synthetic: FXN 3 forward 9:69044538-69044569; SaCas9
tctctccatggcaaccagtgacctt

SEQ ID NO: 23846 - DNA, 24 bp, Artificial Sequence
  Synthetic: FXN 3 forward 9:69044539-69044569; SaCas9
ctctccatggcaaccagtgacctt

SEQ ID NO: 23847 - DNA, 23 bp, Artificial Sequence
  Synthetic: FXN 3 forward 9:69044540-69044569; SaCas9
tctccatggcaaccagtgacctt

SEQ ID NO: 23848 - DNA, 22 bp, Artificial Sequence
  Synthetic: FXN 3 forward 9:69044541-69044569; SaCas9
ctccatggcaaccagtgacctt

SEQ ID NO: 23849 - DNA, 21 bp, Artificial Sequence
  Synthetic: FXN 3 forward 9:69044542-69044569; SaCas9
tccatggcaaccagtgacctt

SEQ ID NO: 23850 - DNA, 20 bp, Artificial Sequence
  Synthetic: FXN 3 forward 9:69044543-69044569; SaCas9
ccatggcaaccagtgacctt

SEQ ID NO: 23851 - DNA, 19 bp, Artificial Sequence
  Synthetic: FXN 3 forward 9:69044544-69044569; SaCas9
catggcaaccagtgacctt

SEQ ID NO: 23852 - DNA, 18 bp, Artificial Sequence
  Synthetic: FXN 3 forward 9:69044545-69044569; SaCas9
atggcaaccagtgacctt

SEQ ID NO: 23853 - DNA, 25 bp, Artificial Sequence
  Synthetic: FXN 3 reverse 9:69044538-69044569; SaCas9
tctccaaaggtcactggttgccatg

SEQ ID NO: 23854 - DNA, 24 bp, Artificial Sequence
  Synthetic: FXN 3 reverse 9:69044539-69044569; SaCas9
ctccaaaggtcactggttgccatg

SEQ ID NO: 23855 - DNA, 23 bp, Artificial Sequence
  Synthetic: FXN 3 reverse 9:69044540-69044569; SaCas9
tccaaaggtcactggttgccatg

SEQ ID NO: 23856 - DNA, 22 bp, Artificial Sequence
  Synthetic: FXN 3 reverse 9:69044541-69044569; SaCas9
ccaaaggtcactggttgccatg

SEQ ID NO: 23857 - DNA, 21 bp, Artificial Sequence
  Synthetic: FXN 3 reverse 9:69044542-69044569; SaCas9
caaaggtcactggttgccatg

SEQ ID NO: 23858 - DNA, 20 bp, Artificial Sequence
  Synthetic: FXN 3 reverse 9:69044543-69044569; SaCas9
aaaggtcactggttgccatg

SEQ ID NO: 23859 - DNA, 19 bp, Artificial Sequence
  Synthetic: FXN 3 reverse 9:69044544-69044569; SaCas9
aaggtcactggttgccatg

SEQ ID NO: 23860 - DNA, 18 bp, Artificial Sequence
  Synthetic: FXN 3 reverse 9:69044545-69044569; SaCas9
aggtcactggttgccatg

SEQ ID NO: 23861 - DNA, 25 bp, Artificial Sequence
  Synthetic: FXN 3 forward 9:69044540-69044571; SaCas9
tctccatggcaaccagtgacctttg

SEQ ID NO: 23862 - DNA, 24 bp, Artificial Sequence
  Synthetic: FXN 3 forward 9:69044541-69044571; SaCas9
ctccatggcaaccagtgacctttg

SEQ ID NO: 23863 - DNA, 23 bp, Artificial Sequence
  Synthetic: FXN 3 forward 9:69044542-69044571; SaCas9
tccatggcaaccagtgacctttg

SEQ ID NO: 23864 - DNA, 22 bp, Artificial Sequence
  Synthetic: FXN 3 forward 9:69044543-69044571; SaCas9
ccatggcaaccagtgacctttg

SEQ ID NO: 23865 - DNA, 21 bp, Artificial Sequence
  Synthetic: FXN 3 forward 9:69044544-69044571; SaCas9
catggcaaccagtgacctttg

SEQ ID NO: 23866 - DNA, 20 bp, Artificial Sequence
  Synthetic: FXN 3 forward 9:69044545-69044571; SaCas9
atggcaaccagtgacctttg

SEQ ID NO: 23867 - DNA, 19 bp, Artificial Sequence
  Synthetic: FXN 3 forward 9:69044546-69044571; SaCas9
tggcaaccagtgacctttg

SEQ ID NO: 23868 - DNA, 18 bp, Artificial Sequence
  Synthetic: FXN 3 forward 9:69044547-69044571; SaCas9
ggcaaccagtgacctttg

SEQ ID NO: 23869 - DNA, 25 bp, Artificial Sequence
  Synthetic: FXN 3 reverse 9:69044540-69044571; SaCas9
attctccaaaggtcactggttgcca

SEQ ID NO: 23870 - DNA, 24 bp, Artificial Sequence
  Synthetic: FXN 3 reverse 9:69044541-69044571; SaCas9
ttctccaaaggtcactggttgcca

SEQ ID NO: 23871 - DNA, 23 bp, Artificial Sequence
  Synthetic: FXN 3 reverse 9:69044542-69044571; SaCas9
tctccaaaggtcactggttgcca

SEQ ID NO: 23872 - DNA, 22 bp, Artificial Sequence
  Synthetic: FXN 3 reverse 9:69044543-69044571; SaCas9
ctccaaaggtcactggttgcca

SEQ ID NO: 23873 - DNA, 21 bp, Artificial Sequence
  Synthetic: FXN 3 reverse 9:69044544-69044571; SaCas9
tccaaaggtcactggttgcca

SEQ ID NO: 23874 - DNA, 20 bp, Artificial Sequence
  Synthetic: FXN 3 reverse 9:69044545-69044571; SaCas9
ccaaaggtcactggttgcca

SEQ ID NO: 23875 - DNA, 19 bp, Artificial Sequence
  Synthetic: FXN 3 reverse 9:69044546-69044571; SaCas9
caaaggtcactggttgcca

SEQ ID NO: 23876 - DNA, 18 bp, Artificial Sequence
  Synthetic: FXN 3 reverse 9:69044547-69044571; SaCas9
aaaggtcactggttgcca

SEQ ID NO: 23877 - DNA, 25 bp, Artificial Sequence
  Synthetic: FXN 3 reverse 9:69044541-69044572; SaCas9
cattctccaaaggtcactggttgcc

SEQ ID NO: 23878 - DNA, 24 bp, Artificial Sequence
  Synthetic: FXN 3 reverse 9:69044542-69044572; SaCas9
attctccaaaggtcactggttgcc

SEQ ID NO: 23879 - DNA, 23 bp, Artificial Sequence
  Synthetic: FXN 3 reverse 9:69044543-69044572; SaCas9
ttctccaaaggtcactggttgcc

SEQ ID NO: 23880 - DNA, 22 bp, Artificial Sequence
  Synthetic: FXN 3 reverse 9:69044544-69044572; SaCas9
tctccaaaggtcactggttgcc

SEQ ID NO: 23881 - DNA, 21 bp, Artificial Sequence
  Synthetic: FXN 3 reverse 9:69044545-69044572; SaCas9
ctccaaaggtcactggttgcc

SEQ ID NO: 23882 - DNA, 20 bp, Artificial Sequence
  Synthetic: FXN 3 reverse 9:69044546-69044572; SaCas9
tccaaaggtcactggttgcc

SEQ ID NO: 23883 - DNA, 19 bp, Artificial Sequence
  Synthetic: FXN 3 reverse 9:69044547-69044572; SaCas9
ccaaaggtcactggttgcc

SEQ ID NO: 23884 - DNA, 18 bp, Artificial Sequence
  Synthetic: FXN 3 reverse 9:69044548-69044572; SaCas9
caaaggtcactggttgcc

SEQ ID NO: 23885 - DNA, 25 bp, Artificial Sequence
  Synthetic: FXN 3 reverse 9:69044588-69044619; SaCas9
tcctgggaaggcaccgaagggcttt

SEQ ID NO: 23886 - DNA, 24 bp, Artificial Sequence
  Synthetic: FXN 3 reverse 9:69044589-69044619; SaCas9
cctgggaaggcaccgaagggcttt

SEQ ID NO: 23887 - DNA, 23 bp, Artificial Sequence
  Synthetic: FXN 3 reverse 9:69044590-69044619; SaCas9
ctgggaaggcaccgaagggcttt

SEQ ID NO: 23888 - DNA, 22 bp, Artificial Sequence
  Synthetic: FXN 3 reverse 9:69044591-69044619; SaCas9
tgggaaggcaccgaagggcttt

SEQ ID NO: 23889 - DNA, 21 bp, Artificial Sequence
  Synthetic: FXN 3 reverse 9:69044592-69044619; SaCas9
gggaaggcaccgaagggcttt

SEQ ID NO: 23890 - DNA, 20 bp, Artificial Sequence
  Synthetic: FXN 3 reverse 9:69044593-69044619; SaCas9
ggaaggcaccgaagggcttt

SEQ ID NO: 23891 - DNA, 19 bp, Artificial Sequence
  Synthetic: FXN 3 reverse 9:69044594-69044619; SaCas9
gaaggcaccgaagggcttt

SEQ ID NO: 23892 - DNA, 18 bp, Artificial Sequence
  Synthetic: FXN 3 reverse 9:69044595-69044619; SaCas9
aaggcaccgaagggcttt

SEQ ID NO: 23893 - DNA, 25 bp, Artificial Sequence
  Synthetic: FXN 3 forward 9:69044589-69044620; SaCas9
ctcttaaagcccttcggtgccttcc

SEQ ID NO: 23894 - DNA, 24 bp, Artificial Sequence
  Synthetic: FXN 3 forward 9:69044590-69044620; SaCas9
tcttaaagcccttcggtgccttcc

SEQ ID NO: 23895 - DNA, 23 bp, Artificial Sequence
  Synthetic: FXN 3 forward 9:69044591-69044620; SaCas9
cttaaagcccttcggtgccttcc

SEQ ID NO: 23896 - DNA, 22 bp, Artificial Sequence
  Synthetic: FXN 3 forward 9:69044592-69044620; SaCas9
ttaaagcccttcggtgccttcc

SEQ ID NO: 23897 - DNA, 21 bp, Artificial Sequence
  Synthetic: FXN 3 forward 9:69044593-69044620; SaCas9
taaagcccttcggtgccttcc

SEQ ID NO: 23898 - DNA, 20 bp, Artificial Sequence
  Synthetic: FXN 3 forward 9:69044594-69044620; SaCas9
aaagcccttcggtgccttcc

SEQ ID NO: 23899 - DNA, 19 bp, Artificial Sequence
  Synthetic: FXN 3 forward 9:69044595-69044620; SaCas9
aagcccttcggtgccttcc

SEQ ID NO: 23900 - DNA, 18 bp, Artificial Sequence
  Synthetic: FXN 3 forward 9:69044596-69044620; SaCas9
agcccttcggtgccttcc

SEQ ID NO: 23901 - DNA, 25 bp, Artificial Sequence
  Synthetic: FXN 3 reverse 9:69044597-69044628; SaCas9
tggacgtcatcctgggaaggcaccg

SEQ ID NO: 23902 - DNA, 24 bp, Artificial Sequence
  Synthetic: FXN 3 reverse 9:69044598-69044628; SaCas9
ggacgtcatcctgggaaggcaccg

SEQ ID NO: 23903 - DNA, 23 bp, Artificial Sequence
  Synthetic: FXN 3 reverse 9:69044599-69044628; SaCas9
gacgtcatcctgggaaggcaccg

SEQ ID NO: 23904 - DNA, 22 bp, Artificial Sequence
  Synthetic: FXN 3 reverse 9:69044600-69044628; SaCas9
acgtcatcctgggaaggcaccg

SEQ ID NO: 23905 - DNA, 21 bp, Artificial Sequence
  Synthetic: FXN 3 reverse 9:69044601-69044628; SaCas9
cgtcatcctgggaaggcaccg

SEQ ID NO: 23906 - DNA, 20 bp, Artificial Sequence
  Synthetic: FXN 3 reverse 9:69044602-69044628; SaCas9
gtcatcctgggaaggcaccg

SEQ ID NO: 23907 - DNA, 19 bp, Artificial Sequence
  Synthetic: FXN 3 reverse 9:69044603-69044628; SaCas9
tcatcctgggaaggcaccg

SEQ ID NO: 23908 - DNA, 18 bp, Artificial Sequence
  Synthetic: FXN 3 reverse 9:69044604-69044628; SaCas9
catcctgggaaggcaccg

SEQ ID NO: 23909 - DNA, 25 bp, Artificial Sequence
  Synthetic: FXN 3 reverse 9:69044600-69044631; SaCas9
agctggacgtcatcctgggaaggca

SEQ ID NO: 23910 - DNA, 24 bp, Artificial Sequence
  Synthetic: FXN 3 reverse 9:69044601-69044631; SaCas9
gctggacgtcatcctgggaaggca

SEQ ID NO: 23911 - DNA, 23 bp, Artificial Sequence
  Synthetic: FXN 3 reverse 9:69044602-69044631; SaCas9
ctggacgtcatcctgggaaggca

SEQ ID NO: 23912 - DNA, 22 bp, Artificial Sequence
  Synthetic: FXN 3 reverse 9:69044603-69044631; SaCas9
tggacgtcatcctgggaaggca

SEQ ID NO: 23913 - DNA, 21 bp, Artificial Sequence
  Synthetic: FXN 3 reverse 9:69044604-69044631; SaCas9
ggacgtcatcctgggaaggca

SEQ ID NO: 23914 - DNA, 20 bp, Artificial Sequence
  Synthetic: FXN 3 reverse 9:69044605-69044631; SaCas9
gacgtcatcctgggaaggca

SEQ ID NO: 23915 - DNA, 19 bp, Artificial Sequence
  Synthetic: FXN 3 reverse 9:69044606-69044631; SaCas9
acgtcatcctgggaaggca

SEQ ID NO: 23916 - DNA, 18 bp, Artificial Sequence
  Synthetic: FXN 3 reverse 9:69044607-69044631; SaCas9
cgtcatcctgggaaggca

SEQ ID NO: 23917 - DNA, 25 bp, Artificial Sequence
  Synthetic: FXN 3 forward 9:69044604-69044635; SaCas9
ggtgccttcccaggatgacgtccag

SEQ ID NO: 23918 - DNA, 24 bp, Artificial Sequence
  Synthetic: FXN 3 forward 9:69044605-69044635; SaCas9
gtgccttcccaggatgacgtccag

SEQ ID NO: 23919 - DNA, 23 bp, Artificial Sequence
  Synthetic: FXN 3 forward 9:69044606-69044635; SaCas9
tgccttcccaggatgacgtccag

SEQ ID NO: 23920 - DNA, 22 bp, Artificial Sequence
  Synthetic: FXN 3 forward 9:69044607-69044635; SaCas9
gccttcccaggatgacgtccag

SEQ ID NO: 23921 - DNA, 21 bp, Artificial Sequence
  Synthetic: FXN 3 forward 9:69044608-69044635; SaCas9
ccttcccaggatgacgtccag

SEQ ID NO: 23922 - DNA, 20 bp, Artificial Sequence
  Synthetic: FXN 3 forward 9:69044609-69044635; SaCas9
cttcccaggatgacgtccag

SEQ ID NO: 23923 - DNA, 19 bp, Artificial Sequence
  Synthetic: FXN 3 forward 9:69044610-69044635; SaCas9
ttcccaggatgacgtccag

SEQ ID NO: 23924 - DNA, 18 bp, Artificial Sequence
  Synthetic: FXN 3 forward 9:69044611-69044635; SaCas9
tcccaggatgacgtccag

SEQ ID NO: 23925 - DNA, 25 bp, Artificial Sequence
  Synthetic: FXN 3 reverse 9:69044609-69044640; SaCas9
aaggacctcagctggacgtcatcct

SEQ ID NO: 23926 - DNA, 24 bp, Artificial Sequence
  Synthetic: FXN 3 reverse 9:69044610-69044640; SaCas9
aggacctcagctggacgtcatcct

SEQ ID NO: 23927 - DNA, 23 bp, Artificial Sequence
  Synthetic: FXN 3 reverse 9:69044611-69044640; SaCas9
ggacctcagctggacgtcatcct

SEQ ID NO: 23928 - DNA, 22 bp, Artificial Sequence
  Synthetic: FXN 3 reverse 9:69044612-69044640; SaCas9
gacctcagctggacgtcatcct

SEQ ID NO: 23929 - DNA, 21 bp, Artificial Sequence
  Synthetic: FXN 3 reverse 9:69044613-69044640; SaCas9
acctcagctggacgtcatcct

SEQ ID NO: 23930 - DNA, 20 bp, Artificial Sequence
  Synthetic: FXN 3 reverse 9:69044614-69044640; SaCas9
cctcagctggacgtcatcct

SEQ ID NO: 23931 - DNA, 19 bp, Artificial Sequence
  Synthetic: FXN 3 reverse 9:69044615-69044640; SaCas9
ctcagctggacgtcatcct

SEQ ID NO: 23932 - DNA, 18 bp, Artificial Sequence
  Synthetic: FXN 3 reverse 9:69044616-69044640; SaCas9
tcagctggacgtcatcct

SEQ ID NO: 23933 - DNA, 25 bp, Artificial Sequence
  Synthetic: FXN 3 reverse 9:69044610-69044641; SaCas9
caaggacctcagctggacgtcatcc

SEQ ID NO: 23934 - DNA, 24 bp, Artificial Sequence
  Synthetic: FXN 3 reverse 9:69044611-69044641; SaCas9
aaggacctcagctggacgtcatcc

SEQ ID NO: 23935 - DNA, 23 bp, Artificial Sequence
  Synthetic: FXN 3 reverse 9:69044612-69044641; SaCas9
aggacctcagctggacgtcatcc

SEQ ID NO: 23936 - DNA, 22 bp, Artificial Sequence
  Synthetic: FXN 3 reverse 9:69044613-69044641; SaCas9
ggacctcagctggacgtcatcc

SEQ ID NO: 23937 - DNA, 21 bp, Artificial Sequence
  Synthetic: FXN 3 reverse 9:69044614-69044641; SaCas9
gacctcagctggacgtcatcc

SEQ ID NO: 23938 - DNA, 20 bp, Artificial Sequence
  Synthetic: FXN 3 reverse 9:69044615-69044641; SaCas9
acctcagctggacgtcatcc

SEQ ID NO: 23939 - DNA, 19 bp, Artificial Sequence
  Synthetic: FXN 3 reverse 9:69044616-69044641; SaCas9
cctcagctggacgtcatcc

SEQ ID NO: 23940 - DNA, 18 bp, Artificial Sequence
  Synthetic: FXN 3 reverse 9:69044617-69044641; SaCas9
ctcagctggacgtcatcc

SEQ ID NO: 23941 - DNA, 25 bp, Artificial Sequence
  Synthetic: FXN 3 reverse 9:69044611-69044642; SaCas9
ccaaggacctcagctggacgtcatc

SEQ ID NO: 23942 - DNA, 24 bp, Artificial Sequence
  Synthetic: FXN 3 reverse 9:69044612-69044642; SaCas9
caaggacctcagctggacgtcatc

SEQ ID NO: 23943 - DNA, 23 bp, Artificial Sequence
  Synthetic: FXN 3 reverse 9:69044613-69044642; SaCas9
aaggacctcagctggacgtcatc

SEQ ID NO: 23944 - DNA, 22 bp, Artificial Sequence
  Synthetic: FXN 3 reverse 9:69044614-69044642; SaCas9
aggacctcagctggacgtcatc

SEQ ID NO: 23945 - DNA, 21 bp, Artificial Sequence
  Synthetic: FXN 3 reverse 9:69044615-69044642; SaCas9
ggacctcagctggacgtcatc

SEQ ID NO: 23946 - DNA, 20 bp, Artificial Sequence
  Synthetic: FXN 3 reverse 9:69044616-69044642; SaCas9
gacctcagctggacgtcatc

SEQ ID NO: 23947 - DNA, 19 bp, Artificial Sequence
  Synthetic: FXN 3 reverse 9:69044617-69044642; SaCas9
acctcagctggacgtcatc

SEQ ID NO: 23948 - DNA, 18 bp, Artificial Sequence
  Synthetic: FXN 3 reverse 9:69044618-69044642; SaCas9
cctcagctggacgtcatc

SEQ ID NO: 23949 - DNA, 25 bp, Artificial Sequence
  Synthetic: FXN 3 reverse 9:69044623-69044654; SaCas9
ccctgggtcttgccaaggacctcag

SEQ ID NO: 23950 - DNA, 24 bp, Artificial Sequence
  Synthetic: FXN 3 reverse 9:69044624-69044654; SaCas9
cctgggtcttgccaaggacctcag

SEQ ID NO: 23951 - DNA, 23 bp, Artificial Sequence
  Synthetic: FXN 3 reverse 9:69044625-69044654; SaCas9
ctgggtcttgccaaggacctcag

SEQ ID NO: 23952 - DNA, 22 bp, Artificial Sequence
  Synthetic: FXN 3 reverse 9:69044626-69044654; SaCas9
tgggtcttgccaaggacctcag

SEQ ID NO: 23953 - DNA, 21 bp, Artificial Sequence
  Synthetic: FXN 3 reverse 9:69044627-69044654; SaCas9
gggtcttgccaaggacctcag

SEQ ID NO: 23954 - DNA, 20 bp, Artificial Sequence
  Synthetic: FXN 3 reverse 9:69044628-69044654; SaCas9
ggtcttgccaaggacctcag

SEQ ID NO: 23955 - DNA, 19 bp, Artificial Sequence
  Synthetic: FXN 3 reverse 9:69044629-69044654; SaCas9
gtcttgccaaggacctcag

SEQ ID NO: 23956 - DNA, 18 bp, Artificial Sequence
  Synthetic: FXN 3 reverse 9:69044630-69044654; SaCas9
tcttgccaaggacctcag

SEQ ID NO: 23957 - DNA, 25 bp, Artificial Sequence
  Synthetic: FXN 3 forward 9:69044624-69044655; SaCas9
tccagctgaggtccttggcaagacc

SEQ ID NO: 23958 - DNA, 24 bp, Artificial Sequence
  Synthetic: FXN 3 forward 9:69044625-69044655; SaCas9
ccagctgaggtccttggcaagacc

SEQ ID NO: 23959 - DNA, 23 bp, Artificial Sequence
  Synthetic: FXN 3 forward 9:69044626-69044655; SaCas9
cagctgaggtccttggcaagacc

SEQ ID NO: 23960 - DNA, 22 bp, Artificial Sequence
  Synthetic: FXN 3 forward 9:69044627-69044655; SaCas9
agctgaggtccttggcaagacc

SEQ ID NO: 23961 - DNA, 21 bp, Artificial Sequence
  Synthetic: FXN 3 forward 9:69044628-69044655; SaCas9
gctgaggtccttggcaagacc

SEQ ID NO: 23962 - DNA, 20 bp, Artificial Sequence
  Synthetic: FXN 3 forward 9:69044629-69044655; SaCas9
ctgaggtccttggcaagacc

SEQ ID NO: 23963 - DNA, 19 bp, Artificial Sequence
  Synthetic: FXN 3 forward 9:69044630-69044655; SaCas9
tgaggtccttggcaagacc

SEQ ID NO: 23964 - DNA, 18 bp, Artificial Sequence
  Synthetic: FXN 3 forward 9:69044631-69044655; SaCas9
gaggtccttggcaagacc

SEQ ID NO: 23965 - DNA, 25 bp, Artificial Sequence
  Synthetic: FXN 3 reverse 9:69044634-69044665; SaCas9
aggagggggcgccctgggtcttgcc

SEQ ID NO: 23966 - DNA, 24 bp, Artificial Sequence
  Synthetic: FXN 3 reverse 9:69044635-69044665; SaCas9
ggagggggcgccctgggtcttgcc

SEQ ID NO: 23967 - DNA, 23 bp, Artificial Sequence
  Synthetic: FXN 3 reverse 9:69044636-69044665; SaCas9
gagggggcgccctgggtcttgcc

SEQ ID NO: 23968 - DNA, 22 bp, Artificial Sequence
  Synthetic: FXN 3 reverse 9:69044637-69044665; SaCas9
agggggcgccctgggtcttgcc

SEQ ID NO: 23969 - DNA, 21 bp, Artificial Sequence
  Synthetic: FXN 3 reverse 9:69044638-69044665; SaCas9
gggggcgccctgggtcttgcc

SEQ ID NO: 23970 - DNA, 20 bp, Artificial Sequence
  Synthetic: FXN 3 reverse 9:69044639-69044665; SaCas9
ggggcgccctgggtcttgcc

SEQ ID NO: 23971 - DNA, 19 bp, Artificial Sequence
  Synthetic: FXN 3 reverse 9:69044640-69044665; SaCas9
gggcgccctgggtcttgcc

SEQ ID NO: 23972 - DNA, 18 bp, Artificial Sequence
  Synthetic: FXN 3 reverse 9:69044641-69044665; SaCas9
ggcgccctgggtcttgcc

SEQ ID NO: 23973 - DNA, 25 bp, Artificial Sequence
  Synthetic: FXN 3 reverse 9:69044646-69044677; SaCas9
ggtgatggagcgaggagggggcgcc

SEQ ID NO: 23974 - DNA, 24 bp, Artificial Sequence
  Synthetic: FXN 3 reverse 9:69044647-69044677; SaCas9
gtgatggagcgaggagggggcgcc

SEQ ID NO: 23975 - DNA, 23 bp, Artificial Sequence
  Synthetic: FXN 3 reverse 9:69044648-69044677; SaCas9
tgatggagcgaggagggggcgcc

SEQ ID NO: 23976 - DNA, 22 bp, Artificial Sequence
  Synthetic: FXN 3 reverse 9:69044649-69044677; SaCas9
gatggagcgaggagggggcgcc

SEQ ID NO: 23977 - DNA, 21 bp, Artificial Sequence
  Synthetic: FXN 3 reverse 9:69044650-69044677; SaCas9
atggagcgaggagggggcgcc

SEQ ID NO: 23978 - DNA, 20 bp, Artificial Sequence
  Synthetic: FXN 3 reverse 9:69044651-69044677; SaCas9
tggagcgaggagggggcgcc

SEQ ID NO: 23979 - DNA, 19 bp, Artificial Sequence
  Synthetic: FXN 3 reverse 9:69044652-69044677; SaCas9
ggagcgaggagggggcgcc

SEQ ID NO: 23980 - DNA, 18 bp, Artificial Sequence
  Synthetic: FXN 3 reverse 9:69044653-69044677; SaCas9
gagcgaggagggggcgcc

SEQ ID NO: 23981 - DNA, 25 bp, Artificial Sequence
  Synthetic: FXN 3 reverse 9:69044655-69044686; SaCas9
gacaggggaggtgatggagcgagga

SEQ ID NO: 23982 - DNA, 24 bp, Artificial Sequence
  Synthetic: FXN 3 reverse 9:69044656-69044686; SaCas9
acaggggaggtgatggagcgagga

SEQ ID NO: 23983 - DNA, 23 bp, Artificial Sequence
  Synthetic: FXN 3 reverse 9:69044657-69044686; SaCas9
caggggaggtgatggagcgagga

SEQ ID NO: 23984 - DNA, 22 bp, Artificial Sequence
  Synthetic: FXN 3 reverse 9:69044658-69044686; SaCas9
aggggaggtgatggagcgagga

SEQ ID NO: 23985 - DNA, 21 bp, Artificial Sequence
  Synthetic: FXN 3 reverse 9:69044659-69044686; SaCas9
ggggaggtgatggagcgagga

SEQ ID NO: 23986 - DNA, 20 bp, Artificial Sequence
  Synthetic: FXN 3 reverse 9:69044660-69044686; SaCas9
gggaggtgatggagcgagga

SEQ ID NO: 23987 - DNA, 19 bp, Artificial Sequence
  Synthetic: FXN 3 reverse 9:69044661-69044686; SaCas9
ggaggtgatggagcgagga

SEQ ID NO: 23988 - DNA, 18 bp, Artificial Sequence
  Synthetic: FXN 3 reverse 9:69044662-69044686; SaCas9
gaggtgatggagcgagga

SEQ ID NO: 23989 - DNA, 25 bp, Artificial Sequence
  Synthetic: FXN 3 reverse 9:69044656-69044687; SaCas9
tgacaggggaggtgatggagcgagg

SEQ ID NO: 23990 - DNA, 24 bp, Artificial Sequence
  Synthetic: FXN 3 reverse 9:69044657-69044687; SaCas9
gacaggggaggtgatggagcgagg

SEQ ID NO: 23991 - DNA, 23 bp, Artificial Sequence
  Synthetic: FXN 3 reverse 9:69044658-69044687; SaCas9
acaggggaggtgatggagcgagg

SEQ ID NO: 23992 - DNA, 22 bp, Artificial Sequence
  Synthetic: FXN 3 reverse 9:69044659-69044687; SaCas9
caggggaggtgatggagcgagg

SEQ ID NO: 23993 - DNA, 21 bp, Artificial Sequence
  Synthetic: FXN 3 reverse 9:69044660-69044687; SaCas9
aggggaggtgatggagcgagg

SEQ ID NO: 23994 - DNA, 20 bp, Artificial Sequence
  Synthetic: FXN 3 reverse 9:69044661-69044687; SaCas9
ggggaggtgatggagcgagg

SEQ ID NO: 23995 - DNA, 19 bp, Artificial Sequence
  Synthetic: FXN 3 reverse 9:69044662-69044687; SaCas9
gggaggtgatggagcgagg

SEQ ID NO: 23996 - DNA, 18 bp, Artificial Sequence
  Synthetic: FXN 3 reverse 9:69044663-69044687; SaCas9
ggaggtgatggagcgagg

SEQ ID NO: 23997 - DNA, 25 bp, Artificial Sequence
  Synthetic: FXN 3 reverse 9:69044657-69044688; SaCas9
gtgacaggggaggtgatggagcgag

SEQ ID NO: 23998 - DNA, 24 bp, Artificial Sequence
  Synthetic: FXN 3 reverse 9:69044658-69044688; SaCas9
tgacaggggaggtgatggagcgag

SEQ ID NO: 23999 - DNA, 23 bp, Artificial Sequence
  Synthetic: FXN 3 reverse 9:69044659-69044688; SaCas9
gacaggggaggtgatggagcgag

SEQ ID NO: 24000 - DNA, 22 bp, Artificial Sequence
  Synthetic: FXN 3 reverse 9:69044660-69044688; SaCas9
acaggggaggtgatggagcgag

SEQ ID NO: 24001 - DNA, 21 bp, Artificial Sequence
  Synthetic: FXN 3 reverse 9:69044661-69044688; SaCas9
caggggaggtgatggagcgag

SEQ ID NO: 24002 - DNA, 20 bp, Artificial Sequence
  Synthetic: FXN 3 reverse 9:69044662-69044688; SaCas9
aggggaggtgatggagcgag

SEQ ID NO: 24003 - DNA, 19 bp, Artificial Sequence
  Synthetic: FXN 3 reverse 9:69044663-69044688; SaCas9
ggggaggtgatggagcgag

SEQ ID NO: 24004 - DNA, 18 bp, Artificial Sequence
  Synthetic: FXN 3 reverse 9:69044664-69044688; SaCas9
gggaggtgatggagcgag

SEQ ID NO: 24005 - DNA, 25 bp, Artificial Sequence
  Synthetic: FXN 3 reverse 9:69044659-69044690; SaCas9
aggtgacaggggaggtgatggagcg

SEQ ID NO: 24006 - DNA, 24 bp, Artificial Sequence
  Synthetic: FXN 3 reverse 9:69044660-69044690; SaCas9
ggtgacaggggaggtgatggagcg

SEQ ID NO: 24007 - DNA, 23 bp, Artificial Sequence
  Synthetic: FXN 3 reverse 9:69044661-69044690; SaCas9
gtgacaggggaggtgatggagcg

SEQ ID NO: 24008 - DNA, 22 bp, Artificial Sequence
  Synthetic: FXN 3 reverse 9:69044662-69044690; SaCas9
tgacaggggaggtgatggagcg

SEQ ID NO: 24009 - DNA, 21 bp, Artificial Sequence
  Synthetic: FXN 3 reverse 9:69044663-69044690; SaCas9
gacaggggaggtgatggagcg

SEQ ID NO: 24010 - DNA, 20 bp, Artificial Sequence
  Synthetic: FXN 3 reverse 9:69044664-69044690; SaCas9
acaggggaggtgatggagcg

SEQ ID NO: 24011 - DNA, 19 bp, Artificial Sequence
  Synthetic: FXN 3 reverse 9:69044665-69044690; SaCas9
caggggaggtgatggagcg

SEQ ID NO: 24012 - DNA, 18 bp, Artificial Sequence
  Synthetic: FXN 3 reverse 9:69044666-69044690; SaCas9
aggggaggtgatggagcg

SEQ ID NO: 24013 - DNA, 25 bp, Artificial Sequence
  Synthetic: FXN 3 reverse 9:69044660-69044691; SaCas9
gaggtgacaggggaggtgatggagc

SEQ ID NO: 24014 - DNA, 24 bp, Artificial Sequence
  Synthetic: FXN 3 reverse 9:69044661-69044691; SaCas9
aggtgacaggggaggtgatggagc

SEQ ID NO: 24015 - DNA, 23 bp, Artificial Sequence
  Synthetic: FXN 3 reverse 9:69044662-69044691; SaCas9
ggtgacaggggaggtgatggagc

SEQ ID NO: 24016 - DNA, 22 bp, Artificial Sequence
  Synthetic: FXN 3 reverse 9:69044663-69044691; SaCas9
gtgacaggggaggtgatggagc

SEQ ID NO: 24017 - DNA, 21 bp, Artificial Sequence
  Synthetic: FXN 3 reverse 9:69044664-69044691; SaCas9
tgacaggggaggtgatggagc

SEQ ID NO: 24018 - DNA, 20 bp, Artificial Sequence
  Synthetic: FXN 3 reverse 9:69044665-69044691; SaCas9
gacaggggaggtgatggagc

SEQ ID NO: 24019 - DNA, 19 bp, Artificial Sequence
  Synthetic: FXN 3 reverse 9:69044666-69044691; SaCas9
acaggggaggtgatggagc

SEQ ID NO: 24020 - DNA, 18 bp, Artificial Sequence
  Synthetic: FXN 3 reverse 9:69044667-69044691; SaCas9
caggggaggtgatggagc

SEQ ID NO: 24021 - DNA, 25 bp, Artificial Sequence
  Synthetic: FXN 3 reverse 9:69044662-69044693; SaCas9
gggaggtgacaggggaggtgatgga

SEQ ID NO: 24022 - DNA, 24 bp, Artificial Sequence
  Synthetic: FXN 3 reverse 9:69044663-69044693; SaCas9
ggaggtgacaggggaggtgatgga

SEQ ID NO: 24023 - DNA, 23 bp, Artificial Sequence
  Synthetic: FXN 3 reverse 9:69044664-69044693; SaCas9
gaggtgacaggggaggtgatgga

SEQ ID NO: 24024 - DNA, 22 bp, Artificial Sequence
  Synthetic: FXN 3 reverse 9:69044665-69044693; SaCas9
aggtgacaggggaggtgatgga

SEQ ID NO: 24025 - DNA, 21 bp, Artificial Sequence
  Synthetic: FXN 3 reverse 9:69044666-69044693; SaCas9
ggtgacaggggaggtgatgga

SEQ ID NO: 24026 - DNA, 20 bp, Artificial Sequence
  Synthetic: FXN 3 reverse 9:69044667-69044693; SaCas9
gtgacaggggaggtgatgga

SEQ ID NO: 24027 - DNA, 19 bp, Artificial Sequence
  Synthetic: FXN 3 reverse 9:69044668-69044693; SaCas9
tgacaggggaggtgatgga

SEQ ID NO: 24028 - DNA, 18 bp, Artificial Sequence
  Synthetic: FXN 3 reverse 9:69044669-69044693; SaCas9
gacaggggaggtgatgga

SEQ ID NO: 24029 - DNA, 25 bp, Artificial Sequence
  Synthetic: FXN 3 reverse 9:69044666-69044697; SaCas9
gcaggggaggtgacaggggaggtga

SEQ ID NO: 24030 - DNA, 24 bp, Artificial Sequence
  Synthetic: FXN 3 reverse 9:69044667-69044697; SaCas9
caggggaggtgacaggggaggtga

SEQ ID NO: 24031 - DNA, 23 bp, Artificial Sequence
  Synthetic: FXN 3 reverse 9:69044668-69044697; SaCas9
aggggaggtgacaggggaggtga

SEQ ID NO: 24032 - DNA, 22 bp, Artificial Sequence
  Synthetic: FXN 3 reverse 9:69044669-69044697; SaCas9
ggggaggtgacaggggaggtga

SEQ ID NO: 24033 - DNA, 21 bp, Artificial Sequence
  Synthetic: FXN 3 reverse 9:69044670-69044697; SaCas9
gggaggtgacaggggaggtga

SEQ ID NO: 24034 - DNA, 20 bp, Artificial Sequence
  Synthetic: FXN 3 reverse 9:69044671-69044697; SaCas9
ggaggtgacaggggaggtga

SEQ ID NO: 24035 - DNA, 19 bp, Artificial Sequence
  Synthetic: FXN 3 reverse 9:69044672-69044697; SaCas9
gaggtgacaggggaggtga

SEQ ID NO: 24036 - DNA, 18 bp, Artificial Sequence
  Synthetic: FXN 3 reverse 9:69044673-69044697; SaCas9
aggtgacaggggaggtga

SEQ ID NO: 24037 - DNA, 25 bp, Artificial Sequence
  Synthetic: FXN 3 reverse 9:69044667-69044698; SaCas9
tgcaggggaggtgacaggggaggtg

SEQ ID NO: 24038 - DNA, 24 bp, Artificial Sequence
  Synthetic: FXN 3 reverse 9:69044668-69044698; SaCas9
gcaggggaggtgacaggggaggtg

SEQ ID NO: 24039 - DNA, 23 bp, Artificial Sequence
  Synthetic: FXN 3 reverse 9:69044669-69044698; SaCas9
caggggaggtgacaggggaggtg

SEQ ID NO: 24040 - DNA, 22 bp, Artificial Sequence
  Synthetic: FXN 3 reverse 9:69044670-69044698; SaCas9
aggggaggtgacaggggaggtg

SEQ ID NO: 24041 - DNA, 21 bp, Artificial Sequence
  Synthetic: FXN 3 reverse 9:69044671-69044698; SaCas9
ggggaggtgacaggggaggtg

SEQ ID NO: 24042 - DNA, 20 bp, Artificial Sequence
  Synthetic: FXN 3 reverse 9:69044672-69044698; SaCas9
gggaggtgacaggggaggtg

SEQ ID NO: 24043 - DNA, 19 bp, Artificial Sequence
  Synthetic: FXN 3 reverse 9:69044673-69044698; SaCas9
ggaggtgacaggggaggtg

SEQ ID NO: 24044 - DNA, 18 bp, Artificial Sequence
  Synthetic: FXN 3 reverse 9:69044674-69044698; SaCas9
gaggtgacaggggaggtg

SEQ ID NO: 24045 - DNA, 25 bp, Artificial Sequence
  Synthetic: FXN 3 reverse 9:69044675-69044706; SaCas9
tagggagatgcaggggaggtgacag

SEQ ID NO: 24046 - DNA, 24 bp, Artificial Sequence
  Synthetic: FXN 3 reverse 9:69044676-69044706; SaCas9
agggagatgcaggggaggtgacag

SEQ ID NO: 24047 - DNA, 23 bp, Artificial Sequence
  Synthetic: FXN 3 reverse 9:69044677-69044706; SaCas9
gggagatgcaggggaggtgacag

SEQ ID NO: 24048 - DNA, 22 bp, Artificial Sequence
  Synthetic: FXN 3 reverse 9:69044678-69044706; SaCas9
ggagatgcaggggaggtgacag

SEQ ID NO: 24049 - DNA, 21 bp, Artificial Sequence
  Synthetic: FXN 3 reverse 9:69044679-69044706; SaCas9
gagatgcaggggaggtgacag

SEQ ID NO: 24050 - DNA, 20 bp, Artificial Sequence
  Synthetic: FXN 3 reverse 9:69044680-69044706; SaCas9
agatgcaggggaggtgacag

SEQ ID NO: 24051 - DNA, 19 bp, Artificial Sequence
  Synthetic: FXN 3 reverse 9:69044681-69044706; SaCas9
gatgcaggggaggtgacag

SEQ ID NO: 24052 - DNA, 18 bp, Artificial Sequence
  Synthetic: FXN 3 reverse 9:69044682-69044706; SaCas9
atgcaggggaggtgacag

SEQ ID NO: 24053 - DNA, 25 bp, Artificial Sequence
  Synthetic: FXN 3 reverse 9:69044676-69044707; SaCas9
gtagggagatgcaggggaggtgaca

SEQ ID NO: 24054 - DNA, 24 bp, Artificial Sequence
  Synthetic: FXN 3 reverse 9:69044677-69044707; SaCas9
tagggagatgcaggggaggtgaca

SEQ ID NO: 24055 - DNA, 23 bp, Artificial Sequence
  Synthetic: FXN 3 reverse 9:69044678-69044707; SaCas9
agggagatgcaggggaggtgaca

SEQ ID NO: 24056 - DNA, 22 bp, Artificial Sequence
  Synthetic: FXN 3 reverse 9:69044679-69044707; SaCas9
gggagatgcaggggaggtgaca

SEQ ID NO: 24057 - DNA, 21 bp, Artificial Sequence
  Synthetic: FXN 3 reverse 9:69044680-69044707; SaCas9
ggagatgcaggggaggtgaca

SEQ ID NO: 24058 - DNA, 20 bp, Artificial Sequence
  Synthetic: FXN 3 reverse 9:69044681-69044707; SaCas9
gagatgcaggggaggtgaca

SEQ ID NO: 24059 - DNA, 19 bp, Artificial Sequence
  Synthetic: FXN 3 reverse 9:69044682-69044707; SaCas9
agatgcaggggaggtgaca

SEQ ID NO: 24060 - DNA, 18 bp, Artificial Sequence
  Synthetic: FXN 3 reverse 9:69044683-69044707; SaCas9
gatgcaggggaggtgaca

SEQ ID NO: 24061 - DNA, 25 bp, Artificial Sequence
  Synthetic: FXN 3 reverse 9:69044677-69044708; SaCas9
agtagggagatgcaggggaggtgac

SEQ ID NO: 24062 - DNA, 24 bp, Artificial Sequence
  Synthetic: FXN 3 reverse 9:69044678-69044708; SaCas9
gtagggagatgcaggggaggtgac

SEQ ID NO: 24063 - DNA, 23 bp, Artificial Sequence
  Synthetic: FXN 3 reverse 9:69044679-69044708; SaCas9
tagggagatgcaggggaggtgac

SEQ ID NO: 24064 - DNA, 22 bp, Artificial Sequence
  Synthetic: FXN 3 reverse 9:69044680-69044708; SaCas9
agggagatgcaggggaggtgac

SEQ ID NO: 24065 - DNA, 21 bp, Artificial Sequence
  Synthetic: FXN 3 reverse 9:69044681-69044708; SaCas9
gggagatgcaggggaggtgac

SEQ ID NO: 24066 - DNA, 20 bp, Artificial Sequence
  Synthetic: FXN 3 reverse 9:69044682-69044708; SaCas9
ggagatgcaggggaggtgac

SEQ ID NO: 24067 - DNA, 19 bp, Artificial Sequence
  Synthetic: FXN 3 reverse 9:69044683-69044708; SaCas9
gagatgcaggggaggtgac

SEQ ID NO: 24068 - DNA, 18 bp, Artificial Sequence
  Synthetic: FXN 3 reverse 9:69044684-69044708; SaCas9
agatgcaggggaggtgac

SEQ ID NO: 24069 - DNA, 25 bp, Artificial Sequence
  Synthetic: FXN 3 reverse 9:69044678-69044709; SaCas9
gagtagggagatgcaggggaggtga

SEQ ID NO: 24070 - DNA, 24 bp, Artificial Sequence
  Synthetic: FXN 3 reverse 9:69044679-69044709; SaCas9
agtagggagatgcaggggaggtga

SEQ ID NO: 24071 - DNA, 23 bp, Artificial Sequence
  Synthetic: FXN 3 reverse 9:69044680-69044709; SaCas9
gtagggagatgcaggggaggtga

SEQ ID NO: 24072 - DNA, 22 bp, Artificial Sequence
  Synthetic: FXN 3 reverse 9:69044681-69044709; SaCas9
tagggagatgcaggggaggtga

SEQ ID NO: 24073 - DNA, 21 bp, Artificial Sequence
  Synthetic: FXN 3 reverse 9:69044682-69044709; SaCas9
agggagatgcaggggaggtga

SEQ ID NO: 24074 - DNA, 20 bp, Artificial Sequence
  Synthetic: FXN 3 reverse 9:69044683-69044709; SaCas9
gggagatgcaggggaggtga

SEQ ID NO: 24075 - DNA, 19 bp, Artificial Sequence
  Synthetic: FXN 3 reverse 9:69044684-69044709; SaCas9
ggagatgcaggggaggtga

SEQ ID NO: 24076 - DNA, 18 bp, Artificial Sequence
  Synthetic: FXN 3 reverse 9:69044685-69044709; SaCas9
gagatgcaggggaggtga

SEQ ID NO: 24077 - DNA, 25 bp, Artificial Sequence
  Synthetic: FXN 3 reverse 9:69044687-69044718; SaCas9
gtgcagctggagtagggagatgcag

SEQ ID NO: 24078 - DNA, 24 bp, Artificial Sequence
  Synthetic: FXN 3 reverse 9:69044688-69044718; SaCas9
tgcagctggagtagggagatgcag

SEQ ID NO: 24079 - DNA, 23 bp, Artificial Sequence
  Synthetic: FXN 3 reverse 9:69044689-69044718; SaCas9
gcagctggagtagggagatgcag

SEQ ID NO: 24080 - DNA, 22 bp, Artificial Sequence
  Synthetic: FXN 3 reverse 9:69044690-69044718; SaCas9
cagctggagtagggagatgcag

SEQ ID NO: 24081 - DNA, 21 bp, Artificial Sequence
  Synthetic: FXN 3 reverse 9:69044691-69044718; SaCas9
agctggagtagggagatgcag

SEQ ID NO: 24082 - DNA, 20 bp, Artificial Sequence
  Synthetic: FXN 3 reverse 9:69044692-69044718; SaCas9
gctggagtagggagatgcag

SEQ ID NO: 24083 - DNA, 19 bp, Artificial Sequence
  Synthetic: FXN 3 reverse 9:69044693-69044718; SaCas9
ctggagtagggagatgcag

SEQ ID NO: 24084 - DNA, 18 bp, Artificial Sequence
  Synthetic: FXN 3 reverse 9:69044694-69044718; SaCas9
tggagtagggagatgcag

SEQ ID NO: 24085 - DNA, 25 bp, Artificial Sequence
  Synthetic: FXN 3 reverse 9:69044688-69044719; SaCas9
ggtgcagctggagtagggagatgca

SEQ ID NO: 24086 - DNA, 24 bp, Artificial Sequence
  Synthetic: FXN 3 reverse 9:69044689-69044719; SaCas9
gtgcagctggagtagggagatgca

SEQ ID NO: 24087 - DNA, 23 bp, Artificial Sequence
  Synthetic: FXN 3 reverse 9:69044690-69044719; SaCas9
tgcagctggagtagggagatgca

SEQ ID NO: 24088 - DNA, 22 bp, Artificial Sequence
  Synthetic: FXN 3 reverse 9:69044691-69044719; SaCas9
gcagctggagtagggagatgca

SEQ ID NO: 24089 - DNA, 21 bp, Artificial Sequence
  Synthetic: FXN 3 reverse 9:69044692-69044719; SaCas9
cagctggagtagggagatgca

SEQ ID NO: 24090 - DNA, 20 bp, Artificial Sequence
  Synthetic: FXN 3 reverse 9:69044693-69044719; SaCas9
agctggagtagggagatgca

SEQ ID NO: 24091 - DNA, 19 bp, Artificial Sequence
  Synthetic: FXN 3 reverse 9:69044694-69044719; SaCas9
gctggagtagggagatgca

SEQ ID NO: 24092 - DNA, 18 bp, Artificial Sequence
  Synthetic: FXN 3 reverse 9:69044695-69044719; SaCas9
ctggagtagggagatgca

SEQ ID NO: 24093 - DNA, 25 bp, Artificial Sequence
  Synthetic: FXN 3 reverse 9:69044689-69044720; SaCas9
tggtgcagctggagtagggagatgc

SEQ ID NO: 24094 - DNA, 24 bp, Artificial Sequence
  Synthetic: FXN 3 reverse 9:69044690-69044720; SaCas9
ggtgcagctggagtagggagatgc

SEQ ID NO: 24095 - DNA, 23 bp, Artificial Sequence
  Synthetic: FXN 3 reverse 9:69044691-69044720; SaCas9
gtgcagctggagtagggagatgc

SEQ ID NO: 24096 - DNA, 22 bp, Artificial Sequence
  Synthetic: FXN 3 reverse 9:69044692-69044720; SaCas9
tgcagctggagtagggagatgc

SEQ ID NO: 24097 - DNA, 21 bp, Artificial Sequence
  Synthetic: FXN 3 reverse 9:69044693-69044720; SaCas9
gcagctggagtagggagatgc

SEQ ID NO: 24098 - DNA, 20 bp, Artificial Sequence
  Synthetic: FXN 3 reverse 9:69044694-69044720; SaCas9
cagctggagtagggagatgc

SEQ ID NO: 24099 - DNA, 19 bp, Artificial Sequence
  Synthetic: FXN 3 reverse 9:69044695-69044720; SaCas9
agctggagtagggagatgc

SEQ ID NO: 24100 - DNA, 18 bp, Artificial Sequence
  Synthetic: FXN 3 reverse 9:69044696-69044720; SaCas9
gctggagtagggagatgc

SEQ ID NO: 24101 - DNA, 25 bp, Artificial Sequence
  Synthetic: FXN 3 reverse 9:69044690-69044721; SaCas9
gtggtgcagctggagtagggagatg

SEQ ID NO: 24102 - DNA, 24 bp, Artificial Sequence
  Synthetic: FXN 3 reverse 9:69044691-69044721; SaCas9
tggtgcagctggagtagggagatg

SEQ ID NO: 24103 - DNA, 23 bp, Artificial Sequence
  Synthetic: FXN 3 reverse 9:69044692-69044721; SaCas9
ggtgcagctggagtagggagatg

SEQ ID NO: 24104 - DNA, 22 bp, Artificial Sequence
  Synthetic: FXN 3 reverse 9:69044693-69044721; SaCas9
gtgcagctggagtagggagatg

SEQ ID NO: 24105 - DNA, 21 bp, Artificial Sequence
  Synthetic: FXN 3 reverse 9:69044694-69044721; SaCas9
tgcagctggagtagggagatg

SEQ ID NO: 24106 - DNA, 20 bp, Artificial Sequence
  Synthetic: FXN 3 reverse 9:69044695-69044721; SaCas9
gcagctggagtagggagatg

SEQ ID NO: 24107 - DNA, 19 bp, Artificial Sequence
  Synthetic: FXN 3 reverse 9:69044696-69044721; SaCas9
cagctggagtagggagatg

SEQ ID NO: 24108 - DNA, 18 bp, Artificial Sequence
  Synthetic: FXN 3 reverse 9:69044697-69044721; SaCas9
agctggagtagggagatg

SEQ ID NO: 24109 - DNA, 25 bp, Artificial Sequence
  Synthetic: FXN 3 reverse 9:69044698-69044729; SaCas9
gcacaagagtggtgcagctggagta

SEQ ID NO: 24110 - DNA, 24 bp, Artificial Sequence
  Synthetic: FXN 3 reverse 9:69044699-69044729; SaCas9
cacaagagtggtgcagctggagta

SEQ ID NO: 24111 - DNA, 23 bp, Artificial Sequence
  Synthetic: FXN 3 reverse 9:69044700-69044729; SaCas9
acaagagtggtgcagctggagta

SEQ ID NO: 24112 - DNA, 22 bp, Artificial Sequence
  Synthetic: FXN 3 reverse 9:69044701-69044729; SaCas9
caagagtggtgcagctggagta

SEQ ID NO: 24113 - DNA, 21 bp, Artificial Sequence
  Synthetic: FXN 3 reverse 9:69044702-69044729; SaCas9
aagagtggtgcagctggagta

SEQ ID NO: 24114 - DNA, 20 bp, Artificial Sequence
  Synthetic: FXN 3 reverse 9:69044703-69044729; SaCas9
agagtggtgcagctggagta

SEQ ID NO: 24115 - DNA, 19 bp, Artificial Sequence
  Synthetic: FXN 3 reverse 9:69044704-69044729; SaCas9
gagtggtgcagctggagta

SEQ ID NO: 24116 - DNA, 18 bp, Artificial Sequence
  Synthetic: FXN 3 reverse 9:69044705-69044729; SaCas9
agtggtgcagctggagta

SEQ ID NO: 24117 - DNA, 25 bp, Artificial Sequence
  Synthetic: FXN 3 reverse 9:69044699-69044730; SaCas9
ggcacaagagtggtgcagctggagt

SEQ ID NO: 24118 - DNA, 24 bp, Artificial Sequence
  Synthetic: FXN 3 reverse 9:69044700-69044730; SaCas9
gcacaagagtggtgcagctggagt

SEQ ID NO: 24119 - DNA, 23 bp, Artificial Sequence
  Synthetic: FXN 3 reverse 9:69044701-69044730; SaCas9
cacaagagtggtgcagctggagt

SEQ ID NO: 24120 - DNA, 22 bp, Artificial Sequence
  Synthetic: FXN 3 reverse 9:69044702-69044730; SaCas9
acaagagtggtgcagctggagt

SEQ ID NO: 24121 - DNA, 21 bp, Artificial Sequence
  Synthetic: FXN 3 reverse 9:69044703-69044730; SaCas9
caagagtggtgcagctggagt

SEQ ID NO: 24122 - DNA, 20 bp, Artificial Sequence
  Synthetic: FXN 3 reverse 9:69044704-69044730; SaCas9
aagagtggtgcagctggagt

SEQ ID NO: 24123 - DNA, 19 bp, Artificial Sequence
  Synthetic: FXN 3 reverse 9:69044705-69044730; SaCas9
agagtggtgcagctggagt

SEQ ID NO: 24124 - DNA, 18 bp, Artificial Sequence
  Synthetic: FXN 3 reverse 9:69044706-69044730; SaCas9
gagtggtgcagctggagt

SEQ ID NO: 24125 - DNA, 25 bp, Artificial Sequence
  Synthetic: FXN 3 reverse 9:69044700-69044731; SaCas9
gggcacaagagtggtgcagctggag

SEQ ID NO: 24126 - DNA, 24 bp, Artificial Sequence
  Synthetic: FXN 3 reverse 9:69044701-69044731; SaCas9
ggcacaagagtggtgcagctggag

SEQ ID NO: 24127 - DNA, 23 bp, Artificial Sequence
  Synthetic: FXN 3 reverse 9:69044702-69044731; SaCas9
gcacaagagtggtgcagctggag

SEQ ID NO: 24128 - DNA, 22 bp, Artificial Sequence
  Synthetic: FXN 3 reverse 9:69044703-69044731; SaCas9
cacaagagtggtgcagctggag

SEQ ID NO: 24129 - DNA, 21 bp, Artificial Sequence
  Synthetic: FXN 3 reverse 9:69044704-69044731; SaCas9
acaagagtggtgcagctggag

SEQ ID NO: 24130 - DNA, 20 bp, Artificial Sequence
  Synthetic: FXN 3 reverse 9:69044705-69044731; SaCas9
caagagtggtgcagctggag

SEQ ID NO: 24131 - DNA, 19 bp, Artificial Sequence
  Synthetic: FXN 3 reverse 9:69044706-69044731; SaCas9
aagagtggtgcagctggag

SEQ ID NO: 24132 - DNA, 18 bp, Artificial Sequence
  Synthetic: FXN 3 reverse 9:69044707-69044731; SaCas9
agagtggtgcagctggag

SEQ ID NO: 24133 - DNA, 25 bp, Artificial Sequence
  Synthetic: FXN 3 reverse 9:69044705-69044736; SaCas9
cactggggcacaagagtggtgcagc

SEQ ID NO: 24134 - DNA, 24 bp, Artificial Sequence
  Synthetic: FXN 3 reverse 9:69044706-69044736; SaCas9
actggggcacaagagtggtgcagc

SEQ ID NO: 24135 - DNA, 23 bp, Artificial Sequence
  Synthetic: FXN 3 reverse 9:69044707-69044736; SaCas9
ctggggcacaagagtggtgcagc

SEQ ID NO: 24136 - DNA, 22 bp, Artificial Sequence
  Synthetic: FXN 3 reverse 9:69044708-69044736; SaCas9
tggggcacaagagtggtgcagc

SEQ ID NO: 24137 - DNA, 21 bp, Artificial Sequence
  Synthetic: FXN 3 reverse 9:69044709-69044736; SaCas9
ggggcacaagagtggtgcagc

SEQ ID NO: 24138 - DNA, 20 bp, Artificial Sequence
  Synthetic: FXN 3 reverse 9:69044710-69044736; SaCas9
gggcacaagagtggtgcagc

SEQ ID NO: 24139 - DNA, 19 bp, Artificial Sequence
  Synthetic: FXN 3 reverse 9:69044711-69044736; SaCas9
ggcacaagagtggtgcagc

SEQ ID NO: 24140 - DNA, 18 bp, Artificial Sequence
  Synthetic: FXN 3 reverse 9:69044712-69044736; SaCas9
gcacaagagtggtgcagc

SEQ ID NO: 24141 - DNA, 25 bp, Artificial Sequence
  Synthetic: FXN 3 reverse 9:69044706-69044737; SaCas9
ccactggggcacaagagtggtgcag

SEQ ID NO: 24142 - DNA, 24 bp, Artificial Sequence
  Synthetic: FXN 3 reverse 9:69044707-69044737; SaCas9
cactggggcacaagagtggtgcag

SEQ ID NO: 24143 - DNA, 23 bp, Artificial Sequence
  Synthetic: FXN 3 reverse 9:69044708-69044737; SaCas9
actggggcacaagagtggtgcag

SEQ ID NO: 24144 - DNA, 22 bp, Artificial Sequence
  Synthetic: FXN 3 reverse 9:69044709-69044737; SaCas9
ctggggcacaagagtggtgcag

SEQ ID NO: 24145 - DNA, 21 bp, Artificial Sequence
  Synthetic: FXN 3 reverse 9:69044710-69044737; SaCas9
tggggcacaagagtggtgcag

SEQ ID NO: 24146 - DNA, 20 bp, Artificial Sequence
  Synthetic: FXN 3 reverse 9:69044711-69044737; SaCas9
ggggcacaagagtggtgcag

SEQ ID NO: 24147 - DNA, 19 bp, Artificial Sequence
  Synthetic: FXN 3 reverse 9:69044712-69044737; SaCas9
gggcacaagagtggtgcag

SEQ ID NO: 24148 - DNA, 18 bp, Artificial Sequence
  Synthetic: FXN 3 reverse 9:69044713-69044737; SaCas9
ggcacaagagtggtgcag

SEQ ID NO: 24149 - DNA, 25 bp, Artificial Sequence
  Synthetic: FXN 3 reverse 9:69044719-69044750; SaCas9
aatcagacaagagccactggggcac

SEQ ID NO: 24150 - DNA, 24 bp, Artificial Sequence
  Synthetic: FXN 3 reverse 9:69044720-69044750; SaCas9
atcagacaagagccactggggcac

SEQ ID NO: 24151 - DNA, 23 bp, Artificial Sequence
  Synthetic: FXN 3 reverse 9:69044721-69044750; SaCas9
tcagacaagagccactggggcac

SEQ ID NO: 24152 - DNA, 22 bp, Artificial Sequence
  Synthetic: FXN 3 reverse 9:69044722-69044750; SaCas9
cagacaagagccactggggcac

SEQ ID NO: 24153 - DNA, 21 bp, Artificial Sequence
  Synthetic: FXN 3 reverse 9:69044723-69044750; SaCas9
agacaagagccactggggcac

SEQ ID NO: 24154 - DNA, 20 bp, Artificial Sequence
  Synthetic: FXN 3 reverse 9:69044724-69044750; SaCas9
gacaagagccactggggcac

SEQ ID NO: 24155 - DNA, 19 bp, Artificial Sequence
  Synthetic: FXN 3 reverse 9:69044725-69044750; SaCas9
acaagagccactggggcac

SEQ ID NO: 24156 - DNA, 18 bp, Artificial Sequence
  Synthetic: FXN 3 reverse 9:69044726-69044750; SaCas9
caagagccactggggcac

SEQ ID NO: 24157 - DNA, 25 bp, Artificial Sequence
  Synthetic: FXN 3 reverse 9:69044727-69044758; SaCas9
aaggaaataatcagacaagagccac

SEQ ID NO: 24158 - DNA, 24 bp, Artificial Sequence
  Synthetic: FXN 3 reverse 9:69044728-69044758; SaCas9
aggaaataatcagacaagagccac

SEQ ID NO: 24159 - DNA, 23 bp, Artificial Sequence
  Synthetic: FXN 3 reverse 9:69044729-69044758; SaCas9
ggaaataatcagacaagagccac

SEQ ID NO: 24160 - DNA, 22 bp, Artificial Sequence
  Synthetic: FXN 3 reverse 9:69044730-69044758; SaCas9
gaaataatcagacaagagccac

SEQ ID NO: 24161 - DNA, 21 bp, Artificial Sequence
  Synthetic: FXN 3 reverse 9:69044731-69044758; SaCas9
aaataatcagacaagagccac

SEQ ID NO: 24162 - DNA, 20 bp, Artificial Sequence
  Synthetic: FXN 3 reverse 9:69044732-69044758; SaCas9
aataatcagacaagagccac

SEQ ID NO: 24163 - DNA, 19 bp, Artificial Sequence
  Synthetic: FXN 3 reverse 9:69044733-69044758; SaCas9
ataatcagacaagagccac

SEQ ID NO: 24164 - DNA, 18 bp, Artificial Sequence
  Synthetic: FXN 3 reverse 9:69044734-69044758; SaCas9
taatcagacaagagccac

SEQ ID NO: 24165 - DNA, 25 bp, Artificial Sequence
  Synthetic: FXN 3 reverse 9:69044728-69044759; SaCas9
gaaggaaataatcagacaagagcca

SEQ ID NO: 24166 - DNA, 24 bp, Artificial Sequence
  Synthetic: FXN 3 reverse 9:69044729-69044759; SaCas9
aaggaaataatcagacaagagcca

SEQ ID NO: 24167 - DNA, 23 bp, Artificial Sequence
  Synthetic: FXN 3 reverse 9:69044730-69044759; SaCas9
aggaaataatcagacaagagcca

SEQ ID NO: 24168 - DNA, 22 bp, Artificial Sequence
  Synthetic: FXN 3 reverse 9:69044731-69044759; SaCas9
ggaaataatcagacaagagcca

SEQ ID NO: 24169 - DNA, 21 bp, Artificial Sequence
  Synthetic: FXN 3 reverse 9:69044732-69044759; SaCas9
gaaataatcagacaagagcca

SEQ ID NO: 24170 - DNA, 20 bp, Artificial Sequence
  Synthetic: FXN 3 reverse 9:69044733-69044759; SaCas9
aaataatcagacaagagcca

SEQ ID NO: 24171 - DNA, 19 bp, Artificial Sequence
  Synthetic: FXN 3 reverse 9:69044734-69044759; SaCas9
aataatcagacaagagcca

SEQ ID NO: 24172 - DNA, 18 bp, Artificial Sequence
  Synthetic: FXN 3 reverse 9:69044735-69044759; SaCas9
ataatcagacaagagcca

SEQ ID NO: 24173 - DNA, 25 bp, Artificial Sequence
  Synthetic: FXN 3 reverse 9:69044736-69044767; SaCas9
ggggagatgaaggaaataatcagac

SEQ ID NO: 24174 - DNA, 24 bp, Artificial Sequence
  Synthetic: FXN 3 reverse 9:69044737-69044767; SaCas9
gggagatgaaggaaataatcagac

SEQ ID NO: 24175 - DNA, 23 bp, Artificial Sequence
  Synthetic: FXN 3 reverse 9:69044738-69044767; SaCas9
ggagatgaaggaaataatcagac

SEQ ID NO: 24176 - DNA, 22 bp, Artificial Sequence
  Synthetic: FXN 3 reverse 9:69044739-69044767; SaCas9
gagatgaaggaaataatcagac

SEQ ID NO: 24177 - DNA, 21 bp, Artificial Sequence
  Synthetic: FXN 3 reverse 9:69044740-69044767; SaCas9
agatgaaggaaataatcagac

SEQ ID NO: 24178 - DNA, 20 bp, Artificial Sequence
  Synthetic: FXN 3 reverse 9:69044741-69044767; SaCas9
gatgaaggaaataatcagac

SEQ ID NO: 24179 - DNA, 19 bp, Artificial Sequence
  Synthetic: FXN 3 reverse 9:69044742-69044767; SaCas9
atgaaggaaataatcagac

SEQ ID NO: 24180 - DNA, 18 bp, Artificial Sequence
  Synthetic: FXN 3 reverse 9:69044743-69044767; SaCas9
tgaaggaaataatcagac

SEQ ID NO: 24181 - DNA, 25 bp, Artificial Sequence
  Synthetic: FXN 3 reverse 9:69044751-69044782; SaCas9
ctctgctgaccagctggggagatga

SEQ ID NO: 24182 - DNA, 24 bp, Artificial Sequence
  Synthetic: FXN 3 reverse 9:69044752-69044782; SaCas9
tctgctgaccagctggggagatga

SEQ ID NO: 24183 - DNA, 23 bp, Artificial Sequence
  Synthetic: FXN 3 reverse 9:69044753-69044782; SaCas9
ctgctgaccagctggggagatga

SEQ ID NO: 24184 - DNA, 22 bp, Artificial Sequence
  Synthetic: FXN 3 reverse 9:69044754-69044782; SaCas9
tgctgaccagctggggagatga

SEQ ID NO: 24185 - DNA, 21 bp, Artificial Sequence
  Synthetic: FXN 3 reverse 9:69044755-69044782; SaCas9
gctgaccagctggggagatga

SEQ ID NO: 24186 - DNA, 20 bp, Artificial Sequence
  Synthetic: FXN 3 reverse 9:69044756-69044782; SaCas9
ctgaccagctggggagatga

SEQ ID NO: 24187 - DNA, 19 bp, Artificial Sequence
  Synthetic: FXN 3 reverse 9:69044757-69044782; SaCas9
tgaccagctggggagatga

SEQ ID NO: 24188 - DNA, 18 bp, Artificial Sequence
  Synthetic: FXN 3 reverse 9:69044758-69044782; SaCas9
gaccagctggggagatga

SEQ ID NO: 24189 - DNA, 25 bp, Artificial Sequence
  Synthetic: FXN 3 forward 9:69044752-69044783; SaCas9
ttccttcatctccccagctggtcag

SEQ ID NO: 24190 - DNA, 24 bp, Artificial Sequence
  Synthetic: FXN 3 forward 9:69044753-69044783; SaCas9
tccttcatctccccagctggtcag

SEQ ID NO: 24191 - DNA, 23 bp, Artificial Sequence
  Synthetic: FXN 3 forward 9:69044754-69044783; SaCas9
ccttcatctccccagctggtcag

SEQ ID NO: 24192 - DNA, 22 bp, Artificial Sequence
  Synthetic: FXN 3 forward 9:69044755-69044783; SaCas9
cttcatctccccagctggtcag

SEQ ID NO: 24193 - DNA, 21 bp, Artificial Sequence
  Synthetic: FXN 3 forward 9:69044756-69044783; SaCas9
ttcatctccccagctggtcag

SEQ ID NO: 24194 - DNA, 20 bp, Artificial Sequence
  Synthetic: FXN 3 forward 9:69044757-69044783; SaCas9
tcatctccccagctggtcag

SEQ ID NO: 24195 - DNA, 19 bp, Artificial Sequence
  Synthetic: FXN 3 forward 9:69044758-69044783; SaCas9
catctccccagctggtcag

SEQ ID NO: 24196 - DNA, 18 bp, Artificial Sequence
  Synthetic: FXN 3 forward 9:69044759-69044783; SaCas9
atctccccagctggtcag

SEQ ID NO: 24197 - DNA, 25 bp, Artificial Sequence
  Synthetic: FXN 3 reverse 9:69044752-69044783; SaCas9
gctctgctgaccagctggggagatg

SEQ ID NO: 24198 - DNA, 24 bp, Artificial Sequence
  Synthetic: FXN 3 reverse 9:69044753-69044783; SaCas9
ctctgctgaccagctggggagatg

SEQ ID NO: 24199 - DNA, 23 bp, Artificial Sequence
  Synthetic: FXN 3 reverse 9:69044754-69044783; SaCas9
tctgctgaccagctggggagatg

SEQ ID NO: 24200 - DNA, 22 bp, Artificial Sequence
  Synthetic: FXN 3 reverse 9:69044755-69044783; SaCas9
ctgctgaccagctggggagatg

SEQ ID NO: 24201 - DNA, 21 bp, Artificial Sequence
  Synthetic: FXN 3 reverse 9:69044756-69044783; SaCas9
tgctgaccagctggggagatg

SEQ ID NO: 24202 - DNA, 20 bp, Artificial Sequence
  Synthetic: FXN 3 reverse 9:69044757-69044783; SaCas9
gctgaccagctggggagatg

SEQ ID NO: 24203 - DNA, 19 bp, Artificial Sequence
  Synthetic: FXN 3 reverse 9:69044758-69044783; SaCas9
ctgaccagctggggagatg

SEQ ID NO: 24204 - DNA, 18 bp, Artificial Sequence
  Synthetic: FXN 3 reverse 9:69044759-69044783; SaCas9
tgaccagctggggagatg

SEQ ID NO: 24205 - DNA, 25 bp, Artificial Sequence
  Synthetic: FXN 3 reverse 9:69044755-69044786; SaCas9
ccagctctgctgaccagctggggag

SEQ ID NO: 24206 - DNA, 24 bp, Artificial Sequence
  Synthetic: FXN 3 reverse 9:69044756-69044786; SaCas9
cagctctgctgaccagctggggag

SEQ ID NO: 24207 - DNA, 23 bp, Artificial Sequence
  Synthetic: FXN 3 reverse 9:69044757-69044786; SaCas9
agctctgctgaccagctggggag

SEQ ID NO: 24208 - DNA, 22 bp, Artificial Sequence
  Synthetic: FXN 3 reverse 9:69044758-69044786; SaCas9
gctctgctgaccagctggggag

SEQ ID NO: 24209 - DNA, 21 bp, Artificial Sequence
  Synthetic: FXN 3 reverse 9:69044759-69044786; SaCas9
ctctgctgaccagctggggag

SEQ ID NO: 24210 - DNA, 20 bp, Artificial Sequence
  Synthetic: FXN 3 reverse 9:69044760-69044786; SaCas9
tctgctgaccagctggggag

SEQ ID NO: 24211 - DNA, 19 bp, Artificial Sequence
  Synthetic: FXN 3 reverse 9:69044761-69044786; SaCas9
ctgctgaccagctggggag

SEQ ID NO: 24212 - DNA, 18 bp, Artificial Sequence
  Synthetic: FXN 3 reverse 9:69044762-69044786; SaCas9
tgctgaccagctggggag

SEQ ID NO: 24213 - DNA, 25 bp, Artificial Sequence
  Synthetic: FXN 3 reverse 9:69044760-69044791; SaCas9
taccaccagctctgctgaccagctg

SEQ ID NO: 24214 - DNA, 24 bp, Artificial Sequence
  Synthetic: FXN 3 reverse 9:69044761-69044791; SaCas9
accaccagctctgctgaccagctg

SEQ ID NO: 24215 - DNA, 23 bp, Artificial Sequence
  Synthetic: FXN 3 reverse 9:69044762-69044791; SaCas9
ccaccagctctgctgaccagctg

SEQ ID NO: 24216 - DNA, 22 bp, Artificial Sequence
  Synthetic: FXN 3 reverse 9:69044763-69044791; SaCas9
caccagctctgctgaccagctg

SEQ ID NO: 24217 - DNA, 21 bp, Artificial Sequence
  Synthetic: FXN 3 reverse 9:69044764-69044791; SaCas9
accagctctgctgaccagctg

SEQ ID NO: 24218 - DNA, 20 bp, Artificial Sequence
  Synthetic: FXN 3 reverse 9:69044765-69044791; SaCas9
ccagctctgctgaccagctg

SEQ ID NO: 24219 - DNA, 19 bp, Artificial Sequence
  Synthetic: FXN 3 reverse 9:69044766-69044791; SaCas9
cagctctgctgaccagctg

SEQ ID NO: 24220 - DNA, 18 bp, Artificial Sequence
  Synthetic: FXN 3 reverse 9:69044767-69044791; SaCas9
agctctgctgaccagctg

SEQ ID NO: 24221 - DNA, 25 bp, Artificial Sequence
  Synthetic: FXN 3 reverse 9:69044761-69044792; SaCas9
ttaccaccagctctgctgaccagct

SEQ ID NO: 24222 - DNA, 24 bp, Artificial Sequence
  Synthetic: FXN 3 reverse 9:69044762-69044792; SaCas9
taccaccagctctgctgaccagct

SEQ ID NO: 24223 - DNA, 23 bp, Artificial Sequence
  Synthetic: FXN 3 reverse 9:69044763-69044792; SaCas9
accaccagctctgctgaccagct

SEQ ID NO: 24224 - DNA, 22 bp, Artificial Sequence
  Synthetic: FXN 3 reverse 9:69044764-69044792; SaCas9
ccaccagctctgctgaccagct

SEQ ID NO: 24225 - DNA, 21 bp, Artificial Sequence
  Synthetic: FXN 3 reverse 9:69044765-69044792; SaCas9
caccagctctgctgaccagct

SEQ ID NO: 24226 - DNA, 20 bp, Artificial Sequence
  Synthetic: FXN 3 reverse 9:69044766-69044792; SaCas9
accagctctgctgaccagct

SEQ ID NO: 24227 - DNA, 19 bp, Artificial Sequence
  Synthetic: FXN 3 reverse 9:69044767-69044792; SaCas9
ccagctctgctgaccagct

SEQ ID NO: 24228 - DNA, 18 bp, Artificial Sequence
  Synthetic: FXN 3 reverse 9:69044768-69044792; SaCas9
cagctctgctgaccagct

SEQ ID NO: 24229 - DNA, 25 bp, Artificial Sequence
  Synthetic: FXN 3 reverse 9:69044762-69044793; SaCas9
attaccaccagctctgctgaccagc

SEQ ID NO: 24230 - DNA, 24 bp, Artificial Sequence
  Synthetic: FXN 3 reverse 9:69044763-69044793; SaCas9
ttaccaccagctctgctgaccagc

SEQ ID NO: 24231 - DNA, 23 bp, Artificial Sequence
  Synthetic: FXN 3 reverse 9:69044764-69044793; SaCas9
taccaccagctctgctgaccagc

SEQ ID NO: 24232 - DNA, 22 bp, Artificial Sequence
  Synthetic: FXN 3 reverse 9:69044765-69044793; SaCas9
accaccagctctgctgaccagc

SEQ ID NO: 24233 - DNA, 21 bp, Artificial Sequence
  Synthetic: FXN 3 reverse 9:69044766-69044793; SaCas9
ccaccagctctgctgaccagc

SEQ ID NO: 24234 - DNA, 20 bp, Artificial Sequence
  Synthetic: FXN 3 reverse 9:69044767-69044793; SaCas9
caccagctctgctgaccagc

SEQ ID NO: 24235 - DNA, 19 bp, Artificial Sequence
  Synthetic: FXN 3 reverse 9:69044768-69044793; SaCas9
accagctctgctgaccagc

SEQ ID NO: 24236 - DNA, 18 bp, Artificial Sequence
  Synthetic: FXN 3 reverse 9:69044769-69044793; SaCas9
ccagctctgctgaccagc

SEQ ID NO: 24237 - DNA, 25 bp, Artificial Sequence
  Synthetic: FXN 3 reverse 9:69044763-69044794; SaCas9
gattaccaccagctctgctgaccag

SEQ ID NO: 24238 - DNA, 24 bp, Artificial Sequence
  Synthetic: FXN 3 reverse 9:69044764-69044794; SaCas9
attaccaccagctctgctgaccag

SEQ ID NO: 24239 - DNA, 23 bp, Artificial Sequence
  Synthetic: FXN 3 reverse 9:69044765-69044794; SaCas9
ttaccaccagctctgctgaccag

SEQ ID NO: 24240 - DNA, 22 bp, Artificial Sequence
  Synthetic: FXN 3 reverse 9:69044766-69044794; SaCas9
taccaccagctctgctgaccag

SEQ ID NO: 24241 - DNA, 21 bp, Artificial Sequence
  Synthetic: FXN 3 reverse 9:69044767-69044794; SaCas9
accaccagctctgctgaccag

SEQ ID NO: 24242 - DNA, 20 bp, Artificial Sequence
  Synthetic: FXN 3 reverse 9:69044768-69044794; SaCas9
ccaccagctctgctgaccag

SEQ ID NO: 24243 - DNA, 19 bp, Artificial Sequence
  Synthetic: FXN 3 reverse 9:69044769-69044794; SaCas9
caccagctctgctgaccag

SEQ ID NO: 24244 - DNA, 18 bp, Artificial Sequence
  Synthetic: FXN 3 reverse 9:69044770-69044794; SaCas9
accagctctgctgaccag

SEQ ID NO: 24245 - DNA, 25 bp, Artificial Sequence
  Synthetic: FXN 3 forward 9:69044786-69044817; SaCas9
tggtaatcaactcagaccctgtcac

SEQ ID NO: 24246 - DNA, 24 bp, Artificial Sequence
  Synthetic: FXN 3 forward 9:69044787-69044817; SaCas9
ggtaatcaactcagaccctgtcac

SEQ ID NO: 24247 - DNA, 23 bp, Artificial Sequence
  Synthetic: FXN 3 forward 9:69044788-69044817; SaCas9
gtaatcaactcagaccctgtcac

SEQ ID NO: 24248 - DNA, 22 bp, Artificial Sequence
  Synthetic: FXN 3 forward 9:69044789-69044817; SaCas9
taatcaactcagaccctgtcac

SEQ ID NO: 24249 - DNA, 21 bp, Artificial Sequence
  Synthetic: FXN 3 forward 9:69044790-69044817; SaCas9
aatcaactcagaccctgtcac

SEQ ID NO: 24250 - DNA, 20 bp, Artificial Sequence
  Synthetic: FXN 3 forward 9:69044791-69044817; SaCas9
atcaactcagaccctgtcac

SEQ ID NO: 24251 - DNA, 19 bp, Artificial Sequence
  Synthetic: FXN 3 forward 9:69044792-69044817; SaCas9
tcaactcagaccctgtcac

SEQ ID NO: 24252 - DNA, 18 bp, Artificial Sequence
  Synthetic: FXN 3 forward 9:69044793-69044817; SaCas9
caactcagaccctgtcac

SEQ ID NO: 24253 - DNA, 25 bp, Artificial Sequence
  Synthetic: FXN 3 reverse 9:69044795-69044826; SaCas9
ctgctggacatccaggtgacagggt

SEQ ID NO: 24254 - DNA, 24 bp, Artificial Sequence
  Synthetic: FXN 3 reverse 9:69044796-69044826; SaCas9
tgctggacatccaggtgacagggt

SEQ ID NO: 24255 - DNA, 23 bp, Artificial Sequence
  Synthetic: FXN 3 reverse 9:69044797-69044826; SaCas9
gctggacatccaggtgacagggt

SEQ ID NO: 24256 - DNA, 22 bp, Artificial Sequence
  Synthetic: FXN 3 reverse 9:69044798-69044826; SaCas9
ctggacatccaggtgacagggt

SEQ ID NO: 24257 - DNA, 21 bp, Artificial Sequence
  Synthetic: FXN 3 reverse 9:69044799-69044826; SaCas9
tggacatccaggtgacagggt

SEQ ID NO: 24258 - DNA, 20 bp, Artificial Sequence
  Synthetic: FXN 3 reverse 9:69044800-69044826; SaCas9
ggacatccaggtgacagggt

SEQ ID NO: 24259 - DNA, 19 bp, Artificial Sequence
  Synthetic: FXN 3 reverse 9:69044801-69044826; SaCas9
gacatccaggtgacagggt

SEQ ID NO: 24260 - DNA, 18 bp, Artificial Sequence
  Synthetic: FXN 3 reverse 9:69044802-69044826; SaCas9
acatccaggtgacagggt

SEQ ID NO: 24261 - DNA, 25 bp, Artificial Sequence
  Synthetic: FXN 3 reverse 9:69044801-69044832; SaCas9
ccctaactgctggacatccaggtga

SEQ ID NO: 24262 - DNA, 24 bp, Artificial Sequence
  Synthetic: FXN 3 reverse 9:69044802-69044832; SaCas9
cctaactgctggacatccaggtga

SEQ ID NO: 24263 - DNA, 23 bp, Artificial Sequence
  Synthetic: FXN 3 reverse 9:69044803-69044832; SaCas9
ctaactgctggacatccaggtga

SEQ ID NO: 24264 - DNA, 22 bp, Artificial Sequence
  Synthetic: FXN 3 reverse 9:69044804-69044832; SaCas9
taactgctggacatccaggtga

SEQ ID NO: 24265 - DNA, 21 bp, Artificial Sequence
  Synthetic: FXN 3 reverse 9:69044805-69044832; SaCas9
aactgctggacatccaggtga

SEQ ID NO: 24266 - DNA, 20 bp, Artificial Sequence
  Synthetic: FXN 3 reverse 9:69044806-69044832; SaCas9
actgctggacatccaggtga

SEQ ID NO: 24267 - DNA, 19 bp, Artificial Sequence
  Synthetic: FXN 3 reverse 9:69044807-69044832; SaCas9
ctgctggacatccaggtga

SEQ ID NO: 24268 - DNA, 18 bp, Artificial Sequence
  Synthetic: FXN 3 reverse 9:69044808-69044832; SaCas9
tgctggacatccaggtga

SEQ ID NO: 24269 - DNA, 25 bp, Artificial Sequence
  Synthetic: FXN 3 forward 9:69044802-69044833; SaCas9
ccctgtcacctggatgtccagcagt

SEQ ID NO: 24270 - DNA, 24 bp, Artificial Sequence
  Synthetic: FXN 3 forward 9:69044803-69044833; SaCas9
cctgtcacctggatgtccagcagt

SEQ ID NO: 24271 - DNA, 23 bp, Artificial Sequence
  Synthetic: FXN 3 forward 9:69044804-69044833; SaCas9
ctgtcacctggatgtccagcagt

SEQ ID NO: 24272 - DNA, 22 bp, Artificial Sequence
  Synthetic: FXN 3 forward 9:69044805-69044833; SaCas9
tgtcacctggatgtccagcagt

SEQ ID NO: 24273 - DNA, 21 bp, Artificial Sequence
  Synthetic: FXN 3 forward 9:69044806-69044833; SaCas9
gtcacctggatgtccagcagt

SEQ ID NO: 24274 - DNA, 20 bp, Artificial Sequence
  Synthetic: FXN 3 forward 9:69044807-69044833; SaCas9
tcacctggatgtccagcagt

SEQ ID NO: 24275 - DNA, 19 bp, Artificial Sequence
  Synthetic: FXN 3 forward 9:69044808-69044833; SaCas9
cacctggatgtccagcagt

SEQ ID NO: 24276 - DNA, 18 bp, Artificial Sequence
  Synthetic: FXN 3 forward 9:69044809-69044833; SaCas9
acctggatgtccagcagt

SEQ ID NO: 24277 - DNA, 25 bp, Artificial Sequence
  Synthetic: FXN 3 forward 9:69044803-69044834; SaCas9
cctgtcacctggatgtccagcagtt

SEQ ID NO: 24278 - DNA, 24 bp, Artificial Sequence
  Synthetic: FXN 3 forward 9:69044804-69044834; SaCas9
ctgtcacctggatgtccagcagtt

SEQ ID NO: 24279 - DNA, 23 bp, Artificial Sequence
  Synthetic: FXN 3 forward 9:69044805-69044834; SaCas9
tgtcacctggatgtccagcagtt

SEQ ID NO: 24280 - DNA, 22 bp, Artificial Sequence
  Synthetic: FXN 3 forward 9:69044806-69044834; SaCas9
gtcacctggatgtccagcagtt

SEQ ID NO: 24281 - DNA, 21 bp, Artificial Sequence
  Synthetic: FXN 3 forward 9:69044807-69044834; SaCas9
tcacctggatgtccagcagtt

SEQ ID NO: 24282 - DNA, 20 bp, Artificial Sequence
  Synthetic: FXN 3 forward 9:69044808-69044834; SaCas9
cacctggatgtccagcagtt

SEQ ID NO: 24283 - DNA, 19 bp, Artificial Sequence
  Synthetic: FXN 3 forward 9:69044809-69044834; SaCas9
acctggatgtccagcagtt

SEQ ID NO: 24284 - DNA, 18 bp, Artificial Sequence
  Synthetic: FXN 3 forward 9:69044810-69044834; SaCas9
cctggatgtccagcagtt

SEQ ID NO: 24285 - DNA, 25 bp, Artificial Sequence
  Synthetic: FXN 3 reverse 9:69044817-69044848; SaCas9
gttgattttttttagtccctaactg

SEQ ID NO: 24286 - DNA, 24 bp, Artificial Sequence
  Synthetic: FXN 3 reverse 9:69044818-69044848; SaCas9
ttgattttttttagtccctaactg

SEQ ID NO: 24287 - DNA, 23 bp, Artificial Sequence
  Synthetic: FXN 3 reverse 9:69044819-69044848; SaCas9
tgattttttttagtccctaactg

SEQ ID NO: 24288 - DNA, 22 bp, Artificial Sequence
  Synthetic: FXN 3 reverse 9:69044820-69044848; SaCas9
gattttttttagtccctaactg

SEQ ID NO: 24289 - DNA, 21 bp, Artificial Sequence
  Synthetic: FXN 3 reverse 9:69044821-69044848; SaCas9
attttttttagtccctaactg

SEQ ID NO: 24290 - DNA, 20 bp, Artificial Sequence
  Synthetic: FXN 3 reverse 9:69044822-69044848; SaCas9
ttttttttagtccctaactg

SEQ ID NO: 24291 - DNA, 19 bp, Artificial Sequence
  Synthetic: FXN 3 reverse 9:69044823-69044848; SaCas9
tttttttagtccctaactg

SEQ ID NO: 24292 - DNA, 18 bp, Artificial Sequence
  Synthetic: FXN 3 reverse 9:69044824-69044848; SaCas9
ttttttagtccctaactg

SEQ ID NO: 24293 - DNA, 25 bp, Artificial Sequence
  Synthetic: FXN 3 reverse 9:69044855-69044886; SaCas9
gatcttattatcatgatctgcagga

SEQ ID NO: 24294 - DNA, 24 bp, Artificial Sequence
  Synthetic: FXN 3 reverse 9:69044856-69044886; SaCas9
atcttattatcatgatctgcagga

SEQ ID NO: 24295 - DNA, 23 bp, Artificial Sequence
  Synthetic: FXN 3 reverse 9:69044857-69044886; SaCas9
tcttattatcatgatctgcagga

SEQ ID NO: 24296 - DNA, 22 bp, Artificial Sequence
  Synthetic: FXN 3 reverse 9:69044858-69044886; SaCas9
cttattatcatgatctgcagga

SEQ ID NO: 24297 - DNA, 21 bp, Artificial Sequence
  Synthetic: FXN 3 reverse 9:69044859-69044886; SaCas9
ttattatcatgatctgcagga

SEQ ID NO: 24298 - DNA, 20 bp, Artificial Sequence
  Synthetic: FXN 3 reverse 9:69044860-69044886; SaCas9
tattatcatgatctgcagga

SEQ ID NO: 24299 - DNA, 19 bp, Artificial Sequence
  Synthetic: FXN 3 reverse 9:69044861-69044886; SaCas9
attatcatgatctgcagga

SEQ ID NO: 24300 - DNA, 18 bp, Artificial Sequence
  Synthetic: FXN 3 reverse 9:69044862-69044886; SaCas9
ttatcatgatctgcagga

SEQ ID NO: 24301 - DNA, 25 bp, Artificial Sequence
  Synthetic: FXN 3 reverse 9:69044860-69044891; SaCas9
tgacagatcttattatcatgatctg

SEQ ID NO: 24302 - DNA, 24 bp, Artificial Sequence
  Synthetic: FXN 3 reverse 9:69044861-69044891; SaCas9
gacagatcttattatcatgatctg

SEQ ID NO: 24303 - DNA, 23 bp, Artificial Sequence
  Synthetic: FXN 3 reverse 9:69044862-69044891; SaCas9
acagatcttattatcatgatctg

SEQ ID NO: 24304 - DNA, 22 bp, Artificial Sequence
  Synthetic: FXN 3 reverse 9:69044863-69044891; SaCas9
cagatcttattatcatgatctg

SEQ ID NO: 24305 - DNA, 21 bp, Artificial Sequence
  Synthetic: FXN 3 reverse 9:69044864-69044891; SaCas9
agatcttattatcatgatctg

SEQ ID NO: 24306 - DNA, 20 bp, Artificial Sequence
  Synthetic: FXN 3 reverse 9:69044865-69044891; SaCas9
gatcttattatcatgatctg

SEQ ID NO: 24307 - DNA, 19 bp, Artificial Sequence
  Synthetic: FXN 3 reverse 9:69044866-69044891; SaCas9
atcttattatcatgatctg

SEQ ID NO: 24308 - DNA, 18 bp, Artificial Sequence
  Synthetic: FXN 3 reverse 9:69044867-69044891; SaCas9
tcttattatcatgatctg

SEQ ID NO: 24309 - DNA, 25 bp, Artificial Sequence
  Synthetic: FXN 3 forward 9:69044882-69044913; SaCas9
gatctgtcagacagcagtcagcagt

SEQ ID NO: 24310 - DNA, 24 bp, Artificial Sequence
  Synthetic: FXN 3 forward 9:69044883-69044913; SaCas9
atctgtcagacagcagtcagcagt

SEQ ID NO: 24311 - DNA, 23 bp, Artificial Sequence
  Synthetic: FXN 3 forward 9:69044884-69044913; SaCas9
tctgtcagacagcagtcagcagt

SEQ ID NO: 24312 - DNA, 22 bp, Artificial Sequence
  Synthetic: FXN 3 forward 9:69044885-69044913; SaCas9
ctgtcagacagcagtcagcagt

SEQ ID NO: 24313 - DNA, 21 bp, Artificial Sequence
  Synthetic: FXN 3 forward 9:69044886-69044913; SaCas9
tgtcagacagcagtcagcagt

SEQ ID NO: 24314 - DNA, 20 bp, Artificial Sequence
  Synthetic: FXN 3 forward 9:69044887-69044913; SaCas9
gtcagacagcagtcagcagt

SEQ ID NO: 24315 - DNA, 19 bp, Artificial Sequence
  Synthetic: FXN 3 forward 9:69044888-69044913; SaCas9
tcagacagcagtcagcagt

SEQ ID NO: 24316 - DNA, 18 bp, Artificial Sequence
  Synthetic: FXN 3 forward 9:69044889-69044913; SaCas9
cagacagcagtcagcagt

SEQ ID NO: 24317 - DNA, 25 bp, Artificial Sequence
  Synthetic: FXN 3 forward 9:69044896-69044927; SaCas9
cagtcagcagtcagagccaaatctt

SEQ ID NO: 24318 - DNA, 24 bp, Artificial Sequence
  Synthetic: FXN 3 forward 9:69044897-69044927; SaCas9
agtcagcagtcagagccaaatctt

SEQ ID NO: 24319 - DNA, 23 bp, Artificial Sequence
  Synthetic: FXN 3 forward 9:69044898-69044927; SaCas9
gtcagcagtcagagccaaatctt

SEQ ID NO: 24320 - DNA, 22 bp, Artificial Sequence
  Synthetic: FXN 3 forward 9:69044899-69044927; SaCas9
tcagcagtcagagccaaatctt

SEQ ID NO: 24321 - DNA, 21 bp, Artificial Sequence
  Synthetic: FXN 3 forward 9:69044900-69044927; SaCas9
cagcagtcagagccaaatctt

SEQ ID NO: 24322 - DNA, 20 bp, Artificial Sequence
  Synthetic: FXN 3 forward 9:69044901-69044927; SaCas9
agcagtcagagccaaatctt

SEQ ID NO: 24323 - DNA, 19 bp, Artificial Sequence
  Synthetic: FXN 3 forward 9:69044902-69044927; SaCas9
gcagtcagagccaaatctt

SEQ ID NO: 24324 - DNA, 18 bp, Artificial Sequence
  Synthetic: FXN 3 forward 9:69044903-69044927; SaCas9
cagtcagagccaaatctt

SEQ ID NO: 24325 - DNA, 25 bp, Artificial Sequence
  Synthetic: FXN 3 forward 9:69044907-69044938; SaCas9
cagagccaaatcttctggacttcag

SEQ ID NO: 24326 - DNA, 24 bp, Artificial Sequence
  Synthetic: FXN 3 forward 9:69044908-69044938; SaCas9
agagccaaatcttctggacttcag

SEQ ID NO: 24327 - DNA, 23 bp, Artificial Sequence
  Synthetic: FXN 3 forward 9:69044909-69044938; SaCas9
gagccaaatcttctggacttcag

SEQ ID NO: 24328 - DNA, 22 bp, Artificial Sequence
  Synthetic: FXN 3 forward 9:69044910-69044938; SaCas9
agccaaatcttctggacttcag

SEQ ID NO: 24329 - DNA, 21 bp, Artificial Sequence
  Synthetic: FXN 3 forward 9:69044911-69044938; SaCas9
gccaaatcttctggacttcag

SEQ ID NO: 24330 - DNA, 20 bp, Artificial Sequence
  Synthetic: FXN 3 forward 9:69044912-69044938; SaCas9
ccaaatcttctggacttcag

SEQ ID NO: 24331 - DNA, 19 bp, Artificial Sequence
  Synthetic: FXN 3 forward 9:69044913-69044938; SaCas9
caaatcttctggacttcag

SEQ ID NO: 24332 - DNA, 18 bp, Artificial Sequence
  Synthetic: FXN 3 forward 9:69044914-69044938; SaCas9
aaatcttctggacttcag

SEQ ID NO: 24333 - DNA, 25 bp, Artificial Sequence
  Synthetic: FXN 3 reverse 9:69044918-69044949; SaCas9
caagaggcagaatcctgctgaagtc

SEQ ID NO: 24334 - DNA, 24 bp, Artificial Sequence
  Synthetic: FXN 3 reverse 9:69044919-69044949; SaCas9
aagaggcagaatcctgctgaagtc

SEQ ID NO: 24335 - DNA, 23 bp, Artificial Sequence
  Synthetic: FXN 3 reverse 9:69044920-69044949; SaCas9
agaggcagaatcctgctgaagtc

SEQ ID NO: 24336 - DNA, 22 bp, Artificial Sequence
  Synthetic: FXN 3 reverse 9:69044921-69044949; SaCas9
gaggcagaatcctgctgaagtc

SEQ ID NO: 24337 - DNA, 21 bp, Artificial Sequence
  Synthetic: FXN 3 reverse 9:69044922-69044949; SaCas9
aggcagaatcctgctgaagtc

SEQ ID NO: 24338 - DNA, 20 bp, Artificial Sequence
  Synthetic: FXN 3 reverse 9:69044923-69044949; SaCas9
ggcagaatcctgctgaagtc

SEQ ID NO: 24339 - DNA, 19 bp, Artificial Sequence
  Synthetic: FXN 3 reverse 9:69044924-69044949; SaCas9
gcagaatcctgctgaagtc

SEQ ID NO: 24340 - DNA, 18 bp, Artificial Sequence
  Synthetic: FXN 3 reverse 9:69044925-69044949; SaCas9
cagaatcctgctgaagtc

SEQ ID NO: 24341 - DNA, 25 bp, Artificial Sequence
  Synthetic: FXN 3 reverse 9:69044926-69044957; SaCas9
ggaaatagcaagaggcagaatcctg

SEQ ID NO: 24342 - DNA, 24 bp, Artificial Sequence
  Synthetic: FXN 3 reverse 9:69044927-69044957; SaCas9
gaaatagcaagaggcagaatcctg

SEQ ID NO: 24343 - DNA, 23 bp, Artificial Sequence
  Synthetic: FXN 3 reverse 9:69044928-69044957; SaCas9
aaatagcaagaggcagaatcctg

SEQ ID NO: 24344 - DNA, 22 bp, Artificial Sequence
  Synthetic: FXN 3 reverse 9:69044929-69044957; SaCas9
aatagcaagaggcagaatcctg

SEQ ID NO: 24345 - DNA, 21 bp, Artificial Sequence
  Synthetic: FXN 3 reverse 9:69044930-69044957; SaCas9
atagcaagaggcagaatcctg

SEQ ID NO: 24346 - DNA, 20 bp, Artificial Sequence
  Synthetic: FXN 3 reverse 9:69044931-69044957; SaCas9
tagcaagaggcagaatcctg

SEQ ID NO: 24347 - DNA, 19 bp, Artificial Sequence
  Synthetic: FXN 3 reverse 9:69044932-69044957; SaCas9
agcaagaggcagaatcctg

SEQ ID NO: 24348 - DNA, 18 bp, Artificial Sequence
  Synthetic: FXN 3 reverse 9:69044933-69044957; SaCas9
gcaagaggcagaatcctg

SEQ ID NO: 24349 - DNA, 25 bp, Artificial Sequence
  Synthetic: FXN 3 reverse 9:69044936-69044967; SaCas9
agaggcaacaggaaatagcaagagg

SEQ ID NO: 24350 - DNA, 24 bp, Artificial Sequence
  Synthetic: FXN 3 reverse 9:69044937-69044967; SaCas9
gaggcaacaggaaatagcaagagg

SEQ ID NO: 24351 - DNA, 23 bp, Artificial Sequence
  Synthetic: FXN 3 reverse 9:69044938-69044967; SaCas9
aggcaacaggaaatagcaagagg

SEQ ID NO: 24352 - DNA, 22 bp, Artificial Sequence
  Synthetic: FXN 3 reverse 9:69044939-69044967; SaCas9
ggcaacaggaaatagcaagagg

SEQ ID NO: 24353 - DNA, 21 bp, Artificial Sequence
  Synthetic: FXN 3 reverse 9:69044940-69044967; SaCas9
gcaacaggaaatagcaagagg

SEQ ID NO: 24354 - DNA, 20 bp, Artificial Sequence
  Synthetic: FXN 3 reverse 9:69044941-69044967; SaCas9
caacaggaaatagcaagagg

SEQ ID NO: 24355 - DNA, 19 bp, Artificial Sequence
  Synthetic: FXN 3 reverse 9:69044942-69044967; SaCas9
aacaggaaatagcaagagg

SEQ ID NO: 24356 - DNA, 18 bp, Artificial Sequence
  Synthetic: FXN 3 reverse 9:69044943-69044967; SaCas9
acaggaaatagcaagagg

SEQ ID NO: 24357 - DNA, 25 bp, Artificial Sequence
  Synthetic: FXN 3 reverse 9:69044942-69044973; SaCas9
actaagagaggcaacaggaaatagc

SEQ ID NO: 24358 - DNA, 24 bp, Artificial Sequence
  Synthetic: FXN 3 reverse 9:69044943-69044973; SaCas9
ctaagagaggcaacaggaaatagc

SEQ ID NO: 24359 - DNA, 23 bp, Artificial Sequence
  Synthetic: FXN 3 reverse 9:69044944-69044973; SaCas9
taagagaggcaacaggaaatagc

SEQ ID NO: 24360 - DNA, 22 bp, Artificial Sequence
  Synthetic: FXN 3 reverse 9:69044945-69044973; SaCas9
aagagaggcaacaggaaatagc

SEQ ID NO: 24361 - DNA, 21 bp, Artificial Sequence
  Synthetic: FXN 3 reverse 9:69044946-69044973; SaCas9
agagaggcaacaggaaatagc

SEQ ID NO: 24362 - DNA, 20 bp, Artificial Sequence
  Synthetic: FXN 3 reverse 9:69044947-69044973; SaCas9
gagaggcaacaggaaatagc

SEQ ID NO: 24363 - DNA, 19 bp, Artificial Sequence
  Synthetic: FXN 3 reverse 9:69044948-69044973; SaCas9
agaggcaacaggaaatagc

SEQ ID NO: 24364 - DNA, 18 bp, Artificial Sequence
  Synthetic: FXN 3 reverse 9:69044949-69044973; SaCas9
gaggcaacaggaaatagc

SEQ ID NO: 24365 - DNA, 25 bp, Artificial Sequence
  Synthetic: FXN 3 reverse 9:69044952-69044983; SaCas9
ttaaaaggtcactaagagaggcaac

SEQ ID NO: 24366 - DNA, 24 bp, Artificial Sequence
  Synthetic: FXN 3 reverse 9:69044953-69044983; SaCas9
taaaaggtcactaagagaggcaac

SEQ ID NO: 24367 - DNA, 23 bp, Artificial Sequence
  Synthetic: FXN 3 reverse 9:69044954-69044983; SaCas9
aaaaggtcactaagagaggcaac

SEQ ID NO: 24368 - DNA, 22 bp, Artificial Sequence
  Synthetic: FXN 3 reverse 9:69044955-69044983; SaCas9
aaaggtcactaagagaggcaac

SEQ ID NO: 24369 - DNA, 21 bp, Artificial Sequence
  Synthetic: FXN 3 reverse 9:69044956-69044983; SaCas9
aaggtcactaagagaggcaac

SEQ ID NO: 24370 - DNA, 20 bp, Artificial Sequence
  Synthetic: FXN 3 reverse 9:69044957-69044983; SaCas9
aggtcactaagagaggcaac

SEQ ID NO: 24371 - DNA, 19 bp, Artificial Sequence
  Synthetic: FXN 3 reverse 9:69044958-69044983; SaCas9
ggtcactaagagaggcaac

SEQ ID NO: 24372 - DNA, 18 bp, Artificial Sequence
  Synthetic: FXN 3 reverse 9:69044959-69044983; SaCas9
gtcactaagagaggcaac

SEQ ID NO: 24373 - DNA, 25 bp, Artificial Sequence
  Synthetic: FXN 3 reverse 9:69044953-69044984; SaCas9
cttaaaaggtcactaagagaggcaa

SEQ ID NO: 24374 - DNA, 24 bp, Artificial Sequence
  Synthetic: FXN 3 reverse 9:69044954-69044984; SaCas9
ttaaaaggtcactaagagaggcaa

SEQ ID NO: 24375 - DNA, 23 bp, Artificial Sequence
  Synthetic: FXN 3 reverse 9:69044955-69044984; SaCas9
taaaaggtcactaagagaggcaa

SEQ ID NO: 24376 - DNA, 22 bp, Artificial Sequence
  Synthetic: FXN 3 reverse 9:69044956-69044984; SaCas9
aaaaggtcactaagagaggcaa

SEQ ID NO: 24377 - DNA, 21 bp, Artificial Sequence
  Synthetic: FXN 3 reverse 9:69044957-69044984; SaCas9
aaaggtcactaagagaggcaa

SEQ ID NO: 24378 - DNA, 20 bp, Artificial Sequence
  Synthetic: FXN 3 reverse 9:69044958-69044984; SaCas9
aaggtcactaagagaggcaa

SEQ ID NO: 24379 - DNA, 19 bp, Artificial Sequence
  Synthetic: FXN 3 reverse 9:69044959-69044984; SaCas9
aggtcactaagagaggcaa

SEQ ID NO: 24380 - DNA, 18 bp, Artificial Sequence
  Synthetic: FXN 3 reverse 9:69044960-69044984; SaCas9
ggtcactaagagaggcaa

SEQ ID NO: 24381 - DNA, 25 bp, Artificial Sequence
  Synthetic: FXN 3 forward 9:69044956-69044987; SaCas9
ctgttgcctctcttagtgacctttt

SEQ ID NO: 24382 - DNA, 24 bp, Artificial Sequence
  Synthetic: FXN 3 forward 9:69044957-69044987; SaCas9
tgttgcctctcttagtgacctttt

SEQ ID NO: 24383 - DNA, 23 bp, Artificial Sequence
  Synthetic: FXN 3 forward 9:69044958-69044987; SaCas9
gttgcctctcttagtgacctttt

SEQ ID NO: 24384 - DNA, 22 bp, Artificial Sequence
  Synthetic: FXN 3 forward 9:69044959-69044987; SaCas9
ttgcctctcttagtgacctttt

SEQ ID NO: 24385 - DNA, 21 bp, Artificial Sequence
  Synthetic: FXN 3 forward 9:69044960-69044987; SaCas9
tgcctctcttagtgacctttt

SEQ ID NO: 24386 - DNA, 20 bp, Artificial Sequence
  Synthetic: FXN 3 forward 9:69044961-69044987; SaCas9
gcctctcttagtgacctttt

SEQ ID NO: 24387 - DNA, 19 bp, Artificial Sequence
  Synthetic: FXN 3 forward 9:69044962-69044987; SaCas9
cctctcttagtgacctttt

SEQ ID NO: 24388 - DNA, 18 bp, Artificial Sequence
  Synthetic: FXN 3 forward 9:69044963-69044987; SaCas9
ctctcttagtgacctttt

SEQ ID NO: 24389 - DNA, 25 bp, Artificial Sequence
  Synthetic: FXN 3 reverse 9:69044962-69044993; SaCas9
cacaatgctcttaaaaggtcactaa

SEQ ID NO: 24390 - DNA, 24 bp, Artificial Sequence
  Synthetic: FXN 3 reverse 9:69044963-69044993; SaCas9
acaatgctcttaaaaggtcactaa

SEQ ID NO: 24391 - DNA, 23 bp, Artificial Sequence
  Synthetic: FXN 3 reverse 9:69044964-69044993; SaCas9
caatgctcttaaaaggtcactaa

SEQ ID NO: 24392 - DNA, 22 bp, Artificial Sequence
  Synthetic: FXN 3 reverse 9:69044965-69044993; SaCas9
aatgctcttaaaaggtcactaa

SEQ ID NO: 24393 - DNA, 21 bp, Artificial Sequence
  Synthetic: FXN 3 reverse 9:69044966-69044993; SaCas9
atgctcttaaaaggtcactaa

SEQ ID NO: 24394 - DNA, 20 bp, Artificial Sequence
  Synthetic: FXN 3 reverse 9:69044967-69044993; SaCas9
tgctcttaaaaggtcactaa

SEQ ID NO: 24395 - DNA, 19 bp, Artificial Sequence
  Synthetic: FXN 3 reverse 9:69044968-69044993; SaCas9
gctcttaaaaggtcactaa

SEQ ID NO: 24396 - DNA, 18 bp, Artificial Sequence
  Synthetic: FXN 3 reverse 9:69044969-69044993; SaCas9
ctcttaaaaggtcactaa

SEQ ID NO: 24397 - DNA, 25 bp, Artificial Sequence
  Synthetic: FXN 3 reverse 9:69044964-69044995; SaCas9
tccacaatgctcttaaaaggtcact

SEQ ID NO: 24398 - DNA, 24 bp, Artificial Sequence
  Synthetic: FXN 3 reverse 9:69044965-69044995; SaCas9
ccacaatgctcttaaaaggtcact

SEQ ID NO: 24399 - DNA, 23 bp, Artificial Sequence
  Synthetic: FXN 3 reverse 9:69044966-69044995; SaCas9
cacaatgctcttaaaaggtcact

SEQ ID NO: 24400 - DNA, 22 bp, Artificial Sequence
  Synthetic: FXN 3 reverse 9:69044967-69044995; SaCas9
acaatgctcttaaaaggtcact

SEQ ID NO: 24401 - DNA, 21 bp, Artificial Sequence
  Synthetic: FXN 3 reverse 9:69044968-69044995; SaCas9
caatgctcttaaaaggtcact

SEQ ID NO: 24402 - DNA, 20 bp, Artificial Sequence
  Synthetic: FXN 3 reverse 9:69044969-69044995; SaCas9
aatgctcttaaaaggtcact

SEQ ID NO: 24403 - DNA, 19 bp, Artificial Sequence
  Synthetic: FXN 3 reverse 9:69044970-69044995; SaCas9
atgctcttaaaaggtcact

SEQ ID NO: 24404 - DNA, 18 bp, Artificial Sequence
  Synthetic: FXN 3 reverse 9:69044971-69044995; SaCas9
tgctcttaaaaggtcact

SEQ ID NO: 24405 - DNA, 25 bp, Artificial Sequence
  Synthetic: FXN 3 forward 9:69044965-69044996; SaCas9
ctcttagtgaccttttaagagcatt

SEQ ID NO: 24406 - DNA, 24 bp, Artificial Sequence
  Synthetic: FXN 3 forward 9:69044966-69044996; SaCas9
tcttagtgaccttttaagagcatt

SEQ ID NO: 24407 - DNA, 23 bp, Artificial Sequence
  Synthetic: FXN 3 forward 9:69044967-69044996; SaCas9
cttagtgaccttttaagagcatt

SEQ ID NO: 24408 - DNA, 22 bp, Artificial Sequence
  Synthetic: FXN 3 forward 9:69044968-69044996; SaCas9
ttagtgaccttttaagagcatt

SEQ ID NO: 24409 - DNA, 21 bp, Artificial Sequence
  Synthetic: FXN 3 forward 9:69044969-69044996; SaCas9
tagtgaccttttaagagcatt

SEQ ID NO: 24410 - DNA, 20 bp, Artificial Sequence
  Synthetic: FXN 3 forward 9:69044970-69044996; SaCas9
agtgaccttttaagagcatt

SEQ ID NO: 24411 - DNA, 19 bp, Artificial Sequence
  Synthetic: FXN 3 forward 9:69044971-69044996; SaCas9
gtgaccttttaagagcatt

SEQ ID NO: 24412 - DNA, 18 bp, Artificial Sequence
  Synthetic: FXN 3 forward 9:69044972-69044996; SaCas9
tgaccttttaagagcatt

SEQ ID NO: 24413 - DNA, 25 bp, Artificial Sequence
  Synthetic: FXN 3 reverse 9:69044997-69045028; SaCas9
gttacagggtggttagcaggaggct

SEQ ID NO: 24414 - DNA, 24 bp, Artificial Sequence
  Synthetic: FXN 3 reverse 9:69044998-69045028; SaCas9
ttacagggtggttagcaggaggct

SEQ ID NO: 24415 - DNA, 23 bp, Artificial Sequence
  Synthetic: FXN 3 reverse 9:69044999-69045028; SaCas9
tacagggtggttagcaggaggct

SEQ ID NO: 24416 - DNA, 22 bp, Artificial Sequence
  Synthetic: FXN 3 reverse 9:69045000-69045028; SaCas9
acagggtggttagcaggaggct

SEQ ID NO: 24417 - DNA, 21 bp, Artificial Sequence
  Synthetic: FXN 3 reverse 9:69045001-69045028; SaCas9
cagggtggttagcaggaggct

SEQ ID NO: 24418 - DNA, 20 bp, Artificial Sequence
  Synthetic: FXN 3 reverse 9:69045002-69045028; SaCas9
agggtggttagcaggaggct

SEQ ID NO: 24419 - DNA, 19 bp, Artificial Sequence
  Synthetic: FXN 3 reverse 9:69045003-69045028; SaCas9
gggtggttagcaggaggct

SEQ ID NO: 24420 - DNA, 18 bp, Artificial Sequence
  Synthetic: FXN 3 reverse 9:69045004-69045028; SaCas9
ggtggttagcaggaggct

SEQ ID NO: 24421 - DNA, 25 bp, Artificial Sequence
  Synthetic: FXN 3 reverse 9:69044998-69045029; SaCas9
ggttacagggtggttagcaggaggc

SEQ ID NO: 24422 - DNA, 24 bp, Artificial Sequence
  Synthetic: FXN 3 reverse 9:69044999-69045029; SaCas9
gttacagggtggttagcaggaggc

SEQ ID NO: 24423 - DNA, 23 bp, Artificial Sequence
  Synthetic: FXN 3 reverse 9:69045000-69045029; SaCas9
ttacagggtggttagcaggaggc

SEQ ID NO: 24424 - DNA, 22 bp, Artificial Sequence
  Synthetic: FXN 3 reverse 9:69045001-69045029; SaCas9
tacagggtggttagcaggaggc

SEQ ID NO: 24425 - DNA, 21 bp, Artificial Sequence
  Synthetic: FXN 3 reverse 9:69045002-69045029; SaCas9
acagggtggttagcaggaggc

SEQ ID NO: 24426 - DNA, 20 bp, Artificial Sequence
  Synthetic: FXN 3 reverse 9:69045003-69045029; SaCas9
cagggtggttagcaggaggc

SEQ ID NO: 24427 - DNA, 19 bp, Artificial Sequence
  Synthetic: FXN 3 reverse 9:69045004-69045029; SaCas9
agggtggttagcaggaggc

SEQ ID NO: 24428 - DNA, 18 bp, Artificial Sequence
  Synthetic: FXN 3 reverse 9:69045005-69045029; SaCas9
gggtggttagcaggaggc

SEQ ID NO: 24429 - DNA, 25 bp, Artificial Sequence
  Synthetic: FXN 3 reverse 9:69044999-69045030; SaCas9
aggttacagggtggttagcaggagg

SEQ ID NO: 24430 - DNA, 24 bp, Artificial Sequence
  Synthetic: FXN 3 reverse 9:69045000-69045030; SaCas9
ggttacagggtggttagcaggagg

SEQ ID NO: 24431 - DNA, 23 bp, Artificial Sequence
  Synthetic: FXN 3 reverse 9:69045001-69045030; SaCas9
gttacagggtggttagcaggagg

SEQ ID NO: 24432 - DNA, 22 bp, Artificial Sequence
  Synthetic: FXN 3 reverse 9:69045002-69045030; SaCas9
ttacagggtggttagcaggagg

SEQ ID NO: 24433 - DNA, 21 bp, Artificial Sequence
  Synthetic: FXN 3 reverse 9:69045003-69045030; SaCas9
tacagggtggttagcaggagg

SEQ ID NO: 24434 - DNA, 20 bp, Artificial Sequence
  Synthetic: FXN 3 reverse 9:69045004-69045030; SaCas9
acagggtggttagcaggagg

SEQ ID NO: 24435 - DNA, 19 bp, Artificial Sequence
  Synthetic: FXN 3 reverse 9:69045005-69045030; SaCas9
cagggtggttagcaggagg

SEQ ID NO: 24436 - DNA, 18 bp, Artificial Sequence
  Synthetic: FXN 3 reverse 9:69045006-69045030; SaCas9
agggtggttagcaggagg

SEQ ID NO: 24437 - DNA, 25 bp, Artificial Sequence
  Synthetic: FXN 3 forward 9:69045003-69045034; SaCas9
agcctcctgctaaccaccctgtaac

SEQ ID NO: 24438 - DNA, 24 bp, Artificial Sequence
  Synthetic: FXN 3 forward 9:69045004-69045034; SaCas9
gcctcctgctaaccaccctgtaac

SEQ ID NO: 24439 - DNA, 23 bp, Artificial Sequence
  Synthetic: FXN 3 forward 9:69045005-69045034; SaCas9
cctcctgctaaccaccctgtaac

SEQ ID NO: 24440 - DNA, 22 bp, Artificial Sequence
  Synthetic: FXN 3 forward 9:69045006-69045034; SaCas9
ctcctgctaaccaccctgtaac

SEQ ID NO: 24441 - DNA, 21 bp, Artificial Sequence
  Synthetic: FXN 3 forward 9:69045007-69045034; SaCas9
tcctgctaaccaccctgtaac

SEQ ID NO: 24442 - DNA, 20 bp, Artificial Sequence
  Synthetic: FXN 3 forward 9:69045008-69045034; SaCas9
cctgctaaccaccctgtaac

SEQ ID NO: 24443 - DNA, 19 bp, Artificial Sequence
  Synthetic: FXN 3 forward 9:69045009-69045034; SaCas9
ctgctaaccaccctgtaac

SEQ ID NO: 24444 - DNA, 18 bp, Artificial Sequence
  Synthetic: FXN 3 forward 9:69045010-69045034; SaCas9
tgctaaccaccctgtaac

SEQ ID NO: 24445 - DNA, 25 bp, Artificial Sequence
  Synthetic: FXN 3 reverse 9:69045005-69045036; SaCas9
ctgttcaggttacagggtggttagc

SEQ ID NO: 24446 - DNA, 24 bp, Artificial Sequence
  Synthetic: FXN 3 reverse 9:69045006-69045036; SaCas9
tgttcaggttacagggtggttagc

SEQ ID NO: 24447 - DNA, 23 bp, Artificial Sequence
  Synthetic: FXN 3 reverse 9:69045007-69045036; SaCas9
gttcaggttacagggtggttagc

SEQ ID NO: 24448 - DNA, 22 bp, Artificial Sequence
  Synthetic: FXN 3 reverse 9:69045008-69045036; SaCas9
ttcaggttacagggtggttagc

SEQ ID NO: 24449 - DNA, 21 bp, Artificial Sequence
  Synthetic: FXN 3 reverse 9:69045009-69045036; SaCas9
tcaggttacagggtggttagc

SEQ ID NO: 24450 - DNA, 20 bp, Artificial Sequence
  Synthetic: FXN 3 reverse 9:69045010-69045036; SaCas9
caggttacagggtggttagc

SEQ ID NO: 24451 - DNA, 19 bp, Artificial Sequence
  Synthetic: FXN 3 reverse 9:69045011-69045036; SaCas9
aggttacagggtggttagc

SEQ ID NO: 24452 - DNA, 18 bp, Artificial Sequence
  Synthetic: FXN 3 reverse 9:69045012-69045036; SaCas9
ggttacagggtggttagc

SEQ ID NO: 24453 - DNA, 25 bp, Artificial Sequence
  Synthetic: FXN 3 reverse 9:69045006-69045037; SaCas9
gctgttcaggttacagggtggttag

SEQ ID NO: 24454 - DNA, 24 bp, Artificial Sequence
  Synthetic: FXN 3 reverse 9:69045007-69045037; SaCas9
ctgttcaggttacagggtggttag

SEQ ID NO: 24455 - DNA, 23 bp, Artificial Sequence
  Synthetic: FXN 3 reverse 9:69045008-69045037; SaCas9
tgttcaggttacagggtggttag

SEQ ID NO: 24456 - DNA, 22 bp, Artificial Sequence
  Synthetic: FXN 3 reverse 9:69045009-69045037; SaCas9
gttcaggttacagggtggttag

SEQ ID NO: 24457 - DNA, 21 bp, Artificial Sequence
  Synthetic: FXN 3 reverse 9:69045010-69045037; SaCas9
ttcaggttacagggtggttag

SEQ ID NO: 24458 - DNA, 20 bp, Artificial Sequence
  Synthetic: FXN 3 reverse 9:69045011-69045037; SaCas9
tcaggttacagggtggttag

SEQ ID NO: 24459 - DNA, 19 bp, Artificial Sequence
  Synthetic: FXN 3 reverse 9:69045012-69045037; SaCas9
caggttacagggtggttag

SEQ ID NO: 24460 - DNA, 18 bp, Artificial Sequence
  Synthetic: FXN 3 reverse 9:69045013-69045037; SaCas9
aggttacagggtggttag

SEQ ID NO: 24461 - DNA, 25 bp, Artificial Sequence
  Synthetic: FXN 3 reverse 9:69045018-69045049; SaCas9
gggctgctgcaggctgttcaggtta

SEQ ID NO: 24462 - DNA, 24 bp, Artificial Sequence
  Synthetic: FXN 3 reverse 9:69045019-69045049; SaCas9
ggctgctgcaggctgttcaggtta

SEQ ID NO: 24463 - DNA, 23 bp, Artificial Sequence
  Synthetic: FXN 3 reverse 9:69045020-69045049; SaCas9
gctgctgcaggctgttcaggtta

SEQ ID NO: 24464 - DNA, 22 bp, Artificial Sequence
  Synthetic: FXN 3 reverse 9:69045021-69045049; SaCas9
ctgctgcaggctgttcaggtta

SEQ ID NO: 24465 - DNA, 21 bp, Artificial Sequence
  Synthetic: FXN 3 reverse 9:69045022-69045049; SaCas9
tgctgcaggctgttcaggtta

SEQ ID NO: 24466 - DNA, 20 bp, Artificial Sequence
  Synthetic: FXN 3 reverse 9:69045023-69045049; SaCas9
gctgcaggctgttcaggtta

SEQ ID NO: 24467 - DNA, 19 bp, Artificial Sequence
  Synthetic: FXN 3 reverse 9:69045024-69045049; SaCas9
ctgcaggctgttcaggtta

SEQ ID NO: 24468 - DNA, 18 bp, Artificial Sequence
  Synthetic: FXN 3 reverse 9:69045025-69045049; SaCas9
tgcaggctgttcaggtta

SEQ ID NO: 24469 - DNA, 25 bp, Artificial Sequence
  Synthetic: FXN 3 forward 9:69045031-69045062; SaCas9
aacagcctgcagcagccctgcccag

SEQ ID NO: 24470 - DNA, 24 bp, Artificial Sequence
  Synthetic: FXN 3 forward 9:69045032-69045062; SaCas9
acagcctgcagcagccctgcccag

SEQ ID NO: 24471 - DNA, 23 bp, Artificial Sequence
  Synthetic: FXN 3 forward 9:69045033-69045062; SaCas9
cagcctgcagcagccctgcccag

SEQ ID NO: 24472 - DNA, 22 bp, Artificial Sequence
  Synthetic: FXN 3 forward 9:69045034-69045062; SaCas9
agcctgcagcagccctgcccag

SEQ ID NO: 24473 - DNA, 21 bp, Artificial Sequence
  Synthetic: FXN 3 forward 9:69045035-69045062; SaCas9
gcctgcagcagccctgcccag

SEQ ID NO: 24474 - DNA, 20 bp, Artificial Sequence
  Synthetic: FXN 3 forward 9:69045036-69045062; SaCas9
cctgcagcagccctgcccag

SEQ ID NO: 24475 - DNA, 19 bp, Artificial Sequence
  Synthetic: FXN 3 forward 9:69045037-69045062; SaCas9
ctgcagcagccctgcccag

SEQ ID NO: 24476 - DNA, 18 bp, Artificial Sequence
  Synthetic: FXN 3 forward 9:69045038-69045062; SaCas9
tgcagcagccctgcccag

SEQ ID NO: 24477 - DNA, 25 bp, Artificial Sequence
  Synthetic: FXN 3 reverse 9:69045045-69045076; SaCas9
catcacatcaggaagttctactggg

SEQ ID NO: 24478 - DNA, 24 bp, Artificial Sequence
  Synthetic: FXN 3 reverse 9:69045046-69045076; SaCas9
atcacatcaggaagttctactggg

SEQ ID NO: 24479 - DNA, 23 bp, Artificial Sequence
  Synthetic: FXN 3 reverse 9:69045047-69045076; SaCas9
tcacatcaggaagttctactggg

SEQ ID NO: 24480 - DNA, 22 bp, Artificial Sequence
  Synthetic: FXN 3 reverse 9:69045048-69045076; SaCas9
cacatcaggaagttctactggg

SEQ ID NO: 24481 - DNA, 21 bp, Artificial Sequence
  Synthetic: FXN 3 reverse 9:69045049-69045076; SaCas9
acatcaggaagttctactggg

SEQ ID NO: 24482 - DNA, 20 bp, Artificial Sequence
  Synthetic: FXN 3 reverse 9:69045050-69045076; SaCas9
catcaggaagttctactggg

SEQ ID NO: 24483 - DNA, 19 bp, Artificial Sequence
  Synthetic: FXN 3 reverse 9:69045051-69045076; SaCas9
atcaggaagttctactggg

SEQ ID NO: 24484 - DNA, 18 bp, Artificial Sequence
  Synthetic: FXN 3 reverse 9:69045052-69045076; SaCas9
tcaggaagttctactggg

SEQ ID NO: 24485 - DNA, 25 bp, Artificial Sequence
  Synthetic: FXN 3 forward 9:69045048-69045079; SaCas9
ctgcccagtagaacttcctgatgtg

SEQ ID NO: 24486 - DNA, 24 bp, Artificial Sequence
  Synthetic: FXN 3 forward 9:69045049-69045079; SaCas9
tgcccagtagaacttcctgatgtg

SEQ ID NO: 24487 - DNA, 23 bp, Artificial Sequence
  Synthetic: FXN 3 forward 9:69045050-69045079; SaCas9
gcccagtagaacttcctgatgtg

SEQ ID NO: 24488 - DNA, 22 bp, Artificial Sequence
  Synthetic: FXN 3 forward 9:69045051-69045079; SaCas9
cccagtagaacttcctgatgtg

SEQ ID NO: 24489 - DNA, 21 bp, Artificial Sequence
  Synthetic: FXN 3 forward 9:69045052-69045079; SaCas9
ccagtagaacttcctgatgtg

SEQ ID NO: 24490 - DNA, 20 bp, Artificial Sequence
  Synthetic: FXN 3 forward 9:69045053-69045079; SaCas9
cagtagaacttcctgatgtg

SEQ ID NO: 24491 - DNA, 19 bp, Artificial Sequence
  Synthetic: FXN 3 forward 9:69045054-69045079; SaCas9
agtagaacttcctgatgtg

SEQ ID NO: 24492 - DNA, 18 bp, Artificial Sequence
  Synthetic: FXN 3 forward 9:69045055-69045079; SaCas9
gtagaacttcctgatgtg

SEQ ID NO: 24493 - DNA, 25 bp, Artificial Sequence
  Synthetic: FXN 3 forward 9:69045049-69045080; SaCas9
tgcccagtagaacttcctgatgtga

SEQ ID NO: 24494 - DNA, 24 bp, Artificial Sequence
  Synthetic: FXN 3 forward 9:69045050-69045080; SaCas9
gcccagtagaacttcctgatgtga

SEQ ID NO: 24495 - DNA, 23 bp, Artificial Sequence
  Synthetic: FXN 3 forward 9:69045051-69045080; SaCas9
cccagtagaacttcctgatgtga

SEQ ID NO: 24496 - DNA, 22 bp, Artificial Sequence
  Synthetic: FXN 3 forward 9:69045052-69045080; SaCas9
ccagtagaacttcctgatgtga

SEQ ID NO: 24497 - DNA, 21 bp, Artificial Sequence
  Synthetic: FXN 3 forward 9:69045053-69045080; SaCas9
cagtagaacttcctgatgtga

SEQ ID NO: 24498 - DNA, 20 bp, Artificial Sequence
  Synthetic: FXN 3 forward 9:69045054-69045080; SaCas9
agtagaacttcctgatgtga

SEQ ID NO: 24499 - DNA, 19 bp, Artificial Sequence
  Synthetic: FXN 3 forward 9:69045055-69045080; SaCas9
gtagaacttcctgatgtga

SEQ ID NO: 24500 - DNA, 18 bp, Artificial Sequence
  Synthetic: FXN 3 forward 9:69045056-69045080; SaCas9
tagaacttcctgatgtga

SEQ ID NO: 24501 - DNA, 25 bp, Artificial Sequence
  Synthetic: FXN 3 reverse 9:69045050-69045081; SaCas9
atttccatcacatcaggaagttcta

SEQ ID NO: 24502 - DNA, 24 bp, Artificial Sequence
  Synthetic: FXN 3 reverse 9:69045051-69045081; SaCas9
tttccatcacatcaggaagttcta

SEQ ID NO: 24503 - DNA, 23 bp, Artificial Sequence
  Synthetic: FXN 3 reverse 9:69045052-69045081; SaCas9
ttccatcacatcaggaagttcta

SEQ ID NO: 24504 - DNA, 22 bp, Artificial Sequence
  Synthetic: FXN 3 reverse 9:69045053-69045081; SaCas9
tccatcacatcaggaagttcta

SEQ ID NO: 24505 - DNA, 21 bp, Artificial Sequence
  Synthetic: FXN 3 reverse 9:69045054-69045081; SaCas9
ccatcacatcaggaagttcta

SEQ ID NO: 24506 - DNA, 20 bp, Artificial Sequence
  Synthetic: FXN 3 reverse 9:69045055-69045081; SaCas9
catcacatcaggaagttcta

SEQ ID NO: 24507 - DNA, 19 bp, Artificial Sequence
  Synthetic: FXN 3 reverse 9:69045056-69045081; SaCas9
atcacatcaggaagttcta

SEQ ID NO: 24508 - DNA, 18 bp, Artificial Sequence
  Synthetic: FXN 3 reverse 9:69045057-69045081; SaCas9
tcacatcaggaagttcta

SEQ ID NO: 24509 - DNA, 25 bp, Artificial Sequence
  Synthetic: FXN 3 reverse 9:69045061-69045092; SaCas9
gcagacacagcatttccatcacatc

SEQ ID NO: 24510 - DNA, 24 bp, Artificial Sequence
  Synthetic: FXN 3 reverse 9:69045062-69045092; SaCas9
cagacacagcatttccatcacatc

SEQ ID NO: 24511 - DNA, 23 bp, Artificial Sequence
  Synthetic: FXN 3 reverse 9:69045063-69045092; SaCas9
agacacagcatttccatcacatc

SEQ ID NO: 24512 - DNA, 22 bp, Artificial Sequence
  Synthetic: FXN 3 reverse 9:69045064-69045092; SaCas9
gacacagcatttccatcacatc

SEQ ID NO: 24513 - DNA, 21 bp, Artificial Sequence
  Synthetic: FXN 3 reverse 9:69045065-69045092; SaCas9
acacagcatttccatcacatc

SEQ ID NO: 24514 - DNA, 20 bp, Artificial Sequence
  Synthetic: FXN 3 reverse 9:69045066-69045092; SaCas9
cacagcatttccatcacatc

SEQ ID NO: 24515 - DNA, 19 bp, Artificial Sequence
  Synthetic: FXN 3 reverse 9:69045067-69045092; SaCas9
acagcatttccatcacatc

SEQ ID NO: 24516 - DNA, 18 bp, Artificial Sequence
  Synthetic: FXN 3 reverse 9:69045068-69045092; SaCas9
cagcatttccatcacatc

SEQ ID NO: 24517 - DNA, 25 bp, Artificial Sequence
  Synthetic: FXN 3 reverse 9:69045062-69045093; SaCas9
tgcagacacagcatttccatcacat

SEQ ID NO: 24518 - DNA, 24 bp, Artificial Sequence
  Synthetic: FXN 3 reverse 9:69045063-69045093; SaCas9
gcagacacagcatttccatcacat

SEQ ID NO: 24519 - DNA, 23 bp, Artificial Sequence
  Synthetic: FXN 3 reverse 9:69045064-69045093; SaCas9
cagacacagcatttccatcacat

SEQ ID NO: 24520 - DNA, 22 bp, Artificial Sequence
  Synthetic: FXN 3 reverse 9:69045065-69045093; SaCas9
agacacagcatttccatcacat

SEQ ID NO: 24521 - DNA, 21 bp, Artificial Sequence
  Synthetic: FXN 3 reverse 9:69045066-69045093; SaCas9
gacacagcatttccatcacat

SEQ ID NO: 24522 - DNA, 20 bp, Artificial Sequence
  Synthetic: FXN 3 reverse 9:69045067-69045093; SaCas9
acacagcatttccatcacat

SEQ ID NO: 24523 - DNA, 19 bp, Artificial Sequence
  Synthetic: FXN 3 reverse 9:69045068-69045093; SaCas9
cacagcatttccatcacat

SEQ ID NO: 24524 - DNA, 18 bp, Artificial Sequence
  Synthetic: FXN 3 reverse 9:69045069-69045093; SaCas9
acagcatttccatcacat

SEQ ID NO: 24525 - DNA, 25 bp, Artificial Sequence
  Synthetic: FXN 3 forward 9:69045088-69045119; SaCas9
ctgcaccactagccacatgtggcca

SEQ ID NO: 24526 - DNA, 24 bp, Artificial Sequence
  Synthetic: FXN 3 forward 9:69045089-69045119; SaCas9
tgcaccactagccacatgtggcca

SEQ ID NO: 24527 - DNA, 23 bp, Artificial Sequence
  Synthetic: FXN 3 forward 9:69045090-69045119; SaCas9
gcaccactagccacatgtggcca

SEQ ID NO: 24528 - DNA, 22 bp, Artificial Sequence
  Synthetic: FXN 3 forward 9:69045091-69045119; SaCas9
caccactagccacatgtggcca

SEQ ID NO: 24529 - DNA, 21 bp, Artificial Sequence
  Synthetic: FXN 3 forward 9:69045092-69045119; SaCas9
accactagccacatgtggcca

SEQ ID NO: 24530 - DNA, 20 bp, Artificial Sequence
  Synthetic: FXN 3 forward 9:69045093-69045119; SaCas9
ccactagccacatgtggcca

SEQ ID NO: 24531 - DNA, 19 bp, Artificial Sequence
  Synthetic: FXN 3 forward 9:69045094-69045119; SaCas9
cactagccacatgtggcca

SEQ ID NO: 24532 - DNA, 18 bp, Artificial Sequence
  Synthetic: FXN 3 forward 9:69045095-69045119; SaCas9
actagccacatgtggcca

SEQ ID NO: 24533 - DNA, 25 bp, Artificial Sequence
  Synthetic: FXN 3 forward 9:69045096-69045127; SaCas9
ctagccacatgtggccacaggattc

SEQ ID NO: 24534 - DNA, 24 bp, Artificial Sequence
  Synthetic: FXN 3 forward 9:69045097-69045127; SaCas9
tagccacatgtggccacaggattc

SEQ ID NO: 24535 - DNA, 23 bp, Artificial Sequence
  Synthetic: FXN 3 forward 9:69045098-69045127; SaCas9
agccacatgtggccacaggattc

SEQ ID NO: 24536 - DNA, 22 bp, Artificial Sequence
  Synthetic: FXN 3 forward 9:69045099-69045127; SaCas9
gccacatgtggccacaggattc

SEQ ID NO: 24537 - DNA, 21 bp, Artificial Sequence
  Synthetic: FXN 3 forward 9:69045100-69045127; SaCas9
ccacatgtggccacaggattc

SEQ ID NO: 24538 - DNA, 20 bp, Artificial Sequence
  Synthetic: FXN 3 forward 9:69045101-69045127; SaCas9
cacatgtggccacaggattc

SEQ ID NO: 24539 - DNA, 19 bp, Artificial Sequence
  Synthetic: FXN 3 forward 9:69045102-69045127; SaCas9
acatgtggccacaggattc

SEQ ID NO: 24540 - DNA, 18 bp, Artificial Sequence
  Synthetic: FXN 3 forward 9:69045103-69045127; SaCas9
catgtggccacaggattc

SEQ ID NO: 24541 - DNA, 25 bp, Artificial Sequence
  Synthetic: FXN 3 forward 9:69045114-69045145; SaCas9
aggattctcgaaactggtggtgcag

SEQ ID NO: 24542 - DNA, 24 bp, Artificial Sequence
  Synthetic: FXN 3 forward 9:69045115-69045145; SaCas9
ggattctcgaaactggtggtgcag

SEQ ID NO: 24543 - DNA, 23 bp, Artificial Sequence
  Synthetic: FXN 3 forward 9:69045116-69045145; SaCas9
gattctcgaaactggtggtgcag

SEQ ID NO: 24544 - DNA, 22 bp, Artificial Sequence
  Synthetic: FXN 3 forward 9:69045117-69045145; SaCas9
attctcgaaactggtggtgcag

SEQ ID NO: 24545 - DNA, 21 bp, Artificial Sequence
  Synthetic: FXN 3 forward 9:69045118-69045145; SaCas9
ttctcgaaactggtggtgcag

SEQ ID NO: 24546 - DNA, 20 bp, Artificial Sequence
  Synthetic: FXN 3 forward 9:69045119-69045145; SaCas9
tctcgaaactggtggtgcag

SEQ ID NO: 24547 - DNA, 19 bp, Artificial Sequence
  Synthetic: FXN 3 forward 9:69045120-69045145; SaCas9
ctcgaaactggtggtgcag

SEQ ID NO: 24548 - DNA, 18 bp, Artificial Sequence
  Synthetic: FXN 3 forward 9:69045121-69045145; SaCas9
tcgaaactggtggtgcag

SEQ ID NO: 24549 - DNA, 25 bp, Artificial Sequence
  Synthetic: FXN 3 forward 9:69045116-69045147; SaCas9
gattctcgaaactggtggtgcagtt

SEQ ID NO: 24550 - DNA, 24 bp, Artificial Sequence
  Synthetic: FXN 3 forward 9:69045117-69045147; SaCas9
attctcgaaactggtggtgcagtt

SEQ ID NO: 24551 - DNA, 23 bp, Artificial Sequence
  Synthetic: FXN 3 forward 9:69045118-69045147; SaCas9
ttctcgaaactggtggtgcagtt

SEQ ID NO: 24552 - DNA, 22 bp, Artificial Sequence
  Synthetic: FXN 3 forward 9:69045119-69045147; SaCas9
tctcgaaactggtggtgcagtt

SEQ ID NO: 24553 - DNA, 21 bp, Artificial Sequence
  Synthetic: FXN 3 forward 9:69045120-69045147; SaCas9
ctcgaaactggtggtgcagtt

SEQ ID NO: 24554 - DNA, 20 bp, Artificial Sequence
  Synthetic: FXN 3 forward 9:69045121-69045147; SaCas9
tcgaaactggtggtgcagtt

SEQ ID NO: 24555 - DNA, 19 bp, Artificial Sequence
  Synthetic: FXN 3 forward 9:69045122-69045147; SaCas9
cgaaactggtggtgcagtt

SEQ ID NO: 24556 - DNA, 18 bp, Artificial Sequence
  Synthetic: FXN 3 forward 9:69045123-69045147; SaCas9
gaaactggtggtgcagtt

SEQ ID NO: 24557 - DNA, 25 bp, Artificial Sequence
  Synthetic: FXN 3 forward 9:69045117-69045148; SaCas9
attctcgaaactggtggtgcagttg

SEQ ID NO: 24558 - DNA, 24 bp, Artificial Sequence
  Synthetic: FXN 3 forward 9:69045118-69045148; SaCas9
ttctcgaaactggtggtgcagttg

SEQ ID NO: 24559 - DNA, 23 bp, Artificial Sequence
  Synthetic: FXN 3 forward 9:69045119-69045148; SaCas9
tctcgaaactggtggtgcagttg

SEQ ID NO: 24560 - DNA, 22 bp, Artificial Sequence
  Synthetic: FXN 3 forward 9:69045120-69045148; SaCas9
ctcgaaactggtggtgcagttg

SEQ ID NO: 24561 - DNA, 21 bp, Artificial Sequence
  Synthetic: FXN 3 forward 9:69045121-69045148; SaCas9
tcgaaactggtggtgcagttg

SEQ ID NO: 24562 - DNA, 20 bp, Artificial Sequence
  Synthetic: FXN 3 forward 9:69045122-69045148; SaCas9
cgaaactggtggtgcagttg

SEQ ID NO: 24563 - DNA, 19 bp, Artificial Sequence
  Synthetic: FXN 3 forward 9:69045123-69045148; SaCas9
gaaactggtggtgcagttg

SEQ ID NO: 24564 - DNA, 18 bp, Artificial Sequence
  Synthetic: FXN 3 forward 9:69045124-69045148; SaCas9
aaactggtggtgcagttg

SEQ ID NO: 24565 - DNA, 25 bp, Artificial Sequence
  Synthetic: FXN 3 reverse 9:69045117-69045148; SaCas9
gctcctcaactgcaccaccagtttc

SEQ ID NO: 24566 - DNA, 24 bp, Artificial Sequence
  Synthetic: FXN 3 reverse 9:69045118-69045148; SaCas9
ctcctcaactgcaccaccagtttc

SEQ ID NO: 24567 - DNA, 23 bp, Artificial Sequence
  Synthetic: FXN 3 reverse 9:69045119-69045148; SaCas9
tcctcaactgcaccaccagtttc

SEQ ID NO: 24568 - DNA, 22 bp, Artificial Sequence
  Synthetic: FXN 3 reverse 9:69045120-69045148; SaCas9
cctcaactgcaccaccagtttc

SEQ ID NO: 24569 - DNA, 21 bp, Artificial Sequence
  Synthetic: FXN 3 reverse 9:69045121-69045148; SaCas9
ctcaactgcaccaccagtttc

SEQ ID NO: 24570 - DNA, 20 bp, Artificial Sequence
  Synthetic: FXN 3 reverse 9:69045122-69045148; SaCas9
tcaactgcaccaccagtttc

SEQ ID NO: 24571 - DNA, 19 bp, Artificial Sequence
  Synthetic: FXN 3 reverse 9:69045123-69045148; SaCas9
caactgcaccaccagtttc

SEQ ID NO: 24572 - DNA, 18 bp, Artificial Sequence
  Synthetic: FXN 3 reverse 9:69045124-69045148; SaCas9
aactgcaccaccagtttc

SEQ ID NO: 24573 - DNA, 25 bp, Artificial Sequence
  Synthetic: FXN 3 reverse 9:69045119-69045150; SaCas9
cagctcctcaactgcaccaccagtt

SEQ ID NO: 24574 - DNA, 24 bp, Artificial Sequence
  Synthetic: FXN 3 reverse 9:69045120-69045150; SaCas9
agctcctcaactgcaccaccagtt

SEQ ID NO: 24575 - DNA, 23 bp, Artificial Sequence
  Synthetic: FXN 3 reverse 9:69045121-69045150; SaCas9
gctcctcaactgcaccaccagtt

SEQ ID NO: 24576 - DNA, 22 bp, Artificial Sequence
  Synthetic: FXN 3 reverse 9:69045122-69045150; SaCas9
ctcctcaactgcaccaccagtt

SEQ ID NO: 24577 - DNA, 21 bp, Artificial Sequence
  Synthetic: FXN 3 reverse 9:69045123-69045150; SaCas9
tcctcaactgcaccaccagtt

SEQ ID NO: 24578 - DNA, 20 bp, Artificial Sequence
  Synthetic: FXN 3 reverse 9:69045124-69045150; SaCas9
cctcaactgcaccaccagtt

SEQ ID NO: 24579 - DNA, 19 bp, Artificial Sequence
  Synthetic: FXN 3 reverse 9:69045125-69045150; SaCas9
ctcaactgcaccaccagtt

SEQ ID NO: 24580 - DNA, 18 bp, Artificial Sequence
  Synthetic: FXN 3 reverse 9:69045126-69045150; SaCas9
tcaactgcaccaccagtt

SEQ ID NO: 24581 - DNA, 25 bp, Artificial Sequence
  Synthetic: FXN 3 reverse 9:69045163-69045194; SaCas9
acgtagctatttacatttaaattta

SEQ ID NO: 24582 - DNA, 24 bp, Artificial Sequence
  Synthetic: FXN 3 reverse 9:69045164-69045194; SaCas9
cgtagctatttacatttaaattta

SEQ ID NO: 24583 - DNA, 23 bp, Artificial Sequence
  Synthetic: FXN 3 reverse 9:69045165-69045194; SaCas9
gtagctatttacatttaaattta

SEQ ID NO: 24584 - DNA, 22 bp, Artificial Sequence
  Synthetic: FXN 3 reverse 9:69045166-69045194; SaCas9
tagctatttacatttaaattta

SEQ ID NO: 24585 - DNA, 21 bp, Artificial Sequence
  Synthetic: FXN 3 reverse 9:69045167-69045194; SaCas9
agctatttacatttaaattta

SEQ ID NO: 24586 - DNA, 20 bp, Artificial Sequence
  Synthetic: FXN 3 reverse 9:69045168-69045194; SaCas9
gctatttacatttaaattta

SEQ ID NO: 24587 - DNA, 19 bp, Artificial Sequence
  Synthetic: FXN 3 reverse 9:69045169-69045194; SaCas9
ctatttacatttaaattta

SEQ ID NO: 24588 - DNA, 18 bp, Artificial Sequence
  Synthetic: FXN 3 reverse 9:69045170-69045194; SaCas9
tatttacatttaaattta

SEQ ID NO: 24589 - DNA, 25 bp, Artificial Sequence
  Synthetic: FXN 3 forward 9:69045189-69045220; SaCas9
tacgtgtggcttgttggctagccta

SEQ ID NO: 24590 - DNA, 24 bp, Artificial Sequence
  Synthetic: FXN 3 forward 9:69045190-69045220; SaCas9
acgtgtggcttgttggctagccta

SEQ ID NO: 24591 - DNA, 23 bp, Artificial Sequence
  Synthetic: FXN 3 forward 9:69045191-69045220; SaCas9
cgtgtggcttgttggctagccta

SEQ ID NO: 24592 - DNA, 22 bp, Artificial Sequence
  Synthetic: FXN 3 forward 9:69045192-69045220; SaCas9
gtgtggcttgttggctagccta

SEQ ID NO: 24593 - DNA, 21 bp, Artificial Sequence
  Synthetic: FXN 3 forward 9:69045193-69045220; SaCas9
tgtggcttgttggctagccta

SEQ ID NO: 24594 - DNA, 20 bp, Artificial Sequence
  Synthetic: FXN 3 forward 9:69045194-69045220; SaCas9
gtggcttgttggctagccta

SEQ ID NO: 24595 - DNA, 19 bp, Artificial Sequence
  Synthetic: FXN 3 forward 9:69045195-69045220; SaCas9
tggcttgttggctagccta

SEQ ID NO: 24596 - DNA, 18 bp, Artificial Sequence
  Synthetic: FXN 3 forward 9:69045196-69045220; SaCas9
ggcttgttggctagccta

SEQ ID NO: 24597 - DNA, 25 bp, Artificial Sequence
  Synthetic: FXN 3 forward 9:69045190-69045221; SaCas9
acgtgtggcttgttggctagcctat

SEQ ID NO: 24598 - DNA, 24 bp, Artificial Sequence
  Synthetic: FXN 3 forward 9:69045191-69045221; SaCas9
cgtgtggcttgttggctagcctat

SEQ ID NO: 24599 - DNA, 23 bp, Artificial Sequence
  Synthetic: FXN 3 forward 9:69045192-69045221; SaCas9
gtgtggcttgttggctagcctat

SEQ ID NO: 24600 - DNA, 22 bp, Artificial Sequence
  Synthetic: FXN 3 forward 9:69045193-69045221; SaCas9
tgtggcttgttggctagcctat

SEQ ID NO: 24601 - DNA, 21 bp, Artificial Sequence
  Synthetic: FXN 3 forward 9:69045194-69045221; SaCas9
gtggcttgttggctagcctat

SEQ ID NO: 24602 - DNA, 20 bp, Artificial Sequence
  Synthetic: FXN 3 forward 9:69045195-69045221; SaCas9
tggcttgttggctagcctat

SEQ ID NO: 24603 - DNA, 19 bp, Artificial Sequence
  Synthetic: FXN 3 forward 9:69045196-69045221; SaCas9
ggcttgttggctagcctat

SEQ ID NO: 24604 - DNA, 18 bp, Artificial Sequence
  Synthetic: FXN 3 forward 9:69045197-69045221; SaCas9
gcttgttggctagcctat

SEQ ID NO: 24605 - DNA, 25 bp, Artificial Sequence
  Synthetic: FXN 3 forward 9:69045198-69045229; SaCas9
cttgttggctagcctattggaaaac

SEQ ID NO: 24606 - DNA, 24 bp, Artificial Sequence
  Synthetic: FXN 3 forward 9:69045199-69045229; SaCas9
ttgttggctagcctattggaaaac

SEQ ID NO: 24607 - DNA, 23 bp, Artificial Sequence
  Synthetic: FXN 3 forward 9:69045200-69045229; SaCas9
tgttggctagcctattggaaaac

SEQ ID NO: 24608 - DNA, 22 bp, Artificial Sequence
  Synthetic: FXN 3 forward 9:69045201-69045229; SaCas9
gttggctagcctattggaaaac

SEQ ID NO: 24609 - DNA, 21 bp, Artificial Sequence
  Synthetic: FXN 3 forward 9:69045202-69045229; SaCas9
ttggctagcctattggaaaac

SEQ ID NO: 24610 - DNA, 20 bp, Artificial Sequence
  Synthetic: FXN 3 forward 9:69045203-69045229; SaCas9
tggctagcctattggaaaac

SEQ ID NO: 24611 - DNA, 19 bp, Artificial Sequence
  Synthetic: FXN 3 forward 9:69045204-69045229; SaCas9
ggctagcctattggaaaac

SEQ ID NO: 24612 - DNA, 18 bp, Artificial Sequence
  Synthetic: FXN 3 forward 9:69045205-69045229; SaCas9
gctagcctattggaaaac

SEQ ID NO: 24613 - DNA, 25 bp, Artificial Sequence
  Synthetic: FXN 3 forward 9:69045205-69045236; SaCas9
gctagcctattggaaaacacgggct

SEQ ID NO: 24614 - DNA, 24 bp, Artificial Sequence
  Synthetic: FXN 3 forward 9:69045206-69045236; SaCas9
ctagcctattggaaaacacgggct

SEQ ID NO: 24615 - DNA, 23 bp, Artificial Sequence
  Synthetic: FXN 3 forward 9:69045207-69045236; SaCas9
tagcctattggaaaacacgggct

SEQ ID NO: 24616 - DNA, 22 bp, Artificial Sequence
  Synthetic: FXN 3 forward 9:69045208-69045236; SaCas9
agcctattggaaaacacgggct

SEQ ID NO: 24617 - DNA, 21 bp, Artificial Sequence
  Synthetic: FXN 3 forward 9:69045209-69045236; SaCas9
gcctattggaaaacacgggct

SEQ ID NO: 24618 - DNA, 20 bp, Artificial Sequence
  Synthetic: FXN 3 forward 9:69045210-69045236; SaCas9
cctattggaaaacacgggct

SEQ ID NO: 24619 - DNA, 19 bp, Artificial Sequence
  Synthetic: FXN 3 forward 9:69045211-69045236; SaCas9
ctattggaaaacacgggct

SEQ ID NO: 24620 - DNA, 18 bp, Artificial Sequence
  Synthetic: FXN 3 forward 9:69045212-69045236; SaCas9
tattggaaaacacgggct

SEQ ID NO: 24621 - DNA, 25 bp, Artificial Sequence
  Synthetic: FXN 3 forward 9:69045207-69045238; SaCas9
tagcctattggaaaacacgggctta

SEQ ID NO: 24622 - DNA, 24 bp, Artificial Sequence
  Synthetic: FXN 3 forward 9:69045208-69045238; SaCas9
agcctattggaaaacacgggctta

SEQ ID NO: 24623 - DNA, 23 bp, Artificial Sequence
  Synthetic: FXN 3 forward 9:69045209-69045238; SaCas9
gcctattggaaaacacgggctta

SEQ ID NO: 24624 - DNA, 22 bp, Artificial Sequence
  Synthetic: FXN 3 forward 9:69045210-69045238; SaCas9
cctattggaaaacacgggctta

SEQ ID NO: 24625 - DNA, 21 bp, Artificial Sequence
  Synthetic: FXN 3 forward 9:69045211-69045238; SaCas9
ctattggaaaacacgggctta

SEQ ID NO: 24626 - DNA, 20 bp, Artificial Sequence
  Synthetic: FXN 3 forward 9:69045212-69045238; SaCas9
tattggaaaacacgggctta

SEQ ID NO: 24627 - DNA, 19 bp, Artificial Sequence
  Synthetic: FXN 3 forward 9:69045213-69045238; SaCas9
attggaaaacacgggctta

SEQ ID NO: 24628 - DNA, 18 bp, Artificial Sequence
  Synthetic: FXN 3 forward 9:69045214-69045238; SaCas9
ttggaaaacacgggctta

SEQ ID NO: 24629 - DNA, 25 bp, Artificial Sequence
  Synthetic: FXN 3 forward 9:69045215-69045246; SaCas9
tggaaaacacgggcttagagagaca

SEQ ID NO: 24630 - DNA, 24 bp, Artificial Sequence
  Synthetic: FXN 3 forward 9:69045216-69045246; SaCas9
ggaaaacacgggcttagagagaca

SEQ ID NO: 24631 - DNA, 23 bp, Artificial Sequence
  Synthetic: FXN 3 forward 9:69045217-69045246; SaCas9
gaaaacacgggcttagagagaca

SEQ ID NO: 24632 - DNA, 22 bp, Artificial Sequence
  Synthetic: FXN 3 forward 9:69045218-69045246; SaCas9
aaaacacgggcttagagagaca

SEQ ID NO: 24633 - DNA, 21 bp, Artificial Sequence
  Synthetic: FXN 3 forward 9:69045219-69045246; SaCas9
aaacacgggcttagagagaca

SEQ ID NO: 24634 - DNA, 20 bp, Artificial Sequence
  Synthetic: FXN 3 forward 9:69045220-69045246; SaCas9
aacacgggcttagagagaca

SEQ ID NO: 24635 - DNA, 19 bp, Artificial Sequence
  Synthetic: FXN 3 forward 9:69045221-69045246; SaCas9
acacgggcttagagagaca

SEQ ID NO: 24636 - DNA, 18 bp, Artificial Sequence
  Synthetic: FXN 3 forward 9:69045222-69045246; SaCas9
cacgggcttagagagaca

SEQ ID NO: 24637 - DNA, 25 bp, Artificial Sequence
  Synthetic: FXN 3 forward 9:69045216-69045247; SaCas9
ggaaaacacgggcttagagagacac

SEQ ID NO: 24638 - DNA, 24 bp, Artificial Sequence
  Synthetic: FXN 3 forward 9:69045217-69045247; SaCas9
gaaaacacgggcttagagagacac

SEQ ID NO: 24639 - DNA, 23 bp, Artificial Sequence
  Synthetic: FXN 3 forward 9:69045218-69045247; SaCas9
aaaacacgggcttagagagacac

SEQ ID NO: 24640 - DNA, 22 bp, Artificial Sequence
  Synthetic: FXN 3 forward 9:69045219-69045247; SaCas9
aaacacgggcttagagagacac

SEQ ID NO: 24641 - DNA, 21 bp, Artificial Sequence
  Synthetic: FXN 3 forward 9:69045220-69045247; SaCas9
aacacgggcttagagagacac

SEQ ID NO: 24642 - DNA, 20 bp, Artificial Sequence
  Synthetic: FXN 3 forward 9:69045221-69045247; SaCas9
acacgggcttagagagacac

SEQ ID NO: 24643 - DNA, 19 bp, Artificial Sequence
  Synthetic: FXN 3 forward 9:69045222-69045247; SaCas9
cacgggcttagagagacac

SEQ ID NO: 24644 - DNA, 18 bp, Artificial Sequence
  Synthetic: FXN 3 forward 9:69045223-69045247; SaCas9
acgggcttagagagacac

SEQ ID NO: 24645 - DNA, 25 bp, Artificial Sequence
  Synthetic: FXN 3 forward 9:69045217-69045248; SaCas9
gaaaacacgggcttagagagacaca

SEQ ID NO: 24646 - DNA, 24 bp, Artificial Sequence
  Synthetic: FXN 3 forward 9:69045218-69045248; SaCas9
aaaacacgggcttagagagacaca

SEQ ID NO: 24647 - DNA, 23 bp, Artificial Sequence
  Synthetic: FXN 3 forward 9:69045219-69045248; SaCas9
aaacacgggcttagagagacaca

SEQ ID NO: 24648 - DNA, 22 bp, Artificial Sequence
  Synthetic: FXN 3 forward 9:69045220-69045248; SaCas9
aacacgggcttagagagacaca

SEQ ID NO: 24649 - DNA, 21 bp, Artificial Sequence
  Synthetic: FXN 3 forward 9:69045221-69045248; SaCas9
acacgggcttagagagacaca

SEQ ID NO: 24650 - DNA, 20 bp, Artificial Sequence
  Synthetic: FXN 3 forward 9:69045222-69045248; SaCas9
cacgggcttagagagacaca

SEQ ID NO: 24651 - DNA, 19 bp, Artificial Sequence
  Synthetic: FXN 3 forward 9:69045223-69045248; SaCas9
acgggcttagagagacaca

SEQ ID NO: 24652 - DNA, 18 bp, Artificial Sequence
  Synthetic: FXN 3 forward 9:69045224-69045248; SaCas9
cgggcttagagagacaca

SEQ ID NO: 24653 - DNA, 25 bp, Artificial Sequence
  Synthetic: FXN 3 forward 9:69045219-69045250; SaCas9
aaacacgggcttagagagacacagg

SEQ ID NO: 24654 - DNA, 24 bp, Artificial Sequence
  Synthetic: FXN 3 forward 9:69045220-69045250; SaCas9
aacacgggcttagagagacacagg

SEQ ID NO: 24655 - DNA, 23 bp, Artificial Sequence
  Synthetic: FXN 3 forward 9:69045221-69045250; SaCas9
acacgggcttagagagacacagg

SEQ ID NO: 24656 - DNA, 22 bp, Artificial Sequence
  Synthetic: FXN 3 forward 9:69045222-69045250; SaCas9
cacgggcttagagagacacagg

SEQ ID NO: 24657 - DNA, 21 bp, Artificial Sequence
  Synthetic: FXN 3 forward 9:69045223-69045250; SaCas9
acgggcttagagagacacagg

SEQ ID NO: 24658 - DNA, 20 bp, Artificial Sequence
  Synthetic: FXN 3 forward 9:69045224-69045250; SaCas9
cgggcttagagagacacagg

SEQ ID NO: 24659 - DNA, 19 bp, Artificial Sequence
  Synthetic: FXN 3 forward 9:69045225-69045250; SaCas9
gggcttagagagacacagg

SEQ ID NO: 24660 - DNA, 18 bp, Artificial Sequence
  Synthetic: FXN 3 forward 9:69045226-69045250; SaCas9
ggcttagagagacacagg

SEQ ID NO: 24661 - DNA, 25 bp, Artificial Sequence
  Synthetic: FXN 3 forward 9:69045241-69045272; SaCas9
agggagaatcactgtaatgcactaa

SEQ ID NO: 24662 - DNA, 24 bp, Artificial Sequence
  Synthetic: FXN 3 forward 9:69045242-69045272; SaCas9
gggagaatcactgtaatgcactaa

SEQ ID NO: 24663 - DNA, 23 bp, Artificial Sequence
  Synthetic: FXN 3 forward 9:69045243-69045272; SaCas9
ggagaatcactgtaatgcactaa

SEQ ID NO: 24664 - DNA, 22 bp, Artificial Sequence
  Synthetic: FXN 3 forward 9:69045244-69045272; SaCas9
gagaatcactgtaatgcactaa

SEQ ID NO: 24665 - DNA, 21 bp, Artificial Sequence
  Synthetic: FXN 3 forward 9:69045245-69045272; SaCas9
agaatcactgtaatgcactaa

SEQ ID NO: 24666 - DNA, 20 bp, Artificial Sequence
  Synthetic: FXN 3 forward 9:69045246-69045272; SaCas9
gaatcactgtaatgcactaa

SEQ ID NO: 24667 - DNA, 19 bp, Artificial Sequence
  Synthetic: FXN 3 forward 9:69045247-69045272; SaCas9
aatcactgtaatgcactaa

SEQ ID NO: 24668 - DNA, 18 bp, Artificial Sequence
  Synthetic: FXN 3 forward 9:69045248-69045272; SaCas9
atcactgtaatgcactaa

SEQ ID NO: 24669 - DNA, 25 bp, Artificial Sequence
  Synthetic: FXN 3 forward 9:69045266-69045297; SaCas9
aagaaggtaaaaaaaaaaaaatcct

SEQ ID NO: 24670 - DNA, 24 bp, Artificial Sequence
  Synthetic: FXN 3 forward 9:69045267-69045297; SaCas9
agaaggtaaaaaaaaaaaaatcct

SEQ ID NO: 24671 - DNA, 23 bp, Artificial Sequence
  Synthetic: FXN 3 forward 9:69045268-69045297; SaCas9
gaaggtaaaaaaaaaaaaatcct

SEQ ID NO: 24672 - DNA, 22 bp, Artificial Sequence
  Synthetic: FXN 3 forward 9:69045269-69045297; SaCas9
aaggtaaaaaaaaaaaaatcct

SEQ ID NO: 24673 - DNA, 21 bp, Artificial Sequence
  Synthetic: FXN 3 forward 9:69045270-69045297; SaCas9
aggtaaaaaaaaaaaaatcct

SEQ ID NO: 24674 - DNA, 20 bp, Artificial Sequence
  Synthetic: FXN 3 forward 9:69045271-69045297; SaCas9
ggtaaaaaaaaaaaaatcct

SEQ ID NO: 24675 - DNA, 19 bp, Artificial Sequence
  Synthetic: FXN 3 forward 9:69045272-69045297; SaCas9
gtaaaaaaaaaaaaatcct

SEQ ID NO: 24676 - DNA, 18 bp, Artificial Sequence
  Synthetic: FXN 3 forward 9:69045273-69045297; SaCas9
taaaaaaaaaaaaatcct

SEQ ID NO: 24677 - DNA, 25 bp, Artificial Sequence
  Synthetic: FXN 3 reverse 9:69045286-69045317; SaCas9
attaaagtattttaggaatatttct

SEQ ID NO: 24678 - DNA, 24 bp, Artificial Sequence
  Synthetic: FXN 3 reverse 9:69045287-69045317; SaCas9
ttaaagtattttaggaatatttct

SEQ ID NO: 24679 - DNA, 23 bp, Artificial Sequence
  Synthetic: FXN 3 reverse 9:69045288-69045317; SaCas9
taaagtattttaggaatatttct

SEQ ID NO: 24680 - DNA, 22 bp, Artificial Sequence
  Synthetic: FXN 3 reverse 9:69045289-69045317; SaCas9
aaagtattttaggaatatttct

SEQ ID NO: 24681 - DNA, 21 bp, Artificial Sequence
  Synthetic: FXN 3 reverse 9:69045290-69045317; SaCas9
aagtattttaggaatatttct

SEQ ID NO: 24682 - DNA, 20 bp, Artificial Sequence
  Synthetic: FXN 3 reverse 9:69045291-69045317; SaCas9
agtattttaggaatatttct

SEQ ID NO: 24683 - DNA, 19 bp, Artificial Sequence
  Synthetic: FXN 3 reverse 9:69045292-69045317; SaCas9
gtattttaggaatatttct

SEQ ID NO: 24684 - DNA, 18 bp, Artificial Sequence
  Synthetic: FXN 3 reverse 9:69045293-69045317; SaCas9
tattttaggaatatttct

SEQ ID NO: 24685 - DNA, 25 bp, Artificial Sequence
  Synthetic: FXN 3 forward 9:69045293-69045324; SaCas9
gaaatattcctaaaatactttaata

SEQ ID NO: 24686 - DNA, 24 bp, Artificial Sequence
  Synthetic: FXN 3 forward 9:69045294-69045324; SaCas9
aaatattcctaaaatactttaata

SEQ ID NO: 24687 - DNA, 23 bp, Artificial Sequence
  Synthetic: FXN 3 forward 9:69045295-69045324; SaCas9
aatattcctaaaatactttaata

SEQ ID NO: 24688 - DNA, 22 bp, Artificial Sequence
  Synthetic: FXN 3 forward 9:69045296-69045324; SaCas9
atattcctaaaatactttaata

SEQ ID NO: 24689 - DNA, 21 bp, Artificial Sequence
  Synthetic: FXN 3 forward 9:69045297-69045324; SaCas9
tattcctaaaatactttaata

SEQ ID NO: 24690 - DNA, 20 bp, Artificial Sequence
  Synthetic: FXN 3 forward 9:69045298-69045324; SaCas9
attcctaaaatactttaata

SEQ ID NO: 24691 - DNA, 19 bp, Artificial Sequence
  Synthetic: FXN 3 forward 9:69045299-69045324; SaCas9
ttcctaaaatactttaata

SEQ ID NO: 24692 - DNA, 18 bp, Artificial Sequence
  Synthetic: FXN 3 forward 9:69045300-69045324; SaCas9
tcctaaaatactttaata

SEQ ID NO: 24693 - DNA, 25 bp, Artificial Sequence
  Synthetic: FXN 3 forward 9:69045298-69045329; SaCas9
attcctaaaatactttaatataggg

SEQ ID NO: 24694 - DNA, 24 bp, Artificial Sequence
  Synthetic: FXN 3 forward 9:69045299-69045329; SaCas9
ttcctaaaatactttaatataggg

SEQ ID NO: 24695 - DNA, 23 bp, Artificial Sequence
  Synthetic: FXN 3 forward 9:69045300-69045329; SaCas9
tcctaaaatactttaatataggg

SEQ ID NO: 24696 - DNA, 22 bp, Artificial Sequence
  Synthetic: FXN 3 forward 9:69045301-69045329; SaCas9
cctaaaatactttaatataggg

SEQ ID NO: 24697 - DNA, 21 bp, Artificial Sequence
  Synthetic: FXN 3 forward 9:69045302-69045329; SaCas9
ctaaaatactttaatataggg

SEQ ID NO: 24698 - DNA, 20 bp, Artificial Sequence
  Synthetic: FXN 3 forward 9:69045303-69045329; SaCas9
taaaatactttaatataggg

SEQ ID NO: 24699 - DNA, 19 bp, Artificial Sequence
  Synthetic: FXN 3 forward 9:69045304-69045329; SaCas9
aaaatactttaatataggg

SEQ ID NO: 24700 - DNA, 18 bp, Artificial Sequence
  Synthetic: FXN 3 forward 9:69045305-69045329; SaCas9
aaatactttaatataggg

SEQ ID NO: 24701 - DNA, 25 bp, Artificial Sequence
  Synthetic: FXN 3 reverse 9:69045298-69045329; SaCas9
acccagccctatattaaagtatttt

SEQ ID NO: 24702 - DNA, 24 bp, Artificial Sequence
  Synthetic: FXN 3 reverse 9:69045299-69045329; SaCas9
cccagccctatattaaagtatttt

SEQ ID NO: 24703 - DNA, 23 bp, Artificial Sequence
  Synthetic: FXN 3 reverse 9:69045300-69045329; SaCas9
ccagccctatattaaagtatttt

SEQ ID NO: 24704 - DNA, 22 bp, Artificial Sequence
  Synthetic: FXN 3 reverse 9:69045301-69045329; SaCas9
cagccctatattaaagtatttt

SEQ ID NO: 24705 - DNA, 21 bp, Artificial Sequence
  Synthetic: FXN 3 reverse 9:69045302-69045329; SaCas9
agccctatattaaagtatttt

SEQ ID NO: 24706 - DNA, 20 bp, Artificial Sequence
  Synthetic: FXN 3 reverse 9:69045303-69045329; SaCas9
gccctatattaaagtatttt

SEQ ID NO: 24707 - DNA, 19 bp, Artificial Sequence
  Synthetic: FXN 3 reverse 9:69045304-69045329; SaCas9
ccctatattaaagtatttt

SEQ ID NO: 24708 - DNA, 18 bp, Artificial Sequence
  Synthetic: FXN 3 reverse 9:69045305-69045329; SaCas9
cctatattaaagtatttt

SEQ ID NO: 24709 - DNA, 25 bp, Artificial Sequence
  Synthetic: FXN 3 reverse 9:69045299-69045330; SaCas9
cacccagccctatattaaagtattt

SEQ ID NO: 24710 - DNA, 24 bp, Artificial Sequence
  Synthetic: FXN 3 reverse 9:69045300-69045330; SaCas9
acccagccctatattaaagtattt

SEQ ID NO: 24711 - DNA, 23 bp, Artificial Sequence
  Synthetic: FXN 3 reverse 9:69045301-69045330; SaCas9
cccagccctatattaaagtattt

SEQ ID NO: 24712 - DNA, 22 bp, Artificial Sequence
  Synthetic: FXN 3 reverse 9:69045302-69045330; SaCas9
ccagccctatattaaagtattt

SEQ ID NO: 24713 - DNA, 21 bp, Artificial Sequence
  Synthetic: FXN 3 reverse 9:69045303-69045330; SaCas9
cagccctatattaaagtattt

SEQ ID NO: 24714 - DNA, 20 bp, Artificial Sequence
  Synthetic: FXN 3 reverse 9:69045304-69045330; SaCas9
agccctatattaaagtattt

SEQ ID NO: 24715 - DNA, 19 bp, Artificial Sequence
  Synthetic: FXN 3 reverse 9:69045305-69045330; SaCas9
gccctatattaaagtattt

SEQ ID NO: 24716 - DNA, 18 bp, Artificial Sequence
  Synthetic: FXN 3 reverse 9:69045306-69045330; SaCas9
ccctatattaaagtattt

SEQ ID NO: 24717 - DNA, 25 bp, Artificial Sequence
  Synthetic: FXN 3 forward 9:69045326-69045357; SaCas9
ggtgcggtggctcacatccagcatt

SEQ ID NO: 24718 - DNA, 24 bp, Artificial Sequence
  Synthetic: FXN 3 forward 9:69045327-69045357; SaCas9
gtgcggtggctcacatccagcatt

SEQ ID NO: 24719 - DNA, 23 bp, Artificial Sequence
  Synthetic: FXN 3 forward 9:69045328-69045357; SaCas9
tgcggtggctcacatccagcatt

SEQ ID NO: 24720 - DNA, 22 bp, Artificial Sequence
  Synthetic: FXN 3 forward 9:69045329-69045357; SaCas9
gcggtggctcacatccagcatt

SEQ ID NO: 24721 - DNA, 21 bp, Artificial Sequence
  Synthetic: FXN 3 forward 9:69045330-69045357; SaCas9
cggtggctcacatccagcatt

SEQ ID NO: 24722 - DNA, 20 bp, Artificial Sequence
  Synthetic: FXN 3 forward 9:69045331-69045357; SaCas9
ggtggctcacatccagcatt

SEQ ID NO: 24723 - DNA, 19 bp, Artificial Sequence
  Synthetic: FXN 3 forward 9:69045332-69045357; SaCas9
gtggctcacatccagcatt

SEQ ID NO: 24724 - DNA, 18 bp, Artificial Sequence
  Synthetic: FXN 3 forward 9:69045333-69045357; SaCas9
tggctcacatccagcatt

SEQ ID NO: 24725 - DNA, 25 bp, Artificial Sequence
  Synthetic: FXN 3 forward 9:69045327-69045358; SaCas9
gtgcggtggctcacatccagcattt

SEQ ID NO: 24726 - DNA, 24 bp, Artificial Sequence
  Synthetic: FXN 3 forward 9:69045328-69045358; SaCas9
tgcggtggctcacatccagcattt

SEQ ID NO: 24727 - DNA, 23 bp, Artificial Sequence
  Synthetic: FXN 3 forward 9:69045329-69045358; SaCas9
gcggtggctcacatccagcattt

SEQ ID NO: 24728 - DNA, 22 bp, Artificial Sequence
  Synthetic: FXN 3 forward 9:69045330-69045358; SaCas9
cggtggctcacatccagcattt

SEQ ID NO: 24729 - DNA, 21 bp, Artificial Sequence
  Synthetic: FXN 3 forward 9:69045331-69045358; SaCas9
ggtggctcacatccagcattt

SEQ ID NO: 24730 - DNA, 20 bp, Artificial Sequence
  Synthetic: FXN 3 forward 9:69045332-69045358; SaCas9
gtggctcacatccagcattt

SEQ ID NO: 24731 - DNA, 19 bp, Artificial Sequence
  Synthetic: FXN 3 forward 9:69045333-69045358; SaCas9
tggctcacatccagcattt

SEQ ID NO: 24732 - DNA, 18 bp, Artificial Sequence
  Synthetic: FXN 3 forward 9:69045334-69045358; SaCas9
ggctcacatccagcattt

SEQ ID NO: 24733 - DNA, 25 bp, Artificial Sequence
  Synthetic: FXN 3 forward 9:69045328-69045359; SaCas9
tgcggtggctcacatccagcatttt

SEQ ID NO: 24734 - DNA, 24 bp, Artificial Sequence
  Synthetic: FXN 3 forward 9:69045329-69045359; SaCas9
gcggtggctcacatccagcatttt

SEQ ID NO: 24735 - DNA, 23 bp, Artificial Sequence
  Synthetic: FXN 3 forward 9:69045330-69045359; SaCas9
cggtggctcacatccagcatttt

SEQ ID NO: 24736 - DNA, 22 bp, Artificial Sequence
  Synthetic: FXN 3 forward 9:69045331-69045359; SaCas9
ggtggctcacatccagcatttt

SEQ ID NO: 24737 - DNA, 21 bp, Artificial Sequence
  Synthetic: FXN 3 forward 9:69045332-69045359; SaCas9
gtggctcacatccagcatttt

SEQ ID NO: 24738 - DNA, 20 bp, Artificial Sequence
  Synthetic: FXN 3 forward 9:69045333-69045359; SaCas9
tggctcacatccagcatttt

SEQ ID NO: 24739 - DNA, 19 bp, Artificial Sequence
  Synthetic: FXN 3 forward 9:69045334-69045359; SaCas9
ggctcacatccagcatttt

SEQ ID NO: 24740 - DNA, 18 bp, Artificial Sequence
  Synthetic: FXN 3 forward 9:69045335-69045359; SaCas9
gctcacatccagcatttt

SEQ ID NO: 24741 - DNA, 25 bp, Artificial Sequence
  Synthetic: FXN 3 forward 9:69045334-69045365; SaCas9
ggctcacatccagcattttgggaag

SEQ ID NO: 24742 - DNA, 24 bp, Artificial Sequence
  Synthetic: FXN 3 forward 9:69045335-69045365; SaCas9
gctcacatccagcattttgggaag

SEQ ID NO: 24743 - DNA, 23 bp, Artificial Sequence
  Synthetic: FXN 3 forward 9:69045336-69045365; SaCas9
ctcacatccagcattttgggaag

SEQ ID NO: 24744 - DNA, 22 bp, Artificial Sequence
  Synthetic: FXN 3 forward 9:69045337-69045365; SaCas9
tcacatccagcattttgggaag

SEQ ID NO: 24745 - DNA, 21 bp, Artificial Sequence
  Synthetic: FXN 3 forward 9:69045338-69045365; SaCas9
cacatccagcattttgggaag

SEQ ID NO: 24746 - DNA, 20 bp, Artificial Sequence
  Synthetic: FXN 3 forward 9:69045339-69045365; SaCas9
acatccagcattttgggaag

SEQ ID NO: 24747 - DNA, 19 bp, Artificial Sequence
  Synthetic: FXN 3 forward 9:69045340-69045365; SaCas9
catccagcattttgggaag

SEQ ID NO: 24748 - DNA, 18 bp, Artificial Sequence
  Synthetic: FXN 3 forward 9:69045341-69045365; SaCas9
atccagcattttgggaag

SEQ ID NO: 24749 - DNA, 25 bp, Artificial Sequence
  Synthetic: FXN 3 reverse 9:69045335-69045366; SaCas9
tcctcagcttcccaaaatgctggat

SEQ ID NO: 24750 - DNA, 24 bp, Artificial Sequence
  Synthetic: FXN 3 reverse 9:69045336-69045366; SaCas9
cctcagcttcccaaaatgctggat

SEQ ID NO: 24751 - DNA, 23 bp, Artificial Sequence
  Synthetic: FXN 3 reverse 9:69045337-69045366; SaCas9
ctcagcttcccaaaatgctggat

SEQ ID NO: 24752 - DNA, 22 bp, Artificial Sequence
  Synthetic: FXN 3 reverse 9:69045338-69045366; SaCas9
tcagcttcccaaaatgctggat

SEQ ID NO: 24753 - DNA, 21 bp, Artificial Sequence
  Synthetic: FXN 3 reverse 9:69045339-69045366; SaCas9
cagcttcccaaaatgctggat

SEQ ID NO: 24754 - DNA, 20 bp, Artificial Sequence
  Synthetic: FXN 3 reverse 9:69045340-69045366; SaCas9
agcttcccaaaatgctggat

SEQ ID NO: 24755 - DNA, 19 bp, Artificial Sequence
  Synthetic: FXN 3 reverse 9:69045341-69045366; SaCas9
gcttcccaaaatgctggat

SEQ ID NO: 24756 - DNA, 18 bp, Artificial Sequence
  Synthetic: FXN 3 reverse 9:69045342-69045366; SaCas9
cttcccaaaatgctggat

SEQ ID NO: 24757 - DNA, 25 bp, Artificial Sequence
  Synthetic: FXN 3 forward 9:69045336-69045367; SaCas9
ctcacatccagcattttgggaagct

SEQ ID NO: 24758 - DNA, 24 bp, Artificial Sequence
  Synthetic: FXN 3 forward 9:69045337-69045367; SaCas9
tcacatccagcattttgggaagct

SEQ ID NO: 24759 - DNA, 23 bp, Artificial Sequence
  Synthetic: FXN 3 forward 9:69045338-69045367; SaCas9
cacatccagcattttgggaagct

SEQ ID NO: 24760 - DNA, 22 bp, Artificial Sequence
  Synthetic: FXN 3 forward 9:69045339-69045367; SaCas9
acatccagcattttgggaagct

SEQ ID NO: 24761 - DNA, 21 bp, Artificial Sequence
  Synthetic: FXN 3 forward 9:69045340-69045367; SaCas9
catccagcattttgggaagct

SEQ ID NO: 24762 - DNA, 20 bp, Artificial Sequence
  Synthetic: FXN 3 forward 9:69045341-69045367; SaCas9
atccagcattttgggaagct

SEQ ID NO: 24763 - DNA, 19 bp, Artificial Sequence
  Synthetic: FXN 3 forward 9:69045342-69045367; SaCas9
tccagcattttgggaagct

SEQ ID NO: 24764 - DNA, 18 bp, Artificial Sequence
  Synthetic: FXN 3 forward 9:69045343-69045367; SaCas9
ccagcattttgggaagct

SEQ ID NO: 24765 - DNA, 25 bp, Artificial Sequence
  Synthetic: FXN 3 forward 9:69045337-69045368; SaCas9
tcacatccagcattttgggaagctg

SEQ ID NO: 24766 - DNA, 24 bp, Artificial Sequence
  Synthetic: FXN 3 forward 9:69045338-69045368; SaCas9
cacatccagcattttgggaagctg

SEQ ID NO: 24767 - DNA, 23 bp, Artificial Sequence
  Synthetic: FXN 3 forward 9:69045339-69045368; SaCas9
acatccagcattttgggaagctg

SEQ ID NO: 24768 - DNA, 22 bp, Artificial Sequence
  Synthetic: FXN 3 forward 9:69045340-69045368; SaCas9
catccagcattttgggaagctg

SEQ ID NO: 24769 - DNA, 21 bp, Artificial Sequence
  Synthetic: FXN 3 forward 9:69045341-69045368; SaCas9
atccagcattttgggaagctg

SEQ ID NO: 24770 - DNA, 20 bp, Artificial Sequence
  Synthetic: FXN 3 forward 9:69045342-69045368; SaCas9
tccagcattttgggaagctg

SEQ ID NO: 24771 - DNA, 19 bp, Artificial Sequence
  Synthetic: FXN 3 forward 9:69045343-69045368; SaCas9
ccagcattttgggaagctg

SEQ ID NO: 24772 - DNA, 18 bp, Artificial Sequence
  Synthetic: FXN 3 forward 9:69045344-69045368; SaCas9
cagcattttgggaagctg

SEQ ID NO: 24773 - DNA, 25 bp, Artificial Sequence
  Synthetic: FXN 3 forward 9:69045339-69045370; SaCas9
acatccagcattttgggaagctgag

SEQ ID NO: 24774 - DNA, 24 bp, Artificial Sequence
  Synthetic: FXN 3 forward 9:69045340-69045370; SaCas9
catccagcattttgggaagctgag

SEQ ID NO: 24775 - DNA, 23 bp, Artificial Sequence
  Synthetic: FXN 3 forward 9:69045341-69045370; SaCas9
atccagcattttgggaagctgag

SEQ ID NO: 24776 - DNA, 22 bp, Artificial Sequence
  Synthetic: FXN 3 forward 9:69045342-69045370; SaCas9
tccagcattttgggaagctgag

SEQ ID NO: 24777 - DNA, 21 bp, Artificial Sequence
  Synthetic: FXN 3 forward 9:69045343-69045370; SaCas9
ccagcattttgggaagctgag

SEQ ID NO: 24778 - DNA, 20 bp, Artificial Sequence
  Synthetic: FXN 3 forward 9:69045344-69045370; SaCas9
cagcattttgggaagctgag

SEQ ID NO: 24779 - DNA, 19 bp, Artificial Sequence
  Synthetic: FXN 3 forward 9:69045345-69045370; SaCas9
agcattttgggaagctgag

SEQ ID NO: 24780 - DNA, 18 bp, Artificial Sequence
  Synthetic: FXN 3 forward 9:69045346-69045370; SaCas9
gcattttgggaagctgag

SEQ ID NO: 24781 - DNA, 25 bp, Artificial Sequence
  Synthetic: FXN 3 reverse 9:69045341-69045372; SaCas9
ctgccctcctcagcttcccaaaatg

SEQ ID NO: 24782 - DNA, 24 bp, Artificial Sequence
  Synthetic: FXN 3 reverse 9:69045342-69045372; SaCas9
tgccctcctcagcttcccaaaatg

SEQ ID NO: 24783 - DNA, 23 bp, Artificial Sequence
  Synthetic: FXN 3 reverse 9:69045343-69045372; SaCas9
gccctcctcagcttcccaaaatg

SEQ ID NO: 24784 - DNA, 22 bp, Artificial Sequence
  Synthetic: FXN 3 reverse 9:69045344-69045372; SaCas9
ccctcctcagcttcccaaaatg

SEQ ID NO: 24785 - DNA, 21 bp, Artificial Sequence
  Synthetic: FXN 3 reverse 9:69045345-69045372; SaCas9
cctcctcagcttcccaaaatg

SEQ ID NO: 24786 - DNA, 20 bp, Artificial Sequence
  Synthetic: FXN 3 reverse 9:69045346-69045372; SaCas9
ctcctcagcttcccaaaatg

SEQ ID NO: 24787 - DNA, 19 bp, Artificial Sequence
  Synthetic: FXN 3 reverse 9:69045347-69045372; SaCas9
tcctcagcttcccaaaatg

SEQ ID NO: 24788 - DNA, 18 bp, Artificial Sequence
  Synthetic: FXN 3 reverse 9:69045348-69045372; SaCas9
cctcagcttcccaaaatg

SEQ ID NO: 24789 - DNA, 25 bp, Artificial Sequence
  Synthetic: FXN 3 forward 9:69045352-69045383; SaCas9
tgggaagctgaggagggcagatcac

SEQ ID NO: 24790 - DNA, 24 bp, Artificial Sequence
  Synthetic: FXN 3 forward 9:69045353-69045383; SaCas9
gggaagctgaggagggcagatcac

SEQ ID NO: 24791 - DNA, 23 bp, Artificial Sequence
  Synthetic: FXN 3 forward 9:69045354-69045383; SaCas9
ggaagctgaggagggcagatcac

SEQ ID NO: 24792 - DNA, 22 bp, Artificial Sequence
  Synthetic: FXN 3 forward 9:69045355-69045383; SaCas9
gaagctgaggagggcagatcac

SEQ ID NO: 24793 - DNA, 21 bp, Artificial Sequence
  Synthetic: FXN 3 forward 9:69045356-69045383; SaCas9
aagctgaggagggcagatcac

SEQ ID NO: 24794 - DNA, 20 bp, Artificial Sequence
  Synthetic: FXN 3 forward 9:69045357-69045383; SaCas9
agctgaggagggcagatcac

SEQ ID NO: 24795 - DNA, 19 bp, Artificial Sequence
  Synthetic: FXN 3 forward 9:69045358-69045383; SaCas9
gctgaggagggcagatcac

SEQ ID NO: 24796 - DNA, 18 bp, Artificial Sequence
  Synthetic: FXN 3 forward 9:69045359-69045383; SaCas9
ctgaggagggcagatcac

SEQ ID NO: 24797 - DNA, 25 bp, Artificial Sequence
  Synthetic: FXN 3 forward 9:69045359-69045390; SaCas9
ctgaggagggcagatcacttgaggc

SEQ ID NO: 24798 - DNA, 24 bp, Artificial Sequence
  Synthetic: FXN 3 forward 9:69045360-69045390; SaCas9
tgaggagggcagatcacttgaggc

SEQ ID NO: 24799 - DNA, 23 bp, Artificial Sequence
  Synthetic: FXN 3 forward 9:69045361-69045390; SaCas9
gaggagggcagatcacttgaggc

SEQ ID NO: 24800 - DNA, 22 bp, Artificial Sequence
  Synthetic: FXN 3 forward 9:69045362-69045390; SaCas9
aggagggcagatcacttgaggc

SEQ ID NO: 24801 - DNA, 21 bp, Artificial Sequence
  Synthetic: FXN 3 forward 9:69045363-69045390; SaCas9
ggagggcagatcacttgaggc

SEQ ID NO: 24802 - DNA, 20 bp, Artificial Sequence
  Synthetic: FXN 3 forward 9:69045364-69045390; SaCas9
gagggcagatcacttgaggc

SEQ ID NO: 24803 - DNA, 19 bp, Artificial Sequence
  Synthetic: FXN 3 forward 9:69045365-69045390; SaCas9
agggcagatcacttgaggc

SEQ ID NO: 24804 - DNA, 18 bp, Artificial Sequence
  Synthetic: FXN 3 forward 9:69045366-69045390; SaCas9
gggcagatcacttgaggc

SEQ ID NO: 24805 - DNA, 25 bp, Artificial Sequence
  Synthetic: FXN 3 forward 9:69045360-69045391; SaCas9
tgaggagggcagatcacttgaggcc

SEQ ID NO: 24806 - DNA, 24 bp, Artificial Sequence
  Synthetic: FXN 3 forward 9:69045361-69045391; SaCas9
gaggagggcagatcacttgaggcc

SEQ ID NO: 24807 - DNA, 23 bp, Artificial Sequence
  Synthetic: FXN 3 forward 9:69045362-69045391; SaCas9
aggagggcagatcacttgaggcc

SEQ ID NO: 24808 - DNA, 22 bp, Artificial Sequence
  Synthetic: FXN 3 forward 9:69045363-69045391; SaCas9
ggagggcagatcacttgaggcc

SEQ ID NO: 24809 - DNA, 21 bp, Artificial Sequence
  Synthetic: FXN 3 forward 9:69045364-69045391; SaCas9
gagggcagatcacttgaggcc

SEQ ID NO: 24810 - DNA, 20 bp, Artificial Sequence
  Synthetic: FXN 3 forward 9:69045365-69045391; SaCas9
agggcagatcacttgaggcc

SEQ ID NO: 24811 - DNA, 19 bp, Artificial Sequence
  Synthetic: FXN 3 forward 9:69045366-69045391; SaCas9
gggcagatcacttgaggcc

SEQ ID NO: 24812 - DNA, 18 bp, Artificial Sequence
  Synthetic: FXN 3 forward 9:69045367-69045391; SaCas9
ggcagatcacttgaggcc

SEQ ID NO: 24813 - DNA, 25 bp, Artificial Sequence
  Synthetic: FXN 3 forward 9:69045389-69045420; SaCas9
gttcaagaccagcctggccaacatg

SEQ ID NO: 24814 - DNA, 24 bp, Artificial Sequence
  Synthetic: FXN 3 forward 9:69045390-69045420; SaCas9
ttcaagaccagcctggccaacatg

SEQ ID NO: 24815 - DNA, 23 bp, Artificial Sequence
  Synthetic: FXN 3 forward 9:69045391-69045420; SaCas9
tcaagaccagcctggccaacatg

SEQ ID NO: 24816 - DNA, 22 bp, Artificial Sequence
  Synthetic: FXN 3 forward 9:69045392-69045420; SaCas9
caagaccagcctggccaacatg

SEQ ID NO: 24817 - DNA, 21 bp, Artificial Sequence
  Synthetic: FXN 3 forward 9:69045393-69045420; SaCas9
aagaccagcctggccaacatg

SEQ ID NO: 24818 - DNA, 20 bp, Artificial Sequence
  Synthetic: FXN 3 forward 9:69045394-69045420; SaCas9
agaccagcctggccaacatg

SEQ ID NO: 24819 - DNA, 19 bp, Artificial Sequence
  Synthetic: FXN 3 forward 9:69045395-69045420; SaCas9
gaccagcctggccaacatg

SEQ ID NO: 24820 - DNA, 18 bp, Artificial Sequence
  Synthetic: FXN 3 forward 9:69045396-69045420; SaCas9
accagcctggccaacatg

SEQ ID NO: 24821 - DNA, 25 bp, Artificial Sequence
  Synthetic: FXN 3 reverse 9:69045389-69045420; SaCas9
tttcaccatgttggccaggctggtc

SEQ ID NO: 24822 - DNA, 24 bp, Artificial Sequence
  Synthetic: FXN 3 reverse 9:69045390-69045420; SaCas9
ttcaccatgttggccaggctggtc

SEQ ID NO: 24823 - DNA, 23 bp, Artificial Sequence
  Synthetic: FXN 3 reverse 9:69045391-69045420; SaCas9
tcaccatgttggccaggctggtc

SEQ ID NO: 24824 - DNA, 22 bp, Artificial Sequence
  Synthetic: FXN 3 reverse 9:69045392-69045420; SaCas9
caccatgttggccaggctggtc

SEQ ID NO: 24825 - DNA, 21 bp, Artificial Sequence
  Synthetic: FXN 3 reverse 9:69045393-69045420; SaCas9
accatgttggccaggctggtc

SEQ ID NO: 24826 - DNA, 20 bp, Artificial Sequence
  Synthetic: FXN 3 reverse 9:69045394-69045420; SaCas9
ccatgttggccaggctggtc

SEQ ID NO: 24827 - DNA, 19 bp, Artificial Sequence
  Synthetic: FXN 3 reverse 9:69045395-69045420; SaCas9
catgttggccaggctggtc

SEQ ID NO: 24828 - DNA, 18 bp, Artificial Sequence
  Synthetic: FXN 3 reverse 9:69045396-69045420; SaCas9
atgttggccaggctggtc

SEQ ID NO: 24829 - DNA, 25 bp, Artificial Sequence
  Synthetic: FXN 3 reverse 9:69045419-69045450; SaCas9
cgattttttgtatttttagtagaga

SEQ ID NO: 24830 - DNA, 24 bp, Artificial Sequence
  Synthetic: FXN 3 reverse 9:69045420-69045450; SaCas9
gattttttgtatttttagtagaga

SEQ ID NO: 24831 - DNA, 23 bp, Artificial Sequence
  Synthetic: FXN 3 reverse 9:69045421-69045450; SaCas9
attttttgtatttttagtagaga

SEQ ID NO: 24832 - DNA, 22 bp, Artificial Sequence
  Synthetic: FXN 3 reverse 9:69045422-69045450; SaCas9
ttttttgtatttttagtagaga

SEQ ID NO: 24833 - DNA, 21 bp, Artificial Sequence
  Synthetic: FXN 3 reverse 9:69045423-69045450; SaCas9
tttttgtatttttagtagaga

SEQ ID NO: 24834 - DNA, 20 bp, Artificial Sequence
  Synthetic: FXN 3 reverse 9:69045424-69045450; SaCas9
ttttgtatttttagtagaga

SEQ ID NO: 24835 - DNA, 19 bp, Artificial Sequence
  Synthetic: FXN 3 reverse 9:69045425-69045450; SaCas9
tttgtatttttagtagaga

SEQ ID NO: 24836 - DNA, 18 bp, Artificial Sequence
  Synthetic: FXN 3 reverse 9:69045426-69045450; SaCas9
ttgtatttttagtagaga

SEQ ID NO: 24837 - DNA, 25 bp, Artificial Sequence
  Synthetic: FXN 3 reverse 9:69045420-69045451; SaCas9
ccgattttttgtatttttagtagag

SEQ ID NO: 24838 - DNA, 24 bp, Artificial Sequence
  Synthetic: FXN 3 reverse 9:69045421-69045451; SaCas9
cgattttttgtatttttagtagag

SEQ ID NO: 24839 - DNA, 23 bp, Artificial Sequence
  Synthetic: FXN 3 reverse 9:69045422-69045451; SaCas9
gattttttgtatttttagtagag

SEQ ID NO: 24840 - DNA, 22 bp, Artificial Sequence
  Synthetic: FXN 3 reverse 9:69045423-69045451; SaCas9
attttttgtatttttagtagag

SEQ ID NO: 24841 - DNA, 21 bp, Artificial Sequence
  Synthetic: FXN 3 reverse 9:69045424-69045451; SaCas9
ttttttgtatttttagtagag

SEQ ID NO: 24842 - DNA, 20 bp, Artificial Sequence
  Synthetic: FXN 3 reverse 9:69045425-69045451; SaCas9
tttttgtatttttagtagag

SEQ ID NO: 24843 - DNA, 19 bp, Artificial Sequence
  Synthetic: FXN 3 reverse 9:69045426-69045451; SaCas9
ttttgtatttttagtagag

SEQ ID NO: 24844 - DNA, 18 bp, Artificial Sequence
  Synthetic: FXN 3 reverse 9:69045427-69045451; SaCas9
tttgtatttttagtagag

SEQ ID NO: 24845 - DNA, 25 bp, Artificial Sequence
  Synthetic: FXN 3 forward 9:69045422-69045453; SaCas9
ccgtctctactaaaaatacaaaaaa

SEQ ID NO: 24846 - DNA, 24 bp, Artificial Sequence
  Synthetic: FXN 3 forward 9:69045423-69045453; SaCas9
cgtctctactaaaaatacaaaaaa

SEQ ID NO: 24847 - DNA, 23 bp, Artificial Sequence
  Synthetic: FXN 3 forward 9:69045424-69045453; SaCas9
gtctctactaaaaatacaaaaaa

SEQ ID NO: 24848 - DNA, 22 bp, Artificial Sequence
  Synthetic: FXN 3 forward 9:69045425-69045453; SaCas9
tctctactaaaaatacaaaaaa

SEQ ID NO: 24849 - DNA, 21 bp, Artificial Sequence
  Synthetic: FXN 3 forward 9:69045426-69045453; SaCas9
ctctactaaaaatacaaaaaa

SEQ ID NO: 24850 - DNA, 20 bp, Artificial Sequence
  Synthetic: FXN 3 forward 9:69045427-69045453; SaCas9
tctactaaaaatacaaaaaa

SEQ ID NO: 24851 - DNA, 19 bp, Artificial Sequence
  Synthetic: FXN 3 forward 9:69045428-69045453; SaCas9
ctactaaaaatacaaaaaa

SEQ ID NO: 24852 - DNA, 18 bp, Artificial Sequence
  Synthetic: FXN 3 forward 9:69045429-69045453; SaCas9
tactaaaaatacaaaaaa

SEQ ID NO: 24853 - DNA, 25 bp, Artificial Sequence
  Synthetic: FXN 3 reverse 9:69045425-69045456; SaCas9
cgcacccgattttttgtatttttag

SEQ ID NO: 24854 - DNA, 24 bp, Artificial Sequence
  Synthetic: FXN 3 reverse 9:69045426-69045456; SaCas9
gcacccgattttttgtatttttag

SEQ ID NO: 24855 - DNA, 23 bp, Artificial Sequence
  Synthetic: FXN 3 reverse 9:69045427-69045456; SaCas9
cacccgattttttgtatttttag

SEQ ID NO: 24856 - DNA, 22 bp, Artificial Sequence
  Synthetic: FXN 3 reverse 9:69045428-69045456; SaCas9
acccgattttttgtatttttag

SEQ ID NO: 24857 - DNA, 21 bp, Artificial Sequence
  Synthetic: FXN 3 reverse 9:69045429-69045456; SaCas9
cccgattttttgtatttttag

SEQ ID NO: 24858 - DNA, 20 bp, Artificial Sequence
  Synthetic: FXN 3 reverse 9:69045430-69045456; SaCas9
ccgattttttgtatttttag

SEQ ID NO: 24859 - DNA, 19 bp, Artificial Sequence
  Synthetic: FXN 3 reverse 9:69045431-69045456; SaCas9
cgattttttgtatttttag

SEQ ID NO: 24860 - DNA, 18 bp, Artificial Sequence
  Synthetic: FXN 3 reverse 9:69045432-69045456; SaCas9
gattttttgtatttttag

SEQ ID NO: 24861 - DNA, 25 bp, Artificial Sequence
  Synthetic: FXN 3 forward 9:69045434-69045465; SaCas9
aaaatacaaaaaatcgggtgcggtg

SEQ ID NO: 24862 - DNA, 24 bp, Artificial Sequence
  Synthetic: FXN 3 forward 9:69045435-69045465; SaCas9
aaatacaaaaaatcgggtgcggtg

SEQ ID NO: 24863 - DNA, 23 bp, Artificial Sequence
  Synthetic: FXN 3 forward 9:69045436-69045465; SaCas9
aatacaaaaaatcgggtgcggtg

SEQ ID NO: 24864 - DNA, 22 bp, Artificial Sequence
  Synthetic: FXN 3 forward 9:69045437-69045465; SaCas9
atacaaaaaatcgggtgcggtg

SEQ ID NO: 24865 - DNA, 21 bp, Artificial Sequence
  Synthetic: FXN 3 forward 9:69045438-69045465; SaCas9
tacaaaaaatcgggtgcggtg

SEQ ID NO: 24866 - DNA, 20 bp, Artificial Sequence
  Synthetic: FXN 3 forward 9:69045439-69045465; SaCas9
acaaaaaatcgggtgcggtg

SEQ ID NO: 24867 - DNA, 19 bp, Artificial Sequence
  Synthetic: FXN 3 forward 9:69045440-69045465; SaCas9
caaaaaatcgggtgcggtg

SEQ ID NO: 24868 - DNA, 18 bp, Artificial Sequence
  Synthetic: FXN 3 forward 9:69045441-69045465; SaCas9
aaaaaatcgggtgcggtg

SEQ ID NO: 24869 - DNA, 25 bp, Artificial Sequence
  Synthetic: FXN 3 forward 9:69045458-69045489; SaCas9
ggcgggtgcctgtaatcccagctac

SEQ ID NO: 24870 - DNA, 24 bp, Artificial Sequence
  Synthetic: FXN 3 forward 9:69045459-69045489; SaCas9
gcgggtgcctgtaatcccagctac

SEQ ID NO: 24871 - DNA, 23 bp, Artificial Sequence
  Synthetic: FXN 3 forward 9:69045460-69045489; SaCas9
cgggtgcctgtaatcccagctac

SEQ ID NO: 24872 - DNA, 22 bp, Artificial Sequence
  Synthetic: FXN 3 forward 9:69045461-69045489; SaCas9
gggtgcctgtaatcccagctac

SEQ ID NO: 24873 - DNA, 21 bp, Artificial Sequence
  Synthetic: FXN 3 forward 9:69045462-69045489; SaCas9
ggtgcctgtaatcccagctac

SEQ ID NO: 24874 - DNA, 20 bp, Artificial Sequence
  Synthetic: FXN 3 forward 9:69045463-69045489; SaCas9
gtgcctgtaatcccagctac

SEQ ID NO: 24875 - DNA, 19 bp, Artificial Sequence
  Synthetic: FXN 3 forward 9:69045464-69045489; SaCas9
tgcctgtaatcccagctac

SEQ ID NO: 24876 - DNA, 18 bp, Artificial Sequence
  Synthetic: FXN 3 forward 9:69045465-69045489; SaCas9
gcctgtaatcccagctac

SEQ ID NO: 24877 - DNA, 25 bp, Artificial Sequence
  Synthetic: FXN 3 forward 9:69045459-69045490; SaCas9
gcgggtgcctgtaatcccagctacg

SEQ ID NO: 24878 - DNA, 24 bp, Artificial Sequence
  Synthetic: FXN 3 forward 9:69045460-69045490; SaCas9
cgggtgcctgtaatcccagctacg

SEQ ID NO: 24879 - DNA, 23 bp, Artificial Sequence
  Synthetic: FXN 3 forward 9:69045461-69045490; SaCas9
gggtgcctgtaatcccagctacg

SEQ ID NO: 24880 - DNA, 22 bp, Artificial Sequence
  Synthetic: FXN 3 forward 9:69045462-69045490; SaCas9
ggtgcctgtaatcccagctacg

SEQ ID NO: 24881 - DNA, 21 bp, Artificial Sequence
  Synthetic: FXN 3 forward 9:69045463-69045490; SaCas9
gtgcctgtaatcccagctacg

SEQ ID NO: 24882 - DNA, 20 bp, Artificial Sequence
  Synthetic: FXN 3 forward 9:69045464-69045490; SaCas9
tgcctgtaatcccagctacg

SEQ ID NO: 24883 - DNA, 19 bp, Artificial Sequence
  Synthetic: FXN 3 forward 9:69045465-69045490; SaCas9
gcctgtaatcccagctacg

SEQ ID NO: 24884 - DNA, 18 bp, Artificial Sequence
  Synthetic: FXN 3 forward 9:69045466-69045490; SaCas9
cctgtaatcccagctacg

SEQ ID NO: 24885 - DNA, 25 bp, Artificial Sequence
  Synthetic: FXN 3 forward 9:69045460-69045491; SaCas9
cgggtgcctgtaatcccagctacgc

SEQ ID NO: 24886 - DNA, 24 bp, Artificial Sequence
  Synthetic: FXN 3 forward 9:69045461-69045491; SaCas9
gggtgcctgtaatcccagctacgc

SEQ ID NO: 24887 - DNA, 23 bp, Artificial Sequence
  Synthetic: FXN 3 forward 9:69045462-69045491; SaCas9
ggtgcctgtaatcccagctacgc

SEQ ID NO: 24888 - DNA, 22 bp, Artificial Sequence
  Synthetic: FXN 3 forward 9:69045463-69045491; SaCas9
gtgcctgtaatcccagctacgc

SEQ ID NO: 24889 - DNA, 21 bp, Artificial Sequence
  Synthetic: FXN 3 forward 9:69045464-69045491; SaCas9
tgcctgtaatcccagctacgc

SEQ ID NO: 24890 - DNA, 20 bp, Artificial Sequence
  Synthetic: FXN 3 forward 9:69045465-69045491; SaCas9
gcctgtaatcccagctacgc

SEQ ID NO: 24891 - DNA, 19 bp, Artificial Sequence
  Synthetic: FXN 3 forward 9:69045466-69045491; SaCas9
cctgtaatcccagctacgc

SEQ ID NO: 24892 - DNA, 18 bp, Artificial Sequence
  Synthetic: FXN 3 forward 9:69045467-69045491; SaCas9
ctgtaatcccagctacgc

SEQ ID NO: 24893 - DNA, 25 bp, Artificial Sequence
  Synthetic: FXN 3 forward 9:69045466-69045497; SaCas9
cctgtaatcccagctacgcgggagg

SEQ ID NO: 24894 - DNA, 24 bp, Artificial Sequence
  Synthetic: FXN 3 forward 9:69045467-69045497; SaCas9
ctgtaatcccagctacgcgggagg

SEQ ID NO: 24895 - DNA, 23 bp, Artificial Sequence
  Synthetic: FXN 3 forward 9:69045468-69045497; SaCas9
tgtaatcccagctacgcgggagg

SEQ ID NO: 24896 - DNA, 22 bp, Artificial Sequence
  Synthetic: FXN 3 forward 9:69045469-69045497; SaCas9
gtaatcccagctacgcgggagg

SEQ ID NO: 24897 - DNA, 21 bp, Artificial Sequence
  Synthetic: FXN 3 forward 9:69045470-69045497; SaCas9
taatcccagctacgcgggagg

SEQ ID NO: 24898 - DNA, 20 bp, Artificial Sequence
  Synthetic: FXN 3 forward 9:69045471-69045497; SaCas9
aatcccagctacgcgggagg

SEQ ID NO: 24899 - DNA, 19 bp, Artificial Sequence
  Synthetic: FXN 3 forward 9:69045472-69045497; SaCas9
atcccagctacgcgggagg

SEQ ID NO: 24900 - DNA, 18 bp, Artificial Sequence
  Synthetic: FXN 3 forward 9:69045473-69045497; SaCas9
tcccagctacgcgggagg

SEQ ID NO: 24901 - DNA, 25 bp, Artificial Sequence
  Synthetic: FXN 3 reverse 9:69045472-69045503; SaCas9
ctcgtgcctcagcctcccgcgtagc

SEQ ID NO: 24902 - DNA, 24 bp, Artificial Sequence
  Synthetic: FXN 3 reverse 9:69045473-69045503; SaCas9
tcgtgcctcagcctcccgcgtagc

SEQ ID NO: 24903 - DNA, 23 bp, Artificial Sequence
  Synthetic: FXN 3 reverse 9:69045474-69045503; SaCas9
cgtgcctcagcctcccgcgtagc

SEQ ID NO: 24904 - DNA, 22 bp, Artificial Sequence
  Synthetic: FXN 3 reverse 9:69045475-69045503; SaCas9
gtgcctcagcctcccgcgtagc

SEQ ID NO: 24905 - DNA, 21 bp, Artificial Sequence
  Synthetic: FXN 3 reverse 9:69045476-69045503; SaCas9
tgcctcagcctcccgcgtagc

SEQ ID NO: 24906 - DNA, 20 bp, Artificial Sequence
  Synthetic: FXN 3 reverse 9:69045477-69045503; SaCas9
gcctcagcctcccgcgtagc

SEQ ID NO: 24907 - DNA, 19 bp, Artificial Sequence
  Synthetic: FXN 3 reverse 9:69045478-69045503; SaCas9
cctcagcctcccgcgtagc

SEQ ID NO: 24908 - DNA, 18 bp, Artificial Sequence
  Synthetic: FXN 3 reverse 9:69045479-69045503; SaCas9
ctcagcctcccgcgtagc

SEQ ID NO: 24909 - DNA, 25 bp, Artificial Sequence
  Synthetic: FXN 3 forward 9:69045473-69045504; SaCas9
tcccagctacgcgggaggctgaggc

SEQ ID NO: 24910 - DNA, 24 bp, Artificial Sequence
  Synthetic: FXN 3 forward 9:69045474-69045504; SaCas9
cccagctacgcgggaggctgaggc

SEQ ID NO: 24911 - DNA, 23 bp, Artificial Sequence
  Synthetic: FXN 3 forward 9:69045475-69045504; SaCas9
ccagctacgcgggaggctgaggc

SEQ ID NO: 24912 - DNA, 22 bp, Artificial Sequence
  Synthetic: FXN 3 forward 9:69045476-69045504; SaCas9
cagctacgcgggaggctgaggc

SEQ ID NO: 24913 - DNA, 21 bp, Artificial Sequence
  Synthetic: FXN 3 forward 9:69045477-69045504; SaCas9
agctacgcgggaggctgaggc

SEQ ID NO: 24914 - DNA, 20 bp, Artificial Sequence
  Synthetic: FXN 3 forward 9:69045478-69045504; SaCas9
gctacgcgggaggctgaggc

SEQ ID NO: 24915 - DNA, 19 bp, Artificial Sequence
  Synthetic: FXN 3 forward 9:69045479-69045504; SaCas9
ctacgcgggaggctgaggc

SEQ ID NO: 24916 - DNA, 18 bp, Artificial Sequence
  Synthetic: FXN 3 forward 9:69045480-69045504; SaCas9
tacgcgggaggctgaggc

SEQ ID NO: 24917 - DNA, 25 bp, Artificial Sequence
  Synthetic: FXN 3 reverse 9:69045473-69045504; SaCas9
tctcgtgcctcagcctcccgcgtag

SEQ ID NO: 24918 - DNA, 24 bp, Artificial Sequence
  Synthetic: FXN 3 reverse 9:69045474-69045504; SaCas9
ctcgtgcctcagcctcccgcgtag

SEQ ID NO: 24919 - DNA, 23 bp, Artificial Sequence
  Synthetic: FXN 3 reverse 9:69045475-69045504; SaCas9
tcgtgcctcagcctcccgcgtag

SEQ ID NO: 24920 - DNA, 22 bp, Artificial Sequence
  Synthetic: FXN 3 reverse 9:69045476-69045504; SaCas9
cgtgcctcagcctcccgcgtag

SEQ ID NO: 24921 - DNA, 21 bp, Artificial Sequence
  Synthetic: FXN 3 reverse 9:69045477-69045504; SaCas9
gtgcctcagcctcccgcgtag

SEQ ID NO: 24922 - DNA, 20 bp, Artificial Sequence
  Synthetic: FXN 3 reverse 9:69045478-69045504; SaCas9
tgcctcagcctcccgcgtag

SEQ ID NO: 24923 - DNA, 19 bp, Artificial Sequence
  Synthetic: FXN 3 reverse 9:69045479-69045504; SaCas9
gcctcagcctcccgcgtag

SEQ ID NO: 24924 - DNA, 18 bp, Artificial Sequence
  Synthetic: FXN 3 reverse 9:69045480-69045504; SaCas9
cctcagcctcccgcgtag

SEQ ID NO: 24925 - DNA, 25 bp, Artificial Sequence
  Synthetic: FXN 3 forward 9:69045475-69045506; SaCas9
ccagctacgcgggaggctgaggcac

SEQ ID NO: 24926 - DNA, 24 bp, Artificial Sequence
  Synthetic: FXN 3 forward 9:69045476-69045506; SaCas9
cagctacgcgggaggctgaggcac

SEQ ID NO: 24927 - DNA, 23 bp, Artificial Sequence
  Synthetic: FXN 3 forward 9:69045477-69045506; SaCas9
agctacgcgggaggctgaggcac

SEQ ID NO: 24928 - DNA, 22 bp, Artificial Sequence
  Synthetic: FXN 3 forward 9:69045478-69045506; SaCas9
gctacgcgggaggctgaggcac

SEQ ID NO: 24929 - DNA, 21 bp, Artificial Sequence
  Synthetic: FXN 3 forward 9:69045479-69045506; SaCas9
ctacgcgggaggctgaggcac

SEQ ID NO: 24930 - DNA, 20 bp, Artificial Sequence
  Synthetic: FXN 3 forward 9:69045480-69045506; SaCas9
tacgcgggaggctgaggcac

SEQ ID NO: 24931 - DNA, 19 bp, Artificial Sequence
  Synthetic: FXN 3 forward 9:69045481-69045506; SaCas9
acgcgggaggctgaggcac

SEQ ID NO: 24932 - DNA, 18 bp, Artificial Sequence
  Synthetic: FXN 3 forward 9:69045482-69045506; SaCas9
cgcgggaggctgaggcac

SEQ ID NO: 24933 - DNA, 25 bp, Artificial Sequence
  Synthetic: FXN 3 forward 9:69045484-69045515; SaCas9
cgggaggctgaggcacgagaatcac

SEQ ID NO: 24934 - DNA, 24 bp, Artificial Sequence
  Synthetic: FXN 3 forward 9:69045485-69045515; SaCas9
gggaggctgaggcacgagaatcac

SEQ ID NO: 24935 - DNA, 23 bp, Artificial Sequence
  Synthetic: FXN 3 forward 9:69045486-69045515; SaCas9
ggaggctgaggcacgagaatcac

SEQ ID NO: 24936 - DNA, 22 bp, Artificial Sequence
  Synthetic: FXN 3 forward 9:69045487-69045515; SaCas9
gaggctgaggcacgagaatcac

SEQ ID NO: 24937 - DNA, 21 bp, Artificial Sequence
  Synthetic: FXN 3 forward 9:69045488-69045515; SaCas9
aggctgaggcacgagaatcac

SEQ ID NO: 24938 - DNA, 20 bp, Artificial Sequence
  Synthetic: FXN 3 forward 9:69045489-69045515; SaCas9
ggctgaggcacgagaatcac

SEQ ID NO: 24939 - DNA, 19 bp, Artificial Sequence
  Synthetic: FXN 3 forward 9:69045490-69045515; SaCas9
gctgaggcacgagaatcac

SEQ ID NO: 24940 - DNA, 18 bp, Artificial Sequence
  Synthetic: FXN 3 forward 9:69045491-69045515; SaCas9
ctgaggcacgagaatcac

SEQ ID NO: 24941 - DNA, 25 bp, Artificial Sequence
  Synthetic: FXN 3 forward 9:69045490-69045521; SaCas9
gctgaggcacgagaatcactcgaac

SEQ ID NO: 24942 - DNA, 24 bp, Artificial Sequence
  Synthetic: FXN 3 forward 9:69045491-69045521; SaCas9
ctgaggcacgagaatcactcgaac

SEQ ID NO: 24943 - DNA, 23 bp, Artificial Sequence
  Synthetic: FXN 3 forward 9:69045492-69045521; SaCas9
tgaggcacgagaatcactcgaac

SEQ ID NO: 24944 - DNA, 22 bp, Artificial Sequence
  Synthetic: FXN 3 forward 9:69045493-69045521; SaCas9
gaggcacgagaatcactcgaac

SEQ ID NO: 24945 - DNA, 21 bp, Artificial Sequence
  Synthetic: FXN 3 forward 9:69045494-69045521; SaCas9
aggcacgagaatcactcgaac

SEQ ID NO: 24946 - DNA, 20 bp, Artificial Sequence
  Synthetic: FXN 3 forward 9:69045495-69045521; SaCas9
ggcacgagaatcactcgaac

SEQ ID NO: 24947 - DNA, 19 bp, Artificial Sequence
  Synthetic: FXN 3 forward 9:69045496-69045521; SaCas9
gcacgagaatcactcgaac

SEQ ID NO: 24948 - DNA, 18 bp, Artificial Sequence
  Synthetic: FXN 3 forward 9:69045497-69045521; SaCas9
cacgagaatcactcgaac

SEQ ID NO: 24949 - DNA, 25 bp, Artificial Sequence
  Synthetic: FXN 3 forward 9:69045491-69045522; SaCas9
ctgaggcacgagaatcactcgaacc

SEQ ID NO: 24950 - DNA, 24 bp, Artificial Sequence
  Synthetic: FXN 3 forward 9:69045492-69045522; SaCas9
tgaggcacgagaatcactcgaacc

SEQ ID NO: 24951 - DNA, 23 bp, Artificial Sequence
  Synthetic: FXN 3 forward 9:69045493-69045522; SaCas9
gaggcacgagaatcactcgaacc

SEQ ID NO: 24952 - DNA, 22 bp, Artificial Sequence
  Synthetic: FXN 3 forward 9:69045494-69045522; SaCas9
aggcacgagaatcactcgaacc

SEQ ID NO: 24953 - DNA, 21 bp, Artificial Sequence
  Synthetic: FXN 3 forward 9:69045495-69045522; SaCas9
ggcacgagaatcactcgaacc

SEQ ID NO: 24954 - DNA, 20 bp, Artificial Sequence
  Synthetic: FXN 3 forward 9:69045496-69045522; SaCas9
gcacgagaatcactcgaacc

SEQ ID NO: 24955 - DNA, 19 bp, Artificial Sequence
  Synthetic: FXN 3 forward 9:69045497-69045522; SaCas9
cacgagaatcactcgaacc

SEQ ID NO: 24956 - DNA, 18 bp, Artificial Sequence
  Synthetic: FXN 3 forward 9:69045498-69045522; SaCas9
acgagaatcactcgaacc

SEQ ID NO: 24957 - DNA, 25 bp, Artificial Sequence
  Synthetic: FXN 3 forward 9:69045492-69045523; SaCas9
tgaggcacgagaatcactcgaaccc

SEQ ID NO: 24958 - DNA, 24 bp, Artificial Sequence
  Synthetic: FXN 3 forward 9:69045493-69045523; SaCas9
gaggcacgagaatcactcgaaccc

SEQ ID NO: 24959 - DNA, 23 bp, Artificial Sequence
  Synthetic: FXN 3 forward 9:69045494-69045523; SaCas9
aggcacgagaatcactcgaaccc

SEQ ID NO: 24960 - DNA, 22 bp, Artificial Sequence
  Synthetic: FXN 3 forward 9:69045495-69045523; SaCas9
ggcacgagaatcactcgaaccc

SEQ ID NO: 24961 - DNA, 21 bp, Artificial Sequence
  Synthetic: FXN 3 forward 9:69045496-69045523; SaCas9
gcacgagaatcactcgaaccc

SEQ ID NO: 24962 - DNA, 20 bp, Artificial Sequence
  Synthetic: FXN 3 forward 9:69045497-69045523; SaCas9
cacgagaatcactcgaaccc

SEQ ID NO: 24963 - DNA, 19 bp, Artificial Sequence
  Synthetic: FXN 3 forward 9:69045498-69045523; SaCas9
acgagaatcactcgaaccc

SEQ ID NO: 24964 - DNA, 18 bp, Artificial Sequence
  Synthetic: FXN 3 forward 9:69045499-69045523; SaCas9
cgagaatcactcgaaccc

SEQ ID NO: 24965 - DNA, 25 bp, Artificial Sequence
  Synthetic: FXN 3 forward 9:69045497-69045528; SaCas9
cacgagaatcactcgaacccgggag

SEQ ID NO: 24966 - DNA, 24 bp, Artificial Sequence
  Synthetic: FXN 3 forward 9:69045498-69045528; SaCas9
acgagaatcactcgaacccgggag

SEQ ID NO: 24967 - DNA, 23 bp, Artificial Sequence
  Synthetic: FXN 3 forward 9:69045499-69045528; SaCas9
cgagaatcactcgaacccgggag

SEQ ID NO: 24968 - DNA, 22 bp, Artificial Sequence
  Synthetic: FXN 3 forward 9:69045500-69045528; SaCas9
gagaatcactcgaacccgggag

SEQ ID NO: 24969 - DNA, 21 bp, Artificial Sequence
  Synthetic: FXN 3 forward 9:69045501-69045528; SaCas9
agaatcactcgaacccgggag

SEQ ID NO: 24970 - DNA, 20 bp, Artificial Sequence
  Synthetic: FXN 3 forward 9:69045502-69045528; SaCas9
gaatcactcgaacccgggag

SEQ ID NO: 24971 - DNA, 19 bp, Artificial Sequence
  Synthetic: FXN 3 forward 9:69045503-69045528; SaCas9
aatcactcgaacccgggag

SEQ ID NO: 24972 - DNA, 18 bp, Artificial Sequence
  Synthetic: FXN 3 forward 9:69045504-69045528; SaCas9
atcactcgaacccgggag

SEQ ID NO: 24973 - DNA, 25 bp, Artificial Sequence
  Synthetic: FXN 3 forward 9:69045498-69045529; SaCas9
acgagaatcactcgaacccgggagg

SEQ ID NO: 24974 - DNA, 24 bp, Artificial Sequence
  Synthetic: FXN 3 forward 9:69045499-69045529; SaCas9
cgagaatcactcgaacccgggagg

SEQ ID NO: 24975 - DNA, 23 bp, Artificial Sequence
  Synthetic: FXN 3 forward 9:69045500-69045529; SaCas9
gagaatcactcgaacccgggagg

SEQ ID NO: 24976 - DNA, 22 bp, Artificial Sequence
  Synthetic: FXN 3 forward 9:69045501-69045529; SaCas9
agaatcactcgaacccgggagg

SEQ ID NO: 24977 - DNA, 21 bp, Artificial Sequence
  Synthetic: FXN 3 forward 9:69045502-69045529; SaCas9
gaatcactcgaacccgggagg

SEQ ID NO: 24978 - DNA, 20 bp, Artificial Sequence
  Synthetic: FXN 3 forward 9:69045503-69045529; SaCas9
aatcactcgaacccgggagg

SEQ ID NO: 24979 - DNA, 19 bp, Artificial Sequence
  Synthetic: FXN 3 forward 9:69045504-69045529; SaCas9
atcactcgaacccgggagg

SEQ ID NO: 24980 - DNA, 18 bp, Artificial Sequence
  Synthetic: FXN 3 forward 9:69045505-69045529; SaCas9
tcactcgaacccgggagg

SEQ ID NO: 24981 - DNA, 25 bp, Artificial Sequence
  Synthetic: FXN 3 forward 9:69045499-69045530; SaCas9
cgagaatcactcgaacccgggaggc

SEQ ID NO: 24982 - DNA, 24 bp, Artificial Sequence
  Synthetic: FXN 3 forward 9:69045500-69045530; SaCas9
gagaatcactcgaacccgggaggc

SEQ ID NO: 24983 - DNA, 23 bp, Artificial Sequence
  Synthetic: FXN 3 forward 9:69045501-69045530; SaCas9
agaatcactcgaacccgggaggc

SEQ ID NO: 24984 - DNA, 22 bp, Artificial Sequence
  Synthetic: FXN 3 forward 9:69045502-69045530; SaCas9
gaatcactcgaacccgggaggc

SEQ ID NO: 24985 - DNA, 21 bp, Artificial Sequence
  Synthetic: FXN 3 forward 9:69045503-69045530; SaCas9
aatcactcgaacccgggaggc

SEQ ID NO: 24986 - DNA, 20 bp, Artificial Sequence
  Synthetic: FXN 3 forward 9:69045504-69045530; SaCas9
atcactcgaacccgggaggc

SEQ ID NO: 24987 - DNA, 19 bp, Artificial Sequence
  Synthetic: FXN 3 forward 9:69045505-69045530; SaCas9
tcactcgaacccgggaggc

SEQ ID NO: 24988 - DNA, 18 bp, Artificial Sequence
  Synthetic: FXN 3 forward 9:69045506-69045530; SaCas9
cactcgaacccgggaggc

SEQ ID NO: 24989 - DNA, 25 bp, Artificial Sequence
  Synthetic: FXN 3 reverse 9:69045507-69045538; SaCas9
tcactgcaacccccgcctcccgggt

SEQ ID NO: 24990 - DNA, 24 bp, Artificial Sequence
  Synthetic: FXN 3 reverse 9:69045508-69045538; SaCas9
cactgcaacccccgcctcccgggt

SEQ ID NO: 24991 - DNA, 23 bp, Artificial Sequence
  Synthetic: FXN 3 reverse 9:69045509-69045538; SaCas9
actgcaacccccgcctcccgggt

SEQ ID NO: 24992 - DNA, 22 bp, Artificial Sequence
  Synthetic: FXN 3 reverse 9:69045510-69045538; SaCas9
ctgcaacccccgcctcccgggt

SEQ ID NO: 24993 - DNA, 21 bp, Artificial Sequence
  Synthetic: FXN 3 reverse 9:69045511-69045538; SaCas9
tgcaacccccgcctcccgggt

SEQ ID NO: 24994 - DNA, 20 bp, Artificial Sequence
  Synthetic: FXN 3 reverse 9:69045512-69045538; SaCas9
gcaacccccgcctcccgggt

SEQ ID NO: 24995 - DNA, 19 bp, Artificial Sequence
  Synthetic: FXN 3 reverse 9:69045513-69045538; SaCas9
caacccccgcctcccgggt

SEQ ID NO: 24996 - DNA, 18 bp, Artificial Sequence
  Synthetic: FXN 3 reverse 9:69045514-69045538; SaCas9
aacccccgcctcccgggt

SEQ ID NO: 24997 - DNA, 25 bp, Artificial Sequence
  Synthetic: FXN 3 forward 9:69045509-69045540; SaCas9
tcgaacccgggaggcgggggttgca

SEQ ID NO: 24998 - DNA, 24 bp, Artificial Sequence
  Synthetic: FXN 3 forward 9:69045510-69045540; SaCas9
cgaacccgggaggcgggggttgca

SEQ ID NO: 24999 - DNA, 23 bp, Artificial Sequence
  Synthetic: FXN 3 forward 9:69045511-69045540; SaCas9
gaacccgggaggcgggggttgca

SEQ ID NO: 25000 - DNA, 22 bp, Artificial Sequence
  Synthetic: FXN 3 forward 9:69045512-69045540; SaCas9
aacccgggaggcgggggttgca

SEQ ID NO: 25001 - DNA, 21 bp, Artificial Sequence
  Synthetic: FXN 3 forward 9:69045513-69045540; SaCas9
acccgggaggcgggggttgca

SEQ ID NO: 25002 - DNA, 20 bp, Artificial Sequence
  Synthetic: FXN 3 forward 9:69045514-69045540; SaCas9
cccgggaggcgggggttgca

SEQ ID NO: 25003 - DNA, 19 bp, Artificial Sequence
  Synthetic: FXN 3 forward 9:69045515-69045540; SaCas9
ccgggaggcgggggttgca

SEQ ID NO: 25004 - DNA, 18 bp, Artificial Sequence
  Synthetic: FXN 3 forward 9:69045516-69045540; SaCas9
cgggaggcgggggttgca

SEQ ID NO: 25005 - DNA, 25 bp, Artificial Sequence
  Synthetic: FXN 3 reverse 9:69045513-69045544; SaCas9
ctcggctcactgcaacccccgcctc

SEQ ID NO: 25006 - DNA, 24 bp, Artificial Sequence
  Synthetic: FXN 3 reverse 9:69045514-69045544; SaCas9
tcggctcactgcaacccccgcctc

SEQ ID NO: 25007 - DNA, 23 bp, Artificial Sequence
  Synthetic: FXN 3 reverse 9:69045515-69045544; SaCas9
cggctcactgcaacccccgcctc

SEQ ID NO: 25008 - DNA, 22 bp, Artificial Sequence
  Synthetic: FXN 3 reverse 9:69045516-69045544; SaCas9
ggctcactgcaacccccgcctc

SEQ ID NO: 25009 - DNA, 21 bp, Artificial Sequence
  Synthetic: FXN 3 reverse 9:69045517-69045544; SaCas9
gctcactgcaacccccgcctc

SEQ ID NO: 25010 - DNA, 20 bp, Artificial Sequence
  Synthetic: FXN 3 reverse 9:69045518-69045544; SaCas9
ctcactgcaacccccgcctc

SEQ ID NO: 25011 - DNA, 19 bp, Artificial Sequence
  Synthetic: FXN 3 reverse 9:69045519-69045544; SaCas9
tcactgcaacccccgcctc

SEQ ID NO: 25012 - DNA, 18 bp, Artificial Sequence
  Synthetic: FXN 3 reverse 9:69045520-69045544; SaCas9
cactgcaacccccgcctc

SEQ ID NO: 25013 - DNA, 25 bp, Artificial Sequence
  Synthetic: FXN 3 forward 9:69045514-69045545; SaCas9
cccgggaggcgggggttgcagtgag

SEQ ID NO: 25014 - DNA, 24 bp, Artificial Sequence
  Synthetic: FXN 3 forward 9:69045515-69045545; SaCas9
ccgggaggcgggggttgcagtgag

SEQ ID NO: 25015 - DNA, 23 bp, Artificial Sequence
  Synthetic: FXN 3 forward 9:69045516-69045545; SaCas9
cgggaggcgggggttgcagtgag

SEQ ID NO: 25016 - DNA, 22 bp, Artificial Sequence
  Synthetic: FXN 3 forward 9:69045517-69045545; SaCas9
gggaggcgggggttgcagtgag

SEQ ID NO: 25017 - DNA, 21 bp, Artificial Sequence
  Synthetic: FXN 3 forward 9:69045518-69045545; SaCas9
ggaggcgggggttgcagtgag

SEQ ID NO: 25018 - DNA, 20 bp, Artificial Sequence
  Synthetic: FXN 3 forward 9:69045519-69045545; SaCas9
gaggcgggggttgcagtgag

SEQ ID NO: 25019 - DNA, 19 bp, Artificial Sequence
  Synthetic: FXN 3 forward 9:69045520-69045545; SaCas9
aggcgggggttgcagtgag

SEQ ID NO: 25020 - DNA, 18 bp, Artificial Sequence
  Synthetic: FXN 3 forward 9:69045521-69045545; SaCas9
ggcgggggttgcagtgag

SEQ ID NO: 25021 - DNA, 25 bp, Artificial Sequence
  Synthetic: FXN 3 forward 9:69045540-69045571; SaCas9
cgagatcgtgccactgcactccagc

SEQ ID NO: 25022 - DNA, 24 bp, Artificial Sequence
  Synthetic: FXN 3 forward 9:69045541-69045571; SaCas9
gagatcgtgccactgcactccagc

SEQ ID NO: 25023 - DNA, 23 bp, Artificial Sequence
  Synthetic: FXN 3 forward 9:69045542-69045571; SaCas9
agatcgtgccactgcactccagc

SEQ ID NO: 25024 - DNA, 22 bp, Artificial Sequence
  Synthetic: FXN 3 forward 9:69045543-69045571; SaCas9
gatcgtgccactgcactccagc

SEQ ID NO: 25025 - DNA, 21 bp, Artificial Sequence
  Synthetic: FXN 3 forward 9:69045544-69045571; SaCas9
atcgtgccactgcactccagc

SEQ ID NO: 25026 - DNA, 20 bp, Artificial Sequence
  Synthetic: FXN 3 forward 9:69045545-69045571; SaCas9
tcgtgccactgcactccagc

SEQ ID NO: 25027 - DNA, 19 bp, Artificial Sequence
  Synthetic: FXN 3 forward 9:69045546-69045571; SaCas9
cgtgccactgcactccagc

SEQ ID NO: 25028 - DNA, 18 bp, Artificial Sequence
  Synthetic: FXN 3 forward 9:69045547-69045571; SaCas9
gtgccactgcactccagc

SEQ ID NO: 25029 - DNA, 25 bp, Artificial Sequence
  Synthetic: FXN 3 forward 9:69045548-69045579; SaCas9
tgccactgcactccagcctgggcga

SEQ ID NO: 25030 - DNA, 24 bp, Artificial Sequence
  Synthetic: FXN 3 forward 9:69045549-69045579; SaCas9
gccactgcactccagcctgggcga

SEQ ID NO: 25031 - DNA, 23 bp, Artificial Sequence
  Synthetic: FXN 3 forward 9:69045550-69045579; SaCas9
ccactgcactccagcctgggcga

SEQ ID NO: 25032 - DNA, 22 bp, Artificial Sequence
  Synthetic: FXN 3 forward 9:69045551-69045579; SaCas9
cactgcactccagcctgggcga

SEQ ID NO: 25033 - DNA, 21 bp, Artificial Sequence
  Synthetic: FXN 3 forward 9:69045552-69045579; SaCas9
actgcactccagcctgggcga

SEQ ID NO: 25034 - DNA, 20 bp, Artificial Sequence
  Synthetic: FXN 3 forward 9:69045553-69045579; SaCas9
ctgcactccagcctgggcga

SEQ ID NO: 25035 - DNA, 19 bp, Artificial Sequence
  Synthetic: FXN 3 forward 9:69045554-69045579; SaCas9
tgcactccagcctgggcga

SEQ ID NO: 25036 - DNA, 18 bp, Artificial Sequence
  Synthetic: FXN 3 forward 9:69045555-69045579; SaCas9
gcactccagcctgggcga

SEQ ID NO: 25037 - DNA, 25 bp, Artificial Sequence
  Synthetic: FXN 3 forward 9:69045552-69045583; SaCas9
actgcactccagcctgggcgacaga

SEQ ID NO: 25038 - DNA, 24 bp, Artificial Sequence
  Synthetic: FXN 3 forward 9:69045553-69045583; SaCas9
ctgcactccagcctgggcgacaga

SEQ ID NO: 25039 - DNA, 23 bp, Artificial Sequence
  Synthetic: FXN 3 forward 9:69045554-69045583; SaCas9
tgcactccagcctgggcgacaga

SEQ ID NO: 25040 - DNA, 22 bp, Artificial Sequence
  Synthetic: FXN 3 forward 9:69045555-69045583; SaCas9
gcactccagcctgggcgacaga

SEQ ID NO: 25041 - DNA, 21 bp, Artificial Sequence
  Synthetic: FXN 3 forward 9:69045556-69045583; SaCas9
cactccagcctgggcgacaga

SEQ ID NO: 25042 - DNA, 20 bp, Artificial Sequence
  Synthetic: FXN 3 forward 9:69045557-69045583; SaCas9
actccagcctgggcgacaga

SEQ ID NO: 25043 - DNA, 19 bp, Artificial Sequence
  Synthetic: FXN 3 forward 9:69045558-69045583; SaCas9
ctccagcctgggcgacaga

SEQ ID NO: 25044 - DNA, 18 bp, Artificial Sequence
  Synthetic: FXN 3 forward 9:69045559-69045583; SaCas9
tccagcctgggcgacaga

SEQ ID NO: 25045 - DNA, 25 bp, Artificial Sequence
  Synthetic: FXN 3 reverse 9:69045557-69045588; SaCas9
tgaagtctcgctctgtcgcccaggc

SEQ ID NO: 25046 - DNA, 24 bp, Artificial Sequence
  Synthetic: FXN 3 reverse 9:69045558-69045588; SaCas9
gaagtctcgctctgtcgcccaggc

SEQ ID NO: 25047 - DNA, 23 bp, Artificial Sequence
  Synthetic: FXN 3 reverse 9:69045559-69045588; SaCas9
aagtctcgctctgtcgcccaggc

SEQ ID NO: 25048 - DNA, 22 bp, Artificial Sequence
  Synthetic: FXN 3 reverse 9:69045560-69045588; SaCas9
agtctcgctctgtcgcccaggc

SEQ ID NO: 25049 - DNA, 21 bp, Artificial Sequence
  Synthetic: FXN 3 reverse 9:69045561-69045588; SaCas9
gtctcgctctgtcgcccaggc

SEQ ID NO: 25050 - DNA, 20 bp, Artificial Sequence
  Synthetic: FXN 3 reverse 9:69045562-69045588; SaCas9
tctcgctctgtcgcccaggc

SEQ ID NO: 25051 - DNA, 19 bp, Artificial Sequence
  Synthetic: FXN 3 reverse 9:69045563-69045588; SaCas9
ctcgctctgtcgcccaggc

SEQ ID NO: 25052 - DNA, 18 bp, Artificial Sequence
  Synthetic: FXN 3 reverse 9:69045564-69045588; SaCas9
tcgctctgtcgcccaggc

SEQ ID NO: 25053 - DNA, 25 bp, Artificial Sequence
  Synthetic: FXN 3 reverse 9:69045558-69045589; SaCas9
atgaagtctcgctctgtcgcccagg

SEQ ID NO: 25054 - DNA, 24 bp, Artificial Sequence
  Synthetic: FXN 3 reverse 9:69045559-69045589; SaCas9
tgaagtctcgctctgtcgcccagg

SEQ ID NO: 25055 - DNA, 23 bp, Artificial Sequence
  Synthetic: FXN 3 reverse 9:69045560-69045589; SaCas9
gaagtctcgctctgtcgcccagg

SEQ ID NO: 25056 - DNA, 22 bp, Artificial Sequence
  Synthetic: FXN 3 reverse 9:69045561-69045589; SaCas9
aagtctcgctctgtcgcccagg

SEQ ID NO: 25057 - DNA, 21 bp, Artificial Sequence
  Synthetic: FXN 3 reverse 9:69045562-69045589; SaCas9
agtctcgctctgtcgcccagg

SEQ ID NO: 25058 - DNA, 20 bp, Artificial Sequence
  Synthetic: FXN 3 reverse 9:69045563-69045589; SaCas9
gtctcgctctgtcgcccagg

SEQ ID NO: 25059 - DNA, 19 bp, Artificial Sequence
  Synthetic: FXN 3 reverse 9:69045564-69045589; SaCas9
tctcgctctgtcgcccagg

SEQ ID NO: 25060 - DNA, 18 bp, Artificial Sequence
  Synthetic: FXN 3 reverse 9:69045565-69045589; SaCas9
ctcgctctgtcgcccagg

SEQ ID NO: 25061 - DNA, 25 bp, Artificial Sequence
  Synthetic: FXN 3 reverse 9:69045583-69045614; SaCas9
ttggtttttgttttttgtttttgag

SEQ ID NO: 25062 - DNA, 24 bp, Artificial Sequence
  Synthetic: FXN 3 reverse 9:69045584-69045614; SaCas9
tggtttttgttttttgtttttgag

SEQ ID NO: 25063 - DNA, 23 bp, Artificial Sequence
  Synthetic: FXN 3 reverse 9:69045585-69045614; SaCas9
ggtttttgttttttgtttttgag

SEQ ID NO: 25064 - DNA, 22 bp, Artificial Sequence
  Synthetic: FXN 3 reverse 9:69045586-69045614; SaCas9
gtttttgttttttgtttttgag

SEQ ID NO: 25065 - DNA, 21 bp, Artificial Sequence
  Synthetic: FXN 3 reverse 9:69045587-69045614; SaCas9
tttttgttttttgtttttgag

SEQ ID NO: 25066 - DNA, 20 bp, Artificial Sequence
  Synthetic: FXN 3 reverse 9:69045588-69045614; SaCas9
ttttgttttttgtttttgag

SEQ ID NO: 25067 - DNA, 19 bp, Artificial Sequence
  Synthetic: FXN 3 reverse 9:69045589-69045614; SaCas9
tttgttttttgtttttgag

SEQ ID NO: 25068 - DNA, 18 bp, Artificial Sequence
  Synthetic: FXN 3 reverse 9:69045590-69045614; SaCas9
ttgttttttgtttttgag

SEQ ID NO: 25069 - DNA, 25 bp, Artificial Sequence
  Synthetic: FXN 3 reverse 9:69045588-69045619; SaCas9
tttttttggtttttgttttttgttt

SEQ ID NO: 25070 - DNA, 24 bp, Artificial Sequence
  Synthetic: FXN 3 reverse 9:69045589-69045619; SaCas9
ttttttggtttttgttttttgttt

SEQ ID NO: 25071 - DNA, 23 bp, Artificial Sequence
  Synthetic: FXN 3 reverse 9:69045590-69045619; SaCas9
tttttggtttttgttttttgttt

SEQ ID NO: 25072 - DNA, 22 bp, Artificial Sequence
  Synthetic: FXN 3 reverse 9:69045591-69045619; SaCas9
ttttggtttttgttttttgttt

SEQ ID NO: 25073 - DNA, 21 bp, Artificial Sequence
  Synthetic: FXN 3 reverse 9:69045592-69045619; SaCas9
tttggtttttgttttttgttt

SEQ ID NO: 25074 - DNA, 20 bp, Artificial Sequence
  Synthetic: FXN 3 reverse 9:69045593-69045619; SaCas9
ttggtttttgttttttgttt

SEQ ID NO: 25075 - DNA, 19 bp, Artificial Sequence
  Synthetic: FXN 3 reverse 9:69045594-69045619; SaCas9
tggtttttgttttttgttt

SEQ ID NO: 25076 - DNA, 18 bp, Artificial Sequence
  Synthetic: FXN 3 reverse 9:69045595-69045619; SaCas9
ggtttttgttttttgttt

SEQ ID NO: 25077 - DNA, 25 bp, Artificial Sequence
  Synthetic: FXN 3 reverse 9:69045623-69045654; SaCas9
cctgcattttggttaaataatcatg

SEQ ID NO: 25078 - DNA, 24 bp, Artificial Sequence
  Synthetic: FXN 3 reverse 9:69045624-69045654; SaCas9
ctgcattttggttaaataatcatg

SEQ ID NO: 25079 - DNA, 23 bp, Artificial Sequence
  Synthetic: FXN 3 reverse 9:69045625-69045654; SaCas9
tgcattttggttaaataatcatg

SEQ ID NO: 25080 - DNA, 22 bp, Artificial Sequence
  Synthetic: FXN 3 reverse 9:69045626-69045654; SaCas9
gcattttggttaaataatcatg

SEQ ID NO: 25081 - DNA, 21 bp, Artificial Sequence
  Synthetic: FXN 3 reverse 9:69045627-69045654; SaCas9
cattttggttaaataatcatg

SEQ ID NO: 25082 - DNA, 20 bp, Artificial Sequence
  Synthetic: FXN 3 reverse 9:69045628-69045654; SaCas9
attttggttaaataatcatg

SEQ ID NO: 25083 - DNA, 19 bp, Artificial Sequence
  Synthetic: FXN 3 reverse 9:69045629-69045654; SaCas9
ttttggttaaataatcatg

SEQ ID NO: 25084 - DNA, 18 bp, Artificial Sequence
  Synthetic: FXN 3 reverse 9:69045630-69045654; SaCas9
tttggttaaataatcatg

SEQ ID NO: 25085 - DNA, 25 bp, Artificial Sequence
  Synthetic: FXN 3 forward 9:69045640-69045671; SaCas9
aaccaaaatgcaggttagttgttca

SEQ ID NO: 25086 - DNA, 24 bp, Artificial Sequence
  Synthetic: FXN 3 forward 9:69045641-69045671; SaCas9
accaaaatgcaggttagttgttca

SEQ ID NO: 25087 - DNA, 23 bp, Artificial Sequence
  Synthetic: FXN 3 forward 9:69045642-69045671; SaCas9
ccaaaatgcaggttagttgttca

SEQ ID NO: 25088 - DNA, 22 bp, Artificial Sequence
  Synthetic: FXN 3 forward 9:69045643-69045671; SaCas9
caaaatgcaggttagttgttca

SEQ ID NO: 25089 - DNA, 21 bp, Artificial Sequence
  Synthetic: FXN 3 forward 9:69045644-69045671; SaCas9
aaaatgcaggttagttgttca

SEQ ID NO: 25090 - DNA, 20 bp, Artificial Sequence
  Synthetic: FXN 3 forward 9:69045645-69045671; SaCas9
aaatgcaggttagttgttca

SEQ ID NO: 25091 - DNA, 19 bp, Artificial Sequence
  Synthetic: FXN 3 forward 9:69045646-69045671; SaCas9
aatgcaggttagttgttca

SEQ ID NO: 25092 - DNA, 18 bp, Artificial Sequence
  Synthetic: FXN 3 forward 9:69045647-69045671; SaCas9
atgcaggttagttgttca

SEQ ID NO: 25093 - DNA, 25 bp, Artificial Sequence
  Synthetic: FXN 3 forward 9:69045647-69045678; SaCas9
atgcaggttagttgttcaccggatg

SEQ ID NO: 25094 - DNA, 24 bp, Artificial Sequence
  Synthetic: FXN 3 forward 9:69045648-69045678; SaCas9
tgcaggttagttgttcaccggatg

SEQ ID NO: 25095 - DNA, 23 bp, Artificial Sequence
  Synthetic: FXN 3 forward 9:69045649-69045678; SaCas9
gcaggttagttgttcaccggatg

SEQ ID NO: 25096 - DNA, 22 bp, Artificial Sequence
  Synthetic: FXN 3 forward 9:69045650-69045678; SaCas9
caggttagttgttcaccggatg

SEQ ID NO: 25097 - DNA, 21 bp, Artificial Sequence
  Synthetic: FXN 3 forward 9:69045651-69045678; SaCas9
aggttagttgttcaccggatg

SEQ ID NO: 25098 - DNA, 20 bp, Artificial Sequence
  Synthetic: FXN 3 forward 9:69045652-69045678; SaCas9
ggttagttgttcaccggatg

SEQ ID NO: 25099 - DNA, 19 bp, Artificial Sequence
  Synthetic: FXN 3 forward 9:69045653-69045678; SaCas9
gttagttgttcaccggatg

SEQ ID NO: 25100 - DNA, 18 bp, Artificial Sequence
  Synthetic: FXN 3 forward 9:69045654-69045678; SaCas9
ttagttgttcaccggatg

SEQ ID NO: 25101 - DNA, 25 bp, Artificial Sequence
  Synthetic: FXN 3 reverse 9:69045660-69045691; SaCas9
tcttgttaattggactctgcatccg

SEQ ID NO: 25102 - DNA, 24 bp, Artificial Sequence
  Synthetic: FXN 3 reverse 9:69045661-69045691; SaCas9
cttgttaattggactctgcatccg

SEQ ID NO: 25103 - DNA, 23 bp, Artificial Sequence
  Synthetic: FXN 3 reverse 9:69045662-69045691; SaCas9
ttgttaattggactctgcatccg

SEQ ID NO: 25104 - DNA, 22 bp, Artificial Sequence
  Synthetic: FXN 3 reverse 9:69045663-69045691; SaCas9
tgttaattggactctgcatccg

SEQ ID NO: 25105 - DNA, 21 bp, Artificial Sequence
  Synthetic: FXN 3 reverse 9:69045664-69045691; SaCas9
gttaattggactctgcatccg

SEQ ID NO: 25106 - DNA, 20 bp, Artificial Sequence
  Synthetic: FXN 3 reverse 9:69045665-69045691; SaCas9
ttaattggactctgcatccg

SEQ ID NO: 25107 - DNA, 19 bp, Artificial Sequence
  Synthetic: FXN 3 reverse 9:69045666-69045691; SaCas9
taattggactctgcatccg

SEQ ID NO: 25108 - DNA, 18 bp, Artificial Sequence
  Synthetic: FXN 3 reverse 9:69045667-69045691; SaCas9
aattggactctgcatccg

SEQ ID NO: 25109 - DNA, 25 bp, Artificial Sequence
  Synthetic: FXN 3 forward 9:69045662-69045693; SaCas9
tcaccggatgcagagtccaattaac

SEQ ID NO: 25110 - DNA, 24 bp, Artificial Sequence
  Synthetic: FXN 3 forward 9:69045663-69045693; SaCas9
caccggatgcagagtccaattaac

SEQ ID NO: 25111 - DNA, 23 bp, Artificial Sequence
  Synthetic: FXN 3 forward 9:69045664-69045693; SaCas9
accggatgcagagtccaattaac

SEQ ID NO: 25112 - DNA, 22 bp, Artificial Sequence
  Synthetic: FXN 3 forward 9:69045665-69045693; SaCas9
ccggatgcagagtccaattaac

SEQ ID NO: 25113 - DNA, 21 bp, Artificial Sequence
  Synthetic: FXN 3 forward 9:69045666-69045693; SaCas9
cggatgcagagtccaattaac

SEQ ID NO: 25114 - DNA, 20 bp, Artificial Sequence
  Synthetic: FXN 3 forward 9:69045667-69045693; SaCas9
ggatgcagagtccaattaac

SEQ ID NO: 25115 - DNA, 19 bp, Artificial Sequence
  Synthetic: FXN 3 forward 9:69045668-69045693; SaCas9
gatgcagagtccaattaac

SEQ ID NO: 25116 - DNA, 18 bp, Artificial Sequence
  Synthetic: FXN 3 forward 9:69045669-69045693; SaCas9
atgcagagtccaattaac

SEQ ID NO: 25117 - DNA, 25 bp, Artificial Sequence
  Synthetic: FXN 3 reverse 9:69045676-69045707; SaCas9
tggtaccaggccttgctcttgttaa

SEQ ID NO: 25118 - DNA, 24 bp, Artificial Sequence
  Synthetic: FXN 3 reverse 9:69045677-69045707; SaCas9
ggtaccaggccttgctcttgttaa

SEQ ID NO: 25119 - DNA, 23 bp, Artificial Sequence
  Synthetic: FXN 3 reverse 9:69045678-69045707; SaCas9
gtaccaggccttgctcttgttaa

SEQ ID NO: 25120 - DNA, 22 bp, Artificial Sequence
  Synthetic: FXN 3 reverse 9:69045679-69045707; SaCas9
taccaggccttgctcttgttaa

SEQ ID NO: 25121 - DNA, 21 bp, Artificial Sequence
  Synthetic: FXN 3 reverse 9:69045680-69045707; SaCas9
accaggccttgctcttgttaa

SEQ ID NO: 25122 - DNA, 20 bp, Artificial Sequence
  Synthetic: FXN 3 reverse 9:69045681-69045707; SaCas9
ccaggccttgctcttgttaa

SEQ ID NO: 25123 - DNA, 19 bp, Artificial Sequence
  Synthetic: FXN 3 reverse 9:69045682-69045707; SaCas9
caggccttgctcttgttaa

SEQ ID NO: 25124 - DNA, 18 bp, Artificial Sequence
  Synthetic: FXN 3 reverse 9:69045683-69045707; SaCas9
aggccttgctcttgttaa

SEQ ID NO: 25125 - DNA, 25 bp, Artificial Sequence
  Synthetic: FXN 3 forward 9:69045688-69045719; SaCas9
agagcaaggcctggtaccaaaaaaa

SEQ ID NO: 25126 - DNA, 24 bp, Artificial Sequence
  Synthetic: FXN 3 forward 9:69045689-69045719; SaCas9
gagcaaggcctggtaccaaaaaaa

SEQ ID NO: 25127 - DNA, 23 bp, Artificial Sequence
  Synthetic: FXN 3 forward 9:69045690-69045719; SaCas9
agcaaggcctggtaccaaaaaaa

SEQ ID NO: 25128 - DNA, 22 bp, Artificial Sequence
  Synthetic: FXN 3 forward 9:69045691-69045719; SaCas9
gcaaggcctggtaccaaaaaaa

SEQ ID NO: 25129 - DNA, 21 bp, Artificial Sequence
  Synthetic: FXN 3 forward 9:69045692-69045719; SaCas9
caaggcctggtaccaaaaaaa

SEQ ID NO: 25130 - DNA, 20 bp, Artificial Sequence
  Synthetic: FXN 3 forward 9:69045693-69045719; SaCas9
aaggcctggtaccaaaaaaa

SEQ ID NO: 25131 - DNA, 19 bp, Artificial Sequence
  Synthetic: FXN 3 forward 9:69045694-69045719; SaCas9
aggcctggtaccaaaaaaa

SEQ ID NO: 25132 - DNA, 18 bp, Artificial Sequence
  Synthetic: FXN 3 forward 9:69045695-69045719; SaCas9
ggcctggtaccaaaaaaa

SEQ ID NO: 25133 - DNA, 25 bp, Artificial Sequence
  Synthetic: FXN 3 forward 9:69045699-69045730; SaCas9
tggtaccaaaaaaagtgaatttact

SEQ ID NO: 25134 - DNA, 24 bp, Artificial Sequence
  Synthetic: FXN 3 forward 9:69045700-69045730; SaCas9
ggtaccaaaaaaagtgaatttact

SEQ ID NO: 25135 - DNA, 23 bp, Artificial Sequence
  Synthetic: FXN 3 forward 9:69045701-69045730; SaCas9
gtaccaaaaaaagtgaatttact

SEQ ID NO: 25136 - DNA, 22 bp, Artificial Sequence
  Synthetic: FXN 3 forward 9:69045702-69045730; SaCas9
taccaaaaaaagtgaatttact

SEQ ID NO: 25137 - DNA, 21 bp, Artificial Sequence
  Synthetic: FXN 3 forward 9:69045703-69045730; SaCas9
accaaaaaaagtgaatttact

SEQ ID NO: 25138 - DNA, 20 bp, Artificial Sequence
  Synthetic: FXN 3 forward 9:69045704-69045730; SaCas9
ccaaaaaaagtgaatttact

SEQ ID NO: 25139 - DNA, 19 bp, Artificial Sequence
  Synthetic: FXN 3 forward 9:69045705-69045730; SaCas9
caaaaaaagtgaatttact

SEQ ID NO: 25140 - DNA, 18 bp, Artificial Sequence
  Synthetic: FXN 3 forward 9:69045706-69045730; SaCas9
aaaaaaagtgaatttact

SEQ ID NO: 25141 - DNA, 25 bp, Artificial Sequence
  Synthetic: FXN 3 forward 9:69045710-69045741; SaCas9
aaagtgaatttactccgaaactagc

SEQ ID NO: 25142 - DNA, 24 bp, Artificial Sequence
  Synthetic: FXN 3 forward 9:69045711-69045741; SaCas9
aagtgaatttactccgaaactagc

SEQ ID NO: 25143 - DNA, 23 bp, Artificial Sequence
  Synthetic: FXN 3 forward 9:69045712-69045741; SaCas9
agtgaatttactccgaaactagc

SEQ ID NO: 25144 - DNA, 22 bp, Artificial Sequence
  Synthetic: FXN 3 forward 9:69045713-69045741; SaCas9
gtgaatttactccgaaactagc

SEQ ID NO: 25145 - DNA, 21 bp, Artificial Sequence
  Synthetic: FXN 3 forward 9:69045714-69045741; SaCas9
tgaatttactccgaaactagc

SEQ ID NO: 25146 - DNA, 20 bp, Artificial Sequence
  Synthetic: FXN 3 forward 9:69045715-69045741; SaCas9
gaatttactccgaaactagc

SEQ ID NO: 25147 - DNA, 19 bp, Artificial Sequence
  Synthetic: FXN 3 forward 9:69045716-69045741; SaCas9
aatttactccgaaactagc

SEQ ID NO: 25148 - DNA, 18 bp, Artificial Sequence
  Synthetic: FXN 3 forward 9:69045717-69045741; SaCas9
atttactccgaaactagc

SEQ ID NO: 25149 - DNA, 25 bp, Artificial Sequence
  Synthetic: FXN 3 forward 9:69045714-69045745; SaCas9
tgaatttactccgaaactagcttgg

SEQ ID NO: 25150 - DNA, 24 bp, Artificial Sequence
  Synthetic: FXN 3 forward 9:69045715-69045745; SaCas9
gaatttactccgaaactagcttgg

SEQ ID NO: 25151 - DNA, 23 bp, Artificial Sequence
  Synthetic: FXN 3 forward 9:69045716-69045745; SaCas9
aatttactccgaaactagcttgg

SEQ ID NO: 25152 - DNA, 22 bp, Artificial Sequence
  Synthetic: FXN 3 forward 9:69045717-69045745; SaCas9
atttactccgaaactagcttgg

SEQ ID NO: 25153 - DNA, 21 bp, Artificial Sequence
  Synthetic: FXN 3 forward 9:69045718-69045745; SaCas9
tttactccgaaactagcttgg

SEQ ID NO: 25154 - DNA, 20 bp, Artificial Sequence
  Synthetic: FXN 3 forward 9:69045719-69045745; SaCas9
ttactccgaaactagcttgg

SEQ ID NO: 25155 - DNA, 19 bp, Artificial Sequence
  Synthetic: FXN 3 forward 9:69045720-69045745; SaCas9
tactccgaaactagcttgg

SEQ ID NO: 25156 - DNA, 18 bp, Artificial Sequence
  Synthetic: FXN 3 forward 9:69045721-69045745; SaCas9
actccgaaactagcttgg

SEQ ID NO: 25157 - DNA, 25 bp, Artificial Sequence
  Synthetic: FXN 3 forward 9:69045716-69045747; SaCas9
aatttactccgaaactagcttgggt

SEQ ID NO: 25158 - DNA, 24 bp, Artificial Sequence
  Synthetic: FXN 3 forward 9:69045717-69045747; SaCas9
atttactccgaaactagcttgggt

SEQ ID NO: 25159 - DNA, 23 bp, Artificial Sequence
  Synthetic: FXN 3 forward 9:69045718-69045747; SaCas9
tttactccgaaactagcttgggt

SEQ ID NO: 25160 - DNA, 22 bp, Artificial Sequence
  Synthetic: FXN 3 forward 9:69045719-69045747; SaCas9
ttactccgaaactagcttgggt

SEQ ID NO: 25161 - DNA, 21 bp, Artificial Sequence
  Synthetic: FXN 3 forward 9:69045720-69045747; SaCas9
tactccgaaactagcttgggt

SEQ ID NO: 25162 - DNA, 20 bp, Artificial Sequence
  Synthetic: FXN 3 forward 9:69045721-69045747; SaCas9
actccgaaactagcttgggt

SEQ ID NO: 25163 - DNA, 19 bp, Artificial Sequence
  Synthetic: FXN 3 forward 9:69045722-69045747; SaCas9
ctccgaaactagcttgggt

SEQ ID NO: 25164 - DNA, 18 bp, Artificial Sequence
  Synthetic: FXN 3 forward 9:69045723-69045747; SaCas9
tccgaaactagcttgggt

SEQ ID NO: 25165 - DNA, 25 bp, Artificial Sequence
  Synthetic: FXN 3 forward 9:69045717-69045748; SaCas9
atttactccgaaactagcttgggtg

SEQ ID NO: 25166 - DNA, 24 bp, Artificial Sequence
  Synthetic: FXN 3 forward 9:69045718-69045748; SaCas9
tttactccgaaactagcttgggtg

SEQ ID NO: 25167 - DNA, 23 bp, Artificial Sequence
  Synthetic: FXN 3 forward 9:69045719-69045748; SaCas9
ttactccgaaactagcttgggtg

SEQ ID NO: 25168 - DNA, 22 bp, Artificial Sequence
  Synthetic: FXN 3 forward 9:69045720-69045748; SaCas9
tactccgaaactagcttgggtg

SEQ ID NO: 25169 - DNA, 21 bp, Artificial Sequence
  Synthetic: FXN 3 forward 9:69045721-69045748; SaCas9
actccgaaactagcttgggtg

SEQ ID NO: 25170 - DNA, 20 bp, Artificial Sequence
  Synthetic: FXN 3 forward 9:69045722-69045748; SaCas9
ctccgaaactagcttgggtg

SEQ ID NO: 25171 - DNA, 19 bp, Artificial Sequence
  Synthetic: FXN 3 forward 9:69045723-69045748; SaCas9
tccgaaactagcttgggtg

SEQ ID NO: 25172 - DNA, 18 bp, Artificial Sequence
  Synthetic: FXN 3 forward 9:69045724-69045748; SaCas9
ccgaaactagcttgggtg

SEQ ID NO: 25173 - DNA, 25 bp, Artificial Sequence
  Synthetic: FXN 3 reverse 9:69045721-69045752; SaCas9
ttgtacccctcacccaagctagttt

SEQ ID NO: 25174 - DNA, 24 bp, Artificial Sequence
  Synthetic: FXN 3 reverse 9:69045722-69045752; SaCas9
tgtacccctcacccaagctagttt

SEQ ID NO: 25175 - DNA, 23 bp, Artificial Sequence
  Synthetic: FXN 3 reverse 9:69045723-69045752; SaCas9
gtacccctcacccaagctagttt

SEQ ID NO: 25176 - DNA, 22 bp, Artificial Sequence
  Synthetic: FXN 3 reverse 9:69045724-69045752; SaCas9
tacccctcacccaagctagttt

SEQ ID NO: 25177 - DNA, 21 bp, Artificial Sequence
  Synthetic: FXN 3 reverse 9:69045725-69045752; SaCas9
acccctcacccaagctagttt

SEQ ID NO: 25178 - DNA, 20 bp, Artificial Sequence
  Synthetic: FXN 3 reverse 9:69045726-69045752; SaCas9
cccctcacccaagctagttt

SEQ ID NO: 25179 - DNA, 19 bp, Artificial Sequence
  Synthetic: FXN 3 reverse 9:69045727-69045752; SaCas9
ccctcacccaagctagttt

SEQ ID NO: 25180 - DNA, 18 bp, Artificial Sequence
  Synthetic: FXN 3 reverse 9:69045728-69045752; SaCas9
cctcacccaagctagttt

SEQ ID NO: 25181 - DNA, 25 bp, Artificial Sequence
  Synthetic: FXN 3 reverse 9:69045722-69045753; SaCas9
tttgtacccctcacccaagctagtt

SEQ ID NO: 25182 - DNA, 24 bp, Artificial Sequence
  Synthetic: FXN 3 reverse 9:69045723-69045753; SaCas9
ttgtacccctcacccaagctagtt

SEQ ID NO: 25183 - DNA, 23 bp, Artificial Sequence
  Synthetic: FXN 3 reverse 9:69045724-69045753; SaCas9
tgtacccctcacccaagctagtt

SEQ ID NO: 25184 - DNA, 22 bp, Artificial Sequence
  Synthetic: FXN 3 reverse 9:69045725-69045753; SaCas9
gtacccctcacccaagctagtt

SEQ ID NO: 25185 - DNA, 21 bp, Artificial Sequence
  Synthetic: FXN 3 reverse 9:69045726-69045753; SaCas9
tacccctcacccaagctagtt

SEQ ID NO: 25186 - DNA, 20 bp, Artificial Sequence
  Synthetic: FXN 3 reverse 9:69045727-69045753; SaCas9
acccctcacccaagctagtt

SEQ ID NO: 25187 - DNA, 19 bp, Artificial Sequence
  Synthetic: FXN 3 reverse 9:69045728-69045753; SaCas9
cccctcacccaagctagtt

SEQ ID NO: 25188 - DNA, 18 bp, Artificial Sequence
  Synthetic: FXN 3 reverse 9:69045729-69045753; SaCas9
ccctcacccaagctagtt

SEQ ID NO: 25189 - DNA, 25 bp, Artificial Sequence
  Synthetic: FXN 3 reverse 9:69045755-69045786; SaCas9
gggaagcagcacttttaaagaaagg

SEQ ID NO: 25190 - DNA, 24 bp, Artificial Sequence
  Synthetic: FXN 3 reverse 9:69045756-69045786; SaCas9
ggaagcagcacttttaaagaaagg

SEQ ID NO: 25191 - DNA, 23 bp, Artificial Sequence
  Synthetic: FXN 3 reverse 9:69045757-69045786; SaCas9
gaagcagcacttttaaagaaagg

SEQ ID NO: 25192 - DNA, 22 bp, Artificial Sequence
  Synthetic: FXN 3 reverse 9:69045758-69045786; SaCas9
aagcagcacttttaaagaaagg

SEQ ID NO: 25193 - DNA, 21 bp, Artificial Sequence
  Synthetic: FXN 3 reverse 9:69045759-69045786; SaCas9
agcagcacttttaaagaaagg

SEQ ID NO: 25194 - DNA, 20 bp, Artificial Sequence
  Synthetic: FXN 3 reverse 9:69045760-69045786; SaCas9
gcagcacttttaaagaaagg

SEQ ID NO: 25195 - DNA, 19 bp, Artificial Sequence
  Synthetic: FXN 3 reverse 9:69045761-69045786; SaCas9
cagcacttttaaagaaagg

SEQ ID NO: 25196 - DNA, 18 bp, Artificial Sequence
  Synthetic: FXN 3 reverse 9:69045762-69045786; SaCas9
agcacttttaaagaaagg

SEQ ID NO: 25197 - DNA, 25 bp, Artificial Sequence
  Synthetic: FXN 3 forward 9:69045762-69045793; SaCas9
ctttctttaaaagtgctgcttcccc

SEQ ID NO: 25198 - DNA, 24 bp, Artificial Sequence
  Synthetic: FXN 3 forward 9:69045763-69045793; SaCas9
tttctttaaaagtgctgcttcccc

SEQ ID NO: 25199 - DNA, 23 bp, Artificial Sequence
  Synthetic: FXN 3 forward 9:69045764-69045793; SaCas9
ttctttaaaagtgctgcttcccc

SEQ ID NO: 25200 - DNA, 22 bp, Artificial Sequence
  Synthetic: FXN 3 forward 9:69045765-69045793; SaCas9
tctttaaaagtgctgcttcccc

SEQ ID NO: 25201 - DNA, 21 bp, Artificial Sequence
  Synthetic: FXN 3 forward 9:69045766-69045793; SaCas9
ctttaaaagtgctgcttcccc

SEQ ID NO: 25202 - DNA, 20 bp, Artificial Sequence
  Synthetic: FXN 3 forward 9:69045767-69045793; SaCas9
tttaaaagtgctgcttcccc

SEQ ID NO: 25203 - DNA, 19 bp, Artificial Sequence
  Synthetic: FXN 3 forward 9:69045768-69045793; SaCas9
ttaaaagtgctgcttcccc

SEQ ID NO: 25204 - DNA, 18 bp, Artificial Sequence
  Synthetic: FXN 3 forward 9:69045769-69045793; SaCas9
taaaagtgctgcttcccc

SEQ ID NO: 25205 - DNA, 25 bp, Artificial Sequence
  Synthetic: FXN 3 forward 9:69045763-69045794; SaCas9
tttctttaaaagtgctgcttcccct

SEQ ID NO: 25206 - DNA, 24 bp, Artificial Sequence
  Synthetic: FXN 3 forward 9:69045764-69045794; SaCas9
ttctttaaaagtgctgcttcccct

SEQ ID NO: 25207 - DNA, 23 bp, Artificial Sequence
  Synthetic: FXN 3 forward 9:69045765-69045794; SaCas9
tctttaaaagtgctgcttcccct

SEQ ID NO: 25208 - DNA, 22 bp, Artificial Sequence
  Synthetic: FXN 3 forward 9:69045766-69045794; SaCas9
ctttaaaagtgctgcttcccct

SEQ ID NO: 25209 - DNA, 21 bp, Artificial Sequence
  Synthetic: FXN 3 forward 9:69045767-69045794; SaCas9
tttaaaagtgctgcttcccct

SEQ ID NO: 25210 - DNA, 20 bp, Artificial Sequence
  Synthetic: FXN 3 forward 9:69045768-69045794; SaCas9
ttaaaagtgctgcttcccct

SEQ ID NO: 25211 - DNA, 19 bp, Artificial Sequence
  Synthetic: FXN 3 forward 9:69045769-69045794; SaCas9
taaaagtgctgcttcccct

SEQ ID NO: 25212 - DNA, 18 bp, Artificial Sequence
  Synthetic: FXN 3 forward 9:69045770-69045794; SaCas9
aaaagtgctgcttcccct

SEQ ID NO: 25213 - DNA, 25 bp, Artificial Sequence
  Synthetic: FXN 3 reverse 9:69045763-69045794; SaCas9
cttccaaggggaagcagcactttta

SEQ ID NO: 25214 - DNA, 24 bp, Artificial Sequence
  Synthetic: FXN 3 reverse 9:69045764-69045794; SaCas9
ttccaaggggaagcagcactttta

SEQ ID NO: 25215 - DNA, 23 bp, Artificial Sequence
  Synthetic: FXN 3 reverse 9:69045765-69045794; SaCas9
tccaaggggaagcagcactttta

SEQ ID NO: 25216 - DNA, 22 bp, Artificial Sequence
  Synthetic: FXN 3 reverse 9:69045766-69045794; SaCas9
ccaaggggaagcagcactttta

SEQ ID NO: 25217 - DNA, 21 bp, Artificial Sequence
  Synthetic: FXN 3 reverse 9:69045767-69045794; SaCas9
caaggggaagcagcactttta

SEQ ID NO: 25218 - DNA, 20 bp, Artificial Sequence
  Synthetic: FXN 3 reverse 9:69045768-69045794; SaCas9
aaggggaagcagcactttta

SEQ ID NO: 25219 - DNA, 19 bp, Artificial Sequence
  Synthetic: FXN 3 reverse 9:69045769-69045794; SaCas9
aggggaagcagcactttta

SEQ ID NO: 25220 - DNA, 18 bp, Artificial Sequence
  Synthetic: FXN 3 reverse 9:69045770-69045794; SaCas9
ggggaagcagcactttta

SEQ ID NO: 25221 - DNA, 25 bp, Artificial Sequence
  Synthetic: FXN 3 forward 9:69045769-69045800; SaCas9
taaaagtgctgcttccccttggaag

SEQ ID NO: 25222 - DNA, 24 bp, Artificial Sequence
  Synthetic: FXN 3 forward 9:69045770-69045800; SaCas9
aaaagtgctgcttccccttggaag

SEQ ID NO: 25223 - DNA, 23 bp, Artificial Sequence
  Synthetic: FXN 3 forward 9:69045771-69045800; SaCas9
aaagtgctgcttccccttggaag

SEQ ID NO: 25224 - DNA, 22 bp, Artificial Sequence
  Synthetic: FXN 3 forward 9:69045772-69045800; SaCas9
aagtgctgcttccccttggaag

SEQ ID NO: 25225 - DNA, 21 bp, Artificial Sequence
  Synthetic: FXN 3 forward 9:69045773-69045800; SaCas9
agtgctgcttccccttggaag

SEQ ID NO: 25226 - DNA, 20 bp, Artificial Sequence
  Synthetic: FXN 3 forward 9:69045774-69045800; SaCas9
gtgctgcttccccttggaag

SEQ ID NO: 25227 - DNA, 19 bp, Artificial Sequence
  Synthetic: FXN 3 forward 9:69045775-69045800; SaCas9
tgctgcttccccttggaag

SEQ ID NO: 25228 - DNA, 18 bp, Artificial Sequence
  Synthetic: FXN 3 forward 9:69045776-69045800; SaCas9
gctgcttccccttggaag

SEQ ID NO: 25229 - DNA, 25 bp, Artificial Sequence
  Synthetic: FXN 3 forward 9:69045775-69045806; SaCas9
tgctgcttccccttggaagtagaaa

SEQ ID NO: 25230 - DNA, 24 bp, Artificial Sequence
  Synthetic: FXN 3 forward 9:69045776-69045806; SaCas9
gctgcttccccttggaagtagaaa

SEQ ID NO: 25231 - DNA, 23 bp, Artificial Sequence
  Synthetic: FXN 3 forward 9:69045777-69045806; SaCas9
ctgcttccccttggaagtagaaa

SEQ ID NO: 25232 - DNA, 22 bp, Artificial Sequence
  Synthetic: FXN 3 forward 9:69045778-69045806; SaCas9
tgcttccccttggaagtagaaa

SEQ ID NO: 25233 - DNA, 21 bp, Artificial Sequence
  Synthetic: FXN 3 forward 9:69045779-69045806; SaCas9
gcttccccttggaagtagaaa

SEQ ID NO: 25234 - DNA, 20 bp, Artificial Sequence
  Synthetic: FXN 3 forward 9:69045780-69045806; SaCas9
cttccccttggaagtagaaa

SEQ ID NO: 25235 - DNA, 19 bp, Artificial Sequence
  Synthetic: FXN 3 forward 9:69045781-69045806; SaCas9
ttccccttggaagtagaaa

SEQ ID NO: 25236 - DNA, 18 bp, Artificial Sequence
  Synthetic: FXN 3 forward 9:69045782-69045806; SaCas9
tccccttggaagtagaaa

SEQ ID NO: 25237 - DNA, 25 bp, Artificial Sequence
  Synthetic: FXN 3 reverse 9:69045780-69045811; SaCas9
aaagtgtccactttctacttccaag

SEQ ID NO: 25238 - DNA, 24 bp, Artificial Sequence
  Synthetic: FXN 3 reverse 9:69045781-69045811; SaCas9
aagtgtccactttctacttccaag

SEQ ID NO: 25239 - DNA, 23 bp, Artificial Sequence
  Synthetic: FXN 3 reverse 9:69045782-69045811; SaCas9
agtgtccactttctacttccaag

SEQ ID NO: 25240 - DNA, 22 bp, Artificial Sequence
  Synthetic: FXN 3 reverse 9:69045783-69045811; SaCas9
gtgtccactttctacttccaag

SEQ ID NO: 25241 - DNA, 21 bp, Artificial Sequence
  Synthetic: FXN 3 reverse 9:69045784-69045811; SaCas9
tgtccactttctacttccaag

SEQ ID NO: 25242 - DNA, 20 bp, Artificial Sequence
  Synthetic: FXN 3 reverse 9:69045785-69045811; SaCas9
gtccactttctacttccaag

SEQ ID NO: 25243 - DNA, 19 bp, Artificial Sequence
  Synthetic: FXN 3 reverse 9:69045786-69045811; SaCas9
tccactttctacttccaag

SEQ ID NO: 25244 - DNA, 18 bp, Artificial Sequence
  Synthetic: FXN 3 reverse 9:69045787-69045811; SaCas9
ccactttctacttccaag

SEQ ID NO: 25245 - DNA, 25 bp, Artificial Sequence
  Synthetic: FXN 3 reverse 9:69045781-69045812; SaCas9
aaaagtgtccactttctacttccaa

SEQ ID NO: 25246 - DNA, 24 bp, Artificial Sequence
  Synthetic: FXN 3 reverse 9:69045782-69045812; SaCas9
aaagtgtccactttctacttccaa

SEQ ID NO: 25247 - DNA, 23 bp, Artificial Sequence
  Synthetic: FXN 3 reverse 9:69045783-69045812; SaCas9
aagtgtccactttctacttccaa

SEQ ID NO: 25248 - DNA, 22 bp, Artificial Sequence
  Synthetic: FXN 3 reverse 9:69045784-69045812; SaCas9
agtgtccactttctacttccaa

SEQ ID NO: 25249 - DNA, 21 bp, Artificial Sequence
  Synthetic: FXN 3 reverse 9:69045785-69045812; SaCas9
gtgtccactttctacttccaa

SEQ ID NO: 25250 - DNA, 20 bp, Artificial Sequence
  Synthetic: FXN 3 reverse 9:69045786-69045812; SaCas9
tgtccactttctacttccaa

SEQ ID NO: 25251 - DNA, 19 bp, Artificial Sequence
  Synthetic: FXN 3 reverse 9:69045787-69045812; SaCas9
gtccactttctacttccaa

SEQ ID NO: 25252 - DNA, 18 bp, Artificial Sequence
  Synthetic: FXN 3 reverse 9:69045788-69045812; SaCas9
tccactttctacttccaa

SEQ ID NO: 25253 - DNA, 25 bp, Artificial Sequence
  Synthetic: FXN 3 reverse 9:69045782-69045813; SaCas9
taaaagtgtccactttctacttcca

SEQ ID NO: 25254 - DNA, 24 bp, Artificial Sequence
  Synthetic: FXN 3 reverse 9:69045783-69045813; SaCas9
aaaagtgtccactttctacttcca

SEQ ID NO: 25255 - DNA, 23 bp, Artificial Sequence
  Synthetic: FXN 3 reverse 9:69045784-69045813; SaCas9
aaagtgtccactttctacttcca

SEQ ID NO: 25256 - DNA, 22 bp, Artificial Sequence
  Synthetic: FXN 3 reverse 9:69045785-69045813; SaCas9
aagtgtccactttctacttcca

SEQ ID NO: 25257 - DNA, 21 bp, Artificial Sequence
  Synthetic: FXN 3 reverse 9:69045786-69045813; SaCas9
agtgtccactttctacttcca

SEQ ID NO: 25258 - DNA, 20 bp, Artificial Sequence
  Synthetic: FXN 3 reverse 9:69045787-69045813; SaCas9
gtgtccactttctacttcca

SEQ ID NO: 25259 - DNA, 19 bp, Artificial Sequence
  Synthetic: FXN 3 reverse 9:69045788-69045813; SaCas9
tgtccactttctacttcca

SEQ ID NO: 25260 - DNA, 18 bp, Artificial Sequence
  Synthetic: FXN 3 reverse 9:69045789-69045813; SaCas9
gtccactttctacttcca

SEQ ID NO: 25261 - DNA, 25 bp, Artificial Sequence
  Synthetic: FXN 3 reverse 9:69045783-69045814; SaCas9
ataaaagtgtccactttctacttcc

SEQ ID NO: 25262 - DNA, 24 bp, Artificial Sequence
  Synthetic: FXN 3 reverse 9:69045784-69045814; SaCas9
taaaagtgtccactttctacttcc

SEQ ID NO: 25263 - DNA, 23 bp, Artificial Sequence
  Synthetic: FXN 3 reverse 9:69045785-69045814; SaCas9
aaaagtgtccactttctacttcc

SEQ ID NO: 25264 - DNA, 22 bp, Artificial Sequence
  Synthetic: FXN 3 reverse 9:69045786-69045814; SaCas9
aaagtgtccactttctacttcc

SEQ ID NO: 25265 - DNA, 21 bp, Artificial Sequence
  Synthetic: FXN 3 reverse 9:69045787-69045814; SaCas9
aagtgtccactttctacttcc

SEQ ID NO: 25266 - DNA, 20 bp, Artificial Sequence
  Synthetic: FXN 3 reverse 9:69045788-69045814; SaCas9
agtgtccactttctacttcc

SEQ ID NO: 25267 - DNA, 19 bp, Artificial Sequence
  Synthetic: FXN 3 reverse 9:69045789-69045814; SaCas9
gtgtccactttctacttcc

SEQ ID NO: 25268 - DNA, 18 bp, Artificial Sequence
  Synthetic: FXN 3 reverse 9:69045790-69045814; SaCas9
tgtccactttctacttcc

SEQ ID NO: 25269 - DNA, 25 bp, Artificial Sequence
  Synthetic: FXN 3 forward 9:69045794-69045825; SaCas9
tagaaagtggacacttttataaggt

SEQ ID NO: 25270 - DNA, 24 bp, Artificial Sequence
  Synthetic: FXN 3 forward 9:69045795-69045825; SaCas9
agaaagtggacacttttataaggt

SEQ ID NO: 25271 - DNA, 23 bp, Artificial Sequence
  Synthetic: FXN 3 forward 9:69045796-69045825; SaCas9
gaaagtggacacttttataaggt

SEQ ID NO: 25272 - DNA, 22 bp, Artificial Sequence
  Synthetic: FXN 3 forward 9:69045797-69045825; SaCas9
aaagtggacacttttataaggt

SEQ ID NO: 25273 - DNA, 21 bp, Artificial Sequence
  Synthetic: FXN 3 forward 9:69045798-69045825; SaCas9
aagtggacacttttataaggt

SEQ ID NO: 25274 - DNA, 20 bp, Artificial Sequence
  Synthetic: FXN 3 forward 9:69045799-69045825; SaCas9
agtggacacttttataaggt

SEQ ID NO: 25275 - DNA, 19 bp, Artificial Sequence
  Synthetic: FXN 3 forward 9:69045800-69045825; SaCas9
gtggacacttttataaggt

SEQ ID NO: 25276 - DNA, 18 bp, Artificial Sequence
  Synthetic: FXN 3 forward 9:69045801-69045825; SaCas9
tggacacttttataaggt

SEQ ID NO: 25277 - DNA, 25 bp, Artificial Sequence
  Synthetic: FXN 3 forward 9:69045795-69045826; SaCas9
agaaagtggacacttttataaggta

SEQ ID NO: 25278 - DNA, 24 bp, Artificial Sequence
  Synthetic: FXN 3 forward 9:69045796-69045826; SaCas9
gaaagtggacacttttataaggta

SEQ ID NO: 25279 - DNA, 23 bp, Artificial Sequence
  Synthetic: FXN 3 forward 9:69045797-69045826; SaCas9
aaagtggacacttttataaggta

SEQ ID NO: 25280 - DNA, 22 bp, Artificial Sequence
  Synthetic: FXN 3 forward 9:69045798-69045826; SaCas9
aagtggacacttttataaggta

SEQ ID NO: 25281 - DNA, 21 bp, Artificial Sequence
  Synthetic: FXN 3 forward 9:69045799-69045826; SaCas9
agtggacacttttataaggta

SEQ ID NO: 25282 - DNA, 20 bp, Artificial Sequence
  Synthetic: FXN 3 forward 9:69045800-69045826; SaCas9
gtggacacttttataaggta

SEQ ID NO: 25283 - DNA, 19 bp, Artificial Sequence
  Synthetic: FXN 3 forward 9:69045801-69045826; SaCas9
tggacacttttataaggta

SEQ ID NO: 25284 - DNA, 18 bp, Artificial Sequence
  Synthetic: FXN 3 forward 9:69045802-69045826; SaCas9
ggacacttttataaggta

SEQ ID NO: 25285 - DNA, 25 bp, Artificial Sequence
  Synthetic: FXN 3 forward 9:69045796-69045827; SaCas9
gaaagtggacacttttataaggtaa

SEQ ID NO: 25286 - DNA, 24 bp, Artificial Sequence
  Synthetic: FXN 3 forward 9:69045797-69045827; SaCas9
aaagtggacacttttataaggtaa

SEQ ID NO: 25287 - DNA, 23 bp, Artificial Sequence
  Synthetic: FXN 3 forward 9:69045798-69045827; SaCas9
aagtggacacttttataaggtaa

SEQ ID NO: 25288 - DNA, 22 bp, Artificial Sequence
  Synthetic: FXN 3 forward 9:69045799-69045827; SaCas9
agtggacacttttataaggtaa

SEQ ID NO: 25289 - DNA, 21 bp, Artificial Sequence
  Synthetic: FXN 3 forward 9:69045800-69045827; SaCas9
gtggacacttttataaggtaa

SEQ ID NO: 25290 - DNA, 20 bp, Artificial Sequence
  Synthetic: FXN 3 forward 9:69045801-69045827; SaCas9
tggacacttttataaggtaa

SEQ ID NO: 25291 - DNA, 19 bp, Artificial Sequence
  Synthetic: FXN 3 forward 9:69045802-69045827; SaCas9
ggacacttttataaggtaa

SEQ ID NO: 25292 - DNA, 18 bp, Artificial Sequence
  Synthetic: FXN 3 forward 9:69045803-69045827; SaCas9
gacacttttataaggtaa

SEQ ID NO: 25293 - DNA, 25 bp, Artificial Sequence
  Synthetic: FXN 3 forward 9:69045797-69045828; SaCas9
aaagtggacacttttataaggtaag

SEQ ID NO: 25294 - DNA, 24 bp, Artificial Sequence
  Synthetic: FXN 3 forward 9:69045798-69045828; SaCas9
aagtggacacttttataaggtaag

SEQ ID NO: 25295 - DNA, 23 bp, Artificial Sequence
  Synthetic: FXN 3 forward 9:69045799-69045828; SaCas9
agtggacacttttataaggtaag

SEQ ID NO: 25296 - DNA, 22 bp, Artificial Sequence
  Synthetic: FXN 3 forward 9:69045800-69045828; SaCas9
gtggacacttttataaggtaag

SEQ ID NO: 25297 - DNA, 21 bp, Artificial Sequence
  Synthetic: FXN 3 forward 9:69045801-69045828; SaCas9
tggacacttttataaggtaag

SEQ ID NO: 25298 - DNA, 20 bp, Artificial Sequence
  Synthetic: FXN 3 forward 9:69045802-69045828; SaCas9
ggacacttttataaggtaag

SEQ ID NO: 25299 - DNA, 19 bp, Artificial Sequence
  Synthetic: FXN 3 forward 9:69045803-69045828; SaCas9
gacacttttataaggtaag

SEQ ID NO: 25300 - DNA, 18 bp, Artificial Sequence
  Synthetic: FXN 3 forward 9:69045804-69045828; SaCas9
acacttttataaggtaag

SEQ ID NO: 25301 - DNA, 25 bp, Artificial Sequence
  Synthetic: FXN 3 forward 9:69045798-69045829; SaCas9
aagtggacacttttataaggtaagg

SEQ ID NO: 25302 - DNA, 24 bp, Artificial Sequence
  Synthetic: FXN 3 forward 9:69045799-69045829; SaCas9
agtggacacttttataaggtaagg

SEQ ID NO: 25303 - DNA, 23 bp, Artificial Sequence
  Synthetic: FXN 3 forward 9:69045800-69045829; SaCas9
gtggacacttttataaggtaagg

SEQ ID NO: 25304 - DNA, 22 bp, Artificial Sequence
  Synthetic: FXN 3 forward 9:69045801-69045829; SaCas9
tggacacttttataaggtaagg

SEQ ID NO: 25305 - DNA, 21 bp, Artificial Sequence
  Synthetic: FXN 3 forward 9:69045802-69045829; SaCas9
ggacacttttataaggtaagg

SEQ ID NO: 25306 - DNA, 20 bp, Artificial Sequence
  Synthetic: FXN 3 forward 9:69045803-69045829; SaCas9
gacacttttataaggtaagg

SEQ ID NO: 25307 - DNA, 19 bp, Artificial Sequence
  Synthetic: FXN 3 forward 9:69045804-69045829; SaCas9
acacttttataaggtaagg

SEQ ID NO: 25308 - DNA, 18 bp, Artificial Sequence
  Synthetic: FXN 3 forward 9:69045805-69045829; SaCas9
cacttttataaggtaagg

SEQ ID NO: 25309 - DNA, 25 bp, Artificial Sequence
  Synthetic: FXN 3 forward 9:69045799-69045830; SaCas9
agtggacacttttataaggtaaggg

SEQ ID NO: 25310 - DNA, 24 bp, Artificial Sequence
  Synthetic: FXN 3 forward 9:69045800-69045830; SaCas9
gtggacacttttataaggtaaggg

SEQ ID NO: 25311 - DNA, 23 bp, Artificial Sequence
  Synthetic: FXN 3 forward 9:69045801-69045830; SaCas9
tggacacttttataaggtaaggg

SEQ ID NO: 25312 - DNA, 22 bp, Artificial Sequence
  Synthetic: FXN 3 forward 9:69045802-69045830; SaCas9
ggacacttttataaggtaaggg

SEQ ID NO: 25313 - DNA, 21 bp, Artificial Sequence
  Synthetic: FXN 3 forward 9:69045803-69045830; SaCas9
gacacttttataaggtaaggg

SEQ ID NO: 25314 - DNA, 20 bp, Artificial Sequence
  Synthetic: FXN 3 forward 9:69045804-69045830; SaCas9
acacttttataaggtaaggg

SEQ ID NO: 25315 - DNA, 19 bp, Artificial Sequence
  Synthetic: FXN 3 forward 9:69045805-69045830; SaCas9
cacttttataaggtaaggg

SEQ ID NO: 25316 - DNA, 18 bp, Artificial Sequence
  Synthetic: FXN 3 forward 9:69045806-69045830; SaCas9
acttttataaggtaaggg

SEQ ID NO: 25317 - DNA, 25 bp, Artificial Sequence
  Synthetic: FXN 3 forward 9:69045810-69045841; SaCas9
ttataaggtaaggggggaagtgtgc

SEQ ID NO: 25318 - DNA, 24 bp, Artificial Sequence
  Synthetic: FXN 3 forward 9:69045811-69045841; SaCas9
tataaggtaaggggggaagtgtgc

SEQ ID NO: 25319 - DNA, 23 bp, Artificial Sequence
  Synthetic: FXN 3 forward 9:69045812-69045841; SaCas9
ataaggtaaggggggaagtgtgc

SEQ ID NO: 25320 - DNA, 22 bp, Artificial Sequence
  Synthetic: FXN 3 forward 9:69045813-69045841; SaCas9
taaggtaaggggggaagtgtgc

SEQ ID NO: 25321 - DNA, 21 bp, Artificial Sequence
  Synthetic: FXN 3 forward 9:69045814-69045841; SaCas9
aaggtaaggggggaagtgtgc

SEQ ID NO: 25322 - DNA, 20 bp, Artificial Sequence
  Synthetic: FXN 3 forward 9:69045815-69045841; SaCas9
aggtaaggggggaagtgtgc

SEQ ID NO: 25323 - DNA, 19 bp, Artificial Sequence
  Synthetic: FXN 3 forward 9:69045816-69045841; SaCas9
ggtaaggggggaagtgtgc

SEQ ID NO: 25324 - DNA, 18 bp, Artificial Sequence
  Synthetic: FXN 3 forward 9:69045817-69045841; SaCas9
gtaaggggggaagtgtgc

SEQ ID NO: 25325 - DNA, 25 bp, Artificial Sequence
  Synthetic: FXN 3 forward 9:69045818-69045849; SaCas9
taaggggggaagtgtgcaagggcaa

SEQ ID NO: 25326 - DNA, 24 bp, Artificial Sequence
  Synthetic: FXN 3 forward 9:69045819-69045849; SaCas9
aaggggggaagtgtgcaagggcaa

SEQ ID NO: 25327 - DNA, 23 bp, Artificial Sequence
  Synthetic: FXN 3 forward 9:69045820-69045849; SaCas9
aggggggaagtgtgcaagggcaa

SEQ ID NO: 25328 - DNA, 22 bp, Artificial Sequence
  Synthetic: FXN 3 forward 9:69045821-69045849; SaCas9
ggggggaagtgtgcaagggcaa

SEQ ID NO: 25329 - DNA, 21 bp, Artificial Sequence
  Synthetic: FXN 3 forward 9:69045822-69045849; SaCas9
gggggaagtgtgcaagggcaa

SEQ ID NO: 25330 - DNA, 20 bp, Artificial Sequence
  Synthetic: FXN 3 forward 9:69045823-69045849; SaCas9
ggggaagtgtgcaagggcaa

SEQ ID NO: 25331 - DNA, 19 bp, Artificial Sequence
  Synthetic: FXN 3 forward 9:69045824-69045849; SaCas9
gggaagtgtgcaagggcaa

SEQ ID NO: 25332 - DNA, 18 bp, Artificial Sequence
  Synthetic: FXN 3 forward 9:69045825-69045849; SaCas9
ggaagtgtgcaagggcaa

SEQ ID NO: 25333 - DNA, 25 bp, Artificial Sequence
  Synthetic: FXN 3 forward 9:69045819-69045850; SaCas9
aaggggggaagtgtgcaagggcaag

SEQ ID NO: 25334 - DNA, 24 bp, Artificial Sequence
  Synthetic: FXN 3 forward 9:69045820-69045850; SaCas9
aggggggaagtgtgcaagggcaag

SEQ ID NO: 25335 - DNA, 23 bp, Artificial Sequence
  Synthetic: FXN 3 forward 9:69045821-69045850; SaCas9
ggggggaagtgtgcaagggcaag

SEQ ID NO: 25336 - DNA, 22 bp, Artificial Sequence
  Synthetic: FXN 3 forward 9:69045822-69045850; SaCas9
gggggaagtgtgcaagggcaag

SEQ ID NO: 25337 - DNA, 21 bp, Artificial Sequence
  Synthetic: FXN 3 forward 9:69045823-69045850; SaCas9
ggggaagtgtgcaagggcaag

SEQ ID NO: 25338 - DNA, 20 bp, Artificial Sequence
  Synthetic: FXN 3 forward 9:69045824-69045850; SaCas9
gggaagtgtgcaagggcaag

SEQ ID NO: 25339 - DNA, 19 bp, Artificial Sequence
  Synthetic: FXN 3 forward 9:69045825-69045850; SaCas9
ggaagtgtgcaagggcaag

SEQ ID NO: 25340 - DNA, 18 bp, Artificial Sequence
  Synthetic: FXN 3 forward 9:69045826-69045850; SaCas9
gaagtgtgcaagggcaag

SEQ ID NO: 25341 - DNA, 25 bp, Artificial Sequence
  Synthetic: FXN 3 forward 9:69045820-69045851; SaCas9
aggggggaagtgtgcaagggcaagt

SEQ ID NO: 25342 - DNA, 24 bp, Artificial Sequence
  Synthetic: FXN 3 forward 9:69045821-69045851; SaCas9
ggggggaagtgtgcaagggcaagt

SEQ ID NO: 25343 - DNA, 23 bp, Artificial Sequence
  Synthetic: FXN 3 forward 9:69045822-69045851; SaCas9
gggggaagtgtgcaagggcaagt

SEQ ID NO: 25344 - DNA, 22 bp, Artificial Sequence
  Synthetic: FXN 3 forward 9:69045823-69045851; SaCas9
ggggaagtgtgcaagggcaagt

SEQ ID NO: 25345 - DNA, 21 bp, Artificial Sequence
  Synthetic: FXN 3 forward 9:69045824-69045851; SaCas9
gggaagtgtgcaagggcaagt

SEQ ID NO: 25346 - DNA, 20 bp, Artificial Sequence
  Synthetic: FXN 3 forward 9:69045825-69045851; SaCas9
ggaagtgtgcaagggcaagt

SEQ ID NO: 25347 - DNA, 19 bp, Artificial Sequence
  Synthetic: FXN 3 forward 9:69045826-69045851; SaCas9
gaagtgtgcaagggcaagt

SEQ ID NO: 25348 - DNA, 18 bp, Artificial Sequence
  Synthetic: FXN 3 forward 9:69045827-69045851; SaCas9
aagtgtgcaagggcaagt

SEQ ID NO: 25349 - DNA, 25 bp, Artificial Sequence
  Synthetic: FXN 3 forward 9:69045821-69045852; SaCas9
ggggggaagtgtgcaagggcaagtg

SEQ ID NO: 25350 - DNA, 24 bp, Artificial Sequence
  Synthetic: FXN 3 forward 9:69045822-69045852; SaCas9
gggggaagtgtgcaagggcaagtg

SEQ ID NO: 25351 - DNA, 23 bp, Artificial Sequence
  Synthetic: FXN 3 forward 9:69045823-69045852; SaCas9
ggggaagtgtgcaagggcaagtg

SEQ ID NO: 25352 - DNA, 22 bp, Artificial Sequence
  Synthetic: FXN 3 forward 9:69045824-69045852; SaCas9
gggaagtgtgcaagggcaagtg

SEQ ID NO: 25353 - DNA, 21 bp, Artificial Sequence
  Synthetic: FXN 3 forward 9:69045825-69045852; SaCas9
ggaagtgtgcaagggcaagtg

SEQ ID NO: 25354 - DNA, 20 bp, Artificial Sequence
  Synthetic: FXN 3 forward 9:69045826-69045852; SaCas9
gaagtgtgcaagggcaagtg

SEQ ID NO: 25355 - DNA, 19 bp, Artificial Sequence
  Synthetic: FXN 3 forward 9:69045827-69045852; SaCas9
aagtgtgcaagggcaagtg

SEQ ID NO: 25356 - DNA, 18 bp, Artificial Sequence
  Synthetic: FXN 3 forward 9:69045828-69045852; SaCas9
agtgtgcaagggcaagtg

SEQ ID NO: 25357 - DNA, 25 bp, Artificial Sequence
  Synthetic: FXN 3 forward 9:69045822-69045853; SaCas9
gggggaagtgtgcaagggcaagtgg

SEQ ID NO: 25358 - DNA, 24 bp, Artificial Sequence
  Synthetic: FXN 3 forward 9:69045823-69045853; SaCas9
ggggaagtgtgcaagggcaagtgg

SEQ ID NO: 25359 - DNA, 23 bp, Artificial Sequence
  Synthetic: FXN 3 forward 9:69045824-69045853; SaCas9
gggaagtgtgcaagggcaagtgg

SEQ ID NO: 25360 - DNA, 22 bp, Artificial Sequence
  Synthetic: FXN 3 forward 9:69045825-69045853; SaCas9
ggaagtgtgcaagggcaagtgg

SEQ ID NO: 25361 - DNA, 21 bp, Artificial Sequence
  Synthetic: FXN 3 forward 9:69045826-69045853; SaCas9
gaagtgtgcaagggcaagtgg

SEQ ID NO: 25362 - DNA, 20 bp, Artificial Sequence
  Synthetic: FXN 3 forward 9:69045827-69045853; SaCas9
aagtgtgcaagggcaagtgg

SEQ ID NO: 25363 - DNA, 19 bp, Artificial Sequence
  Synthetic: FXN 3 forward 9:69045828-69045853; SaCas9
agtgtgcaagggcaagtgg

SEQ ID NO: 25364 - DNA, 18 bp, Artificial Sequence
  Synthetic: FXN 3 forward 9:69045829-69045853; SaCas9
gtgtgcaagggcaagtgg

SEQ ID NO: 25365 - DNA, 25 bp, Artificial Sequence
  Synthetic: FXN 3 reverse 9:69045851-69045882; SaCas9
tgtagagtatgcacggaactagcag

SEQ ID NO: 25366 - DNA, 24 bp, Artificial Sequence
  Synthetic: FXN 3 reverse 9:69045852-69045882; SaCas9
gtagagtatgcacggaactagcag

SEQ ID NO: 25367 - DNA, 23 bp, Artificial Sequence
  Synthetic: FXN 3 reverse 9:69045853-69045882; SaCas9
tagagtatgcacggaactagcag

SEQ ID NO: 25368 - DNA, 22 bp, Artificial Sequence
  Synthetic: FXN 3 reverse 9:69045854-69045882; SaCas9
agagtatgcacggaactagcag

SEQ ID NO: 25369 - DNA, 21 bp, Artificial Sequence
  Synthetic: FXN 3 reverse 9:69045855-69045882; SaCas9
gagtatgcacggaactagcag

SEQ ID NO: 25370 - DNA, 20 bp, Artificial Sequence
  Synthetic: FXN 3 reverse 9:69045856-69045882; SaCas9
agtatgcacggaactagcag

SEQ ID NO: 25371 - DNA, 19 bp, Artificial Sequence
  Synthetic: FXN 3 reverse 9:69045857-69045882; SaCas9
gtatgcacggaactagcag

SEQ ID NO: 25372 - DNA, 18 bp, Artificial Sequence
  Synthetic: FXN 3 reverse 9:69045858-69045882; SaCas9
tatgcacggaactagcag

SEQ ID NO: 25373 - DNA, 25 bp, Artificial Sequence
  Synthetic: FXN 3 reverse 9:69045852-69045883; SaCas9
ctgtagagtatgcacggaactagca

SEQ ID NO: 25374 - DNA, 24 bp, Artificial Sequence
  Synthetic: FXN 3 reverse 9:69045853-69045883; SaCas9
tgtagagtatgcacggaactagca

SEQ ID NO: 25375 - DNA, 23 bp, Artificial Sequence
  Synthetic: FXN 3 reverse 9:69045854-69045883; SaCas9
gtagagtatgcacggaactagca

SEQ ID NO: 25376 - DNA, 22 bp, Artificial Sequence
  Synthetic: FXN 3 reverse 9:69045855-69045883; SaCas9
tagagtatgcacggaactagca

SEQ ID NO: 25377 - DNA, 21 bp, Artificial Sequence
  Synthetic: FXN 3 reverse 9:69045856-69045883; SaCas9
agagtatgcacggaactagca

SEQ ID NO: 25378 - DNA, 20 bp, Artificial Sequence
  Synthetic: FXN 3 reverse 9:69045857-69045883; SaCas9
gagtatgcacggaactagca

SEQ ID NO: 25379 - DNA, 19 bp, Artificial Sequence
  Synthetic: FXN 3 reverse 9:69045858-69045883; SaCas9
agtatgcacggaactagca

SEQ ID NO: 25380 - DNA, 18 bp, Artificial Sequence
  Synthetic: FXN 3 reverse 9:69045859-69045883; SaCas9
gtatgcacggaactagca

SEQ ID NO: 25381 - DNA, 25 bp, Artificial Sequence
  Synthetic: FXN 3 reverse 9:69045854-69045885; SaCas9
tcctgtagagtatgcacggaactag

SEQ ID NO: 25382 - DNA, 24 bp, Artificial Sequence
  Synthetic: FXN 3 reverse 9:69045855-69045885; SaCas9
cctgtagagtatgcacggaactag

SEQ ID NO: 25383 - DNA, 23 bp, Artificial Sequence
  Synthetic: FXN 3 reverse 9:69045856-69045885; SaCas9
ctgtagagtatgcacggaactag

SEQ ID NO: 25384 - DNA, 22 bp, Artificial Sequence
  Synthetic: FXN 3 reverse 9:69045857-69045885; SaCas9
tgtagagtatgcacggaactag

SEQ ID NO: 25385 - DNA, 21 bp, Artificial Sequence
  Synthetic: FXN 3 reverse 9:69045858-69045885; SaCas9
gtagagtatgcacggaactag

SEQ ID NO: 25386 - DNA, 20 bp, Artificial Sequence
  Synthetic: FXN 3 reverse 9:69045859-69045885; SaCas9
tagagtatgcacggaactag

SEQ ID NO: 25387 - DNA, 19 bp, Artificial Sequence
  Synthetic: FXN 3 reverse 9:69045860-69045885; SaCas9
agagtatgcacggaactag

SEQ ID NO: 25388 - DNA, 18 bp, Artificial Sequence
  Synthetic: FXN 3 reverse 9:69045861-69045885; SaCas9
gagtatgcacggaactag

SEQ ID NO: 25389 - DNA, 25 bp, Artificial Sequence
  Synthetic: FXN 3 forward 9:69045855-69045886; SaCas9
ctctgctagttccgtgcatactcta

SEQ ID NO: 25390 - DNA, 24 bp, Artificial Sequence
  Synthetic: FXN 3 forward 9:69045856-69045886; SaCas9
tctgctagttccgtgcatactcta

SEQ ID NO: 25391 - DNA, 23 bp, Artificial Sequence
  Synthetic: FXN 3 forward 9:69045857-69045886; SaCas9
ctgctagttccgtgcatactcta

SEQ ID NO: 25392 - DNA, 22 bp, Artificial Sequence
  Synthetic: FXN 3 forward 9:69045858-69045886; SaCas9
tgctagttccgtgcatactcta

SEQ ID NO: 25393 - DNA, 21 bp, Artificial Sequence
  Synthetic: FXN 3 forward 9:69045859-69045886; SaCas9
gctagttccgtgcatactcta

SEQ ID NO: 25394 - DNA, 20 bp, Artificial Sequence
  Synthetic: FXN 3 forward 9:69045860-69045886; SaCas9
ctagttccgtgcatactcta

SEQ ID NO: 25395 - DNA, 19 bp, Artificial Sequence
  Synthetic: FXN 3 forward 9:69045861-69045886; SaCas9
tagttccgtgcatactcta

SEQ ID NO: 25396 - DNA, 18 bp, Artificial Sequence
  Synthetic: FXN 3 forward 9:69045862-69045886; SaCas9
agttccgtgcatactcta

SEQ ID NO: 25397 - DNA, 25 bp, Artificial Sequence
  Synthetic: FXN 3 reverse 9:69045863-69045894; SaCas9
agtcaactgtcctgtagagtatgca

SEQ ID NO: 25398 - DNA, 24 bp, Artificial Sequence
  Synthetic: FXN 3 reverse 9:69045864-69045894; SaCas9
gtcaactgtcctgtagagtatgca

SEQ ID NO: 25399 - DNA, 23 bp, Artificial Sequence
  Synthetic: FXN 3 reverse 9:69045865-69045894; SaCas9
tcaactgtcctgtagagtatgca

SEQ ID NO: 25400 - DNA, 22 bp, Artificial Sequence
  Synthetic: FXN 3 reverse 9:69045866-69045894; SaCas9
caactgtcctgtagagtatgca

SEQ ID NO: 25401 - DNA, 21 bp, Artificial Sequence
  Synthetic: FXN 3 reverse 9:69045867-69045894; SaCas9
aactgtcctgtagagtatgca

SEQ ID NO: 25402 - DNA, 20 bp, Artificial Sequence
  Synthetic: FXN 3 reverse 9:69045868-69045894; SaCas9
actgtcctgtagagtatgca

SEQ ID NO: 25403 - DNA, 19 bp, Artificial Sequence
  Synthetic: FXN 3 reverse 9:69045869-69045894; SaCas9
ctgtcctgtagagtatgca

SEQ ID NO: 25404 - DNA, 18 bp, Artificial Sequence
  Synthetic: FXN 3 reverse 9:69045870-69045894; SaCas9
tgtcctgtagagtatgca

SEQ ID NO: 25405 - DNA, 25 bp, Artificial Sequence
  Synthetic: FXN 3 reverse 9:69045864-69045895; SaCas9
aagtcaactgtcctgtagagtatgc

SEQ ID NO: 25406 - DNA, 24 bp, Artificial Sequence
  Synthetic: FXN 3 reverse 9:69045865-69045895; SaCas9
agtcaactgtcctgtagagtatgc

SEQ ID NO: 25407 - DNA, 23 bp, Artificial Sequence
  Synthetic: FXN 3 reverse 9:69045866-69045895; SaCas9
gtcaactgtcctgtagagtatgc

SEQ ID NO: 25408 - DNA, 22 bp, Artificial Sequence
  Synthetic: FXN 3 reverse 9:69045867-69045895; SaCas9
tcaactgtcctgtagagtatgc

SEQ ID NO: 25409 - DNA, 21 bp, Artificial Sequence
  Synthetic: FXN 3 reverse 9:69045868-69045895; SaCas9
caactgtcctgtagagtatgc

SEQ ID NO: 25410 - DNA, 20 bp, Artificial Sequence
  Synthetic: FXN 3 reverse 9:69045869-69045895; SaCas9
aactgtcctgtagagtatgc

SEQ ID NO: 25411 - DNA, 19 bp, Artificial Sequence
  Synthetic: FXN 3 reverse 9:69045870-69045895; SaCas9
actgtcctgtagagtatgc

SEQ ID NO: 25412 - DNA, 18 bp, Artificial Sequence
  Synthetic: FXN 3 reverse 9:69045871-69045895; SaCas9
ctgtcctgtagagtatgc

SEQ ID NO: 25413 - DNA, 25 bp, Artificial Sequence
  Synthetic: FXN 3 reverse 9:69045874-69045905; SaCas9
ggaaggtgccaagtcaactgtcctg

SEQ ID NO: 25414 - DNA, 24 bp, Artificial Sequence
  Synthetic: FXN 3 reverse 9:69045875-69045905; SaCas9
gaaggtgccaagtcaactgtcctg

SEQ ID NO: 25415 - DNA, 23 bp, Artificial Sequence
  Synthetic: FXN 3 reverse 9:69045876-69045905; SaCas9
aaggtgccaagtcaactgtcctg

SEQ ID NO: 25416 - DNA, 22 bp, Artificial Sequence
  Synthetic: FXN 3 reverse 9:69045877-69045905; SaCas9
aggtgccaagtcaactgtcctg

SEQ ID NO: 25417 - DNA, 21 bp, Artificial Sequence
  Synthetic: FXN 3 reverse 9:69045878-69045905; SaCas9
ggtgccaagtcaactgtcctg

SEQ ID NO: 25418 - DNA, 20 bp, Artificial Sequence
  Synthetic: FXN 3 reverse 9:69045879-69045905; SaCas9
gtgccaagtcaactgtcctg

SEQ ID NO: 25419 - DNA, 19 bp, Artificial Sequence
  Synthetic: FXN 3 reverse 9:69045880-69045905; SaCas9
tgccaagtcaactgtcctg

SEQ ID NO: 25420 - DNA, 18 bp, Artificial Sequence
  Synthetic: FXN 3 reverse 9:69045881-69045905; SaCas9
gccaagtcaactgtcctg

SEQ ID NO: 25421 - DNA, 25 bp, Artificial Sequence
  Synthetic: FXN 3 reverse 9:69045900-69045931; SaCas9
ccactgctacagcttattactaacc

SEQ ID NO: 25422 - DNA, 24 bp, Artificial Sequence
  Synthetic: FXN 3 reverse 9:69045901-69045931; SaCas9
cactgctacagcttattactaacc

SEQ ID NO: 25423 - DNA, 23 bp, Artificial Sequence
  Synthetic: FXN 3 reverse 9:69045902-69045931; SaCas9
actgctacagcttattactaacc

SEQ ID NO: 25424 - DNA, 22 bp, Artificial Sequence
  Synthetic: FXN 3 reverse 9:69045903-69045931; SaCas9
ctgctacagcttattactaacc

SEQ ID NO: 25425 - DNA, 21 bp, Artificial Sequence
  Synthetic: FXN 3 reverse 9:69045904-69045931; SaCas9
tgctacagcttattactaacc

SEQ ID NO: 25426 - DNA, 20 bp, Artificial Sequence
  Synthetic: FXN 3 reverse 9:69045905-69045931; SaCas9
gctacagcttattactaacc

SEQ ID NO: 25427 - DNA, 19 bp, Artificial Sequence
  Synthetic: FXN 3 reverse 9:69045906-69045931; SaCas9
ctacagcttattactaacc

SEQ ID NO: 25428 - DNA, 18 bp, Artificial Sequence
  Synthetic: FXN 3 reverse 9:69045907-69045931; SaCas9
tacagcttattactaacc

SEQ ID NO: 25429 - DNA, 25 bp, Artificial Sequence
  Synthetic: FXN 3 reverse 9:69045901-69045932; SaCas9
gccactgctacagcttattactaac

SEQ ID NO: 25430 - DNA, 24 bp, Artificial Sequence
  Synthetic: FXN 3 reverse 9:69045902-69045932; SaCas9
ccactgctacagcttattactaac

SEQ ID NO: 25431 - DNA, 23 bp, Artificial Sequence
  Synthetic: FXN 3 reverse 9:69045903-69045932; SaCas9
cactgctacagcttattactaac

SEQ ID NO: 25432 - DNA, 22 bp, Artificial Sequence
  Synthetic: FXN 3 reverse 9:69045904-69045932; SaCas9
actgctacagcttattactaac

SEQ ID NO: 25433 - DNA, 21 bp, Artificial Sequence
  Synthetic: FXN 3 reverse 9:69045905-69045932; SaCas9
ctgctacagcttattactaac

SEQ ID NO: 25434 - DNA, 20 bp, Artificial Sequence
  Synthetic: FXN 3 reverse 9:69045906-69045932; SaCas9
tgctacagcttattactaac

SEQ ID NO: 25435 - DNA, 19 bp, Artificial Sequence
  Synthetic: FXN 3 reverse 9:69045907-69045932; SaCas9
gctacagcttattactaac

SEQ ID NO: 25436 - DNA, 18 bp, Artificial Sequence
  Synthetic: FXN 3 reverse 9:69045908-69045932; SaCas9
ctacagcttattactaac

SEQ ID NO: 25437 - DNA, 25 bp, Artificial Sequence
  Synthetic: FXN 3 forward 9:69045910-69045941; SaCas9
agtaataagctgtagcagtggccaa

SEQ ID NO: 25438 - DNA, 24 bp, Artificial Sequence
  Synthetic: FXN 3 forward 9:69045911-69045941; SaCas9
gtaataagctgtagcagtggccaa

SEQ ID NO: 25439 - DNA, 23 bp, Artificial Sequence
  Synthetic: FXN 3 forward 9:69045912-69045941; SaCas9
taataagctgtagcagtggccaa

SEQ ID NO: 25440 - DNA, 22 bp, Artificial Sequence
  Synthetic: FXN 3 forward 9:69045913-69045941; SaCas9
aataagctgtagcagtggccaa

SEQ ID NO: 25441 - DNA, 21 bp, Artificial Sequence
  Synthetic: FXN 3 forward 9:69045914-69045941; SaCas9
ataagctgtagcagtggccaa

SEQ ID NO: 25442 - DNA, 20 bp, Artificial Sequence
  Synthetic: FXN 3 forward 9:69045915-69045941; SaCas9
taagctgtagcagtggccaa

SEQ ID NO: 25443 - DNA, 19 bp, Artificial Sequence
  Synthetic: FXN 3 forward 9:69045916-69045941; SaCas9
aagctgtagcagtggccaa

SEQ ID NO: 25444 - DNA, 18 bp, Artificial Sequence
  Synthetic: FXN 3 forward 9:69045917-69045941; SaCas9
agctgtagcagtggccaa

SEQ ID NO: 25445 - DNA, 25 bp, Artificial Sequence
  Synthetic: FXN 3 forward 9:69045938-69045969; SaCas9
ggcatgctttcagtatgccctccca

SEQ ID NO: 25446 - DNA, 24 bp, Artificial Sequence
  Synthetic: FXN 3 forward 9:69045939-69045969; SaCas9
gcatgctttcagtatgccctccca

SEQ ID NO: 25447 - DNA, 23 bp, Artificial Sequence
  Synthetic: FXN 3 forward 9:69045940-69045969; SaCas9
catgctttcagtatgccctccca

SEQ ID NO: 25448 - DNA, 22 bp, Artificial Sequence
  Synthetic: FXN 3 forward 9:69045941-69045969; SaCas9
atgctttcagtatgccctccca

SEQ ID NO: 25449 - DNA, 21 bp, Artificial Sequence
  Synthetic: FXN 3 forward 9:69045942-69045969; SaCas9
tgctttcagtatgccctccca

SEQ ID NO: 25450 - DNA, 20 bp, Artificial Sequence
  Synthetic: FXN 3 forward 9:69045943-69045969; SaCas9
gctttcagtatgccctccca

SEQ ID NO: 25451 - DNA, 19 bp, Artificial Sequence
  Synthetic: FXN 3 forward 9:69045944-69045969; SaCas9
ctttcagtatgccctccca

SEQ ID NO: 25452 - DNA, 18 bp, Artificial Sequence
  Synthetic: FXN 3 forward 9:69045945-69045969; SaCas9
tttcagtatgccctccca

SEQ ID NO: 25453 - DNA, 25 bp, Artificial Sequence
  Synthetic: FXN 3 forward 9:69045942-69045973; SaCas9
tgctttcagtatgccctcccagtga

SEQ ID NO: 25454 - DNA, 24 bp, Artificial Sequence
  Synthetic: FXN 3 forward 9:69045943-69045973; SaCas9
gctttcagtatgccctcccagtga

SEQ ID NO: 25455 - DNA, 23 bp, Artificial Sequence
  Synthetic: FXN 3 forward 9:69045944-69045973; SaCas9
ctttcagtatgccctcccagtga

SEQ ID NO: 25456 - DNA, 22 bp, Artificial Sequence
  Synthetic: FXN 3 forward 9:69045945-69045973; SaCas9
tttcagtatgccctcccagtga

SEQ ID NO: 25457 - DNA, 21 bp, Artificial Sequence
  Synthetic: FXN 3 forward 9:69045946-69045973; SaCas9
ttcagtatgccctcccagtga

SEQ ID NO: 25458 - DNA, 20 bp, Artificial Sequence
  Synthetic: FXN 3 forward 9:69045947-69045973; SaCas9
tcagtatgccctcccagtga

SEQ ID NO: 25459 - DNA, 19 bp, Artificial Sequence
  Synthetic: FXN 3 forward 9:69045948-69045973; SaCas9
cagtatgccctcccagtga

SEQ ID NO: 25460 - DNA, 18 bp, Artificial Sequence
  Synthetic: FXN 3 forward 9:69045949-69045973; SaCas9
agtatgccctcccagtga

SEQ ID NO: 25461 - DNA, 25 bp, Artificial Sequence
  Synthetic: FXN 3 reverse 9:69045945-69045976; SaCas9
gactttcattcactgggagggcata

SEQ ID NO: 25462 - DNA, 24 bp, Artificial Sequence
  Synthetic: FXN 3 reverse 9:69045946-69045976; SaCas9
actttcattcactgggagggcata

SEQ ID NO: 25463 - DNA, 23 bp, Artificial Sequence
  Synthetic: FXN 3 reverse 9:69045947-69045976; SaCas9
ctttcattcactgggagggcata

SEQ ID NO: 25464 - DNA, 22 bp, Artificial Sequence
  Synthetic: FXN 3 reverse 9:69045948-69045976; SaCas9
tttcattcactgggagggcata

SEQ ID NO: 25465 - DNA, 21 bp, Artificial Sequence
  Synthetic: FXN 3 reverse 9:69045949-69045976; SaCas9
ttcattcactgggagggcata

SEQ ID NO: 25466 - DNA, 20 bp, Artificial Sequence
  Synthetic: FXN 3 reverse 9:69045950-69045976; SaCas9
tcattcactgggagggcata

SEQ ID NO: 25467 - DNA, 19 bp, Artificial Sequence
  Synthetic: FXN 3 reverse 9:69045951-69045976; SaCas9
cattcactgggagggcata

SEQ ID NO: 25468 - DNA, 18 bp, Artificial Sequence
  Synthetic: FXN 3 reverse 9:69045952-69045976; SaCas9
attcactgggagggcata

SEQ ID NO: 25469 - DNA, 25 bp, Artificial Sequence
  Synthetic: FXN 3 forward 9:69045951-69045982; SaCas9
tatgccctcccagtgaatgaaagtc

SEQ ID NO: 25470 - DNA, 24 bp, Artificial Sequence
  Synthetic: FXN 3 forward 9:69045952-69045982; SaCas9
atgccctcccagtgaatgaaagtc

SEQ ID NO: 25471 - DNA, 23 bp, Artificial Sequence
  Synthetic: FXN 3 forward 9:69045953-69045982; SaCas9
tgccctcccagtgaatgaaagtc

SEQ ID NO: 25472 - DNA, 22 bp, Artificial Sequence
  Synthetic: FXN 3 forward 9:69045954-69045982; SaCas9
gccctcccagtgaatgaaagtc

SEQ ID NO: 25473 - DNA, 21 bp, Artificial Sequence
  Synthetic: FXN 3 forward 9:69045955-69045982; SaCas9
ccctcccagtgaatgaaagtc

SEQ ID NO: 25474 - DNA, 20 bp, Artificial Sequence
  Synthetic: FXN 3 forward 9:69045956-69045982; SaCas9
cctcccagtgaatgaaagtc

SEQ ID NO: 25475 - DNA, 19 bp, Artificial Sequence
  Synthetic: FXN 3 forward 9:69045957-69045982; SaCas9
ctcccagtgaatgaaagtc

SEQ ID NO: 25476 - DNA, 18 bp, Artificial Sequence
  Synthetic: FXN 3 forward 9:69045958-69045982; SaCas9
tcccagtgaatgaaagtc

SEQ ID NO: 25477 - DNA, 25 bp, Artificial Sequence
  Synthetic: FXN 3 reverse 9:69045954-69045985; SaCas9
ttgcctcaggactttcattcactgg

SEQ ID NO: 25478 - DNA, 24 bp, Artificial Sequence
  Synthetic: FXN 3 reverse 9:69045955-69045985; SaCas9
tgcctcaggactttcattcactgg

SEQ ID NO: 25479 - DNA, 23 bp, Artificial Sequence
  Synthetic: FXN 3 reverse 9:69045956-69045985; SaCas9
gcctcaggactttcattcactgg

SEQ ID NO: 25480 - DNA, 22 bp, Artificial Sequence
  Synthetic: FXN 3 reverse 9:69045957-69045985; SaCas9
cctcaggactttcattcactgg

SEQ ID NO: 25481 - DNA, 21 bp, Artificial Sequence
  Synthetic: FXN 3 reverse 9:69045958-69045985; SaCas9
ctcaggactttcattcactgg

SEQ ID NO: 25482 - DNA, 20 bp, Artificial Sequence
  Synthetic: FXN 3 reverse 9:69045959-69045985; SaCas9
tcaggactttcattcactgg

SEQ ID NO: 25483 - DNA, 19 bp, Artificial Sequence
  Synthetic: FXN 3 reverse 9:69045960-69045985; SaCas9
caggactttcattcactgg

SEQ ID NO: 25484 - DNA, 18 bp, Artificial Sequence
  Synthetic: FXN 3 reverse 9:69045961-69045985; SaCas9
aggactttcattcactgg

SEQ ID NO: 25485 - DNA, 25 bp, Artificial Sequence
  Synthetic: FXN 3 reverse 9:69045956-69045987; SaCas9
ggttgcctcaggactttcattcact

SEQ ID NO: 25486 - DNA, 24 bp, Artificial Sequence
  Synthetic: FXN 3 reverse 9:69045957-69045987; SaCas9
gttgcctcaggactttcattcact

SEQ ID NO: 25487 - DNA, 23 bp, Artificial Sequence
  Synthetic: FXN 3 reverse 9:69045958-69045987; SaCas9
ttgcctcaggactttcattcact

SEQ ID NO: 25488 - DNA, 22 bp, Artificial Sequence
  Synthetic: FXN 3 reverse 9:69045959-69045987; SaCas9
tgcctcaggactttcattcact

SEQ ID NO: 25489 - DNA, 21 bp, Artificial Sequence
  Synthetic: FXN 3 reverse 9:69045960-69045987; SaCas9
gcctcaggactttcattcact

SEQ ID NO: 25490 - DNA, 20 bp, Artificial Sequence
  Synthetic: FXN 3 reverse 9:69045961-69045987; SaCas9
cctcaggactttcattcact

SEQ ID NO: 25491 - DNA, 19 bp, Artificial Sequence
  Synthetic: FXN 3 reverse 9:69045962-69045987; SaCas9
ctcaggactttcattcact

SEQ ID NO: 25492 - DNA, 18 bp, Artificial Sequence
  Synthetic: FXN 3 reverse 9:69045963-69045987; SaCas9
tcaggactttcattcact

SEQ ID NO: 25493 - DNA, 25 bp, Artificial Sequence
  Synthetic: FXN 3 reverse 9:69045957-69045988; SaCas9
gggttgcctcaggactttcattcac

SEQ ID NO: 25494 - DNA, 24 bp, Artificial Sequence
  Synthetic: FXN 3 reverse 9:69045958-69045988; SaCas9
ggttgcctcaggactttcattcac

SEQ ID NO: 25495 - DNA, 23 bp, Artificial Sequence
  Synthetic: FXN 3 reverse 9:69045959-69045988; SaCas9
gttgcctcaggactttcattcac

SEQ ID NO: 25496 - DNA, 22 bp, Artificial Sequence
  Synthetic: FXN 3 reverse 9:69045960-69045988; SaCas9
ttgcctcaggactttcattcac

SEQ ID NO: 25497 - DNA, 21 bp, Artificial Sequence
  Synthetic: FXN 3 reverse 9:69045961-69045988; SaCas9
tgcctcaggactttcattcac

SEQ ID NO: 25498 - DNA, 20 bp, Artificial Sequence
  Synthetic: FXN 3 reverse 9:69045962-69045988; SaCas9
gcctcaggactttcattcac

SEQ ID NO: 25499 - DNA, 19 bp, Artificial Sequence
  Synthetic: FXN 3 reverse 9:69045963-69045988; SaCas9
cctcaggactttcattcac

SEQ ID NO: 25500 - DNA, 18 bp, Artificial Sequence
  Synthetic: FXN 3 reverse 9:69045964-69045988; SaCas9
ctcaggactttcattcac

SEQ ID NO: 25501 - DNA, 25 bp, Artificial Sequence
  Synthetic: FXN 3 reverse 9:69045958-69045989; SaCas9
ggggttgcctcaggactttcattca

SEQ ID NO: 25502 - DNA, 24 bp, Artificial Sequence
  Synthetic: FXN 3 reverse 9:69045959-69045989; SaCas9
gggttgcctcaggactttcattca

SEQ ID NO: 25503 - DNA, 23 bp, Artificial Sequence
  Synthetic: FXN 3 reverse 9:69045960-69045989; SaCas9
ggttgcctcaggactttcattca

SEQ ID NO: 25504 - DNA, 22 bp, Artificial Sequence
  Synthetic: FXN 3 reverse 9:69045961-69045989; SaCas9
gttgcctcaggactttcattca

SEQ ID NO: 25505 - DNA, 21 bp, Artificial Sequence
  Synthetic: FXN 3 reverse 9:69045962-69045989; SaCas9
ttgcctcaggactttcattca

SEQ ID NO: 25506 - DNA, 20 bp, Artificial Sequence
  Synthetic: FXN 3 reverse 9:69045963-69045989; SaCas9
tgcctcaggactttcattca

SEQ ID NO: 25507 - DNA, 19 bp, Artificial Sequence
  Synthetic: FXN 3 reverse 9:69045964-69045989; SaCas9
gcctcaggactttcattca

SEQ ID NO: 25508 - DNA, 18 bp, Artificial Sequence
  Synthetic: FXN 3 reverse 9:69045965-69045989; SaCas9
cctcaggactttcattca

SEQ ID NO: 25509 - DNA, 25 bp, Artificial Sequence
  Synthetic: FXN 3 forward 9:69045965-69045996; SaCas9
gaatgaaagtcctgaggcaaccccc

SEQ ID NO: 25510 - DNA, 24 bp, Artificial Sequence
  Synthetic: FXN 3 forward 9:69045966-69045996; SaCas9
aatgaaagtcctgaggcaaccccc

SEQ ID NO: 25511 - DNA, 23 bp, Artificial Sequence
  Synthetic: FXN 3 forward 9:69045967-69045996; SaCas9
atgaaagtcctgaggcaaccccc

SEQ ID NO: 25512 - DNA, 22 bp, Artificial Sequence
  Synthetic: FXN 3 forward 9:69045968-69045996; SaCas9
tgaaagtcctgaggcaaccccc

SEQ ID NO: 25513 - DNA, 21 bp, Artificial Sequence
  Synthetic: FXN 3 forward 9:69045969-69045996; SaCas9
gaaagtcctgaggcaaccccc

SEQ ID NO: 25514 - DNA, 20 bp, Artificial Sequence
  Synthetic: FXN 3 forward 9:69045970-69045996; SaCas9
aaagtcctgaggcaaccccc

SEQ ID NO: 25515 - DNA, 19 bp, Artificial Sequence
  Synthetic: FXN 3 forward 9:69045971-69045996; SaCas9
aagtcctgaggcaaccccc

SEQ ID NO: 25516 - DNA, 18 bp, Artificial Sequence
  Synthetic: FXN 3 forward 9:69045972-69045996; SaCas9
agtcctgaggcaaccccc

SEQ ID NO: 25517 - DNA, 25 bp, Artificial Sequence
  Synthetic: FXN 3 forward 9:69045969-69046000; SaCas9
gaaagtcctgaggcaacccccaagg

SEQ ID NO: 25518 - DNA, 24 bp, Artificial Sequence
  Synthetic: FXN 3 forward 9:69045970-69046000; SaCas9
aaagtcctgaggcaacccccaagg

SEQ ID NO: 25519 - DNA, 23 bp, Artificial Sequence
  Synthetic: FXN 3 forward 9:69045971-69046000; SaCas9
aagtcctgaggcaacccccaagg

SEQ ID NO: 25520 - DNA, 22 bp, Artificial Sequence
  Synthetic: FXN 3 forward 9:69045972-69046000; SaCas9
agtcctgaggcaacccccaagg

SEQ ID NO: 25521 - DNA, 21 bp, Artificial Sequence
  Synthetic: FXN 3 forward 9:69045973-69046000; SaCas9
gtcctgaggcaacccccaagg

SEQ ID NO: 25522 - DNA, 20 bp, Artificial Sequence
  Synthetic: FXN 3 forward 9:69045974-69046000; SaCas9
tcctgaggcaacccccaagg

SEQ ID NO: 25523 - DNA, 19 bp, Artificial Sequence
  Synthetic: FXN 3 forward 9:69045975-69046000; SaCas9
cctgaggcaacccccaagg

SEQ ID NO: 25524 - DNA, 18 bp, Artificial Sequence
  Synthetic: FXN 3 forward 9:69045976-69046000; SaCas9
ctgaggcaacccccaagg

SEQ ID NO: 25525 - DNA, 25 bp, Artificial Sequence
  Synthetic: FXN 3 forward 9:69045970-69046001; SaCas9
aaagtcctgaggcaacccccaaggg

SEQ ID NO: 25526 - DNA, 24 bp, Artificial Sequence
  Synthetic: FXN 3 forward 9:69045971-69046001; SaCas9
aagtcctgaggcaacccccaaggg

SEQ ID NO: 25527 - DNA, 23 bp, Artificial Sequence
  Synthetic: FXN 3 forward 9:69045972-69046001; SaCas9
agtcctgaggcaacccccaaggg

SEQ ID NO: 25528 - DNA, 22 bp, Artificial Sequence
  Synthetic: FXN 3 forward 9:69045973-69046001; SaCas9
gtcctgaggcaacccccaaggg

SEQ ID NO: 25529 - DNA, 21 bp, Artificial Sequence
  Synthetic: FXN 3 forward 9:69045974-69046001; SaCas9
tcctgaggcaacccccaaggg

SEQ ID NO: 25530 - DNA, 20 bp, Artificial Sequence
  Synthetic: FXN 3 forward 9:69045975-69046001; SaCas9
cctgaggcaacccccaaggg

SEQ ID NO: 25531 - DNA, 19 bp, Artificial Sequence
  Synthetic: FXN 3 forward 9:69045976-69046001; SaCas9
ctgaggcaacccccaaggg

SEQ ID NO: 25532 - DNA, 18 bp, Artificial Sequence
  Synthetic: FXN 3 forward 9:69045977-69046001; SaCas9
tgaggcaacccccaaggg

SEQ ID NO: 25533 - DNA, 25 bp, Artificial Sequence
  Synthetic: FXN 3 reverse 9:69045973-69046004; SaCas9
gcacttccacccttgggggttgcct

SEQ ID NO: 25534 - DNA, 24 bp, Artificial Sequence
  Synthetic: FXN 3 reverse 9:69045974-69046004; SaCas9
cacttccacccttgggggttgcct

SEQ ID NO: 25535 - DNA, 23 bp, Artificial Sequence
  Synthetic: FXN 3 reverse 9:69045975-69046004; SaCas9
acttccacccttgggggttgcct

SEQ ID NO: 25536 - DNA, 22 bp, Artificial Sequence
  Synthetic: FXN 3 reverse 9:69045976-69046004; SaCas9
cttccacccttgggggttgcct

SEQ ID NO: 25537 - DNA, 21 bp, Artificial Sequence
  Synthetic: FXN 3 reverse 9:69045977-69046004; SaCas9
ttccacccttgggggttgcct

SEQ ID NO: 25538 - DNA, 20 bp, Artificial Sequence
  Synthetic: FXN 3 reverse 9:69045978-69046004; SaCas9
tccacccttgggggttgcct

SEQ ID NO: 25539 - DNA, 19 bp, Artificial Sequence
  Synthetic: FXN 3 reverse 9:69045979-69046004; SaCas9
ccacccttgggggttgcct

SEQ ID NO: 25540 - DNA, 18 bp, Artificial Sequence
  Synthetic: FXN 3 reverse 9:69045980-69046004; SaCas9
cacccttgggggttgcct

SEQ ID NO: 25541 - DNA, 25 bp, Artificial Sequence
  Synthetic: FXN 3 reverse 9:69045984-69046015; SaCas9
gtggtggcctggcacttccaccctt

SEQ ID NO: 25542 - DNA, 24 bp, Artificial Sequence
  Synthetic: FXN 3 reverse 9:69045985-69046015; SaCas9
tggtggcctggcacttccaccctt

SEQ ID NO: 25543 - DNA, 23 bp, Artificial Sequence
  Synthetic: FXN 3 reverse 9:69045986-69046015; SaCas9
ggtggcctggcacttccaccctt

SEQ ID NO: 25544 - DNA, 22 bp, Artificial Sequence
  Synthetic: FXN 3 reverse 9:69045987-69046015; SaCas9
gtggcctggcacttccaccctt

SEQ ID NO: 25545 - DNA, 21 bp, Artificial Sequence
  Synthetic: FXN 3 reverse 9:69045988-69046015; SaCas9
tggcctggcacttccaccctt

SEQ ID NO: 25546 - DNA, 20 bp, Artificial Sequence
  Synthetic: FXN 3 reverse 9:69045989-69046015; SaCas9
ggcctggcacttccaccctt

SEQ ID NO: 25547 - DNA, 19 bp, Artificial Sequence
  Synthetic: FXN 3 reverse 9:69045990-69046015; SaCas9
gcctggcacttccaccctt

SEQ ID NO: 25548 - DNA, 18 bp, Artificial Sequence
  Synthetic: FXN 3 reverse 9:69045991-69046015; SaCas9
cctggcacttccaccctt

SEQ ID NO: 25549 - DNA, 25 bp, Artificial Sequence
  Synthetic: FXN 3 reverse 9:69045985-69046016; SaCas9
ggtggtggcctggcacttccaccct

SEQ ID NO: 25550 - DNA, 24 bp, Artificial Sequence
  Synthetic: FXN 3 reverse 9:69045986-69046016; SaCas9
gtggtggcctggcacttccaccct

SEQ ID NO: 25551 - DNA, 23 bp, Artificial Sequence
  Synthetic: FXN 3 reverse 9:69045987-69046016; SaCas9
tggtggcctggcacttccaccct

SEQ ID NO: 25552 - DNA, 22 bp, Artificial Sequence
  Synthetic: FXN 3 reverse 9:69045988-69046016; SaCas9
ggtggcctggcacttccaccct

SEQ ID NO: 25553 - DNA, 21 bp, Artificial Sequence
  Synthetic: FXN 3 reverse 9:69045989-69046016; SaCas9
gtggcctggcacttccaccct

SEQ ID NO: 25554 - DNA, 20 bp, Artificial Sequence
  Synthetic: FXN 3 reverse 9:69045990-69046016; SaCas9
tggcctggcacttccaccct

SEQ ID NO: 25555 - DNA, 19 bp, Artificial Sequence
  Synthetic: FXN 3 reverse 9:69045991-69046016; SaCas9
ggcctggcacttccaccct

SEQ ID NO: 25556 - DNA, 18 bp, Artificial Sequence
  Synthetic: FXN 3 reverse 9:69045992-69046016; SaCas9
gcctggcacttccaccct

SEQ ID NO: 25557 - DNA, 25 bp, Artificial Sequence
  Synthetic: FXN 3 reverse 9:69045986-69046017; SaCas9
gggtggtggcctggcacttccaccc

SEQ ID NO: 25558 - DNA, 24 bp, Artificial Sequence
  Synthetic: FXN 3 reverse 9:69045987-69046017; SaCas9
ggtggtggcctggcacttccaccc

SEQ ID NO: 25559 - DNA, 23 bp, Artificial Sequence
  Synthetic: FXN 3 reverse 9:69045988-69046017; SaCas9
gtggtggcctggcacttccaccc

SEQ ID NO: 25560 - DNA, 22 bp, Artificial Sequence
  Synthetic: FXN 3 reverse 9:69045989-69046017; SaCas9
tggtggcctggcacttccaccc

SEQ ID NO: 25561 - DNA, 21 bp, Artificial Sequence
  Synthetic: FXN 3 reverse 9:69045990-69046017; SaCas9
ggtggcctggcacttccaccc

SEQ ID NO: 25562 - DNA, 20 bp, Artificial Sequence
  Synthetic: FXN 3 reverse 9:69045991-69046017; SaCas9
gtggcctggcacttccaccc

SEQ ID NO: 25563 - DNA, 19 bp, Artificial Sequence
  Synthetic: FXN 3 reverse 9:69045992-69046017; SaCas9
tggcctggcacttccaccc

SEQ ID NO: 25564 - DNA, 18 bp, Artificial Sequence
  Synthetic: FXN 3 reverse 9:69045993-69046017; SaCas9
ggcctggcacttccaccc

SEQ ID NO: 25565 - DNA, 25 bp, Artificial Sequence
  Synthetic: FXN 3 forward 9:69045993-69046024; SaCas9
ggtggaagtgccaggccaccaccca

SEQ ID NO: 25566 - DNA, 24 bp, Artificial Sequence
  Synthetic: FXN 3 forward 9:69045994-69046024; SaCas9
gtggaagtgccaggccaccaccca

SEQ ID NO: 25567 - DNA, 23 bp, Artificial Sequence
  Synthetic: FXN 3 forward 9:69045995-69046024; SaCas9
tggaagtgccaggccaccaccca

SEQ ID NO: 25568 - DNA, 22 bp, Artificial Sequence
  Synthetic: FXN 3 forward 9:69045996-69046024; SaCas9
ggaagtgccaggccaccaccca

SEQ ID NO: 25569 - DNA, 21 bp, Artificial Sequence
  Synthetic: FXN 3 forward 9:69045997-69046024; SaCas9
gaagtgccaggccaccaccca

SEQ ID NO: 25570 - DNA, 20 bp, Artificial Sequence
  Synthetic: FXN 3 forward 9:69045998-69046024; SaCas9
aagtgccaggccaccaccca

SEQ ID NO: 25571 - DNA, 19 bp, Artificial Sequence
  Synthetic: FXN 3 forward 9:69045999-69046024; SaCas9
agtgccaggccaccaccca

SEQ ID NO: 25572 - DNA, 18 bp, Artificial Sequence
  Synthetic: FXN 3 forward 9:69046000-69046024; SaCas9
gtgccaggccaccaccca

SEQ ID NO: 25573 - DNA, 25 bp, Artificial Sequence
  Synthetic: FXN 3 forward 9:69045994-69046025; SaCas9
gtggaagtgccaggccaccacccac

SEQ ID NO: 25574 - DNA, 24 bp, Artificial Sequence
  Synthetic: FXN 3 forward 9:69045995-69046025; SaCas9
tggaagtgccaggccaccacccac

SEQ ID NO: 25575 - DNA, 23 bp, Artificial Sequence
  Synthetic: FXN 3 forward 9:69045996-69046025; SaCas9
ggaagtgccaggccaccacccac

SEQ ID NO: 25576 - DNA, 22 bp, Artificial Sequence
  Synthetic: FXN 3 forward 9:69045997-69046025; SaCas9
gaagtgccaggccaccacccac

SEQ ID NO: 25577 - DNA, 21 bp, Artificial Sequence
  Synthetic: FXN 3 forward 9:69045998-69046025; SaCas9
aagtgccaggccaccacccac

SEQ ID NO: 25578 - DNA, 20 bp, Artificial Sequence
  Synthetic: FXN 3 forward 9:69045999-69046025; SaCas9
agtgccaggccaccacccac

SEQ ID NO: 25579 - DNA, 19 bp, Artificial Sequence
  Synthetic: FXN 3 forward 9:69046000-69046025; SaCas9
gtgccaggccaccacccac

SEQ ID NO: 25580 - DNA, 18 bp, Artificial Sequence
  Synthetic: FXN 3 forward 9:69046001-69046025; SaCas9
tgccaggccaccacccac

SEQ ID NO: 25581 - DNA, 25 bp, Artificial Sequence
  Synthetic: FXN 3 forward 9:69045999-69046030; SaCas9
agtgccaggccaccacccactggag

SEQ ID NO: 25582 - DNA, 24 bp, Artificial Sequence
  Synthetic: FXN 3 forward 9:69046000-69046030; SaCas9
gtgccaggccaccacccactggag

SEQ ID NO: 25583 - DNA, 23 bp, Artificial Sequence
  Synthetic: FXN 3 forward 9:69046001-69046030; SaCas9
tgccaggccaccacccactggag

SEQ ID NO: 25584 - DNA, 22 bp, Artificial Sequence
  Synthetic: FXN 3 forward 9:69046002-69046030; SaCas9
gccaggccaccacccactggag

SEQ ID NO: 25585 - DNA, 21 bp, Artificial Sequence
  Synthetic: FXN 3 forward 9:69046003-69046030; SaCas9
ccaggccaccacccactggag

SEQ ID NO: 25586 - DNA, 20 bp, Artificial Sequence
  Synthetic: FXN 3 forward 9:69046004-69046030; SaCas9
caggccaccacccactggag

SEQ ID NO: 25587 - DNA, 19 bp, Artificial Sequence
  Synthetic: FXN 3 forward 9:69046005-69046030; SaCas9
aggccaccacccactggag

SEQ ID NO: 25588 - DNA, 18 bp, Artificial Sequence
  Synthetic: FXN 3 forward 9:69046006-69046030; SaCas9
ggccaccacccactggag

SEQ ID NO: 25589 - DNA, 25 bp, Artificial Sequence
  Synthetic: FXN 3 forward 9:69046013-69046044; SaCas9
acccactggaggtgaaagttccgtg

SEQ ID NO: 25590 - DNA, 24 bp, Artificial Sequence
  Synthetic: FXN 3 forward 9:69046014-69046044; SaCas9
cccactggaggtgaaagttccgtg

SEQ ID NO: 25591 - DNA, 23 bp, Artificial Sequence
  Synthetic: FXN 3 forward 9:69046015-69046044; SaCas9
ccactggaggtgaaagttccgtg

SEQ ID NO: 25592 - DNA, 22 bp, Artificial Sequence
  Synthetic: FXN 3 forward 9:69046016-69046044; SaCas9
cactggaggtgaaagttccgtg

SEQ ID NO: 25593 - DNA, 21 bp, Artificial Sequence
  Synthetic: FXN 3 forward 9:69046017-69046044; SaCas9
actggaggtgaaagttccgtg

SEQ ID NO: 25594 - DNA, 20 bp, Artificial Sequence
  Synthetic: FXN 3 forward 9:69046018-69046044; SaCas9
ctggaggtgaaagttccgtg

SEQ ID NO: 25595 - DNA, 19 bp, Artificial Sequence
  Synthetic: FXN 3 forward 9:69046019-69046044; SaCas9
tggaggtgaaagttccgtg

SEQ ID NO: 25596 - DNA, 18 bp, Artificial Sequence
  Synthetic: FXN 3 forward 9:69046020-69046044; SaCas9
ggaggtgaaagttccgtg

SEQ ID NO: 25597 - DNA, 25 bp, Artificial Sequence
  Synthetic: FXN 3 reverse 9:69046013-69046044; SaCas9
acccatcacggaactttcacctcca

SEQ ID NO: 25598 - DNA, 24 bp, Artificial Sequence
  Synthetic: FXN 3 reverse 9:69046014-69046044; SaCas9
cccatcacggaactttcacctcca

SEQ ID NO: 25599 - DNA, 23 bp, Artificial Sequence
  Synthetic: FXN 3 reverse 9:69046015-69046044; SaCas9
ccatcacggaactttcacctcca

SEQ ID NO: 25600 - DNA, 22 bp, Artificial Sequence
  Synthetic: FXN 3 reverse 9:69046016-69046044; SaCas9
catcacggaactttcacctcca

SEQ ID NO: 25601 - DNA, 21 bp, Artificial Sequence
  Synthetic: FXN 3 reverse 9:69046017-69046044; SaCas9
atcacggaactttcacctcca

SEQ ID NO: 25602 - DNA, 20 bp, Artificial Sequence
  Synthetic: FXN 3 reverse 9:69046018-69046044; SaCas9
tcacggaactttcacctcca

SEQ ID NO: 25603 - DNA, 19 bp, Artificial Sequence
  Synthetic: FXN 3 reverse 9:69046019-69046044; SaCas9
cacggaactttcacctcca

SEQ ID NO: 25604 - DNA, 18 bp, Artificial Sequence
  Synthetic: FXN 3 reverse 9:69046020-69046044; SaCas9
acggaactttcacctcca

SEQ ID NO: 25605 - DNA, 25 bp, Artificial Sequence
  Synthetic: FXN 3 reverse 9:69046030-69046061; SaCas9
ttcgcagaccaaagcaaacccatca

SEQ ID NO: 25606 - DNA, 24 bp, Artificial Sequence
  Synthetic: FXN 3 reverse 9:69046031-69046061; SaCas9
tcgcagaccaaagcaaacccatca

SEQ ID NO: 25607 - DNA, 23 bp, Artificial Sequence
  Synthetic: FXN 3 reverse 9:69046032-69046061; SaCas9
cgcagaccaaagcaaacccatca

SEQ ID NO: 25608 - DNA, 22 bp, Artificial Sequence
  Synthetic: FXN 3 reverse 9:69046033-69046061; SaCas9
gcagaccaaagcaaacccatca

SEQ ID NO: 25609 - DNA, 21 bp, Artificial Sequence
  Synthetic: FXN 3 reverse 9:69046034-69046061; SaCas9
cagaccaaagcaaacccatca

SEQ ID NO: 25610 - DNA, 20 bp, Artificial Sequence
  Synthetic: FXN 3 reverse 9:69046035-69046061; SaCas9
agaccaaagcaaacccatca

SEQ ID NO: 25611 - DNA, 19 bp, Artificial Sequence
  Synthetic: FXN 3 reverse 9:69046036-69046061; SaCas9
gaccaaagcaaacccatca

SEQ ID NO: 25612 - DNA, 18 bp, Artificial Sequence
  Synthetic: FXN 3 reverse 9:69046037-69046061; SaCas9
accaaagcaaacccatca

SEQ ID NO: 25613 - DNA, 25 bp, Artificial Sequence
  Synthetic: FXN 3 forward 9:69046031-69046062; SaCas9
ttccgtgatgggtttgctttggtct

SEQ ID NO: 25614 - DNA, 24 bp, Artificial Sequence
  Synthetic: FXN 3 forward 9:69046032-69046062; SaCas9
tccgtgatgggtttgctttggtct

SEQ ID NO: 25615 - DNA, 23 bp, Artificial Sequence
  Synthetic: FXN 3 forward 9:69046033-69046062; SaCas9
ccgtgatgggtttgctttggtct

SEQ ID NO: 25616 - DNA, 22 bp, Artificial Sequence
  Synthetic: FXN 3 forward 9:69046034-69046062; SaCas9
cgtgatgggtttgctttggtct

SEQ ID NO: 25617 - DNA, 21 bp, Artificial Sequence
  Synthetic: FXN 3 forward 9:69046035-69046062; SaCas9
gtgatgggtttgctttggtct

SEQ ID NO: 25618 - DNA, 20 bp, Artificial Sequence
  Synthetic: FXN 3 forward 9:69046036-69046062; SaCas9
tgatgggtttgctttggtct

SEQ ID NO: 25619 - DNA, 19 bp, Artificial Sequence
  Synthetic: FXN 3 forward 9:69046037-69046062; SaCas9
gatgggtttgctttggtct

SEQ ID NO: 25620 - DNA, 18 bp, Artificial Sequence
  Synthetic: FXN 3 forward 9:69046038-69046062; SaCas9
atgggtttgctttggtct

SEQ ID NO: 25621 - DNA, 25 bp, Artificial Sequence
  Synthetic: FXN 3 reverse 9:69046031-69046062; SaCas9
attcgcagaccaaagcaaacccatc

SEQ ID NO: 25622 - DNA, 24 bp, Artificial Sequence
  Synthetic: FXN 3 reverse 9:69046032-69046062; SaCas9
ttcgcagaccaaagcaaacccatc

SEQ ID NO: 25623 - DNA, 23 bp, Artificial Sequence
  Synthetic: FXN 3 reverse 9:69046033-69046062; SaCas9
tcgcagaccaaagcaaacccatc

SEQ ID NO: 25624 - DNA, 22 bp, Artificial Sequence
  Synthetic: FXN 3 reverse 9:69046034-69046062; SaCas9
cgcagaccaaagcaaacccatc

SEQ ID NO: 25625 - DNA, 21 bp, Artificial Sequence
  Synthetic: FXN 3 reverse 9:69046035-69046062; SaCas9
gcagaccaaagcaaacccatc

SEQ ID NO: 25626 - DNA, 20 bp, Artificial Sequence
  Synthetic: FXN 3 reverse 9:69046036-69046062; SaCas9
cagaccaaagcaaacccatc

SEQ ID NO: 25627 - DNA, 19 bp, Artificial Sequence
  Synthetic: FXN 3 reverse 9:69046037-69046062; SaCas9
agaccaaagcaaacccatc

SEQ ID NO: 25628 - DNA, 18 bp, Artificial Sequence
  Synthetic: FXN 3 reverse 9:69046038-69046062; SaCas9
gaccaaagcaaacccatc

SEQ ID NO: 25629 - DNA, 25 bp, Artificial Sequence
  Synthetic: FXN 3 forward 9:69046047-69046078; SaCas9
ctttggtctgcgaatctactgtcat

SEQ ID NO: 25630 - DNA, 24 bp, Artificial Sequence
  Synthetic: FXN 3 forward 9:69046048-69046078; SaCas9
tttggtctgcgaatctactgtcat

SEQ ID NO: 25631 - DNA, 23 bp, Artificial Sequence
  Synthetic: FXN 3 forward 9:69046049-69046078; SaCas9
ttggtctgcgaatctactgtcat

SEQ ID NO: 25632 - DNA, 22 bp, Artificial Sequence
  Synthetic: FXN 3 forward 9:69046050-69046078; SaCas9
tggtctgcgaatctactgtcat

SEQ ID NO: 25633 - DNA, 21 bp, Artificial Sequence
  Synthetic: FXN 3 forward 9:69046051-69046078; SaCas9
ggtctgcgaatctactgtcat

SEQ ID NO: 25634 - DNA, 20 bp, Artificial Sequence
  Synthetic: FXN 3 forward 9:69046052-69046078; SaCas9
gtctgcgaatctactgtcat

SEQ ID NO: 25635 - DNA, 19 bp, Artificial Sequence
  Synthetic: FXN 3 forward 9:69046053-69046078; SaCas9
tctgcgaatctactgtcat

SEQ ID NO: 25636 - DNA, 18 bp, Artificial Sequence
  Synthetic: FXN 3 forward 9:69046054-69046078; SaCas9
ctgcgaatctactgtcat

SEQ ID NO: 25637 - DNA, 25 bp, Artificial Sequence
  Synthetic: FXN 3 forward 9:69046048-69046079; SaCas9
tttggtctgcgaatctactgtcatg

SEQ ID NO: 25638 - DNA, 24 bp, Artificial Sequence
  Synthetic: FXN 3 forward 9:69046049-69046079; SaCas9
ttggtctgcgaatctactgtcatg

SEQ ID NO: 25639 - DNA, 23 bp, Artificial Sequence
  Synthetic: FXN 3 forward 9:69046050-69046079; SaCas9
tggtctgcgaatctactgtcatg

SEQ ID NO: 25640 - DNA, 22 bp, Artificial Sequence
  Synthetic: FXN 3 forward 9:69046051-69046079; SaCas9
ggtctgcgaatctactgtcatg

SEQ ID NO: 25641 - DNA, 21 bp, Artificial Sequence
  Synthetic: FXN 3 forward 9:69046052-69046079; SaCas9
gtctgcgaatctactgtcatg

SEQ ID NO: 25642 - DNA, 20 bp, Artificial Sequence
  Synthetic: FXN 3 forward 9:69046053-69046079; SaCas9
tctgcgaatctactgtcatg

SEQ ID NO: 25643 - DNA, 19 bp, Artificial Sequence
  Synthetic: FXN 3 forward 9:69046054-69046079; SaCas9
ctgcgaatctactgtcatg

SEQ ID NO: 25644 - DNA, 18 bp, Artificial Sequence
  Synthetic: FXN 3 forward 9:69046055-69046079; SaCas9
tgcgaatctactgtcatg

SEQ ID NO: 25645 - DNA, 25 bp, Artificial Sequence
  Synthetic: FXN 3 forward 9:69046050-69046081; SaCas9
tggtctgcgaatctactgtcatgtg

SEQ ID NO: 25646 - DNA, 24 bp, Artificial Sequence
  Synthetic: FXN 3 forward 9:69046051-69046081; SaCas9
ggtctgcgaatctactgtcatgtg

SEQ ID NO: 25647 - DNA, 23 bp, Artificial Sequence
  Synthetic: FXN 3 forward 9:69046052-69046081; SaCas9
gtctgcgaatctactgtcatgtg

SEQ ID NO: 25648 - DNA, 22 bp, Artificial Sequence
  Synthetic: FXN 3 forward 9:69046053-69046081; SaCas9
tctgcgaatctactgtcatgtg

SEQ ID NO: 25649 - DNA, 21 bp, Artificial Sequence
  Synthetic: FXN 3 forward 9:69046054-69046081; SaCas9
ctgcgaatctactgtcatgtg

SEQ ID NO: 25650 - DNA, 20 bp, Artificial Sequence
  Synthetic: FXN 3 forward 9:69046055-69046081; SaCas9
tgcgaatctactgtcatgtg

SEQ ID NO: 25651 - DNA, 19 bp, Artificial Sequence
  Synthetic: FXN 3 forward 9:69046056-69046081; SaCas9
gcgaatctactgtcatgtg

SEQ ID NO: 25652 - DNA, 18 bp, Artificial Sequence
  Synthetic: FXN 3 forward 9:69046057-69046081; SaCas9
cgaatctactgtcatgtg

SEQ ID NO: 25653 - DNA, 25 bp, Artificial Sequence
  Synthetic: FXN 3 forward 9:69046064-69046095; SaCas9
actgtcatgtggagagatctgtgct

SEQ ID NO: 25654 - DNA, 24 bp, Artificial Sequence
  Synthetic: FXN 3 forward 9:69046065-69046095; SaCas9
ctgtcatgtggagagatctgtgct

SEQ ID NO: 25655 - DNA, 23 bp, Artificial Sequence
  Synthetic: FXN 3 forward 9:69046066-69046095; SaCas9
tgtcatgtggagagatctgtgct

SEQ ID NO: 25656 - DNA, 22 bp, Artificial Sequence
  Synthetic: FXN 3 forward 9:69046067-69046095; SaCas9
gtcatgtggagagatctgtgct

SEQ ID NO: 25657 - DNA, 21 bp, Artificial Sequence
  Synthetic: FXN 3 forward 9:69046068-69046095; SaCas9
tcatgtggagagatctgtgct

SEQ ID NO: 25658 - DNA, 20 bp, Artificial Sequence
  Synthetic: FXN 3 forward 9:69046069-69046095; SaCas9
catgtggagagatctgtgct

SEQ ID NO: 25659 - DNA, 19 bp, Artificial Sequence
  Synthetic: FXN 3 forward 9:69046070-69046095; SaCas9
atgtggagagatctgtgct

SEQ ID NO: 25660 - DNA, 18 bp, Artificial Sequence
  Synthetic: FXN 3 forward 9:69046071-69046095; SaCas9
tgtggagagatctgtgct

SEQ ID NO: 25661 - DNA, 25 bp, Artificial Sequence
  Synthetic: FXN 3 forward 9:69046065-69046096; SaCas9
ctgtcatgtggagagatctgtgctc

SEQ ID NO: 25662 - DNA, 24 bp, Artificial Sequence
  Synthetic: FXN 3 forward 9:69046066-69046096; SaCas9
tgtcatgtggagagatctgtgctc

SEQ ID NO: 25663 - DNA, 23 bp, Artificial Sequence
  Synthetic: FXN 3 forward 9:69046067-69046096; SaCas9
gtcatgtggagagatctgtgctc

SEQ ID NO: 25664 - DNA, 22 bp, Artificial Sequence
  Synthetic: FXN 3 forward 9:69046068-69046096; SaCas9
tcatgtggagagatctgtgctc

SEQ ID NO: 25665 - DNA, 21 bp, Artificial Sequence
  Synthetic: FXN 3 forward 9:69046069-69046096; SaCas9
catgtggagagatctgtgctc

SEQ ID NO: 25666 - DNA, 20 bp, Artificial Sequence
  Synthetic: FXN 3 forward 9:69046070-69046096; SaCas9
atgtggagagatctgtgctc

SEQ ID NO: 25667 - DNA, 19 bp, Artificial Sequence
  Synthetic: FXN 3 forward 9:69046071-69046096; SaCas9
tgtggagagatctgtgctc

SEQ ID NO: 25668 - DNA, 18 bp, Artificial Sequence
  Synthetic: FXN 3 forward 9:69046072-69046096; SaCas9
gtggagagatctgtgctc

SEQ ID NO: 25669 - DNA, 25 bp, Artificial Sequence
  Synthetic: FXN 3 forward 9:69046068-69046099; SaCas9
tcatgtggagagatctgtgctctgg

SEQ ID NO: 25670 - DNA, 24 bp, Artificial Sequence
  Synthetic: FXN 3 forward 9:69046069-69046099; SaCas9
catgtggagagatctgtgctctgg

SEQ ID NO: 25671 - DNA, 23 bp, Artificial Sequence
  Synthetic: FXN 3 forward 9:69046070-69046099; SaCas9
atgtggagagatctgtgctctgg

SEQ ID NO: 25672 - DNA, 22 bp, Artificial Sequence
  Synthetic: FXN 3 forward 9:69046071-69046099; SaCas9
tgtggagagatctgtgctctgg

SEQ ID NO: 25673 - DNA, 21 bp, Artificial Sequence
  Synthetic: FXN 3 forward 9:69046072-69046099; SaCas9
gtggagagatctgtgctctgg

SEQ ID NO: 25674 - DNA, 20 bp, Artificial Sequence
  Synthetic: FXN 3 forward 9:69046073-69046099; SaCas9
tggagagatctgtgctctgg

SEQ ID NO: 25675 - DNA, 19 bp, Artificial Sequence
  Synthetic: FXN 3 forward 9:69046074-69046099; SaCas9
ggagagatctgtgctctgg

SEQ ID NO: 25676 - DNA, 18 bp, Artificial Sequence
  Synthetic: FXN 3 forward 9:69046075-69046099; SaCas9
gagagatctgtgctctgg

SEQ ID NO: 25677 - DNA, 25 bp, Artificial Sequence
  Synthetic: FXN 3 forward 9:69046081-69046112; SaCas9
tctgtgctctggaagagcatacagt

SEQ ID NO: 25678 - DNA, 24 bp, Artificial Sequence
  Synthetic: FXN 3 forward 9:69046082-69046112; SaCas9
ctgtgctctggaagagcatacagt

SEQ ID NO: 25679 - DNA, 23 bp, Artificial Sequence
  Synthetic: FXN 3 forward 9:69046083-69046112; SaCas9
tgtgctctggaagagcatacagt

SEQ ID NO: 25680 - DNA, 22 bp, Artificial Sequence
  Synthetic: FXN 3 forward 9:69046084-69046112; SaCas9
gtgctctggaagagcatacagt

SEQ ID NO: 25681 - DNA, 21 bp, Artificial Sequence
  Synthetic: FXN 3 forward 9:69046085-69046112; SaCas9
tgctctggaagagcatacagt

SEQ ID NO: 25682 - DNA, 20 bp, Artificial Sequence
  Synthetic: FXN 3 forward 9:69046086-69046112; SaCas9
gctctggaagagcatacagt

SEQ ID NO: 25683 - DNA, 19 bp, Artificial Sequence
  Synthetic: FXN 3 forward 9:69046087-69046112; SaCas9
ctctggaagagcatacagt

SEQ ID NO: 25684 - DNA, 18 bp, Artificial Sequence
  Synthetic: FXN 3 forward 9:69046088-69046112; SaCas9
tctggaagagcatacagt

SEQ ID NO: 25685 - DNA, 25 bp, Artificial Sequence
  Synthetic: FXN 3 reverse 9:69046086-69046117; SaCas9
aagcttttctaactgtatgctcttc

SEQ ID NO: 25686 - DNA, 24 bp, Artificial Sequence
  Synthetic: FXN 3 reverse 9:69046087-69046117; SaCas9
agcttttctaactgtatgctcttc

SEQ ID NO: 25687 - DNA, 23 bp, Artificial Sequence
  Synthetic: FXN 3 reverse 9:69046088-69046117; SaCas9
gcttttctaactgtatgctcttc

SEQ ID NO: 25688 - DNA, 22 bp, Artificial Sequence
  Synthetic: FXN 3 reverse 9:69046089-69046117; SaCas9
cttttctaactgtatgctcttc

SEQ ID NO: 25689 - DNA, 21 bp, Artificial Sequence
  Synthetic: FXN 3 reverse 9:69046090-69046117; SaCas9
ttttctaactgtatgctcttc

SEQ ID NO: 25690 - DNA, 20 bp, Artificial Sequence
  Synthetic: FXN 3 reverse 9:69046091-69046117; SaCas9
tttctaactgtatgctcttc

SEQ ID NO: 25691 - DNA, 19 bp, Artificial Sequence
  Synthetic: FXN 3 reverse 9:69046092-69046117; SaCas9
ttctaactgtatgctcttc

SEQ ID NO: 25692 - DNA, 18 bp, Artificial Sequence
  Synthetic: FXN 3 reverse 9:69046093-69046117; SaCas9
tctaactgtatgctcttc

SEQ ID NO: 25693 - DNA, 25 bp, Artificial Sequence
  Synthetic: FXN 3 forward 9:69046095-69046126; SaCas9
gagcatacagttagaaaagcttgcc

SEQ ID NO: 25694 - DNA, 24 bp, Artificial Sequence
  Synthetic: FXN 3 forward 9:69046096-69046126; SaCas9
agcatacagttagaaaagcttgcc

SEQ ID NO: 25695 - DNA, 23 bp, Artificial Sequence
  Synthetic: FXN 3 forward 9:69046097-69046126; SaCas9
gcatacagttagaaaagcttgcc

SEQ ID NO: 25696 - DNA, 22 bp, Artificial Sequence
  Synthetic: FXN 3 forward 9:69046098-69046126; SaCas9
catacagttagaaaagcttgcc

SEQ ID NO: 25697 - DNA, 21 bp, Artificial Sequence
  Synthetic: FXN 3 forward 9:69046099-69046126; SaCas9
atacagttagaaaagcttgcc

SEQ ID NO: 25698 - DNA, 20 bp, Artificial Sequence
  Synthetic: FXN 3 forward 9:69046100-69046126; SaCas9
tacagttagaaaagcttgcc

SEQ ID NO: 25699 - DNA, 19 bp, Artificial Sequence
  Synthetic: FXN 3 forward 9:69046101-69046126; SaCas9
acagttagaaaagcttgcc

SEQ ID NO: 25700 - DNA, 18 bp, Artificial Sequence
  Synthetic: FXN 3 forward 9:69046102-69046126; SaCas9
cagttagaaaagcttgcc

SEQ ID NO: 25701 - DNA, 25 bp, Artificial Sequence
  Synthetic: FXN 3 forward 9:69046098-69046129; SaCas9
catacagttagaaaagcttgccctg

SEQ ID NO: 25702 - DNA, 24 bp, Artificial Sequence
  Synthetic: FXN 3 forward 9:69046099-69046129; SaCas9
atacagttagaaaagcttgccctg

SEQ ID NO: 25703 - DNA, 23 bp, Artificial Sequence
  Synthetic: FXN 3 forward 9:69046100-69046129; SaCas9
tacagttagaaaagcttgccctg

SEQ ID NO: 25704 - DNA, 22 bp, Artificial Sequence
  Synthetic: FXN 3 forward 9:69046101-69046129; SaCas9
acagttagaaaagcttgccctg

SEQ ID NO: 25705 - DNA, 21 bp, Artificial Sequence
  Synthetic: FXN 3 forward 9:69046102-69046129; SaCas9
cagttagaaaagcttgccctg

SEQ ID NO: 25706 - DNA, 20 bp, Artificial Sequence
  Synthetic: FXN 3 forward 9:69046103-69046129; SaCas9
agttagaaaagcttgccctg

SEQ ID NO: 25707 - DNA, 19 bp, Artificial Sequence
  Synthetic: FXN 3 forward 9:69046104-69046129; SaCas9
gttagaaaagcttgccctg

SEQ ID NO: 25708 - DNA, 18 bp, Artificial Sequence
  Synthetic: FXN 3 forward 9:69046105-69046129; SaCas9
ttagaaaagcttgccctg

SEQ ID NO: 25709 - DNA, 25 bp, Artificial Sequence
  Synthetic: FXN 3 forward 9:69046099-69046130; SaCas9
atacagttagaaaagcttgccctga

SEQ ID NO: 25710 - DNA, 24 bp, Artificial Sequence
  Synthetic: FXN 3 forward 9:69046100-69046130; SaCas9
tacagttagaaaagcttgccctga

SEQ ID NO: 25711 - DNA, 23 bp, Artificial Sequence
  Synthetic: FXN 3 forward 9:69046101-69046130; SaCas9
acagttagaaaagcttgccctga

SEQ ID NO: 25712 - DNA, 22 bp, Artificial Sequence
  Synthetic: FXN 3 forward 9:69046102-69046130; SaCas9
cagttagaaaagcttgccctga

SEQ ID NO: 25713 - DNA, 21 bp, Artificial Sequence
  Synthetic: FXN 3 forward 9:69046103-69046130; SaCas9
agttagaaaagcttgccctga

SEQ ID NO: 25714 - DNA, 20 bp, Artificial Sequence
  Synthetic: FXN 3 forward 9:69046104-69046130; SaCas9
gttagaaaagcttgccctga

SEQ ID NO: 25715 - DNA, 19 bp, Artificial Sequence
  Synthetic: FXN 3 forward 9:69046105-69046130; SaCas9
ttagaaaagcttgccctga

SEQ ID NO: 25716 - DNA, 18 bp, Artificial Sequence
  Synthetic: FXN 3 forward 9:69046106-69046130; SaCas9
tagaaaagcttgccctga

SEQ ID NO: 25717 - DNA, 25 bp, Artificial Sequence
  Synthetic: FXN 3 forward 9:69046100-69046131; SaCas9
tacagttagaaaagcttgccctgaa

SEQ ID NO: 25718 - DNA, 24 bp, Artificial Sequence
  Synthetic: FXN 3 forward 9:69046101-69046131; SaCas9
acagttagaaaagcttgccctgaa

SEQ ID NO: 25719 - DNA, 23 bp, Artificial Sequence
  Synthetic: FXN 3 forward 9:69046102-69046131; SaCas9
cagttagaaaagcttgccctgaa

SEQ ID NO: 25720 - DNA, 22 bp, Artificial Sequence
  Synthetic: FXN 3 forward 9:69046103-69046131; SaCas9
agttagaaaagcttgccctgaa

SEQ ID NO: 25721 - DNA, 21 bp, Artificial Sequence
  Synthetic: FXN 3 forward 9:69046104-69046131; SaCas9
gttagaaaagcttgccctgaa

SEQ ID NO: 25722 - DNA, 20 bp, Artificial Sequence
  Synthetic: FXN 3 forward 9:69046105-69046131; SaCas9
ttagaaaagcttgccctgaa

SEQ ID NO: 25723 - DNA, 19 bp, Artificial Sequence
  Synthetic: FXN 3 forward 9:69046106-69046131; SaCas9
tagaaaagcttgccctgaa

SEQ ID NO: 25724 - DNA, 18 bp, Artificial Sequence
  Synthetic: FXN 3 forward 9:69046107-69046131; SaCas9
agaaaagcttgccctgaa

SEQ ID NO: 25725 - DNA, 25 bp, Artificial Sequence
  Synthetic: FXN 3 forward 9:69046111-69046142; SaCas9
aagcttgccctgaagggaatgtatg

SEQ ID NO: 25726 - DNA, 24 bp, Artificial Sequence
  Synthetic: FXN 3 forward 9:69046112-69046142; SaCas9
agcttgccctgaagggaatgtatg

SEQ ID NO: 25727 - DNA, 23 bp, Artificial Sequence
  Synthetic: FXN 3 forward 9:69046113-69046142; SaCas9
gcttgccctgaagggaatgtatg

SEQ ID NO: 25728 - DNA, 22 bp, Artificial Sequence
  Synthetic: FXN 3 forward 9:69046114-69046142; SaCas9
cttgccctgaagggaatgtatg

SEQ ID NO: 25729 - DNA, 21 bp, Artificial Sequence
  Synthetic: FXN 3 forward 9:69046115-69046142; SaCas9
ttgccctgaagggaatgtatg

SEQ ID NO: 25730 - DNA, 20 bp, Artificial Sequence
  Synthetic: FXN 3 forward 9:69046116-69046142; SaCas9
tgccctgaagggaatgtatg

SEQ ID NO: 25731 - DNA, 19 bp, Artificial Sequence
  Synthetic: FXN 3 forward 9:69046117-69046142; SaCas9
gccctgaagggaatgtatg

SEQ ID NO: 25732 - DNA, 18 bp, Artificial Sequence
  Synthetic: FXN 3 forward 9:69046118-69046142; SaCas9
ccctgaagggaatgtatg

SEQ ID NO: 25733 - DNA, 25 bp, Artificial Sequence
  Synthetic: FXN 3 forward 9:69046114-69046145; SaCas9
cttgccctgaagggaatgtatggtg

SEQ ID NO: 25734 - DNA, 24 bp, Artificial Sequence
  Synthetic: FXN 3 forward 9:69046115-69046145; SaCas9
ttgccctgaagggaatgtatggtg

SEQ ID NO: 25735 - DNA, 23 bp, Artificial Sequence
  Synthetic: FXN 3 forward 9:69046116-69046145; SaCas9
tgccctgaagggaatgtatggtg

SEQ ID NO: 25736 - DNA, 22 bp, Artificial Sequence
  Synthetic: FXN 3 forward 9:69046117-69046145; SaCas9
gccctgaagggaatgtatggtg

SEQ ID NO: 25737 - DNA, 21 bp, Artificial Sequence
  Synthetic: FXN 3 forward 9:69046118-69046145; SaCas9
ccctgaagggaatgtatggtg

SEQ ID NO: 25738 - DNA, 20 bp, Artificial Sequence
  Synthetic: FXN 3 forward 9:69046119-69046145; SaCas9
cctgaagggaatgtatggtg

SEQ ID NO: 25739 - DNA, 19 bp, Artificial Sequence
  Synthetic: FXN 3 forward 9:69046120-69046145; SaCas9
ctgaagggaatgtatggtg

SEQ ID NO: 25740 - DNA, 18 bp, Artificial Sequence
  Synthetic: FXN 3 forward 9:69046121-69046145; SaCas9
tgaagggaatgtatggtg

SEQ ID NO: 25741 - DNA, 25 bp, Artificial Sequence
  Synthetic: FXN 3 forward 9:69046115-69046146; SaCas9
ttgccctgaagggaatgtatggtga

SEQ ID NO: 25742 - DNA, 24 bp, Artificial Sequence
  Synthetic: FXN 3 forward 9:69046116-69046146; SaCas9
tgccctgaagggaatgtatggtga

SEQ ID NO: 25743 - DNA, 23 bp, Artificial Sequence
  Synthetic: FXN 3 forward 9:69046117-69046146; SaCas9
gccctgaagggaatgtatggtga

SEQ ID NO: 25744 - DNA, 22 bp, Artificial Sequence
  Synthetic: FXN 3 forward 9:69046118-69046146; SaCas9
ccctgaagggaatgtatggtga

SEQ ID NO: 25745 - DNA, 21 bp, Artificial Sequence
  Synthetic: FXN 3 forward 9:69046119-69046146; SaCas9
cctgaagggaatgtatggtga

SEQ ID NO: 25746 - DNA, 20 bp, Artificial Sequence
  Synthetic: FXN 3 forward 9:69046120-69046146; SaCas9
ctgaagggaatgtatggtga

SEQ ID NO: 25747 - DNA, 19 bp, Artificial Sequence
  Synthetic: FXN 3 forward 9:69046121-69046146; SaCas9
tgaagggaatgtatggtga

SEQ ID NO: 25748 - DNA, 18 bp, Artificial Sequence
  Synthetic: FXN 3 forward 9:69046122-69046146; SaCas9
gaagggaatgtatggtga

SEQ ID NO: 25749 - DNA, 25 bp, Artificial Sequence
  Synthetic: FXN 3 forward 9:69046116-69046147; SaCas9
tgccctgaagggaatgtatggtgaa

SEQ ID NO: 25750 - DNA, 24 bp, Artificial Sequence
  Synthetic: FXN 3 forward 9:69046117-69046147; SaCas9
gccctgaagggaatgtatggtgaa

SEQ ID NO: 25751 - DNA, 23 bp, Artificial Sequence
  Synthetic: FXN 3 forward 9:69046118-69046147; SaCas9
ccctgaagggaatgtatggtgaa

SEQ ID NO: 25752 - DNA, 22 bp, Artificial Sequence
  Synthetic: FXN 3 forward 9:69046119-69046147; SaCas9
cctgaagggaatgtatggtgaa

SEQ ID NO: 25753 - DNA, 21 bp, Artificial Sequence
  Synthetic: FXN 3 forward 9:69046120-69046147; SaCas9
ctgaagggaatgtatggtgaa

SEQ ID NO: 25754 - DNA, 20 bp, Artificial Sequence
  Synthetic: FXN 3 forward 9:69046121-69046147; SaCas9
tgaagggaatgtatggtgaa

SEQ ID NO: 25755 - DNA, 19 bp, Artificial Sequence
  Synthetic: FXN 3 forward 9:69046122-69046147; SaCas9
gaagggaatgtatggtgaa

SEQ ID NO: 25756 - DNA, 18 bp, Artificial Sequence
  Synthetic: FXN 3 forward 9:69046123-69046147; SaCas9
aagggaatgtatggtgaa

SEQ ID NO: 25757 - DNA, 25 bp, Artificial Sequence
  Synthetic: FXN 3 forward 9:69046117-69046148; SaCas9
gccctgaagggaatgtatggtgaag

SEQ ID NO: 25758 - DNA, 24 bp, Artificial Sequence
  Synthetic: FXN 3 forward 9:69046118-69046148; SaCas9
ccctgaagggaatgtatggtgaag

SEQ ID NO: 25759 - DNA, 23 bp, Artificial Sequence
  Synthetic: FXN 3 forward 9:69046119-69046148; SaCas9
cctgaagggaatgtatggtgaag

SEQ ID NO: 25760 - DNA, 22 bp, Artificial Sequence
  Synthetic: FXN 3 forward 9:69046120-69046148; SaCas9
ctgaagggaatgtatggtgaag

SEQ ID NO: 25761 - DNA, 21 bp, Artificial Sequence
  Synthetic: FXN 3 forward 9:69046121-69046148; SaCas9
tgaagggaatgtatggtgaag

SEQ ID NO: 25762 - DNA, 20 bp, Artificial Sequence
  Synthetic: FXN 3 forward 9:69046122-69046148; SaCas9
gaagggaatgtatggtgaag

SEQ ID NO: 25763 - DNA, 19 bp, Artificial Sequence
  Synthetic: FXN 3 forward 9:69046123-69046148; SaCas9
aagggaatgtatggtgaag

SEQ ID NO: 25764 - DNA, 18 bp, Artificial Sequence
  Synthetic: FXN 3 forward 9:69046124-69046148; SaCas9
agggaatgtatggtgaag

SEQ ID NO: 25765 - DNA, 25 bp, Artificial Sequence
  Synthetic: FXN 3 reverse 9:69046117-69046148; SaCas9
cctccccttcaccatacattccctt

SEQ ID NO: 25766 - DNA, 24 bp, Artificial Sequence
  Synthetic: FXN 3 reverse 9:69046118-69046148; SaCas9
ctccccttcaccatacattccctt

SEQ ID NO: 25767 - DNA, 23 bp, Artificial Sequence
  Synthetic: FXN 3 reverse 9:69046119-69046148; SaCas9
tccccttcaccatacattccctt

SEQ ID NO: 25768 - DNA, 22 bp, Artificial Sequence
  Synthetic: FXN 3 reverse 9:69046120-69046148; SaCas9
ccccttcaccatacattccctt

SEQ ID NO: 25769 - DNA, 21 bp, Artificial Sequence
  Synthetic: FXN 3 reverse 9:69046121-69046148; SaCas9
cccttcaccatacattccctt

SEQ ID NO: 25770 - DNA, 20 bp, Artificial Sequence
  Synthetic: FXN 3 reverse 9:69046122-69046148; SaCas9
ccttcaccatacattccctt

SEQ ID NO: 25771 - DNA, 19 bp, Artificial Sequence
  Synthetic: FXN 3 reverse 9:69046123-69046148; SaCas9
cttcaccatacattccctt

SEQ ID NO: 25772 - DNA, 18 bp, Artificial Sequence
  Synthetic: FXN 3 reverse 9:69046124-69046148; SaCas9
ttcaccatacattccctt

SEQ ID NO: 25773 - DNA, 25 bp, Artificial Sequence
  Synthetic: FXN 3 forward 9:69046122-69046153; SaCas9
gaagggaatgtatggtgaaggggag

SEQ ID NO: 25774 - DNA, 24 bp, Artificial Sequence
  Synthetic: FXN 3 forward 9:69046123-69046153; SaCas9
aagggaatgtatggtgaaggggag

SEQ ID NO: 25775 - DNA, 23 bp, Artificial Sequence
  Synthetic: FXN 3 forward 9:69046124-69046153; SaCas9
agggaatgtatggtgaaggggag

SEQ ID NO: 25776 - DNA, 22 bp, Artificial Sequence
  Synthetic: FXN 3 forward 9:69046125-69046153; SaCas9
gggaatgtatggtgaaggggag

SEQ ID NO: 25777 - DNA, 21 bp, Artificial Sequence
  Synthetic: FXN 3 forward 9:69046126-69046153; SaCas9
ggaatgtatggtgaaggggag

SEQ ID NO: 25778 - DNA, 20 bp, Artificial Sequence
  Synthetic: FXN 3 forward 9:69046127-69046153; SaCas9
gaatgtatggtgaaggggag

SEQ ID NO: 25779 - DNA, 19 bp, Artificial Sequence
  Synthetic: FXN 3 forward 9:69046128-69046153; SaCas9
aatgtatggtgaaggggag

SEQ ID NO: 25780 - DNA, 18 bp, Artificial Sequence
  Synthetic: FXN 3 forward 9:69046129-69046153; SaCas9
atgtatggtgaaggggag

SEQ ID NO: 25781 - DNA, 25 bp, Artificial Sequence
  Synthetic: FXN 3 forward 9:69046144-69046175; SaCas9
gaggtgaaaggttatatttgcattt

SEQ ID NO: 25782 - DNA, 24 bp, Artificial Sequence
  Synthetic: FXN 3 forward 9:69046145-69046175; SaCas9
aggtgaaaggttatatttgcattt

SEQ ID NO: 25783 - DNA, 23 bp, Artificial Sequence
  Synthetic: FXN 3 forward 9:69046146-69046175; SaCas9
ggtgaaaggttatatttgcattt

SEQ ID NO: 25784 - DNA, 22 bp, Artificial Sequence
  Synthetic: FXN 3 forward 9:69046147-69046175; SaCas9
gtgaaaggttatatttgcattt

SEQ ID NO: 25785 - DNA, 21 bp, Artificial Sequence
  Synthetic: FXN 3 forward 9:69046148-69046175; SaCas9
tgaaaggttatatttgcattt

SEQ ID NO: 25786 - DNA, 20 bp, Artificial Sequence
  Synthetic: FXN 3 forward 9:69046149-69046175; SaCas9
gaaaggttatatttgcattt

SEQ ID NO: 25787 - DNA, 19 bp, Artificial Sequence
  Synthetic: FXN 3 forward 9:69046150-69046175; SaCas9
aaaggttatatttgcattt

SEQ ID NO: 25788 - DNA, 18 bp, Artificial Sequence
  Synthetic: FXN 3 forward 9:69046151-69046175; SaCas9
aaggttatatttgcattt

SEQ ID NO: 25789 - DNA, 25 bp, Artificial Sequence
  Synthetic: FXN 3 forward 9:69046147-69046178; SaCas9
gtgaaaggttatatttgcatttctg

SEQ ID NO: 25790 - DNA, 24 bp, Artificial Sequence
  Synthetic: FXN 3 forward 9:69046148-69046178; SaCas9
tgaaaggttatatttgcatttctg

SEQ ID NO: 25791 - DNA, 23 bp, Artificial Sequence
  Synthetic: FXN 3 forward 9:69046149-69046178; SaCas9
gaaaggttatatttgcatttctg

SEQ ID NO: 25792 - DNA, 22 bp, Artificial Sequence
  Synthetic: FXN 3 forward 9:69046150-69046178; SaCas9
aaaggttatatttgcatttctg

SEQ ID NO: 25793 - DNA, 21 bp, Artificial Sequence
  Synthetic: FXN 3 forward 9:69046151-69046178; SaCas9
aaggttatatttgcatttctg

SEQ ID NO: 25794 - DNA, 20 bp, Artificial Sequence
  Synthetic: FXN 3 forward 9:69046152-69046178; SaCas9
aggttatatttgcatttctg

SEQ ID NO: 25795 - DNA, 19 bp, Artificial Sequence
  Synthetic: FXN 3 forward 9:69046153-69046178; SaCas9
ggttatatttgcatttctg

SEQ ID NO: 25796 - DNA, 18 bp, Artificial Sequence
  Synthetic: FXN 3 forward 9:69046154-69046178; SaCas9
gttatatttgcatttctg

SEQ ID NO: 25797 - DNA, 25 bp, Artificial Sequence
  Synthetic: FXN 3 forward 9:69046157-69046188; SaCas9
atatttgcatttctgaagggctaag

SEQ ID NO: 25798 - DNA, 24 bp, Artificial Sequence
  Synthetic: FXN 3 forward 9:69046158-69046188; SaCas9
tatttgcatttctgaagggctaag

SEQ ID NO: 25799 - DNA, 23 bp, Artificial Sequence
  Synthetic: FXN 3 forward 9:69046159-69046188; SaCas9
atttgcatttctgaagggctaag

SEQ ID NO: 25800 - DNA, 22 bp, Artificial Sequence
  Synthetic: FXN 3 forward 9:69046160-69046188; SaCas9
tttgcatttctgaagggctaag

SEQ ID NO: 25801 - DNA, 21 bp, Artificial Sequence
  Synthetic: FXN 3 forward 9:69046161-69046188; SaCas9
ttgcatttctgaagggctaag

SEQ ID NO: 25802 - DNA, 20 bp, Artificial Sequence
  Synthetic: FXN 3 forward 9:69046162-69046188; SaCas9
tgcatttctgaagggctaag

SEQ ID NO: 25803 - DNA, 19 bp, Artificial Sequence
  Synthetic: FXN 3 forward 9:69046163-69046188; SaCas9
gcatttctgaagggctaag

SEQ ID NO: 25804 - DNA, 18 bp, Artificial Sequence
  Synthetic: FXN 3 forward 9:69046164-69046188; SaCas9
catttctgaagggctaag

SEQ ID NO: 25805 - DNA, 25 bp, Artificial Sequence
  Synthetic: FXN 3 forward 9:69046158-69046189; SaCas9
tatttgcatttctgaagggctaagt

SEQ ID NO: 25806 - DNA, 24 bp, Artificial Sequence
  Synthetic: FXN 3 forward 9:69046159-69046189; SaCas9
atttgcatttctgaagggctaagt

SEQ ID NO: 25807 - DNA, 23 bp, Artificial Sequence
  Synthetic: FXN 3 forward 9:69046160-69046189; SaCas9
tttgcatttctgaagggctaagt

SEQ ID NO: 25808 - DNA, 22 bp, Artificial Sequence
  Synthetic: FXN 3 forward 9:69046161-69046189; SaCas9
ttgcatttctgaagggctaagt

SEQ ID NO: 25809 - DNA, 21 bp, Artificial Sequence
  Synthetic: FXN 3 forward 9:69046162-69046189; SaCas9
tgcatttctgaagggctaagt

SEQ ID NO: 25810 - DNA, 20 bp, Artificial Sequence
  Synthetic: FXN 3 forward 9:69046163-69046189; SaCas9
gcatttctgaagggctaagt

SEQ ID NO: 25811 - DNA, 19 bp, Artificial Sequence
  Synthetic: FXN 3 forward 9:69046164-69046189; SaCas9
catttctgaagggctaagt

SEQ ID NO: 25812 - DNA, 18 bp, Artificial Sequence
  Synthetic: FXN 3 forward 9:69046165-69046189; SaCas9
atttctgaagggctaagt

SEQ ID NO: 25813 - DNA, 25 bp, Artificial Sequence
  Synthetic: FXN 3 forward 9:69046164-69046195; SaCas9
catttctgaagggctaagtaggaaa

SEQ ID NO: 25814 - DNA, 24 bp, Artificial Sequence
  Synthetic: FXN 3 forward 9:69046165-69046195; SaCas9
atttctgaagggctaagtaggaaa

SEQ ID NO: 25815 - DNA, 23 bp, Artificial Sequence
  Synthetic: FXN 3 forward 9:69046166-69046195; SaCas9
tttctgaagggctaagtaggaaa

SEQ ID NO: 25816 - DNA, 22 bp, Artificial Sequence
  Synthetic: FXN 3 forward 9:69046167-69046195; SaCas9
ttctgaagggctaagtaggaaa

SEQ ID NO: 25817 - DNA, 21 bp, Artificial Sequence
  Synthetic: FXN 3 forward 9:69046168-69046195; SaCas9
tctgaagggctaagtaggaaa

SEQ ID NO: 25818 - DNA, 20 bp, Artificial Sequence
  Synthetic: FXN 3 forward 9:69046169-69046195; SaCas9
ctgaagggctaagtaggaaa

SEQ ID NO: 25819 - DNA, 19 bp, Artificial Sequence
  Synthetic: FXN 3 forward 9:69046170-69046195; SaCas9
tgaagggctaagtaggaaa

SEQ ID NO: 25820 - DNA, 18 bp, Artificial Sequence
  Synthetic: FXN 3 forward 9:69046171-69046195; SaCas9
gaagggctaagtaggaaa

SEQ ID NO: 25821 - DNA, 25 bp, Artificial Sequence
  Synthetic: FXN 3 forward 9:69046165-69046196; SaCas9
atttctgaagggctaagtaggaaac

SEQ ID NO: 25822 - DNA, 24 bp, Artificial Sequence
  Synthetic: FXN 3 forward 9:69046166-69046196; SaCas9
tttctgaagggctaagtaggaaac

SEQ ID NO: 25823 - DNA, 23 bp, Artificial Sequence
  Synthetic: FXN 3 forward 9:69046167-69046196; SaCas9
ttctgaagggctaagtaggaaac

SEQ ID NO: 25824 - DNA, 22 bp, Artificial Sequence
  Synthetic: FXN 3 forward 9:69046168-69046196; SaCas9
tctgaagggctaagtaggaaac

SEQ ID NO: 25825 - DNA, 21 bp, Artificial Sequence
  Synthetic: FXN 3 forward 9:69046169-69046196; SaCas9
ctgaagggctaagtaggaaac

SEQ ID NO: 25826 - DNA, 20 bp, Artificial Sequence
  Synthetic: FXN 3 forward 9:69046170-69046196; SaCas9
tgaagggctaagtaggaaac

SEQ ID NO: 25827 - DNA, 19 bp, Artificial Sequence
  Synthetic: FXN 3 forward 9:69046171-69046196; SaCas9
gaagggctaagtaggaaac

SEQ ID NO: 25828 - DNA, 18 bp, Artificial Sequence
  Synthetic: FXN 3 forward 9:69046172-69046196; SaCas9
aagggctaagtaggaaac

SEQ ID NO: 25829 - DNA, 25 bp, Artificial Sequence
  Synthetic: FXN 3 forward 9:69046166-69046197; SaCas9
tttctgaagggctaagtaggaaacc

SEQ ID NO: 25830 - DNA, 24 bp, Artificial Sequence
  Synthetic: FXN 3 forward 9:69046167-69046197; SaCas9
ttctgaagggctaagtaggaaacc

SEQ ID NO: 25831 - DNA, 23 bp, Artificial Sequence
  Synthetic: FXN 3 forward 9:69046168-69046197; SaCas9
tctgaagggctaagtaggaaacc

SEQ ID NO: 25832 - DNA, 22 bp, Artificial Sequence
  Synthetic: FXN 3 forward 9:69046169-69046197; SaCas9
ctgaagggctaagtaggaaacc

SEQ ID NO: 25833 - DNA, 21 bp, Artificial Sequence
  Synthetic: FXN 3 forward 9:69046170-69046197; SaCas9
tgaagggctaagtaggaaacc

SEQ ID NO: 25834 - DNA, 20 bp, Artificial Sequence
  Synthetic: FXN 3 forward 9:69046171-69046197; SaCas9
gaagggctaagtaggaaacc

SEQ ID NO: 25835 - DNA, 19 bp, Artificial Sequence
  Synthetic: FXN 3 forward 9:69046172-69046197; SaCas9
aagggctaagtaggaaacc

SEQ ID NO: 25836 - DNA, 18 bp, Artificial Sequence
  Synthetic: FXN 3 forward 9:69046173-69046197; SaCas9
agggctaagtaggaaacc

SEQ ID NO: 25837 - DNA, 25 bp, Artificial Sequence
  Synthetic: FXN 3 reverse 9:69046166-69046197; SaCas9
gttcccggtttcctacttagccctt

SEQ ID NO: 25838 - DNA, 24 bp, Artificial Sequence
  Synthetic: FXN 3 reverse 9:69046167-69046197; SaCas9
ttcccggtttcctacttagccctt

SEQ ID NO: 25839 - DNA, 23 bp, Artificial Sequence
  Synthetic: FXN 3 reverse 9:69046168-69046197; SaCas9
tcccggtttcctacttagccctt

SEQ ID NO: 25840 - DNA, 22 bp, Artificial Sequence
  Synthetic: FXN 3 reverse 9:69046169-69046197; SaCas9
cccggtttcctacttagccctt

SEQ ID NO: 25841 - DNA, 21 bp, Artificial Sequence
  Synthetic: FXN 3 reverse 9:69046170-69046197; SaCas9
ccggtttcctacttagccctt

SEQ ID NO: 25842 - DNA, 20 bp, Artificial Sequence
  Synthetic: FXN 3 reverse 9:69046171-69046197; SaCas9
cggtttcctacttagccctt

SEQ ID NO: 25843 - DNA, 19 bp, Artificial Sequence
  Synthetic: FXN 3 reverse 9:69046172-69046197; SaCas9
ggtttcctacttagccctt

SEQ ID NO: 25844 - DNA, 18 bp, Artificial Sequence
  Synthetic: FXN 3 reverse 9:69046173-69046197; SaCas9
gtttcctacttagccctt

SEQ ID NO: 25845 - DNA, 25 bp, Artificial Sequence
  Synthetic: FXN 3 forward 9:69046172-69046203; SaCas9
aagggctaagtaggaaaccgggaac

SEQ ID NO: 25846 - DNA, 24 bp, Artificial Sequence
  Synthetic: FXN 3 forward 9:69046173-69046203; SaCas9
agggctaagtaggaaaccgggaac

SEQ ID NO: 25847 - DNA, 23 bp, Artificial Sequence
  Synthetic: FXN 3 forward 9:69046174-69046203; SaCas9
gggctaagtaggaaaccgggaac

SEQ ID NO: 25848 - DNA, 22 bp, Artificial Sequence
  Synthetic: FXN 3 forward 9:69046175-69046203; SaCas9
ggctaagtaggaaaccgggaac

SEQ ID NO: 25849 - DNA, 21 bp, Artificial Sequence
  Synthetic: FXN 3 forward 9:69046176-69046203; SaCas9
gctaagtaggaaaccgggaac

SEQ ID NO: 25850 - DNA, 20 bp, Artificial Sequence
  Synthetic: FXN 3 forward 9:69046177-69046203; SaCas9
ctaagtaggaaaccgggaac

SEQ ID NO: 25851 - DNA, 19 bp, Artificial Sequence
  Synthetic: FXN 3 forward 9:69046178-69046203; SaCas9
taagtaggaaaccgggaac

SEQ ID NO: 25852 - DNA, 18 bp, Artificial Sequence
  Synthetic: FXN 3 forward 9:69046179-69046203; SaCas9
aagtaggaaaccgggaac

SEQ ID NO: 25853 - DNA, 25 bp, Artificial Sequence
  Synthetic: FXN 3 forward 9:69046173-69046204; SaCas9
agggctaagtaggaaaccgggaacc

SEQ ID NO: 25854 - DNA, 24 bp, Artificial Sequence
  Synthetic: FXN 3 forward 9:69046174-69046204; SaCas9
gggctaagtaggaaaccgggaacc

SEQ ID NO: 25855 - DNA, 23 bp, Artificial Sequence
  Synthetic: FXN 3 forward 9:69046175-69046204; SaCas9
ggctaagtaggaaaccgggaacc

SEQ ID NO: 25856 - DNA, 22 bp, Artificial Sequence
  Synthetic: FXN 3 forward 9:69046176-69046204; SaCas9
gctaagtaggaaaccgggaacc

SEQ ID NO: 25857 - DNA, 21 bp, Artificial Sequence
  Synthetic: FXN 3 forward 9:69046177-69046204; SaCas9
ctaagtaggaaaccgggaacc

SEQ ID NO: 25858 - DNA, 20 bp, Artificial Sequence
  Synthetic: FXN 3 forward 9:69046178-69046204; SaCas9
taagtaggaaaccgggaacc

SEQ ID NO: 25859 - DNA, 19 bp, Artificial Sequence
  Synthetic: FXN 3 forward 9:69046179-69046204; SaCas9
aagtaggaaaccgggaacc

SEQ ID NO: 25860 - DNA, 18 bp, Artificial Sequence
  Synthetic: FXN 3 forward 9:69046180-69046204; SaCas9
agtaggaaaccgggaacc

SEQ ID NO: 25861 - DNA, 25 bp, Artificial Sequence
  Synthetic: FXN 3 forward 9:69046174-69046205; SaCas9
gggctaagtaggaaaccgggaacca

SEQ ID NO: 25862 - DNA, 24 bp, Artificial Sequence
  Synthetic: FXN 3 forward 9:69046175-69046205; SaCas9
ggctaagtaggaaaccgggaacca

SEQ ID NO: 25863 - DNA, 23 bp, Artificial Sequence
  Synthetic: FXN 3 forward 9:69046176-69046205; SaCas9
gctaagtaggaaaccgggaacca

SEQ ID NO: 25864 - DNA, 22 bp, Artificial Sequence
  Synthetic: FXN 3 forward 9:69046177-69046205; SaCas9
ctaagtaggaaaccgggaacca

SEQ ID NO: 25865 - DNA, 21 bp, Artificial Sequence
  Synthetic: FXN 3 forward 9:69046178-69046205; SaCas9
taagtaggaaaccgggaacca

SEQ ID NO: 25866 - DNA, 20 bp, Artificial Sequence
  Synthetic: FXN 3 forward 9:69046179-69046205; SaCas9
aagtaggaaaccgggaacca

SEQ ID NO: 25867 - DNA, 19 bp, Artificial Sequence
  Synthetic: FXN 3 forward 9:69046180-69046205; SaCas9
agtaggaaaccgggaacca

SEQ ID NO: 25868 - DNA, 18 bp, Artificial Sequence
  Synthetic: FXN 3 forward 9:69046181-69046205; SaCas9
gtaggaaaccgggaacca

SEQ ID NO: 25869 - DNA, 25 bp, Artificial Sequence
  Synthetic: FXN 3 forward 9:69046175-69046206; SaCas9
ggctaagtaggaaaccgggaaccag

SEQ ID NO: 25870 - DNA, 24 bp, Artificial Sequence
  Synthetic: FXN 3 forward 9:69046176-69046206; SaCas9
gctaagtaggaaaccgggaaccag

SEQ ID NO: 25871 - DNA, 23 bp, Artificial Sequence
  Synthetic: FXN 3 forward 9:69046177-69046206; SaCas9
ctaagtaggaaaccgggaaccag

SEQ ID NO: 25872 - DNA, 22 bp, Artificial Sequence
  Synthetic: FXN 3 forward 9:69046178-69046206; SaCas9
taagtaggaaaccgggaaccag

SEQ ID NO: 25873 - DNA, 21 bp, Artificial Sequence
  Synthetic: FXN 3 forward 9:69046179-69046206; SaCas9
aagtaggaaaccgggaaccag

SEQ ID NO: 25874 - DNA, 20 bp, Artificial Sequence
  Synthetic: FXN 3 forward 9:69046180-69046206; SaCas9
agtaggaaaccgggaaccag

SEQ ID NO: 25875 - DNA, 19 bp, Artificial Sequence
  Synthetic: FXN 3 forward 9:69046181-69046206; SaCas9
gtaggaaaccgggaaccag

SEQ ID NO: 25876 - DNA, 18 bp, Artificial Sequence
  Synthetic: FXN 3 forward 9:69046182-69046206; SaCas9
taggaaaccgggaaccag

SEQ ID NO: 25877 - DNA, 25 bp, Artificial Sequence
  Synthetic: FXN 3 forward 9:69046177-69046208; SaCas9
ctaagtaggaaaccgggaaccaggg

SEQ ID NO: 25878 - DNA, 24 bp, Artificial Sequence
  Synthetic: FXN 3 forward 9:69046178-69046208; SaCas9
taagtaggaaaccgggaaccaggg

SEQ ID NO: 25879 - DNA, 23 bp, Artificial Sequence
  Synthetic: FXN 3 forward 9:69046179-69046208; SaCas9
aagtaggaaaccgggaaccaggg

SEQ ID NO: 25880 - DNA, 22 bp, Artificial Sequence
  Synthetic: FXN 3 forward 9:69046180-69046208; SaCas9
agtaggaaaccgggaaccaggg

SEQ ID NO: 25881 - DNA, 21 bp, Artificial Sequence
  Synthetic: FXN 3 forward 9:69046181-69046208; SaCas9
gtaggaaaccgggaaccaggg

SEQ ID NO: 25882 - DNA, 20 bp, Artificial Sequence
  Synthetic: FXN 3 forward 9:69046182-69046208; SaCas9
taggaaaccgggaaccaggg

SEQ ID NO: 25883 - DNA, 19 bp, Artificial Sequence
  Synthetic: FXN 3 forward 9:69046183-69046208; SaCas9
aggaaaccgggaaccaggg

SEQ ID NO: 25884 - DNA, 18 bp, Artificial Sequence
  Synthetic: FXN 3 forward 9:69046184-69046208; SaCas9
ggaaaccgggaaccaggg

SEQ ID NO: 25885 - DNA, 25 bp, Artificial Sequence
  Synthetic: FXN 3 forward 9:69046179-69046210; SaCas9
aagtaggaaaccgggaaccagggga

SEQ ID NO: 25886 - DNA, 24 bp, Artificial Sequence
  Synthetic: FXN 3 forward 9:69046180-69046210; SaCas9
agtaggaaaccgggaaccagggga

SEQ ID NO: 25887 - DNA, 23 bp, Artificial Sequence
  Synthetic: FXN 3 forward 9:69046181-69046210; SaCas9
gtaggaaaccgggaaccagggga

SEQ ID NO: 25888 - DNA, 22 bp, Artificial Sequence
  Synthetic: FXN 3 forward 9:69046182-69046210; SaCas9
taggaaaccgggaaccagggga

SEQ ID NO: 25889 - DNA, 21 bp, Artificial Sequence
  Synthetic: FXN 3 forward 9:69046183-69046210; SaCas9
aggaaaccgggaaccagggga

SEQ ID NO: 25890 - DNA, 20 bp, Artificial Sequence
  Synthetic: FXN 3 forward 9:69046184-69046210; SaCas9
ggaaaccgggaaccagggga

SEQ ID NO: 25891 - DNA, 19 bp, Artificial Sequence
  Synthetic: FXN 3 forward 9:69046185-69046210; SaCas9
gaaaccgggaaccagggga

SEQ ID NO: 25892 - DNA, 18 bp, Artificial Sequence
  Synthetic: FXN 3 forward 9:69046186-69046210; SaCas9
aaaccgggaaccagggga

SEQ ID NO: 25893 - DNA, 25 bp, Artificial Sequence
  Synthetic: FXN 3 forward 9:69046180-69046211; SaCas9
agtaggaaaccgggaaccaggggag

SEQ ID NO: 25894 - DNA, 24 bp, Artificial Sequence
  Synthetic: FXN 3 forward 9:69046181-69046211; SaCas9
gtaggaaaccgggaaccaggggag

SEQ ID NO: 25895 - DNA, 23 bp, Artificial Sequence
  Synthetic: FXN 3 forward 9:69046182-69046211; SaCas9
taggaaaccgggaaccaggggag

SEQ ID NO: 25896 - DNA, 22 bp, Artificial Sequence
  Synthetic: FXN 3 forward 9:69046183-69046211; SaCas9
aggaaaccgggaaccaggggag

SEQ ID NO: 25897 - DNA, 21 bp, Artificial Sequence
  Synthetic: FXN 3 forward 9:69046184-69046211; SaCas9
ggaaaccgggaaccaggggag

SEQ ID NO: 25898 - DNA, 20 bp, Artificial Sequence
  Synthetic: FXN 3 forward 9:69046185-69046211; SaCas9
gaaaccgggaaccaggggag

SEQ ID NO: 25899 - DNA, 19 bp, Artificial Sequence
  Synthetic: FXN 3 forward 9:69046186-69046211; SaCas9
aaaccgggaaccaggggag

SEQ ID NO: 25900 - DNA, 18 bp, Artificial Sequence
  Synthetic: FXN 3 forward 9:69046187-69046211; SaCas9
aaccgggaaccaggggag

SEQ ID NO: 25901 - DNA, 25 bp, Artificial Sequence
  Synthetic: FXN 3 forward 9:69046182-69046213; SaCas9
taggaaaccgggaaccaggggagag

SEQ ID NO: 25902 - DNA, 24 bp, Artificial Sequence
  Synthetic: FXN 3 forward 9:69046183-69046213; SaCas9
aggaaaccgggaaccaggggagag

SEQ ID NO: 25903 - DNA, 23 bp, Artificial Sequence
  Synthetic: FXN 3 forward 9:69046184-69046213; SaCas9
ggaaaccgggaaccaggggagag

SEQ ID NO: 25904 - DNA, 22 bp, Artificial Sequence
  Synthetic: FXN 3 forward 9:69046185-69046213; SaCas9
gaaaccgggaaccaggggagag

SEQ ID NO: 25905 - DNA, 21 bp, Artificial Sequence
  Synthetic: FXN 3 forward 9:69046186-69046213; SaCas9
aaaccgggaaccaggggagag

SEQ ID NO: 25906 - DNA, 20 bp, Artificial Sequence
  Synthetic: FXN 3 forward 9:69046187-69046213; SaCas9
aaccgggaaccaggggagag

SEQ ID NO: 25907 - DNA, 19 bp, Artificial Sequence
  Synthetic: FXN 3 forward 9:69046188-69046213; SaCas9
accgggaaccaggggagag

SEQ ID NO: 25908 - DNA, 18 bp, Artificial Sequence
  Synthetic: FXN 3 forward 9:69046189-69046213; SaCas9
ccgggaaccaggggagag

SEQ ID NO: 25909 - DNA, 25 bp, Artificial Sequence
  Synthetic: FXN 3 forward 9:69046185-69046216; SaCas9
gaaaccgggaaccaggggagaggag

SEQ ID NO: 25910 - DNA, 24 bp, Artificial Sequence
  Synthetic: FXN 3 forward 9:69046186-69046216; SaCas9
aaaccgggaaccaggggagaggag

SEQ ID NO: 25911 - DNA, 23 bp, Artificial Sequence
  Synthetic: FXN 3 forward 9:69046187-69046216; SaCas9
aaccgggaaccaggggagaggag

SEQ ID NO: 25912 - DNA, 22 bp, Artificial Sequence
  Synthetic: FXN 3 forward 9:69046188-69046216; SaCas9
accgggaaccaggggagaggag

SEQ ID NO: 25913 - DNA, 21 bp, Artificial Sequence
  Synthetic: FXN 3 forward 9:69046189-69046216; SaCas9
ccgggaaccaggggagaggag

SEQ ID NO: 25914 - DNA, 20 bp, Artificial Sequence
  Synthetic: FXN 3 forward 9:69046190-69046216; SaCas9
cgggaaccaggggagaggag

SEQ ID NO: 25915 - DNA, 19 bp, Artificial Sequence
  Synthetic: FXN 3 forward 9:69046191-69046216; SaCas9
gggaaccaggggagaggag

SEQ ID NO: 25916 - DNA, 18 bp, Artificial Sequence
  Synthetic: FXN 3 forward 9:69046192-69046216; SaCas9
ggaaccaggggagaggag

SEQ ID NO: 25917 - DNA, 25 bp, Artificial Sequence
  Synthetic: FXN 3 forward 9:69046187-69046218; SaCas9
aaccgggaaccaggggagaggagaa

SEQ ID NO: 25918 - DNA, 24 bp, Artificial Sequence
  Synthetic: FXN 3 forward 9:69046188-69046218; SaCas9
accgggaaccaggggagaggagaa

SEQ ID NO: 25919 - DNA, 23 bp, Artificial Sequence
  Synthetic: FXN 3 forward 9:69046189-69046218; SaCas9
ccgggaaccaggggagaggagaa

SEQ ID NO: 25920 - DNA, 22 bp, Artificial Sequence
  Synthetic: FXN 3 forward 9:69046190-69046218; SaCas9
cgggaaccaggggagaggagaa

SEQ ID NO: 25921 - DNA, 21 bp, Artificial Sequence
  Synthetic: FXN 3 forward 9:69046191-69046218; SaCas9
gggaaccaggggagaggagaa

SEQ ID NO: 25922 - DNA, 20 bp, Artificial Sequence
  Synthetic: FXN 3 forward 9:69046192-69046218; SaCas9
ggaaccaggggagaggagaa

SEQ ID NO: 25923 - DNA, 19 bp, Artificial Sequence
  Synthetic: FXN 3 forward 9:69046193-69046218; SaCas9
gaaccaggggagaggagaa

SEQ ID NO: 25924 - DNA, 18 bp, Artificial Sequence
  Synthetic: FXN 3 forward 9:69046194-69046218; SaCas9
aaccaggggagaggagaa

SEQ ID NO: 25925 - DNA, 25 bp, Artificial Sequence
  Synthetic: FXN 3 forward 9:69046190-69046221; SaCas9
cgggaaccaggggagaggagaagag

SEQ ID NO: 25926 - DNA, 24 bp, Artificial Sequence
  Synthetic: FXN 3 forward 9:69046191-69046221; SaCas9
gggaaccaggggagaggagaagag

SEQ ID NO: 25927 - DNA, 23 bp, Artificial Sequence
  Synthetic: FXN 3 forward 9:69046192-69046221; SaCas9
ggaaccaggggagaggagaagag

SEQ ID NO: 25928 - DNA, 22 bp, Artificial Sequence
  Synthetic: FXN 3 forward 9:69046193-69046221; SaCas9
gaaccaggggagaggagaagag

SEQ ID NO: 25929 - DNA, 21 bp, Artificial Sequence
  Synthetic: FXN 3 forward 9:69046194-69046221; SaCas9
aaccaggggagaggagaagag

SEQ ID NO: 25930 - DNA, 20 bp, Artificial Sequence
  Synthetic: FXN 3 forward 9:69046195-69046221; SaCas9
accaggggagaggagaagag

SEQ ID NO: 25931 - DNA, 19 bp, Artificial Sequence
  Synthetic: FXN 3 forward 9:69046196-69046221; SaCas9
ccaggggagaggagaagag

SEQ ID NO: 25932 - DNA, 18 bp, Artificial Sequence
  Synthetic: FXN 3 forward 9:69046197-69046221; SaCas9
caggggagaggagaagag

SEQ ID NO: 25933 - DNA, 25 bp, Artificial Sequence
  Synthetic: FXN 3 forward 9:69046192-69046223; SaCas9
ggaaccaggggagaggagaagagaa

SEQ ID NO: 25934 - DNA, 24 bp, Artificial Sequence
  Synthetic: FXN 3 forward 9:69046193-69046223; SaCas9
gaaccaggggagaggagaagagaa

SEQ ID NO: 25935 - DNA, 23 bp, Artificial Sequence
  Synthetic: FXN 3 forward 9:69046194-69046223; SaCas9
aaccaggggagaggagaagagaa

SEQ ID NO: 25936 - DNA, 22 bp, Artificial Sequence
  Synthetic: FXN 3 forward 9:69046195-69046223; SaCas9
accaggggagaggagaagagaa

SEQ ID NO: 25937 - DNA, 21 bp, Artificial Sequence
  Synthetic: FXN 3 forward 9:69046196-69046223; SaCas9
ccaggggagaggagaagagaa

SEQ ID NO: 25938 - DNA, 20 bp, Artificial Sequence
  Synthetic: FXN 3 forward 9:69046197-69046223; SaCas9
caggggagaggagaagagaa

SEQ ID NO: 25939 - DNA, 19 bp, Artificial Sequence
  Synthetic: FXN 3 forward 9:69046198-69046223; SaCas9
aggggagaggagaagagaa

SEQ ID NO: 25940 - DNA, 18 bp, Artificial Sequence
  Synthetic: FXN 3 forward 9:69046199-69046223; SaCas9
ggggagaggagaagagaa

SEQ ID NO: 25941 - DNA, 25 bp, Artificial Sequence
  Synthetic: FXN 3 forward 9:69046194-69046225; SaCas9
aaccaggggagaggagaagagaaga

SEQ ID NO: 25942 - DNA, 24 bp, Artificial Sequence
  Synthetic: FXN 3 forward 9:69046195-69046225; SaCas9
accaggggagaggagaagagaaga

SEQ ID NO: 25943 - DNA, 23 bp, Artificial Sequence
  Synthetic: FXN 3 forward 9:69046196-69046225; SaCas9
ccaggggagaggagaagagaaga

SEQ ID NO: 25944 - DNA, 22 bp, Artificial Sequence
  Synthetic: FXN 3 forward 9:69046197-69046225; SaCas9
caggggagaggagaagagaaga

SEQ ID NO: 25945 - DNA, 21 bp, Artificial Sequence
  Synthetic: FXN 3 forward 9:69046198-69046225; SaCas9
aggggagaggagaagagaaga

SEQ ID NO: 25946 - DNA, 20 bp, Artificial Sequence
  Synthetic: FXN 3 forward 9:69046199-69046225; SaCas9
ggggagaggagaagagaaga

SEQ ID NO: 25947 - DNA, 19 bp, Artificial Sequence
  Synthetic: FXN 3 forward 9:69046200-69046225; SaCas9
gggagaggagaagagaaga

SEQ ID NO: 25948 - DNA, 18 bp, Artificial Sequence
  Synthetic: FXN 3 forward 9:69046201-69046225; SaCas9
ggagaggagaagagaaga

SEQ ID NO: 25949 - DNA, 25 bp, Artificial Sequence
  Synthetic: FXN 3 forward 9:69046210-69046241; SaCas9
aagagaagagaggataatttttttt

SEQ ID NO: 25950 - DNA, 24 bp, Artificial Sequence
  Synthetic: FXN 3 forward 9:69046211-69046241; SaCas9
agagaagagaggataatttttttt

SEQ ID NO: 25951 - DNA, 23 bp, Artificial Sequence
  Synthetic: FXN 3 forward 9:69046212-69046241; SaCas9
gagaagagaggataatttttttt

SEQ ID NO: 25952 - DNA, 22 bp, Artificial Sequence
  Synthetic: FXN 3 forward 9:69046213-69046241; SaCas9
agaagagaggataatttttttt

SEQ ID NO: 25953 - DNA, 21 bp, Artificial Sequence
  Synthetic: FXN 3 forward 9:69046214-69046241; SaCas9
gaagagaggataatttttttt

SEQ ID NO: 25954 - DNA, 20 bp, Artificial Sequence
  Synthetic: FXN 3 forward 9:69046215-69046241; SaCas9
aagagaggataatttttttt

SEQ ID NO: 25955 - DNA, 19 bp, Artificial Sequence
  Synthetic: FXN 3 forward 9:69046216-69046241; SaCas9
agagaggataatttttttt

SEQ ID NO: 25956 - DNA, 18 bp, Artificial Sequence
  Synthetic: FXN 3 forward 9:69046217-69046241; SaCas9
gagaggataatttttttt

SEQ ID NO: 25957 - DNA, 25 bp, Artificial Sequence
  Synthetic: FXN 3 forward 9:69046237-69046268; SaCas9
gaaaagcaacatattccctttttct

SEQ ID NO: 25958 - DNA, 24 bp, Artificial Sequence
  Synthetic: FXN 3 forward 9:69046238-69046268; SaCas9
aaaagcaacatattccctttttct

SEQ ID NO: 25959 - DNA, 23 bp, Artificial Sequence
  Synthetic: FXN 3 forward 9:69046239-69046268; SaCas9
aaagcaacatattccctttttct

SEQ ID NO: 25960 - DNA, 22 bp, Artificial Sequence
  Synthetic: FXN 3 forward 9:69046240-69046268; SaCas9
aagcaacatattccctttttct

SEQ ID NO: 25961 - DNA, 21 bp, Artificial Sequence
  Synthetic: FXN 3 forward 9:69046241-69046268; SaCas9
agcaacatattccctttttct

SEQ ID NO: 25962 - DNA, 20 bp, Artificial Sequence
  Synthetic: FXN 3 forward 9:69046242-69046268; SaCas9
gcaacatattccctttttct

SEQ ID NO: 25963 - DNA, 19 bp, Artificial Sequence
  Synthetic: FXN 3 forward 9:69046243-69046268; SaCas9
caacatattccctttttct

SEQ ID NO: 25964 - DNA, 18 bp, Artificial Sequence
  Synthetic: FXN 3 forward 9:69046244-69046268; SaCas9
aacatattccctttttct

SEQ ID NO: 25965 - DNA, 25 bp, Artificial Sequence
  Synthetic: FXN 3 forward 9:69046245-69046276; SaCas9
acatattccctttttcttagaaaaa

SEQ ID NO: 25966 - DNA, 24 bp, Artificial Sequence
  Synthetic: FXN 3 forward 9:69046246-69046276; SaCas9
catattccctttttcttagaaaaa

SEQ ID NO: 25967 - DNA, 23 bp, Artificial Sequence
  Synthetic: FXN 3 forward 9:69046247-69046276; SaCas9
atattccctttttcttagaaaaa

SEQ ID NO: 25968 - DNA, 22 bp, Artificial Sequence
  Synthetic: FXN 3 forward 9:69046248-69046276; SaCas9
tattccctttttcttagaaaaa

SEQ ID NO: 25969 - DNA, 21 bp, Artificial Sequence
  Synthetic: FXN 3 forward 9:69046249-69046276; SaCas9
attccctttttcttagaaaaa

SEQ ID NO: 25970 - DNA, 20 bp, Artificial Sequence
  Synthetic: FXN 3 forward 9:69046250-69046276; SaCas9
ttccctttttcttagaaaaa

SEQ ID NO: 25971 - DNA, 19 bp, Artificial Sequence
  Synthetic: FXN 3 forward 9:69046251-69046276; SaCas9
tccctttttcttagaaaaa

SEQ ID NO: 25972 - DNA, 18 bp, Artificial Sequence
  Synthetic: FXN 3 forward 9:69046252-69046276; SaCas9
ccctttttcttagaaaaa

SEQ ID NO: 25973 - DNA, 25 bp, Artificial Sequence
  Synthetic: FXN 3 forward 9:69046246-69046277; SaCas9
catattccctttttcttagaaaaaa

SEQ ID NO: 25974 - DNA, 24 bp, Artificial Sequence
  Synthetic: FXN 3 forward 9:69046247-69046277; SaCas9
atattccctttttcttagaaaaaa

SEQ ID NO: 25975 - DNA, 23 bp, Artificial Sequence
  Synthetic: FXN 3 forward 9:69046248-69046277; SaCas9
tattccctttttcttagaaaaaa

SEQ ID NO: 25976 - DNA, 22 bp, Artificial Sequence
  Synthetic: FXN 3 forward 9:69046249-69046277; SaCas9
attccctttttcttagaaaaaa

SEQ ID NO: 25977 - DNA, 21 bp, Artificial Sequence
  Synthetic: FXN 3 forward 9:69046250-69046277; SaCas9
ttccctttttcttagaaaaaa

SEQ ID NO: 25978 - DNA, 20 bp, Artificial Sequence
  Synthetic: FXN 3 forward 9:69046251-69046277; SaCas9
tccctttttcttagaaaaaa

SEQ ID NO: 25979 - DNA, 19 bp, Artificial Sequence
  Synthetic: FXN 3 forward 9:69046252-69046277; SaCas9
ccctttttcttagaaaaaa

SEQ ID NO: 25980 - DNA, 18 bp, Artificial Sequence
  Synthetic: FXN 3 forward 9:69046253-69046277; SaCas9
cctttttcttagaaaaaa

SEQ ID NO: 25981 - DNA, 25 bp, Artificial Sequence
  Synthetic: FXN 3 reverse 9:69046249-69046280; SaCas9
agtgctccattttttctaagaaaaa

SEQ ID NO: 25982 - DNA, 24 bp, Artificial Sequence
  Synthetic: FXN 3 reverse 9:69046250-69046280; SaCas9
gtgctccattttttctaagaaaaa

SEQ ID NO: 25983 - DNA, 23 bp, Artificial Sequence
  Synthetic: FXN 3 reverse 9:69046251-69046280; SaCas9
tgctccattttttctaagaaaaa

SEQ ID NO: 25984 - DNA, 22 bp, Artificial Sequence
  Synthetic: FXN 3 reverse 9:69046252-69046280; SaCas9
gctccattttttctaagaaaaa

SEQ ID NO: 25985 - DNA, 21 bp, Artificial Sequence
  Synthetic: FXN 3 reverse 9:69046253-69046280; SaCas9
ctccattttttctaagaaaaa

SEQ ID NO: 25986 - DNA, 20 bp, Artificial Sequence
  Synthetic: FXN 3 reverse 9:69046254-69046280; SaCas9
tccattttttctaagaaaaa

SEQ ID NO: 25987 - DNA, 19 bp, Artificial Sequence
  Synthetic: FXN 3 reverse 9:69046255-69046280; SaCas9
ccattttttctaagaaaaa

SEQ ID NO: 25988 - DNA, 18 bp, Artificial Sequence
  Synthetic: FXN 3 reverse 9:69046256-69046280; SaCas9
cattttttctaagaaaaa

SEQ ID NO: 25989 - DNA, 25 bp, Artificial Sequence
  Synthetic: FXN 3 reverse 9:69046250-69046281; SaCas9
gagtgctccattttttctaagaaaa

SEQ ID NO: 25990 - DNA, 24 bp, Artificial Sequence
  Synthetic: FXN 3 reverse 9:69046251-69046281; SaCas9
agtgctccattttttctaagaaaa

SEQ ID NO: 25991 - DNA, 23 bp, Artificial Sequence
  Synthetic: FXN 3 reverse 9:69046252-69046281; SaCas9
gtgctccattttttctaagaaaa

SEQ ID NO: 25992 - DNA, 22 bp, Artificial Sequence
  Synthetic: FXN 3 reverse 9:69046253-69046281; SaCas9
tgctccattttttctaagaaaa

SEQ ID NO: 25993 - DNA, 21 bp, Artificial Sequence
  Synthetic: FXN 3 reverse 9:69046254-69046281; SaCas9
gctccattttttctaagaaaa

SEQ ID NO: 25994 - DNA, 20 bp, Artificial Sequence
  Synthetic: FXN 3 reverse 9:69046255-69046281; SaCas9
ctccattttttctaagaaaa

SEQ ID NO: 25995 - DNA, 19 bp, Artificial Sequence
  Synthetic: FXN 3 reverse 9:69046256-69046281; SaCas9
tccattttttctaagaaaa

SEQ ID NO: 25996 - DNA, 18 bp, Artificial Sequence
  Synthetic: FXN 3 reverse 9:69046257-69046281; SaCas9
ccattttttctaagaaaa

SEQ ID NO: 25997 - DNA, 25 bp, Artificial Sequence
  Synthetic: FXN 3 reverse 9:69046251-69046282; SaCas9
cgagtgctccattttttctaagaaa

SEQ ID NO: 25998 - DNA, 24 bp, Artificial Sequence
  Synthetic: FXN 3 reverse 9:69046252-69046282; SaCas9
gagtgctccattttttctaagaaa

SEQ ID NO: 25999 - DNA, 23 bp, Artificial Sequence
  Synthetic: FXN 3 reverse 9:69046253-69046282; SaCas9
agtgctccattttttctaagaaa

SEQ ID NO: 26000 - DNA, 22 bp, Artificial Sequence
  Synthetic: FXN 3 reverse 9:69046254-69046282; SaCas9
gtgctccattttttctaagaaa

SEQ ID NO: 26001 - DNA, 21 bp, Artificial Sequence
  Synthetic: FXN 3 reverse 9:69046255-69046282; SaCas9
tgctccattttttctaagaaa

SEQ ID NO: 26002 - DNA, 20 bp, Artificial Sequence
  Synthetic: FXN 3 reverse 9:69046256-69046282; SaCas9
gctccattttttctaagaaa

SEQ ID NO: 26003 - DNA, 19 bp, Artificial Sequence
  Synthetic: FXN 3 reverse 9:69046257-69046282; SaCas9
ctccattttttctaagaaa

SEQ ID NO: 26004 - DNA, 18 bp, Artificial Sequence
  Synthetic: FXN 3 reverse 9:69046258-69046282; SaCas9
tccattttttctaagaaa

SEQ ID NO: 26005 - DNA, 25 bp, Artificial Sequence
  Synthetic: FXN 3 reverse 9:69046257-69046288; SaCas9
tgtaaccgagtgctccattttttct

SEQ ID NO: 26006 - DNA, 24 bp, Artificial Sequence
  Synthetic: FXN 3 reverse 9:69046258-69046288; SaCas9
gtaaccgagtgctccattttttct

SEQ ID NO: 26007 - DNA, 23 bp, Artificial Sequence
  Synthetic: FXN 3 reverse 9:69046259-69046288; SaCas9
taaccgagtgctccattttttct

SEQ ID NO: 26008 - DNA, 22 bp, Artificial Sequence
  Synthetic: FXN 3 reverse 9:69046260-69046288; SaCas9
aaccgagtgctccattttttct

SEQ ID NO: 26009 - DNA, 21 bp, Artificial Sequence
  Synthetic: FXN 3 reverse 9:69046261-69046288; SaCas9
accgagtgctccattttttct

SEQ ID NO: 26010 - DNA, 20 bp, Artificial Sequence
  Synthetic: FXN 3 reverse 9:69046262-69046288; SaCas9
ccgagtgctccattttttct

SEQ ID NO: 26011 - DNA, 19 bp, Artificial Sequence
  Synthetic: FXN 3 reverse 9:69046263-69046288; SaCas9
cgagtgctccattttttct

SEQ ID NO: 26012 - DNA, 18 bp, Artificial Sequence
  Synthetic: FXN 3 reverse 9:69046264-69046288; SaCas9
gagtgctccattttttct

SEQ ID NO: 26013 - DNA, 25 bp, Artificial Sequence
  Synthetic: FXN 3 forward 9:69046268-69046299; SaCas9
aaatggagcactcggttacaggcac

SEQ ID NO: 26014 - DNA, 24 bp, Artificial Sequence
  Synthetic: FXN 3 forward 9:69046269-69046299; SaCas9
aatggagcactcggttacaggcac

SEQ ID NO: 26015 - DNA, 23 bp, Artificial Sequence
  Synthetic: FXN 3 forward 9:69046270-69046299; SaCas9
atggagcactcggttacaggcac

SEQ ID NO: 26016 - DNA, 22 bp, Artificial Sequence
  Synthetic: FXN 3 forward 9:69046271-69046299; SaCas9
tggagcactcggttacaggcac

SEQ ID NO: 26017 - DNA, 21 bp, Artificial Sequence
  Synthetic: FXN 3 forward 9:69046272-69046299; SaCas9
ggagcactcggttacaggcac

SEQ ID NO: 26018 - DNA, 20 bp, Artificial Sequence
  Synthetic: FXN 3 forward 9:69046273-69046299; SaCas9
gagcactcggttacaggcac

SEQ ID NO: 26019 - DNA, 19 bp, Artificial Sequence
  Synthetic: FXN 3 forward 9:69046274-69046299; SaCas9
agcactcggttacaggcac

SEQ ID NO: 26020 - DNA, 18 bp, Artificial Sequence
  Synthetic: FXN 3 forward 9:69046275-69046299; SaCas9
gcactcggttacaggcac

SEQ ID NO: 26021 - DNA, 25 bp, Artificial Sequence
  Synthetic: FXN 3 forward 9:69046275-69046306; SaCas9
gcactcggttacaggcactcgaatg

SEQ ID NO: 26022 - DNA, 24 bp, Artificial Sequence
  Synthetic: FXN 3 forward 9:69046276-69046306; SaCas9
cactcggttacaggcactcgaatg

SEQ ID NO: 26023 - DNA, 23 bp, Artificial Sequence
  Synthetic: FXN 3 forward 9:69046277-69046306; SaCas9
actcggttacaggcactcgaatg

SEQ ID NO: 26024 - DNA, 22 bp, Artificial Sequence
  Synthetic: FXN 3 forward 9:69046278-69046306; SaCas9
ctcggttacaggcactcgaatg

SEQ ID NO: 26025 - DNA, 21 bp, Artificial Sequence
  Synthetic: FXN 3 forward 9:69046279-69046306; SaCas9
tcggttacaggcactcgaatg

SEQ ID NO: 26026 - DNA, 20 bp, Artificial Sequence
  Synthetic: FXN 3 forward 9:69046280-69046306; SaCas9
cggttacaggcactcgaatg

SEQ ID NO: 26027 - DNA, 19 bp, Artificial Sequence
  Synthetic: FXN 3 forward 9:69046281-69046306; SaCas9
ggttacaggcactcgaatg

SEQ ID NO: 26028 - DNA, 18 bp, Artificial Sequence
  Synthetic: FXN 3 forward 9:69046282-69046306; SaCas9
gttacaggcactcgaatg

SEQ ID NO: 26029 - DNA, 25 bp, Artificial Sequence
  Synthetic: FXN 3 reverse 9:69046277-69046308; SaCas9
tacttctacattcgagtgcctgtaa

SEQ ID NO: 26030 - DNA, 24 bp, Artificial Sequence
  Synthetic: FXN 3 reverse 9:69046278-69046308; SaCas9
acttctacattcgagtgcctgtaa

SEQ ID NO: 26031 - DNA, 23 bp, Artificial Sequence
  Synthetic: FXN 3 reverse 9:69046279-69046308; SaCas9
cttctacattcgagtgcctgtaa

SEQ ID NO: 26032 - DNA, 22 bp, Artificial Sequence
  Synthetic: FXN 3 reverse 9:69046280-69046308; SaCas9
ttctacattcgagtgcctgtaa

SEQ ID NO: 26033 - DNA, 21 bp, Artificial Sequence
  Synthetic: FXN 3 reverse 9:69046281-69046308; SaCas9
tctacattcgagtgcctgtaa

SEQ ID NO: 26034 - DNA, 20 bp, Artificial Sequence
  Synthetic: FXN 3 reverse 9:69046282-69046308; SaCas9
ctacattcgagtgcctgtaa

SEQ ID NO: 26035 - DNA, 19 bp, Artificial Sequence
  Synthetic: FXN 3 reverse 9:69046283-69046308; SaCas9
tacattcgagtgcctgtaa

SEQ ID NO: 26036 - DNA, 18 bp, Artificial Sequence
  Synthetic: FXN 3 reverse 9:69046284-69046308; SaCas9
acattcgagtgcctgtaa

SEQ ID NO: 26037 - DNA, 25 bp, Artificial Sequence
  Synthetic: FXN 3 reverse 9:69046291-69046322; SaCas9
aatttatatattgctacttctacat

SEQ ID NO: 26038 - DNA, 24 bp, Artificial Sequence
  Synthetic: FXN 3 reverse 9:69046292-69046322; SaCas9
atttatatattgctacttctacat

SEQ ID NO: 26039 - DNA, 23 bp, Artificial Sequence
  Synthetic: FXN 3 reverse 9:69046293-69046322; SaCas9
tttatatattgctacttctacat

SEQ ID NO: 26040 - DNA, 22 bp, Artificial Sequence
  Synthetic: FXN 3 reverse 9:69046294-69046322; SaCas9
ttatatattgctacttctacat

SEQ ID NO: 26041 - DNA, 21 bp, Artificial Sequence
  Synthetic: FXN 3 reverse 9:69046295-69046322; SaCas9
tatatattgctacttctacat

SEQ ID NO: 26042 - DNA, 20 bp, Artificial Sequence
  Synthetic: FXN 3 reverse 9:69046296-69046322; SaCas9
atatattgctacttctacat

SEQ ID NO: 26043 - DNA, 19 bp, Artificial Sequence
  Synthetic: FXN 3 reverse 9:69046297-69046322; SaCas9
tatattgctacttctacat

SEQ ID NO: 26044 - DNA, 18 bp, Artificial Sequence
  Synthetic: FXN 3 reverse 9:69046298-69046322; SaCas9
atattgctacttctacat

SEQ ID NO: 26045 - DNA, 25 bp, Artificial Sequence
  Synthetic: FXN 3 forward 9:69046305-69046336; SaCas9
gtagcaatatataaattatgcatta

SEQ ID NO: 26046 - DNA, 24 bp, Artificial Sequence
  Synthetic: FXN 3 forward 9:69046306-69046336; SaCas9
tagcaatatataaattatgcatta

SEQ ID NO: 26047 - DNA, 23 bp, Artificial Sequence
  Synthetic: FXN 3 forward 9:69046307-69046336; SaCas9
agcaatatataaattatgcatta

SEQ ID NO: 26048 - DNA, 22 bp, Artificial Sequence
  Synthetic: FXN 3 forward 9:69046308-69046336; SaCas9
gcaatatataaattatgcatta

SEQ ID NO: 26049 - DNA, 21 bp, Artificial Sequence
  Synthetic: FXN 3 forward 9:69046309-69046336; SaCas9
caatatataaattatgcatta

SEQ ID NO: 26050 - DNA, 20 bp, Artificial Sequence
  Synthetic: FXN 3 forward 9:69046310-69046336; SaCas9
aatatataaattatgcatta

SEQ ID NO: 26051 - DNA, 19 bp, Artificial Sequence
  Synthetic: FXN 3 forward 9:69046311-69046336; SaCas9
atatataaattatgcatta

SEQ ID NO: 26052 - DNA, 18 bp, Artificial Sequence
  Synthetic: FXN 3 forward 9:69046312-69046336; SaCas9
tatataaattatgcatta

SEQ ID NO: 26053 - DNA, 25 bp, Artificial Sequence
  Synthetic: FXN 3 forward 9:69046320-69046351; SaCas9
ttatgcattaatgggttataattca

SEQ ID NO: 26054 - DNA, 24 bp, Artificial Sequence
  Synthetic: FXN 3 forward 9:69046321-69046351; SaCas9
tatgcattaatgggttataattca

SEQ ID NO: 26055 - DNA, 23 bp, Artificial Sequence
  Synthetic: FXN 3 forward 9:69046322-69046351; SaCas9
atgcattaatgggttataattca

SEQ ID NO: 26056 - DNA, 22 bp, Artificial Sequence
  Synthetic: FXN 3 forward 9:69046323-69046351; SaCas9
tgcattaatgggttataattca

SEQ ID NO: 26057 - DNA, 21 bp, Artificial Sequence
  Synthetic: FXN 3 forward 9:69046324-69046351; SaCas9
gcattaatgggttataattca

SEQ ID NO: 26058 - DNA, 20 bp, Artificial Sequence
  Synthetic: FXN 3 forward 9:69046325-69046351; SaCas9
cattaatgggttataattca

SEQ ID NO: 26059 - DNA, 19 bp, Artificial Sequence
  Synthetic: FXN 3 forward 9:69046326-69046351; SaCas9
attaatgggttataattca

SEQ ID NO: 26060 - DNA, 18 bp, Artificial Sequence
  Synthetic: FXN 3 forward 9:69046327-69046351; SaCas9
ttaatgggttataattca

SEQ ID NO: 26061 - DNA, 25 bp, Artificial Sequence
  Synthetic: FXN 3 reverse 9:69046340-69046371; SaCas9
ttaagaagtacgttactatttttca

SEQ ID NO: 26062 - DNA, 24 bp, Artificial Sequence
  Synthetic: FXN 3 reverse 9:69046341-69046371; SaCas9
taagaagtacgttactatttttca

SEQ ID NO: 26063 - DNA, 23 bp, Artificial Sequence
  Synthetic: FXN 3 reverse 9:69046342-69046371; SaCas9
aagaagtacgttactatttttca

SEQ ID NO: 26064 - DNA, 22 bp, Artificial Sequence
  Synthetic: FXN 3 reverse 9:69046343-69046371; SaCas9
agaagtacgttactatttttca

SEQ ID NO: 26065 - DNA, 21 bp, Artificial Sequence
  Synthetic: FXN 3 reverse 9:69046344-69046371; SaCas9
gaagtacgttactatttttca

SEQ ID NO: 26066 - DNA, 20 bp, Artificial Sequence
  Synthetic: FXN 3 reverse 9:69046345-69046371; SaCas9
aagtacgttactatttttca

SEQ ID NO: 26067 - DNA, 19 bp, Artificial Sequence
  Synthetic: FXN 3 reverse 9:69046346-69046371; SaCas9
agtacgttactatttttca

SEQ ID NO: 26068 - DNA, 18 bp, Artificial Sequence
  Synthetic: FXN 3 reverse 9:69046347-69046371; SaCas9
gtacgttactatttttca

SEQ ID NO: 26069 - DNA, 25 bp, Artificial Sequence
  Synthetic: FXN 3 forward 9:69046356-69046387; SaCas9
taacgtacttcttaactttggcttt

SEQ ID NO: 26070 - DNA, 24 bp, Artificial Sequence
  Synthetic: FXN 3 forward 9:69046357-69046387; SaCas9
aacgtacttcttaactttggcttt

SEQ ID NO: 26071 - DNA, 23 bp, Artificial Sequence
  Synthetic: FXN 3 forward 9:69046358-69046387; SaCas9
acgtacttcttaactttggcttt

SEQ ID NO: 26072 - DNA, 22 bp, Artificial Sequence
  Synthetic: FXN 3 forward 9:69046359-69046387; SaCas9
cgtacttcttaactttggcttt

SEQ ID NO: 26073 - DNA, 21 bp, Artificial Sequence
  Synthetic: FXN 3 forward 9:69046360-69046387; SaCas9
gtacttcttaactttggcttt

SEQ ID NO: 26074 - DNA, 20 bp, Artificial Sequence
  Synthetic: FXN 3 forward 9:69046361-69046387; SaCas9
tacttcttaactttggcttt

SEQ ID NO: 26075 - DNA, 19 bp, Artificial Sequence
  Synthetic: FXN 3 forward 9:69046362-69046387; SaCas9
acttcttaactttggcttt

SEQ ID NO: 26076 - DNA, 18 bp, Artificial Sequence
  Synthetic: FXN 3 forward 9:69046363-69046387; SaCas9
cttcttaactttggcttt

SEQ ID NO: 26077 - DNA, 25 bp, Artificial Sequence
  Synthetic: FXN 3 forward 9:69046362-69046393; SaCas9
acttcttaactttggctttcagagt

SEQ ID NO: 26078 - DNA, 24 bp, Artificial Sequence
  Synthetic: FXN 3 forward 9:69046363-69046393; SaCas9
cttcttaactttggctttcagagt

SEQ ID NO: 26079 - DNA, 23 bp, Artificial Sequence
  Synthetic: FXN 3 forward 9:69046364-69046393; SaCas9
ttcttaactttggctttcagagt

SEQ ID NO: 26080 - DNA, 22 bp, Artificial Sequence
  Synthetic: FXN 3 forward 9:69046365-69046393; SaCas9
tcttaactttggctttcagagt

SEQ ID NO: 26081 - DNA, 21 bp, Artificial Sequence
  Synthetic: FXN 3 forward 9:69046366-69046393; SaCas9
cttaactttggctttcagagt

SEQ ID NO: 26082 - DNA, 20 bp, Artificial Sequence
  Synthetic: FXN 3 forward 9:69046367-69046393; SaCas9
ttaactttggctttcagagt

SEQ ID NO: 26083 - DNA, 19 bp, Artificial Sequence
  Synthetic: FXN 3 forward 9:69046368-69046393; SaCas9
taactttggctttcagagt

SEQ ID NO: 26084 - DNA, 18 bp, Artificial Sequence
  Synthetic: FXN 3 forward 9:69046369-69046393; SaCas9
aactttggctttcagagt

SEQ ID NO: 26085 - DNA, 25 bp, Artificial Sequence
  Synthetic: FXN 3 reverse 9:69046363-69046394; SaCas9
ggttcgaactctgaaagccaaagtt

SEQ ID NO: 26086 - DNA, 24 bp, Artificial Sequence
  Synthetic: FXN 3 reverse 9:69046364-69046394; SaCas9
gttcgaactctgaaagccaaagtt

SEQ ID NO: 26087 - DNA, 23 bp, Artificial Sequence
  Synthetic: FXN 3 reverse 9:69046365-69046394; SaCas9
ttcgaactctgaaagccaaagtt

SEQ ID NO: 26088 - DNA, 22 bp, Artificial Sequence
  Synthetic: FXN 3 reverse 9:69046366-69046394; SaCas9
tcgaactctgaaagccaaagtt

SEQ ID NO: 26089 - DNA, 21 bp, Artificial Sequence
  Synthetic: FXN 3 reverse 9:69046367-69046394; SaCas9
cgaactctgaaagccaaagtt

SEQ ID NO: 26090 - DNA, 20 bp, Artificial Sequence
  Synthetic: FXN 3 reverse 9:69046368-69046394; SaCas9
gaactctgaaagccaaagtt

SEQ ID NO: 26091 - DNA, 19 bp, Artificial Sequence
  Synthetic: FXN 3 reverse 9:69046369-69046394; SaCas9
aactctgaaagccaaagtt

SEQ ID NO: 26092 - DNA, 18 bp, Artificial Sequence
  Synthetic: FXN 3 reverse 9:69046370-69046394; SaCas9
actctgaaagccaaagtt

SEQ ID NO: 26093 - DNA, 25 bp, Artificial Sequence
  Synthetic: FXN 3 forward 9:69037283-69037311; SpCas9
aaagaagaagaagaagaagaaaata

SEQ ID NO: 26094 - DNA, 24 bp, Artificial Sequence
  Synthetic: FXN 3 forward 9:69037284-69037311; SpCas9
aagaagaagaagaagaagaaaata

SEQ ID NO: 26095 - DNA, 23 bp, Artificial Sequence
  Synthetic: FXN 3 forward 9:69037285-69037311; SpCas9
agaagaagaagaagaagaaaata

SEQ ID NO: 26096 - DNA, 22 bp, Artificial Sequence
  Synthetic: FXN 3 forward 9:69037286-69037311; SpCas9
gaagaagaagaagaagaaaata

SEQ ID NO: 26097 - DNA, 21 bp, Artificial Sequence
  Synthetic: FXN 3 forward 9:69037287-69037311; SpCas9
aagaagaagaagaagaaaata

SEQ ID NO: 26098 - DNA, 20 bp, Artificial Sequence
  Synthetic: FXN 3 forward 9:69037288-69037311; SpCas9
agaagaagaagaagaaaata

SEQ ID NO: 26099 - DNA, 19 bp, Artificial Sequence
  Synthetic: FXN 3 forward 9:69037289-69037311; SpCas9
gaagaagaagaagaaaata

SEQ ID NO: 26100 - DNA, 18 bp, Artificial Sequence
  Synthetic: FXN 3 forward 9:69037290-69037311; SpCas9
aagaagaagaagaaaata

SEQ ID NO: 26101 - DNA, 25 bp, Artificial Sequence
  Synthetic: FXN 3 forward 9:69037288-69037316; SpCas9
agaagaagaagaagaaaataaagaa

SEQ ID NO: 26102 - DNA, 24 bp, Artificial Sequence
  Synthetic: FXN 3 forward 9:69037289-69037316; SpCas9
gaagaagaagaagaaaataaagaa

SEQ ID NO: 26103 - DNA, 23 bp, Artificial Sequence
  Synthetic: FXN 3 forward 9:69037290-69037316; SpCas9
aagaagaagaagaaaataaagaa

SEQ ID NO: 26104 - DNA, 22 bp, Artificial Sequence
  Synthetic: FXN 3 forward 9:69037291-69037316; SpCas9
agaagaagaagaaaataaagaa

SEQ ID NO: 26105 - DNA, 21 bp, Artificial Sequence
  Synthetic: FXN 3 forward 9:69037292-69037316; SpCas9
gaagaagaagaaaataaagaa

SEQ ID NO: 26106 - DNA, 20 bp, Artificial Sequence
  Synthetic: FXN 3 forward 9:69037293-69037316; SpCas9
aagaagaagaaaataaagaa

SEQ ID NO: 26107 - DNA, 19 bp, Artificial Sequence
  Synthetic: FXN 3 forward 9:69037294-69037316; SpCas9
agaagaagaaaataaagaa

SEQ ID NO: 26108 - DNA, 18 bp, Artificial Sequence
  Synthetic: FXN 3 forward 9:69037295-69037316; SpCas9
gaagaagaaaataaagaa

SEQ ID NO: 26109 - DNA, 25 bp, Artificial Sequence
  Synthetic: FXN 3 forward 9:69037292-69037320; SpCas9
gaagaagaagaaaataaagaaaagt

SEQ ID NO: 26110 - DNA, 24 bp, Artificial Sequence
  Synthetic: FXN 3 forward 9:69037293-69037320; SpCas9
aagaagaagaaaataaagaaaagt

SEQ ID NO: 26111 - DNA, 23 bp, Artificial Sequence
  Synthetic: FXN 3 forward 9:69037294-69037320; SpCas9
agaagaagaaaataaagaaaagt

SEQ ID NO: 26112 - DNA, 22 bp, Artificial Sequence
  Synthetic: FXN 3 forward 9:69037295-69037320; SpCas9
gaagaagaaaataaagaaaagt

SEQ ID NO: 26113 - DNA, 21 bp, Artificial Sequence
  Synthetic: FXN 3 forward 9:69037296-69037320; SpCas9
aagaagaaaataaagaaaagt

SEQ ID NO: 26114 - DNA, 20 bp, Artificial Sequence
  Synthetic: FXN 3 forward 9:69037297-69037320; SpCas9
agaagaaaataaagaaaagt

SEQ ID NO: 26115 - DNA, 19 bp, Artificial Sequence
  Synthetic: FXN 3 forward 9:69037298-69037320; SpCas9
gaagaaaataaagaaaagt

SEQ ID NO: 26116 - DNA, 18 bp, Artificial Sequence
  Synthetic: FXN 3 forward 9:69037299-69037320; SpCas9
aagaaaataaagaaaagt

SEQ ID NO: 26117 - DNA, 25 bp, Artificial Sequence
  Synthetic: FXN 3 forward 9:69037296-69037324; SpCas9
aagaagaaaataaagaaaagttagc

SEQ ID NO: 26118 - DNA, 24 bp, Artificial Sequence
  Synthetic: FXN 3 forward 9:69037297-69037324; SpCas9
agaagaaaataaagaaaagttagc

SEQ ID NO: 26119 - DNA, 23 bp, Artificial Sequence
  Synthetic: FXN 3 forward 9:69037298-69037324; SpCas9
gaagaaaataaagaaaagttagc

SEQ ID NO: 26120 - DNA, 22 bp, Artificial Sequence
  Synthetic: FXN 3 forward 9:69037299-69037324; SpCas9
aagaaaataaagaaaagttagc

SEQ ID NO: 26121 - DNA, 21 bp, Artificial Sequence
  Synthetic: FXN 3 forward 9:69037300-69037324; SpCas9
agaaaataaagaaaagttagc

SEQ ID NO: 26122 - DNA, 20 bp, Artificial Sequence
  Synthetic: FXN 3 forward 9:69037301-69037324; SpCas9
gaaaataaagaaaagttagc

SEQ ID NO: 26123 - DNA, 19 bp, Artificial Sequence
  Synthetic: FXN 3 forward 9:69037302-69037324; SpCas9
aaaataaagaaaagttagc

SEQ ID NO: 26124 - DNA, 18 bp, Artificial Sequence
  Synthetic: FXN 3 forward 9:69037303-69037324; SpCas9
aaataaagaaaagttagc

SEQ ID NO: 26125 - DNA, 25 bp, Artificial Sequence
  Synthetic: FXN 3 forward 9:69037297-69037325; SpCas9
agaagaaaataaagaaaagttagcc

SEQ ID NO: 26126 - DNA, 24 bp, Artificial Sequence
  Synthetic: FXN 3 forward 9:69037298-69037325; SpCas9
gaagaaaataaagaaaagttagcc

SEQ ID NO: 26127 - DNA, 23 bp, Artificial Sequence
  Synthetic: FXN 3 forward 9:69037299-69037325; SpCas9
aagaaaataaagaaaagttagcc

SEQ ID NO: 26128 - DNA, 22 bp, Artificial Sequence
  Synthetic: FXN 3 forward 9:69037300-69037325; SpCas9
agaaaataaagaaaagttagcc

SEQ ID NO: 26129 - DNA, 21 bp, Artificial Sequence
  Synthetic: FXN 3 forward 9:69037301-69037325; SpCas9
gaaaataaagaaaagttagcc

SEQ ID NO: 26130 - DNA, 20 bp, Artificial Sequence
  Synthetic: FXN 3 forward 9:69037302-69037325; SpCas9
aaaataaagaaaagttagcc

SEQ ID NO: 26131 - DNA, 19 bp, Artificial Sequence
  Synthetic: FXN 3 forward 9:69037303-69037325; SpCas9
aaataaagaaaagttagcc

SEQ ID NO: 26132 - DNA, 18 bp, Artificial Sequence
  Synthetic: FXN 3 forward 9:69037304-69037325; SpCas9
aataaagaaaagttagcc

SEQ ID NO: 26133 - DNA, 25 bp, Artificial Sequence
  Synthetic: FXN 3 forward 9:69037302-69037330; SpCas9
aaaataaagaaaagttagccgggcg

SEQ ID NO: 26134 - DNA, 24 bp, Artificial Sequence
  Synthetic: FXN 3 forward 9:69037303-69037330; SpCas9
aaataaagaaaagttagccgggcg

SEQ ID NO: 26135 - DNA, 23 bp, Artificial Sequence
  Synthetic: FXN 3 forward 9:69037304-69037330; SpCas9
aataaagaaaagttagccgggcg

SEQ ID NO: 26136 - DNA, 22 bp, Artificial Sequence
  Synthetic: FXN 3 forward 9:69037305-69037330; SpCas9
ataaagaaaagttagccgggcg

SEQ ID NO: 26137 - DNA, 21 bp, Artificial Sequence
  Synthetic: FXN 3 forward 9:69037306-69037330; SpCas9
taaagaaaagttagccgggcg

SEQ ID NO: 26138 - DNA, 20 bp, Artificial Sequence
  Synthetic: FXN 3 forward 9:69037307-69037330; SpCas9
aaagaaaagttagccgggcg

SEQ ID NO: 26139 - DNA, 19 bp, Artificial Sequence
  Synthetic: FXN 3 forward 9:69037308-69037330; SpCas9
aagaaaagttagccgggcg

SEQ ID NO: 26140 - DNA, 18 bp, Artificial Sequence
  Synthetic: FXN 3 forward 9:69037309-69037330; SpCas9
agaaaagttagccgggcg

SEQ ID NO: 26141 - DNA, 25 bp, Artificial Sequence
  Synthetic: FXN 3 reverse 9:69037320-69037348; SpCas9
gattacaggcgcgcgacaccacgcc

SEQ ID NO: 26142 - DNA, 24 bp, Artificial Sequence
  Synthetic: FXN 3 reverse 9:69037321-69037348; SpCas9
attacaggcgcgcgacaccacgcc

SEQ ID NO: 26143 - DNA, 23 bp, Artificial Sequence
  Synthetic: FXN 3 reverse 9:69037322-69037348; SpCas9
ttacaggcgcgcgacaccacgcc

SEQ ID NO: 26144 - DNA, 22 bp, Artificial Sequence
  Synthetic: FXN 3 reverse 9:69037323-69037348; SpCas9
tacaggcgcgcgacaccacgcc

SEQ ID NO: 26145 - DNA, 21 bp, Artificial Sequence
  Synthetic: FXN 3 reverse 9:69037324-69037348; SpCas9
acaggcgcgcgacaccacgcc

SEQ ID NO: 26146 - DNA, 20 bp, Artificial Sequence
  Synthetic: FXN 3 reverse 9:69037325-69037348; SpCas9
caggcgcgcgacaccacgcc

SEQ ID NO: 26147 - DNA, 19 bp, Artificial Sequence
  Synthetic: FXN 3 reverse 9:69037326-69037348; SpCas9
aggcgcgcgacaccacgcc

SEQ ID NO: 26148 - DNA, 18 bp, Artificial Sequence
  Synthetic: FXN 3 reverse 9:69037327-69037348; SpCas9
ggcgcgcgacaccacgcc

SEQ ID NO: 26149 - DNA, 25 bp, Artificial Sequence
  Synthetic: FXN 3 forward 9:69037324-69037352; SpCas9
gcgtggtgtcgcgcgcctgtaatcc

SEQ ID NO: 26150 - DNA, 24 bp, Artificial Sequence
  Synthetic: FXN 3 forward 9:69037325-69037352; SpCas9
cgtggtgtcgcgcgcctgtaatcc

SEQ ID NO: 26151 - DNA, 23 bp, Artificial Sequence
  Synthetic: FXN 3 forward 9:69037326-69037352; SpCas9
gtggtgtcgcgcgcctgtaatcc

SEQ ID NO: 26152 - DNA, 22 bp, Artificial Sequence
  Synthetic: FXN 3 forward 9:69037327-69037352; SpCas9
tggtgtcgcgcgcctgtaatcc

SEQ ID NO: 26153 - DNA, 21 bp, Artificial Sequence
  Synthetic: FXN 3 forward 9:69037328-69037352; SpCas9
ggtgtcgcgcgcctgtaatcc

SEQ ID NO: 26154 - DNA, 20 bp, Artificial Sequence
  Synthetic: FXN 3 forward 9:69037329-69037352; SpCas9
gtgtcgcgcgcctgtaatcc

SEQ ID NO: 26155 - DNA, 19 bp, Artificial Sequence
  Synthetic: FXN 3 forward 9:69037330-69037352; SpCas9
tgtcgcgcgcctgtaatcc

SEQ ID NO: 26156 - DNA, 18 bp, Artificial Sequence
  Synthetic: FXN 3 forward 9:69037331-69037352; SpCas9
gtcgcgcgcctgtaatcc

SEQ ID NO: 26157 - DNA, 25 bp, Artificial Sequence
  Synthetic: FXN 3 forward 9:69037333-69037361; SpCas9
cgcgcgcctgtaatcccagctactc

SEQ ID NO: 26158 - DNA, 24 bp, Artificial Sequence
  Synthetic: FXN 3 forward 9:69037334-69037361; SpCas9
gcgcgcctgtaatcccagctactc

SEQ ID NO: 26159 - DNA, 23 bp, Artificial Sequence
  Synthetic: FXN 3 forward 9:69037335-69037361; SpCas9
cgcgcctgtaatcccagctactc

SEQ ID NO: 26160 - DNA, 22 bp, Artificial Sequence
  Synthetic: FXN 3 forward 9:69037336-69037361; SpCas9
gcgcctgtaatcccagctactc

SEQ ID NO: 26161 - DNA, 21 bp, Artificial Sequence
  Synthetic: FXN 3 forward 9:69037337-69037361; SpCas9
cgcctgtaatcccagctactc

SEQ ID NO: 26162 - DNA, 20 bp, Artificial Sequence
  Synthetic: FXN 3 forward 9:69037338-69037361; SpCas9
gcctgtaatcccagctactc

SEQ ID NO: 26163 - DNA, 19 bp, Artificial Sequence
  Synthetic: FXN 3 forward 9:69037339-69037361; SpCas9
cctgtaatcccagctactc

SEQ ID NO: 26164 - DNA, 18 bp, Artificial Sequence
  Synthetic: FXN 3 forward 9:69037340-69037361; SpCas9
ctgtaatcccagctactc

SEQ ID NO: 26165 - DNA, 25 bp, Artificial Sequence
  Synthetic: FXN 3 forward 9:69037335-69037363; SpCas9
cgcgcctgtaatcccagctactcca

SEQ ID NO: 26166 - DNA, 24 bp, Artificial Sequence
  Synthetic: FXN 3 forward 9:69037336-69037363; SpCas9
gcgcctgtaatcccagctactcca

SEQ ID NO: 26167 - DNA, 23 bp, Artificial Sequence
  Synthetic: FXN 3 forward 9:69037337-69037363; SpCas9
cgcctgtaatcccagctactcca

SEQ ID NO: 26168 - DNA, 22 bp, Artificial Sequence
  Synthetic: FXN 3 forward 9:69037338-69037363; SpCas9
gcctgtaatcccagctactcca

SEQ ID NO: 26169 - DNA, 21 bp, Artificial Sequence
  Synthetic: FXN 3 forward 9:69037339-69037363; SpCas9
cctgtaatcccagctactcca

SEQ ID NO: 26170 - DNA, 20 bp, Artificial Sequence
  Synthetic: FXN 3 forward 9:69037340-69037363; SpCas9
ctgtaatcccagctactcca

SEQ ID NO: 26171 - DNA, 19 bp, Artificial Sequence
  Synthetic: FXN 3 forward 9:69037341-69037363; SpCas9
tgtaatcccagctactcca

SEQ ID NO: 26172 - DNA, 18 bp, Artificial Sequence
  Synthetic: FXN 3 forward 9:69037342-69037363; SpCas9
gtaatcccagctactcca

SEQ ID NO: 26173 - DNA, 25 bp, Artificial Sequence
  Synthetic: FXN 3 forward 9:69037336-69037364; SpCas9
gcgcctgtaatcccagctactccag

SEQ ID NO: 26174 - DNA, 24 bp, Artificial Sequence
  Synthetic: FXN 3 forward 9:69037337-69037364; SpCas9
cgcctgtaatcccagctactccag

SEQ ID NO: 26175 - DNA, 23 bp, Artificial Sequence
  Synthetic: FXN 3 forward 9:69037338-69037364; SpCas9
gcctgtaatcccagctactccag

SEQ ID NO: 26176 - DNA, 22 bp, Artificial Sequence
  Synthetic: FXN 3 forward 9:69037339-69037364; SpCas9
cctgtaatcccagctactccag

SEQ ID NO: 26177 - DNA, 21 bp, Artificial Sequence
  Synthetic: FXN 3 forward 9:69037340-69037364; SpCas9
ctgtaatcccagctactccag

SEQ ID NO: 26178 - DNA, 20 bp, Artificial Sequence
  Synthetic: FXN 3 forward 9:69037341-69037364; SpCas9
tgtaatcccagctactccag

SEQ ID NO: 26179 - DNA, 19 bp, Artificial Sequence
  Synthetic: FXN 3 forward 9:69037342-69037364; SpCas9
gtaatcccagctactccag

SEQ ID NO: 26180 - DNA, 18 bp, Artificial Sequence
  Synthetic: FXN 3 forward 9:69037343-69037364; SpCas9
taatcccagctactccag

SEQ ID NO: 26181 - DNA, 25 bp, Artificial Sequence
  Synthetic: FXN 3 reverse 9:69037339-69037367; SpCas9
cagcctctggagtagctgggattac

SEQ ID NO: 26182 - DNA, 24 bp, Artificial Sequence
  Synthetic: FXN 3 reverse 9:69037340-69037367; SpCas9
agcctctggagtagctgggattac

SEQ ID NO: 26183 - DNA, 23 bp, Artificial Sequence
  Synthetic: FXN 3 reverse 9:69037341-69037367; SpCas9
gcctctggagtagctgggattac

SEQ ID NO: 26184 - DNA, 22 bp, Artificial Sequence
  Synthetic: FXN 3 reverse 9:69037342-69037367; SpCas9
cctctggagtagctgggattac

SEQ ID NO: 26185 - DNA, 21 bp, Artificial Sequence
  Synthetic: FXN 3 reverse 9:69037343-69037367; SpCas9
ctctggagtagctgggattac

SEQ ID NO: 26186 - DNA, 20 bp, Artificial Sequence
  Synthetic: FXN 3 reverse 9:69037344-69037367; SpCas9
tctggagtagctgggattac

SEQ ID NO: 26187 - DNA, 19 bp, Artificial Sequence
  Synthetic: FXN 3 reverse 9:69037345-69037367; SpCas9
ctggagtagctgggattac

SEQ ID NO: 26188 - DNA, 18 bp, Artificial Sequence
  Synthetic: FXN 3 reverse 9:69037346-69037367; SpCas9
tggagtagctgggattac

SEQ ID NO: 26189 - DNA, 25 bp, Artificial Sequence
  Synthetic: FXN 3 reverse 9:69037340-69037368; SpCas9
gcagcctctggagtagctgggatta

SEQ ID NO: 26190 - DNA, 24 bp, Artificial Sequence
  Synthetic: FXN 3 reverse 9:69037341-69037368; SpCas9
cagcctctggagtagctgggatta

SEQ ID NO: 26191 - DNA, 23 bp, Artificial Sequence
  Synthetic: FXN 3 reverse 9:69037342-69037368; SpCas9
agcctctggagtagctgggatta

SEQ ID NO: 26192 - DNA, 22 bp, Artificial Sequence
  Synthetic: FXN 3 reverse 9:69037343-69037368; SpCas9
gcctctggagtagctgggatta

SEQ ID NO: 26193 - DNA, 21 bp, Artificial Sequence
  Synthetic: FXN 3 reverse 9:69037344-69037368; SpCas9
cctctggagtagctgggatta

SEQ ID NO: 26194 - DNA, 20 bp, Artificial Sequence
  Synthetic: FXN 3 reverse 9:69037345-69037368; SpCas9
ctctggagtagctgggatta

SEQ ID NO: 26195 - DNA, 19 bp, Artificial Sequence
  Synthetic: FXN 3 reverse 9:69037346-69037368; SpCas9
tctggagtagctgggatta

SEQ ID NO: 26196 - DNA, 18 bp, Artificial Sequence
  Synthetic: FXN 3 reverse 9:69037347-69037368; SpCas9
ctggagtagctgggatta

SEQ ID NO: 26197 - DNA, 25 bp, Artificial Sequence
  Synthetic: FXN 3 forward 9:69037342-69037370; SpCas9
gtaatcccagctactccagaggctg

SEQ ID NO: 26198 - DNA, 24 bp, Artificial Sequence
  Synthetic: FXN 3 forward 9:69037343-69037370; SpCas9
taatcccagctactccagaggctg

SEQ ID NO: 26199 - DNA, 23 bp, Artificial Sequence
  Synthetic: FXN 3 forward 9:69037344-69037370; SpCas9
aatcccagctactccagaggctg

SEQ ID NO: 26200 - DNA, 22 bp, Artificial Sequence
  Synthetic: FXN 3 forward 9:69037345-69037370; SpCas9
atcccagctactccagaggctg

SEQ ID NO: 26201 - DNA, 21 bp, Artificial Sequence
  Synthetic: FXN 3 forward 9:69037346-69037370; SpCas9
tcccagctactccagaggctg

SEQ ID NO: 26202 - DNA, 20 bp, Artificial Sequence
  Synthetic: FXN 3 forward 9:69037347-69037370; SpCas9
cccagctactccagaggctg

SEQ ID NO: 26203 - DNA, 19 bp, Artificial Sequence
  Synthetic: FXN 3 forward 9:69037348-69037370; SpCas9
ccagctactccagaggctg

SEQ ID NO: 26204 - DNA, 18 bp, Artificial Sequence
  Synthetic: FXN 3 forward 9:69037349-69037370; SpCas9
cagctactccagaggctg

SEQ ID NO: 26205 - DNA, 25 bp, Artificial Sequence
  Synthetic: FXN 3 forward 9:69037345-69037373; SpCas9
atcccagctactccagaggctgcgg

SEQ ID NO: 26206 - DNA, 24 bp, Artificial Sequence
  Synthetic: FXN 3 forward 9:69037346-69037373; SpCas9
tcccagctactccagaggctgcgg

SEQ ID NO: 26207 - DNA, 23 bp, Artificial Sequence
  Synthetic: FXN 3 forward 9:69037347-69037373; SpCas9
cccagctactccagaggctgcgg

SEQ ID NO: 26208 - DNA, 22 bp, Artificial Sequence
  Synthetic: FXN 3 forward 9:69037348-69037373; SpCas9
ccagctactccagaggctgcgg

SEQ ID NO: 26209 - DNA, 21 bp, Artificial Sequence
  Synthetic: FXN 3 forward 9:69037349-69037373; SpCas9
cagctactccagaggctgcgg

SEQ ID NO: 26210 - DNA, 20 bp, Artificial Sequence
  Synthetic: FXN 3 forward 9:69037350-69037373; SpCas9
agctactccagaggctgcgg

SEQ ID NO: 26211 - DNA, 19 bp, Artificial Sequence
  Synthetic: FXN 3 forward 9:69037351-69037373; SpCas9
gctactccagaggctgcgg

SEQ ID NO: 26212 - DNA, 18 bp, Artificial Sequence
  Synthetic: FXN 3 forward 9:69037352-69037373; SpCas9
ctactccagaggctgcgg

SEQ ID NO: 26213 - DNA, 25 bp, Artificial Sequence
  Synthetic: FXN 3 forward 9:69037346-69037374; SpCas9
tcccagctactccagaggctgcggc

SEQ ID NO: 26214 - DNA, 24 bp, Artificial Sequence
  Synthetic: FXN 3 forward 9:69037347-69037374; SpCas9
cccagctactccagaggctgcggc

SEQ ID NO: 26215 - DNA, 23 bp, Artificial Sequence
  Synthetic: FXN 3 forward 9:69037348-69037374; SpCas9
ccagctactccagaggctgcggc

SEQ ID NO: 26216 - DNA, 22 bp, Artificial Sequence
  Synthetic: FXN 3 forward 9:69037349-69037374; SpCas9
cagctactccagaggctgcggc

SEQ ID NO: 26217 - DNA, 21 bp, Artificial Sequence
  Synthetic: FXN 3 forward 9:69037350-69037374; SpCas9
agctactccagaggctgcggc

SEQ ID NO: 26218 - DNA, 20 bp, Artificial Sequence
  Synthetic: FXN 3 forward 9:69037351-69037374; SpCas9
gctactccagaggctgcggc

SEQ ID NO: 26219 - DNA, 19 bp, Artificial Sequence
  Synthetic: FXN 3 forward 9:69037352-69037374; SpCas9
ctactccagaggctgcggc

SEQ ID NO: 26220 - DNA, 18 bp, Artificial Sequence
  Synthetic: FXN 3 forward 9:69037353-69037374; SpCas9
tactccagaggctgcggc

SEQ ID NO: 26221 - DNA, 25 bp, Artificial Sequence
  Synthetic: FXN 3 reverse 9:69037347-69037375; SpCas9
tcctgccgcagcctctggagtagct

SEQ ID NO: 26222 - DNA, 24 bp, Artificial Sequence
  Synthetic: FXN 3 reverse 9:69037348-69037375; SpCas9
cctgccgcagcctctggagtagct

SEQ ID NO: 26223 - DNA, 23 bp, Artificial Sequence
  Synthetic: FXN 3 reverse 9:69037349-69037375; SpCas9
ctgccgcagcctctggagtagct

SEQ ID NO: 26224 - DNA, 22 bp, Artificial Sequence
  Synthetic: FXN 3 reverse 9:69037350-69037375; SpCas9
tgccgcagcctctggagtagct

SEQ ID NO: 26225 - DNA, 21 bp, Artificial Sequence
  Synthetic: FXN 3 reverse 9:69037351-69037375; SpCas9
gccgcagcctctggagtagct

SEQ ID NO: 26226 - DNA, 20 bp, Artificial Sequence
  Synthetic: FXN 3 reverse 9:69037352-69037375; SpCas9
ccgcagcctctggagtagct

SEQ ID NO: 26227 - DNA, 19 bp, Artificial Sequence
  Synthetic: FXN 3 reverse 9:69037353-69037375; SpCas9
cgcagcctctggagtagct

SEQ ID NO: 26228 - DNA, 18 bp, Artificial Sequence
  Synthetic: FXN 3 reverse 9:69037354-69037375; SpCas9
gcagcctctggagtagct

SEQ ID NO: 26229 - DNA, 25 bp, Artificial Sequence
  Synthetic: FXN 3 forward 9:69037348-69037376; SpCas9
ccagctactccagaggctgcggcag

SEQ ID NO: 26230 - DNA, 24 bp, Artificial Sequence
  Synthetic: FXN 3 forward 9:69037349-69037376; SpCas9
cagctactccagaggctgcggcag

SEQ ID NO: 26231 - DNA, 23 bp, Artificial Sequence
  Synthetic: FXN 3 forward 9:69037350-69037376; SpCas9
agctactccagaggctgcggcag

SEQ ID NO: 26232 - DNA, 22 bp, Artificial Sequence
  Synthetic: FXN 3 forward 9:69037351-69037376; SpCas9
gctactccagaggctgcggcag

SEQ ID NO: 26233 - DNA, 21 bp, Artificial Sequence
  Synthetic: FXN 3 forward 9:69037352-69037376; SpCas9
ctactccagaggctgcggcag

SEQ ID NO: 26234 - DNA, 20 bp, Artificial Sequence
  Synthetic: FXN 3 forward 9:69037353-69037376; SpCas9
tactccagaggctgcggcag

SEQ ID NO: 26235 - DNA, 19 bp, Artificial Sequence
  Synthetic: FXN 3 forward 9:69037354-69037376; SpCas9
actccagaggctgcggcag

SEQ ID NO: 26236 - DNA, 18 bp, Artificial Sequence
  Synthetic: FXN 3 forward 9:69037355-69037376; SpCas9
ctccagaggctgcggcag

SEQ ID NO: 26237 - DNA, 25 bp, Artificial Sequence
  Synthetic: FXN 3 reverse 9:69037348-69037376; SpCas9
ctcctgccgcagcctctggagtagc

SEQ ID NO: 26238 - DNA, 24 bp, Artificial Sequence
  Synthetic: FXN 3 reverse 9:69037349-69037376; SpCas9
tcctgccgcagcctctggagtagc

SEQ ID NO: 26239 - DNA, 23 bp, Artificial Sequence
  Synthetic: FXN 3 reverse 9:69037350-69037376; SpCas9
cctgccgcagcctctggagtagc

SEQ ID NO: 26240 - DNA, 22 bp, Artificial Sequence
  Synthetic: FXN 3 reverse 9:69037351-69037376; SpCas9
ctgccgcagcctctggagtagc

SEQ ID NO: 26241 - DNA, 21 bp, Artificial Sequence
  Synthetic: FXN 3 reverse 9:69037352-69037376; SpCas9
tgccgcagcctctggagtagc

SEQ ID NO: 26242 - DNA, 20 bp, Artificial Sequence
  Synthetic: FXN 3 reverse 9:69037353-69037376; SpCas9
gccgcagcctctggagtagc

SEQ ID NO: 26243 - DNA, 19 bp, Artificial Sequence
  Synthetic: FXN 3 reverse 9:69037354-69037376; SpCas9
ccgcagcctctggagtagc

SEQ ID NO: 26244 - DNA, 18 bp, Artificial Sequence
  Synthetic: FXN 3 reverse 9:69037355-69037376; SpCas9
cgcagcctctggagtagc

SEQ ID NO: 26245 - DNA, 25 bp, Artificial Sequence
  Synthetic: FXN 3 reverse 9:69037352-69037380; SpCas9
gattctcctgccgcagcctctggag

SEQ ID NO: 26246 - DNA, 24 bp, Artificial Sequence
  Synthetic: FXN 3 reverse 9:69037353-69037380; SpCas9
attctcctgccgcagcctctggag

SEQ ID NO: 26247 - DNA, 23 bp, Artificial Sequence
  Synthetic: FXN 3 reverse 9:69037354-69037380; SpCas9
ttctcctgccgcagcctctggag

SEQ ID NO: 26248 - DNA, 22 bp, Artificial Sequence
  Synthetic: FXN 3 reverse 9:69037355-69037380; SpCas9
tctcctgccgcagcctctggag

SEQ ID NO: 26249 - DNA, 21 bp, Artificial Sequence
  Synthetic: FXN 3 reverse 9:69037356-69037380; SpCas9
ctcctgccgcagcctctggag

SEQ ID NO: 26250 - DNA, 20 bp, Artificial Sequence
  Synthetic: FXN 3 reverse 9:69037357-69037380; SpCas9
tcctgccgcagcctctggag

SEQ ID NO: 26251 - DNA, 19 bp, Artificial Sequence
  Synthetic: FXN 3 reverse 9:69037358-69037380; SpCas9
cctgccgcagcctctggag

SEQ ID NO: 26252 - DNA, 18 bp, Artificial Sequence
  Synthetic: FXN 3 reverse 9:69037359-69037380; SpCas9
ctgccgcagcctctggag

SEQ ID NO: 26253 - DNA, 25 bp, Artificial Sequence
  Synthetic: FXN 3 reverse 9:69037355-69037383; SpCas9
agcgattctcctgccgcagcctctg

SEQ ID NO: 26254 - DNA, 24 bp, Artificial Sequence
  Synthetic: FXN 3 reverse 9:69037356-69037383; SpCas9
gcgattctcctgccgcagcctctg

SEQ ID NO: 26255 - DNA, 23 bp, Artificial Sequence
  Synthetic: FXN 3 reverse 9:69037357-69037383; SpCas9
cgattctcctgccgcagcctctg

SEQ ID NO: 26256 - DNA, 22 bp, Artificial Sequence
  Synthetic: FXN 3 reverse 9:69037358-69037383; SpCas9
gattctcctgccgcagcctctg

SEQ ID NO: 26257 - DNA, 21 bp, Artificial Sequence
  Synthetic: FXN 3 reverse 9:69037359-69037383; SpCas9
attctcctgccgcagcctctg

SEQ ID NO: 26258 - DNA, 20 bp, Artificial Sequence
  Synthetic: FXN 3 reverse 9:69037360-69037383; SpCas9
ttctcctgccgcagcctctg

SEQ ID NO: 26259 - DNA, 19 bp, Artificial Sequence
  Synthetic: FXN 3 reverse 9:69037361-69037383; SpCas9
tctcctgccgcagcctctg

SEQ ID NO: 26260 - DNA, 18 bp, Artificial Sequence
  Synthetic: FXN 3 reverse 9:69037362-69037383; SpCas9
ctcctgccgcagcctctg

SEQ ID NO: 26261 - DNA, 25 bp, Artificial Sequence
  Synthetic: FXN 3 reverse 9:69037357-69037385; SpCas9
caagcgattctcctgccgcagcctc

SEQ ID NO: 26262 - DNA, 24 bp, Artificial Sequence
  Synthetic: FXN 3 reverse 9:69037358-69037385; SpCas9
aagcgattctcctgccgcagcctc

SEQ ID NO: 26263 - DNA, 23 bp, Artificial Sequence
  Synthetic: FXN 3 reverse 9:69037359-69037385; SpCas9
agcgattctcctgccgcagcctc

SEQ ID NO: 26264 - DNA, 22 bp, Artificial Sequence
  Synthetic: FXN 3 reverse 9:69037360-69037385; SpCas9
gcgattctcctgccgcagcctc

SEQ ID NO: 26265 - DNA, 21 bp, Artificial Sequence
  Synthetic: FXN 3 reverse 9:69037361-69037385; SpCas9
cgattctcctgccgcagcctc

SEQ ID NO: 26266 - DNA, 20 bp, Artificial Sequence
  Synthetic: FXN 3 reverse 9:69037362-69037385; SpCas9
gattctcctgccgcagcctc

SEQ ID NO: 26267 - DNA, 19 bp, Artificial Sequence
  Synthetic: FXN 3 reverse 9:69037363-69037385; SpCas9
attctcctgccgcagcctc

SEQ ID NO: 26268 - DNA, 18 bp, Artificial Sequence
  Synthetic: FXN 3 reverse 9:69037364-69037385; SpCas9
ttctcctgccgcagcctc

SEQ ID NO: 26269 - DNA, 25 bp, Artificial Sequence
  Synthetic: FXN 3 forward 9:69037359-69037387; SpCas9
agaggctgcggcaggagaatcgctt

SEQ ID NO: 26270 - DNA, 24 bp, Artificial Sequence
  Synthetic: FXN 3 forward 9:69037360-69037387; SpCas9
gaggctgcggcaggagaatcgctt

SEQ ID NO: 26271 - DNA, 23 bp, Artificial Sequence
  Synthetic: FXN 3 forward 9:69037361-69037387; SpCas9
aggctgcggcaggagaatcgctt

SEQ ID NO: 26272 - DNA, 22 bp, Artificial Sequence
  Synthetic: FXN 3 forward 9:69037362-69037387; SpCas9
ggctgcggcaggagaatcgctt

SEQ ID NO: 26273 - DNA, 21 bp, Artificial Sequence
  Synthetic: FXN 3 forward 9:69037363-69037387; SpCas9
gctgcggcaggagaatcgctt

SEQ ID NO: 26274 - DNA, 20 bp, Artificial Sequence
  Synthetic: FXN 3 forward 9:69037364-69037387; SpCas9
ctgcggcaggagaatcgctt

SEQ ID NO: 26275 - DNA, 19 bp, Artificial Sequence
  Synthetic: FXN 3 forward 9:69037365-69037387; SpCas9
tgcggcaggagaatcgctt

SEQ ID NO: 26276 - DNA, 18 bp, Artificial Sequence
  Synthetic: FXN 3 forward 9:69037366-69037387; SpCas9
gcggcaggagaatcgctt

SEQ ID NO: 26277 - DNA, 25 bp, Artificial Sequence
  Synthetic: FXN 3 forward 9:69037364-69037392; SpCas9
ctgcggcaggagaatcgcttgagcc

SEQ ID NO: 26278 - DNA, 24 bp, Artificial Sequence
  Synthetic: FXN 3 forward 9:69037365-69037392; SpCas9
tgcggcaggagaatcgcttgagcc

SEQ ID NO: 26279 - DNA, 23 bp, Artificial Sequence
  Synthetic: FXN 3 forward 9:69037366-69037392; SpCas9
gcggcaggagaatcgcttgagcc

SEQ ID NO: 26280 - DNA, 22 bp, Artificial Sequence
  Synthetic: FXN 3 forward 9:69037367-69037392; SpCas9
cggcaggagaatcgcttgagcc

SEQ ID NO: 26281 - DNA, 21 bp, Artificial Sequence
  Synthetic: FXN 3 forward 9:69037368-69037392; SpCas9
ggcaggagaatcgcttgagcc

SEQ ID NO: 26282 - DNA, 20 bp, Artificial Sequence
  Synthetic: FXN 3 forward 9:69037369-69037392; SpCas9
gcaggagaatcgcttgagcc

SEQ ID NO: 26283 - DNA, 19 bp, Artificial Sequence
  Synthetic: FXN 3 forward 9:69037370-69037392; SpCas9
caggagaatcgcttgagcc

SEQ ID NO: 26284 - DNA, 18 bp, Artificial Sequence
  Synthetic: FXN 3 forward 9:69037371-69037392; SpCas9
aggagaatcgcttgagcc

SEQ ID NO: 26285 - DNA, 25 bp, Artificial Sequence
  Synthetic: FXN 3 reverse 9:69037364-69037392; SpCas9
ccgggctcaagcgattctcctgccg

SEQ ID NO: 26286 - DNA, 24 bp, Artificial Sequence
  Synthetic: FXN 3 reverse 9:69037365-69037392; SpCas9
cgggctcaagcgattctcctgccg

SEQ ID NO: 26287 - DNA, 23 bp, Artificial Sequence
  Synthetic: FXN 3 reverse 9:69037366-69037392; SpCas9
gggctcaagcgattctcctgccg

SEQ ID NO: 26288 - DNA, 22 bp, Artificial Sequence
  Synthetic: FXN 3 reverse 9:69037367-69037392; SpCas9
ggctcaagcgattctcctgccg

SEQ ID NO: 26289 - DNA, 21 bp, Artificial Sequence
  Synthetic: FXN 3 reverse 9:69037368-69037392; SpCas9
gctcaagcgattctcctgccg

SEQ ID NO: 26290 - DNA, 20 bp, Artificial Sequence
  Synthetic: FXN 3 reverse 9:69037369-69037392; SpCas9
ctcaagcgattctcctgccg

SEQ ID NO: 26291 - DNA, 19 bp, Artificial Sequence
  Synthetic: FXN 3 reverse 9:69037370-69037392; SpCas9
tcaagcgattctcctgccg

SEQ ID NO: 26292 - DNA, 18 bp, Artificial Sequence
  Synthetic: FXN 3 reverse 9:69037371-69037392; SpCas9
caagcgattctcctgccg

SEQ ID NO: 26293 - DNA, 25 bp, Artificial Sequence
  Synthetic: FXN 3 forward 9:69037365-69037393; SpCas9
tgcggcaggagaatcgcttgagccc

SEQ ID NO: 26294 - DNA, 24 bp, Artificial Sequence
  Synthetic: FXN 3 forward 9:69037366-69037393; SpCas9
gcggcaggagaatcgcttgagccc

SEQ ID NO: 26295 - DNA, 23 bp, Artificial Sequence
  Synthetic: FXN 3 forward 9:69037367-69037393; SpCas9
cggcaggagaatcgcttgagccc

SEQ ID NO: 26296 - DNA, 22 bp, Artificial Sequence
  Synthetic: FXN 3 forward 9:69037368-69037393; SpCas9
ggcaggagaatcgcttgagccc

SEQ ID NO: 26297 - DNA, 21 bp, Artificial Sequence
  Synthetic: FXN 3 forward 9:69037369-69037393; SpCas9
gcaggagaatcgcttgagccc

SEQ ID NO: 26298 - DNA, 20 bp, Artificial Sequence
  Synthetic: FXN 3 forward 9:69037370-69037393; SpCas9
caggagaatcgcttgagccc

SEQ ID NO: 26299 - DNA, 19 bp, Artificial Sequence
  Synthetic: FXN 3 forward 9:69037371-69037393; SpCas9
aggagaatcgcttgagccc

SEQ ID NO: 26300 - DNA, 18 bp, Artificial Sequence
  Synthetic: FXN 3 forward 9:69037372-69037393; SpCas9
ggagaatcgcttgagccc

SEQ ID NO: 26301 - DNA, 25 bp, Artificial Sequence
  Synthetic: FXN 3 forward 9:69037367-69037395; SpCas9
cggcaggagaatcgcttgagcccgg

SEQ ID NO: 26302 - DNA, 24 bp, Artificial Sequence
  Synthetic: FXN 3 forward 9:69037368-69037395; SpCas9
ggcaggagaatcgcttgagcccgg

SEQ ID NO: 26303 - DNA, 23 bp, Artificial Sequence
  Synthetic: FXN 3 forward 9:69037369-69037395; SpCas9
gcaggagaatcgcttgagcccgg

SEQ ID NO: 26304 - DNA, 22 bp, Artificial Sequence
  Synthetic: FXN 3 forward 9:69037370-69037395; SpCas9
caggagaatcgcttgagcccgg

SEQ ID NO: 26305 - DNA, 21 bp, Artificial Sequence
  Synthetic: FXN 3 forward 9:69037371-69037395; SpCas9
aggagaatcgcttgagcccgg

SEQ ID NO: 26306 - DNA, 20 bp, Artificial Sequence
  Synthetic: FXN 3 forward 9:69037372-69037395; SpCas9
ggagaatcgcttgagcccgg

SEQ ID NO: 26307 - DNA, 19 bp, Artificial Sequence
  Synthetic: FXN 3 forward 9:69037373-69037395; SpCas9
gagaatcgcttgagcccgg

SEQ ID NO: 26308 - DNA, 18 bp, Artificial Sequence
  Synthetic: FXN 3 forward 9:69037374-69037395; SpCas9
agaatcgcttgagcccgg

SEQ ID NO: 26309 - DNA, 25 bp, Artificial Sequence
  Synthetic: FXN 3 forward 9:69037368-69037396; SpCas9
ggcaggagaatcgcttgagcccggg

SEQ ID NO: 26310 - DNA, 24 bp, Artificial Sequence
  Synthetic: FXN 3 forward 9:69037369-69037396; SpCas9
gcaggagaatcgcttgagcccggg

SEQ ID NO: 26311 - DNA, 23 bp, Artificial Sequence
  Synthetic: FXN 3 forward 9:69037370-69037396; SpCas9
caggagaatcgcttgagcccggg

SEQ ID NO: 26312 - DNA, 22 bp, Artificial Sequence
  Synthetic: FXN 3 forward 9:69037371-69037396; SpCas9
aggagaatcgcttgagcccggg

SEQ ID NO: 26313 - DNA, 21 bp, Artificial Sequence
  Synthetic: FXN 3 forward 9:69037372-69037396; SpCas9
ggagaatcgcttgagcccggg

SEQ ID NO: 26314 - DNA, 20 bp, Artificial Sequence
  Synthetic: FXN 3 forward 9:69037373-69037396; SpCas9
gagaatcgcttgagcccggg

SEQ ID NO: 26315 - DNA, 19 bp, Artificial Sequence
  Synthetic: FXN 3 forward 9:69037374-69037396; SpCas9
agaatcgcttgagcccggg

SEQ ID NO: 26316 - DNA, 18 bp, Artificial Sequence
  Synthetic: FXN 3 forward 9:69037375-69037396; SpCas9
gaatcgcttgagcccggg

SEQ ID NO: 26317 - DNA, 25 bp, Artificial Sequence
  Synthetic: FXN 3 forward 9:69037371-69037399; SpCas9
aggagaatcgcttgagcccgggagg

SEQ ID NO: 26318 - DNA, 24 bp, Artificial Sequence
  Synthetic: FXN 3 forward 9:69037372-69037399; SpCas9
ggagaatcgcttgagcccgggagg

SEQ ID NO: 26319 - DNA, 23 bp, Artificial Sequence
  Synthetic: FXN 3 forward 9:69037373-69037399; SpCas9
gagaatcgcttgagcccgggagg

SEQ ID NO: 26320 - DNA, 22 bp, Artificial Sequence
  Synthetic: FXN 3 forward 9:69037374-69037399; SpCas9
agaatcgcttgagcccgggagg

SEQ ID NO: 26321 - DNA, 21 bp, Artificial Sequence
  Synthetic: FXN 3 forward 9:69037375-69037399; SpCas9
gaatcgcttgagcccgggagg

SEQ ID NO: 26322 - DNA, 20 bp, Artificial Sequence
  Synthetic: FXN 3 forward 9:69037376-69037399; SpCas9
aatcgcttgagcccgggagg

SEQ ID NO: 26323 - DNA, 19 bp, Artificial Sequence
  Synthetic: FXN 3 forward 9:69037377-69037399; SpCas9
atcgcttgagcccgggagg

SEQ ID NO: 26324 - DNA, 18 bp, Artificial Sequence
  Synthetic: FXN 3 forward 9:69037378-69037399; SpCas9
tcgcttgagcccgggagg

SEQ ID NO: 26325 - DNA, 25 bp, Artificial Sequence
  Synthetic: FXN 3 forward 9:69037373-69037401; SpCas9
gagaatcgcttgagcccgggaggca

SEQ ID NO: 26326 - DNA, 24 bp, Artificial Sequence
  Synthetic: FXN 3 forward 9:69037374-69037401; SpCas9
agaatcgcttgagcccgggaggca

SEQ ID NO: 26327 - DNA, 23 bp, Artificial Sequence
  Synthetic: FXN 3 forward 9:69037375-69037401; SpCas9
gaatcgcttgagcccgggaggca

SEQ ID NO: 26328 - DNA, 22 bp, Artificial Sequence
  Synthetic: FXN 3 forward 9:69037376-69037401; SpCas9
aatcgcttgagcccgggaggca

SEQ ID NO: 26329 - DNA, 21 bp, Artificial Sequence
  Synthetic: FXN 3 forward 9:69037377-69037401; SpCas9
atcgcttgagcccgggaggca

SEQ ID NO: 26330 - DNA, 20 bp, Artificial Sequence
  Synthetic: FXN 3 forward 9:69037378-69037401; SpCas9
tcgcttgagcccgggaggca

SEQ ID NO: 26331 - DNA, 19 bp, Artificial Sequence
  Synthetic: FXN 3 forward 9:69037379-69037401; SpCas9
cgcttgagcccgggaggca

SEQ ID NO: 26332 - DNA, 18 bp, Artificial Sequence
  Synthetic: FXN 3 forward 9:69037380-69037401; SpCas9
gcttgagcccgggaggca

SEQ ID NO: 26333 - DNA, 25 bp, Artificial Sequence
  Synthetic: FXN 3 forward 9:69037374-69037402; SpCas9
agaatcgcttgagcccgggaggcag

SEQ ID NO: 26334 - DNA, 24 bp, Artificial Sequence
  Synthetic: FXN 3 forward 9:69037375-69037402; SpCas9
gaatcgcttgagcccgggaggcag

SEQ ID NO: 26335 - DNA, 23 bp, Artificial Sequence
  Synthetic: FXN 3 forward 9:69037376-69037402; SpCas9
aatcgcttgagcccgggaggcag

SEQ ID NO: 26336 - DNA, 22 bp, Artificial Sequence
  Synthetic: FXN 3 forward 9:69037377-69037402; SpCas9
atcgcttgagcccgggaggcag

SEQ ID NO: 26337 - DNA, 21 bp, Artificial Sequence
  Synthetic: FXN 3 forward 9:69037378-69037402; SpCas9
tcgcttgagcccgggaggcag

SEQ ID NO: 26338 - DNA, 20 bp, Artificial Sequence
  Synthetic: FXN 3 forward 9:69037379-69037402; SpCas9
cgcttgagcccgggaggcag

SEQ ID NO: 26339 - DNA, 19 bp, Artificial Sequence
  Synthetic: FXN 3 forward 9:69037380-69037402; SpCas9
gcttgagcccgggaggcag

SEQ ID NO: 26340 - DNA, 18 bp, Artificial Sequence
  Synthetic: FXN 3 forward 9:69037381-69037402; SpCas9
cttgagcccgggaggcag

SEQ ID NO: 26341 - DNA, 25 bp, Artificial Sequence
  Synthetic: FXN 3 reverse 9:69037381-69037409; SpCas9
aatgcaacctctgcctcccgggctc

SEQ ID NO: 26342 - DNA, 24 bp, Artificial Sequence
  Synthetic: FXN 3 reverse 9:69037382-69037409; SpCas9
atgcaacctctgcctcccgggctc

SEQ ID NO: 26343 - DNA, 23 bp, Artificial Sequence
  Synthetic: FXN 3 reverse 9:69037383-69037409; SpCas9
tgcaacctctgcctcccgggctc

SEQ ID NO: 26344 - DNA, 22 bp, Artificial Sequence
  Synthetic: FXN 3 reverse 9:69037384-69037409; SpCas9
gcaacctctgcctcccgggctc

SEQ ID NO: 26345 - DNA, 21 bp, Artificial Sequence
  Synthetic: FXN 3 reverse 9:69037385-69037409; SpCas9
caacctctgcctcccgggctc

SEQ ID NO: 26346 - DNA, 20 bp, Artificial Sequence
  Synthetic: FXN 3 reverse 9:69037386-69037409; SpCas9
aacctctgcctcccgggctc

SEQ ID NO: 26347 - DNA, 19 bp, Artificial Sequence
  Synthetic: FXN 3 reverse 9:69037387-69037409; SpCas9
acctctgcctcccgggctc

SEQ ID NO: 26348 - DNA, 18 bp, Artificial Sequence
  Synthetic: FXN 3 reverse 9:69037388-69037409; SpCas9
cctctgcctcccgggctc

SEQ ID NO: 26349 - DNA, 25 bp, Artificial Sequence
  Synthetic: FXN 3 forward 9:69037384-69037412; SpCas9
gagcccgggaggcagaggttgcatt

SEQ ID NO: 26350 - DNA, 24 bp, Artificial Sequence
  Synthetic: FXN 3 forward 9:69037385-69037412; SpCas9
agcccgggaggcagaggttgcatt

SEQ ID NO: 26351 - DNA, 23 bp, Artificial Sequence
  Synthetic: FXN 3 forward 9:69037386-69037412; SpCas9
gcccgggaggcagaggttgcatt

SEQ ID NO: 26352 - DNA, 22 bp, Artificial Sequence
  Synthetic: FXN 3 forward 9:69037387-69037412; SpCas9
cccgggaggcagaggttgcatt

SEQ ID NO: 26353 - DNA, 21 bp, Artificial Sequence
  Synthetic: FXN 3 forward 9:69037388-69037412; SpCas9
ccgggaggcagaggttgcatt

SEQ ID NO: 26354 - DNA, 20 bp, Artificial Sequence
  Synthetic: FXN 3 forward 9:69037389-69037412; SpCas9
cgggaggcagaggttgcatt

SEQ ID NO: 26355 - DNA, 19 bp, Artificial Sequence
  Synthetic: FXN 3 forward 9:69037390-69037412; SpCas9
gggaggcagaggttgcatt

SEQ ID NO: 26356 - DNA, 18 bp, Artificial Sequence
  Synthetic: FXN 3 forward 9:69037391-69037412; SpCas9
ggaggcagaggttgcatt

SEQ ID NO: 26357 - DNA, 25 bp, Artificial Sequence
  Synthetic: FXN 3 reverse 9:69037387-69037415; SpCas9
tggcttaatgcaacctctgcctccc

SEQ ID NO: 26358 - DNA, 24 bp, Artificial Sequence
  Synthetic: FXN 3 reverse 9:69037388-69037415; SpCas9
ggcttaatgcaacctctgcctccc

SEQ ID NO: 26359 - DNA, 23 bp, Artificial Sequence
  Synthetic: FXN 3 reverse 9:69037389-69037415; SpCas9
gcttaatgcaacctctgcctccc

SEQ ID NO: 26360 - DNA, 22 bp, Artificial Sequence
  Synthetic: FXN 3 reverse 9:69037390-69037415; SpCas9
cttaatgcaacctctgcctccc

SEQ ID NO: 26361 - DNA, 21 bp, Artificial Sequence
  Synthetic: FXN 3 reverse 9:69037391-69037415; SpCas9
ttaatgcaacctctgcctccc

SEQ ID NO: 26362 - DNA, 20 bp, Artificial Sequence
  Synthetic: FXN 3 reverse 9:69037392-69037415; SpCas9
taatgcaacctctgcctccc

SEQ ID NO: 26363 - DNA, 19 bp, Artificial Sequence
  Synthetic: FXN 3 reverse 9:69037393-69037415; SpCas9
aatgcaacctctgcctccc

SEQ ID NO: 26364 - DNA, 18 bp, Artificial Sequence
  Synthetic: FXN 3 reverse 9:69037394-69037415; SpCas9
atgcaacctctgcctccc

SEQ ID NO: 26365 - DNA, 25 bp, Artificial Sequence
  Synthetic: FXN 3 reverse 9:69037388-69037416; SpCas9
ttggcttaatgcaacctctgcctcc

SEQ ID NO: 26366 - DNA, 24 bp, Artificial Sequence
  Synthetic: FXN 3 reverse 9:69037389-69037416; SpCas9
tggcttaatgcaacctctgcctcc

SEQ ID NO: 26367 - DNA, 23 bp, Artificial Sequence
  Synthetic: FXN 3 reverse 9:69037390-69037416; SpCas9
ggcttaatgcaacctctgcctcc

SEQ ID NO: 26368 - DNA, 22 bp, Artificial Sequence
  Synthetic: FXN 3 reverse 9:69037391-69037416; SpCas9
gcttaatgcaacctctgcctcc

SEQ ID NO: 26369 - DNA, 21 bp, Artificial Sequence
  Synthetic: FXN 3 reverse 9:69037392-69037416; SpCas9
cttaatgcaacctctgcctcc

SEQ ID NO: 26370 - DNA, 20 bp, Artificial Sequence
  Synthetic: FXN 3 reverse 9:69037393-69037416; SpCas9
ttaatgcaacctctgcctcc

SEQ ID NO: 26371 - DNA, 19 bp, Artificial Sequence
  Synthetic: FXN 3 reverse 9:69037394-69037416; SpCas9
taatgcaacctctgcctcc

SEQ ID NO: 26372 - DNA, 18 bp, Artificial Sequence
  Synthetic: FXN 3 reverse 9:69037395-69037416; SpCas9
aatgcaacctctgcctcc

SEQ ID NO: 26373 - DNA, 25 bp, Artificial Sequence
  Synthetic: FXN 3 forward 9:69037389-69037417; SpCas9
cgggaggcagaggttgcattaagcc

SEQ ID NO: 26374 - DNA, 24 bp, Artificial Sequence
  Synthetic: FXN 3 forward 9:69037390-69037417; SpCas9
gggaggcagaggttgcattaagcc

SEQ ID NO: 26375 - DNA, 23 bp, Artificial Sequence
  Synthetic: FXN 3 forward 9:69037391-69037417; SpCas9
ggaggcagaggttgcattaagcc

SEQ ID NO: 26376 - DNA, 22 bp, Artificial Sequence
  Synthetic: FXN 3 forward 9:69037392-69037417; SpCas9
gaggcagaggttgcattaagcc

SEQ ID NO: 26377 - DNA, 21 bp, Artificial Sequence
  Synthetic: FXN 3 forward 9:69037393-69037417; SpCas9
aggcagaggttgcattaagcc

SEQ ID NO: 26378 - DNA, 20 bp, Artificial Sequence
  Synthetic: FXN 3 forward 9:69037394-69037417; SpCas9
ggcagaggttgcattaagcc

SEQ ID NO: 26379 - DNA, 19 bp, Artificial Sequence
  Synthetic: FXN 3 forward 9:69037395-69037417; SpCas9
gcagaggttgcattaagcc

SEQ ID NO: 26380 - DNA, 18 bp, Artificial Sequence
  Synthetic: FXN 3 forward 9:69037396-69037417; SpCas9
cagaggttgcattaagcc

SEQ ID NO: 26381 - DNA, 25 bp, Artificial Sequence
  Synthetic: FXN 3 forward 9:69037408-69037436; SpCas9
taagccaagatcgcccaatgcactc

SEQ ID NO: 26382 - DNA, 24 bp, Artificial Sequence
  Synthetic: FXN 3 forward 9:69037409-69037436; SpCas9
aagccaagatcgcccaatgcactc

SEQ ID NO: 26383 - DNA, 23 bp, Artificial Sequence
  Synthetic: FXN 3 forward 9:69037410-69037436; SpCas9
agccaagatcgcccaatgcactc

SEQ ID NO: 26384 - DNA, 22 bp, Artificial Sequence
  Synthetic: FXN 3 forward 9:69037411-69037436; SpCas9
gccaagatcgcccaatgcactc

SEQ ID NO: 26385 - DNA, 21 bp, Artificial Sequence
  Synthetic: FXN 3 forward 9:69037412-69037436; SpCas9
ccaagatcgcccaatgcactc

SEQ ID NO: 26386 - DNA, 20 bp, Artificial Sequence
  Synthetic: FXN 3 forward 9:69037413-69037436; SpCas9
caagatcgcccaatgcactc

SEQ ID NO: 26387 - DNA, 19 bp, Artificial Sequence
  Synthetic: FXN 3 forward 9:69037414-69037436; SpCas9
aagatcgcccaatgcactc

SEQ ID NO: 26388 - DNA, 18 bp, Artificial Sequence
  Synthetic: FXN 3 forward 9:69037415-69037436; SpCas9
agatcgcccaatgcactc

SEQ ID NO: 26389 - DNA, 25 bp, Artificial Sequence
  Synthetic: FXN 3 reverse 9:69037412-69037440; SpCas9
caggccggagtgcattgggcgatct

SEQ ID NO: 26390 - DNA, 24 bp, Artificial Sequence
  Synthetic: FXN 3 reverse 9:69037413-69037440; SpCas9
aggccggagtgcattgggcgatct

SEQ ID NO: 26391 - DNA, 23 bp, Artificial Sequence
  Synthetic: FXN 3 reverse 9:69037414-69037440; SpCas9
ggccggagtgcattgggcgatct

SEQ ID NO: 26392 - DNA, 22 bp, Artificial Sequence
  Synthetic: FXN 3 reverse 9:69037415-69037440; SpCas9
gccggagtgcattgggcgatct

SEQ ID NO: 26393 - DNA, 21 bp, Artificial Sequence
  Synthetic: FXN 3 reverse 9:69037416-69037440; SpCas9
ccggagtgcattgggcgatct

SEQ ID NO: 26394 - DNA, 20 bp, Artificial Sequence
  Synthetic: FXN 3 reverse 9:69037417-69037440; SpCas9
cggagtgcattgggcgatct

SEQ ID NO: 26395 - DNA, 19 bp, Artificial Sequence
  Synthetic: FXN 3 reverse 9:69037418-69037440; SpCas9
ggagtgcattgggcgatct

SEQ ID NO: 26396 - DNA, 18 bp, Artificial Sequence
  Synthetic: FXN 3 reverse 9:69037419-69037440; SpCas9
gagtgcattgggcgatct

SEQ ID NO: 26397 - DNA, 25 bp, Artificial Sequence
  Synthetic: FXN 3 forward 9:69037413-69037441; SpCas9
caagatcgcccaatgcactccggcc

SEQ ID NO: 26398 - DNA, 24 bp, Artificial Sequence
  Synthetic: FXN 3 forward 9:69037414-69037441; SpCas9
aagatcgcccaatgcactccggcc

SEQ ID NO: 26399 - DNA, 23 bp, Artificial Sequence
  Synthetic: FXN 3 forward 9:69037415-69037441; SpCas9
agatcgcccaatgcactccggcc

SEQ ID NO: 26400 - DNA, 22 bp, Artificial Sequence
  Synthetic: FXN 3 forward 9:69037416-69037441; SpCas9
gatcgcccaatgcactccggcc

SEQ ID NO: 26401 - DNA, 21 bp, Artificial Sequence
  Synthetic: FXN 3 forward 9:69037417-69037441; SpCas9
atcgcccaatgcactccggcc

SEQ ID NO: 26402 - DNA, 20 bp, Artificial Sequence
  Synthetic: FXN 3 forward 9:69037418-69037441; SpCas9
tcgcccaatgcactccggcc

SEQ ID NO: 26403 - DNA, 19 bp, Artificial Sequence
  Synthetic: FXN 3 forward 9:69037419-69037441; SpCas9
cgcccaatgcactccggcc

SEQ ID NO: 26404 - DNA, 18 bp, Artificial Sequence
  Synthetic: FXN 3 forward 9:69037420-69037441; SpCas9
gcccaatgcactccggcc

SEQ ID NO: 26405 - DNA, 25 bp, Artificial Sequence
  Synthetic: FXN 3 forward 9:69037414-69037442; SpCas9
aagatcgcccaatgcactccggcct

SEQ ID NO: 26406 - DNA, 24 bp, Artificial Sequence
  Synthetic: FXN 3 forward 9:69037415-69037442; SpCas9
agatcgcccaatgcactccggcct

SEQ ID NO: 26407 - DNA, 23 bp, Artificial Sequence
  Synthetic: FXN 3 forward 9:69037416-69037442; SpCas9
gatcgcccaatgcactccggcct

SEQ ID NO: 26408 - DNA, 22 bp, Artificial Sequence
  Synthetic: FXN 3 forward 9:69037417-69037442; SpCas9
atcgcccaatgcactccggcct

SEQ ID NO: 26409 - DNA, 21 bp, Artificial Sequence
  Synthetic: FXN 3 forward 9:69037418-69037442; SpCas9
tcgcccaatgcactccggcct

SEQ ID NO: 26410 - DNA, 20 bp, Artificial Sequence
  Synthetic: FXN 3 forward 9:69037419-69037442; SpCas9
cgcccaatgcactccggcct

SEQ ID NO: 26411 - DNA, 19 bp, Artificial Sequence
  Synthetic: FXN 3 forward 9:69037420-69037442; SpCas9
gcccaatgcactccggcct

SEQ ID NO: 26412 - DNA, 18 bp, Artificial Sequence
  Synthetic: FXN 3 forward 9:69037421-69037442; SpCas9
cccaatgcactccggcct

SEQ ID NO: 26413 - DNA, 25 bp, Artificial Sequence
  Synthetic: FXN 3 forward 9:69037420-69037448; SpCas9
gcccaatgcactccggcctgggcga

SEQ ID NO: 26414 - DNA, 24 bp, Artificial Sequence
  Synthetic: FXN 3 forward 9:69037421-69037448; SpCas9
cccaatgcactccggcctgggcga

SEQ ID NO: 26415 - DNA, 23 bp, Artificial Sequence
  Synthetic: FXN 3 forward 9:69037422-69037448; SpCas9
ccaatgcactccggcctgggcga

SEQ ID NO: 26416 - DNA, 22 bp, Artificial Sequence
  Synthetic: FXN 3 forward 9:69037423-69037448; SpCas9
caatgcactccggcctgggcga

SEQ ID NO: 26417 - DNA, 21 bp, Artificial Sequence
  Synthetic: FXN 3 forward 9:69037424-69037448; SpCas9
aatgcactccggcctgggcga

SEQ ID NO: 26418 - DNA, 20 bp, Artificial Sequence
  Synthetic: FXN 3 forward 9:69037425-69037448; SpCas9
atgcactccggcctgggcga

SEQ ID NO: 26419 - DNA, 19 bp, Artificial Sequence
  Synthetic: FXN 3 forward 9:69037426-69037448; SpCas9
tgcactccggcctgggcga

SEQ ID NO: 26420 - DNA, 18 bp, Artificial Sequence
  Synthetic: FXN 3 forward 9:69037427-69037448; SpCas9
gcactccggcctgggcga

SEQ ID NO: 26421 - DNA, 25 bp, Artificial Sequence
  Synthetic: FXN 3 reverse 9:69037421-69037449; SpCas9
tctgtcgcccaggccggagtgcatt

SEQ ID NO: 26422 - DNA, 24 bp, Artificial Sequence
  Synthetic: FXN 3 reverse 9:69037422-69037449; SpCas9
ctgtcgcccaggccggagtgcatt

SEQ ID NO: 26423 - DNA, 23 bp, Artificial Sequence
  Synthetic: FXN 3 reverse 9:69037423-69037449; SpCas9
tgtcgcccaggccggagtgcatt

SEQ ID NO: 26424 - DNA, 22 bp, Artificial Sequence
  Synthetic: FXN 3 reverse 9:69037424-69037449; SpCas9
gtcgcccaggccggagtgcatt

SEQ ID NO: 26425 - DNA, 21 bp, Artificial Sequence
  Synthetic: FXN 3 reverse 9:69037425-69037449; SpCas9
tcgcccaggccggagtgcatt

SEQ ID NO: 26426 - DNA, 20 bp, Artificial Sequence
  Synthetic: FXN 3 reverse 9:69037426-69037449; SpCas9
cgcccaggccggagtgcatt

SEQ ID NO: 26427 - DNA, 19 bp, Artificial Sequence
  Synthetic: FXN 3 reverse 9:69037427-69037449; SpCas9
gcccaggccggagtgcatt

SEQ ID NO: 26428 - DNA, 18 bp, Artificial Sequence
  Synthetic: FXN 3 reverse 9:69037428-69037449; SpCas9
cccaggccggagtgcatt

SEQ ID NO: 26429 - DNA, 25 bp, Artificial Sequence
  Synthetic: FXN 3 forward 9:69037422-69037450; SpCas9
ccaatgcactccggcctgggcgaca

SEQ ID NO: 26430 - DNA, 24 bp, Artificial Sequence
  Synthetic: FXN 3 forward 9:69037423-69037450; SpCas9
caatgcactccggcctgggcgaca

SEQ ID NO: 26431 - DNA, 23 bp, Artificial Sequence
  Synthetic: FXN 3 forward 9:69037424-69037450; SpCas9
aatgcactccggcctgggcgaca

SEQ ID NO: 26432 - DNA, 22 bp, Artificial Sequence
  Synthetic: FXN 3 forward 9:69037425-69037450; SpCas9
atgcactccggcctgggcgaca

SEQ ID NO: 26433 - DNA, 21 bp, Artificial Sequence
  Synthetic: FXN 3 forward 9:69037426-69037450; SpCas9
tgcactccggcctgggcgaca

SEQ ID NO: 26434 - DNA, 20 bp, Artificial Sequence
  Synthetic: FXN 3 forward 9:69037427-69037450; SpCas9
gcactccggcctgggcgaca

SEQ ID NO: 26435 - DNA, 19 bp, Artificial Sequence
  Synthetic: FXN 3 forward 9:69037428-69037450; SpCas9
cactccggcctgggcgaca

SEQ ID NO: 26436 - DNA, 18 bp, Artificial Sequence
  Synthetic: FXN 3 forward 9:69037429-69037450; SpCas9
actccggcctgggcgaca

SEQ ID NO: 26437 - DNA, 25 bp, Artificial Sequence
  Synthetic: FXN 3 reverse 9:69037422-69037450; SpCas9
ctctgtcgcccaggccggagtgcat

SEQ ID NO: 26438 - DNA, 24 bp, Artificial Sequence
  Synthetic: FXN 3 reverse 9:69037423-69037450; SpCas9
tctgtcgcccaggccggagtgcat

SEQ ID NO: 26439 - DNA, 23 bp, Artificial Sequence
  Synthetic: FXN 3 reverse 9:69037424-69037450; SpCas9
ctgtcgcccaggccggagtgcat

SEQ ID NO: 26440 - DNA, 22 bp, Artificial Sequence
  Synthetic: FXN 3 reverse 9:69037425-69037450; SpCas9
tgtcgcccaggccggagtgcat

SEQ ID NO: 26441 - DNA, 21 bp, Artificial Sequence
  Synthetic: FXN 3 reverse 9:69037426-69037450; SpCas9
gtcgcccaggccggagtgcat

SEQ ID NO: 26442 - DNA, 20 bp, Artificial Sequence
  Synthetic: FXN 3 reverse 9:69037427-69037450; SpCas9
tcgcccaggccggagtgcat

SEQ ID NO: 26443 - DNA, 19 bp, Artificial Sequence
  Synthetic: FXN 3 reverse 9:69037428-69037450; SpCas9
cgcccaggccggagtgcat

SEQ ID NO: 26444 - DNA, 18 bp, Artificial Sequence
  Synthetic: FXN 3 reverse 9:69037429-69037450; SpCas9
gcccaggccggagtgcat

SEQ ID NO: 26445 - DNA, 25 bp, Artificial Sequence
  Synthetic: FXN 3 forward 9:69037426-69037454; SpCas9
tgcactccggcctgggcgacagagc

SEQ ID NO: 26446 - DNA, 24 bp, Artificial Sequence
  Synthetic: FXN 3 forward 9:69037427-69037454; SpCas9
gcactccggcctgggcgacagagc

SEQ ID NO: 26447 - DNA, 23 bp, Artificial Sequence
  Synthetic: FXN 3 forward 9:69037428-69037454; SpCas9
cactccggcctgggcgacagagc

SEQ ID NO: 26448 - DNA, 22 bp, Artificial Sequence
  Synthetic: FXN 3 forward 9:69037429-69037454; SpCas9
actccggcctgggcgacagagc

SEQ ID NO: 26449 - DNA, 21 bp, Artificial Sequence
  Synthetic: FXN 3 forward 9:69037430-69037454; SpCas9
ctccggcctgggcgacagagc

SEQ ID NO: 26450 - DNA, 20 bp, Artificial Sequence
  Synthetic: FXN 3 forward 9:69037431-69037454; SpCas9
tccggcctgggcgacagagc

SEQ ID NO: 26451 - DNA, 19 bp, Artificial Sequence
  Synthetic: FXN 3 forward 9:69037432-69037454; SpCas9
ccggcctgggcgacagagc

SEQ ID NO: 26452 - DNA, 18 bp, Artificial Sequence
  Synthetic: FXN 3 forward 9:69037433-69037454; SpCas9
cggcctgggcgacagagc

SEQ ID NO: 26453 - DNA, 25 bp, Artificial Sequence
  Synthetic: FXN 3 reverse 9:69037430-69037458; SpCas9
gagtcttgctctgtcgcccaggccg

SEQ ID NO: 26454 - DNA, 24 bp, Artificial Sequence
  Synthetic: FXN 3 reverse 9:69037431-69037458; SpCas9
agtcttgctctgtcgcccaggccg

SEQ ID NO: 26455 - DNA, 23 bp, Artificial Sequence
  Synthetic: FXN 3 reverse 9:69037432-69037458; SpCas9
gtcttgctctgtcgcccaggccg

SEQ ID NO: 26456 - DNA, 22 bp, Artificial Sequence
  Synthetic: FXN 3 reverse 9:69037433-69037458; SpCas9
tcttgctctgtcgcccaggccg

SEQ ID NO: 26457 - DNA, 21 bp, Artificial Sequence
  Synthetic: FXN 3 reverse 9:69037434-69037458; SpCas9
cttgctctgtcgcccaggccg

SEQ ID NO: 26458 - DNA, 20 bp, Artificial Sequence
  Synthetic: FXN 3 reverse 9:69037435-69037458; SpCas9
ttgctctgtcgcccaggccg

SEQ ID NO: 26459 - DNA, 19 bp, Artificial Sequence
  Synthetic: FXN 3 reverse 9:69037436-69037458; SpCas9
tgctctgtcgcccaggccg

SEQ ID NO: 26460 - DNA, 18 bp, Artificial Sequence
  Synthetic: FXN 3 reverse 9:69037437-69037458; SpCas9
gctctgtcgcccaggccg

SEQ ID NO: 26461 - DNA, 25 bp, Artificial Sequence
  Synthetic: FXN 3 reverse 9:69037432-69037460; SpCas9
cggagtcttgctctgtcgcccaggc

SEQ ID NO: 26462 - DNA, 24 bp, Artificial Sequence
  Synthetic: FXN 3 reverse 9:69037433-69037460; SpCas9
ggagtcttgctctgtcgcccaggc

SEQ ID NO: 26463 - DNA, 23 bp, Artificial Sequence
  Synthetic: FXN 3 reverse 9:69037434-69037460; SpCas9
gagtcttgctctgtcgcccaggc

SEQ ID NO: 26464 - DNA, 22 bp, Artificial Sequence
  Synthetic: FXN 3 reverse 9:69037435-69037460; SpCas9
agtcttgctctgtcgcccaggc

SEQ ID NO: 26465 - DNA, 21 bp, Artificial Sequence
  Synthetic: FXN 3 reverse 9:69037436-69037460; SpCas9
gtcttgctctgtcgcccaggc

SEQ ID NO: 26466 - DNA, 20 bp, Artificial Sequence
  Synthetic: FXN 3 reverse 9:69037437-69037460; SpCas9
tcttgctctgtcgcccaggc

SEQ ID NO: 26467 - DNA, 19 bp, Artificial Sequence
  Synthetic: FXN 3 reverse 9:69037438-69037460; SpCas9
cttgctctgtcgcccaggc

SEQ ID NO: 26468 - DNA, 18 bp, Artificial Sequence
  Synthetic: FXN 3 reverse 9:69037439-69037460; SpCas9
ttgctctgtcgcccaggc

SEQ ID NO: 26469 - DNA, 25 bp, Artificial Sequence
  Synthetic: FXN 3 reverse 9:69037436-69037464; SpCas9
gagacggagtcttgctctgtcgccc

SEQ ID NO: 26470 - DNA, 24 bp, Artificial Sequence
  Synthetic: FXN 3 reverse 9:69037437-69037464; SpCas9
agacggagtcttgctctgtcgccc

SEQ ID NO: 26471 - DNA, 23 bp, Artificial Sequence
  Synthetic: FXN 3 reverse 9:69037438-69037464; SpCas9
gacggagtcttgctctgtcgccc

SEQ ID NO: 26472 - DNA, 22 bp, Artificial Sequence
  Synthetic: FXN 3 reverse 9:69037439-69037464; SpCas9
acggagtcttgctctgtcgccc

SEQ ID NO: 26473 - DNA, 21 bp, Artificial Sequence
  Synthetic: FXN 3 reverse 9:69037440-69037464; SpCas9
cggagtcttgctctgtcgccc

SEQ ID NO: 26474 - DNA, 20 bp, Artificial Sequence
  Synthetic: FXN 3 reverse 9:69037441-69037464; SpCas9
ggagtcttgctctgtcgccc

SEQ ID NO: 26475 - DNA, 19 bp, Artificial Sequence
  Synthetic: FXN 3 reverse 9:69037442-69037464; SpCas9
gagtcttgctctgtcgccc

SEQ ID NO: 26476 - DNA, 18 bp, Artificial Sequence
  Synthetic: FXN 3 reverse 9:69037443-69037464; SpCas9
agtcttgctctgtcgccc

SEQ ID NO: 26477 - DNA, 25 bp, Artificial Sequence
  Synthetic: FXN 3 reverse 9:69037437-69037465; SpCas9
tgagacggagtcttgctctgtcgcc

SEQ ID NO: 26478 - DNA, 24 bp, Artificial Sequence
  Synthetic: FXN 3 reverse 9:69037438-69037465; SpCas9
gagacggagtcttgctctgtcgcc

SEQ ID NO: 26479 - DNA, 23 bp, Artificial Sequence
  Synthetic: FXN 3 reverse 9:69037439-69037465; SpCas9
agacggagtcttgctctgtcgcc

SEQ ID NO: 26480 - DNA, 22 bp, Artificial Sequence
  Synthetic: FXN 3 reverse 9:69037440-69037465; SpCas9
gacggagtcttgctctgtcgcc

SEQ ID NO: 26481 - DNA, 21 bp, Artificial Sequence
  Synthetic: FXN 3 reverse 9:69037441-69037465; SpCas9
acggagtcttgctctgtcgcc

SEQ ID NO: 26482 - DNA, 20 bp, Artificial Sequence
  Synthetic: FXN 3 reverse 9:69037442-69037465; SpCas9
cggagtcttgctctgtcgcc

SEQ ID NO: 26483 - DNA, 19 bp, Artificial Sequence
  Synthetic: FXN 3 reverse 9:69037443-69037465; SpCas9
ggagtcttgctctgtcgcc

SEQ ID NO: 26484 - DNA, 18 bp, Artificial Sequence
  Synthetic: FXN 3 reverse 9:69037444-69037465; SpCas9
gagtcttgctctgtcgcc

SEQ ID NO: 26485 - DNA, 25 bp, Artificial Sequence
  Synthetic: FXN 3 reverse 9:69037455-69037483; SpCas9
tttattattattattttttgagacg

SEQ ID NO: 26486 - DNA, 24 bp, Artificial Sequence
  Synthetic: FXN 3 reverse 9:69037456-69037483; SpCas9
ttattattattattttttgagacg

SEQ ID NO: 26487 - DNA, 23 bp, Artificial Sequence
  Synthetic: FXN 3 reverse 9:69037457-69037483; SpCas9
tattattattattttttgagacg

SEQ ID NO: 26488 - DNA, 22 bp, Artificial Sequence
  Synthetic: FXN 3 reverse 9:69037458-69037483; SpCas9
attattattattttttgagacg

SEQ ID NO: 26489 - DNA, 21 bp, Artificial Sequence
  Synthetic: FXN 3 reverse 9:69037459-69037483; SpCas9
ttattattattttttgagacg

SEQ ID NO: 26490 - DNA, 20 bp, Artificial Sequence
  Synthetic: FXN 3 reverse 9:69037460-69037483; SpCas9
tattattattttttgagacg

SEQ ID NO: 26491 - DNA, 19 bp, Artificial Sequence
  Synthetic: FXN 3 reverse 9:69037461-69037483; SpCas9
attattattttttgagacg

SEQ ID NO: 26492 - DNA, 18 bp, Artificial Sequence
  Synthetic: FXN 3 reverse 9:69037462-69037483; SpCas9
ttattattttttgagacg

SEQ ID NO: 26493 - DNA, 25 bp, Artificial Sequence
  Synthetic: FXN 3 reverse 9:69037457-69037485; SpCas9
tatttattattattattttttgaga

SEQ ID NO: 26494 - DNA, 24 bp, Artificial Sequence
  Synthetic: FXN 3 reverse 9:69037458-69037485; SpCas9
atttattattattattttttgaga

SEQ ID NO: 26495 - DNA, 23 bp, Artificial Sequence
  Synthetic: FXN 3 reverse 9:69037459-69037485; SpCas9
tttattattattattttttgaga

SEQ ID NO: 26496 - DNA, 22 bp, Artificial Sequence
  Synthetic: FXN 3 reverse 9:69037460-69037485; SpCas9
ttattattattattttttgaga

SEQ ID NO: 26497 - DNA, 21 bp, Artificial Sequence
  Synthetic: FXN 3 reverse 9:69037461-69037485; SpCas9
tattattattattttttgaga

SEQ ID NO: 26498 - DNA, 20 bp, Artificial Sequence
  Synthetic: FXN 3 reverse 9:69037462-69037485; SpCas9
attattattattttttgaga

SEQ ID NO: 26499 - DNA, 19 bp, Artificial Sequence
  Synthetic: FXN 3 reverse 9:69037463-69037485; SpCas9
ttattattattttttgaga

SEQ ID NO: 26500 - DNA, 18 bp, Artificial Sequence
  Synthetic: FXN 3 reverse 9:69037464-69037485; SpCas9
tattattattttttgaga

SEQ ID NO: 26501 - DNA, 25 bp, Artificial Sequence
  Synthetic: FXN 3 reverse 9:69037461-69037489; SpCas9
tttttatttattattattatttttt

SEQ ID NO: 26502 - DNA, 24 bp, Artificial Sequence
  Synthetic: FXN 3 reverse 9:69037462-69037489; SpCas9
ttttatttattattattatttttt

SEQ ID NO: 26503 - DNA, 23 bp, Artificial Sequence
  Synthetic: FXN 3 reverse 9:69037463-69037489; SpCas9
tttatttattattattatttttt

SEQ ID NO: 26504 - DNA, 22 bp, Artificial Sequence
  Synthetic: FXN 3 reverse 9:69037464-69037489; SpCas9
ttatttattattattatttttt

SEQ ID NO: 26505 - DNA, 21 bp, Artificial Sequence
  Synthetic: FXN 3 reverse 9:69037465-69037489; SpCas9
tatttattattattatttttt

SEQ ID NO: 26506 - DNA, 20 bp, Artificial Sequence
  Synthetic: FXN 3 reverse 9:69037466-69037489; SpCas9
atttattattattatttttt

SEQ ID NO: 26507 - DNA, 19 bp, Artificial Sequence
  Synthetic: FXN 3 reverse 9:69037467-69037489; SpCas9
tttattattattatttttt

SEQ ID NO: 26508 - DNA, 18 bp, Artificial Sequence
  Synthetic: FXN 3 reverse 9:69037468-69037489; SpCas9
ttattattattatttttt

SEQ ID NO: 26509 - DNA, 25 bp, Artificial Sequence
  Synthetic: FXN 3 forward 9:69037476-69037504; SpCas9
taataaataaaaataaaaaataaaa

SEQ ID NO: 26510 - DNA, 24 bp, Artificial Sequence
  Synthetic: FXN 3 forward 9:69037477-69037504; SpCas9
aataaataaaaataaaaaataaaa

SEQ ID NO: 26511 - DNA, 23 bp, Artificial Sequence
  Synthetic: FXN 3 forward 9:69037478-69037504; SpCas9
ataaataaaaataaaaaataaaa

SEQ ID NO: 26512 - DNA, 22 bp, Artificial Sequence
  Synthetic: FXN 3 forward 9:69037479-69037504; SpCas9
taaataaaaataaaaaataaaa

SEQ ID NO: 26513 - DNA, 21 bp, Artificial Sequence
  Synthetic: FXN 3 forward 9:69037480-69037504; SpCas9
aaataaaaataaaaaataaaa

SEQ ID NO: 26514 - DNA, 20 bp, Artificial Sequence
  Synthetic: FXN 3 forward 9:69037481-69037504; SpCas9
aataaaaataaaaaataaaa

SEQ ID NO: 26515 - DNA, 19 bp, Artificial Sequence
  Synthetic: FXN 3 forward 9:69037482-69037504; SpCas9
ataaaaataaaaaataaaa

SEQ ID NO: 26516 - DNA, 18 bp, Artificial Sequence
  Synthetic: FXN 3 forward 9:69037483-69037504; SpCas9
taaaaataaaaaataaaa

SEQ ID NO: 26517 - DNA, 25 bp, Artificial Sequence
  Synthetic: FXN 3 forward 9:69037485-69037513; SpCas9
aaaataaaaaataaaatggatttcc

SEQ ID NO: 26518 - DNA, 24 bp, Artificial Sequence
  Synthetic: FXN 3 forward 9:69037486-69037513; SpCas9
aaataaaaaataaaatggatttcc

SEQ ID NO: 26519 - DNA, 23 bp, Artificial Sequence
  Synthetic: FXN 3 forward 9:69037487-69037513; SpCas9
aataaaaaataaaatggatttcc

SEQ ID NO: 26520 - DNA, 22 bp, Artificial Sequence
  Synthetic: FXN 3 forward 9:69037488-69037513; SpCas9
ataaaaaataaaatggatttcc

SEQ ID NO: 26521 - DNA, 21 bp, Artificial Sequence
  Synthetic: FXN 3 forward 9:69037489-69037513; SpCas9
taaaaaataaaatggatttcc

SEQ ID NO: 26522 - DNA, 20 bp, Artificial Sequence
  Synthetic: FXN 3 forward 9:69037490-69037513; SpCas9
aaaaaataaaatggatttcc

SEQ ID NO: 26523 - DNA, 19 bp, Artificial Sequence
  Synthetic: FXN 3 forward 9:69037491-69037513; SpCas9
aaaaataaaatggatttcc

SEQ ID NO: 26524 - DNA, 18 bp, Artificial Sequence
  Synthetic: FXN 3 forward 9:69037492-69037513; SpCas9
aaaataaaatggatttcc

SEQ ID NO: 26525 - DNA, 25 bp, Artificial Sequence
  Synthetic: FXN 3 forward 9:69037494-69037522; SpCas9
aataaaatggatttcccagcatctc

SEQ ID NO: 26526 - DNA, 24 bp, Artificial Sequence
  Synthetic: FXN 3 forward 9:69037495-69037522; SpCas9
ataaaatggatttcccagcatctc

SEQ ID NO: 26527 - DNA, 23 bp, Artificial Sequence
  Synthetic: FXN 3 forward 9:69037496-69037522; SpCas9
taaaatggatttcccagcatctc

SEQ ID NO: 26528 - DNA, 22 bp, Artificial Sequence
  Synthetic: FXN 3 forward 9:69037497-69037522; SpCas9
aaaatggatttcccagcatctc

SEQ ID NO: 26529 - DNA, 21 bp, Artificial Sequence
  Synthetic: FXN 3 forward 9:69037498-69037522; SpCas9
aaatggatttcccagcatctc

SEQ ID NO: 26530 - DNA, 20 bp, Artificial Sequence
  Synthetic: FXN 3 forward 9:69037499-69037522; SpCas9
aatggatttcccagcatctc

SEQ ID NO: 26531 - DNA, 19 bp, Artificial Sequence
  Synthetic: FXN 3 forward 9:69037500-69037522; SpCas9
atggatttcccagcatctc

SEQ ID NO: 26532 - DNA, 18 bp, Artificial Sequence
  Synthetic: FXN 3 forward 9:69037501-69037522; SpCas9
tggatttcccagcatctc

SEQ ID NO: 26533 - DNA, 25 bp, Artificial Sequence
  Synthetic: FXN 3 forward 9:69037502-69037530; SpCas9
ggatttcccagcatctctggaaaaa

SEQ ID NO: 26534 - DNA, 24 bp, Artificial Sequence
  Synthetic: FXN 3 forward 9:69037503-69037530; SpCas9
gatttcccagcatctctggaaaaa

SEQ ID NO: 26535 - DNA, 23 bp, Artificial Sequence
  Synthetic: FXN 3 forward 9:69037504-69037530; SpCas9
atttcccagcatctctggaaaaa

SEQ ID NO: 26536 - DNA, 22 bp, Artificial Sequence
  Synthetic: FXN 3 forward 9:69037505-69037530; SpCas9
tttcccagcatctctggaaaaa

SEQ ID NO: 26537 - DNA, 21 bp, Artificial Sequence
  Synthetic: FXN 3 forward 9:69037506-69037530; SpCas9
ttcccagcatctctggaaaaa

SEQ ID NO: 26538 - DNA, 20 bp, Artificial Sequence
  Synthetic: FXN 3 forward 9:69037507-69037530; SpCas9
tcccagcatctctggaaaaa

SEQ ID NO: 26539 - DNA, 19 bp, Artificial Sequence
  Synthetic: FXN 3 forward 9:69037508-69037530; SpCas9
cccagcatctctggaaaaa

SEQ ID NO: 26540 - DNA, 18 bp, Artificial Sequence
  Synthetic: FXN 3 forward 9:69037509-69037530; SpCas9
ccagcatctctggaaaaa

SEQ ID NO: 26541 - DNA, 25 bp, Artificial Sequence
  Synthetic: FXN 3 forward 9:69037503-69037531; SpCas9
gatttcccagcatctctggaaaaat

SEQ ID NO: 26542 - DNA, 24 bp, Artificial Sequence
  Synthetic: FXN 3 forward 9:69037504-69037531; SpCas9
atttcccagcatctctggaaaaat

SEQ ID NO: 26543 - DNA, 23 bp, Artificial Sequence
  Synthetic: FXN 3 forward 9:69037505-69037531; SpCas9
tttcccagcatctctggaaaaat

SEQ ID NO: 26544 - DNA, 22 bp, Artificial Sequence
  Synthetic: FXN 3 forward 9:69037506-69037531; SpCas9
ttcccagcatctctggaaaaat

SEQ ID NO: 26545 - DNA, 21 bp, Artificial Sequence
  Synthetic: FXN 3 forward 9:69037507-69037531; SpCas9
tcccagcatctctggaaaaat

SEQ ID NO: 26546 - DNA, 20 bp, Artificial Sequence
  Synthetic: FXN 3 forward 9:69037508-69037531; SpCas9
cccagcatctctggaaaaat

SEQ ID NO: 26547 - DNA, 19 bp, Artificial Sequence
  Synthetic: FXN 3 forward 9:69037509-69037531; SpCas9
ccagcatctctggaaaaat

SEQ ID NO: 26548 - DNA, 18 bp, Artificial Sequence
  Synthetic: FXN 3 forward 9:69037510-69037531; SpCas9
cagcatctctggaaaaat

SEQ ID NO: 26549 - DNA, 25 bp, Artificial Sequence
  Synthetic: FXN 3 forward 9:69037507-69037535; SpCas9
tcccagcatctctggaaaaataggc

SEQ ID NO: 26550 - DNA, 24 bp, Artificial Sequence
  Synthetic: FXN 3 forward 9:69037508-69037535; SpCas9
cccagcatctctggaaaaataggc

SEQ ID NO: 26551 - DNA, 23 bp, Artificial Sequence
  Synthetic: FXN 3 forward 9:69037509-69037535; SpCas9
ccagcatctctggaaaaataggc

SEQ ID NO: 26552 - DNA, 22 bp, Artificial Sequence
  Synthetic: FXN 3 forward 9:69037510-69037535; SpCas9
cagcatctctggaaaaataggc

SEQ ID NO: 26553 - DNA, 21 bp, Artificial Sequence
  Synthetic: FXN 3 forward 9:69037511-69037535; SpCas9
agcatctctggaaaaataggc

SEQ ID NO: 26554 - DNA, 20 bp, Artificial Sequence
  Synthetic: FXN 3 forward 9:69037512-69037535; SpCas9
gcatctctggaaaaataggc

SEQ ID NO: 26555 - DNA, 19 bp, Artificial Sequence
  Synthetic: FXN 3 forward 9:69037513-69037535; SpCas9
catctctggaaaaataggc

SEQ ID NO: 26556 - DNA, 18 bp, Artificial Sequence
  Synthetic: FXN 3 forward 9:69037514-69037535; SpCas9
atctctggaaaaataggc

SEQ ID NO: 26557 - DNA, 25 bp, Artificial Sequence
  Synthetic: FXN 3 reverse 9:69037508-69037536; SpCas9
acttgcctatttttccagagatgct

SEQ ID NO: 26558 - DNA, 24 bp, Artificial Sequence
  Synthetic: FXN 3 reverse 9:69037509-69037536; SpCas9
cttgcctatttttccagagatgct

SEQ ID NO: 26559 - DNA, 23 bp, Artificial Sequence
  Synthetic: FXN 3 reverse 9:69037510-69037536; SpCas9
ttgcctatttttccagagatgct

SEQ ID NO: 26560 - DNA, 22 bp, Artificial Sequence
  Synthetic: FXN 3 reverse 9:69037511-69037536; SpCas9
tgcctatttttccagagatgct

SEQ ID NO: 26561 - DNA, 21 bp, Artificial Sequence
  Synthetic: FXN 3 reverse 9:69037512-69037536; SpCas9
gcctatttttccagagatgct

SEQ ID NO: 26562 - DNA, 20 bp, Artificial Sequence
  Synthetic: FXN 3 reverse 9:69037513-69037536; SpCas9
cctatttttccagagatgct

SEQ ID NO: 26563 - DNA, 19 bp, Artificial Sequence
  Synthetic: FXN 3 reverse 9:69037514-69037536; SpCas9
ctatttttccagagatgct

SEQ ID NO: 26564 - DNA, 18 bp, Artificial Sequence
  Synthetic: FXN 3 reverse 9:69037515-69037536; SpCas9
tatttttccagagatgct

SEQ ID NO: 26565 - DNA, 25 bp, Artificial Sequence
  Synthetic: FXN 3 reverse 9:69037509-69037537; SpCas9
cacttgcctatttttccagagatgc

SEQ ID NO: 26566 - DNA, 24 bp, Artificial Sequence
  Synthetic: FXN 3 reverse 9:69037510-69037537; SpCas9
acttgcctatttttccagagatgc

SEQ ID NO: 26567 - DNA, 23 bp, Artificial Sequence
  Synthetic: FXN 3 reverse 9:69037511-69037537; SpCas9
cttgcctatttttccagagatgc

SEQ ID NO: 26568 - DNA, 22 bp, Artificial Sequence
  Synthetic: FXN 3 reverse 9:69037512-69037537; SpCas9
ttgcctatttttccagagatgc

SEQ ID NO: 26569 - DNA, 21 bp, Artificial Sequence
  Synthetic: FXN 3 reverse 9:69037513-69037537; SpCas9
tgcctatttttccagagatgc

SEQ ID NO: 26570 - DNA, 20 bp, Artificial Sequence
  Synthetic: FXN 3 reverse 9:69037514-69037537; SpCas9
gcctatttttccagagatgc

SEQ ID NO: 26571 - DNA, 19 bp, Artificial Sequence
  Synthetic: FXN 3 reverse 9:69037515-69037537; SpCas9
cctatttttccagagatgc

SEQ ID NO: 26572 - DNA, 18 bp, Artificial Sequence
  Synthetic: FXN 3 reverse 9:69037516-69037537; SpCas9
ctatttttccagagatgc

SEQ ID NO: 26573 - DNA, 25 bp, Artificial Sequence
  Synthetic: FXN 3 forward 9:69037512-69037540; SpCas9
gcatctctggaaaaataggcaagtg

SEQ ID NO: 26574 - DNA, 24 bp, Artificial Sequence
  Synthetic: FXN 3 forward 9:69037513-69037540; SpCas9
catctctggaaaaataggcaagtg

SEQ ID NO: 26575 - DNA, 23 bp, Artificial Sequence
  Synthetic: FXN 3 forward 9:69037514-69037540; SpCas9
atctctggaaaaataggcaagtg

SEQ ID NO: 26576 - DNA, 22 bp, Artificial Sequence
  Synthetic: FXN 3 forward 9:69037515-69037540; SpCas9
tctctggaaaaataggcaagtg

SEQ ID NO: 26577 - DNA, 21 bp, Artificial Sequence
  Synthetic: FXN 3 forward 9:69037516-69037540; SpCas9
ctctggaaaaataggcaagtg

SEQ ID NO: 26578 - DNA, 20 bp, Artificial Sequence
  Synthetic: FXN 3 forward 9:69037517-69037540; SpCas9
tctggaaaaataggcaagtg

SEQ ID NO: 26579 - DNA, 19 bp, Artificial Sequence
  Synthetic: FXN 3 forward 9:69037518-69037540; SpCas9
ctggaaaaataggcaagtg

SEQ ID NO: 26580 - DNA, 18 bp, Artificial Sequence
  Synthetic: FXN 3 forward 9:69037519-69037540; SpCas9
tggaaaaataggcaagtg

SEQ ID NO: 26581 - DNA, 25 bp, Artificial Sequence
  Synthetic: FXN 3 reverse 9:69037516-69037544; SpCas9
atggccacacttgcctatttttcca

SEQ ID NO: 26582 - DNA, 24 bp, Artificial Sequence
  Synthetic: FXN 3 reverse 9:69037517-69037544; SpCas9
tggccacacttgcctatttttcca

SEQ ID NO: 26583 - DNA, 23 bp, Artificial Sequence
  Synthetic: FXN 3 reverse 9:69037518-69037544; SpCas9
ggccacacttgcctatttttcca

SEQ ID NO: 26584 - DNA, 22 bp, Artificial Sequence
  Synthetic: FXN 3 reverse 9:69037519-69037544; SpCas9
gccacacttgcctatttttcca

SEQ ID NO: 26585 - DNA, 21 bp, Artificial Sequence
  Synthetic: FXN 3 reverse 9:69037520-69037544; SpCas9
ccacacttgcctatttttcca

SEQ ID NO: 26586 - DNA, 20 bp, Artificial Sequence
  Synthetic: FXN 3 reverse 9:69037521-69037544; SpCas9
cacacttgcctatttttcca

SEQ ID NO: 26587 - DNA, 19 bp, Artificial Sequence
  Synthetic: FXN 3 reverse 9:69037522-69037544; SpCas9
acacttgcctatttttcca

SEQ ID NO: 26588 - DNA, 18 bp, Artificial Sequence
  Synthetic: FXN 3 reverse 9:69037523-69037544; SpCas9
cacttgcctatttttcca

SEQ ID NO: 26589 - DNA, 25 bp, Artificial Sequence
  Synthetic: FXN 3 reverse 9:69037518-69037546; SpCas9
tcatggccacacttgcctatttttc

SEQ ID NO: 26590 - DNA, 24 bp, Artificial Sequence
  Synthetic: FXN 3 reverse 9:69037519-69037546; SpCas9
catggccacacttgcctatttttc

SEQ ID NO: 26591 - DNA, 23 bp, Artificial Sequence
  Synthetic: FXN 3 reverse 9:69037520-69037546; SpCas9
atggccacacttgcctatttttc

SEQ ID NO: 26592 - DNA, 22 bp, Artificial Sequence
  Synthetic: FXN 3 reverse 9:69037521-69037546; SpCas9
tggccacacttgcctatttttc

SEQ ID NO: 26593 - DNA, 21 bp, Artificial Sequence
  Synthetic: FXN 3 reverse 9:69037522-69037546; SpCas9
ggccacacttgcctatttttc

SEQ ID NO: 26594 - DNA, 20 bp, Artificial Sequence
  Synthetic: FXN 3 reverse 9:69037523-69037546; SpCas9
gccacacttgcctatttttc

SEQ ID NO: 26595 - DNA, 19 bp, Artificial Sequence
  Synthetic: FXN 3 reverse 9:69037524-69037546; SpCas9
ccacacttgcctatttttc

SEQ ID NO: 26596 - DNA, 18 bp, Artificial Sequence
  Synthetic: FXN 3 reverse 9:69037525-69037546; SpCas9
cacacttgcctatttttc

SEQ ID NO: 26597 - DNA, 25 bp, Artificial Sequence
  Synthetic: FXN 3 forward 9:69037521-69037549; SpCas9
gaaaaataggcaagtgtggccatga

SEQ ID NO: 26598 - DNA, 24 bp, Artificial Sequence
  Synthetic: FXN 3 forward 9:69037522-69037549; SpCas9
aaaaataggcaagtgtggccatga

SEQ ID NO: 26599 - DNA, 23 bp, Artificial Sequence
  Synthetic: FXN 3 forward 9:69037523-69037549; SpCas9
aaaataggcaagtgtggccatga

SEQ ID NO: 26600 - DNA, 22 bp, Artificial Sequence
  Synthetic: FXN 3 forward 9:69037524-69037549; SpCas9
aaataggcaagtgtggccatga

SEQ ID NO: 26601 - DNA, 21 bp, Artificial Sequence
  Synthetic: FXN 3 forward 9:69037525-69037549; SpCas9
aataggcaagtgtggccatga

SEQ ID NO: 26602 - DNA, 20 bp, Artificial Sequence
  Synthetic: FXN 3 forward 9:69037526-69037549; SpCas9
ataggcaagtgtggccatga

SEQ ID NO: 26603 - DNA, 19 bp, Artificial Sequence
  Synthetic: FXN 3 forward 9:69037527-69037549; SpCas9
taggcaagtgtggccatga

SEQ ID NO: 26604 - DNA, 18 bp, Artificial Sequence
  Synthetic: FXN 3 forward 9:69037528-69037549; SpCas9
aggcaagtgtggccatga

SEQ ID NO: 26605 - DNA, 25 bp, Artificial Sequence
  Synthetic: FXN 3 forward 9:69037528-69037556; SpCas9
aggcaagtgtggccatgatggtcct

SEQ ID NO: 26606 - DNA, 24 bp, Artificial Sequence
  Synthetic: FXN 3 forward 9:69037529-69037556; SpCas9
ggcaagtgtggccatgatggtcct

SEQ ID NO: 26607 - DNA, 23 bp, Artificial Sequence
  Synthetic: FXN 3 forward 9:69037530-69037556; SpCas9
gcaagtgtggccatgatggtcct

SEQ ID NO: 26608 - DNA, 22 bp, Artificial Sequence
  Synthetic: FXN 3 forward 9:69037531-69037556; SpCas9
caagtgtggccatgatggtcct

SEQ ID NO: 26609 - DNA, 21 bp, Artificial Sequence
  Synthetic: FXN 3 forward 9:69037532-69037556; SpCas9
aagtgtggccatgatggtcct

SEQ ID NO: 26610 - DNA, 20 bp, Artificial Sequence
  Synthetic: FXN 3 forward 9:69037533-69037556; SpCas9
agtgtggccatgatggtcct

SEQ ID NO: 26611 - DNA, 19 bp, Artificial Sequence
  Synthetic: FXN 3 forward 9:69037534-69037556; SpCas9
gtgtggccatgatggtcct

SEQ ID NO: 26612 - DNA, 18 bp, Artificial Sequence
  Synthetic: FXN 3 forward 9:69037535-69037556; SpCas9
tgtggccatgatggtcct

SEQ ID NO: 26613 - DNA, 25 bp, Artificial Sequence
  Synthetic: FXN 3 forward 9:69037539-69037567; SpCas9
gccatgatggtccttagatctcctc

SEQ ID NO: 26614 - DNA, 24 bp, Artificial Sequence
  Synthetic: FXN 3 forward 9:69037540-69037567; SpCas9
ccatgatggtccttagatctcctc

SEQ ID NO: 26615 - DNA, 23 bp, Artificial Sequence
  Synthetic: FXN 3 forward 9:69037541-69037567; SpCas9
catgatggtccttagatctcctc

SEQ ID NO: 26616 - DNA, 22 bp, Artificial Sequence
  Synthetic: FXN 3 forward 9:69037542-69037567; SpCas9
atgatggtccttagatctcctc

SEQ ID NO: 26617 - DNA, 21 bp, Artificial Sequence
  Synthetic: FXN 3 forward 9:69037543-69037567; SpCas9
tgatggtccttagatctcctc

SEQ ID NO: 26618 - DNA, 20 bp, Artificial Sequence
  Synthetic: FXN 3 forward 9:69037544-69037567; SpCas9
gatggtccttagatctcctc

SEQ ID NO: 26619 - DNA, 19 bp, Artificial Sequence
  Synthetic: FXN 3 forward 9:69037545-69037567; SpCas9
atggtccttagatctcctc

SEQ ID NO: 26620 - DNA, 18 bp, Artificial Sequence
  Synthetic: FXN 3 forward 9:69037546-69037567; SpCas9
tggtccttagatctcctc

SEQ ID NO: 26621 - DNA, 25 bp, Artificial Sequence
  Synthetic: FXN 3 forward 9:69037540-69037568; SpCas9
ccatgatggtccttagatctcctct

SEQ ID NO: 26622 - DNA, 24 bp, Artificial Sequence
  Synthetic: FXN 3 forward 9:69037541-69037568; SpCas9
catgatggtccttagatctcctct

SEQ ID NO: 26623 - DNA, 23 bp, Artificial Sequence
  Synthetic: FXN 3 forward 9:69037542-69037568; SpCas9
atgatggtccttagatctcctct

SEQ ID NO: 26624 - DNA, 22 bp, Artificial Sequence
  Synthetic: FXN 3 forward 9:69037543-69037568; SpCas9
tgatggtccttagatctcctct

SEQ ID NO: 26625 - DNA, 21 bp, Artificial Sequence
  Synthetic: FXN 3 forward 9:69037544-69037568; SpCas9
gatggtccttagatctcctct

SEQ ID NO: 26626 - DNA, 20 bp, Artificial Sequence
  Synthetic: FXN 3 forward 9:69037545-69037568; SpCas9
atggtccttagatctcctct

SEQ ID NO: 26627 - DNA, 19 bp, Artificial Sequence
  Synthetic: FXN 3 forward 9:69037546-69037568; SpCas9
tggtccttagatctcctct

SEQ ID NO: 26628 - DNA, 18 bp, Artificial Sequence
  Synthetic: FXN 3 forward 9:69037547-69037568; SpCas9
ggtccttagatctcctct

SEQ ID NO: 26629 - DNA, 25 bp, Artificial Sequence
  Synthetic: FXN 3 reverse 9:69037540-69037568; SpCas9
cctagaggagatctaaggaccatca

SEQ ID NO: 26630 - DNA, 24 bp, Artificial Sequence
  Synthetic: FXN 3 reverse 9:69037541-69037568; SpCas9
ctagaggagatctaaggaccatca

SEQ ID NO: 26631 - DNA, 23 bp, Artificial Sequence
  Synthetic: FXN 3 reverse 9:69037542-69037568; SpCas9
tagaggagatctaaggaccatca

SEQ ID NO: 26632 - DNA, 22 bp, Artificial Sequence
  Synthetic: FXN 3 reverse 9:69037543-69037568; SpCas9
agaggagatctaaggaccatca

SEQ ID NO: 26633 - DNA, 21 bp, Artificial Sequence
  Synthetic: FXN 3 reverse 9:69037544-69037568; SpCas9
gaggagatctaaggaccatca

SEQ ID NO: 26634 - DNA, 20 bp, Artificial Sequence
  Synthetic: FXN 3 reverse 9:69037545-69037568; SpCas9
aggagatctaaggaccatca

SEQ ID NO: 26635 - DNA, 19 bp, Artificial Sequence
  Synthetic: FXN 3 reverse 9:69037546-69037568; SpCas9
ggagatctaaggaccatca

SEQ ID NO: 26636 - DNA, 18 bp, Artificial Sequence
  Synthetic: FXN 3 reverse 9:69037547-69037568; SpCas9
gagatctaaggaccatca

SEQ ID NO: 26637 - DNA, 25 bp, Artificial Sequence
  Synthetic: FXN 3 forward 9:69037544-69037572; SpCas9
gatggtccttagatctcctctagga

SEQ ID NO: 26638 - DNA, 24 bp, Artificial Sequence
  Synthetic: FXN 3 forward 9:69037545-69037572; SpCas9
atggtccttagatctcctctagga

SEQ ID NO: 26639 - DNA, 23 bp, Artificial Sequence
  Synthetic: FXN 3 forward 9:69037546-69037572; SpCas9
tggtccttagatctcctctagga

SEQ ID NO: 26640 - DNA, 22 bp, Artificial Sequence
  Synthetic: FXN 3 forward 9:69037547-69037572; SpCas9
ggtccttagatctcctctagga

SEQ ID NO: 26641 - DNA, 21 bp, Artificial Sequence
  Synthetic: FXN 3 forward 9:69037548-69037572; SpCas9
gtccttagatctcctctagga

SEQ ID NO: 26642 - DNA, 20 bp, Artificial Sequence
  Synthetic: FXN 3 forward 9:69037549-69037572; SpCas9
tccttagatctcctctagga

SEQ ID NO: 26643 - DNA, 19 bp, Artificial Sequence
  Synthetic: FXN 3 forward 9:69037550-69037572; SpCas9
ccttagatctcctctagga

SEQ ID NO: 26644 - DNA, 18 bp, Artificial Sequence
  Synthetic: FXN 3 forward 9:69037551-69037572; SpCas9
cttagatctcctctagga

SEQ ID NO: 26645 - DNA, 25 bp, Artificial Sequence
  Synthetic: FXN 3 forward 9:69037547-69037575; SpCas9
ggtccttagatctcctctaggaaag

SEQ ID NO: 26646 - DNA, 24 bp, Artificial Sequence
  Synthetic: FXN 3 forward 9:69037548-69037575; SpCas9
gtccttagatctcctctaggaaag

SEQ ID NO: 26647 - DNA, 23 bp, Artificial Sequence
  Synthetic: FXN 3 forward 9:69037549-69037575; SpCas9
tccttagatctcctctaggaaag

SEQ ID NO: 26648 - DNA, 22 bp, Artificial Sequence
  Synthetic: FXN 3 forward 9:69037550-69037575; SpCas9
ccttagatctcctctaggaaag

SEQ ID NO: 26649 - DNA, 21 bp, Artificial Sequence
  Synthetic: FXN 3 forward 9:69037551-69037575; SpCas9
cttagatctcctctaggaaag

SEQ ID NO: 26650 - DNA, 20 bp, Artificial Sequence
  Synthetic: FXN 3 forward 9:69037552-69037575; SpCas9
ttagatctcctctaggaaag

SEQ ID NO: 26651 - DNA, 19 bp, Artificial Sequence
  Synthetic: FXN 3 forward 9:69037553-69037575; SpCas9
tagatctcctctaggaaag

SEQ ID NO: 26652 - DNA, 18 bp, Artificial Sequence
  Synthetic: FXN 3 forward 9:69037554-69037575; SpCas9
agatctcctctaggaaag

SEQ ID NO: 26653 - DNA, 25 bp, Artificial Sequence
  Synthetic: FXN 3 reverse 9:69037550-69037578; SpCas9
tgtctgctttcctagaggagatcta

SEQ ID NO: 26654 - DNA, 24 bp, Artificial Sequence
  Synthetic: FXN 3 reverse 9:69037551-69037578; SpCas9
gtctgctttcctagaggagatcta

SEQ ID NO: 26655 - DNA, 23 bp, Artificial Sequence
  Synthetic: FXN 3 reverse 9:69037552-69037578; SpCas9
tctgctttcctagaggagatcta

SEQ ID NO: 26656 - DNA, 22 bp, Artificial Sequence
  Synthetic: FXN 3 reverse 9:69037553-69037578; SpCas9
ctgctttcctagaggagatcta

SEQ ID NO: 26657 - DNA, 21 bp, Artificial Sequence
  Synthetic: FXN 3 reverse 9:69037554-69037578; SpCas9
tgctttcctagaggagatcta

SEQ ID NO: 26658 - DNA, 20 bp, Artificial Sequence
  Synthetic: FXN 3 reverse 9:69037555-69037578; SpCas9
gctttcctagaggagatcta

SEQ ID NO: 26659 - DNA, 19 bp, Artificial Sequence
  Synthetic: FXN 3 reverse 9:69037556-69037578; SpCas9
ctttcctagaggagatcta

SEQ ID NO: 26660 - DNA, 18 bp, Artificial Sequence
  Synthetic: FXN 3 reverse 9:69037557-69037578; SpCas9
tttcctagaggagatcta

SEQ ID NO: 26661 - DNA, 25 bp, Artificial Sequence
  Synthetic: FXN 3 reverse 9:69037551-69037579; SpCas9
atgtctgctttcctagaggagatct

SEQ ID NO: 26662 - DNA, 24 bp, Artificial Sequence
  Synthetic: FXN 3 reverse 9:69037552-69037579; SpCas9
tgtctgctttcctagaggagatct

SEQ ID NO: 26663 - DNA, 23 bp, Artificial Sequence
  Synthetic: FXN 3 reverse 9:69037553-69037579; SpCas9
gtctgctttcctagaggagatct

SEQ ID NO: 26664 - DNA, 22 bp, Artificial Sequence
  Synthetic: FXN 3 reverse 9:69037554-69037579; SpCas9
tctgctttcctagaggagatct

SEQ ID NO: 26665 - DNA, 21 bp, Artificial Sequence
  Synthetic: FXN 3 reverse 9:69037555-69037579; SpCas9
ctgctttcctagaggagatct

SEQ ID NO: 26666 - DNA, 20 bp, Artificial Sequence
  Synthetic: FXN 3 reverse 9:69037556-69037579; SpCas9
tgctttcctagaggagatct

SEQ ID NO: 26667 - DNA, 19 bp, Artificial Sequence
  Synthetic: FXN 3 reverse 9:69037557-69037579; SpCas9
gctttcctagaggagatct

SEQ ID NO: 26668 - DNA, 18 bp, Artificial Sequence
  Synthetic: FXN 3 reverse 9:69037558-69037579; SpCas9
ctttcctagaggagatct

SEQ ID NO: 26669 - DNA, 25 bp, Artificial Sequence
  Synthetic: FXN 3 reverse 9:69037558-69037586; SpCas9
gtaataaatgtctgctttcctagag

SEQ ID NO: 26670 - DNA, 24 bp, Artificial Sequence
  Synthetic: FXN 3 reverse 9:69037559-69037586; SpCas9
taataaatgtctgctttcctagag

SEQ ID NO: 26671 - DNA, 23 bp, Artificial Sequence
  Synthetic: FXN 3 reverse 9:69037560-69037586; SpCas9
aataaatgtctgctttcctagag

SEQ ID NO: 26672 - DNA, 22 bp, Artificial Sequence
  Synthetic: FXN 3 reverse 9:69037561-69037586; SpCas9
ataaatgtctgctttcctagag

SEQ ID NO: 26673 - DNA, 21 bp, Artificial Sequence
  Synthetic: FXN 3 reverse 9:69037562-69037586; SpCas9
taaatgtctgctttcctagag

SEQ ID NO: 26674 - DNA, 20 bp, Artificial Sequence
  Synthetic: FXN 3 reverse 9:69037563-69037586; SpCas9
aaatgtctgctttcctagag

SEQ ID NO: 26675 - DNA, 19 bp, Artificial Sequence
  Synthetic: FXN 3 reverse 9:69037564-69037586; SpCas9
aatgtctgctttcctagag

SEQ ID NO: 26676 - DNA, 18 bp, Artificial Sequence
  Synthetic: FXN 3 reverse 9:69037565-69037586; SpCas9
atgtctgctttcctagag

SEQ ID NO: 26677 - DNA, 25 bp, Artificial Sequence
  Synthetic: FXN 3 reverse 9:69037560-69037588; SpCas9
aagtaataaatgtctgctttcctag

SEQ ID NO: 26678 - DNA, 24 bp, Artificial Sequence
  Synthetic: FXN 3 reverse 9:69037561-69037588; SpCas9
agtaataaatgtctgctttcctag

SEQ ID NO: 26679 - DNA, 23 bp, Artificial Sequence
  Synthetic: FXN 3 reverse 9:69037562-69037588; SpCas9
gtaataaatgtctgctttcctag

SEQ ID NO: 26680 - DNA, 22 bp, Artificial Sequence
  Synthetic: FXN 3 reverse 9:69037563-69037588; SpCas9
taataaatgtctgctttcctag

SEQ ID NO: 26681 - DNA, 21 bp, Artificial Sequence
  Synthetic: FXN 3 reverse 9:69037564-69037588; SpCas9
aataaatgtctgctttcctag

SEQ ID NO: 26682 - DNA, 20 bp, Artificial Sequence
  Synthetic: FXN 3 reverse 9:69037565-69037588; SpCas9
ataaatgtctgctttcctag

SEQ ID NO: 26683 - DNA, 19 bp, Artificial Sequence
  Synthetic: FXN 3 reverse 9:69037566-69037588; SpCas9
taaatgtctgctttcctag

SEQ ID NO: 26684 - DNA, 18 bp, Artificial Sequence
  Synthetic: FXN 3 reverse 9:69037567-69037588; SpCas9
aaatgtctgctttcctag

SEQ ID NO: 26685 - DNA, 25 bp, Artificial Sequence
  Synthetic: FXN 3 reverse 9:69037561-69037589; SpCas9
caagtaataaatgtctgctttccta

SEQ ID NO: 26686 - DNA, 24 bp, Artificial Sequence
  Synthetic: FXN 3 reverse 9:69037562-69037589; SpCas9
aagtaataaatgtctgctttccta

SEQ ID NO: 26687 - DNA, 23 bp, Artificial Sequence
  Synthetic: FXN 3 reverse 9:69037563-69037589; SpCas9
agtaataaatgtctgctttccta

SEQ ID NO: 26688 - DNA, 22 bp, Artificial Sequence
  Synthetic: FXN 3 reverse 9:69037564-69037589; SpCas9
gtaataaatgtctgctttccta

SEQ ID NO: 26689 - DNA, 21 bp, Artificial Sequence
  Synthetic: FXN 3 reverse 9:69037565-69037589; SpCas9
taataaatgtctgctttccta

SEQ ID NO: 26690 - DNA, 20 bp, Artificial Sequence
  Synthetic: FXN 3 reverse 9:69037566-69037589; SpCas9
aataaatgtctgctttccta

SEQ ID NO: 26691 - DNA, 19 bp, Artificial Sequence
  Synthetic: FXN 3 reverse 9:69037567-69037589; SpCas9
ataaatgtctgctttccta

SEQ ID NO: 26692 - DNA, 18 bp, Artificial Sequence
  Synthetic: FXN 3 reverse 9:69037568-69037589; SpCas9
taaatgtctgctttccta

SEQ ID NO: 26693 - DNA, 25 bp, Artificial Sequence
  Synthetic: FXN 3 forward 9:69037562-69037590; SpCas9
tctaggaaagcagacatttattact

SEQ ID NO: 26694 - DNA, 24 bp, Artificial Sequence
  Synthetic: FXN 3 forward 9:69037563-69037590; SpCas9
ctaggaaagcagacatttattact

SEQ ID NO: 26695 - DNA, 23 bp, Artificial Sequence
  Synthetic: FXN 3 forward 9:69037564-69037590; SpCas9
taggaaagcagacatttattact

SEQ ID NO: 26696 - DNA, 22 bp, Artificial Sequence
  Synthetic: FXN 3 forward 9:69037565-69037590; SpCas9
aggaaagcagacatttattact

SEQ ID NO: 26697 - DNA, 21 bp, Artificial Sequence
  Synthetic: FXN 3 forward 9:69037566-69037590; SpCas9
ggaaagcagacatttattact

SEQ ID NO: 26698 - DNA, 20 bp, Artificial Sequence
  Synthetic: FXN 3 forward 9:69037567-69037590; SpCas9
gaaagcagacatttattact

SEQ ID NO: 26699 - DNA, 19 bp, Artificial Sequence
  Synthetic: FXN 3 forward 9:69037568-69037590; SpCas9
aaagcagacatttattact

SEQ ID NO: 26700 - DNA, 18 bp, Artificial Sequence
  Synthetic: FXN 3 forward 9:69037569-69037590; SpCas9
aagcagacatttattact

SEQ ID NO: 26701 - DNA, 25 bp, Artificial Sequence
  Synthetic: FXN 3 reverse 9:69037563-69037591; SpCas9
gccaagtaataaatgtctgctttcc

SEQ ID NO: 26702 - DNA, 24 bp, Artificial Sequence
  Synthetic: FXN 3 reverse 9:69037564-69037591; SpCas9
ccaagtaataaatgtctgctttcc

SEQ ID NO: 26703 - DNA, 23 bp, Artificial Sequence
  Synthetic: FXN 3 reverse 9:69037565-69037591; SpCas9
caagtaataaatgtctgctttcc

SEQ ID NO: 26704 - DNA, 22 bp, Artificial Sequence
  Synthetic: FXN 3 reverse 9:69037566-69037591; SpCas9
aagtaataaatgtctgctttcc

SEQ ID NO: 26705 - DNA, 21 bp, Artificial Sequence
  Synthetic: FXN 3 reverse 9:69037567-69037591; SpCas9
agtaataaatgtctgctttcc

SEQ ID NO: 26706 - DNA, 20 bp, Artificial Sequence
  Synthetic: FXN 3 reverse 9:69037568-69037591; SpCas9
gtaataaatgtctgctttcc

SEQ ID NO: 26707 - DNA, 19 bp, Artificial Sequence
  Synthetic: FXN 3 reverse 9:69037569-69037591; SpCas9
taataaatgtctgctttcc

SEQ ID NO: 26708 - DNA, 18 bp, Artificial Sequence
  Synthetic: FXN 3 reverse 9:69037570-69037591; SpCas9
aataaatgtctgctttcc

SEQ ID NO: 26709 - DNA, 25 bp, Artificial Sequence
  Synthetic: FXN 3 forward 9:69037581-69037609; SpCas9
attacttggcttctgtgcactatct

SEQ ID NO: 26710 - DNA, 24 bp, Artificial Sequence
  Synthetic: FXN 3 forward 9:69037582-69037609; SpCas9
ttacttggcttctgtgcactatct

SEQ ID NO: 26711 - DNA, 23 bp, Artificial Sequence
  Synthetic: FXN 3 forward 9:69037583-69037609; SpCas9
tacttggcttctgtgcactatct

SEQ ID NO: 26712 - DNA, 22 bp, Artificial Sequence
  Synthetic: FXN 3 forward 9:69037584-69037609; SpCas9
acttggcttctgtgcactatct

SEQ ID NO: 26713 - DNA, 21 bp, Artificial Sequence
  Synthetic: FXN 3 forward 9:69037585-69037609; SpCas9
cttggcttctgtgcactatct

SEQ ID NO: 26714 - DNA, 20 bp, Artificial Sequence
  Synthetic: FXN 3 forward 9:69037586-69037609; SpCas9
ttggcttctgtgcactatct

SEQ ID NO: 26715 - DNA, 19 bp, Artificial Sequence
  Synthetic: FXN 3 forward 9:69037587-69037609; SpCas9
tggcttctgtgcactatct

SEQ ID NO: 26716 - DNA, 18 bp, Artificial Sequence
  Synthetic: FXN 3 forward 9:69037588-69037609; SpCas9
ggcttctgtgcactatct

SEQ ID NO: 26717 - DNA, 25 bp, Artificial Sequence
  Synthetic: FXN 3 reverse 9:69037585-69037613; SpCas9
gcagctcagatagtgcacagaagcc

SEQ ID NO: 26718 - DNA, 24 bp, Artificial Sequence
  Synthetic: FXN 3 reverse 9:69037586-69037613; SpCas9
cagctcagatagtgcacagaagcc

SEQ ID NO: 26719 - DNA, 23 bp, Artificial Sequence
  Synthetic: FXN 3 reverse 9:69037587-69037613; SpCas9
agctcagatagtgcacagaagcc

SEQ ID NO: 26720 - DNA, 22 bp, Artificial Sequence
  Synthetic: FXN 3 reverse 9:69037588-69037613; SpCas9
gctcagatagtgcacagaagcc

SEQ ID NO: 26721 - DNA, 21 bp, Artificial Sequence
  Synthetic: FXN 3 reverse 9:69037589-69037613; SpCas9
ctcagatagtgcacagaagcc

SEQ ID NO: 26722 - DNA, 20 bp, Artificial Sequence
  Synthetic: FXN 3 reverse 9:69037590-69037613; SpCas9
tcagatagtgcacagaagcc

SEQ ID NO: 26723 - DNA, 19 bp, Artificial Sequence
  Synthetic: FXN 3 reverse 9:69037591-69037613; SpCas9
cagatagtgcacagaagcc

SEQ ID NO: 26724 - DNA, 18 bp, Artificial Sequence
  Synthetic: FXN 3 reverse 9:69037592-69037613; SpCas9
agatagtgcacagaagcc

SEQ ID NO: 26725 - DNA, 25 bp, Artificial Sequence
  Synthetic: FXN 3 reverse 9:69037590-69037618; SpCas9
acgtggcagctcagatagtgcacag

SEQ ID NO: 26726 - DNA, 24 bp, Artificial Sequence
  Synthetic: FXN 3 reverse 9:69037591-69037618; SpCas9
cgtggcagctcagatagtgcacag

SEQ ID NO: 26727 - DNA, 23 bp, Artificial Sequence
  Synthetic: FXN 3 reverse 9:69037592-69037618; SpCas9
gtggcagctcagatagtgcacag

SEQ ID NO: 26728 - DNA, 22 bp, Artificial Sequence
  Synthetic: FXN 3 reverse 9:69037593-69037618; SpCas9
tggcagctcagatagtgcacag

SEQ ID NO: 26729 - DNA, 21 bp, Artificial Sequence
  Synthetic: FXN 3 reverse 9:69037594-69037618; SpCas9
ggcagctcagatagtgcacag

SEQ ID NO: 26730 - DNA, 20 bp, Artificial Sequence
  Synthetic: FXN 3 reverse 9:69037595-69037618; SpCas9
gcagctcagatagtgcacag

SEQ ID NO: 26731 - DNA, 19 bp, Artificial Sequence
  Synthetic: FXN 3 reverse 9:69037596-69037618; SpCas9
cagctcagatagtgcacag

SEQ ID NO: 26732 - DNA, 18 bp, Artificial Sequence
  Synthetic: FXN 3 reverse 9:69037597-69037618; SpCas9
agctcagatagtgcacag

SEQ ID NO: 26733 - DNA, 25 bp, Artificial Sequence
  Synthetic: FXN 3 reverse 9:69037593-69037621; SpCas9
aatacgtggcagctcagatagtgca

SEQ ID NO: 26734 - DNA, 24 bp, Artificial Sequence
  Synthetic: FXN 3 reverse 9:69037594-69037621; SpCas9
atacgtggcagctcagatagtgca

SEQ ID NO: 26735 - DNA, 23 bp, Artificial Sequence
  Synthetic: FXN 3 reverse 9:69037595-69037621; SpCas9
tacgtggcagctcagatagtgca

SEQ ID NO: 26736 - DNA, 22 bp, Artificial Sequence
  Synthetic: FXN 3 reverse 9:69037596-69037621; SpCas9
acgtggcagctcagatagtgca

SEQ ID NO: 26737 - DNA, 21 bp, Artificial Sequence
  Synthetic: FXN 3 reverse 9:69037597-69037621; SpCas9
cgtggcagctcagatagtgca

SEQ ID NO: 26738 - DNA, 20 bp, Artificial Sequence
  Synthetic: FXN 3 reverse 9:69037598-69037621; SpCas9
gtggcagctcagatagtgca

SEQ ID NO: 26739 - DNA, 19 bp, Artificial Sequence
  Synthetic: FXN 3 reverse 9:69037599-69037621; SpCas9
tggcagctcagatagtgca

SEQ ID NO: 26740 - DNA, 18 bp, Artificial Sequence
  Synthetic: FXN 3 reverse 9:69037600-69037621; SpCas9
ggcagctcagatagtgca

SEQ ID NO: 26741 - DNA, 25 bp, Artificial Sequence
  Synthetic: FXN 3 forward 9:69037595-69037623; SpCas9
gtgcactatctgagctgccacgtat

SEQ ID NO: 26742 - DNA, 24 bp, Artificial Sequence
  Synthetic: FXN 3 forward 9:69037596-69037623; SpCas9
tgcactatctgagctgccacgtat

SEQ ID NO: 26743 - DNA, 23 bp, Artificial Sequence
  Synthetic: FXN 3 forward 9:69037597-69037623; SpCas9
gcactatctgagctgccacgtat

SEQ ID NO: 26744 - DNA, 22 bp, Artificial Sequence
  Synthetic: FXN 3 forward 9:69037598-69037623; SpCas9
cactatctgagctgccacgtat

SEQ ID NO: 26745 - DNA, 21 bp, Artificial Sequence
  Synthetic: FXN 3 forward 9:69037599-69037623; SpCas9
actatctgagctgccacgtat

SEQ ID NO: 26746 - DNA, 20 bp, Artificial Sequence
  Synthetic: FXN 3 forward 9:69037600-69037623; SpCas9
ctatctgagctgccacgtat

SEQ ID NO: 26747 - DNA, 19 bp, Artificial Sequence
  Synthetic: FXN 3 forward 9:69037601-69037623; SpCas9
tatctgagctgccacgtat

SEQ ID NO: 26748 - DNA, 18 bp, Artificial Sequence
  Synthetic: FXN 3 forward 9:69037602-69037623; SpCas9
atctgagctgccacgtat

SEQ ID NO: 26749 - DNA, 25 bp, Artificial Sequence
  Synthetic: FXN 3 forward 9:69037596-69037624; SpCas9
tgcactatctgagctgccacgtatt

SEQ ID NO: 26750 - DNA, 24 bp, Artificial Sequence
  Synthetic: FXN 3 forward 9:69037597-69037624; SpCas9
gcactatctgagctgccacgtatt

SEQ ID NO: 26751 - DNA, 23 bp, Artificial Sequence
  Synthetic: FXN 3 forward 9:69037598-69037624; SpCas9
cactatctgagctgccacgtatt

SEQ ID NO: 26752 - DNA, 22 bp, Artificial Sequence
  Synthetic: FXN 3 forward 9:69037599-69037624; SpCas9
actatctgagctgccacgtatt

SEQ ID NO: 26753 - DNA, 21 bp, Artificial Sequence
  Synthetic: FXN 3 forward 9:69037600-69037624; SpCas9
ctatctgagctgccacgtatt

SEQ ID NO: 26754 - DNA, 20 bp, Artificial Sequence
  Synthetic: FXN 3 forward 9:69037601-69037624; SpCas9
tatctgagctgccacgtatt

SEQ ID NO: 26755 - DNA, 19 bp, Artificial Sequence
  Synthetic: FXN 3 forward 9:69037602-69037624; SpCas9
atctgagctgccacgtatt

SEQ ID NO: 26756 - DNA, 18 bp, Artificial Sequence
  Synthetic: FXN 3 forward 9:69037603-69037624; SpCas9
tctgagctgccacgtatt

SEQ ID NO: 26757 - DNA, 25 bp, Artificial Sequence
  Synthetic: FXN 3 reverse 9:69037600-69037628; SpCas9
gaagcccaatacgtggcagctcaga

SEQ ID NO: 26758 - DNA, 24 bp, Artificial Sequence
  Synthetic: FXN 3 reverse 9:69037601-69037628; SpCas9
aagcccaatacgtggcagctcaga

SEQ ID NO: 26759 - DNA, 23 bp, Artificial Sequence
  Synthetic: FXN 3 reverse 9:69037602-69037628; SpCas9
agcccaatacgtggcagctcaga

SEQ ID NO: 26760 - DNA, 22 bp, Artificial Sequence
  Synthetic: FXN 3 reverse 9:69037603-69037628; SpCas9
gcccaatacgtggcagctcaga

SEQ ID NO: 26761 - DNA, 21 bp, Artificial Sequence
  Synthetic: FXN 3 reverse 9:69037604-69037628; SpCas9
cccaatacgtggcagctcaga

SEQ ID NO: 26762 - DNA, 20 bp, Artificial Sequence
  Synthetic: FXN 3 reverse 9:69037605-69037628; SpCas9
ccaatacgtggcagctcaga

SEQ ID NO: 26763 - DNA, 19 bp, Artificial Sequence
  Synthetic: FXN 3 reverse 9:69037606-69037628; SpCas9
caatacgtggcagctcaga

SEQ ID NO: 26764 - DNA, 18 bp, Artificial Sequence
  Synthetic: FXN 3 reverse 9:69037607-69037628; SpCas9
aatacgtggcagctcaga

SEQ ID NO: 26765 - DNA, 25 bp, Artificial Sequence
  Synthetic: FXN 3 reverse 9:69037604-69037632; SpCas9
ggtggaagcccaatacgtggcagct

SEQ ID NO: 26766 - DNA, 24 bp, Artificial Sequence
  Synthetic: FXN 3 reverse 9:69037605-69037632; SpCas9
gtggaagcccaatacgtggcagct

SEQ ID NO: 26767 - DNA, 23 bp, Artificial Sequence
  Synthetic: FXN 3 reverse 9:69037606-69037632; SpCas9
tggaagcccaatacgtggcagct

SEQ ID NO: 26768 - DNA, 22 bp, Artificial Sequence
  Synthetic: FXN 3 reverse 9:69037607-69037632; SpCas9
ggaagcccaatacgtggcagct

SEQ ID NO: 26769 - DNA, 21 bp, Artificial Sequence
  Synthetic: FXN 3 reverse 9:69037608-69037632; SpCas9
gaagcccaatacgtggcagct

SEQ ID NO: 26770 - DNA, 20 bp, Artificial Sequence
  Synthetic: FXN 3 reverse 9:69037609-69037632; SpCas9
aagcccaatacgtggcagct

SEQ ID NO: 26771 - DNA, 19 bp, Artificial Sequence
  Synthetic: FXN 3 reverse 9:69037610-69037632; SpCas9
agcccaatacgtggcagct

SEQ ID NO: 26772 - DNA, 18 bp, Artificial Sequence
  Synthetic: FXN 3 reverse 9:69037611-69037632; SpCas9
gcccaatacgtggcagct

SEQ ID NO: 26773 - DNA, 25 bp, Artificial Sequence
  Synthetic: FXN 3 reverse 9:69037609-69037637; SpCas9
gcaggggtggaagcccaatacgtgg

SEQ ID NO: 26774 - DNA, 24 bp, Artificial Sequence
  Synthetic: FXN 3 reverse 9:69037610-69037637; SpCas9
caggggtggaagcccaatacgtgg

SEQ ID NO: 26775 - DNA, 23 bp, Artificial Sequence
  Synthetic: FXN 3 reverse 9:69037611-69037637; SpCas9
aggggtggaagcccaatacgtgg

SEQ ID NO: 26776 - DNA, 22 bp, Artificial Sequence
  Synthetic: FXN 3 reverse 9:69037612-69037637; SpCas9
ggggtggaagcccaatacgtgg

SEQ ID NO: 26777 - DNA, 21 bp, Artificial Sequence
  Synthetic: FXN 3 reverse 9:69037613-69037637; SpCas9
gggtggaagcccaatacgtgg

SEQ ID NO: 26778 - DNA, 20 bp, Artificial Sequence
  Synthetic: FXN 3 reverse 9:69037614-69037637; SpCas9
ggtggaagcccaatacgtgg

SEQ ID NO: 26779 - DNA, 19 bp, Artificial Sequence
  Synthetic: FXN 3 reverse 9:69037615-69037637; SpCas9
gtggaagcccaatacgtgg

SEQ ID NO: 26780 - DNA, 18 bp, Artificial Sequence
  Synthetic: FXN 3 reverse 9:69037616-69037637; SpCas9
tggaagcccaatacgtgg

SEQ ID NO: 26781 - DNA, 25 bp, Artificial Sequence
  Synthetic: FXN 3 reverse 9:69037612-69037640; SpCas9
caggcaggggtggaagcccaatacg

SEQ ID NO: 26782 - DNA, 24 bp, Artificial Sequence
  Synthetic: FXN 3 reverse 9:69037613-69037640; SpCas9
aggcaggggtggaagcccaatacg

SEQ ID NO: 26783 - DNA, 23 bp, Artificial Sequence
  Synthetic: FXN 3 reverse 9:69037614-69037640; SpCas9
ggcaggggtggaagcccaatacg

SEQ ID NO: 26784 - DNA, 22 bp, Artificial Sequence
  Synthetic: FXN 3 reverse 9:69037615-69037640; SpCas9
gcaggggtggaagcccaatacg

SEQ ID NO: 26785 - DNA, 21 bp, Artificial Sequence
  Synthetic: FXN 3 reverse 9:69037616-69037640; SpCas9
caggggtggaagcccaatacg

SEQ ID NO: 26786 - DNA, 20 bp, Artificial Sequence
  Synthetic: FXN 3 reverse 9:69037617-69037640; SpCas9
aggggtggaagcccaatacg

SEQ ID NO: 26787 - DNA, 19 bp, Artificial Sequence
  Synthetic: FXN 3 reverse 9:69037618-69037640; SpCas9
ggggtggaagcccaatacg

SEQ ID NO: 26788 - DNA, 18 bp, Artificial Sequence
  Synthetic: FXN 3 reverse 9:69037619-69037640; SpCas9
gggtggaagcccaatacg

SEQ ID NO: 26789 - DNA, 25 bp, Artificial Sequence
  Synthetic: FXN 3 forward 9:69037617-69037645; SpCas9
tattgggcttccacccctgcctgtg

SEQ ID NO: 26790 - DNA, 24 bp, Artificial Sequence
  Synthetic: FXN 3 forward 9:69037618-69037645; SpCas9
attgggcttccacccctgcctgtg

SEQ ID NO: 26791 - DNA, 23 bp, Artificial Sequence
  Synthetic: FXN 3 forward 9:69037619-69037645; SpCas9
ttgggcttccacccctgcctgtg

SEQ ID NO: 26792 - DNA, 22 bp, Artificial Sequence
  Synthetic: FXN 3 forward 9:69037620-69037645; SpCas9
tgggcttccacccctgcctgtg

SEQ ID NO: 26793 - DNA, 21 bp, Artificial Sequence
  Synthetic: FXN 3 forward 9:69037621-69037645; SpCas9
gggcttccacccctgcctgtg

SEQ ID NO: 26794 - DNA, 20 bp, Artificial Sequence
  Synthetic: FXN 3 forward 9:69037622-69037645; SpCas9
ggcttccacccctgcctgtg

SEQ ID NO: 26795 - DNA, 19 bp, Artificial Sequence
  Synthetic: FXN 3 forward 9:69037623-69037645; SpCas9
gcttccacccctgcctgtg

SEQ ID NO: 26796 - DNA, 18 bp, Artificial Sequence
  Synthetic: FXN 3 forward 9:69037624-69037645; SpCas9
cttccacccctgcctgtg

SEQ ID NO: 26797 - DNA, 25 bp, Artificial Sequence
  Synthetic: FXN 3 forward 9:69037621-69037649; SpCas9
gggcttccacccctgcctgtgtgga

SEQ ID NO: 26798 - DNA, 24 bp, Artificial Sequence
  Synthetic: FXN 3 forward 9:69037622-69037649; SpCas9
ggcttccacccctgcctgtgtgga

SEQ ID NO: 26799 - DNA, 23 bp, Artificial Sequence
  Synthetic: FXN 3 forward 9:69037623-69037649; SpCas9
gcttccacccctgcctgtgtgga

SEQ ID NO: 26800 - DNA, 22 bp, Artificial Sequence
  Synthetic: FXN 3 forward 9:69037624-69037649; SpCas9
cttccacccctgcctgtgtgga

SEQ ID NO: 26801 - DNA, 21 bp, Artificial Sequence
  Synthetic: FXN 3 forward 9:69037625-69037649; SpCas9
ttccacccctgcctgtgtgga

SEQ ID NO: 26802 - DNA, 20 bp, Artificial Sequence
  Synthetic: FXN 3 forward 9:69037626-69037649; SpCas9
tccacccctgcctgtgtgga

SEQ ID NO: 26803 - DNA, 19 bp, Artificial Sequence
  Synthetic: FXN 3 forward 9:69037627-69037649; SpCas9
ccacccctgcctgtgtgga

SEQ ID NO: 26804 - DNA, 18 bp, Artificial Sequence
  Synthetic: FXN 3 forward 9:69037628-69037649; SpCas9
cacccctgcctgtgtgga

SEQ ID NO: 26805 - DNA, 25 bp, Artificial Sequence
  Synthetic: FXN 3 reverse 9:69037624-69037652; SpCas9
atgctgtccacacaggcaggggtgg

SEQ ID NO: 26806 - DNA, 24 bp, Artificial Sequence
  Synthetic: FXN 3 reverse 9:69037625-69037652; SpCas9
tgctgtccacacaggcaggggtgg

SEQ ID NO: 26807 - DNA, 23 bp, Artificial Sequence
  Synthetic: FXN 3 reverse 9:69037626-69037652; SpCas9
gctgtccacacaggcaggggtgg

SEQ ID NO: 26808 - DNA, 22 bp, Artificial Sequence
  Synthetic: FXN 3 reverse 9:69037627-69037652; SpCas9
ctgtccacacaggcaggggtgg

SEQ ID NO: 26809 - DNA, 21 bp, Artificial Sequence
  Synthetic: FXN 3 reverse 9:69037628-69037652; SpCas9
tgtccacacaggcaggggtgg

SEQ ID NO: 26810 - DNA, 20 bp, Artificial Sequence
  Synthetic: FXN 3 reverse 9:69037629-69037652; SpCas9
gtccacacaggcaggggtgg

SEQ ID NO: 26811 - DNA, 19 bp, Artificial Sequence
  Synthetic: FXN 3 reverse 9:69037630-69037652; SpCas9
tccacacaggcaggggtgg

SEQ ID NO: 26812 - DNA, 18 bp, Artificial Sequence
  Synthetic: FXN 3 reverse 9:69037631-69037652; SpCas9
ccacacaggcaggggtgg

SEQ ID NO: 26813 - DNA, 25 bp, Artificial Sequence
  Synthetic: FXN 3 forward 9:69037626-69037654; SpCas9
tccacccctgcctgtgtggacagca

SEQ ID NO: 26814 - DNA, 24 bp, Artificial Sequence
  Synthetic: FXN 3 forward 9:69037627-69037654; SpCas9
ccacccctgcctgtgtggacagca

SEQ ID NO: 26815 - DNA, 23 bp, Artificial Sequence
  Synthetic: FXN 3 forward 9:69037628-69037654; SpCas9
cacccctgcctgtgtggacagca

SEQ ID NO: 26816 - DNA, 22 bp, Artificial Sequence
  Synthetic: FXN 3 forward 9:69037629-69037654; SpCas9
acccctgcctgtgtggacagca

SEQ ID NO: 26817 - DNA, 21 bp, Artificial Sequence
  Synthetic: FXN 3 forward 9:69037630-69037654; SpCas9
cccctgcctgtgtggacagca

SEQ ID NO: 26818 - DNA, 20 bp, Artificial Sequence
  Synthetic: FXN 3 forward 9:69037631-69037654; SpCas9
ccctgcctgtgtggacagca

SEQ ID NO: 26819 - DNA, 19 bp, Artificial Sequence
  Synthetic: FXN 3 forward 9:69037632-69037654; SpCas9
cctgcctgtgtggacagca

SEQ ID NO: 26820 - DNA, 18 bp, Artificial Sequence
  Synthetic: FXN 3 forward 9:69037633-69037654; SpCas9
ctgcctgtgtggacagca

SEQ ID NO: 26821 - DNA, 25 bp, Artificial Sequence
  Synthetic: FXN 3 forward 9:69037627-69037655; SpCas9
ccacccctgcctgtgtggacagcat

SEQ ID NO: 26822 - DNA, 24 bp, Artificial Sequence
  Synthetic: FXN 3 forward 9:69037628-69037655; SpCas9
cacccctgcctgtgtggacagcat

SEQ ID NO: 26823 - DNA, 23 bp, Artificial Sequence
  Synthetic: FXN 3 forward 9:69037629-69037655; SpCas9
acccctgcctgtgtggacagcat

SEQ ID NO: 26824 - DNA, 22 bp, Artificial Sequence
  Synthetic: FXN 3 forward 9:69037630-69037655; SpCas9
cccctgcctgtgtggacagcat

SEQ ID NO: 26825 - DNA, 21 bp, Artificial Sequence
  Synthetic: FXN 3 forward 9:69037631-69037655; SpCas9
ccctgcctgtgtggacagcat

SEQ ID NO: 26826 - DNA, 20 bp, Artificial Sequence
  Synthetic: FXN 3 forward 9:69037632-69037655; SpCas9
cctgcctgtgtggacagcat

SEQ ID NO: 26827 - DNA, 19 bp, Artificial Sequence
  Synthetic: FXN 3 forward 9:69037633-69037655; SpCas9
ctgcctgtgtggacagcat

SEQ ID NO: 26828 - DNA, 18 bp, Artificial Sequence
  Synthetic: FXN 3 forward 9:69037634-69037655; SpCas9
tgcctgtgtggacagcat

SEQ ID NO: 26829 - DNA, 25 bp, Artificial Sequence
  Synthetic: FXN 3 reverse 9:69037627-69037655; SpCas9
cccatgctgtccacacaggcagggg

SEQ ID NO: 26830 - DNA, 24 bp, Artificial Sequence
  Synthetic: FXN 3 reverse 9:69037628-69037655; SpCas9
ccatgctgtccacacaggcagggg

SEQ ID NO: 26831 - DNA, 23 bp, Artificial Sequence
  Synthetic: FXN 3 reverse 9:69037629-69037655; SpCas9
catgctgtccacacaggcagggg

SEQ ID NO: 26832 - DNA, 22 bp, Artificial Sequence
  Synthetic: FXN 3 reverse 9:69037630-69037655; SpCas9
atgctgtccacacaggcagggg

SEQ ID NO: 26833 - DNA, 21 bp, Artificial Sequence
  Synthetic: FXN 3 reverse 9:69037631-69037655; SpCas9
tgctgtccacacaggcagggg

SEQ ID NO: 26834 - DNA, 20 bp, Artificial Sequence
  Synthetic: FXN 3 reverse 9:69037632-69037655; SpCas9
gctgtccacacaggcagggg

SEQ ID NO: 26835 - DNA, 19 bp, Artificial Sequence
  Synthetic: FXN 3 reverse 9:69037633-69037655; SpCas9
ctgtccacacaggcagggg

SEQ ID NO: 26836 - DNA, 18 bp, Artificial Sequence
  Synthetic: FXN 3 reverse 9:69037634-69037655; SpCas9
tgtccacacaggcagggg

SEQ ID NO: 26837 - DNA, 25 bp, Artificial Sequence
  Synthetic: FXN 3 reverse 9:69037630-69037658; SpCas9
caacccatgctgtccacacaggcag

SEQ ID NO: 26838 - DNA, 24 bp, Artificial Sequence
  Synthetic: FXN 3 reverse 9:69037631-69037658; SpCas9
aacccatgctgtccacacaggcag

SEQ ID NO: 26839 - DNA, 23 bp, Artificial Sequence
  Synthetic: FXN 3 reverse 9:69037632-69037658; SpCas9
acccatgctgtccacacaggcag

SEQ ID NO: 26840 - DNA, 22 bp, Artificial Sequence
  Synthetic: FXN 3 reverse 9:69037633-69037658; SpCas9
cccatgctgtccacacaggcag

SEQ ID NO: 26841 - DNA, 21 bp, Artificial Sequence
  Synthetic: FXN 3 reverse 9:69037634-69037658; SpCas9
ccatgctgtccacacaggcag

SEQ ID NO: 26842 - DNA, 20 bp, Artificial Sequence
  Synthetic: FXN 3 reverse 9:69037635-69037658; SpCas9
catgctgtccacacaggcag

SEQ ID NO: 26843 - DNA, 19 bp, Artificial Sequence
  Synthetic: FXN 3 reverse 9:69037636-69037658; SpCas9
atgctgtccacacaggcag

SEQ ID NO: 26844 - DNA, 18 bp, Artificial Sequence
  Synthetic: FXN 3 reverse 9:69037637-69037658; SpCas9
tgctgtccacacaggcag

SEQ ID NO: 26845 - DNA, 25 bp, Artificial Sequence
  Synthetic: FXN 3 reverse 9:69037631-69037659; SpCas9
acaacccatgctgtccacacaggca

SEQ ID NO: 26846 - DNA, 24 bp, Artificial Sequence
  Synthetic: FXN 3 reverse 9:69037632-69037659; SpCas9
caacccatgctgtccacacaggca

SEQ ID NO: 26847 - DNA, 23 bp, Artificial Sequence
  Synthetic: FXN 3 reverse 9:69037633-69037659; SpCas9
aacccatgctgtccacacaggca

SEQ ID NO: 26848 - DNA, 22 bp, Artificial Sequence
  Synthetic: FXN 3 reverse 9:69037634-69037659; SpCas9
acccatgctgtccacacaggca

SEQ ID NO: 26849 - DNA, 21 bp, Artificial Sequence
  Synthetic: FXN 3 reverse 9:69037635-69037659; SpCas9
cccatgctgtccacacaggca

SEQ ID NO: 26850 - DNA, 20 bp, Artificial Sequence
  Synthetic: FXN 3 reverse 9:69037636-69037659; SpCas9
ccatgctgtccacacaggca

SEQ ID NO: 26851 - DNA, 19 bp, Artificial Sequence
  Synthetic: FXN 3 reverse 9:69037637-69037659; SpCas9
catgctgtccacacaggca

SEQ ID NO: 26852 - DNA, 18 bp, Artificial Sequence
  Synthetic: FXN 3 reverse 9:69037638-69037659; SpCas9
atgctgtccacacaggca

SEQ ID NO: 26853 - DNA, 25 bp, Artificial Sequence
  Synthetic: FXN 3 reverse 9:69037632-69037660; SpCas9
gacaacccatgctgtccacacaggc

SEQ ID NO: 26854 - DNA, 24 bp, Artificial Sequence
  Synthetic: FXN 3 reverse 9:69037633-69037660; SpCas9
acaacccatgctgtccacacaggc

SEQ ID NO: 26855 - DNA, 23 bp, Artificial Sequence
  Synthetic: FXN 3 reverse 9:69037634-69037660; SpCas9
caacccatgctgtccacacaggc

SEQ ID NO: 26856 - DNA, 22 bp, Artificial Sequence
  Synthetic: FXN 3 reverse 9:69037635-69037660; SpCas9
aacccatgctgtccacacaggc

SEQ ID NO: 26857 - DNA, 21 bp, Artificial Sequence
  Synthetic: FXN 3 reverse 9:69037636-69037660; SpCas9
acccatgctgtccacacaggc

SEQ ID NO: 26858 - DNA, 20 bp, Artificial Sequence
  Synthetic: FXN 3 reverse 9:69037637-69037660; SpCas9
cccatgctgtccacacaggc

SEQ ID NO: 26859 - DNA, 19 bp, Artificial Sequence
  Synthetic: FXN 3 reverse 9:69037638-69037660; SpCas9
ccatgctgtccacacaggc

SEQ ID NO: 26860 - DNA, 18 bp, Artificial Sequence
  Synthetic: FXN 3 reverse 9:69037639-69037660; SpCas9
catgctgtccacacaggc

SEQ ID NO: 26861 - DNA, 25 bp, Artificial Sequence
  Synthetic: FXN 3 reverse 9:69037633-69037661; SpCas9
tgacaacccatgctgtccacacagg

SEQ ID NO: 26862 - DNA, 24 bp, Artificial Sequence
  Synthetic: FXN 3 reverse 9:69037634-69037661; SpCas9
gacaacccatgctgtccacacagg

SEQ ID NO: 26863 - DNA, 23 bp, Artificial Sequence
  Synthetic: FXN 3 reverse 9:69037635-69037661; SpCas9
acaacccatgctgtccacacagg

SEQ ID NO: 26864 - DNA, 22 bp, Artificial Sequence
  Synthetic: FXN 3 reverse 9:69037636-69037661; SpCas9
caacccatgctgtccacacagg

SEQ ID NO: 26865 - DNA, 21 bp, Artificial Sequence
  Synthetic: FXN 3 reverse 9:69037637-69037661; SpCas9
aacccatgctgtccacacagg

SEQ ID NO: 26866 - DNA, 20 bp, Artificial Sequence
  Synthetic: FXN 3 reverse 9:69037638-69037661; SpCas9
acccatgctgtccacacagg

SEQ ID NO: 26867 - DNA, 19 bp, Artificial Sequence
  Synthetic: FXN 3 reverse 9:69037639-69037661; SpCas9
cccatgctgtccacacagg

SEQ ID NO: 26868 - DNA, 18 bp, Artificial Sequence
  Synthetic: FXN 3 reverse 9:69037640-69037661; SpCas9
ccatgctgtccacacagg

SEQ ID NO: 26869 - DNA, 25 bp, Artificial Sequence
  Synthetic: FXN 3 forward 9:69037634-69037662; SpCas9
tgcctgtgtggacagcatgggttgt

SEQ ID NO: 26870 - DNA, 24 bp, Artificial Sequence
  Synthetic: FXN 3 forward 9:69037635-69037662; SpCas9
gcctgtgtggacagcatgggttgt

SEQ ID NO: 26871 - DNA, 23 bp, Artificial Sequence
  Synthetic: FXN 3 forward 9:69037636-69037662; SpCas9
cctgtgtggacagcatgggttgt

SEQ ID NO: 26872 - DNA, 22 bp, Artificial Sequence
  Synthetic: FXN 3 forward 9:69037637-69037662; SpCas9
ctgtgtggacagcatgggttgt

SEQ ID NO: 26873 - DNA, 21 bp, Artificial Sequence
  Synthetic: FXN 3 forward 9:69037638-69037662; SpCas9
tgtgtggacagcatgggttgt

SEQ ID NO: 26874 - DNA, 20 bp, Artificial Sequence
  Synthetic: FXN 3 forward 9:69037639-69037662; SpCas9
gtgtggacagcatgggttgt

SEQ ID NO: 26875 - DNA, 19 bp, Artificial Sequence
  Synthetic: FXN 3 forward 9:69037640-69037662; SpCas9
tgtggacagcatgggttgt

SEQ ID NO: 26876 - DNA, 18 bp, Artificial Sequence
  Synthetic: FXN 3 forward 9:69037641-69037662; SpCas9
gtggacagcatgggttgt

SEQ ID NO: 26877 - DNA, 25 bp, Artificial Sequence
  Synthetic: FXN 3 reverse 9:69037636-69037664; SpCas9
tgctgacaacccatgctgtccacac

SEQ ID NO: 26878 - DNA, 24 bp, Artificial Sequence
  Synthetic: FXN 3 reverse 9:69037637-69037664; SpCas9
gctgacaacccatgctgtccacac

SEQ ID NO: 26879 - DNA, 23 bp, Artificial Sequence
  Synthetic: FXN 3 reverse 9:69037638-69037664; SpCas9
ctgacaacccatgctgtccacac

SEQ ID NO: 26880 - DNA, 22 bp, Artificial Sequence
  Synthetic: FXN 3 reverse 9:69037639-69037664; SpCas9
tgacaacccatgctgtccacac

SEQ ID NO: 26881 - DNA, 21 bp, Artificial Sequence
  Synthetic: FXN 3 reverse 9:69037640-69037664; SpCas9
gacaacccatgctgtccacac

SEQ ID NO: 26882 - DNA, 20 bp, Artificial Sequence
  Synthetic: FXN 3 reverse 9:69037641-69037664; SpCas9
acaacccatgctgtccacac

SEQ ID NO: 26883 - DNA, 19 bp, Artificial Sequence
  Synthetic: FXN 3 reverse 9:69037642-69037664; SpCas9
caacccatgctgtccacac

SEQ ID NO: 26884 - DNA, 18 bp, Artificial Sequence
  Synthetic: FXN 3 reverse 9:69037643-69037664; SpCas9
aacccatgctgtccacac

SEQ ID NO: 26885 - DNA, 25 bp, Artificial Sequence
  Synthetic: FXN 3 forward 9:69037637-69037665; SpCas9
ctgtgtggacagcatgggttgtcag

SEQ ID NO: 26886 - DNA, 24 bp, Artificial Sequence
  Synthetic: FXN 3 forward 9:69037638-69037665; SpCas9
tgtgtggacagcatgggttgtcag

SEQ ID NO: 26887 - DNA, 23 bp, Artificial Sequence
  Synthetic: FXN 3 forward 9:69037639-69037665; SpCas9
gtgtggacagcatgggttgtcag

SEQ ID NO: 26888 - DNA, 22 bp, Artificial Sequence
  Synthetic: FXN 3 forward 9:69037640-69037665; SpCas9
tgtggacagcatgggttgtcag

SEQ ID NO: 26889 - DNA, 21 bp, Artificial Sequence
  Synthetic: FXN 3 forward 9:69037641-69037665; SpCas9
gtggacagcatgggttgtcag

SEQ ID NO: 26890 - DNA, 20 bp, Artificial Sequence
  Synthetic: FXN 3 forward 9:69037642-69037665; SpCas9
tggacagcatgggttgtcag

SEQ ID NO: 26891 - DNA, 19 bp, Artificial Sequence
  Synthetic: FXN 3 forward 9:69037643-69037665; SpCas9
ggacagcatgggttgtcag

SEQ ID NO: 26892 - DNA, 18 bp, Artificial Sequence
  Synthetic: FXN 3 forward 9:69037644-69037665; SpCas9
gacagcatgggttgtcag

SEQ ID NO: 26893 - DNA, 25 bp, Artificial Sequence
  Synthetic: FXN 3 reverse 9:69037637-69037665; SpCas9
ctgctgacaacccatgctgtccaca

SEQ ID NO: 26894 - DNA, 24 bp, Artificial Sequence
  Synthetic: FXN 3 reverse 9:69037638-69037665; SpCas9
tgctgacaacccatgctgtccaca

SEQ ID NO: 26895 - DNA, 23 bp, Artificial Sequence
  Synthetic: FXN 3 reverse 9:69037639-69037665; SpCas9
gctgacaacccatgctgtccaca

SEQ ID NO: 26896 - DNA, 22 bp, Artificial Sequence
  Synthetic: FXN 3 reverse 9:69037640-69037665; SpCas9
ctgacaacccatgctgtccaca

SEQ ID NO: 26897 - DNA, 21 bp, Artificial Sequence
  Synthetic: FXN 3 reverse 9:69037641-69037665; SpCas9
tgacaacccatgctgtccaca

SEQ ID NO: 26898 - DNA, 20 bp, Artificial Sequence
  Synthetic: FXN 3 reverse 9:69037642-69037665; SpCas9
gacaacccatgctgtccaca

SEQ ID NO: 26899 - DNA, 19 bp, Artificial Sequence
  Synthetic: FXN 3 reverse 9:69037643-69037665; SpCas9
acaacccatgctgtccaca

SEQ ID NO: 26900 - DNA, 18 bp, Artificial Sequence
  Synthetic: FXN 3 reverse 9:69037644-69037665; SpCas9
caacccatgctgtccaca

SEQ ID NO: 26901 - DNA, 25 bp, Artificial Sequence
  Synthetic: FXN 3 forward 9:69037639-69037667; SpCas9
gtgtggacagcatgggttgtcagca

SEQ ID NO: 26902 - DNA, 24 bp, Artificial Sequence
  Synthetic: FXN 3 forward 9:69037640-69037667; SpCas9
tgtggacagcatgggttgtcagca

SEQ ID NO: 26903 - DNA, 23 bp, Artificial Sequence
  Synthetic: FXN 3 forward 9:69037641-69037667; SpCas9
gtggacagcatgggttgtcagca

SEQ ID NO: 26904 - DNA, 22 bp, Artificial Sequence
  Synthetic: FXN 3 forward 9:69037642-69037667; SpCas9
tggacagcatgggttgtcagca

SEQ ID NO: 26905 - DNA, 21 bp, Artificial Sequence
  Synthetic: FXN 3 forward 9:69037643-69037667; SpCas9
ggacagcatgggttgtcagca

SEQ ID NO: 26906 - DNA, 20 bp, Artificial Sequence
  Synthetic: FXN 3 forward 9:69037644-69037667; SpCas9
gacagcatgggttgtcagca

SEQ ID NO: 26907 - DNA, 19 bp, Artificial Sequence
  Synthetic: FXN 3 forward 9:69037645-69037667; SpCas9
acagcatgggttgtcagca

SEQ ID NO: 26908 - DNA, 18 bp, Artificial Sequence
  Synthetic: FXN 3 forward 9:69037646-69037667; SpCas9
cagcatgggttgtcagca

SEQ ID NO: 26909 - DNA, 25 bp, Artificial Sequence
  Synthetic: FXN 3 forward 9:69037664-69037692; SpCas9
gagttgtgttttgttttgttttttt

SEQ ID NO: 26910 - DNA, 24 bp, Artificial Sequence
  Synthetic: FXN 3 forward 9:69037665-69037692; SpCas9
agttgtgttttgttttgttttttt

SEQ ID NO: 26911 - DNA, 23 bp, Artificial Sequence
  Synthetic: FXN 3 forward 9:69037666-69037692; SpCas9
gttgtgttttgttttgttttttt

SEQ ID NO: 26912 - DNA, 22 bp, Artificial Sequence
  Synthetic: FXN 3 forward 9:69037667-69037692; SpCas9
ttgtgttttgttttgttttttt

SEQ ID NO: 26913 - DNA, 21 bp, Artificial Sequence
  Synthetic: FXN 3 forward 9:69037668-69037692; SpCas9
tgtgttttgttttgttttttt

SEQ ID NO: 26914 - DNA, 20 bp, Artificial Sequence
  Synthetic: FXN 3 forward 9:69037669-69037692; SpCas9
gtgttttgttttgttttttt

SEQ ID NO: 26915 - DNA, 19 bp, Artificial Sequence
  Synthetic: FXN 3 forward 9:69037670-69037692; SpCas9
tgttttgttttgttttttt

SEQ ID NO: 26916 - DNA, 18 bp, Artificial Sequence
  Synthetic: FXN 3 forward 9:69037671-69037692; SpCas9
gttttgttttgttttttt

SEQ ID NO: 26917 - DNA, 25 bp, Artificial Sequence
  Synthetic: FXN 3 forward 9:69037668-69037696; SpCas9
tgtgttttgttttgtttttttgaga

SEQ ID NO: 26918 - DNA, 24 bp, Artificial Sequence
  Synthetic: FXN 3 forward 9:69037669-69037696; SpCas9
gtgttttgttttgtttttttgaga

SEQ ID NO: 26919 - DNA, 23 bp, Artificial Sequence
  Synthetic: FXN 3 forward 9:69037670-69037696; SpCas9
tgttttgttttgtttttttgaga

SEQ ID NO: 26920 - DNA, 22 bp, Artificial Sequence
  Synthetic: FXN 3 forward 9:69037671-69037696; SpCas9
gttttgttttgtttttttgaga

SEQ ID NO: 26921 - DNA, 21 bp, Artificial Sequence
  Synthetic: FXN 3 forward 9:69037672-69037696; SpCas9
ttttgttttgtttttttgaga

SEQ ID NO: 26922 - DNA, 20 bp, Artificial Sequence
  Synthetic: FXN 3 forward 9:69037673-69037696; SpCas9
tttgttttgtttttttgaga

SEQ ID NO: 26923 - DNA, 19 bp, Artificial Sequence
  Synthetic: FXN 3 forward 9:69037674-69037696; SpCas9
ttgttttgtttttttgaga

SEQ ID NO: 26924 - DNA, 18 bp, Artificial Sequence
  Synthetic: FXN 3 forward 9:69037675-69037696; SpCas9
tgttttgtttttttgaga

SEQ ID NO: 26925 - DNA, 25 bp, Artificial Sequence
  Synthetic: FXN 3 forward 9:69037670-69037698; SpCas9
tgttttgttttgtttttttgagaca

SEQ ID NO: 26926 - DNA, 24 bp, Artificial Sequence
  Synthetic: FXN 3 forward 9:69037671-69037698; SpCas9
gttttgttttgtttttttgagaca

SEQ ID NO: 26927 - DNA, 23 bp, Artificial Sequence
  Synthetic: FXN 3 forward 9:69037672-69037698; SpCas9
ttttgttttgtttttttgagaca

SEQ ID NO: 26928 - DNA, 22 bp, Artificial Sequence
  Synthetic: FXN 3 forward 9:69037673-69037698; SpCas9
tttgttttgtttttttgagaca

SEQ ID NO: 26929 - DNA, 21 bp, Artificial Sequence
  Synthetic: FXN 3 forward 9:69037674-69037698; SpCas9
ttgttttgtttttttgagaca

SEQ ID NO: 26930 - DNA, 20 bp, Artificial Sequence
  Synthetic: FXN 3 forward 9:69037675-69037698; SpCas9
tgttttgtttttttgagaca

SEQ ID NO: 26931 - DNA, 19 bp, Artificial Sequence
  Synthetic: FXN 3 forward 9:69037676-69037698; SpCas9
gttttgtttttttgagaca

SEQ ID NO: 26932 - DNA, 18 bp, Artificial Sequence
  Synthetic: FXN 3 forward 9:69037677-69037698; SpCas9
ttttgtttttttgagaca

SEQ ID NO: 26933 - DNA, 25 bp, Artificial Sequence
  Synthetic: FXN 3 forward 9:69037689-69037717; SpCas9
gagacagagtttccctcttgttgcc

SEQ ID NO: 26934 - DNA, 24 bp, Artificial Sequence
  Synthetic: FXN 3 forward 9:69037690-69037717; SpCas9
agacagagtttccctcttgttgcc

SEQ ID NO: 26935 - DNA, 23 bp, Artificial Sequence
  Synthetic: FXN 3 forward 9:69037691-69037717; SpCas9
gacagagtttccctcttgttgcc

SEQ ID NO: 26936 - DNA, 22 bp, Artificial Sequence
  Synthetic: FXN 3 forward 9:69037692-69037717; SpCas9
acagagtttccctcttgttgcc

SEQ ID NO: 26937 - DNA, 21 bp, Artificial Sequence
  Synthetic: FXN 3 forward 9:69037693-69037717; SpCas9
cagagtttccctcttgttgcc

SEQ ID NO: 26938 - DNA, 20 bp, Artificial Sequence
  Synthetic: FXN 3 forward 9:69037694-69037717; SpCas9
agagtttccctcttgttgcc

SEQ ID NO: 26939 - DNA, 19 bp, Artificial Sequence
  Synthetic: FXN 3 forward 9:69037695-69037717; SpCas9
gagtttccctcttgttgcc

SEQ ID NO: 26940 - DNA, 18 bp, Artificial Sequence
  Synthetic: FXN 3 forward 9:69037696-69037717; SpCas9
agtttccctcttgttgcc

SEQ ID NO: 26941 - DNA, 25 bp, Artificial Sequence
  Synthetic: FXN 3 forward 9:69037690-69037718; SpCas9
agacagagtttccctcttgttgccc

SEQ ID NO: 26942 - DNA, 24 bp, Artificial Sequence
  Synthetic: FXN 3 forward 9:69037691-69037718; SpCas9
gacagagtttccctcttgttgccc

SEQ ID NO: 26943 - DNA, 23 bp, Artificial Sequence
  Synthetic: FXN 3 forward 9:69037692-69037718; SpCas9
acagagtttccctcttgttgccc

SEQ ID NO: 26944 - DNA, 22 bp, Artificial Sequence
  Synthetic: FXN 3 forward 9:69037693-69037718; SpCas9
cagagtttccctcttgttgccc

SEQ ID NO: 26945 - DNA, 21 bp, Artificial Sequence
  Synthetic: FXN 3 forward 9:69037694-69037718; SpCas9
agagtttccctcttgttgccc

SEQ ID NO: 26946 - DNA, 20 bp, Artificial Sequence
  Synthetic: FXN 3 forward 9:69037695-69037718; SpCas9
gagtttccctcttgttgccc

SEQ ID NO: 26947 - DNA, 19 bp, Artificial Sequence
  Synthetic: FXN 3 forward 9:69037696-69037718; SpCas9
agtttccctcttgttgccc

SEQ ID NO: 26948 - DNA, 18 bp, Artificial Sequence
  Synthetic: FXN 3 forward 9:69037697-69037718; SpCas9
gtttccctcttgttgccc

SEQ ID NO: 26949 - DNA, 25 bp, Artificial Sequence
  Synthetic: FXN 3 forward 9:69037694-69037722; SpCas9
agagtttccctcttgttgcccaggc

SEQ ID NO: 26950 - DNA, 24 bp, Artificial Sequence
  Synthetic: FXN 3 forward 9:69037695-69037722; SpCas9
gagtttccctcttgttgcccaggc

SEQ ID NO: 26951 - DNA, 23 bp, Artificial Sequence
  Synthetic: FXN 3 forward 9:69037696-69037722; SpCas9
agtttccctcttgttgcccaggc

SEQ ID NO: 26952 - DNA, 22 bp, Artificial Sequence
  Synthetic: FXN 3 forward 9:69037697-69037722; SpCas9
gtttccctcttgttgcccaggc

SEQ ID NO: 26953 - DNA, 21 bp, Artificial Sequence
  Synthetic: FXN 3 forward 9:69037698-69037722; SpCas9
tttccctcttgttgcccaggc

SEQ ID NO: 26954 - DNA, 20 bp, Artificial Sequence
  Synthetic: FXN 3 forward 9:69037699-69037722; SpCas9
ttccctcttgttgcccaggc

SEQ ID NO: 26955 - DNA, 19 bp, Artificial Sequence
  Synthetic: FXN 3 forward 9:69037700-69037722; SpCas9
tccctcttgttgcccaggc

SEQ ID NO: 26956 - DNA, 18 bp, Artificial Sequence
  Synthetic: FXN 3 forward 9:69037701-69037722; SpCas9
ccctcttgttgcccaggc

SEQ ID NO: 26957 - DNA, 25 bp, Artificial Sequence
  Synthetic: FXN 3 forward 9:69037696-69037724; SpCas9
agtttccctcttgttgcccaggctg

SEQ ID NO: 26958 - DNA, 24 bp, Artificial Sequence
  Synthetic: FXN 3 forward 9:69037697-69037724; SpCas9
gtttccctcttgttgcccaggctg

SEQ ID NO: 26959 - DNA, 23 bp, Artificial Sequence
  Synthetic: FXN 3 forward 9:69037698-69037724; SpCas9
tttccctcttgttgcccaggctg

SEQ ID NO: 26960 - DNA, 22 bp, Artificial Sequence
  Synthetic: FXN 3 forward 9:69037699-69037724; SpCas9
ttccctcttgttgcccaggctg

SEQ ID NO: 26961 - DNA, 21 bp, Artificial Sequence
  Synthetic: FXN 3 forward 9:69037700-69037724; SpCas9
tccctcttgttgcccaggctg

SEQ ID NO: 26962 - DNA, 20 bp, Artificial Sequence
  Synthetic: FXN 3 forward 9:69037701-69037724; SpCas9
ccctcttgttgcccaggctg

SEQ ID NO: 26963 - DNA, 19 bp, Artificial Sequence
  Synthetic: FXN 3 forward 9:69037702-69037724; SpCas9
cctcttgttgcccaggctg

SEQ ID NO: 26964 - DNA, 18 bp, Artificial Sequence
  Synthetic: FXN 3 forward 9:69037703-69037724; SpCas9
ctcttgttgcccaggctg

SEQ ID NO: 26965 - DNA, 25 bp, Artificial Sequence
  Synthetic: FXN 3 forward 9:69037701-69037729; SpCas9
ccctcttgttgcccaggctggagtg

SEQ ID NO: 26966 - DNA, 24 bp, Artificial Sequence
  Synthetic: FXN 3 forward 9:69037702-69037729; SpCas9
cctcttgttgcccaggctggagtg

SEQ ID NO: 26967 - DNA, 23 bp, Artificial Sequence
  Synthetic: FXN 3 forward 9:69037703-69037729; SpCas9
ctcttgttgcccaggctggagtg

SEQ ID NO: 26968 - DNA, 22 bp, Artificial Sequence
  Synthetic: FXN 3 forward 9:69037704-69037729; SpCas9
tcttgttgcccaggctggagtg

SEQ ID NO: 26969 - DNA, 21 bp, Artificial Sequence
  Synthetic: FXN 3 forward 9:69037705-69037729; SpCas9
cttgttgcccaggctggagtg

SEQ ID NO: 26970 - DNA, 20 bp, Artificial Sequence
  Synthetic: FXN 3 forward 9:69037706-69037729; SpCas9
ttgttgcccaggctggagtg

SEQ ID NO: 26971 - DNA, 19 bp, Artificial Sequence
  Synthetic: FXN 3 forward 9:69037707-69037729; SpCas9
tgttgcccaggctggagtg

SEQ ID NO: 26972 - DNA, 18 bp, Artificial Sequence
  Synthetic: FXN 3 forward 9:69037708-69037729; SpCas9
gttgcccaggctggagtg

SEQ ID NO: 26973 - DNA, 25 bp, Artificial Sequence
  Synthetic: FXN 3 reverse 9:69037701-69037729; SpCas9
ctgcactccagcctgggcaacaaga

SEQ ID NO: 26974 - DNA, 24 bp, Artificial Sequence
  Synthetic: FXN 3 reverse 9:69037702-69037729; SpCas9
tgcactccagcctgggcaacaaga

SEQ ID NO: 26975 - DNA, 23 bp, Artificial Sequence
  Synthetic: FXN 3 reverse 9:69037703-69037729; SpCas9
gcactccagcctgggcaacaaga

SEQ ID NO: 26976 - DNA, 22 bp, Artificial Sequence
  Synthetic: FXN 3 reverse 9:69037704-69037729; SpCas9
cactccagcctgggcaacaaga

SEQ ID NO: 26977 - DNA, 21 bp, Artificial Sequence
  Synthetic: FXN 3 reverse 9:69037705-69037729; SpCas9
actccagcctgggcaacaaga

SEQ ID NO: 26978 - DNA, 20 bp, Artificial Sequence
  Synthetic: FXN 3 reverse 9:69037706-69037729; SpCas9
ctccagcctgggcaacaaga

SEQ ID NO: 26979 - DNA, 19 bp, Artificial Sequence
  Synthetic: FXN 3 reverse 9:69037707-69037729; SpCas9
tccagcctgggcaacaaga

SEQ ID NO: 26980 - DNA, 18 bp, Artificial Sequence
  Synthetic: FXN 3 reverse 9:69037708-69037729; SpCas9
ccagcctgggcaacaaga

SEQ ID NO: 26981 - DNA, 25 bp, Artificial Sequence
  Synthetic: FXN 3 reverse 9:69037702-69037730; SpCas9
actgcactccagcctgggcaacaag

SEQ ID NO: 26982 - DNA, 24 bp, Artificial Sequence
  Synthetic: FXN 3 reverse 9:69037703-69037730; SpCas9
ctgcactccagcctgggcaacaag

SEQ ID NO: 26983 - DNA, 23 bp, Artificial Sequence
  Synthetic: FXN 3 reverse 9:69037704-69037730; SpCas9
tgcactccagcctgggcaacaag

SEQ ID NO: 26984 - DNA, 22 bp, Artificial Sequence
  Synthetic: FXN 3 reverse 9:69037705-69037730; SpCas9
gcactccagcctgggcaacaag

SEQ ID NO: 26985 - DNA, 21 bp, Artificial Sequence
  Synthetic: FXN 3 reverse 9:69037706-69037730; SpCas9
cactccagcctgggcaacaag

SEQ ID NO: 26986 - DNA, 20 bp, Artificial Sequence
  Synthetic: FXN 3 reverse 9:69037707-69037730; SpCas9
actccagcctgggcaacaag

SEQ ID NO: 26987 - DNA, 19 bp, Artificial Sequence
  Synthetic: FXN 3 reverse 9:69037708-69037730; SpCas9
ctccagcctgggcaacaag

SEQ ID NO: 26988 - DNA, 18 bp, Artificial Sequence
  Synthetic: FXN 3 reverse 9:69037709-69037730; SpCas9
tccagcctgggcaacaag

SEQ ID NO: 26989 - DNA, 25 bp, Artificial Sequence
  Synthetic: FXN 3 reverse 9:69037703-69037731; SpCas9
cactgcactccagcctgggcaacaa

SEQ ID NO: 26990 - DNA, 24 bp, Artificial Sequence
  Synthetic: FXN 3 reverse 9:69037704-69037731; SpCas9
actgcactccagcctgggcaacaa

SEQ ID NO: 26991 - DNA, 23 bp, Artificial Sequence
  Synthetic: FXN 3 reverse 9:69037705-69037731; SpCas9
ctgcactccagcctgggcaacaa

SEQ ID NO: 26992 - DNA, 22 bp, Artificial Sequence
  Synthetic: FXN 3 reverse 9:69037706-69037731; SpCas9
tgcactccagcctgggcaacaa

SEQ ID NO: 26993 - DNA, 21 bp, Artificial Sequence
  Synthetic: FXN 3 reverse 9:69037707-69037731; SpCas9
gcactccagcctgggcaacaa

SEQ ID NO: 26994 - DNA, 20 bp, Artificial Sequence
  Synthetic: FXN 3 reverse 9:69037708-69037731; SpCas9
cactccagcctgggcaacaa

SEQ ID NO: 26995 - DNA, 19 bp, Artificial Sequence
  Synthetic: FXN 3 reverse 9:69037709-69037731; SpCas9
actccagcctgggcaacaa

SEQ ID NO: 26996 - DNA, 18 bp, Artificial Sequence
  Synthetic: FXN 3 reverse 9:69037710-69037731; SpCas9
ctccagcctgggcaacaa

SEQ ID NO: 26997 - DNA, 25 bp, Artificial Sequence
  Synthetic: FXN 3 forward 9:69037704-69037732; SpCas9
tcttgttgcccaggctggagtgcag

SEQ ID NO: 26998 - DNA, 24 bp, Artificial Sequence
  Synthetic: FXN 3 forward 9:69037705-69037732; SpCas9
cttgttgcccaggctggagtgcag

SEQ ID NO: 26999 - DNA, 23 bp, Artificial Sequence
  Synthetic: FXN 3 forward 9:69037706-69037732; SpCas9
ttgttgcccaggctggagtgcag

SEQ ID NO: 27000 - DNA, 22 bp, Artificial Sequence
  Synthetic: FXN 3 forward 9:69037707-69037732; SpCas9
tgttgcccaggctggagtgcag

SEQ ID NO: 27001 - DNA, 21 bp, Artificial Sequence
  Synthetic: FXN 3 forward 9:69037708-69037732; SpCas9
gttgcccaggctggagtgcag

SEQ ID NO: 27002 - DNA, 20 bp, Artificial Sequence
  Synthetic: FXN 3 forward 9:69037709-69037732; SpCas9
ttgcccaggctggagtgcag

SEQ ID NO: 27003 - DNA, 19 bp, Artificial Sequence
  Synthetic: FXN 3 forward 9:69037710-69037732; SpCas9
tgcccaggctggagtgcag

SEQ ID NO: 27004 - DNA, 18 bp, Artificial Sequence
  Synthetic: FXN 3 forward 9:69037711-69037732; SpCas9
gcccaggctggagtgcag

SEQ ID NO: 27005 - DNA, 25 bp, Artificial Sequence
  Synthetic: FXN 3 reverse 9:69037705-69037733; SpCas9
gccactgcactccagcctgggcaac

SEQ ID NO: 27006 - DNA, 24 bp, Artificial Sequence
  Synthetic: FXN 3 reverse 9:69037706-69037733; SpCas9
ccactgcactccagcctgggcaac

SEQ ID NO: 27007 - DNA, 23 bp, Artificial Sequence
  Synthetic: FXN 3 reverse 9:69037707-69037733; SpCas9
cactgcactccagcctgggcaac

SEQ ID NO: 27008 - DNA, 22 bp, Artificial Sequence
  Synthetic: FXN 3 reverse 9:69037708-69037733; SpCas9
actgcactccagcctgggcaac

SEQ ID NO: 27009 - DNA, 21 bp, Artificial Sequence
  Synthetic: FXN 3 reverse 9:69037709-69037733; SpCas9
ctgcactccagcctgggcaac

SEQ ID NO: 27010 - DNA, 20 bp, Artificial Sequence
  Synthetic: FXN 3 reverse 9:69037710-69037733; SpCas9
tgcactccagcctgggcaac

SEQ ID NO: 27011 - DNA, 19 bp, Artificial Sequence
  Synthetic: FXN 3 reverse 9:69037711-69037733; SpCas9
gcactccagcctgggcaac

SEQ ID NO: 27012 - DNA, 18 bp, Artificial Sequence
  Synthetic: FXN 3 reverse 9:69037712-69037733; SpCas9
cactccagcctgggcaac

SEQ ID NO: 27013 - DNA, 25 bp, Artificial Sequence
  Synthetic: FXN 3 forward 9:69037709-69037737; SpCas9
ttgcccaggctggagtgcagtggct

SEQ ID NO: 27014 - DNA, 24 bp, Artificial Sequence
  Synthetic: FXN 3 forward 9:69037710-69037737; SpCas9
tgcccaggctggagtgcagtggct

SEQ ID NO: 27015 - DNA, 23 bp, Artificial Sequence
  Synthetic: FXN 3 forward 9:69037711-69037737; SpCas9
gcccaggctggagtgcagtggct

SEQ ID NO: 27016 - DNA, 22 bp, Artificial Sequence
  Synthetic: FXN 3 forward 9:69037712-69037737; SpCas9
cccaggctggagtgcagtggct

SEQ ID NO: 27017 - DNA, 21 bp, Artificial Sequence
  Synthetic: FXN 3 forward 9:69037713-69037737; SpCas9
ccaggctggagtgcagtggct

SEQ ID NO: 27018 - DNA, 20 bp, Artificial Sequence
  Synthetic: FXN 3 forward 9:69037714-69037737; SpCas9
caggctggagtgcagtggct

SEQ ID NO: 27019 - DNA, 19 bp, Artificial Sequence
  Synthetic: FXN 3 forward 9:69037715-69037737; SpCas9
aggctggagtgcagtggct

SEQ ID NO: 27020 - DNA, 18 bp, Artificial Sequence
  Synthetic: FXN 3 forward 9:69037716-69037737; SpCas9
ggctggagtgcagtggct

SEQ ID NO: 27021 - DNA, 25 bp, Artificial Sequence
  Synthetic: FXN 3 reverse 9:69037712-69037740; SpCas9
agactgagccactgcactccagcct

SEQ ID NO: 27022 - DNA, 24 bp, Artificial Sequence
  Synthetic: FXN 3 reverse 9:69037713-69037740; SpCas9
gactgagccactgcactccagcct

SEQ ID NO: 27023 - DNA, 23 bp, Artificial Sequence
  Synthetic: FXN 3 reverse 9:69037714-69037740; SpCas9
actgagccactgcactccagcct

SEQ ID NO: 27024 - DNA, 22 bp, Artificial Sequence
  Synthetic: FXN 3 reverse 9:69037715-69037740; SpCas9
ctgagccactgcactccagcct

SEQ ID NO: 27025 - DNA, 21 bp, Artificial Sequence
  Synthetic: FXN 3 reverse 9:69037716-69037740; SpCas9
tgagccactgcactccagcct

SEQ ID NO: 27026 - DNA, 20 bp, Artificial Sequence
  Synthetic: FXN 3 reverse 9:69037717-69037740; SpCas9
gagccactgcactccagcct

SEQ ID NO: 27027 - DNA, 19 bp, Artificial Sequence
  Synthetic: FXN 3 reverse 9:69037718-69037740; SpCas9
agccactgcactccagcct

SEQ ID NO: 27028 - DNA, 18 bp, Artificial Sequence
  Synthetic: FXN 3 reverse 9:69037719-69037740; SpCas9
gccactgcactccagcct

SEQ ID NO: 27029 - DNA, 25 bp, Artificial Sequence
  Synthetic: FXN 3 reverse 9:69037713-69037741; SpCas9
gagactgagccactgcactccagcc

SEQ ID NO: 27030 - DNA, 24 bp, Artificial Sequence
  Synthetic: FXN 3 reverse 9:69037714-69037741; SpCas9
agactgagccactgcactccagcc

SEQ ID NO: 27031 - DNA, 23 bp, Artificial Sequence
  Synthetic: FXN 3 reverse 9:69037715-69037741; SpCas9
gactgagccactgcactccagcc

SEQ ID NO: 27032 - DNA, 22 bp, Artificial Sequence
  Synthetic: FXN 3 reverse 9:69037716-69037741; SpCas9
actgagccactgcactccagcc

SEQ ID NO: 27033 - DNA, 21 bp, Artificial Sequence
  Synthetic: FXN 3 reverse 9:69037717-69037741; SpCas9
ctgagccactgcactccagcc

SEQ ID NO: 27034 - DNA, 20 bp, Artificial Sequence
  Synthetic: FXN 3 reverse 9:69037718-69037741; SpCas9
tgagccactgcactccagcc

SEQ ID NO: 27035 - DNA, 19 bp, Artificial Sequence
  Synthetic: FXN 3 reverse 9:69037719-69037741; SpCas9
gagccactgcactccagcc

SEQ ID NO: 27036 - DNA, 18 bp, Artificial Sequence
  Synthetic: FXN 3 reverse 9:69037720-69037741; SpCas9
agccactgcactccagcc

SEQ ID NO: 27037 - DNA, 25 bp, Artificial Sequence
  Synthetic: FXN 3 forward 9:69037715-69037743; SpCas9
aggctggagtgcagtggctcagtct

SEQ ID NO: 27038 - DNA, 24 bp, Artificial Sequence
  Synthetic: FXN 3 forward 9:69037716-69037743; SpCas9
ggctggagtgcagtggctcagtct

SEQ ID NO: 27039 - DNA, 23 bp, Artificial Sequence
  Synthetic: FXN 3 forward 9:69037717-69037743; SpCas9
gctggagtgcagtggctcagtct

SEQ ID NO: 27040 - DNA, 22 bp, Artificial Sequence
  Synthetic: FXN 3 forward 9:69037718-69037743; SpCas9
ctggagtgcagtggctcagtct

SEQ ID NO: 27041 - DNA, 21 bp, Artificial Sequence
  Synthetic: FXN 3 forward 9:69037719-69037743; SpCas9
tggagtgcagtggctcagtct

SEQ ID NO: 27042 - DNA, 20 bp, Artificial Sequence
  Synthetic: FXN 3 forward 9:69037720-69037743; SpCas9
ggagtgcagtggctcagtct

SEQ ID NO: 27043 - DNA, 19 bp, Artificial Sequence
  Synthetic: FXN 3 forward 9:69037721-69037743; SpCas9
gagtgcagtggctcagtct

SEQ ID NO: 27044 - DNA, 18 bp, Artificial Sequence
  Synthetic: FXN 3 forward 9:69037722-69037743; SpCas9
agtgcagtggctcagtct

SEQ ID NO: 27045 - DNA, 25 bp, Artificial Sequence
  Synthetic: FXN 3 reverse 9:69037718-69037746; SpCas9
gagctgagactgagccactgcactc

SEQ ID NO: 27046 - DNA, 24 bp, Artificial Sequence
  Synthetic: FXN 3 reverse 9:69037719-69037746; SpCas9
agctgagactgagccactgcactc

SEQ ID NO: 27047 - DNA, 23 bp, Artificial Sequence
  Synthetic: FXN 3 reverse 9:69037720-69037746; SpCas9
gctgagactgagccactgcactc

SEQ ID NO: 27048 - DNA, 22 bp, Artificial Sequence
  Synthetic: FXN 3 reverse 9:69037721-69037746; SpCas9
ctgagactgagccactgcactc

SEQ ID NO: 27049 - DNA, 21 bp, Artificial Sequence
  Synthetic: FXN 3 reverse 9:69037722-69037746; SpCas9
tgagactgagccactgcactc

SEQ ID NO: 27050 - DNA, 20 bp, Artificial Sequence
  Synthetic: FXN 3 reverse 9:69037723-69037746; SpCas9
gagactgagccactgcactc

SEQ ID NO: 27051 - DNA, 19 bp, Artificial Sequence
  Synthetic: FXN 3 reverse 9:69037724-69037746; SpCas9
agactgagccactgcactc

SEQ ID NO: 27052 - DNA, 18 bp, Artificial Sequence
  Synthetic: FXN 3 reverse 9:69037725-69037746; SpCas9
gactgagccactgcactc

SEQ ID NO: 27053 - DNA, 25 bp, Artificial Sequence
  Synthetic: FXN 3 reverse 9:69037732-69037760; SpCas9
gcagaggttgcagtgagctgagact

SEQ ID NO: 27054 - DNA, 24 bp, Artificial Sequence
  Synthetic: FXN 3 reverse 9:69037733-69037760; SpCas9
cagaggttgcagtgagctgagact

SEQ ID NO: 27055 - DNA, 23 bp, Artificial Sequence
  Synthetic: FXN 3 reverse 9:69037734-69037760; SpCas9
agaggttgcagtgagctgagact

SEQ ID NO: 27056 - DNA, 22 bp, Artificial Sequence
  Synthetic: FXN 3 reverse 9:69037735-69037760; SpCas9
gaggttgcagtgagctgagact

SEQ ID NO: 27057 - DNA, 21 bp, Artificial Sequence
  Synthetic: FXN 3 reverse 9:69037736-69037760; SpCas9
aggttgcagtgagctgagact

SEQ ID NO: 27058 - DNA, 20 bp, Artificial Sequence
  Synthetic: FXN 3 reverse 9:69037737-69037760; SpCas9
ggttgcagtgagctgagact

SEQ ID NO: 27059 - DNA, 19 bp, Artificial Sequence
  Synthetic: FXN 3 reverse 9:69037738-69037760; SpCas9
gttgcagtgagctgagact

SEQ ID NO: 27060 - DNA, 18 bp, Artificial Sequence
  Synthetic: FXN 3 reverse 9:69037739-69037760; SpCas9
ttgcagtgagctgagact

SEQ ID NO: 27061 - DNA, 25 bp, Artificial Sequence
  Synthetic: FXN 3 reverse 9:69037738-69037766; SpCas9
caggaggcagaggttgcagtgagct

SEQ ID NO: 27062 - DNA, 24 bp, Artificial Sequence
  Synthetic: FXN 3 reverse 9:69037739-69037766; SpCas9
aggaggcagaggttgcagtgagct

SEQ ID NO: 27063 - DNA, 23 bp, Artificial Sequence
  Synthetic: FXN 3 reverse 9:69037740-69037766; SpCas9
ggaggcagaggttgcagtgagct

SEQ ID NO: 27064 - DNA, 22 bp, Artificial Sequence
  Synthetic: FXN 3 reverse 9:69037741-69037766; SpCas9
gaggcagaggttgcagtgagct

SEQ ID NO: 27065 - DNA, 21 bp, Artificial Sequence
  Synthetic: FXN 3 reverse 9:69037742-69037766; SpCas9
aggcagaggttgcagtgagct

SEQ ID NO: 27066 - DNA, 20 bp, Artificial Sequence
  Synthetic: FXN 3 reverse 9:69037743-69037766; SpCas9
ggcagaggttgcagtgagct

SEQ ID NO: 27067 - DNA, 19 bp, Artificial Sequence
  Synthetic: FXN 3 reverse 9:69037744-69037766; SpCas9
gcagaggttgcagtgagct

SEQ ID NO: 27068 - DNA, 18 bp, Artificial Sequence
  Synthetic: FXN 3 reverse 9:69037745-69037766; SpCas9
cagaggttgcagtgagct

SEQ ID NO: 27069 - DNA, 25 bp, Artificial Sequence
  Synthetic: FXN 3 forward 9:69037739-69037767; SpCas9
tcagctcactgcaacctctgcctcc

SEQ ID NO: 27070 - DNA, 24 bp, Artificial Sequence
  Synthetic: FXN 3 forward 9:69037740-69037767; SpCas9
cagctcactgcaacctctgcctcc

SEQ ID NO: 27071 - DNA, 23 bp, Artificial Sequence
  Synthetic: FXN 3 forward 9:69037741-69037767; SpCas9
agctcactgcaacctctgcctcc

SEQ ID NO: 27072 - DNA, 22 bp, Artificial Sequence
  Synthetic: FXN 3 forward 9:69037742-69037767; SpCas9
gctcactgcaacctctgcctcc

SEQ ID NO: 27073 - DNA, 21 bp, Artificial Sequence
  Synthetic: FXN 3 forward 9:69037743-69037767; SpCas9
ctcactgcaacctctgcctcc

SEQ ID NO: 27074 - DNA, 20 bp, Artificial Sequence
  Synthetic: FXN 3 forward 9:69037744-69037767; SpCas9
tcactgcaacctctgcctcc

SEQ ID NO: 27075 - DNA, 19 bp, Artificial Sequence
  Synthetic: FXN 3 forward 9:69037745-69037767; SpCas9
cactgcaacctctgcctcc

SEQ ID NO: 27076 - DNA, 18 bp, Artificial Sequence
  Synthetic: FXN 3 forward 9:69037746-69037767; SpCas9
actgcaacctctgcctcc

SEQ ID NO: 27077 - DNA, 25 bp, Artificial Sequence
  Synthetic: FXN 3 forward 9:69037740-69037768; SpCas9
cagctcactgcaacctctgcctcct

SEQ ID NO: 27078 - DNA, 24 bp, Artificial Sequence
  Synthetic: FXN 3 forward 9:69037741-69037768; SpCas9
agctcactgcaacctctgcctcct

SEQ ID NO: 27079 - DNA, 23 bp, Artificial Sequence
  Synthetic: FXN 3 forward 9:69037742-69037768; SpCas9
gctcactgcaacctctgcctcct

SEQ ID NO: 27080 - DNA, 22 bp, Artificial Sequence
  Synthetic: FXN 3 forward 9:69037743-69037768; SpCas9
ctcactgcaacctctgcctcct

SEQ ID NO: 27081 - DNA, 21 bp, Artificial Sequence
  Synthetic: FXN 3 forward 9:69037744-69037768; SpCas9
tcactgcaacctctgcctcct

SEQ ID NO: 27082 - DNA, 20 bp, Artificial Sequence
  Synthetic: FXN 3 forward 9:69037745-69037768; SpCas9
cactgcaacctctgcctcct

SEQ ID NO: 27083 - DNA, 19 bp, Artificial Sequence
  Synthetic: FXN 3 forward 9:69037746-69037768; SpCas9
actgcaacctctgcctcct

SEQ ID NO: 27084 - DNA, 18 bp, Artificial Sequence
  Synthetic: FXN 3 forward 9:69037747-69037768; SpCas9
ctgcaacctctgcctcct

SEQ ID NO: 27085 - DNA, 25 bp, Artificial Sequence
  Synthetic: FXN 3 reverse 9:69037743-69037771; SpCas9
gaacccaggaggcagaggttgcagt

SEQ ID NO: 27086 - DNA, 24 bp, Artificial Sequence
  Synthetic: FXN 3 reverse 9:69037744-69037771; SpCas9
aacccaggaggcagaggttgcagt

SEQ ID NO: 27087 - DNA, 23 bp, Artificial Sequence
  Synthetic: FXN 3 reverse 9:69037745-69037771; SpCas9
acccaggaggcagaggttgcagt

SEQ ID NO: 27088 - DNA, 22 bp, Artificial Sequence
  Synthetic: FXN 3 reverse 9:69037746-69037771; SpCas9
cccaggaggcagaggttgcagt

SEQ ID NO: 27089 - DNA, 21 bp, Artificial Sequence
  Synthetic: FXN 3 reverse 9:69037747-69037771; SpCas9
ccaggaggcagaggttgcagt

SEQ ID NO: 27090 - DNA, 20 bp, Artificial Sequence
  Synthetic: FXN 3 reverse 9:69037748-69037771; SpCas9
caggaggcagaggttgcagt

SEQ ID NO: 27091 - DNA, 19 bp, Artificial Sequence
  Synthetic: FXN 3 reverse 9:69037749-69037771; SpCas9
aggaggcagaggttgcagt

SEQ ID NO: 27092 - DNA, 18 bp, Artificial Sequence
  Synthetic: FXN 3 reverse 9:69037750-69037771; SpCas9
ggaggcagaggttgcagt

SEQ ID NO: 27093 - DNA, 25 bp, Artificial Sequence
  Synthetic: FXN 3 forward 9:69037746-69037774; SpCas9
actgcaacctctgcctcctgggttc

SEQ ID NO: 27094 - DNA, 24 bp, Artificial Sequence
  Synthetic: FXN 3 forward 9:69037747-69037774; SpCas9
ctgcaacctctgcctcctgggttc

SEQ ID NO: 27095 - DNA, 23 bp, Artificial Sequence
  Synthetic: FXN 3 forward 9:69037748-69037774; SpCas9
tgcaacctctgcctcctgggttc

SEQ ID NO: 27096 - DNA, 22 bp, Artificial Sequence
  Synthetic: FXN 3 forward 9:69037749-69037774; SpCas9
gcaacctctgcctcctgggttc

SEQ ID NO: 27097 - DNA, 21 bp, Artificial Sequence
  Synthetic: FXN 3 forward 9:69037750-69037774; SpCas9
caacctctgcctcctgggttc

SEQ ID NO: 27098 - DNA, 20 bp, Artificial Sequence
  Synthetic: FXN 3 forward 9:69037751-69037774; SpCas9
aacctctgcctcctgggttc

SEQ ID NO: 27099 - DNA, 19 bp, Artificial Sequence
  Synthetic: FXN 3 forward 9:69037752-69037774; SpCas9
acctctgcctcctgggttc

SEQ ID NO: 27100 - DNA, 18 bp, Artificial Sequence
  Synthetic: FXN 3 forward 9:69037753-69037774; SpCas9
cctctgcctcctgggttc

SEQ ID NO: 27101 - DNA, 25 bp, Artificial Sequence
  Synthetic: FXN 3 reverse 9:69037747-69037775; SpCas9
acttgaacccaggaggcagaggttg

SEQ ID NO: 27102 - DNA, 24 bp, Artificial Sequence
  Synthetic: FXN 3 reverse 9:69037748-69037775; SpCas9
cttgaacccaggaggcagaggttg

SEQ ID NO: 27103 - DNA, 23 bp, Artificial Sequence
  Synthetic: FXN 3 reverse 9:69037749-69037775; SpCas9
ttgaacccaggaggcagaggttg

SEQ ID NO: 27104 - DNA, 22 bp, Artificial Sequence
  Synthetic: FXN 3 reverse 9:69037750-69037775; SpCas9
tgaacccaggaggcagaggttg

SEQ ID NO: 27105 - DNA, 21 bp, Artificial Sequence
  Synthetic: FXN 3 reverse 9:69037751-69037775; SpCas9
gaacccaggaggcagaggttg

SEQ ID NO: 27106 - DNA, 20 bp, Artificial Sequence
  Synthetic: FXN 3 reverse 9:69037752-69037775; SpCas9
aacccaggaggcagaggttg

SEQ ID NO: 27107 - DNA, 19 bp, Artificial Sequence
  Synthetic: FXN 3 reverse 9:69037753-69037775; SpCas9
acccaggaggcagaggttg

SEQ ID NO: 27108 - DNA, 18 bp, Artificial Sequence
  Synthetic: FXN 3 reverse 9:69037754-69037775; SpCas9
cccaggaggcagaggttg

SEQ ID NO: 27109 - DNA, 25 bp, Artificial Sequence
  Synthetic: FXN 3 reverse 9:69037753-69037781; SpCas9
agaatcacttgaacccaggaggcag

SEQ ID NO: 27110 - DNA, 24 bp, Artificial Sequence
  Synthetic: FXN 3 reverse 9:69037754-69037781; SpCas9
gaatcacttgaacccaggaggcag

SEQ ID NO: 27111 - DNA, 23 bp, Artificial Sequence
  Synthetic: FXN 3 reverse 9:69037755-69037781; SpCas9
aatcacttgaacccaggaggcag

SEQ ID NO: 27112 - DNA, 22 bp, Artificial Sequence
  Synthetic: FXN 3 reverse 9:69037756-69037781; SpCas9
atcacttgaacccaggaggcag

SEQ ID NO: 27113 - DNA, 21 bp, Artificial Sequence
  Synthetic: FXN 3 reverse 9:69037757-69037781; SpCas9
tcacttgaacccaggaggcag

SEQ ID NO: 27114 - DNA, 20 bp, Artificial Sequence
  Synthetic: FXN 3 reverse 9:69037758-69037781; SpCas9
cacttgaacccaggaggcag

SEQ ID NO: 27115 - DNA, 19 bp, Artificial Sequence
  Synthetic: FXN 3 reverse 9:69037759-69037781; SpCas9
acttgaacccaggaggcag

SEQ ID NO: 27116 - DNA, 18 bp, Artificial Sequence
  Synthetic: FXN 3 reverse 9:69037760-69037781; SpCas9
cttgaacccaggaggcag

SEQ ID NO: 27117 - DNA, 25 bp, Artificial Sequence
  Synthetic: FXN 3 reverse 9:69037754-69037782; SpCas9
gagaatcacttgaacccaggaggca

SEQ ID NO: 27118 - DNA, 24 bp, Artificial Sequence
  Synthetic: FXN 3 reverse 9:69037755-69037782; SpCas9
agaatcacttgaacccaggaggca

SEQ ID NO: 27119 - DNA, 23 bp, Artificial Sequence
  Synthetic: FXN 3 reverse 9:69037756-69037782; SpCas9
gaatcacttgaacccaggaggca

SEQ ID NO: 27120 - DNA, 22 bp, Artificial Sequence
  Synthetic: FXN 3 reverse 9:69037757-69037782; SpCas9
aatcacttgaacccaggaggca

SEQ ID NO: 27121 - DNA, 21 bp, Artificial Sequence
  Synthetic: FXN 3 reverse 9:69037758-69037782; SpCas9
atcacttgaacccaggaggca

SEQ ID NO: 27122 - DNA, 20 bp, Artificial Sequence
  Synthetic: FXN 3 reverse 9:69037759-69037782; SpCas9
tcacttgaacccaggaggca

SEQ ID NO: 27123 - DNA, 19 bp, Artificial Sequence
  Synthetic: FXN 3 reverse 9:69037760-69037782; SpCas9
cacttgaacccaggaggca

SEQ ID NO: 27124 - DNA, 18 bp, Artificial Sequence
  Synthetic: FXN 3 reverse 9:69037761-69037782; SpCas9
acttgaacccaggaggca

SEQ ID NO: 27125 - DNA, 25 bp, Artificial Sequence
  Synthetic: FXN 3 reverse 9:69037756-69037784; SpCas9
aggagaatcacttgaacccaggagg

SEQ ID NO: 27126 - DNA, 24 bp, Artificial Sequence
  Synthetic: FXN 3 reverse 9:69037757-69037784; SpCas9
ggagaatcacttgaacccaggagg

SEQ ID NO: 27127 - DNA, 23 bp, Artificial Sequence
  Synthetic: FXN 3 reverse 9:69037758-69037784; SpCas9
gagaatcacttgaacccaggagg

SEQ ID NO: 27128 - DNA, 22 bp, Artificial Sequence
  Synthetic: FXN 3 reverse 9:69037759-69037784; SpCas9
agaatcacttgaacccaggagg

SEQ ID NO: 27129 - DNA, 21 bp, Artificial Sequence
  Synthetic: FXN 3 reverse 9:69037760-69037784; SpCas9
gaatcacttgaacccaggagg

SEQ ID NO: 27130 - DNA, 20 bp, Artificial Sequence
  Synthetic: FXN 3 reverse 9:69037761-69037784; SpCas9
aatcacttgaacccaggagg

SEQ ID NO: 27131 - DNA, 19 bp, Artificial Sequence
  Synthetic: FXN 3 reverse 9:69037762-69037784; SpCas9
atcacttgaacccaggagg

SEQ ID NO: 27132 - DNA, 18 bp, Artificial Sequence
  Synthetic: FXN 3 reverse 9:69037763-69037784; SpCas9
tcacttgaacccaggagg

SEQ ID NO: 27133 - DNA, 25 bp, Artificial Sequence
  Synthetic: FXN 3 reverse 9:69037759-69037787; SpCas9
ggcaggagaatcacttgaacccagg

SEQ ID NO: 27134 - DNA, 24 bp, Artificial Sequence
  Synthetic: FXN 3 reverse 9:69037760-69037787; SpCas9
gcaggagaatcacttgaacccagg

SEQ ID NO: 27135 - DNA, 23 bp, Artificial Sequence
  Synthetic: FXN 3 reverse 9:69037761-69037787; SpCas9
caggagaatcacttgaacccagg

SEQ ID NO: 27136 - DNA, 22 bp, Artificial Sequence
  Synthetic: FXN 3 reverse 9:69037762-69037787; SpCas9
aggagaatcacttgaacccagg

SEQ ID NO: 27137 - DNA, 21 bp, Artificial Sequence
  Synthetic: FXN 3 reverse 9:69037763-69037787; SpCas9
ggagaatcacttgaacccagg

SEQ ID NO: 27138 - DNA, 20 bp, Artificial Sequence
  Synthetic: FXN 3 reverse 9:69037764-69037787; SpCas9
gagaatcacttgaacccagg

SEQ ID NO: 27139 - DNA, 19 bp, Artificial Sequence
  Synthetic: FXN 3 reverse 9:69037765-69037787; SpCas9
agaatcacttgaacccagg

SEQ ID NO: 27140 - DNA, 18 bp, Artificial Sequence
  Synthetic: FXN 3 reverse 9:69037766-69037787; SpCas9
gaatcacttgaacccagg

SEQ ID NO: 27141 - DNA, 25 bp, Artificial Sequence
  Synthetic: FXN 3 reverse 9:69037760-69037788; SpCas9
aggcaggagaatcacttgaacccag

SEQ ID NO: 27142 - DNA, 24 bp, Artificial Sequence
  Synthetic: FXN 3 reverse 9:69037761-69037788; SpCas9
ggcaggagaatcacttgaacccag

SEQ ID NO: 27143 - DNA, 23 bp, Artificial Sequence
  Synthetic: FXN 3 reverse 9:69037762-69037788; SpCas9
gcaggagaatcacttgaacccag

SEQ ID NO: 27144 - DNA, 22 bp, Artificial Sequence
  Synthetic: FXN 3 reverse 9:69037763-69037788; SpCas9
caggagaatcacttgaacccag

SEQ ID NO: 27145 - DNA, 21 bp, Artificial Sequence
  Synthetic: FXN 3 reverse 9:69037764-69037788; SpCas9
aggagaatcacttgaacccag

SEQ ID NO: 27146 - DNA, 20 bp, Artificial Sequence
  Synthetic: FXN 3 reverse 9:69037765-69037788; SpCas9
ggagaatcacttgaacccag

SEQ ID NO: 27147 - DNA, 19 bp, Artificial Sequence
  Synthetic: FXN 3 reverse 9:69037766-69037788; SpCas9
gagaatcacttgaacccag

SEQ ID NO: 27148 - DNA, 18 bp, Artificial Sequence
  Synthetic: FXN 3 reverse 9:69037767-69037788; SpCas9
agaatcacttgaacccag

SEQ ID NO: 27149 - DNA, 25 bp, Artificial Sequence
  Synthetic: FXN 3 reverse 9:69037762-69037790; SpCas9
tgaggcaggagaatcacttgaaccc

SEQ ID NO: 27150 - DNA, 24 bp, Artificial Sequence
  Synthetic: FXN 3 reverse 9:69037763-69037790; SpCas9
gaggcaggagaatcacttgaaccc

SEQ ID NO: 27151 - DNA, 23 bp, Artificial Sequence
  Synthetic: FXN 3 reverse 9:69037764-69037790; SpCas9
aggcaggagaatcacttgaaccc

SEQ ID NO: 27152 - DNA, 22 bp, Artificial Sequence
  Synthetic: FXN 3 reverse 9:69037765-69037790; SpCas9
ggcaggagaatcacttgaaccc

SEQ ID NO: 27153 - DNA, 21 bp, Artificial Sequence
  Synthetic: FXN 3 reverse 9:69037766-69037790; SpCas9
gcaggagaatcacttgaaccc

SEQ ID NO: 27154 - DNA, 20 bp, Artificial Sequence
  Synthetic: FXN 3 reverse 9:69037767-69037790; SpCas9
caggagaatcacttgaaccc

SEQ ID NO: 27155 - DNA, 19 bp, Artificial Sequence
  Synthetic: FXN 3 reverse 9:69037768-69037790; SpCas9
aggagaatcacttgaaccc

SEQ ID NO: 27156 - DNA, 18 bp, Artificial Sequence
  Synthetic: FXN 3 reverse 9:69037769-69037790; SpCas9
ggagaatcacttgaaccc

SEQ ID NO: 27157 - DNA, 25 bp, Artificial Sequence
  Synthetic: FXN 3 forward 9:69037763-69037791; SpCas9
ctgggttcaagtgattctcctgcct

SEQ ID NO: 27158 - DNA, 24 bp, Artificial Sequence
  Synthetic: FXN 3 forward 9:69037764-69037791; SpCas9
tgggttcaagtgattctcctgcct

SEQ ID NO: 27159 - DNA, 23 bp, Artificial Sequence
  Synthetic: FXN 3 forward 9:69037765-69037791; SpCas9
gggttcaagtgattctcctgcct

SEQ ID NO: 27160 - DNA, 22 bp, Artificial Sequence
  Synthetic: FXN 3 forward 9:69037766-69037791; SpCas9
ggttcaagtgattctcctgcct

SEQ ID NO: 27161 - DNA, 21 bp, Artificial Sequence
  Synthetic: FXN 3 forward 9:69037767-69037791; SpCas9
gttcaagtgattctcctgcct

SEQ ID NO: 27162 - DNA, 20 bp, Artificial Sequence
  Synthetic: FXN 3 forward 9:69037768-69037791; SpCas9
ttcaagtgattctcctgcct

SEQ ID NO: 27163 - DNA, 19 bp, Artificial Sequence
  Synthetic: FXN 3 forward 9:69037769-69037791; SpCas9
tcaagtgattctcctgcct

SEQ ID NO: 27164 - DNA, 18 bp, Artificial Sequence
  Synthetic: FXN 3 forward 9:69037770-69037791; SpCas9
caagtgattctcctgcct

SEQ ID NO: 27165 - DNA, 25 bp, Artificial Sequence
  Synthetic: FXN 3 reverse 9:69037763-69037791; SpCas9
ctgaggcaggagaatcacttgaacc

SEQ ID NO: 27166 - DNA, 24 bp, Artificial Sequence
  Synthetic: FXN 3 reverse 9:69037764-69037791; SpCas9
tgaggcaggagaatcacttgaacc

SEQ ID NO: 27167 - DNA, 23 bp, Artificial Sequence
  Synthetic: FXN 3 reverse 9:69037765-69037791; SpCas9
gaggcaggagaatcacttgaacc

SEQ ID NO: 27168 - DNA, 22 bp, Artificial Sequence
  Synthetic: FXN 3 reverse 9:69037766-69037791; SpCas9
aggcaggagaatcacttgaacc

SEQ ID NO: 27169 - DNA, 21 bp, Artificial Sequence
  Synthetic: FXN 3 reverse 9:69037767-69037791; SpCas9
ggcaggagaatcacttgaacc

SEQ ID NO: 27170 - DNA, 20 bp, Artificial Sequence
  Synthetic: FXN 3 reverse 9:69037768-69037791; SpCas9
gcaggagaatcacttgaacc

SEQ ID NO: 27171 - DNA, 19 bp, Artificial Sequence
  Synthetic: FXN 3 reverse 9:69037769-69037791; SpCas9
caggagaatcacttgaacc

SEQ ID NO: 27172 - DNA, 18 bp, Artificial Sequence
  Synthetic: FXN 3 reverse 9:69037770-69037791; SpCas9
aggagaatcacttgaacc

SEQ ID NO: 27173 - DNA, 25 bp, Artificial Sequence
  Synthetic: FXN 3 forward 9:69037772-69037800; SpCas9
agtgattctcctgcctcagcctccc

SEQ ID NO: 27174 - DNA, 24 bp, Artificial Sequence
  Synthetic: FXN 3 forward 9:69037773-69037800; SpCas9
gtgattctcctgcctcagcctccc

SEQ ID NO: 27175 - DNA, 23 bp, Artificial Sequence
  Synthetic: FXN 3 forward 9:69037774-69037800; SpCas9
tgattctcctgcctcagcctccc

SEQ ID NO: 27176 - DNA, 22 bp, Artificial Sequence
  Synthetic: FXN 3 forward 9:69037775-69037800; SpCas9
gattctcctgcctcagcctccc

SEQ ID NO: 27177 - DNA, 21 bp, Artificial Sequence
  Synthetic: FXN 3 forward 9:69037776-69037800; SpCas9
attctcctgcctcagcctccc

SEQ ID NO: 27178 - DNA, 20 bp, Artificial Sequence
  Synthetic: FXN 3 forward 9:69037777-69037800; SpCas9
ttctcctgcctcagcctccc

SEQ ID NO: 27179 - DNA, 19 bp, Artificial Sequence
  Synthetic: FXN 3 forward 9:69037778-69037800; SpCas9
tctcctgcctcagcctccc

SEQ ID NO: 27180 - DNA, 18 bp, Artificial Sequence
  Synthetic: FXN 3 forward 9:69037779-69037800; SpCas9
ctcctgcctcagcctccc

SEQ ID NO: 27181 - DNA, 25 bp, Artificial Sequence
  Synthetic: FXN 3 forward 9:69037775-69037803; SpCas9
gattctcctgcctcagcctcccgag

SEQ ID NO: 27182 - DNA, 24 bp, Artificial Sequence
  Synthetic: FXN 3 forward 9:69037776-69037803; SpCas9
attctcctgcctcagcctcccgag

SEQ ID NO: 27183 - DNA, 23 bp, Artificial Sequence
  Synthetic: FXN 3 forward 9:69037777-69037803; SpCas9
ttctcctgcctcagcctcccgag

SEQ ID NO: 27184 - DNA, 22 bp, Artificial Sequence
  Synthetic: FXN 3 forward 9:69037778-69037803; SpCas9
tctcctgcctcagcctcccgag

SEQ ID NO: 27185 - DNA, 21 bp, Artificial Sequence
  Synthetic: FXN 3 forward 9:69037779-69037803; SpCas9
ctcctgcctcagcctcccgag

SEQ ID NO: 27186 - DNA, 20 bp, Artificial Sequence
  Synthetic: FXN 3 forward 9:69037780-69037803; SpCas9
tcctgcctcagcctcccgag

SEQ ID NO: 27187 - DNA, 19 bp, Artificial Sequence
  Synthetic: FXN 3 forward 9:69037781-69037803; SpCas9
cctgcctcagcctcccgag

SEQ ID NO: 27188 - DNA, 18 bp, Artificial Sequence
  Synthetic: FXN 3 forward 9:69037782-69037803; SpCas9
ctgcctcagcctcccgag

SEQ ID NO: 27189 - DNA, 25 bp, Artificial Sequence
  Synthetic: FXN 3 forward 9:69037779-69037807; SpCas9
ctcctgcctcagcctcccgagtagc

SEQ ID NO: 27190 - DNA, 24 bp, Artificial Sequence
  Synthetic: FXN 3 forward 9:69037780-69037807; SpCas9
tcctgcctcagcctcccgagtagc

SEQ ID NO: 27191 - DNA, 23 bp, Artificial Sequence
  Synthetic: FXN 3 forward 9:69037781-69037807; SpCas9
cctgcctcagcctcccgagtagc

SEQ ID NO: 27192 - DNA, 22 bp, Artificial Sequence
  Synthetic: FXN 3 forward 9:69037782-69037807; SpCas9
ctgcctcagcctcccgagtagc

SEQ ID NO: 27193 - DNA, 21 bp, Artificial Sequence
  Synthetic: FXN 3 forward 9:69037783-69037807; SpCas9
tgcctcagcctcccgagtagc

SEQ ID NO: 27194 - DNA, 20 bp, Artificial Sequence
  Synthetic: FXN 3 forward 9:69037784-69037807; SpCas9
gcctcagcctcccgagtagc

SEQ ID NO: 27195 - DNA, 19 bp, Artificial Sequence
  Synthetic: FXN 3 forward 9:69037785-69037807; SpCas9
cctcagcctcccgagtagc

SEQ ID NO: 27196 - DNA, 18 bp, Artificial Sequence
  Synthetic: FXN 3 forward 9:69037786-69037807; SpCas9
ctcagcctcccgagtagc

SEQ ID NO: 27197 - DNA, 25 bp, Artificial Sequence
  Synthetic: FXN 3 reverse 9:69037779-69037807; SpCas9
ccagctactcgggaggctgaggcag

SEQ ID NO: 27198 - DNA, 24 bp, Artificial Sequence
  Synthetic: FXN 3 reverse 9:69037780-69037807; SpCas9
cagctactcgggaggctgaggcag

SEQ ID NO: 27199 - DNA, 23 bp, Artificial Sequence
  Synthetic: FXN 3 reverse 9:69037781-69037807; SpCas9
agctactcgggaggctgaggcag

SEQ ID NO: 27200 - DNA, 22 bp, Artificial Sequence
  Synthetic: FXN 3 reverse 9:69037782-69037807; SpCas9
gctactcgggaggctgaggcag

SEQ ID NO: 27201 - DNA, 21 bp, Artificial Sequence
  Synthetic: FXN 3 reverse 9:69037783-69037807; SpCas9
ctactcgggaggctgaggcag

SEQ ID NO: 27202 - DNA, 20 bp, Artificial Sequence
  Synthetic: FXN 3 reverse 9:69037784-69037807; SpCas9
tactcgggaggctgaggcag

SEQ ID NO: 27203 - DNA, 19 bp, Artificial Sequence
  Synthetic: FXN 3 reverse 9:69037785-69037807; SpCas9
actcgggaggctgaggcag

SEQ ID NO: 27204 - DNA, 18 bp, Artificial Sequence
  Synthetic: FXN 3 reverse 9:69037786-69037807; SpCas9
ctcgggaggctgaggcag

SEQ ID NO: 27205 - DNA, 25 bp, Artificial Sequence
  Synthetic: FXN 3 forward 9:69037780-69037808; SpCas9
tcctgcctcagcctcccgagtagct

SEQ ID NO: 27206 - DNA, 24 bp, Artificial Sequence
  Synthetic: FXN 3 forward 9:69037781-69037808; SpCas9
cctgcctcagcctcccgagtagct

SEQ ID NO: 27207 - DNA, 23 bp, Artificial Sequence
  Synthetic: FXN 3 forward 9:69037782-69037808; SpCas9
ctgcctcagcctcccgagtagct

SEQ ID NO: 27208 - DNA, 22 bp, Artificial Sequence
  Synthetic: FXN 3 forward 9:69037783-69037808; SpCas9
tgcctcagcctcccgagtagct

SEQ ID NO: 27209 - DNA, 21 bp, Artificial Sequence
  Synthetic: FXN 3 forward 9:69037784-69037808; SpCas9
gcctcagcctcccgagtagct

SEQ ID NO: 27210 - DNA, 20 bp, Artificial Sequence
  Synthetic: FXN 3 forward 9:69037785-69037808; SpCas9
cctcagcctcccgagtagct

SEQ ID NO: 27211 - DNA, 19 bp, Artificial Sequence
  Synthetic: FXN 3 forward 9:69037786-69037808; SpCas9
ctcagcctcccgagtagct

SEQ ID NO: 27212 - DNA, 18 bp, Artificial Sequence
  Synthetic: FXN 3 forward 9:69037787-69037808; SpCas9
tcagcctcccgagtagct

SEQ ID NO: 27213 - DNA, 25 bp, Artificial Sequence
  Synthetic: FXN 3 reverse 9:69037781-69037809; SpCas9
tcccagctactcgggaggctgaggc

SEQ ID NO: 27214 - DNA, 24 bp, Artificial Sequence
  Synthetic: FXN 3 reverse 9:69037782-69037809; SpCas9
cccagctactcgggaggctgaggc

SEQ ID NO: 27215 - DNA, 23 bp, Artificial Sequence
  Synthetic: FXN 3 reverse 9:69037783-69037809; SpCas9
ccagctactcgggaggctgaggc

SEQ ID NO: 27216 - DNA, 22 bp, Artificial Sequence
  Synthetic: FXN 3 reverse 9:69037784-69037809; SpCas9
cagctactcgggaggctgaggc

SEQ ID NO: 27217 - DNA, 21 bp, Artificial Sequence
  Synthetic: FXN 3 reverse 9:69037785-69037809; SpCas9
agctactcgggaggctgaggc

SEQ ID NO: 27218 - DNA, 20 bp, Artificial Sequence
  Synthetic: FXN 3 reverse 9:69037786-69037809; SpCas9
gctactcgggaggctgaggc

SEQ ID NO: 27219 - DNA, 19 bp, Artificial Sequence
  Synthetic: FXN 3 reverse 9:69037787-69037809; SpCas9
ctactcgggaggctgaggc

SEQ ID NO: 27220 - DNA, 18 bp, Artificial Sequence
  Synthetic: FXN 3 reverse 9:69037788-69037809; SpCas9
tactcgggaggctgaggc

SEQ ID NO: 27221 - DNA, 25 bp, Artificial Sequence
  Synthetic: FXN 3 reverse 9:69037782-69037810; SpCas9
atcccagctactcgggaggctgagg

SEQ ID NO: 27222 - DNA, 24 bp, Artificial Sequence
  Synthetic: FXN 3 reverse 9:69037783-69037810; SpCas9
tcccagctactcgggaggctgagg

SEQ ID NO: 27223 - DNA, 23 bp, Artificial Sequence
  Synthetic: FXN 3 reverse 9:69037784-69037810; SpCas9
cccagctactcgggaggctgagg

SEQ ID NO: 27224 - DNA, 22 bp, Artificial Sequence
  Synthetic: FXN 3 reverse 9:69037785-69037810; SpCas9
ccagctactcgggaggctgagg

SEQ ID NO: 27225 - DNA, 21 bp, Artificial Sequence
  Synthetic: FXN 3 reverse 9:69037786-69037810; SpCas9
cagctactcgggaggctgagg

SEQ ID NO: 27226 - DNA, 20 bp, Artificial Sequence
  Synthetic: FXN 3 reverse 9:69037787-69037810; SpCas9
agctactcgggaggctgagg

SEQ ID NO: 27227 - DNA, 19 bp, Artificial Sequence
  Synthetic: FXN 3 reverse 9:69037788-69037810; SpCas9
gctactcgggaggctgagg

SEQ ID NO: 27228 - DNA, 18 bp, Artificial Sequence
  Synthetic: FXN 3 reverse 9:69037789-69037810; SpCas9
ctactcgggaggctgagg

SEQ ID NO: 27229 - DNA, 25 bp, Artificial Sequence
  Synthetic: FXN 3 reverse 9:69037785-69037813; SpCas9
ataatcccagctactcgggaggctg

SEQ ID NO: 27230 - DNA, 24 bp, Artificial Sequence
  Synthetic: FXN 3 reverse 9:69037786-69037813; SpCas9
taatcccagctactcgggaggctg

SEQ ID NO: 27231 - DNA, 23 bp, Artificial Sequence
  Synthetic: FXN 3 reverse 9:69037787-69037813; SpCas9
aatcccagctactcgggaggctg

SEQ ID NO: 27232 - DNA, 22 bp, Artificial Sequence
  Synthetic: FXN 3 reverse 9:69037788-69037813; SpCas9
atcccagctactcgggaggctg

SEQ ID NO: 27233 - DNA, 21 bp, Artificial Sequence
  Synthetic: FXN 3 reverse 9:69037789-69037813; SpCas9
tcccagctactcgggaggctg

SEQ ID NO: 27234 - DNA, 20 bp, Artificial Sequence
  Synthetic: FXN 3 reverse 9:69037790-69037813; SpCas9
cccagctactcgggaggctg

SEQ ID NO: 27235 - DNA, 19 bp, Artificial Sequence
  Synthetic: FXN 3 reverse 9:69037791-69037813; SpCas9
ccagctactcgggaggctg

SEQ ID NO: 27236 - DNA, 18 bp, Artificial Sequence
  Synthetic: FXN 3 reverse 9:69037792-69037813; SpCas9
cagctactcgggaggctg

SEQ ID NO: 27237 - DNA, 25 bp, Artificial Sequence
  Synthetic: FXN 3 reverse 9:69037786-69037814; SpCas9
gataatcccagctactcgggaggct

SEQ ID NO: 27238 - DNA, 24 bp, Artificial Sequence
  Synthetic: FXN 3 reverse 9:69037787-69037814; SpCas9
ataatcccagctactcgggaggct

SEQ ID NO: 27239 - DNA, 23 bp, Artificial Sequence
  Synthetic: FXN 3 reverse 9:69037788-69037814; SpCas9
taatcccagctactcgggaggct

SEQ ID NO: 27240 - DNA, 22 bp, Artificial Sequence
  Synthetic: FXN 3 reverse 9:69037789-69037814; SpCas9
aatcccagctactcgggaggct

SEQ ID NO: 27241 - DNA, 21 bp, Artificial Sequence
  Synthetic: FXN 3 reverse 9:69037790-69037814; SpCas9
atcccagctactcgggaggct

SEQ ID NO: 27242 - DNA, 20 bp, Artificial Sequence
  Synthetic: FXN 3 reverse 9:69037791-69037814; SpCas9
tcccagctactcgggaggct

SEQ ID NO: 27243 - DNA, 19 bp, Artificial Sequence
  Synthetic: FXN 3 reverse 9:69037792-69037814; SpCas9
cccagctactcgggaggct

SEQ ID NO: 27244 - DNA, 18 bp, Artificial Sequence
  Synthetic: FXN 3 reverse 9:69037793-69037814; SpCas9
ccagctactcgggaggct

SEQ ID NO: 27245 - DNA, 25 bp, Artificial Sequence
  Synthetic: FXN 3 forward 9:69037788-69037816; SpCas9
cagcctcccgagtagctgggattat

SEQ ID NO: 27246 - DNA, 24 bp, Artificial Sequence
  Synthetic: FXN 3 forward 9:69037789-69037816; SpCas9
agcctcccgagtagctgggattat

SEQ ID NO: 27247 - DNA, 23 bp, Artificial Sequence
  Synthetic: FXN 3 forward 9:69037790-69037816; SpCas9
gcctcccgagtagctgggattat

SEQ ID NO: 27248 - DNA, 22 bp, Artificial Sequence
  Synthetic: FXN 3 forward 9:69037791-69037816; SpCas9
cctcccgagtagctgggattat

SEQ ID NO: 27249 - DNA, 21 bp, Artificial Sequence
  Synthetic: FXN 3 forward 9:69037792-69037816; SpCas9
ctcccgagtagctgggattat

SEQ ID NO: 27250 - DNA, 20 bp, Artificial Sequence
  Synthetic: FXN 3 forward 9:69037793-69037816; SpCas9
tcccgagtagctgggattat

SEQ ID NO: 27251 - DNA, 19 bp, Artificial Sequence
  Synthetic: FXN 3 forward 9:69037794-69037816; SpCas9
cccgagtagctgggattat

SEQ ID NO: 27252 - DNA, 18 bp, Artificial Sequence
  Synthetic: FXN 3 forward 9:69037795-69037816; SpCas9
ccgagtagctgggattat

SEQ ID NO: 27253 - DNA, 25 bp, Artificial Sequence
  Synthetic: FXN 3 reverse 9:69037791-69037819; SpCas9
tagccgataatcccagctactcggg

SEQ ID NO: 27254 - DNA, 24 bp, Artificial Sequence
  Synthetic: FXN 3 reverse 9:69037792-69037819; SpCas9
agccgataatcccagctactcggg

SEQ ID NO: 27255 - DNA, 23 bp, Artificial Sequence
  Synthetic: FXN 3 reverse 9:69037793-69037819; SpCas9
gccgataatcccagctactcggg

SEQ ID NO: 27256 - DNA, 22 bp, Artificial Sequence
  Synthetic: FXN 3 reverse 9:69037794-69037819; SpCas9
ccgataatcccagctactcggg

SEQ ID NO: 27257 - DNA, 21 bp, Artificial Sequence
  Synthetic: FXN 3 reverse 9:69037795-69037819; SpCas9
cgataatcccagctactcggg

SEQ ID NO: 27258 - DNA, 20 bp, Artificial Sequence
  Synthetic: FXN 3 reverse 9:69037796-69037819; SpCas9
gataatcccagctactcggg

SEQ ID NO: 27259 - DNA, 19 bp, Artificial Sequence
  Synthetic: FXN 3 reverse 9:69037797-69037819; SpCas9
ataatcccagctactcggg

SEQ ID NO: 27260 - DNA, 18 bp, Artificial Sequence
  Synthetic: FXN 3 reverse 9:69037798-69037819; SpCas9
taatcccagctactcggg

SEQ ID NO: 27261 - DNA, 25 bp, Artificial Sequence
  Synthetic: FXN 3 reverse 9:69037792-69037820; SpCas9
ttagccgataatcccagctactcgg

SEQ ID NO: 27262 - DNA, 24 bp, Artificial Sequence
  Synthetic: FXN 3 reverse 9:69037793-69037820; SpCas9
tagccgataatcccagctactcgg

SEQ ID NO: 27263 - DNA, 23 bp, Artificial Sequence
  Synthetic: FXN 3 reverse 9:69037794-69037820; SpCas9
agccgataatcccagctactcgg

SEQ ID NO: 27264 - DNA, 22 bp, Artificial Sequence
  Synthetic: FXN 3 reverse 9:69037795-69037820; SpCas9
gccgataatcccagctactcgg

SEQ ID NO: 27265 - DNA, 21 bp, Artificial Sequence
  Synthetic: FXN 3 reverse 9:69037796-69037820; SpCas9
ccgataatcccagctactcgg

SEQ ID NO: 27266 - DNA, 20 bp, Artificial Sequence
  Synthetic: FXN 3 reverse 9:69037797-69037820; SpCas9
cgataatcccagctactcgg

SEQ ID NO: 27267 - DNA, 19 bp, Artificial Sequence
  Synthetic: FXN 3 reverse 9:69037798-69037820; SpCas9
gataatcccagctactcgg

SEQ ID NO: 27268 - DNA, 18 bp, Artificial Sequence
  Synthetic: FXN 3 reverse 9:69037799-69037820; SpCas9
ataatcccagctactcgg

SEQ ID NO: 27269 - DNA, 25 bp, Artificial Sequence
  Synthetic: FXN 3 reverse 9:69037794-69037822; SpCas9
aattagccgataatcccagctactc

SEQ ID NO: 27270 - DNA, 24 bp, Artificial Sequence
  Synthetic: FXN 3 reverse 9:69037795-69037822; SpCas9
attagccgataatcccagctactc

SEQ ID NO: 27271 - DNA, 23 bp, Artificial Sequence
  Synthetic: FXN 3 reverse 9:69037796-69037822; SpCas9
ttagccgataatcccagctactc

SEQ ID NO: 27272 - DNA, 22 bp, Artificial Sequence
  Synthetic: FXN 3 reverse 9:69037797-69037822; SpCas9
tagccgataatcccagctactc

SEQ ID NO: 27273 - DNA, 21 bp, Artificial Sequence
  Synthetic: FXN 3 reverse 9:69037798-69037822; SpCas9
agccgataatcccagctactc

SEQ ID NO: 27274 - DNA, 20 bp, Artificial Sequence
  Synthetic: FXN 3 reverse 9:69037799-69037822; SpCas9
gccgataatcccagctactc

SEQ ID NO: 27275 - DNA, 19 bp, Artificial Sequence
  Synthetic: FXN 3 reverse 9:69037800-69037822; SpCas9
ccgataatcccagctactc

SEQ ID NO: 27276 - DNA, 18 bp, Artificial Sequence
  Synthetic: FXN 3 reverse 9:69037801-69037822; SpCas9
cgataatcccagctactc

SEQ ID NO: 27277 - DNA, 25 bp, Artificial Sequence
  Synthetic: FXN 3 reverse 9:69037795-69037823; SpCas9
aaattagccgataatcccagctact

SEQ ID NO: 27278 - DNA, 24 bp, Artificial Sequence
  Synthetic: FXN 3 reverse 9:69037796-69037823; SpCas9
aattagccgataatcccagctact

SEQ ID NO: 27279 - DNA, 23 bp, Artificial Sequence
  Synthetic: FXN 3 reverse 9:69037797-69037823; SpCas9
attagccgataatcccagctact

SEQ ID NO: 27280 - DNA, 22 bp, Artificial Sequence
  Synthetic: FXN 3 reverse 9:69037798-69037823; SpCas9
ttagccgataatcccagctact

SEQ ID NO: 27281 - DNA, 21 bp, Artificial Sequence
  Synthetic: FXN 3 reverse 9:69037799-69037823; SpCas9
tagccgataatcccagctact

SEQ ID NO: 27282 - DNA, 20 bp, Artificial Sequence
  Synthetic: FXN 3 reverse 9:69037800-69037823; SpCas9
agccgataatcccagctact

SEQ ID NO: 27283 - DNA, 19 bp, Artificial Sequence
  Synthetic: FXN 3 reverse 9:69037801-69037823; SpCas9
gccgataatcccagctact

SEQ ID NO: 27284 - DNA, 18 bp, Artificial Sequence
  Synthetic: FXN 3 reverse 9:69037802-69037823; SpCas9
ccgataatcccagctact

SEQ ID NO: 27285 - DNA, 25 bp, Artificial Sequence
  Synthetic: FXN 3 reverse 9:69037803-69037831; SpCas9
aaaatacaaaattagccgataatcc

SEQ ID NO: 27286 - DNA, 24 bp, Artificial Sequence
  Synthetic: FXN 3 reverse 9:69037804-69037831; SpCas9
aaatacaaaattagccgataatcc

SEQ ID NO: 27287 - DNA, 23 bp, Artificial Sequence
  Synthetic: FXN 3 reverse 9:69037805-69037831; SpCas9
aatacaaaattagccgataatcc

SEQ ID NO: 27288 - DNA, 22 bp, Artificial Sequence
  Synthetic: FXN 3 reverse 9:69037806-69037831; SpCas9
atacaaaattagccgataatcc

SEQ ID NO: 27289 - DNA, 21 bp, Artificial Sequence
  Synthetic: FXN 3 reverse 9:69037807-69037831; SpCas9
tacaaaattagccgataatcc

SEQ ID NO: 27290 - DNA, 20 bp, Artificial Sequence
  Synthetic: FXN 3 reverse 9:69037808-69037831; SpCas9
acaaaattagccgataatcc

SEQ ID NO: 27291 - DNA, 19 bp, Artificial Sequence
  Synthetic: FXN 3 reverse 9:69037809-69037831; SpCas9
caaaattagccgataatcc

SEQ ID NO: 27292 - DNA, 18 bp, Artificial Sequence
  Synthetic: FXN 3 reverse 9:69037810-69037831; SpCas9
aaaattagccgataatcc

SEQ ID NO: 27293 - DNA, 25 bp, Artificial Sequence
  Synthetic: FXN 3 forward 9:69037806-69037834; SpCas9
ggattatcggctaattttgtatttt

SEQ ID NO: 27294 - DNA, 24 bp, Artificial Sequence
  Synthetic: FXN 3 forward 9:69037807-69037834; SpCas9
gattatcggctaattttgtatttt

SEQ ID NO: 27295 - DNA, 23 bp, Artificial Sequence
  Synthetic: FXN 3 forward 9:69037808-69037834; SpCas9
attatcggctaattttgtatttt

SEQ ID NO: 27296 - DNA, 22 bp, Artificial Sequence
  Synthetic: FXN 3 forward 9:69037809-69037834; SpCas9
ttatcggctaattttgtatttt

SEQ ID NO: 27297 - DNA, 21 bp, Artificial Sequence
  Synthetic: FXN 3 forward 9:69037810-69037834; SpCas9
tatcggctaattttgtatttt

SEQ ID NO: 27298 - DNA, 20 bp, Artificial Sequence
  Synthetic: FXN 3 forward 9:69037811-69037834; SpCas9
atcggctaattttgtatttt

SEQ ID NO: 27299 - DNA, 19 bp, Artificial Sequence
  Synthetic: FXN 3 forward 9:69037812-69037834; SpCas9
tcggctaattttgtatttt

SEQ ID NO: 27300 - DNA, 18 bp, Artificial Sequence
  Synthetic: FXN 3 forward 9:69037813-69037834; SpCas9
cggctaattttgtatttt

SEQ ID NO: 27301 - DNA, 25 bp, Artificial Sequence
  Synthetic: FXN 3 forward 9:69037809-69037837; SpCas9
ttatcggctaattttgtatttttag

SEQ ID NO: 27302 - DNA, 24 bp, Artificial Sequence
  Synthetic: FXN 3 forward 9:69037810-69037837; SpCas9
tatcggctaattttgtatttttag

SEQ ID NO: 27303 - DNA, 23 bp, Artificial Sequence
  Synthetic: FXN 3 forward 9:69037811-69037837; SpCas9
atcggctaattttgtatttttag

SEQ ID NO: 27304 - DNA, 22 bp, Artificial Sequence
  Synthetic: FXN 3 forward 9:69037812-69037837; SpCas9
tcggctaattttgtatttttag

SEQ ID NO: 27305 - DNA, 21 bp, Artificial Sequence
  Synthetic: FXN 3 forward 9:69037813-69037837; SpCas9
cggctaattttgtatttttag

SEQ ID NO: 27306 - DNA, 20 bp, Artificial Sequence
  Synthetic: FXN 3 forward 9:69037814-69037837; SpCas9
ggctaattttgtatttttag

SEQ ID NO: 27307 - DNA, 19 bp, Artificial Sequence
  Synthetic: FXN 3 forward 9:69037815-69037837; SpCas9
gctaattttgtatttttag

SEQ ID NO: 27308 - DNA, 18 bp, Artificial Sequence
  Synthetic: FXN 3 forward 9:69037816-69037837; SpCas9
ctaattttgtatttttag

SEQ ID NO: 27309 - DNA, 25 bp, Artificial Sequence
  Synthetic: FXN 3 forward 9:69037811-69037839; SpCas9
atcggctaattttgtatttttagta

SEQ ID NO: 27310 - DNA, 24 bp, Artificial Sequence
  Synthetic: FXN 3 forward 9:69037812-69037839; SpCas9
tcggctaattttgtatttttagta

SEQ ID NO: 27311 - DNA, 23 bp, Artificial Sequence
  Synthetic: FXN 3 forward 9:69037813-69037839; SpCas9
cggctaattttgtatttttagta

SEQ ID NO: 27312 - DNA, 22 bp, Artificial Sequence
  Synthetic: FXN 3 forward 9:69037814-69037839; SpCas9
ggctaattttgtatttttagta

SEQ ID NO: 27313 - DNA, 21 bp, Artificial Sequence
  Synthetic: FXN 3 forward 9:69037815-69037839; SpCas9
gctaattttgtatttttagta

SEQ ID NO: 27314 - DNA, 20 bp, Artificial Sequence
  Synthetic: FXN 3 forward 9:69037816-69037839; SpCas9
ctaattttgtatttttagta

SEQ ID NO: 27315 - DNA, 19 bp, Artificial Sequence
  Synthetic: FXN 3 forward 9:69037817-69037839; SpCas9
taattttgtatttttagta

SEQ ID NO: 27316 - DNA, 18 bp, Artificial Sequence
  Synthetic: FXN 3 forward 9:69037818-69037839; SpCas9
aattttgtatttttagta

SEQ ID NO: 27317 - DNA, 25 bp, Artificial Sequence
  Synthetic: FXN 3 forward 9:69037815-69037843; SpCas9
gctaattttgtatttttagtagaga

SEQ ID NO: 27318 - DNA, 24 bp, Artificial Sequence
  Synthetic: FXN 3 forward 9:69037816-69037843; SpCas9
ctaattttgtatttttagtagaga

SEQ ID NO: 27319 - DNA, 23 bp, Artificial Sequence
  Synthetic: FXN 3 forward 9:69037817-69037843; SpCas9
taattttgtatttttagtagaga

SEQ ID NO: 27320 - DNA, 22 bp, Artificial Sequence
  Synthetic: FXN 3 forward 9:69037818-69037843; SpCas9
aattttgtatttttagtagaga

SEQ ID NO: 27321 - DNA, 21 bp, Artificial Sequence
  Synthetic: FXN 3 forward 9:69037819-69037843; SpCas9
attttgtatttttagtagaga

SEQ ID NO: 27322 - DNA, 20 bp, Artificial Sequence
  Synthetic: FXN 3 forward 9:69037820-69037843; SpCas9
ttttgtatttttagtagaga

SEQ ID NO: 27323 - DNA, 19 bp, Artificial Sequence
  Synthetic: FXN 3 forward 9:69037821-69037843; SpCas9
tttgtatttttagtagaga

SEQ ID NO: 27324 - DNA, 18 bp, Artificial Sequence
  Synthetic: FXN 3 forward 9:69037822-69037843; SpCas9
ttgtatttttagtagaga

SEQ ID NO: 27325 - DNA, 25 bp, Artificial Sequence
  Synthetic: FXN 3 reverse 9:69037816-69037844; SpCas9
tctgtctctactaaaaatacaaaat

SEQ ID NO: 27326 - DNA, 24 bp, Artificial Sequence
  Synthetic: FXN 3 reverse 9:69037817-69037844; SpCas9
ctgtctctactaaaaatacaaaat

SEQ ID NO: 27327 - DNA, 23 bp, Artificial Sequence
  Synthetic: FXN 3 reverse 9:69037818-69037844; SpCas9
tgtctctactaaaaatacaaaat

SEQ ID NO: 27328 - DNA, 22 bp, Artificial Sequence
  Synthetic: FXN 3 reverse 9:69037819-69037844; SpCas9
gtctctactaaaaatacaaaat

SEQ ID NO: 27329 - DNA, 21 bp, Artificial Sequence
  Synthetic: FXN 3 reverse 9:69037820-69037844; SpCas9
tctctactaaaaatacaaaat

SEQ ID NO: 27330 - DNA, 20 bp, Artificial Sequence
  Synthetic: FXN 3 reverse 9:69037821-69037844; SpCas9
ctctactaaaaatacaaaat

SEQ ID NO: 27331 - DNA, 19 bp, Artificial Sequence
  Synthetic: FXN 3 reverse 9:69037822-69037844; SpCas9
tctactaaaaatacaaaat

SEQ ID NO: 27332 - DNA, 18 bp, Artificial Sequence
  Synthetic: FXN 3 reverse 9:69037823-69037844; SpCas9
ctactaaaaatacaaaat

SEQ ID NO: 27333 - DNA, 25 bp, Artificial Sequence
  Synthetic: FXN 3 forward 9:69037830-69037858; SpCas9
ttagtagagacagatttctccatgt

SEQ ID NO: 27334 - DNA, 24 bp, Artificial Sequence
  Synthetic: FXN 3 forward 9:69037831-69037858; SpCas9
tagtagagacagatttctccatgt

SEQ ID NO: 27335 - DNA, 23 bp, Artificial Sequence
  Synthetic: FXN 3 forward 9:69037832-69037858; SpCas9
agtagagacagatttctccatgt

SEQ ID NO: 27336 - DNA, 22 bp, Artificial Sequence
  Synthetic: FXN 3 forward 9:69037833-69037858; SpCas9
gtagagacagatttctccatgt

SEQ ID NO: 27337 - DNA, 21 bp, Artificial Sequence
  Synthetic: FXN 3 forward 9:69037834-69037858; SpCas9
tagagacagatttctccatgt

SEQ ID NO: 27338 - DNA, 20 bp, Artificial Sequence
  Synthetic: FXN 3 forward 9:69037835-69037858; SpCas9
agagacagatttctccatgt

SEQ ID NO: 27339 - DNA, 19 bp, Artificial Sequence
  Synthetic: FXN 3 forward 9:69037836-69037858; SpCas9
gagacagatttctccatgt

SEQ ID NO: 27340 - DNA, 18 bp, Artificial Sequence
  Synthetic: FXN 3 forward 9:69037837-69037858; SpCas9
agacagatttctccatgt

SEQ ID NO: 27341 - DNA, 25 bp, Artificial Sequence
  Synthetic: FXN 3 forward 9:69037834-69037862; SpCas9
tagagacagatttctccatgttggt

SEQ ID NO: 27342 - DNA, 24 bp, Artificial Sequence
  Synthetic: FXN 3 forward 9:69037835-69037862; SpCas9
agagacagatttctccatgttggt

SEQ ID NO: 27343 - DNA, 23 bp, Artificial Sequence
  Synthetic: FXN 3 forward 9:69037836-69037862; SpCas9
gagacagatttctccatgttggt

SEQ ID NO: 27344 - DNA, 22 bp, Artificial Sequence
  Synthetic: FXN 3 forward 9:69037837-69037862; SpCas9
agacagatttctccatgttggt

SEQ ID NO: 27345 - DNA, 21 bp, Artificial Sequence
  Synthetic: FXN 3 forward 9:69037838-69037862; SpCas9
gacagatttctccatgttggt

SEQ ID NO: 27346 - DNA, 20 bp, Artificial Sequence
  Synthetic: FXN 3 forward 9:69037839-69037862; SpCas9
acagatttctccatgttggt

SEQ ID NO: 27347 - DNA, 19 bp, Artificial Sequence
  Synthetic: FXN 3 forward 9:69037840-69037862; SpCas9
cagatttctccatgttggt

SEQ ID NO: 27348 - DNA, 18 bp, Artificial Sequence
  Synthetic: FXN 3 forward 9:69037841-69037862; SpCas9
agatttctccatgttggt

SEQ ID NO: 27349 - DNA, 25 bp, Artificial Sequence
  Synthetic: FXN 3 forward 9:69037835-69037863; SpCas9
agagacagatttctccatgttggtc

SEQ ID NO: 27350 - DNA, 24 bp, Artificial Sequence
  Synthetic: FXN 3 forward 9:69037836-69037863; SpCas9
gagacagatttctccatgttggtc

SEQ ID NO: 27351 - DNA, 23 bp, Artificial Sequence
  Synthetic: FXN 3 forward 9:69037837-69037863; SpCas9
agacagatttctccatgttggtc

SEQ ID NO: 27352 - DNA, 22 bp, Artificial Sequence
  Synthetic: FXN 3 forward 9:69037838-69037863; SpCas9
gacagatttctccatgttggtc

SEQ ID NO: 27353 - DNA, 21 bp, Artificial Sequence
  Synthetic: FXN 3 forward 9:69037839-69037863; SpCas9
acagatttctccatgttggtc

SEQ ID NO: 27354 - DNA, 20 bp, Artificial Sequence
  Synthetic: FXN 3 forward 9:69037840-69037863; SpCas9
cagatttctccatgttggtc

SEQ ID NO: 27355 - DNA, 19 bp, Artificial Sequence
  Synthetic: FXN 3 forward 9:69037841-69037863; SpCas9
agatttctccatgttggtc

SEQ ID NO: 27356 - DNA, 18 bp, Artificial Sequence
  Synthetic: FXN 3 forward 9:69037842-69037863; SpCas9
gatttctccatgttggtc

SEQ ID NO: 27357 - DNA, 25 bp, Artificial Sequence
  Synthetic: FXN 3 forward 9:69037839-69037867; SpCas9
acagatttctccatgttggtcaggc

SEQ ID NO: 27358 - DNA, 24 bp, Artificial Sequence
  Synthetic: FXN 3 forward 9:69037840-69037867; SpCas9
cagatttctccatgttggtcaggc

SEQ ID NO: 27359 - DNA, 23 bp, Artificial Sequence
  Synthetic: FXN 3 forward 9:69037841-69037867; SpCas9
agatttctccatgttggtcaggc

SEQ ID NO: 27360 - DNA, 22 bp, Artificial Sequence
  Synthetic: FXN 3 forward 9:69037842-69037867; SpCas9
gatttctccatgttggtcaggc

SEQ ID NO: 27361 - DNA, 21 bp, Artificial Sequence
  Synthetic: FXN 3 forward 9:69037843-69037867; SpCas9
atttctccatgttggtcaggc

SEQ ID NO: 27362 - DNA, 20 bp, Artificial Sequence
  Synthetic: FXN 3 forward 9:69037844-69037867; SpCas9
tttctccatgttggtcaggc

SEQ ID NO: 27363 - DNA, 19 bp, Artificial Sequence
  Synthetic: FXN 3 forward 9:69037845-69037867; SpCas9
ttctccatgttggtcaggc

SEQ ID NO: 27364 - DNA, 18 bp, Artificial Sequence
  Synthetic: FXN 3 forward 9:69037846-69037867; SpCas9
tctccatgttggtcaggc

SEQ ID NO: 27365 - DNA, 25 bp, Artificial Sequence
  Synthetic: FXN 3 reverse 9:69037847-69037875; SpCas9
gttcgagaccagcctgaccaacatg

SEQ ID NO: 27366 - DNA, 24 bp, Artificial Sequence
  Synthetic: FXN 3 reverse 9:69037848-69037875; SpCas9
ttcgagaccagcctgaccaacatg

SEQ ID NO: 27367 - DNA, 23 bp, Artificial Sequence
  Synthetic: FXN 3 reverse 9:69037849-69037875; SpCas9
tcgagaccagcctgaccaacatg

SEQ ID NO: 27368 - DNA, 22 bp, Artificial Sequence
  Synthetic: FXN 3 reverse 9:69037850-69037875; SpCas9
cgagaccagcctgaccaacatg

SEQ ID NO: 27369 - DNA, 21 bp, Artificial Sequence
  Synthetic: FXN 3 reverse 9:69037851-69037875; SpCas9
gagaccagcctgaccaacatg

SEQ ID NO: 27370 - DNA, 20 bp, Artificial Sequence
  Synthetic: FXN 3 reverse 9:69037852-69037875; SpCas9
agaccagcctgaccaacatg

SEQ ID NO: 27371 - DNA, 19 bp, Artificial Sequence
  Synthetic: FXN 3 reverse 9:69037853-69037875; SpCas9
gaccagcctgaccaacatg

SEQ ID NO: 27372 - DNA, 18 bp, Artificial Sequence
  Synthetic: FXN 3 reverse 9:69037854-69037875; SpCas9
accagcctgaccaacatg

SEQ ID NO: 27373 - DNA, 25 bp, Artificial Sequence
  Synthetic: FXN 3 reverse 9:69037849-69037877; SpCas9
gagttcgagaccagcctgaccaaca

SEQ ID NO: 27374 - DNA, 24 bp, Artificial Sequence
  Synthetic: FXN 3 reverse 9:69037850-69037877; SpCas9
agttcgagaccagcctgaccaaca

SEQ ID NO: 27375 - DNA, 23 bp, Artificial Sequence
  Synthetic: FXN 3 reverse 9:69037851-69037877; SpCas9
gttcgagaccagcctgaccaaca

SEQ ID NO: 27376 - DNA, 22 bp, Artificial Sequence
  Synthetic: FXN 3 reverse 9:69037852-69037877; SpCas9
ttcgagaccagcctgaccaaca

SEQ ID NO: 27377 - DNA, 21 bp, Artificial Sequence
  Synthetic: FXN 3 reverse 9:69037853-69037877; SpCas9
tcgagaccagcctgaccaaca

SEQ ID NO: 27378 - DNA, 20 bp, Artificial Sequence
  Synthetic: FXN 3 reverse 9:69037854-69037877; SpCas9
cgagaccagcctgaccaaca

SEQ ID NO: 27379 - DNA, 19 bp, Artificial Sequence
  Synthetic: FXN 3 reverse 9:69037855-69037877; SpCas9
gagaccagcctgaccaaca

SEQ ID NO: 27380 - DNA, 18 bp, Artificial Sequence
  Synthetic: FXN 3 reverse 9:69037856-69037877; SpCas9
agaccagcctgaccaaca

SEQ ID NO: 27381 - DNA, 25 bp, Artificial Sequence
  Synthetic: FXN 3 forward 9:69037859-69037887; SpCas9
caggctggtctcgaactcccaacct

SEQ ID NO: 27382 - DNA, 24 bp, Artificial Sequence
  Synthetic: FXN 3 forward 9:69037860-69037887; SpCas9
aggctggtctcgaactcccaacct

SEQ ID NO: 27383 - DNA, 23 bp, Artificial Sequence
  Synthetic: FXN 3 forward 9:69037861-69037887; SpCas9
ggctggtctcgaactcccaacct

SEQ ID NO: 27384 - DNA, 22 bp, Artificial Sequence
  Synthetic: FXN 3 forward 9:69037862-69037887; SpCas9
gctggtctcgaactcccaacct

SEQ ID NO: 27385 - DNA, 21 bp, Artificial Sequence
  Synthetic: FXN 3 forward 9:69037863-69037887; SpCas9
ctggtctcgaactcccaacct

SEQ ID NO: 27386 - DNA, 20 bp, Artificial Sequence
  Synthetic: FXN 3 forward 9:69037864-69037887; SpCas9
tggtctcgaactcccaacct

SEQ ID NO: 27387 - DNA, 19 bp, Artificial Sequence
  Synthetic: FXN 3 forward 9:69037865-69037887; SpCas9
ggtctcgaactcccaacct

SEQ ID NO: 27388 - DNA, 18 bp, Artificial Sequence
  Synthetic: FXN 3 forward 9:69037866-69037887; SpCas9
gtctcgaactcccaacct

SEQ ID NO: 27389 - DNA, 25 bp, Artificial Sequence
  Synthetic: FXN 3 forward 9:69037860-69037888; SpCas9
aggctggtctcgaactcccaacctc

SEQ ID NO: 27390 - DNA, 24 bp, Artificial Sequence
  Synthetic: FXN 3 forward 9:69037861-69037888; SpCas9
ggctggtctcgaactcccaacctc

SEQ ID NO: 27391 - DNA, 23 bp, Artificial Sequence
  Synthetic: FXN 3 forward 9:69037862-69037888; SpCas9
gctggtctcgaactcccaacctc

SEQ ID NO: 27392 - DNA, 22 bp, Artificial Sequence
  Synthetic: FXN 3 forward 9:69037863-69037888; SpCas9
ctggtctcgaactcccaacctc

SEQ ID NO: 27393 - DNA, 21 bp, Artificial Sequence
  Synthetic: FXN 3 forward 9:69037864-69037888; SpCas9
tggtctcgaactcccaacctc

SEQ ID NO: 27394 - DNA, 20 bp, Artificial Sequence
  Synthetic: FXN 3 forward 9:69037865-69037888; SpCas9
ggtctcgaactcccaacctc

SEQ ID NO: 27395 - DNA, 19 bp, Artificial Sequence
  Synthetic: FXN 3 forward 9:69037866-69037888; SpCas9
gtctcgaactcccaacctc

SEQ ID NO: 27396 - DNA, 18 bp, Artificial Sequence
  Synthetic: FXN 3 forward 9:69037867-69037888; SpCas9
tctcgaactcccaacctc

SEQ ID NO: 27397 - DNA, 25 bp, Artificial Sequence
  Synthetic: FXN 3 reverse 9:69037863-69037891; SpCas9
tcacctgaggttgggagttcgagac

SEQ ID NO: 27398 - DNA, 24 bp, Artificial Sequence
  Synthetic: FXN 3 reverse 9:69037864-69037891; SpCas9
cacctgaggttgggagttcgagac

SEQ ID NO: 27399 - DNA, 23 bp, Artificial Sequence
  Synthetic: FXN 3 reverse 9:69037865-69037891; SpCas9
acctgaggttgggagttcgagac

SEQ ID NO: 27400 - DNA, 22 bp, Artificial Sequence
  Synthetic: FXN 3 reverse 9:69037866-69037891; SpCas9
cctgaggttgggagttcgagac

SEQ ID NO: 27401 - DNA, 21 bp, Artificial Sequence
  Synthetic: FXN 3 reverse 9:69037867-69037891; SpCas9
ctgaggttgggagttcgagac

SEQ ID NO: 27402 - DNA, 20 bp, Artificial Sequence
  Synthetic: FXN 3 reverse 9:69037868-69037891; SpCas9
tgaggttgggagttcgagac

SEQ ID NO: 27403 - DNA, 19 bp, Artificial Sequence
  Synthetic: FXN 3 reverse 9:69037869-69037891; SpCas9
gaggttgggagttcgagac

SEQ ID NO: 27404 - DNA, 18 bp, Artificial Sequence
  Synthetic: FXN 3 reverse 9:69037870-69037891; SpCas9
aggttgggagttcgagac

SEQ ID NO: 27405 - DNA, 25 bp, Artificial Sequence
  Synthetic: FXN 3 reverse 9:69037868-69037896; SpCas9
gcggatcacctgaggttgggagttc

SEQ ID NO: 27406 - DNA, 24 bp, Artificial Sequence
  Synthetic: FXN 3 reverse 9:69037869-69037896; SpCas9
cggatcacctgaggttgggagttc

SEQ ID NO: 27407 - DNA, 23 bp, Artificial Sequence
  Synthetic: FXN 3 reverse 9:69037870-69037896; SpCas9
ggatcacctgaggttgggagttc

SEQ ID NO: 27408 - DNA, 22 bp, Artificial Sequence
  Synthetic: FXN 3 reverse 9:69037871-69037896; SpCas9
gatcacctgaggttgggagttc

SEQ ID NO: 27409 - DNA, 21 bp, Artificial Sequence
  Synthetic: FXN 3 reverse 9:69037872-69037896; SpCas9
atcacctgaggttgggagttc

SEQ ID NO: 27410 - DNA, 20 bp, Artificial Sequence
  Synthetic: FXN 3 reverse 9:69037873-69037896; SpCas9
tcacctgaggttgggagttc

SEQ ID NO: 27411 - DNA, 19 bp, Artificial Sequence
  Synthetic: FXN 3 reverse 9:69037874-69037896; SpCas9
cacctgaggttgggagttc

SEQ ID NO: 27412 - DNA, 18 bp, Artificial Sequence
  Synthetic: FXN 3 reverse 9:69037875-69037896; SpCas9
acctgaggttgggagttc

SEQ ID NO: 27413 - DNA, 25 bp, Artificial Sequence
  Synthetic: FXN 3 reverse 9:69037874-69037902; SpCas9
aggtgggcggatcacctgaggttgg

SEQ ID NO: 27414 - DNA, 24 bp, Artificial Sequence
  Synthetic: FXN 3 reverse 9:69037875-69037902; SpCas9
ggtgggcggatcacctgaggttgg

SEQ ID NO: 27415 - DNA, 23 bp, Artificial Sequence
  Synthetic: FXN 3 reverse 9:69037876-69037902; SpCas9
gtgggcggatcacctgaggttgg

SEQ ID NO: 27416 - DNA, 22 bp, Artificial Sequence
  Synthetic: FXN 3 reverse 9:69037877-69037902; SpCas9
tgggcggatcacctgaggttgg

SEQ ID NO: 27417 - DNA, 21 bp, Artificial Sequence
  Synthetic: FXN 3 reverse 9:69037878-69037902; SpCas9
gggcggatcacctgaggttgg

SEQ ID NO: 27418 - DNA, 20 bp, Artificial Sequence
  Synthetic: FXN 3 reverse 9:69037879-69037902; SpCas9
ggcggatcacctgaggttgg

SEQ ID NO: 27419 - DNA, 19 bp, Artificial Sequence
  Synthetic: FXN 3 reverse 9:69037880-69037902; SpCas9
gcggatcacctgaggttgg

SEQ ID NO: 27420 - DNA, 18 bp, Artificial Sequence
  Synthetic: FXN 3 reverse 9:69037881-69037902; SpCas9
cggatcacctgaggttgg

SEQ ID NO: 27421 - DNA, 25 bp, Artificial Sequence
  Synthetic: FXN 3 reverse 9:69037876-69037904; SpCas9
cgaggtgggcggatcacctgaggtt

SEQ ID NO: 27422 - DNA, 24 bp, Artificial Sequence
  Synthetic: FXN 3 reverse 9:69037877-69037904; SpCas9
gaggtgggcggatcacctgaggtt

SEQ ID NO: 27423 - DNA, 23 bp, Artificial Sequence
  Synthetic: FXN 3 reverse 9:69037878-69037904; SpCas9
aggtgggcggatcacctgaggtt

SEQ ID NO: 27424 - DNA, 22 bp, Artificial Sequence
  Synthetic: FXN 3 reverse 9:69037879-69037904; SpCas9
ggtgggcggatcacctgaggtt

SEQ ID NO: 27425 - DNA, 21 bp, Artificial Sequence
  Synthetic: FXN 3 reverse 9:69037880-69037904; SpCas9
gtgggcggatcacctgaggtt

SEQ ID NO: 27426 - DNA, 20 bp, Artificial Sequence
  Synthetic: FXN 3 reverse 9:69037881-69037904; SpCas9
tgggcggatcacctgaggtt

SEQ ID NO: 27427 - DNA, 19 bp, Artificial Sequence
  Synthetic: FXN 3 reverse 9:69037882-69037904; SpCas9
gggcggatcacctgaggtt

SEQ ID NO: 27428 - DNA, 18 bp, Artificial Sequence
  Synthetic: FXN 3 reverse 9:69037883-69037904; SpCas9
ggcggatcacctgaggtt

SEQ ID NO: 27429 - DNA, 25 bp, Artificial Sequence
  Synthetic: FXN 3 reverse 9:69037877-69037905; SpCas9
gcgaggtgggcggatcacctgaggt

SEQ ID NO: 27430 - DNA, 24 bp, Artificial Sequence
  Synthetic: FXN 3 reverse 9:69037878-69037905; SpCas9
cgaggtgggcggatcacctgaggt

SEQ ID NO: 27431 - DNA, 23 bp, Artificial Sequence
  Synthetic: FXN 3 reverse 9:69037879-69037905; SpCas9
gaggtgggcggatcacctgaggt

SEQ ID NO: 27432 - DNA, 22 bp, Artificial Sequence
  Synthetic: FXN 3 reverse 9:69037880-69037905; SpCas9
aggtgggcggatcacctgaggt

SEQ ID NO: 27433 - DNA, 21 bp, Artificial Sequence
  Synthetic: FXN 3 reverse 9:69037881-69037905; SpCas9
ggtgggcggatcacctgaggt

SEQ ID NO: 27434 - DNA, 20 bp, Artificial Sequence
  Synthetic: FXN 3 reverse 9:69037882-69037905; SpCas9
gtgggcggatcacctgaggt

SEQ ID NO: 27435 - DNA, 19 bp, Artificial Sequence
  Synthetic: FXN 3 reverse 9:69037883-69037905; SpCas9
tgggcggatcacctgaggt

SEQ ID NO: 27436 - DNA, 18 bp, Artificial Sequence
  Synthetic: FXN 3 reverse 9:69037884-69037905; SpCas9
gggcggatcacctgaggt

SEQ ID NO: 27437 - DNA, 25 bp, Artificial Sequence
  Synthetic: FXN 3 reverse 9:69037881-69037909; SpCas9
gagggcgaggtgggcggatcacctg

SEQ ID NO: 27438 - DNA, 24 bp, Artificial Sequence
  Synthetic: FXN 3 reverse 9:69037882-69037909; SpCas9
agggcgaggtgggcggatcacctg

SEQ ID NO: 27439 - DNA, 23 bp, Artificial Sequence
  Synthetic: FXN 3 reverse 9:69037883-69037909; SpCas9
gggcgaggtgggcggatcacctg

SEQ ID NO: 27440 - DNA, 22 bp, Artificial Sequence
  Synthetic: FXN 3 reverse 9:69037884-69037909; SpCas9
ggcgaggtgggcggatcacctg

SEQ ID NO: 27441 - DNA, 21 bp, Artificial Sequence
  Synthetic: FXN 3 reverse 9:69037885-69037909; SpCas9
gcgaggtgggcggatcacctg

SEQ ID NO: 27442 - DNA, 20 bp, Artificial Sequence
  Synthetic: FXN 3 reverse 9:69037886-69037909; SpCas9
cgaggtgggcggatcacctg

SEQ ID NO: 27443 - DNA, 19 bp, Artificial Sequence
  Synthetic: FXN 3 reverse 9:69037887-69037909; SpCas9
gaggtgggcggatcacctg

SEQ ID NO: 27444 - DNA, 18 bp, Artificial Sequence
  Synthetic: FXN 3 reverse 9:69037888-69037909; SpCas9
aggtgggcggatcacctg

SEQ ID NO: 27445 - DNA, 25 bp, Artificial Sequence
  Synthetic: FXN 3 reverse 9:69037882-69037910; SpCas9
ggagggcgaggtgggcggatcacct

SEQ ID NO: 27446 - DNA, 24 bp, Artificial Sequence
  Synthetic: FXN 3 reverse 9:69037883-69037910; SpCas9
gagggcgaggtgggcggatcacct

SEQ ID NO: 27447 - DNA, 23 bp, Artificial Sequence
  Synthetic: FXN 3 reverse 9:69037884-69037910; SpCas9
agggcgaggtgggcggatcacct

SEQ ID NO: 27448 - DNA, 22 bp, Artificial Sequence
  Synthetic: FXN 3 reverse 9:69037885-69037910; SpCas9
gggcgaggtgggcggatcacct

SEQ ID NO: 27449 - DNA, 21 bp, Artificial Sequence
  Synthetic: FXN 3 reverse 9:69037886-69037910; SpCas9
ggcgaggtgggcggatcacct

SEQ ID NO: 27450 - DNA, 20 bp, Artificial Sequence
  Synthetic: FXN 3 reverse 9:69037887-69037910; SpCas9
gcgaggtgggcggatcacct

SEQ ID NO: 27451 - DNA, 19 bp, Artificial Sequence
  Synthetic: FXN 3 reverse 9:69037888-69037910; SpCas9
cgaggtgggcggatcacct

SEQ ID NO: 27452 - DNA, 18 bp, Artificial Sequence
  Synthetic: FXN 3 reverse 9:69037889-69037910; SpCas9
gaggtgggcggatcacct

SEQ ID NO: 27453 - DNA, 25 bp, Artificial Sequence
  Synthetic: FXN 3 forward 9:69037887-69037915; SpCas9
gtgatccgcccacctcgccctccca

SEQ ID NO: 27454 - DNA, 24 bp, Artificial Sequence
  Synthetic: FXN 3 forward 9:69037888-69037915; SpCas9
tgatccgcccacctcgccctccca

SEQ ID NO: 27455 - DNA, 23 bp, Artificial Sequence
  Synthetic: FXN 3 forward 9:69037889-69037915; SpCas9
gatccgcccacctcgccctccca

SEQ ID NO: 27456 - DNA, 22 bp, Artificial Sequence
  Synthetic: FXN 3 forward 9:69037890-69037915; SpCas9
atccgcccacctcgccctccca

SEQ ID NO: 27457 - DNA, 21 bp, Artificial Sequence
  Synthetic: FXN 3 forward 9:69037891-69037915; SpCas9
tccgcccacctcgccctccca

SEQ ID NO: 27458 - DNA, 20 bp, Artificial Sequence
  Synthetic: FXN 3 forward 9:69037892-69037915; SpCas9
ccgcccacctcgccctccca

SEQ ID NO: 27459 - DNA, 19 bp, Artificial Sequence
  Synthetic: FXN 3 forward 9:69037893-69037915; SpCas9
cgcccacctcgccctccca

SEQ ID NO: 27460 - DNA, 18 bp, Artificial Sequence
  Synthetic: FXN 3 forward 9:69037894-69037915; SpCas9
gcccacctcgccctccca

SEQ ID NO: 27461 - DNA, 25 bp, Artificial Sequence
  Synthetic: FXN 3 reverse 9:69037892-69037920; SpCas9
cagcactttgggagggcgaggtggg

SEQ ID NO: 27462 - DNA, 24 bp, Artificial Sequence
  Synthetic: FXN 3 reverse 9:69037893-69037920; SpCas9
agcactttgggagggcgaggtggg

SEQ ID NO: 27463 - DNA, 23 bp, Artificial Sequence
  Synthetic: FXN 3 reverse 9:69037894-69037920; SpCas9
gcactttgggagggcgaggtggg

SEQ ID NO: 27464 - DNA, 22 bp, Artificial Sequence
  Synthetic: FXN 3 reverse 9:69037895-69037920; SpCas9
cactttgggagggcgaggtggg

SEQ ID NO: 27465 - DNA, 21 bp, Artificial Sequence
  Synthetic: FXN 3 reverse 9:69037896-69037920; SpCas9
actttgggagggcgaggtggg

SEQ ID NO: 27466 - DNA, 20 bp, Artificial Sequence
  Synthetic: FXN 3 reverse 9:69037897-69037920; SpCas9
ctttgggagggcgaggtggg

SEQ ID NO: 27467 - DNA, 19 bp, Artificial Sequence
  Synthetic: FXN 3 reverse 9:69037898-69037920; SpCas9
tttgggagggcgaggtggg

SEQ ID NO: 27468 - DNA, 18 bp, Artificial Sequence
  Synthetic: FXN 3 reverse 9:69037899-69037920; SpCas9
ttgggagggcgaggtggg

SEQ ID NO: 27469 - DNA, 25 bp, Artificial Sequence
  Synthetic: FXN 3 forward 9:69037893-69037921; SpCas9
cgcccacctcgccctcccaaagtgc

SEQ ID NO: 27470 - DNA, 24 bp, Artificial Sequence
  Synthetic: FXN 3 forward 9:69037894-69037921; SpCas9
gcccacctcgccctcccaaagtgc

SEQ ID NO: 27471 - DNA, 23 bp, Artificial Sequence
  Synthetic: FXN 3 forward 9:69037895-69037921; SpCas9
cccacctcgccctcccaaagtgc

SEQ ID NO: 27472 - DNA, 22 bp, Artificial Sequence
  Synthetic: FXN 3 forward 9:69037896-69037921; SpCas9
ccacctcgccctcccaaagtgc

SEQ ID NO: 27473 - DNA, 21 bp, Artificial Sequence
  Synthetic: FXN 3 forward 9:69037897-69037921; SpCas9
cacctcgccctcccaaagtgc

SEQ ID NO: 27474 - DNA, 20 bp, Artificial Sequence
  Synthetic: FXN 3 forward 9:69037898-69037921; SpCas9
acctcgccctcccaaagtgc

SEQ ID NO: 27475 - DNA, 19 bp, Artificial Sequence
  Synthetic: FXN 3 forward 9:69037899-69037921; SpCas9
cctcgccctcccaaagtgc

SEQ ID NO: 27476 - DNA, 18 bp, Artificial Sequence
  Synthetic: FXN 3 forward 9:69037900-69037921; SpCas9
ctcgccctcccaaagtgc

SEQ ID NO: 27477 - DNA, 25 bp, Artificial Sequence
  Synthetic: FXN 3 reverse 9:69037895-69037923; SpCas9
ttccagcactttgggagggcgaggt

SEQ ID NO: 27478 - DNA, 24 bp, Artificial Sequence
  Synthetic: FXN 3 reverse 9:69037896-69037923; SpCas9
tccagcactttgggagggcgaggt

SEQ ID NO: 27479 - DNA, 23 bp, Artificial Sequence
  Synthetic: FXN 3 reverse 9:69037897-69037923; SpCas9
ccagcactttgggagggcgaggt

SEQ ID NO: 27480 - DNA, 22 bp, Artificial Sequence
  Synthetic: FXN 3 reverse 9:69037898-69037923; SpCas9
cagcactttgggagggcgaggt

SEQ ID NO: 27481 - DNA, 21 bp, Artificial Sequence
  Synthetic: FXN 3 reverse 9:69037899-69037923; SpCas9
agcactttgggagggcgaggt

SEQ ID NO: 27482 - DNA, 20 bp, Artificial Sequence
  Synthetic: FXN 3 reverse 9:69037900-69037923; SpCas9
gcactttgggagggcgaggt

SEQ ID NO: 27483 - DNA, 19 bp, Artificial Sequence
  Synthetic: FXN 3 reverse 9:69037901-69037923; SpCas9
cactttgggagggcgaggt

SEQ ID NO: 27484 - DNA, 18 bp, Artificial Sequence
  Synthetic: FXN 3 reverse 9:69037902-69037923; SpCas9
actttgggagggcgaggt

SEQ ID NO: 27485 - DNA, 25 bp, Artificial Sequence
  Synthetic: FXN 3 reverse 9:69037896-69037924; SpCas9
attccagcactttgggagggcgagg

SEQ ID NO: 27486 - DNA, 24 bp, Artificial Sequence
  Synthetic: FXN 3 reverse 9:69037897-69037924; SpCas9
ttccagcactttgggagggcgagg

SEQ ID NO: 27487 - DNA, 23 bp, Artificial Sequence
  Synthetic: FXN 3 reverse 9:69037898-69037924; SpCas9
tccagcactttgggagggcgagg

SEQ ID NO: 27488 - DNA, 22 bp, Artificial Sequence
  Synthetic: FXN 3 reverse 9:69037899-69037924; SpCas9
ccagcactttgggagggcgagg

SEQ ID NO: 27489 - DNA, 21 bp, Artificial Sequence
  Synthetic: FXN 3 reverse 9:69037900-69037924; SpCas9
cagcactttgggagggcgagg

SEQ ID NO: 27490 - DNA, 20 bp, Artificial Sequence
  Synthetic: FXN 3 reverse 9:69037901-69037924; SpCas9
agcactttgggagggcgagg

SEQ ID NO: 27491 - DNA, 19 bp, Artificial Sequence
  Synthetic: FXN 3 reverse 9:69037902-69037924; SpCas9
gcactttgggagggcgagg

SEQ ID NO: 27492 - DNA, 18 bp, Artificial Sequence
  Synthetic: FXN 3 reverse 9:69037903-69037924; SpCas9
cactttgggagggcgagg

SEQ ID NO: 27493 - DNA, 25 bp, Artificial Sequence
  Synthetic: FXN 3 reverse 9:69037899-69037927; SpCas9
gtaattccagcactttgggagggcg

SEQ ID NO: 27494 - DNA, 24 bp, Artificial Sequence
  Synthetic: FXN 3 reverse 9:69037900-69037927; SpCas9
taattccagcactttgggagggcg

SEQ ID NO: 27495 - DNA, 23 bp, Artificial Sequence
  Synthetic: FXN 3 reverse 9:69037901-69037927; SpCas9
aattccagcactttgggagggcg

SEQ ID NO: 27496 - DNA, 22 bp, Artificial Sequence
  Synthetic: FXN 3 reverse 9:69037902-69037927; SpCas9
attccagcactttgggagggcg

SEQ ID NO: 27497 - DNA, 21 bp, Artificial Sequence
  Synthetic: FXN 3 reverse 9:69037903-69037927; SpCas9
ttccagcactttgggagggcg

SEQ ID NO: 27498 - DNA, 20 bp, Artificial Sequence
  Synthetic: FXN 3 reverse 9:69037904-69037927; SpCas9
tccagcactttgggagggcg

SEQ ID NO: 27499 - DNA, 19 bp, Artificial Sequence
  Synthetic: FXN 3 reverse 9:69037905-69037927; SpCas9
ccagcactttgggagggcg

SEQ ID NO: 27500 - DNA, 18 bp, Artificial Sequence
  Synthetic: FXN 3 reverse 9:69037906-69037927; SpCas9
cagcactttgggagggcg

SEQ ID NO: 27501 - DNA, 25 bp, Artificial Sequence
  Synthetic: FXN 3 reverse 9:69037900-69037928; SpCas9
tgtaattccagcactttgggagggc

SEQ ID NO: 27502 - DNA, 24 bp, Artificial Sequence
  Synthetic: FXN 3 reverse 9:69037901-69037928; SpCas9
gtaattccagcactttgggagggc

SEQ ID NO: 27503 - DNA, 23 bp, Artificial Sequence
  Synthetic: FXN 3 reverse 9:69037902-69037928; SpCas9
taattccagcactttgggagggc

SEQ ID NO: 27504 - DNA, 22 bp, Artificial Sequence
  Synthetic: FXN 3 reverse 9:69037903-69037928; SpCas9
aattccagcactttgggagggc

SEQ ID NO: 27505 - DNA, 21 bp, Artificial Sequence
  Synthetic: FXN 3 reverse 9:69037904-69037928; SpCas9
attccagcactttgggagggc

SEQ ID NO: 27506 - DNA, 20 bp, Artificial Sequence
  Synthetic: FXN 3 reverse 9:69037905-69037928; SpCas9
ttccagcactttgggagggc

SEQ ID NO: 27507 - DNA, 19 bp, Artificial Sequence
  Synthetic: FXN 3 reverse 9:69037906-69037928; SpCas9
tccagcactttgggagggc

SEQ ID NO: 27508 - DNA, 18 bp, Artificial Sequence
  Synthetic: FXN 3 reverse 9:69037907-69037928; SpCas9
ccagcactttgggagggc

SEQ ID NO: 27509 - DNA, 25 bp, Artificial Sequence
  Synthetic: FXN 3 forward 9:69037901-69037929; SpCas9
tcgccctcccaaagtgctggaatta

SEQ ID NO: 27510 - DNA, 24 bp, Artificial Sequence
  Synthetic: FXN 3 forward 9:69037902-69037929; SpCas9
cgccctcccaaagtgctggaatta

SEQ ID NO: 27511 - DNA, 23 bp, Artificial Sequence
  Synthetic: FXN 3 forward 9:69037903-69037929; SpCas9
gccctcccaaagtgctggaatta

SEQ ID NO: 27512 - DNA, 22 bp, Artificial Sequence
  Synthetic: FXN 3 forward 9:69037904-69037929; SpCas9
ccctcccaaagtgctggaatta

SEQ ID NO: 27513 - DNA, 21 bp, Artificial Sequence
  Synthetic: FXN 3 forward 9:69037905-69037929; SpCas9
cctcccaaagtgctggaatta

SEQ ID NO: 27514 - DNA, 20 bp, Artificial Sequence
  Synthetic: FXN 3 forward 9:69037906-69037929; SpCas9
ctcccaaagtgctggaatta

SEQ ID NO: 27515 - DNA, 19 bp, Artificial Sequence
  Synthetic: FXN 3 forward 9:69037907-69037929; SpCas9
tcccaaagtgctggaatta

SEQ ID NO: 27516 - DNA, 18 bp, Artificial Sequence
  Synthetic: FXN 3 forward 9:69037908-69037929; SpCas9
cccaaagtgctggaatta

SEQ ID NO: 27517 - DNA, 25 bp, Artificial Sequence
  Synthetic: FXN 3 forward 9:69037902-69037930; SpCas9
cgccctcccaaagtgctggaattac

SEQ ID NO: 27518 - DNA, 24 bp, Artificial Sequence
  Synthetic: FXN 3 forward 9:69037903-69037930; SpCas9
gccctcccaaagtgctggaattac

SEQ ID NO: 27519 - DNA, 23 bp, Artificial Sequence
  Synthetic: FXN 3 forward 9:69037904-69037930; SpCas9
ccctcccaaagtgctggaattac

SEQ ID NO: 27520 - DNA, 22 bp, Artificial Sequence
  Synthetic: FXN 3 forward 9:69037905-69037930; SpCas9
cctcccaaagtgctggaattac

SEQ ID NO: 27521 - DNA, 21 bp, Artificial Sequence
  Synthetic: FXN 3 forward 9:69037906-69037930; SpCas9
ctcccaaagtgctggaattac

SEQ ID NO: 27522 - DNA, 20 bp, Artificial Sequence
  Synthetic: FXN 3 forward 9:69037907-69037930; SpCas9
tcccaaagtgctggaattac

SEQ ID NO: 27523 - DNA, 19 bp, Artificial Sequence
  Synthetic: FXN 3 forward 9:69037908-69037930; SpCas9
cccaaagtgctggaattac

SEQ ID NO: 27524 - DNA, 18 bp, Artificial Sequence
  Synthetic: FXN 3 forward 9:69037909-69037930; SpCas9
ccaaagtgctggaattac

SEQ ID NO: 27525 - DNA, 25 bp, Artificial Sequence
  Synthetic: FXN 3 reverse 9:69037904-69037932; SpCas9
cgcctgtaattccagcactttggga

SEQ ID NO: 27526 - DNA, 24 bp, Artificial Sequence
  Synthetic: FXN 3 reverse 9:69037905-69037932; SpCas9
gcctgtaattccagcactttggga

SEQ ID NO: 27527 - DNA, 23 bp, Artificial Sequence
  Synthetic: FXN 3 reverse 9:69037906-69037932; SpCas9
cctgtaattccagcactttggga

SEQ ID NO: 27528 - DNA, 22 bp, Artificial Sequence
  Synthetic: FXN 3 reverse 9:69037907-69037932; SpCas9
ctgtaattccagcactttggga

SEQ ID NO: 27529 - DNA, 21 bp, Artificial Sequence
  Synthetic: FXN 3 reverse 9:69037908-69037932; SpCas9
tgtaattccagcactttggga

SEQ ID NO: 27530 - DNA, 20 bp, Artificial Sequence
  Synthetic: FXN 3 reverse 9:69037909-69037932; SpCas9
gtaattccagcactttggga

SEQ ID NO: 27531 - DNA, 19 bp, Artificial Sequence
  Synthetic: FXN 3 reverse 9:69037910-69037932; SpCas9
taattccagcactttggga

SEQ ID NO: 27532 - DNA, 18 bp, Artificial Sequence
  Synthetic: FXN 3 reverse 9:69037911-69037932; SpCas9
aattccagcactttggga

SEQ ID NO: 27533 - DNA, 25 bp, Artificial Sequence
  Synthetic: FXN 3 reverse 9:69037905-69037933; SpCas9
acgcctgtaattccagcactttggg

SEQ ID NO: 27534 - DNA, 24 bp, Artificial Sequence
  Synthetic: FXN 3 reverse 9:69037906-69037933; SpCas9
cgcctgtaattccagcactttggg

SEQ ID NO: 27535 - DNA, 23 bp, Artificial Sequence
  Synthetic: FXN 3 reverse 9:69037907-69037933; SpCas9
gcctgtaattccagcactttggg

SEQ ID NO: 27536 - DNA, 22 bp, Artificial Sequence
  Synthetic: FXN 3 reverse 9:69037908-69037933; SpCas9
cctgtaattccagcactttggg

SEQ ID NO: 27537 - DNA, 21 bp, Artificial Sequence
  Synthetic: FXN 3 reverse 9:69037909-69037933; SpCas9
ctgtaattccagcactttggg

SEQ ID NO: 27538 - DNA, 20 bp, Artificial Sequence
  Synthetic: FXN 3 reverse 9:69037910-69037933; SpCas9
tgtaattccagcactttggg

SEQ ID NO: 27539 - DNA, 19 bp, Artificial Sequence
  Synthetic: FXN 3 reverse 9:69037911-69037933; SpCas9
gtaattccagcactttggg

SEQ ID NO: 27540 - DNA, 18 bp, Artificial Sequence
  Synthetic: FXN 3 reverse 9:69037912-69037933; SpCas9
taattccagcactttggg

SEQ ID NO: 27541 - DNA, 25 bp, Artificial Sequence
  Synthetic: FXN 3 reverse 9:69037906-69037934; SpCas9
cacgcctgtaattccagcactttgg

SEQ ID NO: 27542 - DNA, 24 bp, Artificial Sequence
  Synthetic: FXN 3 reverse 9:69037907-69037934; SpCas9
acgcctgtaattccagcactttgg

SEQ ID NO: 27543 - DNA, 23 bp, Artificial Sequence
  Synthetic: FXN 3 reverse 9:69037908-69037934; SpCas9
cgcctgtaattccagcactttgg

SEQ ID NO: 27544 - DNA, 22 bp, Artificial Sequence
  Synthetic: FXN 3 reverse 9:69037909-69037934; SpCas9
gcctgtaattccagcactttgg

SEQ ID NO: 27545 - DNA, 21 bp, Artificial Sequence
  Synthetic: FXN 3 reverse 9:69037910-69037934; SpCas9
cctgtaattccagcactttgg

SEQ ID NO: 27546 - DNA, 20 bp, Artificial Sequence
  Synthetic: FXN 3 reverse 9:69037911-69037934; SpCas9
ctgtaattccagcactttgg

SEQ ID NO: 27547 - DNA, 19 bp, Artificial Sequence
  Synthetic: FXN 3 reverse 9:69037912-69037934; SpCas9
tgtaattccagcactttgg

SEQ ID NO: 27548 - DNA, 18 bp, Artificial Sequence
  Synthetic: FXN 3 reverse 9:69037913-69037934; SpCas9
gtaattccagcactttgg

SEQ ID NO: 27549 - DNA, 25 bp, Artificial Sequence
  Synthetic: FXN 3 forward 9:69037908-69037936; SpCas9
cccaaagtgctggaattacaggcgt

SEQ ID NO: 27550 - DNA, 24 bp, Artificial Sequence
  Synthetic: FXN 3 forward 9:69037909-69037936; SpCas9
ccaaagtgctggaattacaggcgt

SEQ ID NO: 27551 - DNA, 23 bp, Artificial Sequence
  Synthetic: FXN 3 forward 9:69037910-69037936; SpCas9
caaagtgctggaattacaggcgt

SEQ ID NO: 27552 - DNA, 22 bp, Artificial Sequence
  Synthetic: FXN 3 forward 9:69037911-69037936; SpCas9
aaagtgctggaattacaggcgt

SEQ ID NO: 27553 - DNA, 21 bp, Artificial Sequence
  Synthetic: FXN 3 forward 9:69037912-69037936; SpCas9
aagtgctggaattacaggcgt

SEQ ID NO: 27554 - DNA, 20 bp, Artificial Sequence
  Synthetic: FXN 3 forward 9:69037913-69037936; SpCas9
agtgctggaattacaggcgt

SEQ ID NO: 27555 - DNA, 19 bp, Artificial Sequence
  Synthetic: FXN 3 forward 9:69037914-69037936; SpCas9
gtgctggaattacaggcgt

SEQ ID NO: 27556 - DNA, 18 bp, Artificial Sequence
  Synthetic: FXN 3 forward 9:69037915-69037936; SpCas9
tgctggaattacaggcgt

SEQ ID NO: 27557 - DNA, 25 bp, Artificial Sequence
  Synthetic: FXN 3 reverse 9:69037908-69037936; SpCas9
ctcacgcctgtaattccagcacttt

SEQ ID NO: 27558 - DNA, 24 bp, Artificial Sequence
  Synthetic: FXN 3 reverse 9:69037909-69037936; SpCas9
tcacgcctgtaattccagcacttt

SEQ ID NO: 27559 - DNA, 23 bp, Artificial Sequence
  Synthetic: FXN 3 reverse 9:69037910-69037936; SpCas9
cacgcctgtaattccagcacttt

SEQ ID NO: 27560 - DNA, 22 bp, Artificial Sequence
  Synthetic: FXN 3 reverse 9:69037911-69037936; SpCas9
acgcctgtaattccagcacttt

SEQ ID NO: 27561 - DNA, 21 bp, Artificial Sequence
  Synthetic: FXN 3 reverse 9:69037912-69037936; SpCas9
cgcctgtaattccagcacttt

SEQ ID NO: 27562 - DNA, 20 bp, Artificial Sequence
  Synthetic: FXN 3 reverse 9:69037913-69037936; SpCas9
gcctgtaattccagcacttt

SEQ ID NO: 27563 - DNA, 19 bp, Artificial Sequence
  Synthetic: FXN 3 reverse 9:69037914-69037936; SpCas9
cctgtaattccagcacttt

SEQ ID NO: 27564 - DNA, 18 bp, Artificial Sequence
  Synthetic: FXN 3 reverse 9:69037915-69037936; SpCas9
ctgtaattccagcacttt

SEQ ID NO: 27565 - DNA, 25 bp, Artificial Sequence
  Synthetic: FXN 3 reverse 9:69037909-69037937; SpCas9
gctcacgcctgtaattccagcactt

SEQ ID NO: 27566 - DNA, 24 bp, Artificial Sequence
  Synthetic: FXN 3 reverse 9:69037910-69037937; SpCas9
ctcacgcctgtaattccagcactt

SEQ ID NO: 27567 - DNA, 23 bp, Artificial Sequence
  Synthetic: FXN 3 reverse 9:69037911-69037937; SpCas9
tcacgcctgtaattccagcactt

SEQ ID NO: 27568 - DNA, 22 bp, Artificial Sequence
  Synthetic: FXN 3 reverse 9:69037912-69037937; SpCas9
cacgcctgtaattccagcactt

SEQ ID NO: 27569 - DNA, 21 bp, Artificial Sequence
  Synthetic: FXN 3 reverse 9:69037913-69037937; SpCas9
acgcctgtaattccagcactt

SEQ ID NO: 27570 - DNA, 20 bp, Artificial Sequence
  Synthetic: FXN 3 reverse 9:69037914-69037937; SpCas9
cgcctgtaattccagcactt

SEQ ID NO: 27571 - DNA, 19 bp, Artificial Sequence
  Synthetic: FXN 3 reverse 9:69037915-69037937; SpCas9
gcctgtaattccagcactt

SEQ ID NO: 27572 - DNA, 18 bp, Artificial Sequence
  Synthetic: FXN 3 reverse 9:69037916-69037937; SpCas9
cctgtaattccagcactt

SEQ ID NO: 27573 - DNA, 25 bp, Artificial Sequence
  Synthetic: FXN 3 reverse 9:69037917-69037945; SpCas9
acgcggtggctcacgcctgtaattc

SEQ ID NO: 27574 - DNA, 24 bp, Artificial Sequence
  Synthetic: FXN 3 reverse 9:69037918-69037945; SpCas9
cgcggtggctcacgcctgtaattc

SEQ ID NO: 27575 - DNA, 23 bp, Artificial Sequence
  Synthetic: FXN 3 reverse 9:69037919-69037945; SpCas9
gcggtggctcacgcctgtaattc

SEQ ID NO: 27576 - DNA, 22 bp, Artificial Sequence
  Synthetic: FXN 3 reverse 9:69037920-69037945; SpCas9
cggtggctcacgcctgtaattc

SEQ ID NO: 27577 - DNA, 21 bp, Artificial Sequence
  Synthetic: FXN 3 reverse 9:69037921-69037945; SpCas9
ggtggctcacgcctgtaattc

SEQ ID NO: 27578 - DNA, 20 bp, Artificial Sequence
  Synthetic: FXN 3 reverse 9:69037922-69037945; SpCas9
gtggctcacgcctgtaattc

SEQ ID NO: 27579 - DNA, 19 bp, Artificial Sequence
  Synthetic: FXN 3 reverse 9:69037923-69037945; SpCas9
tggctcacgcctgtaattc

SEQ ID NO: 27580 - DNA, 18 bp, Artificial Sequence
  Synthetic: FXN 3 reverse 9:69037924-69037945; SpCas9
ggctcacgcctgtaattc

SEQ ID NO: 27581 - DNA, 25 bp, Artificial Sequence
  Synthetic: FXN 3 forward 9:69037921-69037949; SpCas9
aattacaggcgtgagccaccgcgtc

SEQ ID NO: 27582 - DNA, 24 bp, Artificial Sequence
  Synthetic: FXN 3 forward 9:69037922-69037949; SpCas9
attacaggcgtgagccaccgcgtc

SEQ ID NO: 27583 - DNA, 23 bp, Artificial Sequence
  Synthetic: FXN 3 forward 9:69037923-69037949; SpCas9
ttacaggcgtgagccaccgcgtc

SEQ ID NO: 27584 - DNA, 22 bp, Artificial Sequence
  Synthetic: FXN 3 forward 9:69037924-69037949; SpCas9
tacaggcgtgagccaccgcgtc

SEQ ID NO: 27585 - DNA, 21 bp, Artificial Sequence
  Synthetic: FXN 3 forward 9:69037925-69037949; SpCas9
acaggcgtgagccaccgcgtc

SEQ ID NO: 27586 - DNA, 20 bp, Artificial Sequence
  Synthetic: FXN 3 forward 9:69037926-69037949; SpCas9
caggcgtgagccaccgcgtc

SEQ ID NO: 27587 - DNA, 19 bp, Artificial Sequence
  Synthetic: FXN 3 forward 9:69037927-69037949; SpCas9
aggcgtgagccaccgcgtc

SEQ ID NO: 27588 - DNA, 18 bp, Artificial Sequence
  Synthetic: FXN 3 forward 9:69037928-69037949; SpCas9
ggcgtgagccaccgcgtc

SEQ ID NO: 27589 - DNA, 25 bp, Artificial Sequence
  Synthetic: FXN 3 forward 9:69037928-69037956; SpCas9
ggcgtgagccaccgcgtctggccat

SEQ ID NO: 27590 - DNA, 24 bp, Artificial Sequence
  Synthetic: FXN 3 forward 9:69037929-69037956; SpCas9
gcgtgagccaccgcgtctggccat

SEQ ID NO: 27591 - DNA, 23 bp, Artificial Sequence
  Synthetic: FXN 3 forward 9:69037930-69037956; SpCas9
cgtgagccaccgcgtctggccat

SEQ ID NO: 27592 - DNA, 22 bp, Artificial Sequence
  Synthetic: FXN 3 forward 9:69037931-69037956; SpCas9
gtgagccaccgcgtctggccat

SEQ ID NO: 27593 - DNA, 21 bp, Artificial Sequence
  Synthetic: FXN 3 forward 9:69037932-69037956; SpCas9
tgagccaccgcgtctggccat

SEQ ID NO: 27594 - DNA, 20 bp, Artificial Sequence
  Synthetic: FXN 3 forward 9:69037933-69037956; SpCas9
gagccaccgcgtctggccat

SEQ ID NO: 27595 - DNA, 19 bp, Artificial Sequence
  Synthetic: FXN 3 forward 9:69037934-69037956; SpCas9
agccaccgcgtctggccat

SEQ ID NO: 27596 - DNA, 18 bp, Artificial Sequence
  Synthetic: FXN 3 forward 9:69037935-69037956; SpCas9
gccaccgcgtctggccat

SEQ ID NO: 27597 - DNA, 25 bp, Artificial Sequence
  Synthetic: FXN 3 forward 9:69037931-69037959; SpCas9
gtgagccaccgcgtctggccatcag

SEQ ID NO: 27598 - DNA, 24 bp, Artificial Sequence
  Synthetic: FXN 3 forward 9:69037932-69037959; SpCas9
tgagccaccgcgtctggccatcag

SEQ ID NO: 27599 - DNA, 23 bp, Artificial Sequence
  Synthetic: FXN 3 forward 9:69037933-69037959; SpCas9
gagccaccgcgtctggccatcag

SEQ ID NO: 27600 - DNA, 22 bp, Artificial Sequence
  Synthetic: FXN 3 forward 9:69037934-69037959; SpCas9
agccaccgcgtctggccatcag

SEQ ID NO: 27601 - DNA, 21 bp, Artificial Sequence
  Synthetic: FXN 3 forward 9:69037935-69037959; SpCas9
gccaccgcgtctggccatcag

SEQ ID NO: 27602 - DNA, 20 bp, Artificial Sequence
  Synthetic: FXN 3 forward 9:69037936-69037959; SpCas9
ccaccgcgtctggccatcag

SEQ ID NO: 27603 - DNA, 19 bp, Artificial Sequence
  Synthetic: FXN 3 forward 9:69037937-69037959; SpCas9
caccgcgtctggccatcag

SEQ ID NO: 27604 - DNA, 18 bp, Artificial Sequence
  Synthetic: FXN 3 forward 9:69037938-69037959; SpCas9
accgcgtctggccatcag

SEQ ID NO: 27605 - DNA, 25 bp, Artificial Sequence
  Synthetic: FXN 3 forward 9:69037933-69037961; SpCas9
gagccaccgcgtctggccatcagca

SEQ ID NO: 27606 - DNA, 24 bp, Artificial Sequence
  Synthetic: FXN 3 forward 9:69037934-69037961; SpCas9
agccaccgcgtctggccatcagca

SEQ ID NO: 27607 - DNA, 23 bp, Artificial Sequence
  Synthetic: FXN 3 forward 9:69037935-69037961; SpCas9
gccaccgcgtctggccatcagca

SEQ ID NO: 27608 - DNA, 22 bp, Artificial Sequence
  Synthetic: FXN 3 forward 9:69037936-69037961; SpCas9
ccaccgcgtctggccatcagca

SEQ ID NO: 27609 - DNA, 21 bp, Artificial Sequence
  Synthetic: FXN 3 forward 9:69037937-69037961; SpCas9
caccgcgtctggccatcagca

SEQ ID NO: 27610 - DNA, 20 bp, Artificial Sequence
  Synthetic: FXN 3 forward 9:69037938-69037961; SpCas9
accgcgtctggccatcagca

SEQ ID NO: 27611 - DNA, 19 bp, Artificial Sequence
  Synthetic: FXN 3 forward 9:69037939-69037961; SpCas9
ccgcgtctggccatcagca

SEQ ID NO: 27612 - DNA, 18 bp, Artificial Sequence
  Synthetic: FXN 3 forward 9:69037940-69037961; SpCas9
cgcgtctggccatcagca

SEQ ID NO: 27613 - DNA, 25 bp, Artificial Sequence
  Synthetic: FXN 3 reverse 9:69037936-69037964; SpCas9
aaactctgctgatggccagacgcgg

SEQ ID NO: 27614 - DNA, 24 bp, Artificial Sequence
  Synthetic: FXN 3 reverse 9:69037937-69037964; SpCas9
aactctgctgatggccagacgcgg

SEQ ID NO: 27615 - DNA, 23 bp, Artificial Sequence
  Synthetic: FXN 3 reverse 9:69037938-69037964; SpCas9
actctgctgatggccagacgcgg

SEQ ID NO: 27616 - DNA, 22 bp, Artificial Sequence
  Synthetic: FXN 3 reverse 9:69037939-69037964; SpCas9
ctctgctgatggccagacgcgg

SEQ ID NO: 27617 - DNA, 21 bp, Artificial Sequence
  Synthetic: FXN 3 reverse 9:69037940-69037964; SpCas9
tctgctgatggccagacgcgg

SEQ ID NO: 27618 - DNA, 20 bp, Artificial Sequence
  Synthetic: FXN 3 reverse 9:69037941-69037964; SpCas9
ctgctgatggccagacgcgg

SEQ ID NO: 27619 - DNA, 19 bp, Artificial Sequence
  Synthetic: FXN 3 reverse 9:69037942-69037964; SpCas9
tgctgatggccagacgcgg

SEQ ID NO: 27620 - DNA, 18 bp, Artificial Sequence
  Synthetic: FXN 3 reverse 9:69037943-69037964; SpCas9
gctgatggccagacgcgg

SEQ ID NO: 27621 - DNA, 25 bp, Artificial Sequence
  Synthetic: FXN 3 reverse 9:69037939-69037967; SpCas9
taaaaactctgctgatggccagacg

SEQ ID NO: 27622 - DNA, 24 bp, Artificial Sequence
  Synthetic: FXN 3 reverse 9:69037940-69037967; SpCas9
aaaaactctgctgatggccagacg

SEQ ID NO: 27623 - DNA, 23 bp, Artificial Sequence
  Synthetic: FXN 3 reverse 9:69037941-69037967; SpCas9
aaaactctgctgatggccagacg

SEQ ID NO: 27624 - DNA, 22 bp, Artificial Sequence
  Synthetic: FXN 3 reverse 9:69037942-69037967; SpCas9
aaactctgctgatggccagacg

SEQ ID NO: 27625 - DNA, 21 bp, Artificial Sequence
  Synthetic: FXN 3 reverse 9:69037943-69037967; SpCas9
aactctgctgatggccagacg

SEQ ID NO: 27626 - DNA, 20 bp, Artificial Sequence
  Synthetic: FXN 3 reverse 9:69037944-69037967; SpCas9
actctgctgatggccagacg

SEQ ID NO: 27627 - DNA, 19 bp, Artificial Sequence
  Synthetic: FXN 3 reverse 9:69037945-69037967; SpCas9
ctctgctgatggccagacg

SEQ ID NO: 27628 - DNA, 18 bp, Artificial Sequence
  Synthetic: FXN 3 reverse 9:69037946-69037967; SpCas9
tctgctgatggccagacg

SEQ ID NO: 27629 - DNA, 25 bp, Artificial Sequence
  Synthetic: FXN 3 forward 9:69037945-69037973; SpCas9
ctggccatcagcagagtttttaatt

SEQ ID NO: 27630 - DNA, 24 bp, Artificial Sequence
  Synthetic: FXN 3 forward 9:69037946-69037973; SpCas9
tggccatcagcagagtttttaatt

SEQ ID NO: 27631 - DNA, 23 bp, Artificial Sequence
  Synthetic: FXN 3 forward 9:69037947-69037973; SpCas9
ggccatcagcagagtttttaatt

SEQ ID NO: 27632 - DNA, 22 bp, Artificial Sequence
  Synthetic: FXN 3 forward 9:69037948-69037973; SpCas9
gccatcagcagagtttttaatt

SEQ ID NO: 27633 - DNA, 21 bp, Artificial Sequence
  Synthetic: FXN 3 forward 9:69037949-69037973; SpCas9
ccatcagcagagtttttaatt

SEQ ID NO: 27634 - DNA, 20 bp, Artificial Sequence
  Synthetic: FXN 3 forward 9:69037950-69037973; SpCas9
catcagcagagtttttaatt

SEQ ID NO: 27635 - DNA, 19 bp, Artificial Sequence
  Synthetic: FXN 3 forward 9:69037951-69037973; SpCas9
atcagcagagtttttaatt

SEQ ID NO: 27636 - DNA, 18 bp, Artificial Sequence
  Synthetic: FXN 3 forward 9:69037952-69037973; SpCas9
tcagcagagtttttaatt

SEQ ID NO: 27637 - DNA, 25 bp, Artificial Sequence
  Synthetic: FXN 3 reverse 9:69037945-69037973; SpCas9
ctaaattaaaaactctgctgatggc

SEQ ID NO: 27638 - DNA, 24 bp, Artificial Sequence
  Synthetic: FXN 3 reverse 9:69037946-69037973; SpCas9
taaattaaaaactctgctgatggc

SEQ ID NO: 27639 - DNA, 23 bp, Artificial Sequence
  Synthetic: FXN 3 reverse 9:69037947-69037973; SpCas9
aaattaaaaactctgctgatggc

SEQ ID NO: 27640 - DNA, 22 bp, Artificial Sequence
  Synthetic: FXN 3 reverse 9:69037948-69037973; SpCas9
aattaaaaactctgctgatggc

SEQ ID NO: 27641 - DNA, 21 bp, Artificial Sequence
  Synthetic: FXN 3 reverse 9:69037949-69037973; SpCas9
attaaaaactctgctgatggc

SEQ ID NO: 27642 - DNA, 20 bp, Artificial Sequence
  Synthetic: FXN 3 reverse 9:69037950-69037973; SpCas9
ttaaaaactctgctgatggc

SEQ ID NO: 27643 - DNA, 19 bp, Artificial Sequence
  Synthetic: FXN 3 reverse 9:69037951-69037973; SpCas9
taaaaactctgctgatggc

SEQ ID NO: 27644 - DNA, 18 bp, Artificial Sequence
  Synthetic: FXN 3 reverse 9:69037952-69037973; SpCas9
aaaaactctgctgatggc

SEQ ID NO: 27645 - DNA, 25 bp, Artificial Sequence
  Synthetic: FXN 3 forward 9:69037946-69037974; SpCas9
tggccatcagcagagtttttaattt

SEQ ID NO: 27646 - DNA, 24 bp, Artificial Sequence
  Synthetic: FXN 3 forward 9:69037947-69037974; SpCas9
ggccatcagcagagtttttaattt

SEQ ID NO: 27647 - DNA, 23 bp, Artificial Sequence
  Synthetic: FXN 3 forward 9:69037948-69037974; SpCas9
gccatcagcagagtttttaattt

SEQ ID NO: 27648 - DNA, 22 bp, Artificial Sequence
  Synthetic: FXN 3 forward 9:69037949-69037974; SpCas9
ccatcagcagagtttttaattt

SEQ ID NO: 27649 - DNA, 21 bp, Artificial Sequence
  Synthetic: FXN 3 forward 9:69037950-69037974; SpCas9
catcagcagagtttttaattt

SEQ ID NO: 27650 - DNA, 20 bp, Artificial Sequence
  Synthetic: FXN 3 forward 9:69037951-69037974; SpCas9
atcagcagagtttttaattt

SEQ ID NO: 27651 - DNA, 19 bp, Artificial Sequence
  Synthetic: FXN 3 forward 9:69037952-69037974; SpCas9
tcagcagagtttttaattt

SEQ ID NO: 27652 - DNA, 18 bp, Artificial Sequence
  Synthetic: FXN 3 forward 9:69037953-69037974; SpCas9
cagcagagtttttaattt

SEQ ID NO: 27653 - DNA, 25 bp, Artificial Sequence
  Synthetic: FXN 3 forward 9:69037948-69037976; SpCas9
gccatcagcagagtttttaatttag

SEQ ID NO: 27654 - DNA, 24 bp, Artificial Sequence
  Synthetic: FXN 3 forward 9:69037949-69037976; SpCas9
ccatcagcagagtttttaatttag

SEQ ID NO: 27655 - DNA, 23 bp, Artificial Sequence
  Synthetic: FXN 3 forward 9:69037950-69037976; SpCas9
catcagcagagtttttaatttag

SEQ ID NO: 27656 - DNA, 22 bp, Artificial Sequence
  Synthetic: FXN 3 forward 9:69037951-69037976; SpCas9
atcagcagagtttttaatttag

SEQ ID NO: 27657 - DNA, 21 bp, Artificial Sequence
  Synthetic: FXN 3 forward 9:69037952-69037976; SpCas9
tcagcagagtttttaatttag

SEQ ID NO: 27658 - DNA, 20 bp, Artificial Sequence
  Synthetic: FXN 3 forward 9:69037953-69037976; SpCas9
cagcagagtttttaatttag

SEQ ID NO: 27659 - DNA, 19 bp, Artificial Sequence
  Synthetic: FXN 3 forward 9:69037954-69037976; SpCas9
agcagagtttttaatttag

SEQ ID NO: 27660 - DNA, 18 bp, Artificial Sequence
  Synthetic: FXN 3 forward 9:69037955-69037976; SpCas9
gcagagtttttaatttag

SEQ ID NO: 27661 - DNA, 25 bp, Artificial Sequence
  Synthetic: FXN 3 reverse 9:69037949-69037977; SpCas9
tctcctaaattaaaaactctgctga

SEQ ID NO: 27662 - DNA, 24 bp, Artificial Sequence
  Synthetic: FXN 3 reverse 9:69037950-69037977; SpCas9
ctcctaaattaaaaactctgctga

SEQ ID NO: 27663 - DNA, 23 bp, Artificial Sequence
  Synthetic: FXN 3 reverse 9:69037951-69037977; SpCas9
tcctaaattaaaaactctgctga

SEQ ID NO: 27664 - DNA, 22 bp, Artificial Sequence
  Synthetic: FXN 3 reverse 9:69037952-69037977; SpCas9
cctaaattaaaaactctgctga

SEQ ID NO: 27665 - DNA, 21 bp, Artificial Sequence
  Synthetic: FXN 3 reverse 9:69037953-69037977; SpCas9
ctaaattaaaaactctgctga

SEQ ID NO: 27666 - DNA, 20 bp, Artificial Sequence
  Synthetic: FXN 3 reverse 9:69037954-69037977; SpCas9
taaattaaaaactctgctga

SEQ ID NO: 27667 - DNA, 19 bp, Artificial Sequence
  Synthetic: FXN 3 reverse 9:69037955-69037977; SpCas9
aaattaaaaactctgctga

SEQ ID NO: 27668 - DNA, 18 bp, Artificial Sequence
  Synthetic: FXN 3 reverse 9:69037956-69037977; SpCas9
aattaaaaactctgctga

SEQ ID NO: 27669 - DNA, 25 bp, Artificial Sequence
  Synthetic: FXN 3 forward 9:69037957-69037985; SpCas9
agagtttttaatttaggagaatgac

SEQ ID NO: 27670 - DNA, 24 bp, Artificial Sequence
  Synthetic: FXN 3 forward 9:69037958-69037985; SpCas9
gagtttttaatttaggagaatgac

SEQ ID NO: 27671 - DNA, 23 bp, Artificial Sequence
  Synthetic: FXN 3 forward 9:69037959-69037985; SpCas9
agtttttaatttaggagaatgac

SEQ ID NO: 27672 - DNA, 22 bp, Artificial Sequence
  Synthetic: FXN 3 forward 9:69037960-69037985; SpCas9
gtttttaatttaggagaatgac

SEQ ID NO: 27673 - DNA, 21 bp, Artificial Sequence
  Synthetic: FXN 3 forward 9:69037961-69037985; SpCas9
tttttaatttaggagaatgac

SEQ ID NO: 27674 - DNA, 20 bp, Artificial Sequence
  Synthetic: FXN 3 forward 9:69037962-69037985; SpCas9
ttttaatttaggagaatgac

SEQ ID NO: 27675 - DNA, 19 bp, Artificial Sequence
  Synthetic: FXN 3 forward 9:69037963-69037985; SpCas9
tttaatttaggagaatgac

SEQ ID NO: 27676 - DNA, 18 bp, Artificial Sequence
  Synthetic: FXN 3 forward 9:69037964-69037985; SpCas9
ttaatttaggagaatgac

SEQ ID NO: 27677 - DNA, 25 bp, Artificial Sequence
  Synthetic: FXN 3 forward 9:69037959-69037987; SpCas9
agtttttaatttaggagaatgacaa

SEQ ID NO: 27678 - DNA, 24 bp, Artificial Sequence
  Synthetic: FXN 3 forward 9:69037960-69037987; SpCas9
gtttttaatttaggagaatgacaa

SEQ ID NO: 27679 - DNA, 23 bp, Artificial Sequence
  Synthetic: FXN 3 forward 9:69037961-69037987; SpCas9
tttttaatttaggagaatgacaa

SEQ ID NO: 27680 - DNA, 22 bp, Artificial Sequence
  Synthetic: FXN 3 forward 9:69037962-69037987; SpCas9
ttttaatttaggagaatgacaa

SEQ ID NO: 27681 - DNA, 21 bp, Artificial Sequence
  Synthetic: FXN 3 forward 9:69037963-69037987; SpCas9
tttaatttaggagaatgacaa

SEQ ID NO: 27682 - DNA, 20 bp, Artificial Sequence
  Synthetic: FXN 3 forward 9:69037964-69037987; SpCas9
ttaatttaggagaatgacaa

SEQ ID NO: 27683 - DNA, 19 bp, Artificial Sequence
  Synthetic: FXN 3 forward 9:69037965-69037987; SpCas9
taatttaggagaatgacaa

SEQ ID NO: 27684 - DNA, 18 bp, Artificial Sequence
  Synthetic: FXN 3 forward 9:69037966-69037987; SpCas9
aatttaggagaatgacaa

SEQ ID NO: 27685 - DNA, 25 bp, Artificial Sequence
  Synthetic: FXN 3 forward 9:69037960-69037988; SpCas9
gtttttaatttaggagaatgacaag

SEQ ID NO: 27686 - DNA, 24 bp, Artificial Sequence
  Synthetic: FXN 3 forward 9:69037961-69037988; SpCas9
tttttaatttaggagaatgacaag

SEQ ID NO: 27687 - DNA, 23 bp, Artificial Sequence
  Synthetic: FXN 3 forward 9:69037962-69037988; SpCas9
ttttaatttaggagaatgacaag

SEQ ID NO: 27688 - DNA, 22 bp, Artificial Sequence
  Synthetic: FXN 3 forward 9:69037963-69037988; SpCas9
tttaatttaggagaatgacaag

SEQ ID NO: 27689 - DNA, 21 bp, Artificial Sequence
  Synthetic: FXN 3 forward 9:69037964-69037988; SpCas9
ttaatttaggagaatgacaag

SEQ ID NO: 27690 - DNA, 20 bp, Artificial Sequence
  Synthetic: FXN 3 forward 9:69037965-69037988; SpCas9
taatttaggagaatgacaag

SEQ ID NO: 27691 - DNA, 19 bp, Artificial Sequence
  Synthetic: FXN 3 forward 9:69037966-69037988; SpCas9
aatttaggagaatgacaag

SEQ ID NO: 27692 - DNA, 18 bp, Artificial Sequence
  Synthetic: FXN 3 forward 9:69037967-69037988; SpCas9
atttaggagaatgacaag

SEQ ID NO: 27693 - DNA, 25 bp, Artificial Sequence
  Synthetic: FXN 3 forward 9:69037963-69037991; SpCas9
tttaatttaggagaatgacaagagg

SEQ ID NO: 27694 - DNA, 24 bp, Artificial Sequence
  Synthetic: FXN 3 forward 9:69037964-69037991; SpCas9
ttaatttaggagaatgacaagagg

SEQ ID NO: 27695 - DNA, 23 bp, Artificial Sequence
  Synthetic: FXN 3 forward 9:69037965-69037991; SpCas9
taatttaggagaatgacaagagg

SEQ ID NO: 27696 - DNA, 22 bp, Artificial Sequence
  Synthetic: FXN 3 forward 9:69037966-69037991; SpCas9
aatttaggagaatgacaagagg

SEQ ID NO: 27697 - DNA, 21 bp, Artificial Sequence
  Synthetic: FXN 3 forward 9:69037967-69037991; SpCas9
atttaggagaatgacaagagg

SEQ ID NO: 27698 - DNA, 20 bp, Artificial Sequence
  Synthetic: FXN 3 forward 9:69037968-69037991; SpCas9
tttaggagaatgacaagagg

SEQ ID NO: 27699 - DNA, 19 bp, Artificial Sequence
  Synthetic: FXN 3 forward 9:69037969-69037991; SpCas9
ttaggagaatgacaagagg

SEQ ID NO: 27700 - DNA, 18 bp, Artificial Sequence
  Synthetic: FXN 3 forward 9:69037970-69037991; SpCas9
taggagaatgacaagagg

SEQ ID NO: 27701 - DNA, 25 bp, Artificial Sequence
  Synthetic: FXN 3 forward 9:69037968-69037996; SpCas9
tttaggagaatgacaagaggtggta

SEQ ID NO: 27702 - DNA, 24 bp, Artificial Sequence
  Synthetic: FXN 3 forward 9:69037969-69037996; SpCas9
ttaggagaatgacaagaggtggta

SEQ ID NO: 27703 - DNA, 23 bp, Artificial Sequence
  Synthetic: FXN 3 forward 9:69037970-69037996; SpCas9
taggagaatgacaagaggtggta

SEQ ID NO: 27704 - DNA, 22 bp, Artificial Sequence
  Synthetic: FXN 3 forward 9:69037971-69037996; SpCas9
aggagaatgacaagaggtggta

SEQ ID NO: 27705 - DNA, 21 bp, Artificial Sequence
  Synthetic: FXN 3 forward 9:69037972-69037996; SpCas9
ggagaatgacaagaggtggta

SEQ ID NO: 27706 - DNA, 20 bp, Artificial Sequence
  Synthetic: FXN 3 forward 9:69037973-69037996; SpCas9
gagaatgacaagaggtggta

SEQ ID NO: 27707 - DNA, 19 bp, Artificial Sequence
  Synthetic: FXN 3 forward 9:69037974-69037996; SpCas9
agaatgacaagaggtggta

SEQ ID NO: 27708 - DNA, 18 bp, Artificial Sequence
  Synthetic: FXN 3 forward 9:69037975-69037996; SpCas9
gaatgacaagaggtggta

SEQ ID NO: 27709 - DNA, 25 bp, Artificial Sequence
  Synthetic: FXN 3 forward 9:69037976-69038004; SpCas9
aatgacaagaggtggtacagttttt

SEQ ID NO: 27710 - DNA, 24 bp, Artificial Sequence
  Synthetic: FXN 3 forward 9:69037977-69038004; SpCas9
atgacaagaggtggtacagttttt

SEQ ID NO: 27711 - DNA, 23 bp, Artificial Sequence
  Synthetic: FXN 3 forward 9:69037978-69038004; SpCas9
tgacaagaggtggtacagttttt

SEQ ID NO: 27712 - DNA, 22 bp, Artificial Sequence
  Synthetic: FXN 3 forward 9:69037979-69038004; SpCas9
gacaagaggtggtacagttttt

SEQ ID NO: 27713 - DNA, 21 bp, Artificial Sequence
  Synthetic: FXN 3 forward 9:69037980-69038004; SpCas9
acaagaggtggtacagttttt

SEQ ID NO: 27714 - DNA, 20 bp, Artificial Sequence
  Synthetic: FXN 3 forward 9:69037981-69038004; SpCas9
caagaggtggtacagttttt

SEQ ID NO: 27715 - DNA, 19 bp, Artificial Sequence
  Synthetic: FXN 3 forward 9:69037982-69038004; SpCas9
aagaggtggtacagttttt

SEQ ID NO: 27716 - DNA, 18 bp, Artificial Sequence
  Synthetic: FXN 3 forward 9:69037983-69038004; SpCas9
agaggtggtacagttttt

SEQ ID NO: 27717 - DNA, 25 bp, Artificial Sequence
  Synthetic: FXN 3 forward 9:69037980-69038008; SpCas9
acaagaggtggtacagttttttaga

SEQ ID NO: 27718 - DNA, 24 bp, Artificial Sequence
  Synthetic: FXN 3 forward 9:69037981-69038008; SpCas9
caagaggtggtacagttttttaga

SEQ ID NO: 27719 - DNA, 23 bp, Artificial Sequence
  Synthetic: FXN 3 forward 9:69037982-69038008; SpCas9
aagaggtggtacagttttttaga

SEQ ID NO: 27720 - DNA, 22 bp, Artificial Sequence
  Synthetic: FXN 3 forward 9:69037983-69038008; SpCas9
agaggtggtacagttttttaga

SEQ ID NO: 27721 - DNA, 21 bp, Artificial Sequence
  Synthetic: FXN 3 forward 9:69037984-69038008; SpCas9
gaggtggtacagttttttaga

SEQ ID NO: 27722 - DNA, 20 bp, Artificial Sequence
  Synthetic: FXN 3 forward 9:69037985-69038008; SpCas9
aggtggtacagttttttaga

SEQ ID NO: 27723 - DNA, 19 bp, Artificial Sequence
  Synthetic: FXN 3 forward 9:69037986-69038008; SpCas9
ggtggtacagttttttaga

SEQ ID NO: 27724 - DNA, 18 bp, Artificial Sequence
  Synthetic: FXN 3 forward 9:69037987-69038008; SpCas9
gtggtacagttttttaga

SEQ ID NO: 27725 - DNA, 25 bp, Artificial Sequence
  Synthetic: FXN 3 forward 9:69037987-69038015; SpCas9
gtggtacagttttttagatggtacc

SEQ ID NO: 27726 - DNA, 24 bp, Artificial Sequence
  Synthetic: FXN 3 forward 9:69037988-69038015; SpCas9
tggtacagttttttagatggtacc

SEQ ID NO: 27727 - DNA, 23 bp, Artificial Sequence
  Synthetic: FXN 3 forward 9:69037989-69038015; SpCas9
ggtacagttttttagatggtacc

SEQ ID NO: 27728 - DNA, 22 bp, Artificial Sequence
  Synthetic: FXN 3 forward 9:69037990-69038015; SpCas9
gtacagttttttagatggtacc

SEQ ID NO: 27729 - DNA, 21 bp, Artificial Sequence
  Synthetic: FXN 3 forward 9:69037991-69038015; SpCas9
tacagttttttagatggtacc

SEQ ID NO: 27730 - DNA, 20 bp, Artificial Sequence
  Synthetic: FXN 3 forward 9:69037992-69038015; SpCas9
acagttttttagatggtacc

SEQ ID NO: 27731 - DNA, 19 bp, Artificial Sequence
  Synthetic: FXN 3 forward 9:69037993-69038015; SpCas9
cagttttttagatggtacc

SEQ ID NO: 27732 - DNA, 18 bp, Artificial Sequence
  Synthetic: FXN 3 forward 9:69037994-69038015; SpCas9
agttttttagatggtacc

SEQ ID NO: 27733 - DNA, 25 bp, Artificial Sequence
  Synthetic: FXN 3 forward 9:69037990-69038018; SpCas9
gtacagttttttagatggtacctgg

SEQ ID NO: 27734 - DNA, 24 bp, Artificial Sequence
  Synthetic: FXN 3 forward 9:69037991-69038018; SpCas9
tacagttttttagatggtacctgg

SEQ ID NO: 27735 - DNA, 23 bp, Artificial Sequence
  Synthetic: FXN 3 forward 9:69037992-69038018; SpCas9
acagttttttagatggtacctgg

SEQ ID NO: 27736 - DNA, 22 bp, Artificial Sequence
  Synthetic: FXN 3 forward 9:69037993-69038018; SpCas9
cagttttttagatggtacctgg

SEQ ID NO: 27737 - DNA, 21 bp, Artificial Sequence
  Synthetic: FXN 3 forward 9:69037994-69038018; SpCas9
agttttttagatggtacctgg

SEQ ID NO: 27738 - DNA, 20 bp, Artificial Sequence
  Synthetic: FXN 3 forward 9:69037995-69038018; SpCas9
gttttttagatggtacctgg

SEQ ID NO: 27739 - DNA, 19 bp, Artificial Sequence
  Synthetic: FXN 3 forward 9:69037996-69038018; SpCas9
ttttttagatggtacctgg

SEQ ID NO: 27740 - DNA, 18 bp, Artificial Sequence
  Synthetic: FXN 3 forward 9:69037997-69038018; SpCas9
tttttagatggtacctgg

SEQ ID NO: 27741 - DNA, 25 bp, Artificial Sequence
  Synthetic: FXN 3 forward 9:69037998-69038026; SpCas9
ttttagatggtacctggtggctgtt

SEQ ID NO: 27742 - DNA, 24 bp, Artificial Sequence
  Synthetic: FXN 3 forward 9:69037999-69038026; SpCas9
tttagatggtacctggtggctgtt

SEQ ID NO: 27743 - DNA, 23 bp, Artificial Sequence
  Synthetic: FXN 3 forward 9:69038000-69038026; SpCas9
ttagatggtacctggtggctgtt

SEQ ID NO: 27744 - DNA, 22 bp, Artificial Sequence
  Synthetic: FXN 3 forward 9:69038001-69038026; SpCas9
tagatggtacctggtggctgtt

SEQ ID NO: 27745 - DNA, 21 bp, Artificial Sequence
  Synthetic: FXN 3 forward 9:69038002-69038026; SpCas9
agatggtacctggtggctgtt

SEQ ID NO: 27746 - DNA, 20 bp, Artificial Sequence
  Synthetic: FXN 3 forward 9:69038003-69038026; SpCas9
gatggtacctggtggctgtt

SEQ ID NO: 27747 - DNA, 19 bp, Artificial Sequence
  Synthetic: FXN 3 forward 9:69038004-69038026; SpCas9
atggtacctggtggctgtt

SEQ ID NO: 27748 - DNA, 18 bp, Artificial Sequence
  Synthetic: FXN 3 forward 9:69038005-69038026; SpCas9
tggtacctggtggctgtt

SEQ ID NO: 27749 - DNA, 25 bp, Artificial Sequence
  Synthetic: FXN 3 forward 9:69037999-69038027; SpCas9
tttagatggtacctggtggctgtta

SEQ ID NO: 27750 - DNA, 24 bp, Artificial Sequence
  Synthetic: FXN 3 forward 9:69038000-69038027; SpCas9
ttagatggtacctggtggctgtta

SEQ ID NO: 27751 - DNA, 23 bp, Artificial Sequence
  Synthetic: FXN 3 forward 9:69038001-69038027; SpCas9
tagatggtacctggtggctgtta

SEQ ID NO: 27752 - DNA, 22 bp, Artificial Sequence
  Synthetic: FXN 3 forward 9:69038002-69038027; SpCas9
agatggtacctggtggctgtta

SEQ ID NO: 27753 - DNA, 21 bp, Artificial Sequence
  Synthetic: FXN 3 forward 9:69038003-69038027; SpCas9
gatggtacctggtggctgtta

SEQ ID NO: 27754 - DNA, 20 bp, Artificial Sequence
  Synthetic: FXN 3 forward 9:69038004-69038027; SpCas9
atggtacctggtggctgtta

SEQ ID NO: 27755 - DNA, 19 bp, Artificial Sequence
  Synthetic: FXN 3 forward 9:69038005-69038027; SpCas9
tggtacctggtggctgtta

SEQ ID NO: 27756 - DNA, 18 bp, Artificial Sequence
  Synthetic: FXN 3 forward 9:69038006-69038027; SpCas9
ggtacctggtggctgtta

SEQ ID NO: 27757 - DNA, 25 bp, Artificial Sequence
  Synthetic: FXN 3 forward 9:69038000-69038028; SpCas9
ttagatggtacctggtggctgttaa

SEQ ID NO: 27758 - DNA, 24 bp, Artificial Sequence
  Synthetic: FXN 3 forward 9:69038001-69038028; SpCas9
tagatggtacctggtggctgttaa

SEQ ID NO: 27759 - DNA, 23 bp, Artificial Sequence
  Synthetic: FXN 3 forward 9:69038002-69038028; SpCas9
agatggtacctggtggctgttaa

SEQ ID NO: 27760 - DNA, 22 bp, Artificial Sequence
  Synthetic: FXN 3 forward 9:69038003-69038028; SpCas9
gatggtacctggtggctgttaa

SEQ ID NO: 27761 - DNA, 21 bp, Artificial Sequence
  Synthetic: FXN 3 forward 9:69038004-69038028; SpCas9
atggtacctggtggctgttaa

SEQ ID NO: 27762 - DNA, 20 bp, Artificial Sequence
  Synthetic: FXN 3 forward 9:69038005-69038028; SpCas9
tggtacctggtggctgttaa

SEQ ID NO: 27763 - DNA, 19 bp, Artificial Sequence
  Synthetic: FXN 3 forward 9:69038006-69038028; SpCas9
ggtacctggtggctgttaa

SEQ ID NO: 27764 - DNA, 18 bp, Artificial Sequence
  Synthetic: FXN 3 forward 9:69038007-69038028; SpCas9
gtacctggtggctgttaa

SEQ ID NO: 27765 - DNA, 25 bp, Artificial Sequence
  Synthetic: FXN 3 reverse 9:69038010-69038038; SpCas9
cagtcaatagcccttaacagccacc

SEQ ID NO: 27766 - DNA, 24 bp, Artificial Sequence
  Synthetic: FXN 3 reverse 9:69038011-69038038; SpCas9
agtcaatagcccttaacagccacc

SEQ ID NO: 27767 - DNA, 23 bp, Artificial Sequence
  Synthetic: FXN 3 reverse 9:69038012-69038038; SpCas9
gtcaatagcccttaacagccacc

SEQ ID NO: 27768 - DNA, 22 bp, Artificial Sequence
  Synthetic: FXN 3 reverse 9:69038013-69038038; SpCas9
tcaatagcccttaacagccacc

SEQ ID NO: 27769 - DNA, 21 bp, Artificial Sequence
  Synthetic: FXN 3 reverse 9:69038014-69038038; SpCas9
caatagcccttaacagccacc

SEQ ID NO: 27770 - DNA, 20 bp, Artificial Sequence
  Synthetic: FXN 3 reverse 9:69038015-69038038; SpCas9
aatagcccttaacagccacc

SEQ ID NO: 27771 - DNA, 19 bp, Artificial Sequence
  Synthetic: FXN 3 reverse 9:69038016-69038038; SpCas9
atagcccttaacagccacc

SEQ ID NO: 27772 - DNA, 18 bp, Artificial Sequence
  Synthetic: FXN 3 reverse 9:69038017-69038038; SpCas9
tagcccttaacagccacc

SEQ ID NO: 27773 - DNA, 25 bp, Artificial Sequence
  Synthetic: FXN 3 reverse 9:69038011-69038039; SpCas9
tcagtcaatagcccttaacagccac

SEQ ID NO: 27774 - DNA, 24 bp, Artificial Sequence
  Synthetic: FXN 3 reverse 9:69038012-69038039; SpCas9
cagtcaatagcccttaacagccac

SEQ ID NO: 27775 - DNA, 23 bp, Artificial Sequence
  Synthetic: FXN 3 reverse 9:69038013-69038039; SpCas9
agtcaatagcccttaacagccac

SEQ ID NO: 27776 - DNA, 22 bp, Artificial Sequence
  Synthetic: FXN 3 reverse 9:69038014-69038039; SpCas9
gtcaatagcccttaacagccac

SEQ ID NO: 27777 - DNA, 21 bp, Artificial Sequence
  Synthetic: FXN 3 reverse 9:69038015-69038039; SpCas9
tcaatagcccttaacagccac

SEQ ID NO: 27778 - DNA, 20 bp, Artificial Sequence
  Synthetic: FXN 3 reverse 9:69038016-69038039; SpCas9
caatagcccttaacagccac

SEQ ID NO: 27779 - DNA, 19 bp, Artificial Sequence
  Synthetic: FXN 3 reverse 9:69038017-69038039; SpCas9
aatagcccttaacagccac

SEQ ID NO: 27780 - DNA, 18 bp, Artificial Sequence
  Synthetic: FXN 3 reverse 9:69038018-69038039; SpCas9
atagcccttaacagccac

SEQ ID NO: 27781 - DNA, 25 bp, Artificial Sequence
  Synthetic: FXN 3 reverse 9:69038018-69038046; SpCas9
gtgtttgtcagtcaatagcccttaa

SEQ ID NO: 27782 - DNA, 24 bp, Artificial Sequence
  Synthetic: FXN 3 reverse 9:69038019-69038046; SpCas9
tgtttgtcagtcaatagcccttaa

SEQ ID NO: 27783 - DNA, 23 bp, Artificial Sequence
  Synthetic: FXN 3 reverse 9:69038020-69038046; SpCas9
gtttgtcagtcaatagcccttaa

SEQ ID NO: 27784 - DNA, 22 bp, Artificial Sequence
  Synthetic: FXN 3 reverse 9:69038021-69038046; SpCas9
tttgtcagtcaatagcccttaa

SEQ ID NO: 27785 - DNA, 21 bp, Artificial Sequence
  Synthetic: FXN 3 reverse 9:69038022-69038046; SpCas9
ttgtcagtcaatagcccttaa

SEQ ID NO: 27786 - DNA, 20 bp, Artificial Sequence
  Synthetic: FXN 3 reverse 9:69038023-69038046; SpCas9
tgtcagtcaatagcccttaa

SEQ ID NO: 27787 - DNA, 19 bp, Artificial Sequence
  Synthetic: FXN 3 reverse 9:69038024-69038046; SpCas9
gtcagtcaatagcccttaa

SEQ ID NO: 27788 - DNA, 18 bp, Artificial Sequence
  Synthetic: FXN 3 reverse 9:69038025-69038046; SpCas9
tcagtcaatagcccttaa

SEQ ID NO: 27789 - DNA, 25 bp, Artificial Sequence
  Synthetic: FXN 3 reverse 9:69038028-69038056; SpCas9
caagttgggtgtgtttgtcagtcaa

SEQ ID NO: 27790 - DNA, 24 bp, Artificial Sequence
  Synthetic: FXN 3 reverse 9:69038029-69038056; SpCas9
aagttgggtgtgtttgtcagtcaa

SEQ ID NO: 27791 - DNA, 23 bp, Artificial Sequence
  Synthetic: FXN 3 reverse 9:69038030-69038056; SpCas9
agttgggtgtgtttgtcagtcaa

SEQ ID NO: 27792 - DNA, 22 bp, Artificial Sequence
  Synthetic: FXN 3 reverse 9:69038031-69038056; SpCas9
gttgggtgtgtttgtcagtcaa

SEQ ID NO: 27793 - DNA, 21 bp, Artificial Sequence
  Synthetic: FXN 3 reverse 9:69038032-69038056; SpCas9
ttgggtgtgtttgtcagtcaa

SEQ ID NO: 27794 - DNA, 20 bp, Artificial Sequence
  Synthetic: FXN 3 reverse 9:69038033-69038056; SpCas9
tgggtgtgtttgtcagtcaa

SEQ ID NO: 27795 - DNA, 19 bp, Artificial Sequence
  Synthetic: FXN 3 reverse 9:69038034-69038056; SpCas9
gggtgtgtttgtcagtcaa

SEQ ID NO: 27796 - DNA, 18 bp, Artificial Sequence
  Synthetic: FXN 3 reverse 9:69038035-69038056; SpCas9
ggtgtgtttgtcagtcaa

SEQ ID NO: 27797 - DNA, 25 bp, Artificial Sequence
  Synthetic: FXN 3 forward 9:69038029-69038057; SpCas9
tattgactgacaaacacacccaact

SEQ ID NO: 27798 - DNA, 24 bp, Artificial Sequence
  Synthetic: FXN 3 forward 9:69038030-69038057; SpCas9
attgactgacaaacacacccaact

SEQ ID NO: 27799 - DNA, 23 bp, Artificial Sequence
  Synthetic: FXN 3 forward 9:69038031-69038057; SpCas9
ttgactgacaaacacacccaact

SEQ ID NO: 27800 - DNA, 22 bp, Artificial Sequence
  Synthetic: FXN 3 forward 9:69038032-69038057; SpCas9
tgactgacaaacacacccaact

SEQ ID NO: 27801 - DNA, 21 bp, Artificial Sequence
  Synthetic: FXN 3 forward 9:69038033-69038057; SpCas9
gactgacaaacacacccaact

SEQ ID NO: 27802 - DNA, 20 bp, Artificial Sequence
  Synthetic: FXN 3 forward 9:69038034-69038057; SpCas9
actgacaaacacacccaact

SEQ ID NO: 27803 - DNA, 19 bp, Artificial Sequence
  Synthetic: FXN 3 forward 9:69038035-69038057; SpCas9
ctgacaaacacacccaact

SEQ ID NO: 27804 - DNA, 18 bp, Artificial Sequence
  Synthetic: FXN 3 forward 9:69038036-69038057; SpCas9
tgacaaacacacccaact

SEQ ID NO: 27805 - DNA, 25 bp, Artificial Sequence
  Synthetic: FXN 3 reverse 9:69038035-69038063; SpCas9
gcagcgccaagttgggtgtgtttgt

SEQ ID NO: 27806 - DNA, 24 bp, Artificial Sequence
  Synthetic: FXN 3 reverse 9:69038036-69038063; SpCas9
cagcgccaagttgggtgtgtttgt

SEQ ID NO: 27807 - DNA, 23 bp, Artificial Sequence
  Synthetic: FXN 3 reverse 9:69038037-69038063; SpCas9
agcgccaagttgggtgtgtttgt

SEQ ID NO: 27808 - DNA, 22 bp, Artificial Sequence
  Synthetic: FXN 3 reverse 9:69038038-69038063; SpCas9
gcgccaagttgggtgtgtttgt

SEQ ID NO: 27809 - DNA, 21 bp, Artificial Sequence
  Synthetic: FXN 3 reverse 9:69038039-69038063; SpCas9
cgccaagttgggtgtgtttgt

SEQ ID NO: 27810 - DNA, 20 bp, Artificial Sequence
  Synthetic: FXN 3 reverse 9:69038040-69038063; SpCas9
gccaagttgggtgtgtttgt

SEQ ID NO: 27811 - DNA, 19 bp, Artificial Sequence
  Synthetic: FXN 3 reverse 9:69038041-69038063; SpCas9
ccaagttgggtgtgtttgt

SEQ ID NO: 27812 - DNA, 18 bp, Artificial Sequence
  Synthetic: FXN 3 reverse 9:69038042-69038063; SpCas9
caagttgggtgtgtttgt

SEQ ID NO: 27813 - DNA, 25 bp, Artificial Sequence
  Synthetic: FXN 3 forward 9:69038042-69038070; SpCas9
acacacccaacttggcgctgccgcc

SEQ ID NO: 27814 - DNA, 24 bp, Artificial Sequence
  Synthetic: FXN 3 forward 9:69038043-69038070; SpCas9
cacacccaacttggcgctgccgcc

SEQ ID NO: 27815 - DNA, 23 bp, Artificial Sequence
  Synthetic: FXN 3 forward 9:69038044-69038070; SpCas9
acacccaacttggcgctgccgcc

SEQ ID NO: 27816 - DNA, 22 bp, Artificial Sequence
  Synthetic: FXN 3 forward 9:69038045-69038070; SpCas9
cacccaacttggcgctgccgcc

SEQ ID NO: 27817 - DNA, 21 bp, Artificial Sequence
  Synthetic: FXN 3 forward 9:69038046-69038070; SpCas9
acccaacttggcgctgccgcc

SEQ ID NO: 27818 - DNA, 20 bp, Artificial Sequence
  Synthetic: FXN 3 forward 9:69038047-69038070; SpCas9
cccaacttggcgctgccgcc

SEQ ID NO: 27819 - DNA, 19 bp, Artificial Sequence
  Synthetic: FXN 3 forward 9:69038048-69038070; SpCas9
ccaacttggcgctgccgcc

SEQ ID NO: 27820 - DNA, 18 bp, Artificial Sequence
  Synthetic: FXN 3 forward 9:69038049-69038070; SpCas9
caacttggcgctgccgcc

SEQ ID NO: 27821 - DNA, 25 bp, Artificial Sequence
  Synthetic: FXN 3 forward 9:69038043-69038071; SpCas9
cacacccaacttggcgctgccgccc

SEQ ID NO: 27822 - DNA, 24 bp, Artificial Sequence
  Synthetic: FXN 3 forward 9:69038044-69038071; SpCas9
acacccaacttggcgctgccgccc

SEQ ID NO: 27823 - DNA, 23 bp, Artificial Sequence
  Synthetic: FXN 3 forward 9:69038045-69038071; SpCas9
cacccaacttggcgctgccgccc

SEQ ID NO: 27824 - DNA, 22 bp, Artificial Sequence
  Synthetic: FXN 3 forward 9:69038046-69038071; SpCas9
acccaacttggcgctgccgccc

SEQ ID NO: 27825 - DNA, 21 bp, Artificial Sequence
  Synthetic: FXN 3 forward 9:69038047-69038071; SpCas9
cccaacttggcgctgccgccc

SEQ ID NO: 27826 - DNA, 20 bp, Artificial Sequence
  Synthetic: FXN 3 forward 9:69038048-69038071; SpCas9
ccaacttggcgctgccgccc

SEQ ID NO: 27827 - DNA, 19 bp, Artificial Sequence
  Synthetic: FXN 3 forward 9:69038049-69038071; SpCas9
caacttggcgctgccgccc

SEQ ID NO: 27828 - DNA, 18 bp, Artificial Sequence
  Synthetic: FXN 3 forward 9:69038050-69038071; SpCas9
aacttggcgctgccgccc

SEQ ID NO: 27829 - DNA, 25 bp, Artificial Sequence
  Synthetic: FXN 3 forward 9:69038045-69038073; SpCas9
cacccaacttggcgctgccgcccag

SEQ ID NO: 27830 - DNA, 24 bp, Artificial Sequence
  Synthetic: FXN 3 forward 9:69038046-69038073; SpCas9
acccaacttggcgctgccgcccag

SEQ ID NO: 27831 - DNA, 23 bp, Artificial Sequence
  Synthetic: FXN 3 forward 9:69038047-69038073; SpCas9
cccaacttggcgctgccgcccag

SEQ ID NO: 27832 - DNA, 22 bp, Artificial Sequence
  Synthetic: FXN 3 forward 9:69038048-69038073; SpCas9
ccaacttggcgctgccgcccag

SEQ ID NO: 27833 - DNA, 21 bp, Artificial Sequence
  Synthetic: FXN 3 forward 9:69038049-69038073; SpCas9
caacttggcgctgccgcccag

SEQ ID NO: 27834 - DNA, 20 bp, Artificial Sequence
  Synthetic: FXN 3 forward 9:69038050-69038073; SpCas9
aacttggcgctgccgcccag

SEQ ID NO: 27835 - DNA, 19 bp, Artificial Sequence
  Synthetic: FXN 3 forward 9:69038051-69038073; SpCas9
acttggcgctgccgcccag

SEQ ID NO: 27836 - DNA, 18 bp, Artificial Sequence
  Synthetic: FXN 3 forward 9:69038052-69038073; SpCas9
cttggcgctgccgcccag

SEQ ID NO: 27837 - DNA, 25 bp, Artificial Sequence
  Synthetic: FXN 3 forward 9:69038046-69038074; SpCas9
acccaacttggcgctgccgcccagg

SEQ ID NO: 27838 - DNA, 24 bp, Artificial Sequence
  Synthetic: FXN 3 forward 9:69038047-69038074; SpCas9
cccaacttggcgctgccgcccagg

SEQ ID NO: 27839 - DNA, 23 bp, Artificial Sequence
  Synthetic: FXN 3 forward 9:69038048-69038074; SpCas9
ccaacttggcgctgccgcccagg

SEQ ID NO: 27840 - DNA, 22 bp, Artificial Sequence
  Synthetic: FXN 3 forward 9:69038049-69038074; SpCas9
caacttggcgctgccgcccagg

SEQ ID NO: 27841 - DNA, 21 bp, Artificial Sequence
  Synthetic: FXN 3 forward 9:69038050-69038074; SpCas9
aacttggcgctgccgcccagg

SEQ ID NO: 27842 - DNA, 20 bp, Artificial Sequence
  Synthetic: FXN 3 forward 9:69038051-69038074; SpCas9
acttggcgctgccgcccagg

SEQ ID NO: 27843 - DNA, 19 bp, Artificial Sequence
  Synthetic: FXN 3 forward 9:69038052-69038074; SpCas9
cttggcgctgccgcccagg

SEQ ID NO: 27844 - DNA, 18 bp, Artificial Sequence
  Synthetic: FXN 3 forward 9:69038053-69038074; SpCas9
ttggcgctgccgcccagg

SEQ ID NO: 27845 - DNA, 25 bp, Artificial Sequence
  Synthetic: FXN 3 reverse 9:69038047-69038075; SpCas9
acctcctgggcggcagcgccaagtt

SEQ ID NO: 27846 - DNA, 24 bp, Artificial Sequence
  Synthetic: FXN 3 reverse 9:69038048-69038075; SpCas9
cctcctgggcggcagcgccaagtt

SEQ ID NO: 27847 - DNA, 23 bp, Artificial Sequence
  Synthetic: FXN 3 reverse 9:69038049-69038075; SpCas9
ctcctgggcggcagcgccaagtt

SEQ ID NO: 27848 - DNA, 22 bp, Artificial Sequence
  Synthetic: FXN 3 reverse 9:69038050-69038075; SpCas9
tcctgggcggcagcgccaagtt

SEQ ID NO: 27849 - DNA, 21 bp, Artificial Sequence
  Synthetic: FXN 3 reverse 9:69038051-69038075; SpCas9
cctgggcggcagcgccaagtt

SEQ ID NO: 27850 - DNA, 20 bp, Artificial Sequence
  Synthetic: FXN 3 reverse 9:69038052-69038075; SpCas9
ctgggcggcagcgccaagtt

SEQ ID NO: 27851 - DNA, 19 bp, Artificial Sequence
  Synthetic: FXN 3 reverse 9:69038053-69038075; SpCas9
tgggcggcagcgccaagtt

SEQ ID NO: 27852 - DNA, 18 bp, Artificial Sequence
  Synthetic: FXN 3 reverse 9:69038054-69038075; SpCas9
gggcggcagcgccaagtt

SEQ ID NO: 27853 - DNA, 25 bp, Artificial Sequence
  Synthetic: FXN 3 reverse 9:69038048-69038076; SpCas9
cacctcctgggcggcagcgccaagt

SEQ ID NO: 27854 - DNA, 24 bp, Artificial Sequence
  Synthetic: FXN 3 reverse 9:69038049-69038076; SpCas9
acctcctgggcggcagcgccaagt

SEQ ID NO: 27855 - DNA, 23 bp, Artificial Sequence
  Synthetic: FXN 3 reverse 9:69038050-69038076; SpCas9
cctcctgggcggcagcgccaagt

SEQ ID NO: 27856 - DNA, 22 bp, Artificial Sequence
  Synthetic: FXN 3 reverse 9:69038051-69038076; SpCas9
ctcctgggcggcagcgccaagt

SEQ ID NO: 27857 - DNA, 21 bp, Artificial Sequence
  Synthetic: FXN 3 reverse 9:69038052-69038076; SpCas9
tcctgggcggcagcgccaagt

SEQ ID NO: 27858 - DNA, 20 bp, Artificial Sequence
  Synthetic: FXN 3 reverse 9:69038053-69038076; SpCas9
cctgggcggcagcgccaagt

SEQ ID NO: 27859 - DNA, 19 bp, Artificial Sequence
  Synthetic: FXN 3 reverse 9:69038054-69038076; SpCas9
ctgggcggcagcgccaagt

SEQ ID NO: 27860 - DNA, 18 bp, Artificial Sequence
  Synthetic: FXN 3 reverse 9:69038055-69038076; SpCas9
tgggcggcagcgccaagt

SEQ ID NO: 27861 - DNA, 25 bp, Artificial Sequence
  Synthetic: FXN 3 forward 9:69038049-69038077; SpCas9
caacttggcgctgccgcccaggagg

SEQ ID NO: 27862 - DNA, 24 bp, Artificial Sequence
  Synthetic: FXN 3 forward 9:69038050-69038077; SpCas9
aacttggcgctgccgcccaggagg

SEQ ID NO: 27863 - DNA, 23 bp, Artificial Sequence
  Synthetic: FXN 3 forward 9:69038051-69038077; SpCas9
acttggcgctgccgcccaggagg

SEQ ID NO: 27864 - DNA, 22 bp, Artificial Sequence
  Synthetic: FXN 3 forward 9:69038052-69038077; SpCas9
cttggcgctgccgcccaggagg

SEQ ID NO: 27865 - DNA, 21 bp, Artificial Sequence
  Synthetic: FXN 3 forward 9:69038053-69038077; SpCas9
ttggcgctgccgcccaggagg

SEQ ID NO: 27866 - DNA, 20 bp, Artificial Sequence
  Synthetic: FXN 3 forward 9:69038054-69038077; SpCas9
tggcgctgccgcccaggagg

SEQ ID NO: 27867 - DNA, 19 bp, Artificial Sequence
  Synthetic: FXN 3 forward 9:69038055-69038077; SpCas9
ggcgctgccgcccaggagg

SEQ ID NO: 27868 - DNA, 18 bp, Artificial Sequence
  Synthetic: FXN 3 forward 9:69038056-69038077; SpCas9
gcgctgccgcccaggagg

SEQ ID NO: 27869 - DNA, 25 bp, Artificial Sequence
  Synthetic: FXN 3 reverse 9:69038052-69038080; SpCas9
tgtccacctcctgggcggcagcgcc

SEQ ID NO: 27870 - DNA, 24 bp, Artificial Sequence
  Synthetic: FXN 3 reverse 9:69038053-69038080; SpCas9
gtccacctcctgggcggcagcgcc

SEQ ID NO: 27871 - DNA, 23 bp, Artificial Sequence
  Synthetic: FXN 3 reverse 9:69038054-69038080; SpCas9
tccacctcctgggcggcagcgcc

SEQ ID NO: 27872 - DNA, 22 bp, Artificial Sequence
  Synthetic: FXN 3 reverse 9:69038055-69038080; SpCas9
ccacctcctgggcggcagcgcc

SEQ ID NO: 27873 - DNA, 21 bp, Artificial Sequence
  Synthetic: FXN 3 reverse 9:69038056-69038080; SpCas9
cacctcctgggcggcagcgcc

SEQ ID NO: 27874 - DNA, 20 bp, Artificial Sequence
  Synthetic: FXN 3 reverse 9:69038057-69038080; SpCas9
acctcctgggcggcagcgcc

SEQ ID NO: 27875 - DNA, 19 bp, Artificial Sequence
  Synthetic: FXN 3 reverse 9:69038058-69038080; SpCas9
cctcctgggcggcagcgcc

SEQ ID NO: 27876 - DNA, 18 bp, Artificial Sequence
  Synthetic: FXN 3 reverse 9:69038059-69038080; SpCas9
ctcctgggcggcagcgcc

SEQ ID NO: 27877 - DNA, 25 bp, Artificial Sequence
  Synthetic: FXN 3 forward 9:69038056-69038084; SpCas9
gcgctgccgcccaggaggtggacac

SEQ ID NO: 27878 - DNA, 24 bp, Artificial Sequence
  Synthetic: FXN 3 forward 9:69038057-69038084; SpCas9
cgctgccgcccaggaggtggacac

SEQ ID NO: 27879 - DNA, 23 bp, Artificial Sequence
  Synthetic: FXN 3 forward 9:69038058-69038084; SpCas9
gctgccgcccaggaggtggacac

SEQ ID NO: 27880 - DNA, 22 bp, Artificial Sequence
  Synthetic: FXN 3 forward 9:69038059-69038084; SpCas9
ctgccgcccaggaggtggacac

SEQ ID NO: 27881 - DNA, 21 bp, Artificial Sequence
  Synthetic: FXN 3 forward 9:69038060-69038084; SpCas9
tgccgcccaggaggtggacac

SEQ ID NO: 27882 - DNA, 20 bp, Artificial Sequence
  Synthetic: FXN 3 forward 9:69038061-69038084; SpCas9
gccgcccaggaggtggacac

SEQ ID NO: 27883 - DNA, 19 bp, Artificial Sequence
  Synthetic: FXN 3 forward 9:69038062-69038084; SpCas9
ccgcccaggaggtggacac

SEQ ID NO: 27884 - DNA, 18 bp, Artificial Sequence
  Synthetic: FXN 3 forward 9:69038063-69038084; SpCas9
cgcccaggaggtggacac

SEQ ID NO: 27885 - DNA, 25 bp, Artificial Sequence
  Synthetic: FXN 3 forward 9:69038057-69038085; SpCas9
cgctgccgcccaggaggtggacact

SEQ ID NO: 27886 - DNA, 24 bp, Artificial Sequence
  Synthetic: FXN 3 forward 9:69038058-69038085; SpCas9
gctgccgcccaggaggtggacact

SEQ ID NO: 27887 - DNA, 23 bp, Artificial Sequence
  Synthetic: FXN 3 forward 9:69038059-69038085; SpCas9
ctgccgcccaggaggtggacact

SEQ ID NO: 27888 - DNA, 22 bp, Artificial Sequence
  Synthetic: FXN 3 forward 9:69038060-69038085; SpCas9
tgccgcccaggaggtggacact

SEQ ID NO: 27889 - DNA, 21 bp, Artificial Sequence
  Synthetic: FXN 3 forward 9:69038061-69038085; SpCas9
gccgcccaggaggtggacact

SEQ ID NO: 27890 - DNA, 20 bp, Artificial Sequence
  Synthetic: FXN 3 forward 9:69038062-69038085; SpCas9
ccgcccaggaggtggacact

SEQ ID NO: 27891 - DNA, 19 bp, Artificial Sequence
  Synthetic: FXN 3 forward 9:69038063-69038085; SpCas9
cgcccaggaggtggacact

SEQ ID NO: 27892 - DNA, 18 bp, Artificial Sequence
  Synthetic: FXN 3 forward 9:69038064-69038085; SpCas9
gcccaggaggtggacact

SEQ ID NO: 27893 - DNA, 25 bp, Artificial Sequence
  Synthetic: FXN 3 reverse 9:69038059-69038087; SpCas9
aacccagtgtccacctcctgggcgg

SEQ ID NO: 27894 - DNA, 24 bp, Artificial Sequence
  Synthetic: FXN 3 reverse 9:69038060-69038087; SpCas9
acccagtgtccacctcctgggcgg

SEQ ID NO: 27895 - DNA, 23 bp, Artificial Sequence
  Synthetic: FXN 3 reverse 9:69038061-69038087; SpCas9
cccagtgtccacctcctgggcgg

SEQ ID NO: 27896 - DNA, 22 bp, Artificial Sequence
  Synthetic: FXN 3 reverse 9:69038062-69038087; SpCas9
ccagtgtccacctcctgggcgg

SEQ ID NO: 27897 - DNA, 21 bp, Artificial Sequence
  Synthetic: FXN 3 reverse 9:69038063-69038087; SpCas9
cagtgtccacctcctgggcgg

SEQ ID NO: 27898 - DNA, 20 bp, Artificial Sequence
  Synthetic: FXN 3 reverse 9:69038064-69038087; SpCas9
agtgtccacctcctgggcgg

SEQ ID NO: 27899 - DNA, 19 bp, Artificial Sequence
  Synthetic: FXN 3 reverse 9:69038065-69038087; SpCas9
gtgtccacctcctgggcgg

SEQ ID NO: 27900 - DNA, 18 bp, Artificial Sequence
  Synthetic: FXN 3 reverse 9:69038066-69038087; SpCas9
tgtccacctcctgggcgg

SEQ ID NO: 27901 - DNA, 25 bp, Artificial Sequence
  Synthetic: FXN 3 reverse 9:69038062-69038090; SpCas9
agaaacccagtgtccacctcctggg

SEQ ID NO: 27902 - DNA, 24 bp, Artificial Sequence
  Synthetic: FXN 3 reverse 9:69038063-69038090; SpCas9
gaaacccagtgtccacctcctggg

SEQ ID NO: 27903 - DNA, 23 bp, Artificial Sequence
  Synthetic: FXN 3 reverse 9:69038064-69038090; SpCas9
aaacccagtgtccacctcctggg

SEQ ID NO: 27904 - DNA, 22 bp, Artificial Sequence
  Synthetic: FXN 3 reverse 9:69038065-69038090; SpCas9
aacccagtgtccacctcctggg

SEQ ID NO: 27905 - DNA, 21 bp, Artificial Sequence
  Synthetic: FXN 3 reverse 9:69038066-69038090; SpCas9
acccagtgtccacctcctggg

SEQ ID NO: 27906 - DNA, 20 bp, Artificial Sequence
  Synthetic: FXN 3 reverse 9:69038067-69038090; SpCas9
cccagtgtccacctcctggg

SEQ ID NO: 27907 - DNA, 19 bp, Artificial Sequence
  Synthetic: FXN 3 reverse 9:69038068-69038090; SpCas9
ccagtgtccacctcctggg

SEQ ID NO: 27908 - DNA, 18 bp, Artificial Sequence
  Synthetic: FXN 3 reverse 9:69038069-69038090; SpCas9
cagtgtccacctcctggg

SEQ ID NO: 27909 - DNA, 25 bp, Artificial Sequence
  Synthetic: FXN 3 forward 9:69038064-69038092; SpCas9
gcccaggaggtggacactgggtttc

SEQ ID NO: 27910 - DNA, 24 bp, Artificial Sequence
  Synthetic: FXN 3 forward 9:69038065-69038092; SpCas9
cccaggaggtggacactgggtttc

SEQ ID NO: 27911 - DNA, 23 bp, Artificial Sequence
  Synthetic: FXN 3 forward 9:69038066-69038092; SpCas9
ccaggaggtggacactgggtttc

SEQ ID NO: 27912 - DNA, 22 bp, Artificial Sequence
  Synthetic: FXN 3 forward 9:69038067-69038092; SpCas9
caggaggtggacactgggtttc

SEQ ID NO: 27913 - DNA, 21 bp, Artificial Sequence
  Synthetic: FXN 3 forward 9:69038068-69038092; SpCas9
aggaggtggacactgggtttc

SEQ ID NO: 27914 - DNA, 20 bp, Artificial Sequence
  Synthetic: FXN 3 forward 9:69038069-69038092; SpCas9
ggaggtggacactgggtttc

SEQ ID NO: 27915 - DNA, 19 bp, Artificial Sequence
  Synthetic: FXN 3 forward 9:69038070-69038092; SpCas9
gaggtggacactgggtttc

SEQ ID NO: 27916 - DNA, 18 bp, Artificial Sequence
  Synthetic: FXN 3 forward 9:69038071-69038092; SpCas9
aggtggacactgggtttc

SEQ ID NO: 27917 - DNA, 25 bp, Artificial Sequence
  Synthetic: FXN 3 reverse 9:69038065-69038093; SpCas9
tccagaaacccagtgtccacctcct

SEQ ID NO: 27918 - DNA, 24 bp, Artificial Sequence
  Synthetic: FXN 3 reverse 9:69038066-69038093; SpCas9
ccagaaacccagtgtccacctcct

SEQ ID NO: 27919 - DNA, 23 bp, Artificial Sequence
  Synthetic: FXN 3 reverse 9:69038067-69038093; SpCas9
cagaaacccagtgtccacctcct

SEQ ID NO: 27920 - DNA, 22 bp, Artificial Sequence
  Synthetic: FXN 3 reverse 9:69038068-69038093; SpCas9
agaaacccagtgtccacctcct

SEQ ID NO: 27921 - DNA, 21 bp, Artificial Sequence
  Synthetic: FXN 3 reverse 9:69038069-69038093; SpCas9
gaaacccagtgtccacctcct

SEQ ID NO: 27922 - DNA, 20 bp, Artificial Sequence
  Synthetic: FXN 3 reverse 9:69038070-69038093; SpCas9
aaacccagtgtccacctcct

SEQ ID NO: 27923 - DNA, 19 bp, Artificial Sequence
  Synthetic: FXN 3 reverse 9:69038071-69038093; SpCas9
aacccagtgtccacctcct

SEQ ID NO: 27924 - DNA, 18 bp, Artificial Sequence
  Synthetic: FXN 3 reverse 9:69038072-69038093; SpCas9
acccagtgtccacctcct

SEQ ID NO: 27925 - DNA, 25 bp, Artificial Sequence
  Synthetic: FXN 3 reverse 9:69038066-69038094; SpCas9
atccagaaacccagtgtccacctcc

SEQ ID NO: 27926 - DNA, 24 bp, Artificial Sequence
  Synthetic: FXN 3 reverse 9:69038067-69038094; SpCas9
tccagaaacccagtgtccacctcc

SEQ ID NO: 27927 - DNA, 23 bp, Artificial Sequence
  Synthetic: FXN 3 reverse 9:69038068-69038094; SpCas9
ccagaaacccagtgtccacctcc

SEQ ID NO: 27928 - DNA, 22 bp, Artificial Sequence
  Synthetic: FXN 3 reverse 9:69038069-69038094; SpCas9
cagaaacccagtgtccacctcc

SEQ ID NO: 27929 - DNA, 21 bp, Artificial Sequence
  Synthetic: FXN 3 reverse 9:69038070-69038094; SpCas9
agaaacccagtgtccacctcc

SEQ ID NO: 27930 - DNA, 20 bp, Artificial Sequence
  Synthetic: FXN 3 reverse 9:69038071-69038094; SpCas9
gaaacccagtgtccacctcc

SEQ ID NO: 27931 - DNA, 19 bp, Artificial Sequence
  Synthetic: FXN 3 reverse 9:69038072-69038094; SpCas9
aaacccagtgtccacctcc

SEQ ID NO: 27932 - DNA, 18 bp, Artificial Sequence
  Synthetic: FXN 3 reverse 9:69038073-69038094; SpCas9
aacccagtgtccacctcc

SEQ ID NO: 27933 - DNA, 25 bp, Artificial Sequence
  Synthetic: FXN 3 forward 9:69038068-69038096; SpCas9
aggaggtggacactgggtttctgga

SEQ ID NO: 27934 - DNA, 24 bp, Artificial Sequence
  Synthetic: FXN 3 forward 9:69038069-69038096; SpCas9
ggaggtggacactgggtttctgga

SEQ ID NO: 27935 - DNA, 23 bp, Artificial Sequence
  Synthetic: FXN 3 forward 9:69038070-69038096; SpCas9
gaggtggacactgggtttctgga

SEQ ID NO: 27936 - DNA, 22 bp, Artificial Sequence
  Synthetic: FXN 3 forward 9:69038071-69038096; SpCas9
aggtggacactgggtttctgga

SEQ ID NO: 27937 - DNA, 21 bp, Artificial Sequence
  Synthetic: FXN 3 forward 9:69038072-69038096; SpCas9
ggtggacactgggtttctgga

SEQ ID NO: 27938 - DNA, 20 bp, Artificial Sequence
  Synthetic: FXN 3 forward 9:69038073-69038096; SpCas9
gtggacactgggtttctgga

SEQ ID NO: 27939 - DNA, 19 bp, Artificial Sequence
  Synthetic: FXN 3 forward 9:69038074-69038096; SpCas9
tggacactgggtttctgga

SEQ ID NO: 27940 - DNA, 18 bp, Artificial Sequence
  Synthetic: FXN 3 forward 9:69038075-69038096; SpCas9
ggacactgggtttctgga

SEQ ID NO: 27941 - DNA, 25 bp, Artificial Sequence
  Synthetic: FXN 3 forward 9:69038072-69038100; SpCas9
ggtggacactgggtttctggataga

SEQ ID NO: 27942 - DNA, 24 bp, Artificial Sequence
  Synthetic: FXN 3 forward 9:69038073-69038100; SpCas9
gtggacactgggtttctggataga

SEQ ID NO: 27943 - DNA, 23 bp, Artificial Sequence
  Synthetic: FXN 3 forward 9:69038074-69038100; SpCas9
tggacactgggtttctggataga

SEQ ID NO: 27944 - DNA, 22 bp, Artificial Sequence
  Synthetic: FXN 3 forward 9:69038075-69038100; SpCas9
ggacactgggtttctggataga

SEQ ID NO: 27945 - DNA, 21 bp, Artificial Sequence
  Synthetic: FXN 3 forward 9:69038076-69038100; SpCas9
gacactgggtttctggataga

SEQ ID NO: 27946 - DNA, 20 bp, Artificial Sequence
  Synthetic: FXN 3 forward 9:69038077-69038100; SpCas9
acactgggtttctggataga

SEQ ID NO: 27947 - DNA, 19 bp, Artificial Sequence
  Synthetic: FXN 3 forward 9:69038078-69038100; SpCas9
cactgggtttctggataga

SEQ ID NO: 27948 - DNA, 18 bp, Artificial Sequence
  Synthetic: FXN 3 forward 9:69038079-69038100; SpCas9
actgggtttctggataga

SEQ ID NO: 27949 - DNA, 25 bp, Artificial Sequence
  Synthetic: FXN 3 forward 9:69038076-69038104; SpCas9
gacactgggtttctggatagatggt

SEQ ID NO: 27950 - DNA, 24 bp, Artificial Sequence
  Synthetic: FXN 3 forward 9:69038077-69038104; SpCas9
acactgggtttctggatagatggt

SEQ ID NO: 27951 - DNA, 23 bp, Artificial Sequence
  Synthetic: FXN 3 forward 9:69038078-69038104; SpCas9
cactgggtttctggatagatggt

SEQ ID NO: 27952 - DNA, 22 bp, Artificial Sequence
  Synthetic: FXN 3 forward 9:69038079-69038104; SpCas9
actgggtttctggatagatggt

SEQ ID NO: 27953 - DNA, 21 bp, Artificial Sequence
  Synthetic: FXN 3 forward 9:69038080-69038104; SpCas9
ctgggtttctggatagatggt

SEQ ID NO: 27954 - DNA, 20 bp, Artificial Sequence
  Synthetic: FXN 3 forward 9:69038081-69038104; SpCas9
tgggtttctggatagatggt

SEQ ID NO: 27955 - DNA, 19 bp, Artificial Sequence
  Synthetic: FXN 3 forward 9:69038082-69038104; SpCas9
gggtttctggatagatggt

SEQ ID NO: 27956 - DNA, 18 bp, Artificial Sequence
  Synthetic: FXN 3 forward 9:69038083-69038104; SpCas9
ggtttctggatagatggt

SEQ ID NO: 27957 - DNA, 25 bp, Artificial Sequence
  Synthetic: FXN 3 reverse 9:69038080-69038108; SpCas9
gttgctaaccatctatccagaaacc

SEQ ID NO: 27958 - DNA, 24 bp, Artificial Sequence
  Synthetic: FXN 3 reverse 9:69038081-69038108; SpCas9
ttgctaaccatctatccagaaacc

SEQ ID NO: 27959 - DNA, 23 bp, Artificial Sequence
  Synthetic: FXN 3 reverse 9:69038082-69038108; SpCas9
tgctaaccatctatccagaaacc

SEQ ID NO: 27960 - DNA, 22 bp, Artificial Sequence
  Synthetic: FXN 3 reverse 9:69038083-69038108; SpCas9
gctaaccatctatccagaaacc

SEQ ID NO: 27961 - DNA, 21 bp, Artificial Sequence
  Synthetic: FXN 3 reverse 9:69038084-69038108; SpCas9
ctaaccatctatccagaaacc

SEQ ID NO: 27962 - DNA, 20 bp, Artificial Sequence
  Synthetic: FXN 3 reverse 9:69038085-69038108; SpCas9
taaccatctatccagaaacc

SEQ ID NO: 27963 - DNA, 19 bp, Artificial Sequence
  Synthetic: FXN 3 reverse 9:69038086-69038108; SpCas9
aaccatctatccagaaacc

SEQ ID NO: 27964 - DNA, 18 bp, Artificial Sequence
  Synthetic: FXN 3 reverse 9:69038087-69038108; SpCas9
accatctatccagaaacc

SEQ ID NO: 27965 - DNA, 25 bp, Artificial Sequence
  Synthetic: FXN 3 reverse 9:69038088-69038116; SpCas9
tgacagaggttgctaaccatctatc

SEQ ID NO: 27966 - DNA, 24 bp, Artificial Sequence
  Synthetic: FXN 3 reverse 9:69038089-69038116; SpCas9
gacagaggttgctaaccatctatc

SEQ ID NO: 27967 - DNA, 23 bp, Artificial Sequence
  Synthetic: FXN 3 reverse 9:69038090-69038116; SpCas9
acagaggttgctaaccatctatc

SEQ ID NO: 27968 - DNA, 22 bp, Artificial Sequence
  Synthetic: FXN 3 reverse 9:69038091-69038116; SpCas9
cagaggttgctaaccatctatc

SEQ ID NO: 27969 - DNA, 21 bp, Artificial Sequence
  Synthetic: FXN 3 reverse 9:69038092-69038116; SpCas9
agaggttgctaaccatctatc

SEQ ID NO: 27970 - DNA, 20 bp, Artificial Sequence
  Synthetic: FXN 3 reverse 9:69038093-69038116; SpCas9
gaggttgctaaccatctatc

SEQ ID NO: 27971 - DNA, 19 bp, Artificial Sequence
  Synthetic: FXN 3 reverse 9:69038094-69038116; SpCas9
aggttgctaaccatctatc

SEQ ID NO: 27972 - DNA, 18 bp, Artificial Sequence
  Synthetic: FXN 3 reverse 9:69038095-69038116; SpCas9
ggttgctaaccatctatc

SEQ ID NO: 27973 - DNA, 25 bp, Artificial Sequence
  Synthetic: FXN 3 forward 9:69038092-69038120; SpCas9
atagatggttagcaacctctgtcac

SEQ ID NO: 27974 - DNA, 24 bp, Artificial Sequence
  Synthetic: FXN 3 forward 9:69038093-69038120; SpCas9
tagatggttagcaacctctgtcac

SEQ ID NO: 27975 - DNA, 23 bp, Artificial Sequence
  Synthetic: FXN 3 forward 9:69038094-69038120; SpCas9
agatggttagcaacctctgtcac

SEQ ID NO: 27976 - DNA, 22 bp, Artificial Sequence
  Synthetic: FXN 3 forward 9:69038095-69038120; SpCas9
gatggttagcaacctctgtcac

SEQ ID NO: 27977 - DNA, 21 bp, Artificial Sequence
  Synthetic: FXN 3 forward 9:69038096-69038120; SpCas9
atggttagcaacctctgtcac

SEQ ID NO: 27978 - DNA, 20 bp, Artificial Sequence
  Synthetic: FXN 3 forward 9:69038097-69038120; SpCas9
tggttagcaacctctgtcac

SEQ ID NO: 27979 - DNA, 19 bp, Artificial Sequence
  Synthetic: FXN 3 forward 9:69038098-69038120; SpCas9
ggttagcaacctctgtcac

SEQ ID NO: 27980 - DNA, 18 bp, Artificial Sequence
  Synthetic: FXN 3 forward 9:69038099-69038120; SpCas9
gttagcaacctctgtcac

SEQ ID NO: 27981 - DNA, 25 bp, Artificial Sequence
  Synthetic: FXN 3 forward 9:69038096-69038124; SpCas9
atggttagcaacctctgtcaccagc

SEQ ID NO: 27982 - DNA, 24 bp, Artificial Sequence
  Synthetic: FXN 3 forward 9:69038097-69038124; SpCas9
tggttagcaacctctgtcaccagc

SEQ ID NO: 27983 - DNA, 23 bp, Artificial Sequence
  Synthetic: FXN 3 forward 9:69038098-69038124; SpCas9
ggttagcaacctctgtcaccagc

SEQ ID NO: 27984 - DNA, 22 bp, Artificial Sequence
  Synthetic: FXN 3 forward 9:69038099-69038124; SpCas9
gttagcaacctctgtcaccagc

SEQ ID NO: 27985 - DNA, 21 bp, Artificial Sequence
  Synthetic: FXN 3 forward 9:69038100-69038124; SpCas9
ttagcaacctctgtcaccagc

SEQ ID NO: 27986 - DNA, 20 bp, Artificial Sequence
  Synthetic: FXN 3 forward 9:69038101-69038124; SpCas9
tagcaacctctgtcaccagc

SEQ ID NO: 27987 - DNA, 19 bp, Artificial Sequence
  Synthetic: FXN 3 forward 9:69038102-69038124; SpCas9
agcaacctctgtcaccagc

SEQ ID NO: 27988 - DNA, 18 bp, Artificial Sequence
  Synthetic: FXN 3 forward 9:69038103-69038124; SpCas9
gcaacctctgtcaccagc

SEQ ID NO: 27989 - DNA, 25 bp, Artificial Sequence
  Synthetic: FXN 3 forward 9:69038097-69038125; SpCas9
tggttagcaacctctgtcaccagct

SEQ ID NO: 27990 - DNA, 24 bp, Artificial Sequence
  Synthetic: FXN 3 forward 9:69038098-69038125; SpCas9
ggttagcaacctctgtcaccagct

SEQ ID NO: 27991 - DNA, 23 bp, Artificial Sequence
  Synthetic: FXN 3 forward 9:69038099-69038125; SpCas9
gttagcaacctctgtcaccagct

SEQ ID NO: 27992 - DNA, 22 bp, Artificial Sequence
  Synthetic: FXN 3 forward 9:69038100-69038125; SpCas9
ttagcaacctctgtcaccagct

SEQ ID NO: 27993 - DNA, 21 bp, Artificial Sequence
  Synthetic: FXN 3 forward 9:69038101-69038125; SpCas9
tagcaacctctgtcaccagct

SEQ ID NO: 27994 - DNA, 20 bp, Artificial Sequence
  Synthetic: FXN 3 forward 9:69038102-69038125; SpCas9
agcaacctctgtcaccagct

SEQ ID NO: 27995 - DNA, 19 bp, Artificial Sequence
  Synthetic: FXN 3 forward 9:69038103-69038125; SpCas9
gcaacctctgtcaccagct

SEQ ID NO: 27996 - DNA, 18 bp, Artificial Sequence
  Synthetic: FXN 3 forward 9:69038104-69038125; SpCas9
caacctctgtcaccagct

SEQ ID NO: 27997 - DNA, 25 bp, Artificial Sequence
  Synthetic: FXN 3 reverse 9:69038107-69038135; SpCas9
aaaaaagaggcccagctggtgacag

SEQ ID NO: 27998 - DNA, 24 bp, Artificial Sequence
  Synthetic: FXN 3 reverse 9:69038108-69038135; SpCas9
aaaaagaggcccagctggtgacag

SEQ ID NO: 27999 - DNA, 23 bp, Artificial Sequence
  Synthetic: FXN 3 reverse 9:69038109-69038135; SpCas9
aaaagaggcccagctggtgacag

SEQ ID NO: 28000 - DNA, 22 bp, Artificial Sequence
  Synthetic: FXN 3 reverse 9:69038110-69038135; SpCas9
aaagaggcccagctggtgacag

SEQ ID NO: 28001 - DNA, 21 bp, Artificial Sequence
  Synthetic: FXN 3 reverse 9:69038111-69038135; SpCas9
aagaggcccagctggtgacag

SEQ ID NO: 28002 - DNA, 20 bp, Artificial Sequence
  Synthetic: FXN 3 reverse 9:69038112-69038135; SpCas9
agaggcccagctggtgacag

SEQ ID NO: 28003 - DNA, 19 bp, Artificial Sequence
  Synthetic: FXN 3 reverse 9:69038113-69038135; SpCas9
gaggcccagctggtgacag

SEQ ID NO: 28004 - DNA, 18 bp, Artificial Sequence
  Synthetic: FXN 3 reverse 9:69038114-69038135; SpCas9
aggcccagctggtgacag

SEQ ID NO: 28005 - DNA, 25 bp, Artificial Sequence
  Synthetic: FXN 3 reverse 9:69038108-69038136; SpCas9
aaaaaaagaggcccagctggtgaca

SEQ ID NO: 28006 - DNA, 24 bp, Artificial Sequence
  Synthetic: FXN 3 reverse 9:69038109-69038136; SpCas9
aaaaaagaggcccagctggtgaca

SEQ ID NO: 28007 - DNA, 23 bp, Artificial Sequence
  Synthetic: FXN 3 reverse 9:69038110-69038136; SpCas9
aaaaagaggcccagctggtgaca

SEQ ID NO: 28008 - DNA, 22 bp, Artificial Sequence
  Synthetic: FXN 3 reverse 9:69038111-69038136; SpCas9
aaaagaggcccagctggtgaca

SEQ ID NO: 28009 - DNA, 21 bp, Artificial Sequence
  Synthetic: FXN 3 reverse 9:69038112-69038136; SpCas9
aaagaggcccagctggtgaca

SEQ ID NO: 28010 - DNA, 20 bp, Artificial Sequence
  Synthetic: FXN 3 reverse 9:69038113-69038136; SpCas9
aagaggcccagctggtgaca

SEQ ID NO: 28011 - DNA, 19 bp, Artificial Sequence
  Synthetic: FXN 3 reverse 9:69038114-69038136; SpCas9
agaggcccagctggtgaca

SEQ ID NO: 28012 - DNA, 18 bp, Artificial Sequence
  Synthetic: FXN 3 reverse 9:69038115-69038136; SpCas9
gaggcccagctggtgaca

SEQ ID NO: 28013 - DNA, 25 bp, Artificial Sequence
  Synthetic: FXN 3 reverse 9:69038110-69038138; SpCas9
agaaaaaaagaggcccagctggtga

SEQ ID NO: 28014 - DNA, 24 bp, Artificial Sequence
  Synthetic: FXN 3 reverse 9:69038111-69038138; SpCas9
gaaaaaaagaggcccagctggtga

SEQ ID NO: 28015 - DNA, 23 bp, Artificial Sequence
  Synthetic: FXN 3 reverse 9:69038112-69038138; SpCas9
aaaaaaagaggcccagctggtga

SEQ ID NO: 28016 - DNA, 22 bp, Artificial Sequence
  Synthetic: FXN 3 reverse 9:69038113-69038138; SpCas9
aaaaaagaggcccagctggtga

SEQ ID NO: 28017 - DNA, 21 bp, Artificial Sequence
  Synthetic: FXN 3 reverse 9:69038114-69038138; SpCas9
aaaaagaggcccagctggtga

SEQ ID NO: 28018 - DNA, 20 bp, Artificial Sequence
  Synthetic: FXN 3 reverse 9:69038115-69038138; SpCas9
aaaagaggcccagctggtga

SEQ ID NO: 28019 - DNA, 19 bp, Artificial Sequence
  Synthetic: FXN 3 reverse 9:69038116-69038138; SpCas9
aaagaggcccagctggtga

SEQ ID NO: 28020 - DNA, 18 bp, Artificial Sequence
  Synthetic: FXN 3 reverse 9:69038117-69038138; SpCas9
aagaggcccagctggtga

SEQ ID NO: 28021 - DNA, 25 bp, Artificial Sequence
  Synthetic: FXN 3 reverse 9:69038116-69038144; SpCas9
cagtatagaaaaaaagaggcccagc

SEQ ID NO: 28022 - DNA, 24 bp, Artificial Sequence
  Synthetic: FXN 3 reverse 9:69038117-69038144; SpCas9
agtatagaaaaaaagaggcccagc

SEQ ID NO: 28023 - DNA, 23 bp, Artificial Sequence
  Synthetic: FXN 3 reverse 9:69038118-69038144; SpCas9
gtatagaaaaaaagaggcccagc

SEQ ID NO: 28024 - DNA, 22 bp, Artificial Sequence
  Synthetic: FXN 3 reverse 9:69038119-69038144; SpCas9
tatagaaaaaaagaggcccagc

SEQ ID NO: 28025 - DNA, 21 bp, Artificial Sequence
  Synthetic: FXN 3 reverse 9:69038120-69038144; SpCas9
atagaaaaaaagaggcccagc

SEQ ID NO: 28026 - DNA, 20 bp, Artificial Sequence
  Synthetic: FXN 3 reverse 9:69038121-69038144; SpCas9
tagaaaaaaagaggcccagc

SEQ ID NO: 28027 - DNA, 19 bp, Artificial Sequence
  Synthetic: FXN 3 reverse 9:69038122-69038144; SpCas9
agaaaaaaagaggcccagc

SEQ ID NO: 28028 - DNA, 18 bp, Artificial Sequence
  Synthetic: FXN 3 reverse 9:69038123-69038144; SpCas9
gaaaaaaagaggcccagc

SEQ ID NO: 28029 - DNA, 25 bp, Artificial Sequence
  Synthetic: FXN 3 reverse 9:69038120-69038148; SpCas9
aattcagtatagaaaaaaagaggcc

SEQ ID NO: 28030 - DNA, 24 bp, Artificial Sequence
  Synthetic: FXN 3 reverse 9:69038121-69038148; SpCas9
attcagtatagaaaaaaagaggcc

SEQ ID NO: 28031 - DNA, 23 bp, Artificial Sequence
  Synthetic: FXN 3 reverse 9:69038122-69038148; SpCas9
ttcagtatagaaaaaaagaggcc

SEQ ID NO: 28032 - DNA, 22 bp, Artificial Sequence
  Synthetic: FXN 3 reverse 9:69038123-69038148; SpCas9
tcagtatagaaaaaaagaggcc

SEQ ID NO: 28033 - DNA, 21 bp, Artificial Sequence
  Synthetic: FXN 3 reverse 9:69038124-69038148; SpCas9
cagtatagaaaaaaagaggcc

SEQ ID NO: 28034 - DNA, 20 bp, Artificial Sequence
  Synthetic: FXN 3 reverse 9:69038125-69038148; SpCas9
agtatagaaaaaaagaggcc

SEQ ID NO: 28035 - DNA, 19 bp, Artificial Sequence
  Synthetic: FXN 3 reverse 9:69038126-69038148; SpCas9
gtatagaaaaaaagaggcc

SEQ ID NO: 28036 - DNA, 18 bp, Artificial Sequence
  Synthetic: FXN 3 reverse 9:69038127-69038148; SpCas9
tatagaaaaaaagaggcc

SEQ ID NO: 28037 - DNA, 25 bp, Artificial Sequence
  Synthetic: FXN 3 reverse 9:69038125-69038153; SpCas9
tgattaattcagtatagaaaaaaag

SEQ ID NO: 28038 - DNA, 24 bp, Artificial Sequence
  Synthetic: FXN 3 reverse 9:69038126-69038153; SpCas9
gattaattcagtatagaaaaaaag

SEQ ID NO: 28039 - DNA, 23 bp, Artificial Sequence
  Synthetic: FXN 3 reverse 9:69038127-69038153; SpCas9
attaattcagtatagaaaaaaag

SEQ ID NO: 28040 - DNA, 22 bp, Artificial Sequence
  Synthetic: FXN 3 reverse 9:69038128-69038153; SpCas9
ttaattcagtatagaaaaaaag

SEQ ID NO: 28041 - DNA, 21 bp, Artificial Sequence
  Synthetic: FXN 3 reverse 9:69038129-69038153; SpCas9
taattcagtatagaaaaaaag

SEQ ID NO: 28042 - DNA, 20 bp, Artificial Sequence
  Synthetic: FXN 3 reverse 9:69038130-69038153; SpCas9
aattcagtatagaaaaaaag

SEQ ID NO: 28043 - DNA, 19 bp, Artificial Sequence
  Synthetic: FXN 3 reverse 9:69038131-69038153; SpCas9
attcagtatagaaaaaaag

SEQ ID NO: 28044 - DNA, 18 bp, Artificial Sequence
  Synthetic: FXN 3 reverse 9:69038132-69038153; SpCas9
ttcagtatagaaaaaaag

SEQ ID NO: 28045 - DNA, 25 bp, Artificial Sequence
  Synthetic: FXN 3 reverse 9:69038126-69038154; SpCas9
gtgattaattcagtatagaaaaaaa

SEQ ID NO: 28046 - DNA, 24 bp, Artificial Sequence
  Synthetic: FXN 3 reverse 9:69038127-69038154; SpCas9
tgattaattcagtatagaaaaaaa

SEQ ID NO: 28047 - DNA, 23 bp, Artificial Sequence
  Synthetic: FXN 3 reverse 9:69038128-69038154; SpCas9
gattaattcagtatagaaaaaaa

SEQ ID NO: 28048 - DNA, 22 bp, Artificial Sequence
  Synthetic: FXN 3 reverse 9:69038129-69038154; SpCas9
attaattcagtatagaaaaaaa

SEQ ID NO: 28049 - DNA, 21 bp, Artificial Sequence
  Synthetic: FXN 3 reverse 9:69038130-69038154; SpCas9
ttaattcagtatagaaaaaaa

SEQ ID NO: 28050 - DNA, 20 bp, Artificial Sequence
  Synthetic: FXN 3 reverse 9:69038131-69038154; SpCas9
taattcagtatagaaaaaaa

SEQ ID NO: 28051 - DNA, 19 bp, Artificial Sequence
  Synthetic: FXN 3 reverse 9:69038132-69038154; SpCas9
aattcagtatagaaaaaaa

SEQ ID NO: 28052 - DNA, 18 bp, Artificial Sequence
  Synthetic: FXN 3 reverse 9:69038133-69038154; SpCas9
attcagtatagaaaaaaa

SEQ ID NO: 28053 - DNA, 25 bp, Artificial Sequence
  Synthetic: FXN 3 reverse 9:69038128-69038156; SpCas9
atgtgattaattcagtatagaaaaa

SEQ ID NO: 28054 - DNA, 24 bp, Artificial Sequence
  Synthetic: FXN 3 reverse 9:69038129-69038156; SpCas9
tgtgattaattcagtatagaaaaa

SEQ ID NO: 28055 - DNA, 23 bp, Artificial Sequence
  Synthetic: FXN 3 reverse 9:69038130-69038156; SpCas9
gtgattaattcagtatagaaaaa

SEQ ID NO: 28056 - DNA, 22 bp, Artificial Sequence
  Synthetic: FXN 3 reverse 9:69038131-69038156; SpCas9
tgattaattcagtatagaaaaa

SEQ ID NO: 28057 - DNA, 21 bp, Artificial Sequence
  Synthetic: FXN 3 reverse 9:69038132-69038156; SpCas9
gattaattcagtatagaaaaa

SEQ ID NO: 28058 - DNA, 20 bp, Artificial Sequence
  Synthetic: FXN 3 reverse 9:69038133-69038156; SpCas9
attaattcagtatagaaaaa

SEQ ID NO: 28059 - DNA, 19 bp, Artificial Sequence
  Synthetic: FXN 3 reverse 9:69038134-69038156; SpCas9
ttaattcagtatagaaaaa

SEQ ID NO: 28060 - DNA, 18 bp, Artificial Sequence
  Synthetic: FXN 3 reverse 9:69038135-69038156; SpCas9
taattcagtatagaaaaa

SEQ ID NO: 28061 - DNA, 25 bp, Artificial Sequence
  Synthetic: FXN 3 reverse 9:69038136-69038164; SpCas9
ttaaacaaatgtgattaattcagta

SEQ ID NO: 28062 - DNA, 24 bp, Artificial Sequence
  Synthetic: FXN 3 reverse 9:69038137-69038164; SpCas9
taaacaaatgtgattaattcagta

SEQ ID NO: 28063 - DNA, 23 bp, Artificial Sequence
  Synthetic: FXN 3 reverse 9:69038138-69038164; SpCas9
aaacaaatgtgattaattcagta

SEQ ID NO: 28064 - DNA, 22 bp, Artificial Sequence
  Synthetic: FXN 3 reverse 9:69038139-69038164; SpCas9
aacaaatgtgattaattcagta

SEQ ID NO: 28065 - DNA, 21 bp, Artificial Sequence
  Synthetic: FXN 3 reverse 9:69038140-69038164; SpCas9
acaaatgtgattaattcagta

SEQ ID NO: 28066 - DNA, 20 bp, Artificial Sequence
  Synthetic: FXN 3 reverse 9:69038141-69038164; SpCas9
caaatgtgattaattcagta

SEQ ID NO: 28067 - DNA, 19 bp, Artificial Sequence
  Synthetic: FXN 3 reverse 9:69038142-69038164; SpCas9
aaatgtgattaattcagta

SEQ ID NO: 28068 - DNA, 18 bp, Artificial Sequence
  Synthetic: FXN 3 reverse 9:69038143-69038164; SpCas9
aatgtgattaattcagta

SEQ ID NO: 28069 - DNA, 25 bp, Artificial Sequence
  Synthetic: FXN 3 reverse 9:69038141-69038169; SpCas9
acaggttaaacaaatgtgattaatt

SEQ ID NO: 28070 - DNA, 24 bp, Artificial Sequence
  Synthetic: FXN 3 reverse 9:69038142-69038169; SpCas9
caggttaaacaaatgtgattaatt

SEQ ID NO: 28071 - DNA, 23 bp, Artificial Sequence
  Synthetic: FXN 3 reverse 9:69038143-69038169; SpCas9
aggttaaacaaatgtgattaatt

SEQ ID NO: 28072 - DNA, 22 bp, Artificial Sequence
  Synthetic: FXN 3 reverse 9:69038144-69038169; SpCas9
ggttaaacaaatgtgattaatt

SEQ ID NO: 28073 - DNA, 21 bp, Artificial Sequence
  Synthetic: FXN 3 reverse 9:69038145-69038169; SpCas9
gttaaacaaatgtgattaatt

SEQ ID NO: 28074 - DNA, 20 bp, Artificial Sequence
  Synthetic: FXN 3 reverse 9:69038146-69038169; SpCas9
ttaaacaaatgtgattaatt

SEQ ID NO: 28075 - DNA, 19 bp, Artificial Sequence
  Synthetic: FXN 3 reverse 9:69038147-69038169; SpCas9
taaacaaatgtgattaatt

SEQ ID NO: 28076 - DNA, 18 bp, Artificial Sequence
  Synthetic: FXN 3 reverse 9:69038148-69038169; SpCas9
aaacaaatgtgattaatt

SEQ ID NO: 28077 - DNA, 25 bp, Artificial Sequence
  Synthetic: FXN 3 forward 9:69038152-69038180; SpCas9
acatttgtttaacctgtctgttcca

SEQ ID NO: 28078 - DNA, 24 bp, Artificial Sequence
  Synthetic: FXN 3 forward 9:69038153-69038180; SpCas9
catttgtttaacctgtctgttcca

SEQ ID NO: 28079 - DNA, 23 bp, Artificial Sequence
  Synthetic: FXN 3 forward 9:69038154-69038180; SpCas9
atttgtttaacctgtctgttcca

SEQ ID NO: 28080 - DNA, 22 bp, Artificial Sequence
  Synthetic: FXN 3 forward 9:69038155-69038180; SpCas9
tttgtttaacctgtctgttcca

SEQ ID NO: 28081 - DNA, 21 bp, Artificial Sequence
  Synthetic: FXN 3 forward 9:69038156-69038180; SpCas9
ttgtttaacctgtctgttcca

SEQ ID NO: 28082 - DNA, 20 bp, Artificial Sequence
  Synthetic: FXN 3 forward 9:69038157-69038180; SpCas9
tgtttaacctgtctgttcca

SEQ ID NO: 28083 - DNA, 19 bp, Artificial Sequence
  Synthetic: FXN 3 forward 9:69038158-69038180; SpCas9
gtttaacctgtctgttcca

SEQ ID NO: 28084 - DNA, 18 bp, Artificial Sequence
  Synthetic: FXN 3 forward 9:69038159-69038180; SpCas9
tttaacctgtctgttcca

SEQ ID NO: 28085 - DNA, 25 bp, Artificial Sequence
  Synthetic: FXN 3 reverse 9:69038164-69038192; SpCas9
tgtgcaagggaactatggaacagac

SEQ ID NO: 28086 - DNA, 24 bp, Artificial Sequence
  Synthetic: FXN 3 reverse 9:69038165-69038192; SpCas9
gtgcaagggaactatggaacagac

SEQ ID NO: 28087 - DNA, 23 bp, Artificial Sequence
  Synthetic: FXN 3 reverse 9:69038166-69038192; SpCas9
tgcaagggaactatggaacagac

SEQ ID NO: 28088 - DNA, 22 bp, Artificial Sequence
  Synthetic: FXN 3 reverse 9:69038167-69038192; SpCas9
gcaagggaactatggaacagac

SEQ ID NO: 28089 - DNA, 21 bp, Artificial Sequence
  Synthetic: FXN 3 reverse 9:69038168-69038192; SpCas9
caagggaactatggaacagac

SEQ ID NO: 28090 - DNA, 20 bp, Artificial Sequence
  Synthetic: FXN 3 reverse 9:69038169-69038192; SpCas9
aagggaactatggaacagac

SEQ ID NO: 28091 - DNA, 19 bp, Artificial Sequence
  Synthetic: FXN 3 reverse 9:69038170-69038192; SpCas9
agggaactatggaacagac

SEQ ID NO: 28092 - DNA, 18 bp, Artificial Sequence
  Synthetic: FXN 3 reverse 9:69038171-69038192; SpCas9
gggaactatggaacagac

SEQ ID NO: 28093 - DNA, 25 bp, Artificial Sequence
  Synthetic: FXN 3 reverse 9:69038165-69038193; SpCas9
atgtgcaagggaactatggaacaga

SEQ ID NO: 28094 - DNA, 24 bp, Artificial Sequence
  Synthetic: FXN 3 reverse 9:69038166-69038193; SpCas9
tgtgcaagggaactatggaacaga

SEQ ID NO: 28095 - DNA, 23 bp, Artificial Sequence
  Synthetic: FXN 3 reverse 9:69038167-69038193; SpCas9
gtgcaagggaactatggaacaga

SEQ ID NO: 28096 - DNA, 22 bp, Artificial Sequence
  Synthetic: FXN 3 reverse 9:69038168-69038193; SpCas9
tgcaagggaactatggaacaga

SEQ ID NO: 28097 - DNA, 21 bp, Artificial Sequence
  Synthetic: FXN 3 reverse 9:69038169-69038193; SpCas9
gcaagggaactatggaacaga

SEQ ID NO: 28098 - DNA, 20 bp, Artificial Sequence
  Synthetic: FXN 3 reverse 9:69038170-69038193; SpCas9
caagggaactatggaacaga

SEQ ID NO: 28099 - DNA, 19 bp, Artificial Sequence
  Synthetic: FXN 3 reverse 9:69038171-69038193; SpCas9
aagggaactatggaacaga

SEQ ID NO: 28100 - DNA, 18 bp, Artificial Sequence
  Synthetic: FXN 3 reverse 9:69038172-69038193; SpCas9
agggaactatggaacaga

SEQ ID NO: 28101 - DNA, 25 bp, Artificial Sequence
  Synthetic: FXN 3 reverse 9:69038169-69038197; SpCas9
caagatgtgcaagggaactatggaa

SEQ ID NO: 28102 - DNA, 24 bp, Artificial Sequence
  Synthetic: FXN 3 reverse 9:69038170-69038197; SpCas9
aagatgtgcaagggaactatggaa

SEQ ID NO: 28103 - DNA, 23 bp, Artificial Sequence
  Synthetic: FXN 3 reverse 9:69038171-69038197; SpCas9
agatgtgcaagggaactatggaa

SEQ ID NO: 28104 - DNA, 22 bp, Artificial Sequence
  Synthetic: FXN 3 reverse 9:69038172-69038197; SpCas9
gatgtgcaagggaactatggaa

SEQ ID NO: 28105 - DNA, 21 bp, Artificial Sequence
  Synthetic: FXN 3 reverse 9:69038173-69038197; SpCas9
atgtgcaagggaactatggaa

SEQ ID NO: 28106 - DNA, 20 bp, Artificial Sequence
  Synthetic: FXN 3 reverse 9:69038174-69038197; SpCas9
tgtgcaagggaactatggaa

SEQ ID NO: 28107 - DNA, 19 bp, Artificial Sequence
  Synthetic: FXN 3 reverse 9:69038175-69038197; SpCas9
gtgcaagggaactatggaa

SEQ ID NO: 28108 - DNA, 18 bp, Artificial Sequence
  Synthetic: FXN 3 reverse 9:69038176-69038197; SpCas9
tgcaagggaactatggaa

SEQ ID NO: 28109 - DNA, 25 bp, Artificial Sequence
  Synthetic: FXN 3 forward 9:69038170-69038198; SpCas9
tgttccatagttcccttgcacatct

SEQ ID NO: 28110 - DNA, 24 bp, Artificial Sequence
  Synthetic: FXN 3 forward 9:69038171-69038198; SpCas9
gttccatagttcccttgcacatct

SEQ ID NO: 28111 - DNA, 23 bp, Artificial Sequence
  Synthetic: FXN 3 forward 9:69038172-69038198; SpCas9
ttccatagttcccttgcacatct

SEQ ID NO: 28112 - DNA, 22 bp, Artificial Sequence
  Synthetic: FXN 3 forward 9:69038173-69038198; SpCas9
tccatagttcccttgcacatct

SEQ ID NO: 28113 - DNA, 21 bp, Artificial Sequence
  Synthetic: FXN 3 forward 9:69038174-69038198; SpCas9
ccatagttcccttgcacatct

SEQ ID NO: 28114 - DNA, 20 bp, Artificial Sequence
  Synthetic: FXN 3 forward 9:69038175-69038198; SpCas9
catagttcccttgcacatct

SEQ ID NO: 28115 - DNA, 19 bp, Artificial Sequence
  Synthetic: FXN 3 forward 9:69038176-69038198; SpCas9
atagttcccttgcacatct

SEQ ID NO: 28116 - DNA, 18 bp, Artificial Sequence
  Synthetic: FXN 3 forward 9:69038177-69038198; SpCas9
tagttcccttgcacatct

SEQ ID NO: 28117 - DNA, 25 bp, Artificial Sequence
  Synthetic: FXN 3 forward 9:69038171-69038199; SpCas9
gttccatagttcccttgcacatctt

SEQ ID NO: 28118 - DNA, 24 bp, Artificial Sequence
  Synthetic: FXN 3 forward 9:69038172-69038199; SpCas9
ttccatagttcccttgcacatctt

SEQ ID NO: 28119 - DNA, 23 bp, Artificial Sequence
  Synthetic: FXN 3 forward 9:69038173-69038199; SpCas9
tccatagttcccttgcacatctt

SEQ ID NO: 28120 - DNA, 22 bp, Artificial Sequence
  Synthetic: FXN 3 forward 9:69038174-69038199; SpCas9
ccatagttcccttgcacatctt

SEQ ID NO: 28121 - DNA, 21 bp, Artificial Sequence
  Synthetic: FXN 3 forward 9:69038175-69038199; SpCas9
catagttcccttgcacatctt

SEQ ID NO: 28122 - DNA, 20 bp, Artificial Sequence
  Synthetic: FXN 3 forward 9:69038176-69038199; SpCas9
atagttcccttgcacatctt

SEQ ID NO: 28123 - DNA, 19 bp, Artificial Sequence
  Synthetic: FXN 3 forward 9:69038177-69038199; SpCas9
tagttcccttgcacatctt

SEQ ID NO: 28124 - DNA, 18 bp, Artificial Sequence
  Synthetic: FXN 3 forward 9:69038178-69038199; SpCas9
agttcccttgcacatctt

SEQ ID NO: 28125 - DNA, 25 bp, Artificial Sequence
  Synthetic: FXN 3 reverse 9:69038174-69038202; SpCas9
atacccaagatgtgcaagggaacta

SEQ ID NO: 28126 - DNA, 24 bp, Artificial Sequence
  Synthetic: FXN 3 reverse 9:69038175-69038202; SpCas9
tacccaagatgtgcaagggaacta

SEQ ID NO: 28127 - DNA, 23 bp, Artificial Sequence
  Synthetic: FXN 3 reverse 9:69038176-69038202; SpCas9
acccaagatgtgcaagggaacta

SEQ ID NO: 28128 - DNA, 22 bp, Artificial Sequence
  Synthetic: FXN 3 reverse 9:69038177-69038202; SpCas9
cccaagatgtgcaagggaacta

SEQ ID NO: 28129 - DNA, 21 bp, Artificial Sequence
  Synthetic: FXN 3 reverse 9:69038178-69038202; SpCas9
ccaagatgtgcaagggaacta

SEQ ID NO: 28130 - DNA, 20 bp, Artificial Sequence
  Synthetic: FXN 3 reverse 9:69038179-69038202; SpCas9
caagatgtgcaagggaacta

SEQ ID NO: 28131 - DNA, 19 bp, Artificial Sequence
  Synthetic: FXN 3 reverse 9:69038180-69038202; SpCas9
aagatgtgcaagggaacta

SEQ ID NO: 28132 - DNA, 18 bp, Artificial Sequence
  Synthetic: FXN 3 reverse 9:69038181-69038202; SpCas9
agatgtgcaagggaacta

SEQ ID NO: 28133 - DNA, 25 bp, Artificial Sequence
  Synthetic: FXN 3 forward 9:69038179-69038207; SpCas9
gttcccttgcacatcttgggtattt

SEQ ID NO: 28134 - DNA, 24 bp, Artificial Sequence
  Synthetic: FXN 3 forward 9:69038180-69038207; SpCas9
ttcccttgcacatcttgggtattt

SEQ ID NO: 28135 - DNA, 23 bp, Artificial Sequence
  Synthetic: FXN 3 forward 9:69038181-69038207; SpCas9
tcccttgcacatcttgggtattt

SEQ ID NO: 28136 - DNA, 22 bp, Artificial Sequence
  Synthetic: FXN 3 forward 9:69038182-69038207; SpCas9
cccttgcacatcttgggtattt

SEQ ID NO: 28137 - DNA, 21 bp, Artificial Sequence
  Synthetic: FXN 3 forward 9:69038183-69038207; SpCas9
ccttgcacatcttgggtattt

SEQ ID NO: 28138 - DNA, 20 bp, Artificial Sequence
  Synthetic: FXN 3 forward 9:69038184-69038207; SpCas9
cttgcacatcttgggtattt

SEQ ID NO: 28139 - DNA, 19 bp, Artificial Sequence
  Synthetic: FXN 3 forward 9:69038185-69038207; SpCas9
ttgcacatcttgggtattt

SEQ ID NO: 28140 - DNA, 18 bp, Artificial Sequence
  Synthetic: FXN 3 forward 9:69038186-69038207; SpCas9
tgcacatcttgggtattt

SEQ ID NO: 28141 - DNA, 25 bp, Artificial Sequence
  Synthetic: FXN 3 forward 9:69038180-69038208; SpCas9
ttcccttgcacatcttgggtatttg

SEQ ID NO: 28142 - DNA, 24 bp, Artificial Sequence
  Synthetic: FXN 3 forward 9:69038181-69038208; SpCas9
tcccttgcacatcttgggtatttg

SEQ ID NO: 28143 - DNA, 23 bp, Artificial Sequence
  Synthetic: FXN 3 forward 9:69038182-69038208; SpCas9
cccttgcacatcttgggtatttg

SEQ ID NO: 28144 - DNA, 22 bp, Artificial Sequence
  Synthetic: FXN 3 forward 9:69038183-69038208; SpCas9
ccttgcacatcttgggtatttg

SEQ ID NO: 28145 - DNA, 21 bp, Artificial Sequence
  Synthetic: FXN 3 forward 9:69038184-69038208; SpCas9
cttgcacatcttgggtatttg

SEQ ID NO: 28146 - DNA, 20 bp, Artificial Sequence
  Synthetic: FXN 3 forward 9:69038185-69038208; SpCas9
ttgcacatcttgggtatttg

SEQ ID NO: 28147 - DNA, 19 bp, Artificial Sequence
  Synthetic: FXN 3 forward 9:69038186-69038208; SpCas9
tgcacatcttgggtatttg

SEQ ID NO: 28148 - DNA, 18 bp, Artificial Sequence
  Synthetic: FXN 3 forward 9:69038187-69038208; SpCas9
gcacatcttgggtatttg

SEQ ID NO: 28149 - DNA, 25 bp, Artificial Sequence
  Synthetic: FXN 3 forward 9:69038182-69038210; SpCas9
cccttgcacatcttgggtatttgag

SEQ ID NO: 28150 - DNA, 24 bp, Artificial Sequence
  Synthetic: FXN 3 forward 9:69038183-69038210; SpCas9
ccttgcacatcttgggtatttgag

SEQ ID NO: 28151 - DNA, 23 bp, Artificial Sequence
  Synthetic: FXN 3 forward 9:69038184-69038210; SpCas9
cttgcacatcttgggtatttgag

SEQ ID NO: 28152 - DNA, 22 bp, Artificial Sequence
  Synthetic: FXN 3 forward 9:69038185-69038210; SpCas9
ttgcacatcttgggtatttgag

SEQ ID NO: 28153 - DNA, 21 bp, Artificial Sequence
  Synthetic: FXN 3 forward 9:69038186-69038210; SpCas9
tgcacatcttgggtatttgag

SEQ ID NO: 28154 - DNA, 20 bp, Artificial Sequence
  Synthetic: FXN 3 forward 9:69038187-69038210; SpCas9
gcacatcttgggtatttgag

SEQ ID NO: 28155 - DNA, 19 bp, Artificial Sequence
  Synthetic: FXN 3 forward 9:69038188-69038210; SpCas9
cacatcttgggtatttgag

SEQ ID NO: 28156 - DNA, 18 bp, Artificial Sequence
  Synthetic: FXN 3 forward 9:69038189-69038210; SpCas9
acatcttgggtatttgag

SEQ ID NO: 28157 - DNA, 25 bp, Artificial Sequence
  Synthetic: FXN 3 reverse 9:69038182-69038210; SpCas9
ctcctcaaatacccaagatgtgcaa

SEQ ID NO: 28158 - DNA, 24 bp, Artificial Sequence
  Synthetic: FXN 3 reverse 9:69038183-69038210; SpCas9
tcctcaaatacccaagatgtgcaa

SEQ ID NO: 28159 - DNA, 23 bp, Artificial Sequence
  Synthetic: FXN 3 reverse 9:69038184-69038210; SpCas9
cctcaaatacccaagatgtgcaa

SEQ ID NO: 28160 - DNA, 22 bp, Artificial Sequence
  Synthetic: FXN 3 reverse 9:69038185-69038210; SpCas9
ctcaaatacccaagatgtgcaa

SEQ ID NO: 28161 - DNA, 21 bp, Artificial Sequence
  Synthetic: FXN 3 reverse 9:69038186-69038210; SpCas9
tcaaatacccaagatgtgcaa

SEQ ID NO: 28162 - DNA, 20 bp, Artificial Sequence
  Synthetic: FXN 3 reverse 9:69038187-69038210; SpCas9
caaatacccaagatgtgcaa

SEQ ID NO: 28163 - DNA, 19 bp, Artificial Sequence
  Synthetic: FXN 3 reverse 9:69038188-69038210; SpCas9
aaatacccaagatgtgcaa

SEQ ID NO: 28164 - DNA, 18 bp, Artificial Sequence
  Synthetic: FXN 3 reverse 9:69038189-69038210; SpCas9
aatacccaagatgtgcaa

SEQ ID NO: 28165 - DNA, 25 bp, Artificial Sequence
  Synthetic: FXN 3 reverse 9:69038183-69038211; SpCas9
actcctcaaatacccaagatgtgca

SEQ ID NO: 28166 - DNA, 24 bp, Artificial Sequence
  Synthetic: FXN 3 reverse 9:69038184-69038211; SpCas9
ctcctcaaatacccaagatgtgca

SEQ ID NO: 28167 - DNA, 23 bp, Artificial Sequence
  Synthetic: FXN 3 reverse 9:69038185-69038211; SpCas9
tcctcaaatacccaagatgtgca

SEQ ID NO: 28168 - DNA, 22 bp, Artificial Sequence
  Synthetic: FXN 3 reverse 9:69038186-69038211; SpCas9
cctcaaatacccaagatgtgca

SEQ ID NO: 28169 - DNA, 21 bp, Artificial Sequence
  Synthetic: FXN 3 reverse 9:69038187-69038211; SpCas9
ctcaaatacccaagatgtgca

SEQ ID NO: 28170 - DNA, 20 bp, Artificial Sequence
  Synthetic: FXN 3 reverse 9:69038188-69038211; SpCas9
tcaaatacccaagatgtgca

SEQ ID NO: 28171 - DNA, 19 bp, Artificial Sequence
  Synthetic: FXN 3 reverse 9:69038189-69038211; SpCas9
caaatacccaagatgtgca

SEQ ID NO: 28172 - DNA, 18 bp, Artificial Sequence
  Synthetic: FXN 3 reverse 9:69038190-69038211; SpCas9
aaatacccaagatgtgca

SEQ ID NO: 28173 - DNA, 25 bp, Artificial Sequence
  Synthetic: FXN 3 reverse 9:69038184-69038212; SpCas9
aactcctcaaatacccaagatgtgc

SEQ ID NO: 28174 - DNA, 24 bp, Artificial Sequence
  Synthetic: FXN 3 reverse 9:69038185-69038212; SpCas9
actcctcaaatacccaagatgtgc

SEQ ID NO: 28175 - DNA, 23 bp, Artificial Sequence
  Synthetic: FXN 3 reverse 9:69038186-69038212; SpCas9
ctcctcaaatacccaagatgtgc

SEQ ID NO: 28176 - DNA, 22 bp, Artificial Sequence
  Synthetic: FXN 3 reverse 9:69038187-69038212; SpCas9
tcctcaaatacccaagatgtgc

SEQ ID NO: 28177 - DNA, 21 bp, Artificial Sequence
  Synthetic: FXN 3 reverse 9:69038188-69038212; SpCas9
cctcaaatacccaagatgtgc

SEQ ID NO: 28178 - DNA, 20 bp, Artificial Sequence
  Synthetic: FXN 3 reverse 9:69038189-69038212; SpCas9
ctcaaatacccaagatgtgc

SEQ ID NO: 28179 - DNA, 19 bp, Artificial Sequence
  Synthetic: FXN 3 reverse 9:69038190-69038212; SpCas9
tcaaatacccaagatgtgc

SEQ ID NO: 28180 - DNA, 18 bp, Artificial Sequence
  Synthetic: FXN 3 reverse 9:69038191-69038212; SpCas9
caaatacccaagatgtgc

SEQ ID NO: 28181 - DNA, 25 bp, Artificial Sequence
  Synthetic: FXN 3 forward 9:69038186-69038214; SpCas9
tgcacatcttgggtatttgaggagt

SEQ ID NO: 28182 - DNA, 24 bp, Artificial Sequence
  Synthetic: FXN 3 forward 9:69038187-69038214; SpCas9
gcacatcttgggtatttgaggagt

SEQ ID NO: 28183 - DNA, 23 bp, Artificial Sequence
  Synthetic: FXN 3 forward 9:69038188-69038214; SpCas9
cacatcttgggtatttgaggagt

SEQ ID NO: 28184 - DNA, 22 bp, Artificial Sequence
  Synthetic: FXN 3 forward 9:69038189-69038214; SpCas9
acatcttgggtatttgaggagt

SEQ ID NO: 28185 - DNA, 21 bp, Artificial Sequence
  Synthetic: FXN 3 forward 9:69038190-69038214; SpCas9
catcttgggtatttgaggagt

SEQ ID NO: 28186 - DNA, 20 bp, Artificial Sequence
  Synthetic: FXN 3 forward 9:69038191-69038214; SpCas9
atcttgggtatttgaggagt

SEQ ID NO: 28187 - DNA, 19 bp, Artificial Sequence
  Synthetic: FXN 3 forward 9:69038192-69038214; SpCas9
tcttgggtatttgaggagt

SEQ ID NO: 28188 - DNA, 18 bp, Artificial Sequence
  Synthetic: FXN 3 forward 9:69038193-69038214; SpCas9
cttgggtatttgaggagt

SEQ ID NO: 28189 - DNA, 25 bp, Artificial Sequence
  Synthetic: FXN 3 forward 9:69038187-69038215; SpCas9
gcacatcttgggtatttgaggagtt

SEQ ID NO: 28190 - DNA, 24 bp, Artificial Sequence
  Synthetic: FXN 3 forward 9:69038188-69038215; SpCas9
cacatcttgggtatttgaggagtt

SEQ ID NO: 28191 - DNA, 23 bp, Artificial Sequence
  Synthetic: FXN 3 forward 9:69038189-69038215; SpCas9
acatcttgggtatttgaggagtt

SEQ ID NO: 28192 - DNA, 22 bp, Artificial Sequence
  Synthetic: FXN 3 forward 9:69038190-69038215; SpCas9
catcttgggtatttgaggagtt

SEQ ID NO: 28193 - DNA, 21 bp, Artificial Sequence
  Synthetic: FXN 3 forward 9:69038191-69038215; SpCas9
atcttgggtatttgaggagtt

SEQ ID NO: 28194 - DNA, 20 bp, Artificial Sequence
  Synthetic: FXN 3 forward 9:69038192-69038215; SpCas9
tcttgggtatttgaggagtt

SEQ ID NO: 28195 - DNA, 19 bp, Artificial Sequence
  Synthetic: FXN 3 forward 9:69038193-69038215; SpCas9
cttgggtatttgaggagtt

SEQ ID NO: 28196 - DNA, 18 bp, Artificial Sequence
  Synthetic: FXN 3 forward 9:69038194-69038215; SpCas9
ttgggtatttgaggagtt

SEQ ID NO: 28197 - DNA, 25 bp, Artificial Sequence
  Synthetic: FXN 3 forward 9:69038190-69038218; SpCas9
catcttgggtatttgaggagttggg

SEQ ID NO: 28198 - DNA, 24 bp, Artificial Sequence
  Synthetic: FXN 3 forward 9:69038191-69038218; SpCas9
atcttgggtatttgaggagttggg

SEQ ID NO: 28199 - DNA, 23 bp, Artificial Sequence
  Synthetic: FXN 3 forward 9:69038192-69038218; SpCas9
tcttgggtatttgaggagttggg

SEQ ID NO: 28200 - DNA, 22 bp, Artificial Sequence
  Synthetic: FXN 3 forward 9:69038193-69038218; SpCas9
cttgggtatttgaggagttggg

SEQ ID NO: 28201 - DNA, 21 bp, Artificial Sequence
  Synthetic: FXN 3 forward 9:69038194-69038218; SpCas9
ttgggtatttgaggagttggg

SEQ ID NO: 28202 - DNA, 20 bp, Artificial Sequence
  Synthetic: FXN 3 forward 9:69038195-69038218; SpCas9
tgggtatttgaggagttggg

SEQ ID NO: 28203 - DNA, 19 bp, Artificial Sequence
  Synthetic: FXN 3 forward 9:69038196-69038218; SpCas9
gggtatttgaggagttggg

SEQ ID NO: 28204 - DNA, 18 bp, Artificial Sequence
  Synthetic: FXN 3 forward 9:69038197-69038218; SpCas9
ggtatttgaggagttggg

SEQ ID NO: 28205 - DNA, 25 bp, Artificial Sequence
  Synthetic: FXN 3 forward 9:69038191-69038219; SpCas9
atcttgggtatttgaggagttgggt

SEQ ID NO: 28206 - DNA, 24 bp, Artificial Sequence
  Synthetic: FXN 3 forward 9:69038192-69038219; SpCas9
tcttgggtatttgaggagttgggt

SEQ ID NO: 28207 - DNA, 23 bp, Artificial Sequence
  Synthetic: FXN 3 forward 9:69038193-69038219; SpCas9
cttgggtatttgaggagttgggt

SEQ ID NO: 28208 - DNA, 22 bp, Artificial Sequence
  Synthetic: FXN 3 forward 9:69038194-69038219; SpCas9
ttgggtatttgaggagttgggt

SEQ ID NO: 28209 - DNA, 21 bp, Artificial Sequence
  Synthetic: FXN 3 forward 9:69038195-69038219; SpCas9
tgggtatttgaggagttgggt

SEQ ID NO: 28210 - DNA, 20 bp, Artificial Sequence
  Synthetic: FXN 3 forward 9:69038196-69038219; SpCas9
gggtatttgaggagttgggt

SEQ ID NO: 28211 - DNA, 19 bp, Artificial Sequence
  Synthetic: FXN 3 forward 9:69038197-69038219; SpCas9
ggtatttgaggagttgggt

SEQ ID NO: 28212 - DNA, 18 bp, Artificial Sequence
  Synthetic: FXN 3 forward 9:69038198-69038219; SpCas9
gtatttgaggagttgggt

SEQ ID NO: 28213 - DNA, 25 bp, Artificial Sequence
  Synthetic: FXN 3 reverse 9:69038193-69038221; SpCas9
cacccacccaactcctcaaataccc

SEQ ID NO: 28214 - DNA, 24 bp, Artificial Sequence
  Synthetic: FXN 3 reverse 9:69038194-69038221; SpCas9
acccacccaactcctcaaataccc

SEQ ID NO: 28215 - DNA, 23 bp, Artificial Sequence
  Synthetic: FXN 3 reverse 9:69038195-69038221; SpCas9
cccacccaactcctcaaataccc

SEQ ID NO: 28216 - DNA, 22 bp, Artificial Sequence
  Synthetic: FXN 3 reverse 9:69038196-69038221; SpCas9
ccacccaactcctcaaataccc

SEQ ID NO: 28217 - DNA, 21 bp, Artificial Sequence
  Synthetic: FXN 3 reverse 9:69038197-69038221; SpCas9
cacccaactcctcaaataccc

SEQ ID NO: 28218 - DNA, 20 bp, Artificial Sequence
  Synthetic: FXN 3 reverse 9:69038198-69038221; SpCas9
acccaactcctcaaataccc

SEQ ID NO: 28219 - DNA, 19 bp, Artificial Sequence
  Synthetic: FXN 3 reverse 9:69038199-69038221; SpCas9
cccaactcctcaaataccc

SEQ ID NO: 28220 - DNA, 18 bp, Artificial Sequence
  Synthetic: FXN 3 reverse 9:69038200-69038221; SpCas9
ccaactcctcaaataccc

SEQ ID NO: 28221 - DNA, 25 bp, Artificial Sequence
  Synthetic: FXN 3 forward 9:69038194-69038222; SpCas9
ttgggtatttgaggagttgggtggg

SEQ ID NO: 28222 - DNA, 24 bp, Artificial Sequence
  Synthetic: FXN 3 forward 9:69038195-69038222; SpCas9
tgggtatttgaggagttgggtggg

SEQ ID NO: 28223 - DNA, 23 bp, Artificial Sequence
  Synthetic: FXN 3 forward 9:69038196-69038222; SpCas9
gggtatttgaggagttgggtggg

SEQ ID NO: 28224 - DNA, 22 bp, Artificial Sequence
  Synthetic: FXN 3 forward 9:69038197-69038222; SpCas9
ggtatttgaggagttgggtggg

SEQ ID NO: 28225 - DNA, 21 bp, Artificial Sequence
  Synthetic: FXN 3 forward 9:69038198-69038222; SpCas9
gtatttgaggagttgggtggg

SEQ ID NO: 28226 - DNA, 20 bp, Artificial Sequence
  Synthetic: FXN 3 forward 9:69038199-69038222; SpCas9
tatttgaggagttgggtggg

SEQ ID NO: 28227 - DNA, 19 bp, Artificial Sequence
  Synthetic: FXN 3 forward 9:69038200-69038222; SpCas9
atttgaggagttgggtggg

SEQ ID NO: 28228 - DNA, 18 bp, Artificial Sequence
  Synthetic: FXN 3 forward 9:69038201-69038222; SpCas9
tttgaggagttgggtggg

SEQ ID NO: 28229 - DNA, 25 bp, Artificial Sequence
  Synthetic: FXN 3 forward 9:69038197-69038225; SpCas9
ggtatttgaggagttgggtgggtgg

SEQ ID NO: 28230 - DNA, 24 bp, Artificial Sequence
  Synthetic: FXN 3 forward 9:69038198-69038225; SpCas9
gtatttgaggagttgggtgggtgg

SEQ ID NO: 28231 - DNA, 23 bp, Artificial Sequence
  Synthetic: FXN 3 forward 9:69038199-69038225; SpCas9
tatttgaggagttgggtgggtgg

SEQ ID NO: 28232 - DNA, 22 bp, Artificial Sequence
  Synthetic: FXN 3 forward 9:69038200-69038225; SpCas9
atttgaggagttgggtgggtgg

SEQ ID NO: 28233 - DNA, 21 bp, Artificial Sequence
  Synthetic: FXN 3 forward 9:69038201-69038225; SpCas9
tttgaggagttgggtgggtgg

SEQ ID NO: 28234 - DNA, 20 bp, Artificial Sequence
  Synthetic: FXN 3 forward 9:69038202-69038225; SpCas9
ttgaggagttgggtgggtgg

SEQ ID NO: 28235 - DNA, 19 bp, Artificial Sequence
  Synthetic: FXN 3 forward 9:69038203-69038225; SpCas9
tgaggagttgggtgggtgg

SEQ ID NO: 28236 - DNA, 18 bp, Artificial Sequence
  Synthetic: FXN 3 forward 9:69038204-69038225; SpCas9
gaggagttgggtgggtgg

SEQ ID NO: 28237 - DNA, 25 bp, Artificial Sequence
  Synthetic: FXN 3 forward 9:69038200-69038228; SpCas9
atttgaggagttgggtgggtggcag

SEQ ID NO: 28238 - DNA, 24 bp, Artificial Sequence
  Synthetic: FXN 3 forward 9:69038201-69038228; SpCas9
tttgaggagttgggtgggtggcag

SEQ ID NO: 28239 - DNA, 23 bp, Artificial Sequence
  Synthetic: FXN 3 forward 9:69038202-69038228; SpCas9
ttgaggagttgggtgggtggcag

SEQ ID NO: 28240 - DNA, 22 bp, Artificial Sequence
  Synthetic: FXN 3 forward 9:69038203-69038228; SpCas9
tgaggagttgggtgggtggcag

SEQ ID NO: 28241 - DNA, 21 bp, Artificial Sequence
  Synthetic: FXN 3 forward 9:69038204-69038228; SpCas9
gaggagttgggtgggtggcag

SEQ ID NO: 28242 - DNA, 20 bp, Artificial Sequence
  Synthetic: FXN 3 forward 9:69038205-69038228; SpCas9
aggagttgggtgggtggcag

SEQ ID NO: 28243 - DNA, 19 bp, Artificial Sequence
  Synthetic: FXN 3 forward 9:69038206-69038228; SpCas9
ggagttgggtgggtggcag

SEQ ID NO: 28244 - DNA, 18 bp, Artificial Sequence
  Synthetic: FXN 3 forward 9:69038207-69038228; SpCas9
gagttgggtgggtggcag

SEQ ID NO: 28245 - DNA, 25 bp, Artificial Sequence
  Synthetic: FXN 3 forward 9:69038207-69038235; SpCas9
gagttgggtgggtggcagtggcaac

SEQ ID NO: 28246 - DNA, 24 bp, Artificial Sequence
  Synthetic: FXN 3 forward 9:69038208-69038235; SpCas9
agttgggtgggtggcagtggcaac

SEQ ID NO: 28247 - DNA, 23 bp, Artificial Sequence
  Synthetic: FXN 3 forward 9:69038209-69038235; SpCas9
gttgggtgggtggcagtggcaac

SEQ ID NO: 28248 - DNA, 22 bp, Artificial Sequence
  Synthetic: FXN 3 forward 9:69038210-69038235; SpCas9
ttgggtgggtggcagtggcaac

SEQ ID NO: 28249 - DNA, 21 bp, Artificial Sequence
  Synthetic: FXN 3 forward 9:69038211-69038235; SpCas9
tgggtgggtggcagtggcaac

SEQ ID NO: 28250 - DNA, 20 bp, Artificial Sequence
  Synthetic: FXN 3 forward 9:69038212-69038235; SpCas9
gggtgggtggcagtggcaac

SEQ ID NO: 28251 - DNA, 19 bp, Artificial Sequence
  Synthetic: FXN 3 forward 9:69038213-69038235; SpCas9
ggtgggtggcagtggcaac

SEQ ID NO: 28252 - DNA, 18 bp, Artificial Sequence
  Synthetic: FXN 3 forward 9:69038214-69038235; SpCas9
gtgggtggcagtggcaac

SEQ ID NO: 28253 - DNA, 25 bp, Artificial Sequence
  Synthetic: FXN 3 forward 9:69038208-69038236; SpCas9
agttgggtgggtggcagtggcaact

SEQ ID NO: 28254 - DNA, 24 bp, Artificial Sequence
  Synthetic: FXN 3 forward 9:69038209-69038236; SpCas9
gttgggtgggtggcagtggcaact

SEQ ID NO: 28255 - DNA, 23 bp, Artificial Sequence
  Synthetic: FXN 3 forward 9:69038210-69038236; SpCas9
ttgggtgggtggcagtggcaact

SEQ ID NO: 28256 - DNA, 22 bp, Artificial Sequence
  Synthetic: FXN 3 forward 9:69038211-69038236; SpCas9
tgggtgggtggcagtggcaact

SEQ ID NO: 28257 - DNA, 21 bp, Artificial Sequence
  Synthetic: FXN 3 forward 9:69038212-69038236; SpCas9
gggtgggtggcagtggcaact

SEQ ID NO: 28258 - DNA, 20 bp, Artificial Sequence
  Synthetic: FXN 3 forward 9:69038213-69038236; SpCas9
ggtgggtggcagtggcaact

SEQ ID NO: 28259 - DNA, 19 bp, Artificial Sequence
  Synthetic: FXN 3 forward 9:69038214-69038236; SpCas9
gtgggtggcagtggcaact

SEQ ID NO: 28260 - DNA, 18 bp, Artificial Sequence
  Synthetic: FXN 3 forward 9:69038215-69038236; SpCas9
tgggtggcagtggcaact

SEQ ID NO: 28261 - DNA, 25 bp, Artificial Sequence
  Synthetic: FXN 3 forward 9:69038209-69038237; SpCas9
gttgggtgggtggcagtggcaactg

SEQ ID NO: 28262 - DNA, 24 bp, Artificial Sequence
  Synthetic: FXN 3 forward 9:69038210-69038237; SpCas9
ttgggtgggtggcagtggcaactg

SEQ ID NO: 28263 - DNA, 23 bp, Artificial Sequence
  Synthetic: FXN 3 forward 9:69038211-69038237; SpCas9
tgggtgggtggcagtggcaactg

SEQ ID NO: 28264 - DNA, 22 bp, Artificial Sequence
  Synthetic: FXN 3 forward 9:69038212-69038237; SpCas9
gggtgggtggcagtggcaactg

SEQ ID NO: 28265 - DNA, 21 bp, Artificial Sequence
  Synthetic: FXN 3 forward 9:69038213-69038237; SpCas9
ggtgggtggcagtggcaactg

SEQ ID NO: 28266 - DNA, 20 bp, Artificial Sequence
  Synthetic: FXN 3 forward 9:69038214-69038237; SpCas9
gtgggtggcagtggcaactg

SEQ ID NO: 28267 - DNA, 19 bp, Artificial Sequence
  Synthetic: FXN 3 forward 9:69038215-69038237; SpCas9
tgggtggcagtggcaactg

SEQ ID NO: 28268 - DNA, 18 bp, Artificial Sequence
  Synthetic: FXN 3 forward 9:69038216-69038237; SpCas9
gggtggcagtggcaactg

SEQ ID NO: 28269 - DNA, 25 bp, Artificial Sequence
  Synthetic: FXN 3 reverse 9:69038231-69038259; SpCas9
aaataattaaacaggatggtggccc

SEQ ID NO: 28270 - DNA, 24 bp, Artificial Sequence
  Synthetic: FXN 3 reverse 9:69038232-69038259; SpCas9
aataattaaacaggatggtggccc

SEQ ID NO: 28271 - DNA, 23 bp, Artificial Sequence
  Synthetic: FXN 3 reverse 9:69038233-69038259; SpCas9
ataattaaacaggatggtggccc

SEQ ID NO: 28272 - DNA, 22 bp, Artificial Sequence
  Synthetic: FXN 3 reverse 9:69038234-69038259; SpCas9
taattaaacaggatggtggccc

SEQ ID NO: 28273 - DNA, 21 bp, Artificial Sequence
  Synthetic: FXN 3 reverse 9:69038235-69038259; SpCas9
aattaaacaggatggtggccc

SEQ ID NO: 28274 - DNA, 20 bp, Artificial Sequence
  Synthetic: FXN 3 reverse 9:69038236-69038259; SpCas9
attaaacaggatggtggccc

SEQ ID NO: 28275 - DNA, 19 bp, Artificial Sequence
  Synthetic: FXN 3 reverse 9:69038237-69038259; SpCas9
ttaaacaggatggtggccc

SEQ ID NO: 28276 - DNA, 18 bp, Artificial Sequence
  Synthetic: FXN 3 reverse 9:69038238-69038259; SpCas9
taaacaggatggtggccc

SEQ ID NO: 28277 - DNA, 25 bp, Artificial Sequence
  Synthetic: FXN 3 forward 9:69038236-69038264; SpCas9
gccaccatcctgtttaattatttta

SEQ ID NO: 28278 - DNA, 24 bp, Artificial Sequence
  Synthetic: FXN 3 forward 9:69038237-69038264; SpCas9
ccaccatcctgtttaattatttta

SEQ ID NO: 28279 - DNA, 23 bp, Artificial Sequence
  Synthetic: FXN 3 forward 9:69038238-69038264; SpCas9
caccatcctgtttaattatttta

SEQ ID NO: 28280 - DNA, 22 bp, Artificial Sequence
  Synthetic: FXN 3 forward 9:69038239-69038264; SpCas9
accatcctgtttaattatttta

SEQ ID NO: 28281 - DNA, 21 bp, Artificial Sequence
  Synthetic: FXN 3 forward 9:69038240-69038264; SpCas9
ccatcctgtttaattatttta

SEQ ID NO: 28282 - DNA, 20 bp, Artificial Sequence
  Synthetic: FXN 3 forward 9:69038241-69038264; SpCas9
catcctgtttaattatttta

SEQ ID NO: 28283 - DNA, 19 bp, Artificial Sequence
  Synthetic: FXN 3 forward 9:69038242-69038264; SpCas9
atcctgtttaattatttta

SEQ ID NO: 28284 - DNA, 18 bp, Artificial Sequence
  Synthetic: FXN 3 forward 9:69038243-69038264; SpCas9
tcctgtttaattatttta

SEQ ID NO: 28285 - DNA, 25 bp, Artificial Sequence
  Synthetic: FXN 3 reverse 9:69038237-69038265; SpCas9
gctttaaaataattaaacaggatgg

SEQ ID NO: 28286 - DNA, 24 bp, Artificial Sequence
  Synthetic: FXN 3 reverse 9:69038238-69038265; SpCas9
ctttaaaataattaaacaggatgg

SEQ ID NO: 28287 - DNA, 23 bp, Artificial Sequence
  Synthetic: FXN 3 reverse 9:69038239-69038265; SpCas9
tttaaaataattaaacaggatgg

SEQ ID NO: 28288 - DNA, 22 bp, Artificial Sequence
  Synthetic: FXN 3 reverse 9:69038240-69038265; SpCas9
ttaaaataattaaacaggatgg

SEQ ID NO: 28289 - DNA, 21 bp, Artificial Sequence
  Synthetic: FXN 3 reverse 9:69038241-69038265; SpCas9
taaaataattaaacaggatgg

SEQ ID NO: 28290 - DNA, 20 bp, Artificial Sequence
  Synthetic: FXN 3 reverse 9:69038242-69038265; SpCas9
aaaataattaaacaggatgg

SEQ ID NO: 28291 - DNA, 19 bp, Artificial Sequence
  Synthetic: FXN 3 reverse 9:69038243-69038265; SpCas9
aaataattaaacaggatgg

SEQ ID NO: 28292 - DNA, 18 bp, Artificial Sequence
  Synthetic: FXN 3 reverse 9:69038244-69038265; SpCas9
aataattaaacaggatgg

SEQ ID NO: 28293 - DNA, 25 bp, Artificial Sequence
  Synthetic: FXN 3 reverse 9:69038240-69038268; SpCas9
agggctttaaaataattaaacagga

SEQ ID NO: 28294 - DNA, 24 bp, Artificial Sequence
  Synthetic: FXN 3 reverse 9:69038241-69038268; SpCas9
gggctttaaaataattaaacagga

SEQ ID NO: 28295 - DNA, 23 bp, Artificial Sequence
  Synthetic: FXN 3 reverse 9:69038242-69038268; SpCas9
ggctttaaaataattaaacagga

SEQ ID NO: 28296 - DNA, 22 bp, Artificial Sequence
  Synthetic: FXN 3 reverse 9:69038243-69038268; SpCas9
gctttaaaataattaaacagga

SEQ ID NO: 28297 - DNA, 21 bp, Artificial Sequence
  Synthetic: FXN 3 reverse 9:69038244-69038268; SpCas9
ctttaaaataattaaacagga

SEQ ID NO: 28298 - DNA, 20 bp, Artificial Sequence
  Synthetic: FXN 3 reverse 9:69038245-69038268; SpCas9
tttaaaataattaaacagga

SEQ ID NO: 28299 - DNA, 19 bp, Artificial Sequence
  Synthetic: FXN 3 reverse 9:69038246-69038268; SpCas9
ttaaaataattaaacagga

SEQ ID NO: 28300 - DNA, 18 bp, Artificial Sequence
  Synthetic: FXN 3 reverse 9:69038247-69038268; SpCas9
taaaataattaaacagga

SEQ ID NO: 28301 - DNA, 25 bp, Artificial Sequence
  Synthetic: FXN 3 reverse 9:69038244-69038272; SpCas9
agtcagggctttaaaataattaaac

SEQ ID NO: 28302 - DNA, 24 bp, Artificial Sequence
  Synthetic: FXN 3 reverse 9:69038245-69038272; SpCas9
gtcagggctttaaaataattaaac

SEQ ID NO: 28303 - DNA, 23 bp, Artificial Sequence
  Synthetic: FXN 3 reverse 9:69038246-69038272; SpCas9
tcagggctttaaaataattaaac

SEQ ID NO: 28304 - DNA, 22 bp, Artificial Sequence
  Synthetic: FXN 3 reverse 9:69038247-69038272; SpCas9
cagggctttaaaataattaaac

SEQ ID NO: 28305 - DNA, 21 bp, Artificial Sequence
  Synthetic: FXN 3 reverse 9:69038248-69038272; SpCas9
agggctttaaaataattaaac

SEQ ID NO: 28306 - DNA, 20 bp, Artificial Sequence
  Synthetic: FXN 3 reverse 9:69038249-69038272; SpCas9
gggctttaaaataattaaac

SEQ ID NO: 28307 - DNA, 19 bp, Artificial Sequence
  Synthetic: FXN 3 reverse 9:69038250-69038272; SpCas9
ggctttaaaataattaaac

SEQ ID NO: 28308 - DNA, 18 bp, Artificial Sequence
  Synthetic: FXN 3 reverse 9:69038251-69038272; SpCas9
gctttaaaataattaaac

SEQ ID NO: 28309 - DNA, 25 bp, Artificial Sequence
  Synthetic: FXN 3 reverse 9:69038245-69038273; SpCas9
cagtcagggctttaaaataattaaa

SEQ ID NO: 28310 - DNA, 24 bp, Artificial Sequence
  Synthetic: FXN 3 reverse 9:69038246-69038273; SpCas9
agtcagggctttaaaataattaaa

SEQ ID NO: 28311 - DNA, 23 bp, Artificial Sequence
  Synthetic: FXN 3 reverse 9:69038247-69038273; SpCas9
gtcagggctttaaaataattaaa

SEQ ID NO: 28312 - DNA, 22 bp, Artificial Sequence
  Synthetic: FXN 3 reverse 9:69038248-69038273; SpCas9
tcagggctttaaaataattaaa

SEQ ID NO: 28313 - DNA, 21 bp, Artificial Sequence
  Synthetic: FXN 3 reverse 9:69038249-69038273; SpCas9
cagggctttaaaataattaaa

SEQ ID NO: 28314 - DNA, 20 bp, Artificial Sequence
  Synthetic: FXN 3 reverse 9:69038250-69038273; SpCas9
agggctttaaaataattaaa

SEQ ID NO: 28315 - DNA, 19 bp, Artificial Sequence
  Synthetic: FXN 3 reverse 9:69038251-69038273; SpCas9
gggctttaaaataattaaa

SEQ ID NO: 28316 - DNA, 18 bp, Artificial Sequence
  Synthetic: FXN 3 reverse 9:69038252-69038273; SpCas9
ggctttaaaataattaaa

SEQ ID NO: 28317 - DNA, 25 bp, Artificial Sequence
  Synthetic: FXN 3 forward 9:69038251-69038279; SpCas9
aattattttaaagccctgactgtcc

SEQ ID NO: 28318 - DNA, 24 bp, Artificial Sequence
  Synthetic: FXN 3 forward 9:69038252-69038279; SpCas9
attattttaaagccctgactgtcc

SEQ ID NO: 28319 - DNA, 23 bp, Artificial Sequence
  Synthetic: FXN 3 forward 9:69038253-69038279; SpCas9
ttattttaaagccctgactgtcc

SEQ ID NO: 28320 - DNA, 22 bp, Artificial Sequence
  Synthetic: FXN 3 forward 9:69038254-69038279; SpCas9
tattttaaagccctgactgtcc

SEQ ID NO: 28321 - DNA, 21 bp, Artificial Sequence
  Synthetic: FXN 3 forward 9:69038255-69038279; SpCas9
attttaaagccctgactgtcc

SEQ ID NO: 28322 - DNA, 20 bp, Artificial Sequence
  Synthetic: FXN 3 forward 9:69038256-69038279; SpCas9
ttttaaagccctgactgtcc

SEQ ID NO: 28323 - DNA, 19 bp, Artificial Sequence
  Synthetic: FXN 3 forward 9:69038257-69038279; SpCas9
tttaaagccctgactgtcc

SEQ ID NO: 28324 - DNA, 18 bp, Artificial Sequence
  Synthetic: FXN 3 forward 9:69038258-69038279; SpCas9
ttaaagccctgactgtcc

SEQ ID NO: 28325 - DNA, 25 bp, Artificial Sequence
  Synthetic: FXN 3 forward 9:69038263-69038291; SpCas9
gccctgactgtcctggattgaccct

SEQ ID NO: 28326 - DNA, 24 bp, Artificial Sequence
  Synthetic: FXN 3 forward 9:69038264-69038291; SpCas9
ccctgactgtcctggattgaccct

SEQ ID NO: 28327 - DNA, 23 bp, Artificial Sequence
  Synthetic: FXN 3 forward 9:69038265-69038291; SpCas9
cctgactgtcctggattgaccct

SEQ ID NO: 28328 - DNA, 22 bp, Artificial Sequence
  Synthetic: FXN 3 forward 9:69038266-69038291; SpCas9
ctgactgtcctggattgaccct

SEQ ID NO: 28329 - DNA, 21 bp, Artificial Sequence
  Synthetic: FXN 3 forward 9:69038267-69038291; SpCas9
tgactgtcctggattgaccct

SEQ ID NO: 28330 - DNA, 20 bp, Artificial Sequence
  Synthetic: FXN 3 forward 9:69038268-69038291; SpCas9
gactgtcctggattgaccct

SEQ ID NO: 28331 - DNA, 19 bp, Artificial Sequence
  Synthetic: FXN 3 forward 9:69038269-69038291; SpCas9
actgtcctggattgaccct

SEQ ID NO: 28332 - DNA, 18 bp, Artificial Sequence
  Synthetic: FXN 3 forward 9:69038270-69038291; SpCas9
ctgtcctggattgaccct

SEQ ID NO: 28333 - DNA, 25 bp, Artificial Sequence
  Synthetic: FXN 3 reverse 9:69038264-69038292; SpCas9
gcttagggtcaatccaggacagtca

SEQ ID NO: 28334 - DNA, 24 bp, Artificial Sequence
  Synthetic: FXN 3 reverse 9:69038265-69038292; SpCas9
cttagggtcaatccaggacagtca

SEQ ID NO: 28335 - DNA, 23 bp, Artificial Sequence
  Synthetic: FXN 3 reverse 9:69038266-69038292; SpCas9
ttagggtcaatccaggacagtca

SEQ ID NO: 28336 - DNA, 22 bp, Artificial Sequence
  Synthetic: FXN 3 reverse 9:69038267-69038292; SpCas9
tagggtcaatccaggacagtca

SEQ ID NO: 28337 - DNA, 21 bp, Artificial Sequence
  Synthetic: FXN 3 reverse 9:69038268-69038292; SpCas9
agggtcaatccaggacagtca

SEQ ID NO: 28338 - DNA, 20 bp, Artificial Sequence
  Synthetic: FXN 3 reverse 9:69038269-69038292; SpCas9
gggtcaatccaggacagtca

SEQ ID NO: 28339 - DNA, 19 bp, Artificial Sequence
  Synthetic: FXN 3 reverse 9:69038270-69038292; SpCas9
ggtcaatccaggacagtca

SEQ ID NO: 28340 - DNA, 18 bp, Artificial Sequence
  Synthetic: FXN 3 reverse 9:69038271-69038292; SpCas9
gtcaatccaggacagtca

SEQ ID NO: 28341 - DNA, 25 bp, Artificial Sequence
  Synthetic: FXN 3 reverse 9:69038265-69038293; SpCas9
agcttagggtcaatccaggacagtc

SEQ ID NO: 28342 - DNA, 24 bp, Artificial Sequence
  Synthetic: FXN 3 reverse 9:69038266-69038293; SpCas9
gcttagggtcaatccaggacagtc

SEQ ID NO: 28343 - DNA, 23 bp, Artificial Sequence
  Synthetic: FXN 3 reverse 9:69038267-69038293; SpCas9
cttagggtcaatccaggacagtc

SEQ ID NO: 28344 - DNA, 22 bp, Artificial Sequence
  Synthetic: FXN 3 reverse 9:69038268-69038293; SpCas9
ttagggtcaatccaggacagtc

SEQ ID NO: 28345 - DNA, 21 bp, Artificial Sequence
  Synthetic: FXN 3 reverse 9:69038269-69038293; SpCas9
tagggtcaatccaggacagtc

SEQ ID NO: 28346 - DNA, 20 bp, Artificial Sequence
  Synthetic: FXN 3 reverse 9:69038270-69038293; SpCas9
agggtcaatccaggacagtc

SEQ ID NO: 28347 - DNA, 19 bp, Artificial Sequence
  Synthetic: FXN 3 reverse 9:69038271-69038293; SpCas9
gggtcaatccaggacagtc

SEQ ID NO: 28348 - DNA, 18 bp, Artificial Sequence
  Synthetic: FXN 3 reverse 9:69038272-69038293; SpCas9
ggtcaatccaggacagtc

SEQ ID NO: 28349 - DNA, 25 bp, Artificial Sequence
  Synthetic: FXN 3 reverse 9:69038266-69038294; SpCas9
gagcttagggtcaatccaggacagt

SEQ ID NO: 28350 - DNA, 24 bp, Artificial Sequence
  Synthetic: FXN 3 reverse 9:69038267-69038294; SpCas9
agcttagggtcaatccaggacagt

SEQ ID NO: 28351 - DNA, 23 bp, Artificial Sequence
  Synthetic: FXN 3 reverse 9:69038268-69038294; SpCas9
gcttagggtcaatccaggacagt

SEQ ID NO: 28352 - DNA, 22 bp, Artificial Sequence
  Synthetic: FXN 3 reverse 9:69038269-69038294; SpCas9
cttagggtcaatccaggacagt

SEQ ID NO: 28353 - DNA, 21 bp, Artificial Sequence
  Synthetic: FXN 3 reverse 9:69038270-69038294; SpCas9
ttagggtcaatccaggacagt

SEQ ID NO: 28354 - DNA, 20 bp, Artificial Sequence
  Synthetic: FXN 3 reverse 9:69038271-69038294; SpCas9
tagggtcaatccaggacagt

SEQ ID NO: 28355 - DNA, 19 bp, Artificial Sequence
  Synthetic: FXN 3 reverse 9:69038272-69038294; SpCas9
agggtcaatccaggacagt

SEQ ID NO: 28356 - DNA, 18 bp, Artificial Sequence
  Synthetic: FXN 3 reverse 9:69038273-69038294; SpCas9
gggtcaatccaggacagt

SEQ ID NO: 28357 - DNA, 25 bp, Artificial Sequence
  Synthetic: FXN 3 reverse 9:69038270-69038298; SpCas9
gggggagcttagggtcaatccagga

SEQ ID NO: 28358 - DNA, 24 bp, Artificial Sequence
  Synthetic: FXN 3 reverse 9:69038271-69038298; SpCas9
ggggagcttagggtcaatccagga

SEQ ID NO: 28359 - DNA, 23 bp, Artificial Sequence
  Synthetic: FXN 3 reverse 9:69038272-69038298; SpCas9
gggagcttagggtcaatccagga

SEQ ID NO: 28360 - DNA, 22 bp, Artificial Sequence
  Synthetic: FXN 3 reverse 9:69038273-69038298; SpCas9
ggagcttagggtcaatccagga

SEQ ID NO: 28361 - DNA, 21 bp, Artificial Sequence
  Synthetic: FXN 3 reverse 9:69038274-69038298; SpCas9
gagcttagggtcaatccagga

SEQ ID NO: 28362 - DNA, 20 bp, Artificial Sequence
  Synthetic: FXN 3 reverse 9:69038275-69038298; SpCas9
agcttagggtcaatccagga

SEQ ID NO: 28363 - DNA, 19 bp, Artificial Sequence
  Synthetic: FXN 3 reverse 9:69038276-69038298; SpCas9
gcttagggtcaatccagga

SEQ ID NO: 28364 - DNA, 18 bp, Artificial Sequence
  Synthetic: FXN 3 reverse 9:69038277-69038298; SpCas9
cttagggtcaatccagga

SEQ ID NO: 28365 - DNA, 25 bp, Artificial Sequence
  Synthetic: FXN 3 forward 9:69038273-69038301; SpCas9
tcctggattgaccctaagctccccc

SEQ ID NO: 28366 - DNA, 24 bp, Artificial Sequence
  Synthetic: FXN 3 forward 9:69038274-69038301; SpCas9
cctggattgaccctaagctccccc

SEQ ID NO: 28367 - DNA, 23 bp, Artificial Sequence
  Synthetic: FXN 3 forward 9:69038275-69038301; SpCas9
ctggattgaccctaagctccccc

SEQ ID NO: 28368 - DNA, 22 bp, Artificial Sequence
  Synthetic: FXN 3 forward 9:69038276-69038301; SpCas9
tggattgaccctaagctccccc

SEQ ID NO: 28369 - DNA, 21 bp, Artificial Sequence
  Synthetic: FXN 3 forward 9:69038277-69038301; SpCas9
ggattgaccctaagctccccc

SEQ ID NO: 28370 - DNA, 20 bp, Artificial Sequence
  Synthetic: FXN 3 forward 9:69038278-69038301; SpCas9
gattgaccctaagctccccc

SEQ ID NO: 28371 - DNA, 19 bp, Artificial Sequence
  Synthetic: FXN 3 forward 9:69038279-69038301; SpCas9
attgaccctaagctccccc

SEQ ID NO: 28372 - DNA, 18 bp, Artificial Sequence
  Synthetic: FXN 3 forward 9:69038280-69038301; SpCas9
ttgaccctaagctccccc

SEQ ID NO: 28373 - DNA, 25 bp, Artificial Sequence
  Synthetic: FXN 3 reverse 9:69038274-69038302; SpCas9
accagggggagcttagggtcaatcc

SEQ ID NO: 28374 - DNA, 24 bp, Artificial Sequence
  Synthetic: FXN 3 reverse 9:69038275-69038302; SpCas9
ccagggggagcttagggtcaatcc

SEQ ID NO: 28375 - DNA, 23 bp, Artificial Sequence
  Synthetic: FXN 3 reverse 9:69038276-69038302; SpCas9
cagggggagcttagggtcaatcc

SEQ ID NO: 28376 - DNA, 22 bp, Artificial Sequence
  Synthetic: FXN 3 reverse 9:69038277-69038302; SpCas9
agggggagcttagggtcaatcc

SEQ ID NO: 28377 - DNA, 21 bp, Artificial Sequence
  Synthetic: FXN 3 reverse 9:69038278-69038302; SpCas9
gggggagcttagggtcaatcc

SEQ ID NO: 28378 - DNA, 20 bp, Artificial Sequence
  Synthetic: FXN 3 reverse 9:69038279-69038302; SpCas9
ggggagcttagggtcaatcc

SEQ ID NO: 28379 - DNA, 19 bp, Artificial Sequence
  Synthetic: FXN 3 reverse 9:69038280-69038302; SpCas9
gggagcttagggtcaatcc

SEQ ID NO: 28380 - DNA, 18 bp, Artificial Sequence
  Synthetic: FXN 3 reverse 9:69038281-69038302; SpCas9
ggagcttagggtcaatcc

SEQ ID NO: 28381 - DNA, 25 bp, Artificial Sequence
  Synthetic: FXN 3 reverse 9:69038275-69038303; SpCas9
gaccagggggagcttagggtcaatc

SEQ ID NO: 28382 - DNA, 24 bp, Artificial Sequence
  Synthetic: FXN 3 reverse 9:69038276-69038303; SpCas9
accagggggagcttagggtcaatc

SEQ ID NO: 28383 - DNA, 23 bp, Artificial Sequence
  Synthetic: FXN 3 reverse 9:69038277-69038303; SpCas9
ccagggggagcttagggtcaatc

SEQ ID NO: 28384 - DNA, 22 bp, Artificial Sequence
  Synthetic: FXN 3 reverse 9:69038278-69038303; SpCas9
cagggggagcttagggtcaatc

SEQ ID NO: 28385 - DNA, 21 bp, Artificial Sequence
  Synthetic: FXN 3 reverse 9:69038279-69038303; SpCas9
agggggagcttagggtcaatc

SEQ ID NO: 28386 - DNA, 20 bp, Artificial Sequence
  Synthetic: FXN 3 reverse 9:69038280-69038303; SpCas9
gggggagcttagggtcaatc

SEQ ID NO: 28387 - DNA, 19 bp, Artificial Sequence
  Synthetic: FXN 3 reverse 9:69038281-69038303; SpCas9
ggggagcttagggtcaatc

SEQ ID NO: 28388 - DNA, 18 bp, Artificial Sequence
  Synthetic: FXN 3 reverse 9:69038282-69038303; SpCas9
gggagcttagggtcaatc

SEQ ID NO: 28389 - DNA, 25 bp, Artificial Sequence
  Synthetic: FXN 3 reverse 9:69038284-69038312; SpCas9
aattttggagaccagggggagctta

SEQ ID NO: 28390 - DNA, 24 bp, Artificial Sequence
  Synthetic: FXN 3 reverse 9:69038285-69038312; SpCas9
attttggagaccagggggagctta

SEQ ID NO: 28391 - DNA, 23 bp, Artificial Sequence
  Synthetic: FXN 3 reverse 9:69038286-69038312; SpCas9
ttttggagaccagggggagctta

SEQ ID NO: 28392 - DNA, 22 bp, Artificial Sequence
  Synthetic: FXN 3 reverse 9:69038287-69038312; SpCas9
tttggagaccagggggagctta

SEQ ID NO: 28393 - DNA, 21 bp, Artificial Sequence
  Synthetic: FXN 3 reverse 9:69038288-69038312; SpCas9
ttggagaccagggggagctta

SEQ ID NO: 28394 - DNA, 20 bp, Artificial Sequence
  Synthetic: FXN 3 reverse 9:69038289-69038312; SpCas9
tggagaccagggggagctta

SEQ ID NO: 28395 - DNA, 19 bp, Artificial Sequence
  Synthetic: FXN 3 reverse 9:69038290-69038312; SpCas9
ggagaccagggggagctta

SEQ ID NO: 28396 - DNA, 18 bp, Artificial Sequence
  Synthetic: FXN 3 reverse 9:69038291-69038312; SpCas9
gagaccagggggagctta

SEQ ID NO: 28397 - DNA, 25 bp, Artificial Sequence
  Synthetic: FXN 3 reverse 9:69038285-69038313; SpCas9
gaattttggagaccagggggagctt

SEQ ID NO: 28398 - DNA, 24 bp, Artificial Sequence
  Synthetic: FXN 3 reverse 9:69038286-69038313; SpCas9
aattttggagaccagggggagctt

SEQ ID NO: 28399 - DNA, 23 bp, Artificial Sequence
  Synthetic: FXN 3 reverse 9:69038287-69038313; SpCas9
attttggagaccagggggagctt

SEQ ID NO: 28400 - DNA, 22 bp, Artificial Sequence
  Synthetic: FXN 3 reverse 9:69038288-69038313; SpCas9
ttttggagaccagggggagctt

SEQ ID NO: 28401 - DNA, 21 bp, Artificial Sequence
  Synthetic: FXN 3 reverse 9:69038289-69038313; SpCas9
tttggagaccagggggagctt

SEQ ID NO: 28402 - DNA, 20 bp, Artificial Sequence
  Synthetic: FXN 3 reverse 9:69038290-69038313; SpCas9
ttggagaccagggggagctt

SEQ ID NO: 28403 - DNA, 19 bp, Artificial Sequence
  Synthetic: FXN 3 reverse 9:69038291-69038313; SpCas9
tggagaccagggggagctt

SEQ ID NO: 28404 - DNA, 18 bp, Artificial Sequence
  Synthetic: FXN 3 reverse 9:69038292-69038313; SpCas9
ggagaccagggggagctt

SEQ ID NO: 28405 - DNA, 25 bp, Artificial Sequence
  Synthetic: FXN 3 reverse 9:69038286-69038314; SpCas9
tgaattttggagaccagggggagct

SEQ ID NO: 28406 - DNA, 24 bp, Artificial Sequence
  Synthetic: FXN 3 reverse 9:69038287-69038314; SpCas9
gaattttggagaccagggggagct

SEQ ID NO: 28407 - DNA, 23 bp, Artificial Sequence
  Synthetic: FXN 3 reverse 9:69038288-69038314; SpCas9
aattttggagaccagggggagct

SEQ ID NO: 28408 - DNA, 22 bp, Artificial Sequence
  Synthetic: FXN 3 reverse 9:69038289-69038314; SpCas9
attttggagaccagggggagct

SEQ ID NO: 28409 - DNA, 21 bp, Artificial Sequence
  Synthetic: FXN 3 reverse 9:69038290-69038314; SpCas9
ttttggagaccagggggagct

SEQ ID NO: 28410 - DNA, 20 bp, Artificial Sequence
  Synthetic: FXN 3 reverse 9:69038291-69038314; SpCas9
tttggagaccagggggagct

SEQ ID NO: 28411 - DNA, 19 bp, Artificial Sequence
  Synthetic: FXN 3 reverse 9:69038292-69038314; SpCas9
ttggagaccagggggagct

SEQ ID NO: 28412 - DNA, 18 bp, Artificial Sequence
  Synthetic: FXN 3 reverse 9:69038293-69038314; SpCas9
tggagaccagggggagct

SEQ ID NO: 28413 - DNA, 25 bp, Artificial Sequence
  Synthetic: FXN 3 forward 9:69038290-69038318; SpCas9
gctccccctggtctccaaaattcat

SEQ ID NO: 28414 - DNA, 24 bp, Artificial Sequence
  Synthetic: FXN 3 forward 9:69038291-69038318; SpCas9
ctccccctggtctccaaaattcat

SEQ ID NO: 28415 - DNA, 23 bp, Artificial Sequence
  Synthetic: FXN 3 forward 9:69038292-69038318; SpCas9
tccccctggtctccaaaattcat

SEQ ID NO: 28416 - DNA, 22 bp, Artificial Sequence
  Synthetic: FXN 3 forward 9:69038293-69038318; SpCas9
ccccctggtctccaaaattcat

SEQ ID NO: 28417 - DNA, 21 bp, Artificial Sequence
  Synthetic: FXN 3 forward 9:69038294-69038318; SpCas9
cccctggtctccaaaattcat

SEQ ID NO: 28418 - DNA, 20 bp, Artificial Sequence
  Synthetic: FXN 3 forward 9:69038295-69038318; SpCas9
ccctggtctccaaaattcat

SEQ ID NO: 28419 - DNA, 19 bp, Artificial Sequence
  Synthetic: FXN 3 forward 9:69038296-69038318; SpCas9
cctggtctccaaaattcat

SEQ ID NO: 28420 - DNA, 18 bp, Artificial Sequence
  Synthetic: FXN 3 forward 9:69038297-69038318; SpCas9
ctggtctccaaaattcat

SEQ ID NO: 28421 - DNA, 25 bp, Artificial Sequence
  Synthetic: FXN 3 reverse 9:69038291-69038319; SpCas9
tctgatgaattttggagaccagggg

SEQ ID NO: 28422 - DNA, 24 bp, Artificial Sequence
  Synthetic: FXN 3 reverse 9:69038292-69038319; SpCas9
ctgatgaattttggagaccagggg

SEQ ID NO: 28423 - DNA, 23 bp, Artificial Sequence
  Synthetic: FXN 3 reverse 9:69038293-69038319; SpCas9
tgatgaattttggagaccagggg

SEQ ID NO: 28424 - DNA, 22 bp, Artificial Sequence
  Synthetic: FXN 3 reverse 9:69038294-69038319; SpCas9
gatgaattttggagaccagggg

SEQ ID NO: 28425 - DNA, 21 bp, Artificial Sequence
  Synthetic: FXN 3 reverse 9:69038295-69038319; SpCas9
atgaattttggagaccagggg

SEQ ID NO: 28426 - DNA, 20 bp, Artificial Sequence
  Synthetic: FXN 3 reverse 9:69038296-69038319; SpCas9
tgaattttggagaccagggg

SEQ ID NO: 28427 - DNA, 19 bp, Artificial Sequence
  Synthetic: FXN 3 reverse 9:69038297-69038319; SpCas9
gaattttggagaccagggg

SEQ ID NO: 28428 - DNA, 18 bp, Artificial Sequence
  Synthetic: FXN 3 reverse 9:69038298-69038319; SpCas9
aattttggagaccagggg

SEQ ID NO: 28429 - DNA, 25 bp, Artificial Sequence
  Synthetic: FXN 3 reverse 9:69038293-69038321; SpCas9
tttctgatgaattttggagaccagg

SEQ ID NO: 28430 - DNA, 24 bp, Artificial Sequence
  Synthetic: FXN 3 reverse 9:69038294-69038321; SpCas9
ttctgatgaattttggagaccagg

SEQ ID NO: 28431 - DNA, 23 bp, Artificial Sequence
  Synthetic: FXN 3 reverse 9:69038295-69038321; SpCas9
tctgatgaattttggagaccagg

SEQ ID NO: 28432 - DNA, 22 bp, Artificial Sequence
  Synthetic: FXN 3 reverse 9:69038296-69038321; SpCas9
ctgatgaattttggagaccagg

SEQ ID NO: 28433 - DNA, 21 bp, Artificial Sequence
  Synthetic: FXN 3 reverse 9:69038297-69038321; SpCas9
tgatgaattttggagaccagg

SEQ ID NO: 28434 - DNA, 20 bp, Artificial Sequence
  Synthetic: FXN 3 reverse 9:69038298-69038321; SpCas9
gatgaattttggagaccagg

SEQ ID NO: 28435 - DNA, 19 bp, Artificial Sequence
  Synthetic: FXN 3 reverse 9:69038299-69038321; SpCas9
atgaattttggagaccagg

SEQ ID NO: 28436 - DNA, 18 bp, Artificial Sequence
  Synthetic: FXN 3 reverse 9:69038300-69038321; SpCas9
tgaattttggagaccagg

SEQ ID NO: 28437 - DNA, 25 bp, Artificial Sequence
  Synthetic: FXN 3 reverse 9:69038294-69038322; SpCas9
gtttctgatgaattttggagaccag

SEQ ID NO: 28438 - DNA, 24 bp, Artificial Sequence
  Synthetic: FXN 3 reverse 9:69038295-69038322; SpCas9
tttctgatgaattttggagaccag

SEQ ID NO: 28439 - DNA, 23 bp, Artificial Sequence
  Synthetic: FXN 3 reverse 9:69038296-69038322; SpCas9
ttctgatgaattttggagaccag

SEQ ID NO: 28440 - DNA, 22 bp, Artificial Sequence
  Synthetic: FXN 3 reverse 9:69038297-69038322; SpCas9
tctgatgaattttggagaccag

SEQ ID NO: 28441 - DNA, 21 bp, Artificial Sequence
  Synthetic: FXN 3 reverse 9:69038298-69038322; SpCas9
ctgatgaattttggagaccag

SEQ ID NO: 28442 - DNA, 20 bp, Artificial Sequence
  Synthetic: FXN 3 reverse 9:69038299-69038322; SpCas9
tgatgaattttggagaccag

SEQ ID NO: 28443 - DNA, 19 bp, Artificial Sequence
  Synthetic: FXN 3 reverse 9:69038300-69038322; SpCas9
gatgaattttggagaccag

SEQ ID NO: 28444 - DNA, 18 bp, Artificial Sequence
  Synthetic: FXN 3 reverse 9:69038301-69038322; SpCas9
atgaattttggagaccag

SEQ ID NO: 28445 - DNA, 25 bp, Artificial Sequence
  Synthetic: FXN 3 reverse 9:69038295-69038323; SpCas9
agtttctgatgaattttggagacca

SEQ ID NO: 28446 - DNA, 24 bp, Artificial Sequence
  Synthetic: FXN 3 reverse 9:69038296-69038323; SpCas9
gtttctgatgaattttggagacca

SEQ ID NO: 28447 - DNA, 23 bp, Artificial Sequence
  Synthetic: FXN 3 reverse 9:69038297-69038323; SpCas9
tttctgatgaattttggagacca

SEQ ID NO: 28448 - DNA, 22 bp, Artificial Sequence
  Synthetic: FXN 3 reverse 9:69038298-69038323; SpCas9
ttctgatgaattttggagacca

SEQ ID NO: 28449 - DNA, 21 bp, Artificial Sequence
  Synthetic: FXN 3 reverse 9:69038299-69038323; SpCas9
tctgatgaattttggagacca

SEQ ID NO: 28450 - DNA, 20 bp, Artificial Sequence
  Synthetic: FXN 3 reverse 9:69038300-69038323; SpCas9
ctgatgaattttggagacca

SEQ ID NO: 28451 - DNA, 19 bp, Artificial Sequence
  Synthetic: FXN 3 reverse 9:69038301-69038323; SpCas9
tgatgaattttggagacca

SEQ ID NO: 28452 - DNA, 18 bp, Artificial Sequence
  Synthetic: FXN 3 reverse 9:69038302-69038323; SpCas9
gatgaattttggagacca

SEQ ID NO: 28453 - DNA, 25 bp, Artificial Sequence
  Synthetic: FXN 3 reverse 9:69038296-69038324; SpCas9
cagtttctgatgaattttggagacc

SEQ ID NO: 28454 - DNA, 24 bp, Artificial Sequence
  Synthetic: FXN 3 reverse 9:69038297-69038324; SpCas9
agtttctgatgaattttggagacc

SEQ ID NO: 28455 - DNA, 23 bp, Artificial Sequence
  Synthetic: FXN 3 reverse 9:69038298-69038324; SpCas9
gtttctgatgaattttggagacc

SEQ ID NO: 28456 - DNA, 22 bp, Artificial Sequence
  Synthetic: FXN 3 reverse 9:69038299-69038324; SpCas9
tttctgatgaattttggagacc

SEQ ID NO: 28457 - DNA, 21 bp, Artificial Sequence
  Synthetic: FXN 3 reverse 9:69038300-69038324; SpCas9
ttctgatgaattttggagacc

SEQ ID NO: 28458 - DNA, 20 bp, Artificial Sequence
  Synthetic: FXN 3 reverse 9:69038301-69038324; SpCas9
tctgatgaattttggagacc

SEQ ID NO: 28459 - DNA, 19 bp, Artificial Sequence
  Synthetic: FXN 3 reverse 9:69038302-69038324; SpCas9
ctgatgaattttggagacc

SEQ ID NO: 28460 - DNA, 18 bp, Artificial Sequence
  Synthetic: FXN 3 reverse 9:69038303-69038324; SpCas9
tgatgaattttggagacc

SEQ ID NO: 28461 - DNA, 25 bp, Artificial Sequence
  Synthetic: FXN 3 reverse 9:69038297-69038325; SpCas9
tcagtttctgatgaattttggagac

SEQ ID NO: 28462 - DNA, 24 bp, Artificial Sequence
  Synthetic: FXN 3 reverse 9:69038298-69038325; SpCas9
cagtttctgatgaattttggagac

SEQ ID NO: 28463 - DNA, 23 bp, Artificial Sequence
  Synthetic: FXN 3 reverse 9:69038299-69038325; SpCas9
agtttctgatgaattttggagac

SEQ ID NO: 28464 - DNA, 22 bp, Artificial Sequence
  Synthetic: FXN 3 reverse 9:69038300-69038325; SpCas9
gtttctgatgaattttggagac

SEQ ID NO: 28465 - DNA, 21 bp, Artificial Sequence
  Synthetic: FXN 3 reverse 9:69038301-69038325; SpCas9
tttctgatgaattttggagac

SEQ ID NO: 28466 - DNA, 20 bp, Artificial Sequence
  Synthetic: FXN 3 reverse 9:69038302-69038325; SpCas9
ttctgatgaattttggagac

SEQ ID NO: 28467 - DNA, 19 bp, Artificial Sequence
  Synthetic: FXN 3 reverse 9:69038303-69038325; SpCas9
tctgatgaattttggagac

SEQ ID NO: 28468 - DNA, 18 bp, Artificial Sequence
  Synthetic: FXN 3 reverse 9:69038304-69038325; SpCas9
ctgatgaattttggagac

SEQ ID NO: 28469 - DNA, 25 bp, Artificial Sequence
  Synthetic: FXN 3 forward 9:69038298-69038326; SpCas9
tggtctccaaaattcatcagaaact

SEQ ID NO: 28470 - DNA, 24 bp, Artificial Sequence
  Synthetic: FXN 3 forward 9:69038299-69038326; SpCas9
ggtctccaaaattcatcagaaact

SEQ ID NO: 28471 - DNA, 23 bp, Artificial Sequence
  Synthetic: FXN 3 forward 9:69038300-69038326; SpCas9
gtctccaaaattcatcagaaact

SEQ ID NO: 28472 - DNA, 22 bp, Artificial Sequence
  Synthetic: FXN 3 forward 9:69038301-69038326; SpCas9
tctccaaaattcatcagaaact

SEQ ID NO: 28473 - DNA, 21 bp, Artificial Sequence
  Synthetic: FXN 3 forward 9:69038302-69038326; SpCas9
ctccaaaattcatcagaaact

SEQ ID NO: 28474 - DNA, 20 bp, Artificial Sequence
  Synthetic: FXN 3 forward 9:69038303-69038326; SpCas9
tccaaaattcatcagaaact

SEQ ID NO: 28475 - DNA, 19 bp, Artificial Sequence
  Synthetic: FXN 3 forward 9:69038304-69038326; SpCas9
ccaaaattcatcagaaact

SEQ ID NO: 28476 - DNA, 18 bp, Artificial Sequence
  Synthetic: FXN 3 forward 9:69038305-69038326; SpCas9
caaaattcatcagaaact

SEQ ID NO: 28477 - DNA, 25 bp, Artificial Sequence
  Synthetic: FXN 3 reverse 9:69038302-69038330; SpCas9
tgaactcagtttctgatgaattttg

SEQ ID NO: 28478 - DNA, 24 bp, Artificial Sequence
  Synthetic: FXN 3 reverse 9:69038303-69038330; SpCas9
gaactcagtttctgatgaattttg

SEQ ID NO: 28479 - DNA, 23 bp, Artificial Sequence
  Synthetic: FXN 3 reverse 9:69038304-69038330; SpCas9
aactcagtttctgatgaattttg

SEQ ID NO: 28480 - DNA, 22 bp, Artificial Sequence
  Synthetic: FXN 3 reverse 9:69038305-69038330; SpCas9
actcagtttctgatgaattttg

SEQ ID NO: 28481 - DNA, 21 bp, Artificial Sequence
  Synthetic: FXN 3 reverse 9:69038306-69038330; SpCas9
ctcagtttctgatgaattttg

SEQ ID NO: 28482 - DNA, 20 bp, Artificial Sequence
  Synthetic: FXN 3 reverse 9:69038307-69038330; SpCas9
tcagtttctgatgaattttg

SEQ ID NO: 28483 - DNA, 19 bp, Artificial Sequence
  Synthetic: FXN 3 reverse 9:69038308-69038330; SpCas9
cagtttctgatgaattttg

SEQ ID NO: 28484 - DNA, 18 bp, Artificial Sequence
  Synthetic: FXN 3 reverse 9:69038309-69038330; SpCas9
agtttctgatgaattttg

SEQ ID NO: 28485 - DNA, 25 bp, Artificial Sequence
  Synthetic: FXN 3 reverse 9:69038304-69038332; SpCas9
agtgaactcagtttctgatgaattt

SEQ ID NO: 28486 - DNA, 24 bp, Artificial Sequence
  Synthetic: FXN 3 reverse 9:69038305-69038332; SpCas9
gtgaactcagtttctgatgaattt

SEQ ID NO: 28487 - DNA, 23 bp, Artificial Sequence
  Synthetic: FXN 3 reverse 9:69038306-69038332; SpCas9
tgaactcagtttctgatgaattt

SEQ ID NO: 28488 - DNA, 22 bp, Artificial Sequence
  Synthetic: FXN 3 reverse 9:69038307-69038332; SpCas9
gaactcagtttctgatgaattt

SEQ ID NO: 28489 - DNA, 21 bp, Artificial Sequence
  Synthetic: FXN 3 reverse 9:69038308-69038332; SpCas9
aactcagtttctgatgaattt

SEQ ID NO: 28490 - DNA, 20 bp, Artificial Sequence
  Synthetic: FXN 3 reverse 9:69038309-69038332; SpCas9
actcagtttctgatgaattt

SEQ ID NO: 28491 - DNA, 19 bp, Artificial Sequence
  Synthetic: FXN 3 reverse 9:69038310-69038332; SpCas9
ctcagtttctgatgaattt

SEQ ID NO: 28492 - DNA, 18 bp, Artificial Sequence
  Synthetic: FXN 3 reverse 9:69038311-69038332; SpCas9
tcagtttctgatgaattt

SEQ ID NO: 28493 - DNA, 25 bp, Artificial Sequence
  Synthetic: FXN 3 forward 9:69038309-69038337; SpCas9
attcatcagaaactgagttcacttg

SEQ ID NO: 28494 - DNA, 24 bp, Artificial Sequence
  Synthetic: FXN 3 forward 9:69038310-69038337; SpCas9
ttcatcagaaactgagttcacttg

SEQ ID NO: 28495 - DNA, 23 bp, Artificial Sequence
  Synthetic: FXN 3 forward 9:69038311-69038337; SpCas9
tcatcagaaactgagttcacttg

SEQ ID NO: 28496 - DNA, 22 bp, Artificial Sequence
  Synthetic: FXN 3 forward 9:69038312-69038337; SpCas9
catcagaaactgagttcacttg

SEQ ID NO: 28497 - DNA, 21 bp, Artificial Sequence
  Synthetic: FXN 3 forward 9:69038313-69038337; SpCas9
atcagaaactgagttcacttg

SEQ ID NO: 28498 - DNA, 20 bp, Artificial Sequence
  Synthetic: FXN 3 forward 9:69038314-69038337; SpCas9
tcagaaactgagttcacttg

SEQ ID NO: 28499 - DNA, 19 bp, Artificial Sequence
  Synthetic: FXN 3 forward 9:69038315-69038337; SpCas9
cagaaactgagttcacttg

SEQ ID NO: 28500 - DNA, 18 bp, Artificial Sequence
  Synthetic: FXN 3 forward 9:69038316-69038337; SpCas9
agaaactgagttcacttg

SEQ ID NO: 28501 - DNA, 25 bp, Artificial Sequence
  Synthetic: FXN 3 forward 9:69038310-69038338; SpCas9
ttcatcagaaactgagttcacttga

SEQ ID NO: 28502 - DNA, 24 bp, Artificial Sequence
  Synthetic: FXN 3 forward 9:69038311-69038338; SpCas9
tcatcagaaactgagttcacttga

SEQ ID NO: 28503 - DNA, 23 bp, Artificial Sequence
  Synthetic: FXN 3 forward 9:69038312-69038338; SpCas9
catcagaaactgagttcacttga

SEQ ID NO: 28504 - DNA, 22 bp, Artificial Sequence
  Synthetic: FXN 3 forward 9:69038313-69038338; SpCas9
atcagaaactgagttcacttga

SEQ ID NO: 28505 - DNA, 21 bp, Artificial Sequence
  Synthetic: FXN 3 forward 9:69038314-69038338; SpCas9
tcagaaactgagttcacttga

SEQ ID NO: 28506 - DNA, 20 bp, Artificial Sequence
  Synthetic: FXN 3 forward 9:69038315-69038338; SpCas9
cagaaactgagttcacttga

SEQ ID NO: 28507 - DNA, 19 bp, Artificial Sequence
  Synthetic: FXN 3 forward 9:69038316-69038338; SpCas9
agaaactgagttcacttga

SEQ ID NO: 28508 - DNA, 18 bp, Artificial Sequence
  Synthetic: FXN 3 forward 9:69038317-69038338; SpCas9
gaaactgagttcacttga

SEQ ID NO: 28509 - DNA, 25 bp, Artificial Sequence
  Synthetic: FXN 3 reverse 9:69038321-69038349; SpCas9
tggggaagaggccttcaagtgaact

SEQ ID NO: 28510 - DNA, 24 bp, Artificial Sequence
  Synthetic: FXN 3 reverse 9:69038322-69038349; SpCas9
ggggaagaggccttcaagtgaact

SEQ ID NO: 28511 - DNA, 23 bp, Artificial Sequence
  Synthetic: FXN 3 reverse 9:69038323-69038349; SpCas9
gggaagaggccttcaagtgaact

SEQ ID NO: 28512 - DNA, 22 bp, Artificial Sequence
  Synthetic: FXN 3 reverse 9:69038324-69038349; SpCas9
ggaagaggccttcaagtgaact

SEQ ID NO: 28513 - DNA, 21 bp, Artificial Sequence
  Synthetic: FXN 3 reverse 9:69038325-69038349; SpCas9
gaagaggccttcaagtgaact

SEQ ID NO: 28514 - DNA, 20 bp, Artificial Sequence
  Synthetic: FXN 3 reverse 9:69038326-69038349; SpCas9
aagaggccttcaagtgaact

SEQ ID NO: 28515 - DNA, 19 bp, Artificial Sequence
  Synthetic: FXN 3 reverse 9:69038327-69038349; SpCas9
agaggccttcaagtgaact

SEQ ID NO: 28516 - DNA, 18 bp, Artificial Sequence
  Synthetic: FXN 3 reverse 9:69038328-69038349; SpCas9
gaggccttcaagtgaact

SEQ ID NO: 28517 - DNA, 25 bp, Artificial Sequence
  Synthetic: FXN 3 reverse 9:69038330-69038358; SpCas9
agaaaagggtggggaagaggccttc

SEQ ID NO: 28518 - DNA, 24 bp, Artificial Sequence
  Synthetic: FXN 3 reverse 9:69038331-69038358; SpCas9
gaaaagggtggggaagaggccttc

SEQ ID NO: 28519 - DNA, 23 bp, Artificial Sequence
  Synthetic: FXN 3 reverse 9:69038332-69038358; SpCas9
aaaagggtggggaagaggccttc

SEQ ID NO: 28520 - DNA, 22 bp, Artificial Sequence
  Synthetic: FXN 3 reverse 9:69038333-69038358; SpCas9
aaagggtggggaagaggccttc

SEQ ID NO: 28521 - DNA, 21 bp, Artificial Sequence
  Synthetic: FXN 3 reverse 9:69038334-69038358; SpCas9
aagggtggggaagaggccttc

SEQ ID NO: 28522 - DNA, 20 bp, Artificial Sequence
  Synthetic: FXN 3 reverse 9:69038335-69038358; SpCas9
agggtggggaagaggccttc

SEQ ID NO: 28523 - DNA, 19 bp, Artificial Sequence
  Synthetic: FXN 3 reverse 9:69038336-69038358; SpCas9
gggtggggaagaggccttc

SEQ ID NO: 28524 - DNA, 18 bp, Artificial Sequence
  Synthetic: FXN 3 reverse 9:69038337-69038358; SpCas9
ggtggggaagaggccttc

SEQ ID NO: 28525 - DNA, 25 bp, Artificial Sequence
  Synthetic: FXN 3 reverse 9:69038338-69038366; SpCas9
aggggtggagaaaagggtggggaag

SEQ ID NO: 28526 - DNA, 24 bp, Artificial Sequence
  Synthetic: FXN 3 reverse 9:69038339-69038366; SpCas9
ggggtggagaaaagggtggggaag

SEQ ID NO: 28527 - DNA, 23 bp, Artificial Sequence
  Synthetic: FXN 3 reverse 9:69038340-69038366; SpCas9
gggtggagaaaagggtggggaag

SEQ ID NO: 28528 - DNA, 22 bp, Artificial Sequence
  Synthetic: FXN 3 reverse 9:69038341-69038366; SpCas9
ggtggagaaaagggtggggaag

SEQ ID NO: 28529 - DNA, 21 bp, Artificial Sequence
  Synthetic: FXN 3 reverse 9:69038342-69038366; SpCas9
gtggagaaaagggtggggaag

SEQ ID NO: 28530 - DNA, 20 bp, Artificial Sequence
  Synthetic: FXN 3 reverse 9:69038343-69038366; SpCas9
tggagaaaagggtggggaag

SEQ ID NO: 28531 - DNA, 19 bp, Artificial Sequence
  Synthetic: FXN 3 reverse 9:69038344-69038366; SpCas9
ggagaaaagggtggggaag

SEQ ID NO: 28532 - DNA, 18 bp, Artificial Sequence
  Synthetic: FXN 3 reverse 9:69038345-69038366; SpCas9
gagaaaagggtggggaag

SEQ ID NO: 28533 - DNA, 25 bp, Artificial Sequence
  Synthetic: FXN 3 reverse 9:69038339-69038367; SpCas9
aaggggtggagaaaagggtggggaa

SEQ ID NO: 28534 - DNA, 24 bp, Artificial Sequence
  Synthetic: FXN 3 reverse 9:69038340-69038367; SpCas9
aggggtggagaaaagggtggggaa

SEQ ID NO: 28535 - DNA, 23 bp, Artificial Sequence
  Synthetic: FXN 3 reverse 9:69038341-69038367; SpCas9
ggggtggagaaaagggtggggaa

SEQ ID NO: 28536 - DNA, 22 bp, Artificial Sequence
  Synthetic: FXN 3 reverse 9:69038342-69038367; SpCas9
gggtggagaaaagggtggggaa

SEQ ID NO: 28537 - DNA, 21 bp, Artificial Sequence
  Synthetic: FXN 3 reverse 9:69038343-69038367; SpCas9
ggtggagaaaagggtggggaa

SEQ ID NO: 28538 - DNA, 20 bp, Artificial Sequence
  Synthetic: FXN 3 reverse 9:69038344-69038367; SpCas9
gtggagaaaagggtggggaa

SEQ ID NO: 28539 - DNA, 19 bp, Artificial Sequence
  Synthetic: FXN 3 reverse 9:69038345-69038367; SpCas9
tggagaaaagggtggggaa

SEQ ID NO: 28540 - DNA, 18 bp, Artificial Sequence
  Synthetic: FXN 3 reverse 9:69038346-69038367; SpCas9
ggagaaaagggtggggaa

SEQ ID NO: 28541 - DNA, 25 bp, Artificial Sequence
  Synthetic: FXN 3 reverse 9:69038341-69038369; SpCas9
gcaaggggtggagaaaagggtgggg

SEQ ID NO: 28542 - DNA, 24 bp, Artificial Sequence
  Synthetic: FXN 3 reverse 9:69038342-69038369; SpCas9
caaggggtggagaaaagggtgggg

SEQ ID NO: 28543 - DNA, 23 bp, Artificial Sequence
  Synthetic: FXN 3 reverse 9:69038343-69038369; SpCas9
aaggggtggagaaaagggtgggg

SEQ ID NO: 28544 - DNA, 22 bp, Artificial Sequence
  Synthetic: FXN 3 reverse 9:69038344-69038369; SpCas9
aggggtggagaaaagggtgggg

SEQ ID NO: 28545 - DNA, 21 bp, Artificial Sequence
  Synthetic: FXN 3 reverse 9:69038345-69038369; SpCas9
ggggtggagaaaagggtgggg

SEQ ID NO: 28546 - DNA, 20 bp, Artificial Sequence
  Synthetic: FXN 3 reverse 9:69038346-69038369; SpCas9
gggtggagaaaagggtgggg

SEQ ID NO: 28547 - DNA, 19 bp, Artificial Sequence
  Synthetic: FXN 3 reverse 9:69038347-69038369; SpCas9
ggtggagaaaagggtgggg

SEQ ID NO: 28548 - DNA, 18 bp, Artificial Sequence
  Synthetic: FXN 3 reverse 9:69038348-69038369; SpCas9
gtggagaaaagggtgggg

SEQ ID NO: 28549 - DNA, 25 bp, Artificial Sequence
  Synthetic: FXN 3 reverse 9:69038344-69038372; SpCas9
gatgcaaggggtggagaaaagggtg

SEQ ID NO: 28550 - DNA, 24 bp, Artificial Sequence
  Synthetic: FXN 3 reverse 9:69038345-69038372; SpCas9
atgcaaggggtggagaaaagggtg

SEQ ID NO: 28551 - DNA, 23 bp, Artificial Sequence
  Synthetic: FXN 3 reverse 9:69038346-69038372; SpCas9
tgcaaggggtggagaaaagggtg

SEQ ID NO: 28552 - DNA, 22 bp, Artificial Sequence
  Synthetic: FXN 3 reverse 9:69038347-69038372; SpCas9
gcaaggggtggagaaaagggtg

SEQ ID NO: 28553 - DNA, 21 bp, Artificial Sequence
  Synthetic: FXN 3 reverse 9:69038348-69038372; SpCas9
caaggggtggagaaaagggtg

SEQ ID NO: 28554 - DNA, 20 bp, Artificial Sequence
  Synthetic: FXN 3 reverse 9:69038349-69038372; SpCas9
aaggggtggagaaaagggtg

SEQ ID NO: 28555 - DNA, 19 bp, Artificial Sequence
  Synthetic: FXN 3 reverse 9:69038350-69038372; SpCas9
aggggtggagaaaagggtg

SEQ ID NO: 28556 - DNA, 18 bp, Artificial Sequence
  Synthetic: FXN 3 reverse 9:69038351-69038372; SpCas9
ggggtggagaaaagggtg

SEQ ID NO: 28557 - DNA, 25 bp, Artificial Sequence
  Synthetic: FXN 3 reverse 9:69038345-69038373; SpCas9
agatgcaaggggtggagaaaagggt

SEQ ID NO: 28558 - DNA, 24 bp, Artificial Sequence
  Synthetic: FXN 3 reverse 9:69038346-69038373; SpCas9
gatgcaaggggtggagaaaagggt

SEQ ID NO: 28559 - DNA, 23 bp, Artificial Sequence
  Synthetic: FXN 3 reverse 9:69038347-69038373; SpCas9
atgcaaggggtggagaaaagggt

SEQ ID NO: 28560 - DNA, 22 bp, Artificial Sequence
  Synthetic: FXN 3 reverse 9:69038348-69038373; SpCas9
tgcaaggggtggagaaaagggt

SEQ ID NO: 28561 - DNA, 21 bp, Artificial Sequence
  Synthetic: FXN 3 reverse 9:69038349-69038373; SpCas9
gcaaggggtggagaaaagggt

SEQ ID NO: 28562 - DNA, 20 bp, Artificial Sequence
  Synthetic: FXN 3 reverse 9:69038350-69038373; SpCas9
caaggggtggagaaaagggt

SEQ ID NO: 28563 - DNA, 19 bp, Artificial Sequence
  Synthetic: FXN 3 reverse 9:69038351-69038373; SpCas9
aaggggtggagaaaagggt

SEQ ID NO: 28564 - DNA, 18 bp, Artificial Sequence
  Synthetic: FXN 3 reverse 9:69038352-69038373; SpCas9
aggggtggagaaaagggt

SEQ ID NO: 28565 - DNA, 25 bp, Artificial Sequence
  Synthetic: FXN 3 reverse 9:69038346-69038374; SpCas9
tagatgcaaggggtggagaaaaggg

SEQ ID NO: 28566 - DNA, 24 bp, Artificial Sequence
  Synthetic: FXN 3 reverse 9:69038347-69038374; SpCas9
agatgcaaggggtggagaaaaggg

SEQ ID NO: 28567 - DNA, 23 bp, Artificial Sequence
  Synthetic: FXN 3 reverse 9:69038348-69038374; SpCas9
gatgcaaggggtggagaaaaggg

SEQ ID NO: 28568 - DNA, 22 bp, Artificial Sequence
  Synthetic: FXN 3 reverse 9:69038349-69038374; SpCas9
atgcaaggggtggagaaaaggg

SEQ ID NO: 28569 - DNA, 21 bp, Artificial Sequence
  Synthetic: FXN 3 reverse 9:69038350-69038374; SpCas9
tgcaaggggtggagaaaaggg

SEQ ID NO: 28570 - DNA, 20 bp, Artificial Sequence
  Synthetic: FXN 3 reverse 9:69038351-69038374; SpCas9
gcaaggggtggagaaaaggg

SEQ ID NO: 28571 - DNA, 19 bp, Artificial Sequence
  Synthetic: FXN 3 reverse 9:69038352-69038374; SpCas9
caaggggtggagaaaaggg

SEQ ID NO: 28572 - DNA, 18 bp, Artificial Sequence
  Synthetic: FXN 3 reverse 9:69038353-69038374; SpCas9
aaggggtggagaaaaggg

SEQ ID NO: 28573 - DNA, 25 bp, Artificial Sequence
  Synthetic: FXN 3 reverse 9:69038349-69038377; SpCas9
aagtagatgcaaggggtggagaaaa

SEQ ID NO: 28574 - DNA, 24 bp, Artificial Sequence
  Synthetic: FXN 3 reverse 9:69038350-69038377; SpCas9
agtagatgcaaggggtggagaaaa

SEQ ID NO: 28575 - DNA, 23 bp, Artificial Sequence
  Synthetic: FXN 3 reverse 9:69038351-69038377; SpCas9
gtagatgcaaggggtggagaaaa

SEQ ID NO: 28576 - DNA, 22 bp, Artificial Sequence
  Synthetic: FXN 3 reverse 9:69038352-69038377; SpCas9
tagatgcaaggggtggagaaaa

SEQ ID NO: 28577 - DNA, 21 bp, Artificial Sequence
  Synthetic: FXN 3 reverse 9:69038353-69038377; SpCas9
agatgcaaggggtggagaaaa

SEQ ID NO: 28578 - DNA, 20 bp, Artificial Sequence
  Synthetic: FXN 3 reverse 9:69038354-69038377; SpCas9
gatgcaaggggtggagaaaa

SEQ ID NO: 28579 - DNA, 19 bp, Artificial Sequence
  Synthetic: FXN 3 reverse 9:69038355-69038377; SpCas9
atgcaaggggtggagaaaa

SEQ ID NO: 28580 - DNA, 18 bp, Artificial Sequence
  Synthetic: FXN 3 reverse 9:69038356-69038377; SpCas9
tgcaaggggtggagaaaa

SEQ ID NO: 28581 - DNA, 25 bp, Artificial Sequence
  Synthetic: FXN 3 reverse 9:69038350-69038378; SpCas9
gaagtagatgcaaggggtggagaaa

SEQ ID NO: 28582 - DNA, 24 bp, Artificial Sequence
  Synthetic: FXN 3 reverse 9:69038351-69038378; SpCas9
aagtagatgcaaggggtggagaaa

SEQ ID NO: 28583 - DNA, 23 bp, Artificial Sequence
  Synthetic: FXN 3 reverse 9:69038352-69038378; SpCas9
agtagatgcaaggggtggagaaa

SEQ ID NO: 28584 - DNA, 22 bp, Artificial Sequence
  Synthetic: FXN 3 reverse 9:69038353-69038378; SpCas9
gtagatgcaaggggtggagaaa

SEQ ID NO: 28585 - DNA, 21 bp, Artificial Sequence
  Synthetic: FXN 3 reverse 9:69038354-69038378; SpCas9
tagatgcaaggggtggagaaa

SEQ ID NO: 28586 - DNA, 20 bp, Artificial Sequence
  Synthetic: FXN 3 reverse 9:69038355-69038378; SpCas9
agatgcaaggggtggagaaa

SEQ ID NO: 28587 - DNA, 19 bp, Artificial Sequence
  Synthetic: FXN 3 reverse 9:69038356-69038378; SpCas9
gatgcaaggggtggagaaa

SEQ ID NO: 28588 - DNA, 18 bp, Artificial Sequence
  Synthetic: FXN 3 reverse 9:69038357-69038378; SpCas9
atgcaaggggtggagaaa

SEQ ID NO: 28589 - DNA, 25 bp, Artificial Sequence
  Synthetic: FXN 3 reverse 9:69038351-69038379; SpCas9
agaagtagatgcaaggggtggagaa

SEQ ID NO: 28590 - DNA, 24 bp, Artificial Sequence
  Synthetic: FXN 3 reverse 9:69038352-69038379; SpCas9
gaagtagatgcaaggggtggagaa

SEQ ID NO: 28591 - DNA, 23 bp, Artificial Sequence
  Synthetic: FXN 3 reverse 9:69038353-69038379; SpCas9
aagtagatgcaaggggtggagaa

SEQ ID NO: 28592 - DNA, 22 bp, Artificial Sequence
  Synthetic: FXN 3 reverse 9:69038354-69038379; SpCas9
agtagatgcaaggggtggagaa

SEQ ID NO: 28593 - DNA, 21 bp, Artificial Sequence
  Synthetic: FXN 3 reverse 9:69038355-69038379; SpCas9
gtagatgcaaggggtggagaa

SEQ ID NO: 28594 - DNA, 20 bp, Artificial Sequence
  Synthetic: FXN 3 reverse 9:69038356-69038379; SpCas9
tagatgcaaggggtggagaa

SEQ ID NO: 28595 - DNA, 19 bp, Artificial Sequence
  Synthetic: FXN 3 reverse 9:69038357-69038379; SpCas9
agatgcaaggggtggagaa

SEQ ID NO: 28596 - DNA, 18 bp, Artificial Sequence
  Synthetic: FXN 3 reverse 9:69038358-69038379; SpCas9
gatgcaaggggtggagaa

SEQ ID NO: 28597 - DNA, 25 bp, Artificial Sequence
  Synthetic: FXN 3 forward 9:69038355-69038383; SpCas9
tctccaccccttgcatctacttcta

SEQ ID NO: 28598 - DNA, 24 bp, Artificial Sequence
  Synthetic: FXN 3 forward 9:69038356-69038383; SpCas9
ctccaccccttgcatctacttcta

SEQ ID NO: 28599 - DNA, 23 bp, Artificial Sequence
  Synthetic: FXN 3 forward 9:69038357-69038383; SpCas9
tccaccccttgcatctacttcta

SEQ ID NO: 28600 - DNA, 22 bp, Artificial Sequence
  Synthetic: FXN 3 forward 9:69038358-69038383; SpCas9
ccaccccttgcatctacttcta

SEQ ID NO: 28601 - DNA, 21 bp, Artificial Sequence
  Synthetic: FXN 3 forward 9:69038359-69038383; SpCas9
caccccttgcatctacttcta

SEQ ID NO: 28602 - DNA, 20 bp, Artificial Sequence
  Synthetic: FXN 3 forward 9:69038360-69038383; SpCas9
accccttgcatctacttcta

SEQ ID NO: 28603 - DNA, 19 bp, Artificial Sequence
  Synthetic: FXN 3 forward 9:69038361-69038383; SpCas9
ccccttgcatctacttcta

SEQ ID NO: 28604 - DNA, 18 bp, Artificial Sequence
  Synthetic: FXN 3 forward 9:69038362-69038383; SpCas9
cccttgcatctacttcta

SEQ ID NO: 28605 - DNA, 25 bp, Artificial Sequence
  Synthetic: FXN 3 reverse 9:69038356-69038384; SpCas9
gctttagaagtagatgcaaggggtg

SEQ ID NO: 28606 - DNA, 24 bp, Artificial Sequence
  Synthetic: FXN 3 reverse 9:69038357-69038384; SpCas9
ctttagaagtagatgcaaggggtg

SEQ ID NO: 28607 - DNA, 23 bp, Artificial Sequence
  Synthetic: FXN 3 reverse 9:69038358-69038384; SpCas9
tttagaagtagatgcaaggggtg

SEQ ID NO: 28608 - DNA, 22 bp, Artificial Sequence
  Synthetic: FXN 3 reverse 9:69038359-69038384; SpCas9
ttagaagtagatgcaaggggtg

SEQ ID NO: 28609 - DNA, 21 bp, Artificial Sequence
  Synthetic: FXN 3 reverse 9:69038360-69038384; SpCas9
tagaagtagatgcaaggggtg

SEQ ID NO: 28610 - DNA, 20 bp, Artificial Sequence
  Synthetic: FXN 3 reverse 9:69038361-69038384; SpCas9
agaagtagatgcaaggggtg

SEQ ID NO: 28611 - DNA, 19 bp, Artificial Sequence
  Synthetic: FXN 3 reverse 9:69038362-69038384; SpCas9
gaagtagatgcaaggggtg

SEQ ID NO: 28612 - DNA, 18 bp, Artificial Sequence
  Synthetic: FXN 3 reverse 9:69038363-69038384; SpCas9
aagtagatgcaaggggtg

SEQ ID NO: 28613 - DNA, 25 bp, Artificial Sequence
  Synthetic: FXN 3 forward 9:69038358-69038386; SpCas9
ccaccccttgcatctacttctaaag

SEQ ID NO: 28614 - DNA, 24 bp, Artificial Sequence
  Synthetic: FXN 3 forward 9:69038359-69038386; SpCas9
caccccttgcatctacttctaaag

SEQ ID NO: 28615 - DNA, 23 bp, Artificial Sequence
  Synthetic: FXN 3 forward 9:69038360-69038386; SpCas9
accccttgcatctacttctaaag

SEQ ID NO: 28616 - DNA, 22 bp, Artificial Sequence
  Synthetic: FXN 3 forward 9:69038361-69038386; SpCas9
ccccttgcatctacttctaaag

SEQ ID NO: 28617 - DNA, 21 bp, Artificial Sequence
  Synthetic: FXN 3 forward 9:69038362-69038386; SpCas9
cccttgcatctacttctaaag

SEQ ID NO: 28618 - DNA, 20 bp, Artificial Sequence
  Synthetic: FXN 3 forward 9:69038363-69038386; SpCas9
ccttgcatctacttctaaag

SEQ ID NO: 28619 - DNA, 19 bp, Artificial Sequence
  Synthetic: FXN 3 forward 9:69038364-69038386; SpCas9
cttgcatctacttctaaag

SEQ ID NO: 28620 - DNA, 18 bp, Artificial Sequence
  Synthetic: FXN 3 forward 9:69038365-69038386; SpCas9
ttgcatctacttctaaag

SEQ ID NO: 28621 - DNA, 25 bp, Artificial Sequence
  Synthetic: FXN 3 reverse 9:69038358-69038386; SpCas9
ctgctttagaagtagatgcaagggg

SEQ ID NO: 28622 - DNA, 24 bp, Artificial Sequence
  Synthetic: FXN 3 reverse 9:69038359-69038386; SpCas9
tgctttagaagtagatgcaagggg

SEQ ID NO: 28623 - DNA, 23 bp, Artificial Sequence
  Synthetic: FXN 3 reverse 9:69038360-69038386; SpCas9
gctttagaagtagatgcaagggg

SEQ ID NO: 28624 - DNA, 22 bp, Artificial Sequence
  Synthetic: FXN 3 reverse 9:69038361-69038386; SpCas9
ctttagaagtagatgcaagggg

SEQ ID NO: 28625 - DNA, 21 bp, Artificial Sequence
  Synthetic: FXN 3 reverse 9:69038362-69038386; SpCas9
tttagaagtagatgcaagggg

SEQ ID NO: 28626 - DNA, 20 bp, Artificial Sequence
  Synthetic: FXN 3 reverse 9:69038363-69038386; SpCas9
ttagaagtagatgcaagggg

SEQ ID NO: 28627 - DNA, 19 bp, Artificial Sequence
  Synthetic: FXN 3 reverse 9:69038364-69038386; SpCas9
tagaagtagatgcaagggg

SEQ ID NO: 28628 - DNA, 18 bp, Artificial Sequence
  Synthetic: FXN 3 reverse 9:69038365-69038386; SpCas9
agaagtagatgcaagggg

SEQ ID NO: 28629 - DNA, 25 bp, Artificial Sequence
  Synthetic: FXN 3 reverse 9:69038361-69038389; SpCas9
cagctgctttagaagtagatgcaag

SEQ ID NO: 28630 - DNA, 24 bp, Artificial Sequence
  Synthetic: FXN 3 reverse 9:69038362-69038389; SpCas9
agctgctttagaagtagatgcaag

SEQ ID NO: 28631 - DNA, 23 bp, Artificial Sequence
  Synthetic: FXN 3 reverse 9:69038363-69038389; SpCas9
gctgctttagaagtagatgcaag

SEQ ID NO: 28632 - DNA, 22 bp, Artificial Sequence
  Synthetic: FXN 3 reverse 9:69038364-69038389; SpCas9
ctgctttagaagtagatgcaag

SEQ ID NO: 28633 - DNA, 21 bp, Artificial Sequence
  Synthetic: FXN 3 reverse 9:69038365-69038389; SpCas9
tgctttagaagtagatgcaag

SEQ ID NO: 28634 - DNA, 20 bp, Artificial Sequence
  Synthetic: FXN 3 reverse 9:69038366-69038389; SpCas9
gctttagaagtagatgcaag

SEQ ID NO: 28635 - DNA, 19 bp, Artificial Sequence
  Synthetic: FXN 3 reverse 9:69038367-69038389; SpCas9
ctttagaagtagatgcaag

SEQ ID NO: 28636 - DNA, 18 bp, Artificial Sequence
  Synthetic: FXN 3 reverse 9:69038368-69038389; SpCas9
tttagaagtagatgcaag

SEQ ID NO: 28637 - DNA, 25 bp, Artificial Sequence
  Synthetic: FXN 3 reverse 9:69038362-69038390; SpCas9
acagctgctttagaagtagatgcaa

SEQ ID NO: 28638 - DNA, 24 bp, Artificial Sequence
  Synthetic: FXN 3 reverse 9:69038363-69038390; SpCas9
cagctgctttagaagtagatgcaa

SEQ ID NO: 28639 - DNA, 23 bp, Artificial Sequence
  Synthetic: FXN 3 reverse 9:69038364-69038390; SpCas9
agctgctttagaagtagatgcaa

SEQ ID NO: 28640 - DNA, 22 bp, Artificial Sequence
  Synthetic: FXN 3 reverse 9:69038365-69038390; SpCas9
gctgctttagaagtagatgcaa

SEQ ID NO: 28641 - DNA, 21 bp, Artificial Sequence
  Synthetic: FXN 3 reverse 9:69038366-69038390; SpCas9
ctgctttagaagtagatgcaa

SEQ ID NO: 28642 - DNA, 20 bp, Artificial Sequence
  Synthetic: FXN 3 reverse 9:69038367-69038390; SpCas9
tgctttagaagtagatgcaa

SEQ ID NO: 28643 - DNA, 19 bp, Artificial Sequence
  Synthetic: FXN 3 reverse 9:69038368-69038390; SpCas9
gctttagaagtagatgcaa

SEQ ID NO: 28644 - DNA, 18 bp, Artificial Sequence
  Synthetic: FXN 3 reverse 9:69038369-69038390; SpCas9
ctttagaagtagatgcaa

SEQ ID NO: 28645 - DNA, 25 bp, Artificial Sequence
  Synthetic: FXN 3 reverse 9:69038363-69038391; SpCas9
aacagctgctttagaagtagatgca

SEQ ID NO: 28646 - DNA, 24 bp, Artificial Sequence
  Synthetic: FXN 3 reverse 9:69038364-69038391; SpCas9
acagctgctttagaagtagatgca

SEQ ID NO: 28647 - DNA, 23 bp, Artificial Sequence
  Synthetic: FXN 3 reverse 9:69038365-69038391; SpCas9
cagctgctttagaagtagatgca

SEQ ID NO: 28648 - DNA, 22 bp, Artificial Sequence
  Synthetic: FXN 3 reverse 9:69038366-69038391; SpCas9
agctgctttagaagtagatgca

SEQ ID NO: 28649 - DNA, 21 bp, Artificial Sequence
  Synthetic: FXN 3 reverse 9:69038367-69038391; SpCas9
gctgctttagaagtagatgca

SEQ ID NO: 28650 - DNA, 20 bp, Artificial Sequence
  Synthetic: FXN 3 reverse 9:69038368-69038391; SpCas9
ctgctttagaagtagatgca

SEQ ID NO: 28651 - DNA, 19 bp, Artificial Sequence
  Synthetic: FXN 3 reverse 9:69038369-69038391; SpCas9
tgctttagaagtagatgca

SEQ ID NO: 28652 - DNA, 18 bp, Artificial Sequence
  Synthetic: FXN 3 reverse 9:69038370-69038391; SpCas9
gctttagaagtagatgca

SEQ ID NO: 28653 - DNA, 25 bp, Artificial Sequence
  Synthetic: FXN 3 reverse 9:69038364-69038392; SpCas9
gaacagctgctttagaagtagatgc

SEQ ID NO: 28654 - DNA, 24 bp, Artificial Sequence
  Synthetic: FXN 3 reverse 9:69038365-69038392; SpCas9
aacagctgctttagaagtagatgc

SEQ ID NO: 28655 - DNA, 23 bp, Artificial Sequence
  Synthetic: FXN 3 reverse 9:69038366-69038392; SpCas9
acagctgctttagaagtagatgc

SEQ ID NO: 28656 - DNA, 22 bp, Artificial Sequence
  Synthetic: FXN 3 reverse 9:69038367-69038392; SpCas9
cagctgctttagaagtagatgc

SEQ ID NO: 28657 - DNA, 21 bp, Artificial Sequence
  Synthetic: FXN 3 reverse 9:69038368-69038392; SpCas9
agctgctttagaagtagatgc

SEQ ID NO: 28658 - DNA, 20 bp, Artificial Sequence
  Synthetic: FXN 3 reverse 9:69038369-69038392; SpCas9
gctgctttagaagtagatgc

SEQ ID NO: 28659 - DNA, 19 bp, Artificial Sequence
  Synthetic: FXN 3 reverse 9:69038370-69038392; SpCas9
ctgctttagaagtagatgc

SEQ ID NO: 28660 - DNA, 18 bp, Artificial Sequence
  Synthetic: FXN 3 reverse 9:69038371-69038392; SpCas9
tgctttagaagtagatgc

SEQ ID NO: 28661 - DNA, 25 bp, Artificial Sequence
  Synthetic: FXN 3 forward 9:69038369-69038397; SpCas9
atctacttctaaagcagctgttcaa

SEQ ID NO: 28662 - DNA, 24 bp, Artificial Sequence
  Synthetic: FXN 3 forward 9:69038370-69038397; SpCas9
tctacttctaaagcagctgttcaa

SEQ ID NO: 28663 - DNA, 23 bp, Artificial Sequence
  Synthetic: FXN 3 forward 9:69038371-69038397; SpCas9
ctacttctaaagcagctgttcaa

SEQ ID NO: 28664 - DNA, 22 bp, Artificial Sequence
  Synthetic: FXN 3 forward 9:69038372-69038397; SpCas9
tacttctaaagcagctgttcaa

SEQ ID NO: 28665 - DNA, 21 bp, Artificial Sequence
  Synthetic: FXN 3 forward 9:69038373-69038397; SpCas9
acttctaaagcagctgttcaa

SEQ ID NO: 28666 - DNA, 20 bp, Artificial Sequence
  Synthetic: FXN 3 forward 9:69038374-69038397; SpCas9
cttctaaagcagctgttcaa

SEQ ID NO: 28667 - DNA, 19 bp, Artificial Sequence
  Synthetic: FXN 3 forward 9:69038375-69038397; SpCas9
ttctaaagcagctgttcaa

SEQ ID NO: 28668 - DNA, 18 bp, Artificial Sequence
  Synthetic: FXN 3 forward 9:69038376-69038397; SpCas9
tctaaagcagctgttcaa

SEQ ID NO: 28669 - DNA, 25 bp, Artificial Sequence
  Synthetic: FXN 3 reverse 9:69038371-69038399; SpCas9
ttctgttgaacagctgctttagaag

SEQ ID NO: 28670 - DNA, 24 bp, Artificial Sequence
  Synthetic: FXN 3 reverse 9:69038372-69038399; SpCas9
tctgttgaacagctgctttagaag

SEQ ID NO: 28671 - DNA, 23 bp, Artificial Sequence
  Synthetic: FXN 3 reverse 9:69038373-69038399; SpCas9
ctgttgaacagctgctttagaag

SEQ ID NO: 28672 - DNA, 22 bp, Artificial Sequence
  Synthetic: FXN 3 reverse 9:69038374-69038399; SpCas9
tgttgaacagctgctttagaag

SEQ ID NO: 28673 - DNA, 21 bp, Artificial Sequence
  Synthetic: FXN 3 reverse 9:69038375-69038399; SpCas9
gttgaacagctgctttagaag

SEQ ID NO: 28674 - DNA, 20 bp, Artificial Sequence
  Synthetic: FXN 3 reverse 9:69038376-69038399; SpCas9
ttgaacagctgctttagaag

SEQ ID NO: 28675 - DNA, 19 bp, Artificial Sequence
  Synthetic: FXN 3 reverse 9:69038377-69038399; SpCas9
tgaacagctgctttagaag

SEQ ID NO: 28676 - DNA, 18 bp, Artificial Sequence
  Synthetic: FXN 3 reverse 9:69038378-69038399; SpCas9
gaacagctgctttagaag

SEQ ID NO: 28677 - DNA, 25 bp, Artificial Sequence
  Synthetic: FXN 3 reverse 9:69038374-69038402; SpCas9
tgtttctgttgaacagctgctttag

SEQ ID NO: 28678 - DNA, 24 bp, Artificial Sequence
  Synthetic: FXN 3 reverse 9:69038375-69038402; SpCas9
gtttctgttgaacagctgctttag

SEQ ID NO: 28679 - DNA, 23 bp, Artificial Sequence
  Synthetic: FXN 3 reverse 9:69038376-69038402; SpCas9
tttctgttgaacagctgctttag

SEQ ID NO: 28680 - DNA, 22 bp, Artificial Sequence
  Synthetic: FXN 3 reverse 9:69038377-69038402; SpCas9
ttctgttgaacagctgctttag

SEQ ID NO: 28681 - DNA, 21 bp, Artificial Sequence
  Synthetic: FXN 3 reverse 9:69038378-69038402; SpCas9
tctgttgaacagctgctttag

SEQ ID NO: 28682 - DNA, 20 bp, Artificial Sequence
  Synthetic: FXN 3 reverse 9:69038379-69038402; SpCas9
ctgttgaacagctgctttag

SEQ ID NO: 28683 - DNA, 19 bp, Artificial Sequence
  Synthetic: FXN 3 reverse 9:69038380-69038402; SpCas9
tgttgaacagctgctttag

SEQ ID NO: 28684 - DNA, 18 bp, Artificial Sequence
  Synthetic: FXN 3 reverse 9:69038381-69038402; SpCas9
gttgaacagctgctttag

SEQ ID NO: 28685 - DNA, 25 bp, Artificial Sequence
  Synthetic: FXN 3 forward 9:69038375-69038403; SpCas9
ttctaaagcagctgttcaacagaaa

SEQ ID NO: 28686 - DNA, 24 bp, Artificial Sequence
  Synthetic: FXN 3 forward 9:69038376-69038403; SpCas9
tctaaagcagctgttcaacagaaa

SEQ ID NO: 28687 - DNA, 23 bp, Artificial Sequence
  Synthetic: FXN 3 forward 9:69038377-69038403; SpCas9
ctaaagcagctgttcaacagaaa

SEQ ID NO: 28688 - DNA, 22 bp, Artificial Sequence
  Synthetic: FXN 3 forward 9:69038378-69038403; SpCas9
taaagcagctgttcaacagaaa

SEQ ID NO: 28689 - DNA, 21 bp, Artificial Sequence
  Synthetic: FXN 3 forward 9:69038379-69038403; SpCas9
aaagcagctgttcaacagaaa

SEQ ID NO: 28690 - DNA, 20 bp, Artificial Sequence
  Synthetic: FXN 3 forward 9:69038380-69038403; SpCas9
aagcagctgttcaacagaaa

SEQ ID NO: 28691 - DNA, 19 bp, Artificial Sequence
  Synthetic: FXN 3 forward 9:69038381-69038403; SpCas9
agcagctgttcaacagaaa

SEQ ID NO: 28692 - DNA, 18 bp, Artificial Sequence
  Synthetic: FXN 3 forward 9:69038382-69038403; SpCas9
gcagctgttcaacagaaa

SEQ ID NO: 28693 - DNA, 25 bp, Artificial Sequence
  Synthetic: FXN 3 reverse 9:69038377-69038405; SpCas9
ttctgtttctgttgaacagctgctt

SEQ ID NO: 28694 - DNA, 24 bp, Artificial Sequence
  Synthetic: FXN 3 reverse 9:69038378-69038405; SpCas9
tctgtttctgttgaacagctgctt

SEQ ID NO: 28695 - DNA, 23 bp, Artificial Sequence
  Synthetic: FXN 3 reverse 9:69038379-69038405; SpCas9
ctgtttctgttgaacagctgctt

SEQ ID NO: 28696 - DNA, 22 bp, Artificial Sequence
  Synthetic: FXN 3 reverse 9:69038380-69038405; SpCas9
tgtttctgttgaacagctgctt

SEQ ID NO: 28697 - DNA, 21 bp, Artificial Sequence
  Synthetic: FXN 3 reverse 9:69038381-69038405; SpCas9
gtttctgttgaacagctgctt

SEQ ID NO: 28698 - DNA, 20 bp, Artificial Sequence
  Synthetic: FXN 3 reverse 9:69038382-69038405; SpCas9
tttctgttgaacagctgctt

SEQ ID NO: 28699 - DNA, 19 bp, Artificial Sequence
  Synthetic: FXN 3 reverse 9:69038383-69038405; SpCas9
ttctgttgaacagctgctt

SEQ ID NO: 28700 - DNA, 18 bp, Artificial Sequence
  Synthetic: FXN 3 reverse 9:69038384-69038405; SpCas9
tctgttgaacagctgctt

SEQ ID NO: 28701 - DNA, 25 bp, Artificial Sequence
  Synthetic: FXN 3 forward 9:69038380-69038408; SpCas9
aagcagctgttcaacagaaacagaa

SEQ ID NO: 28702 - DNA, 24 bp, Artificial Sequence
  Synthetic: FXN 3 forward 9:69038381-69038408; SpCas9
agcagctgttcaacagaaacagaa

SEQ ID NO: 28703 - DNA, 23 bp, Artificial Sequence
  Synthetic: FXN 3 forward 9:69038382-69038408; SpCas9
gcagctgttcaacagaaacagaa

SEQ ID NO: 28704 - DNA, 22 bp, Artificial Sequence
  Synthetic: FXN 3 forward 9:69038383-69038408; SpCas9
cagctgttcaacagaaacagaa

SEQ ID NO: 28705 - DNA, 21 bp, Artificial Sequence
  Synthetic: FXN 3 forward 9:69038384-69038408; SpCas9
agctgttcaacagaaacagaa

SEQ ID NO: 28706 - DNA, 20 bp, Artificial Sequence
  Synthetic: FXN 3 forward 9:69038385-69038408; SpCas9
gctgttcaacagaaacagaa

SEQ ID NO: 28707 - DNA, 19 bp, Artificial Sequence
  Synthetic: FXN 3 forward 9:69038386-69038408; SpCas9
ctgttcaacagaaacagaa

SEQ ID NO: 28708 - DNA, 18 bp, Artificial Sequence
  Synthetic: FXN 3 forward 9:69038387-69038408; SpCas9
tgttcaacagaaacagaa

SEQ ID NO: 28709 - DNA, 25 bp, Artificial Sequence
  Synthetic: FXN 3 forward 9:69038381-69038409; SpCas9
agcagctgttcaacagaaacagaat

SEQ ID NO: 28710 - DNA, 24 bp, Artificial Sequence
  Synthetic: FXN 3 forward 9:69038382-69038409; SpCas9
gcagctgttcaacagaaacagaat

SEQ ID NO: 28711 - DNA, 23 bp, Artificial Sequence
  Synthetic: FXN 3 forward 9:69038383-69038409; SpCas9
cagctgttcaacagaaacagaat

SEQ ID NO: 28712 - DNA, 22 bp, Artificial Sequence
  Synthetic: FXN 3 forward 9:69038384-69038409; SpCas9
agctgttcaacagaaacagaat

SEQ ID NO: 28713 - DNA, 21 bp, Artificial Sequence
  Synthetic: FXN 3 forward 9:69038385-69038409; SpCas9
gctgttcaacagaaacagaat

SEQ ID NO: 28714 - DNA, 20 bp, Artificial Sequence
  Synthetic: FXN 3 forward 9:69038386-69038409; SpCas9
ctgttcaacagaaacagaat

SEQ ID NO: 28715 - DNA, 19 bp, Artificial Sequence
  Synthetic: FXN 3 forward 9:69038387-69038409; SpCas9
tgttcaacagaaacagaat

SEQ ID NO: 28716 - DNA, 18 bp, Artificial Sequence
  Synthetic: FXN 3 forward 9:69038388-69038409; SpCas9
gttcaacagaaacagaat

SEQ ID NO: 28717 - DNA, 25 bp, Artificial Sequence
  Synthetic: FXN 3 forward 9:69038383-69038411; SpCas9
cagctgttcaacagaaacagaatgg

SEQ ID NO: 28718 - DNA, 24 bp, Artificial Sequence
  Synthetic: FXN 3 forward 9:69038384-69038411; SpCas9
agctgttcaacagaaacagaatgg

SEQ ID NO: 28719 - DNA, 23 bp, Artificial Sequence
  Synthetic: FXN 3 forward 9:69038385-69038411; SpCas9
gctgttcaacagaaacagaatgg

SEQ ID NO: 28720 - DNA, 22 bp, Artificial Sequence
  Synthetic: FXN 3 forward 9:69038386-69038411; SpCas9
ctgttcaacagaaacagaatgg

SEQ ID NO: 28721 - DNA, 21 bp, Artificial Sequence
  Synthetic: FXN 3 forward 9:69038387-69038411; SpCas9
tgttcaacagaaacagaatgg

SEQ ID NO: 28722 - DNA, 20 bp, Artificial Sequence
  Synthetic: FXN 3 forward 9:69038388-69038411; SpCas9
gttcaacagaaacagaatgg

SEQ ID NO: 28723 - DNA, 19 bp, Artificial Sequence
  Synthetic: FXN 3 forward 9:69038389-69038411; SpCas9
ttcaacagaaacagaatgg

SEQ ID NO: 28724 - DNA, 18 bp, Artificial Sequence
  Synthetic: FXN 3 forward 9:69038390-69038411; SpCas9
tcaacagaaacagaatgg

SEQ ID NO: 28725 - DNA, 25 bp, Artificial Sequence
  Synthetic: FXN 3 reverse 9:69038386-69038414; SpCas9
tggctcccattctgtttctgttgaa

SEQ ID NO: 28726 - DNA, 24 bp, Artificial Sequence
  Synthetic: FXN 3 reverse 9:69038387-69038414; SpCas9
ggctcccattctgtttctgttgaa

SEQ ID NO: 28727 - DNA, 23 bp, Artificial Sequence
  Synthetic: FXN 3 reverse 9:69038388-69038414; SpCas9
gctcccattctgtttctgttgaa

SEQ ID NO: 28728 - DNA, 22 bp, Artificial Sequence
  Synthetic: FXN 3 reverse 9:69038389-69038414; SpCas9
ctcccattctgtttctgttgaa

SEQ ID NO: 28729 - DNA, 21 bp, Artificial Sequence
  Synthetic: FXN 3 reverse 9:69038390-69038414; SpCas9
tcccattctgtttctgttgaa

SEQ ID NO: 28730 - DNA, 20 bp, Artificial Sequence
  Synthetic: FXN 3 reverse 9:69038391-69038414; SpCas9
cccattctgtttctgttgaa

SEQ ID NO: 28731 - DNA, 19 bp, Artificial Sequence
  Synthetic: FXN 3 reverse 9:69038392-69038414; SpCas9
ccattctgtttctgttgaa

SEQ ID NO: 28732 - DNA, 18 bp, Artificial Sequence
  Synthetic: FXN 3 reverse 9:69038393-69038414; SpCas9
cattctgtttctgttgaa

SEQ ID NO: 28733 - DNA, 25 bp, Artificial Sequence
  Synthetic: FXN 3 forward 9:69038410-69038438; SpCas9
gccacacacataattctacattttc

SEQ ID NO: 28734 - DNA, 24 bp, Artificial Sequence
  Synthetic: FXN 3 forward 9:69038411-69038438; SpCas9
ccacacacataattctacattttc

SEQ ID NO: 28735 - DNA, 23 bp, Artificial Sequence
  Synthetic: FXN 3 forward 9:69038412-69038438; SpCas9
cacacacataattctacattttc

SEQ ID NO: 28736 - DNA, 22 bp, Artificial Sequence
  Synthetic: FXN 3 forward 9:69038413-69038438; SpCas9
acacacataattctacattttc

SEQ ID NO: 28737 - DNA, 21 bp, Artificial Sequence
  Synthetic: FXN 3 forward 9:69038414-69038438; SpCas9
cacacataattctacattttc

SEQ ID NO: 28738 - DNA, 20 bp, Artificial Sequence
  Synthetic: FXN 3 forward 9:69038415-69038438; SpCas9
acacataattctacattttc

SEQ ID NO: 28739 - DNA, 19 bp, Artificial Sequence
  Synthetic: FXN 3 forward 9:69038416-69038438; SpCas9
cacataattctacattttc

SEQ ID NO: 28740 - DNA, 18 bp, Artificial Sequence
  Synthetic: FXN 3 forward 9:69038417-69038438; SpCas9
acataattctacattttc

SEQ ID NO: 28741 - DNA, 25 bp, Artificial Sequence
  Synthetic: FXN 3 reverse 9:69038411-69038439; SpCas9
actagaaaatgtagaattatgtgtg

SEQ ID NO: 28742 - DNA, 24 bp, Artificial Sequence
  Synthetic: FXN 3 reverse 9:69038412-69038439; SpCas9
ctagaaaatgtagaattatgtgtg

SEQ ID NO: 28743 - DNA, 23 bp, Artificial Sequence
  Synthetic: FXN 3 reverse 9:69038413-69038439; SpCas9
tagaaaatgtagaattatgtgtg

SEQ ID NO: 28744 - DNA, 22 bp, Artificial Sequence
  Synthetic: FXN 3 reverse 9:69038414-69038439; SpCas9
agaaaatgtagaattatgtgtg

SEQ ID NO: 28745 - DNA, 21 bp, Artificial Sequence
  Synthetic: FXN 3 reverse 9:69038415-69038439; SpCas9
gaaaatgtagaattatgtgtg

SEQ ID NO: 28746 - DNA, 20 bp, Artificial Sequence
  Synthetic: FXN 3 reverse 9:69038416-69038439; SpCas9
aaaatgtagaattatgtgtg

SEQ ID NO: 28747 - DNA, 19 bp, Artificial Sequence
  Synthetic: FXN 3 reverse 9:69038417-69038439; SpCas9
aaatgtagaattatgtgtg

SEQ ID NO: 28748 - DNA, 18 bp, Artificial Sequence
  Synthetic: FXN 3 reverse 9:69038418-69038439; SpCas9
aatgtagaattatgtgtg

SEQ ID NO: 28749 - DNA, 25 bp, Artificial Sequence
  Synthetic: FXN 3 forward 9:69038418-69038446; SpCas9
cataattctacattttctagttaaa

SEQ ID NO: 28750 - DNA, 24 bp, Artificial Sequence
  Synthetic: FXN 3 forward 9:69038419-69038446; SpCas9
ataattctacattttctagttaaa

SEQ ID NO: 28751 - DNA, 23 bp, Artificial Sequence
  Synthetic: FXN 3 forward 9:69038420-69038446; SpCas9
taattctacattttctagttaaa

SEQ ID NO: 28752 - DNA, 22 bp, Artificial Sequence
  Synthetic: FXN 3 forward 9:69038421-69038446; SpCas9
aattctacattttctagttaaa

SEQ ID NO: 28753 - DNA, 21 bp, Artificial Sequence
  Synthetic: FXN 3 forward 9:69038422-69038446; SpCas9
attctacattttctagttaaa

SEQ ID NO: 28754 - DNA, 20 bp, Artificial Sequence
  Synthetic: FXN 3 forward 9:69038423-69038446; SpCas9
ttctacattttctagttaaa

SEQ ID NO: 28755 - DNA, 19 bp, Artificial Sequence
  Synthetic: FXN 3 forward 9:69038424-69038446; SpCas9
tctacattttctagttaaa

SEQ ID NO: 28756 - DNA, 18 bp, Artificial Sequence
  Synthetic: FXN 3 forward 9:69038425-69038446; SpCas9
ctacattttctagttaaa

SEQ ID NO: 28757 - DNA, 25 bp, Artificial Sequence
  Synthetic: FXN 3 reverse 9:69038425-69038453; SpCas9
tttttttctttttaactagaaaatg

SEQ ID NO: 28758 - DNA, 24 bp, Artificial Sequence
  Synthetic: FXN 3 reverse 9:69038426-69038453; SpCas9
ttttttctttttaactagaaaatg

SEQ ID NO: 28759 - DNA, 23 bp, Artificial Sequence
  Synthetic: FXN 3 reverse 9:69038427-69038453; SpCas9
tttttctttttaactagaaaatg

SEQ ID NO: 28760 - DNA, 22 bp, Artificial Sequence
  Synthetic: FXN 3 reverse 9:69038428-69038453; SpCas9
ttttctttttaactagaaaatg

SEQ ID NO: 28761 - DNA, 21 bp, Artificial Sequence
  Synthetic: FXN 3 reverse 9:69038429-69038453; SpCas9
tttctttttaactagaaaatg

SEQ ID NO: 28762 - DNA, 20 bp, Artificial Sequence
  Synthetic: FXN 3 reverse 9:69038430-69038453; SpCas9
ttctttttaactagaaaatg

SEQ ID NO: 28763 - DNA, 19 bp, Artificial Sequence
  Synthetic: FXN 3 reverse 9:69038431-69038453; SpCas9
tctttttaactagaaaatg

SEQ ID NO: 28764 - DNA, 18 bp, Artificial Sequence
  Synthetic: FXN 3 reverse 9:69038432-69038453; SpCas9
ctttttaactagaaaatg

SEQ ID NO: 28765 - DNA, 25 bp, Artificial Sequence
  Synthetic: FXN 3 reverse 9:69038434-69038462; SpCas9
aaaatgatttttttttctttttaac

SEQ ID NO: 28766 - DNA, 24 bp, Artificial Sequence
  Synthetic: FXN 3 reverse 9:69038435-69038462; SpCas9
aaatgatttttttttctttttaac

SEQ ID NO: 28767 - DNA, 23 bp, Artificial Sequence
  Synthetic: FXN 3 reverse 9:69038436-69038462; SpCas9
aatgatttttttttctttttaac

SEQ ID NO: 28768 - DNA, 22 bp, Artificial Sequence
  Synthetic: FXN 3 reverse 9:69038437-69038462; SpCas9
atgatttttttttctttttaac

SEQ ID NO: 28769 - DNA, 21 bp, Artificial Sequence
  Synthetic: FXN 3 reverse 9:69038438-69038462; SpCas9
tgatttttttttctttttaac

SEQ ID NO: 28770 - DNA, 20 bp, Artificial Sequence
  Synthetic: FXN 3 reverse 9:69038439-69038462; SpCas9
gatttttttttctttttaac

SEQ ID NO: 28771 - DNA, 19 bp, Artificial Sequence
  Synthetic: FXN 3 reverse 9:69038440-69038462; SpCas9
atttttttttctttttaac

SEQ ID NO: 28772 - DNA, 18 bp, Artificial Sequence
  Synthetic: FXN 3 reverse 9:69038441-69038462; SpCas9
tttttttttctttttaac

SEQ ID NO: 28773 - DNA, 25 bp, Artificial Sequence
  Synthetic: FXN 3 forward 9:69038458-69038486; SpCas9
ttttcaacaatatatttattcaacc

SEQ ID NO: 28774 - DNA, 24 bp, Artificial Sequence
  Synthetic: FXN 3 forward 9:69038459-69038486; SpCas9
tttcaacaatatatttattcaacc

SEQ ID NO: 28775 - DNA, 23 bp, Artificial Sequence
  Synthetic: FXN 3 forward 9:69038460-69038486; SpCas9
ttcaacaatatatttattcaacc

SEQ ID NO: 28776 - DNA, 22 bp, Artificial Sequence
  Synthetic: FXN 3 forward 9:69038461-69038486; SpCas9
tcaacaatatatttattcaacc

SEQ ID NO: 28777 - DNA, 21 bp, Artificial Sequence
  Synthetic: FXN 3 forward 9:69038462-69038486; SpCas9
caacaatatatttattcaacc

SEQ ID NO: 28778 - DNA, 20 bp, Artificial Sequence
  Synthetic: FXN 3 forward 9:69038463-69038486; SpCas9
aacaatatatttattcaacc

SEQ ID NO: 28779 - DNA, 19 bp, Artificial Sequence
  Synthetic: FXN 3 forward 9:69038464-69038486; SpCas9
acaatatatttattcaacc

SEQ ID NO: 28780 - DNA, 18 bp, Artificial Sequence
  Synthetic: FXN 3 forward 9:69038465-69038486; SpCas9
caatatatttattcaacc

SEQ ID NO: 28781 - DNA, 25 bp, Artificial Sequence
  Synthetic: FXN 3 reverse 9:69038481-69038509; SpCas9
ggaatgataatattttgtatgtact

SEQ ID NO: 28782 - DNA, 24 bp, Artificial Sequence
  Synthetic: FXN 3 reverse 9:69038482-69038509; SpCas9
gaatgataatattttgtatgtact

SEQ ID NO: 28783 - DNA, 23 bp, Artificial Sequence
  Synthetic: FXN 3 reverse 9:69038483-69038509; SpCas9
aatgataatattttgtatgtact

SEQ ID NO: 28784 - DNA, 22 bp, Artificial Sequence
  Synthetic: FXN 3 reverse 9:69038484-69038509; SpCas9
atgataatattttgtatgtact

SEQ ID NO: 28785 - DNA, 21 bp, Artificial Sequence
  Synthetic: FXN 3 reverse 9:69038485-69038509; SpCas9
tgataatattttgtatgtact

SEQ ID NO: 28786 - DNA, 20 bp, Artificial Sequence
  Synthetic: FXN 3 reverse 9:69038486-69038509; SpCas9
gataatattttgtatgtact

SEQ ID NO: 28787 - DNA, 19 bp, Artificial Sequence
  Synthetic: FXN 3 reverse 9:69038487-69038509; SpCas9
ataatattttgtatgtact

SEQ ID NO: 28788 - DNA, 18 bp, Artificial Sequence
  Synthetic: FXN 3 reverse 9:69038488-69038509; SpCas9
taatattttgtatgtact

SEQ ID NO: 28789 - DNA, 25 bp, Artificial Sequence
  Synthetic: FXN 3 reverse 9:69038482-69038510; SpCas9
tggaatgataatattttgtatgtac

SEQ ID NO: 28790 - DNA, 24 bp, Artificial Sequence
  Synthetic: FXN 3 reverse 9:69038483-69038510; SpCas9
ggaatgataatattttgtatgtac

SEQ ID NO: 28791 - DNA, 23 bp, Artificial Sequence
  Synthetic: FXN 3 reverse 9:69038484-69038510; SpCas9
gaatgataatattttgtatgtac

SEQ ID NO: 28792 - DNA, 22 bp, Artificial Sequence
  Synthetic: FXN 3 reverse 9:69038485-69038510; SpCas9
aatgataatattttgtatgtac

SEQ ID NO: 28793 - DNA, 21 bp, Artificial Sequence
  Synthetic: FXN 3 reverse 9:69038486-69038510; SpCas9
atgataatattttgtatgtac

SEQ ID NO: 28794 - DNA, 20 bp, Artificial Sequence
  Synthetic: FXN 3 reverse 9:69038487-69038510; SpCas9
tgataatattttgtatgtac

SEQ ID NO: 28795 - DNA, 19 bp, Artificial Sequence
  Synthetic: FXN 3 reverse 9:69038488-69038510; SpCas9
gataatattttgtatgtac

SEQ ID NO: 28796 - DNA, 18 bp, Artificial Sequence
  Synthetic: FXN 3 reverse 9:69038489-69038510; SpCas9
ataatattttgtatgtac

SEQ ID NO: 28797 - DNA, 25 bp, Artificial Sequence
  Synthetic: FXN 3 forward 9:69038494-69038522; SpCas9
aaatattatcattccaacatgtaat

SEQ ID NO: 28798 - DNA, 24 bp, Artificial Sequence
  Synthetic: FXN 3 forward 9:69038495-69038522; SpCas9
aatattatcattccaacatgtaat

SEQ ID NO: 28799 - DNA, 23 bp, Artificial Sequence
  Synthetic: FXN 3 forward 9:69038496-69038522; SpCas9
atattatcattccaacatgtaat

SEQ ID NO: 28800 - DNA, 22 bp, Artificial Sequence
  Synthetic: FXN 3 forward 9:69038497-69038522; SpCas9
tattatcattccaacatgtaat

SEQ ID NO: 28801 - DNA, 21 bp, Artificial Sequence
  Synthetic: FXN 3 forward 9:69038498-69038522; SpCas9
attatcattccaacatgtaat

SEQ ID NO: 28802 - DNA, 20 bp, Artificial Sequence
  Synthetic: FXN 3 forward 9:69038499-69038522; SpCas9
ttatcattccaacatgtaat

SEQ ID NO: 28803 - DNA, 19 bp, Artificial Sequence
  Synthetic: FXN 3 forward 9:69038500-69038522; SpCas9
tatcattccaacatgtaat

SEQ ID NO: 28804 - DNA, 18 bp, Artificial Sequence
  Synthetic: FXN 3 forward 9:69038501-69038522; SpCas9
atcattccaacatgtaat

SEQ ID NO: 28805 - DNA, 25 bp, Artificial Sequence
  Synthetic: FXN 3 reverse 9:69038507-69038535; SpCas9
gatttttaaaatactgattacatgt

SEQ ID NO: 28806 - DNA, 24 bp, Artificial Sequence
  Synthetic: FXN 3 reverse 9:69038508-69038535; SpCas9
atttttaaaatactgattacatgt

SEQ ID NO: 28807 - DNA, 23 bp, Artificial Sequence
  Synthetic: FXN 3 reverse 9:69038509-69038535; SpCas9
tttttaaaatactgattacatgt

SEQ ID NO: 28808 - DNA, 22 bp, Artificial Sequence
  Synthetic: FXN 3 reverse 9:69038510-69038535; SpCas9
ttttaaaatactgattacatgt

SEQ ID NO: 28809 - DNA, 21 bp, Artificial Sequence
  Synthetic: FXN 3 reverse 9:69038511-69038535; SpCas9
tttaaaatactgattacatgt

SEQ ID NO: 28810 - DNA, 20 bp, Artificial Sequence
  Synthetic: FXN 3 reverse 9:69038512-69038535; SpCas9
ttaaaatactgattacatgt

SEQ ID NO: 28811 - DNA, 19 bp, Artificial Sequence
  Synthetic: FXN 3 reverse 9:69038513-69038535; SpCas9
taaaatactgattacatgt

SEQ ID NO: 28812 - DNA, 18 bp, Artificial Sequence
  Synthetic: FXN 3 reverse 9:69038514-69038535; SpCas9
aaaatactgattacatgt

SEQ ID NO: 28813 - DNA, 25 bp, Artificial Sequence
  Synthetic: FXN 3 forward 9:69038509-69038537; SpCas9
aacatgtaatcagtattttaaaaat

SEQ ID NO: 28814 - DNA, 24 bp, Artificial Sequence
  Synthetic: FXN 3 forward 9:69038510-69038537; SpCas9
acatgtaatcagtattttaaaaat

SEQ ID NO: 28815 - DNA, 23 bp, Artificial Sequence
  Synthetic: FXN 3 forward 9:69038511-69038537; SpCas9
catgtaatcagtattttaaaaat

SEQ ID NO: 28816 - DNA, 22 bp, Artificial Sequence
  Synthetic: FXN 3 forward 9:69038512-69038537; SpCas9
atgtaatcagtattttaaaaat

SEQ ID NO: 28817 - DNA, 21 bp, Artificial Sequence
  Synthetic: FXN 3 forward 9:69038513-69038537; SpCas9
tgtaatcagtattttaaaaat

SEQ ID NO: 28818 - DNA, 20 bp, Artificial Sequence
  Synthetic: FXN 3 forward 9:69038514-69038537; SpCas9
gtaatcagtattttaaaaat

SEQ ID NO: 28819 - DNA, 19 bp, Artificial Sequence
  Synthetic: FXN 3 forward 9:69038515-69038537; SpCas9
taatcagtattttaaaaat

SEQ ID NO: 28820 - DNA, 18 bp, Artificial Sequence
  Synthetic: FXN 3 forward 9:69038516-69038537; SpCas9
aatcagtattttaaaaat

SEQ ID NO: 28821 - DNA, 25 bp, Artificial Sequence
  Synthetic: FXN 3 forward 9:69038516-69038544; SpCas9
aatcagtattttaaaaatcagtaat

SEQ ID NO: 28822 - DNA, 24 bp, Artificial Sequence
  Synthetic: FXN 3 forward 9:69038517-69038544; SpCas9
atcagtattttaaaaatcagtaat

SEQ ID NO: 28823 - DNA, 23 bp, Artificial Sequence
  Synthetic: FXN 3 forward 9:69038518-69038544; SpCas9
tcagtattttaaaaatcagtaat

SEQ ID NO: 28824 - DNA, 22 bp, Artificial Sequence
  Synthetic: FXN 3 forward 9:69038519-69038544; SpCas9
cagtattttaaaaatcagtaat

SEQ ID NO: 28825 - DNA, 21 bp, Artificial Sequence
  Synthetic: FXN 3 forward 9:69038520-69038544; SpCas9
agtattttaaaaatcagtaat

SEQ ID NO: 28826 - DNA, 20 bp, Artificial Sequence
  Synthetic: FXN 3 forward 9:69038521-69038544; SpCas9
gtattttaaaaatcagtaat

SEQ ID NO: 28827 - DNA, 19 bp, Artificial Sequence
  Synthetic: FXN 3 forward 9:69038522-69038544; SpCas9
tattttaaaaatcagtaat

SEQ ID NO: 28828 - DNA, 18 bp, Artificial Sequence
  Synthetic: FXN 3 forward 9:69038523-69038544; SpCas9
attttaaaaatcagtaat

SEQ ID NO: 28829 - DNA, 25 bp, Artificial Sequence
  Synthetic: FXN 3 forward 9:69038521-69038549; SpCas9
gtattttaaaaatcagtaatgagac

SEQ ID NO: 28830 - DNA, 24 bp, Artificial Sequence
  Synthetic: FXN 3 forward 9:69038522-69038549; SpCas9
tattttaaaaatcagtaatgagac

SEQ ID NO: 28831 - DNA, 23 bp, Artificial Sequence
  Synthetic: FXN 3 forward 9:69038523-69038549; SpCas9
attttaaaaatcagtaatgagac

SEQ ID NO: 28832 - DNA, 22 bp, Artificial Sequence
  Synthetic: FXN 3 forward 9:69038524-69038549; SpCas9
ttttaaaaatcagtaatgagac

SEQ ID NO: 28833 - DNA, 21 bp, Artificial Sequence
  Synthetic: FXN 3 forward 9:69038525-69038549; SpCas9
tttaaaaatcagtaatgagac

SEQ ID NO: 28834 - DNA, 20 bp, Artificial Sequence
  Synthetic: FXN 3 forward 9:69038526-69038549; SpCas9
ttaaaaatcagtaatgagac

SEQ ID NO: 28835 - DNA, 19 bp, Artificial Sequence
  Synthetic: FXN 3 forward 9:69038527-69038549; SpCas9
taaaaatcagtaatgagac

SEQ ID NO: 28836 - DNA, 18 bp, Artificial Sequence
  Synthetic: FXN 3 forward 9:69038528-69038549; SpCas9
aaaaatcagtaatgagac

SEQ ID NO: 28837 - DNA, 25 bp, Artificial Sequence
  Synthetic: FXN 3 forward 9:69038522-69038550; SpCas9
tattttaaaaatcagtaatgagacc

SEQ ID NO: 28838 - DNA, 24 bp, Artificial Sequence
  Synthetic: FXN 3 forward 9:69038523-69038550; SpCas9
attttaaaaatcagtaatgagacc

SEQ ID NO: 28839 - DNA, 23 bp, Artificial Sequence
  Synthetic: FXN 3 forward 9:69038524-69038550; SpCas9
ttttaaaaatcagtaatgagacc

SEQ ID NO: 28840 - DNA, 22 bp, Artificial Sequence
  Synthetic: FXN 3 forward 9:69038525-69038550; SpCas9
tttaaaaatcagtaatgagacc

SEQ ID NO: 28841 - DNA, 21 bp, Artificial Sequence
  Synthetic: FXN 3 forward 9:69038526-69038550; SpCas9
ttaaaaatcagtaatgagacc

SEQ ID NO: 28842 - DNA, 20 bp, Artificial Sequence
  Synthetic: FXN 3 forward 9:69038527-69038550; SpCas9
taaaaatcagtaatgagacc

SEQ ID NO: 28843 - DNA, 19 bp, Artificial Sequence
  Synthetic: FXN 3 forward 9:69038528-69038550; SpCas9
aaaaatcagtaatgagacc

SEQ ID NO: 28844 - DNA, 18 bp, Artificial Sequence
  Synthetic: FXN 3 forward 9:69038529-69038550; SpCas9
aaaatcagtaatgagacc

SEQ ID NO: 28845 - DNA, 25 bp, Artificial Sequence
  Synthetic: FXN 3 forward 9:69038527-69038555; SpCas9
taaaaatcagtaatgagaccaggca

SEQ ID NO: 28846 - DNA, 24 bp, Artificial Sequence
  Synthetic: FXN 3 forward 9:69038528-69038555; SpCas9
aaaaatcagtaatgagaccaggca

SEQ ID NO: 28847 - DNA, 23 bp, Artificial Sequence
  Synthetic: FXN 3 forward 9:69038529-69038555; SpCas9
aaaatcagtaatgagaccaggca

SEQ ID NO: 28848 - DNA, 22 bp, Artificial Sequence
  Synthetic: FXN 3 forward 9:69038530-69038555; SpCas9
aaatcagtaatgagaccaggca

SEQ ID NO: 28849 - DNA, 21 bp, Artificial Sequence
  Synthetic: FXN 3 forward 9:69038531-69038555; SpCas9
aatcagtaatgagaccaggca

SEQ ID NO: 28850 - DNA, 20 bp, Artificial Sequence
  Synthetic: FXN 3 forward 9:69038532-69038555; SpCas9
atcagtaatgagaccaggca

SEQ ID NO: 28851 - DNA, 19 bp, Artificial Sequence
  Synthetic: FXN 3 forward 9:69038533-69038555; SpCas9
tcagtaatgagaccaggca

SEQ ID NO: 28852 - DNA, 18 bp, Artificial Sequence
  Synthetic: FXN 3 forward 9:69038534-69038555; SpCas9
cagtaatgagaccaggca

SEQ ID NO: 28853 - DNA, 25 bp, Artificial Sequence
  Synthetic: FXN 3 forward 9:69038530-69038558; SpCas9
aaatcagtaatgagaccaggcacgg

SEQ ID NO: 28854 - DNA, 24 bp, Artificial Sequence
  Synthetic: FXN 3 forward 9:69038531-69038558; SpCas9
aatcagtaatgagaccaggcacgg

SEQ ID NO: 28855 - DNA, 23 bp, Artificial Sequence
  Synthetic: FXN 3 forward 9:69038532-69038558; SpCas9
atcagtaatgagaccaggcacgg

SEQ ID NO: 28856 - DNA, 22 bp, Artificial Sequence
  Synthetic: FXN 3 forward 9:69038533-69038558; SpCas9
tcagtaatgagaccaggcacgg

SEQ ID NO: 28857 - DNA, 21 bp, Artificial Sequence
  Synthetic: FXN 3 forward 9:69038534-69038558; SpCas9
cagtaatgagaccaggcacgg

SEQ ID NO: 28858 - DNA, 20 bp, Artificial Sequence
  Synthetic: FXN 3 forward 9:69038535-69038558; SpCas9
agtaatgagaccaggcacgg

SEQ ID NO: 28859 - DNA, 19 bp, Artificial Sequence
  Synthetic: FXN 3 forward 9:69038536-69038558; SpCas9
gtaatgagaccaggcacgg

SEQ ID NO: 28860 - DNA, 18 bp, Artificial Sequence
  Synthetic: FXN 3 forward 9:69038537-69038558; SpCas9
taatgagaccaggcacgg

SEQ ID NO: 28861 - DNA, 25 bp, Artificial Sequence
  Synthetic: FXN 3 reverse 9:69038545-69038573; SpCas9
gattacagtcgtgagccaccgtgcc

SEQ ID NO: 28862 - DNA, 24 bp, Artificial Sequence
  Synthetic: FXN 3 reverse 9:69038546-69038573; SpCas9
attacagtcgtgagccaccgtgcc

SEQ ID NO: 28863 - DNA, 23 bp, Artificial Sequence
  Synthetic: FXN 3 reverse 9:69038547-69038573; SpCas9
ttacagtcgtgagccaccgtgcc

SEQ ID NO: 28864 - DNA, 22 bp, Artificial Sequence
  Synthetic: FXN 3 reverse 9:69038548-69038573; SpCas9
tacagtcgtgagccaccgtgcc

SEQ ID NO: 28865 - DNA, 21 bp, Artificial Sequence
  Synthetic: FXN 3 reverse 9:69038549-69038573; SpCas9
acagtcgtgagccaccgtgcc

SEQ ID NO: 28866 - DNA, 20 bp, Artificial Sequence
  Synthetic: FXN 3 reverse 9:69038550-69038573; SpCas9
cagtcgtgagccaccgtgcc

SEQ ID NO: 28867 - DNA, 19 bp, Artificial Sequence
  Synthetic: FXN 3 reverse 9:69038551-69038573; SpCas9
agtcgtgagccaccgtgcc

SEQ ID NO: 28868 - DNA, 18 bp, Artificial Sequence
  Synthetic: FXN 3 reverse 9:69038552-69038573; SpCas9
gtcgtgagccaccgtgcc

SEQ ID NO: 28869 - DNA, 25 bp, Artificial Sequence
  Synthetic: FXN 3 forward 9:69038549-69038577; SpCas9
gcacggtggctcacgactgtaatcc

SEQ ID NO: 28870 - DNA, 24 bp, Artificial Sequence
  Synthetic: FXN 3 forward 9:69038550-69038577; SpCas9
cacggtggctcacgactgtaatcc

SEQ ID NO: 28871 - DNA, 23 bp, Artificial Sequence
  Synthetic: FXN 3 forward 9:69038551-69038577; SpCas9
acggtggctcacgactgtaatcc

SEQ ID NO: 28872 - DNA, 22 bp, Artificial Sequence
  Synthetic: FXN 3 forward 9:69038552-69038577; SpCas9
cggtggctcacgactgtaatcc

SEQ ID NO: 28873 - DNA, 21 bp, Artificial Sequence
  Synthetic: FXN 3 forward 9:69038553-69038577; SpCas9
ggtggctcacgactgtaatcc

SEQ ID NO: 28874 - DNA, 20 bp, Artificial Sequence
  Synthetic: FXN 3 forward 9:69038554-69038577; SpCas9
gtggctcacgactgtaatcc

SEQ ID NO: 28875 - DNA, 19 bp, Artificial Sequence
  Synthetic: FXN 3 forward 9:69038555-69038577; SpCas9
tggctcacgactgtaatcc

SEQ ID NO: 28876 - DNA, 18 bp, Artificial Sequence
  Synthetic: FXN 3 forward 9:69038556-69038577; SpCas9
ggctcacgactgtaatcc

SEQ ID NO: 28877 - DNA, 25 bp, Artificial Sequence
  Synthetic: FXN 3 forward 9:69038550-69038578; SpCas9
cacggtggctcacgactgtaatccc

SEQ ID NO: 28878 - DNA, 24 bp, Artificial Sequence
  Synthetic: FXN 3 forward 9:69038551-69038578; SpCas9
acggtggctcacgactgtaatccc

SEQ ID NO: 28879 - DNA, 23 bp, Artificial Sequence
  Synthetic: FXN 3 forward 9:69038552-69038578; SpCas9
cggtggctcacgactgtaatccc

SEQ ID NO: 28880 - DNA, 22 bp, Artificial Sequence
  Synthetic: FXN 3 forward 9:69038553-69038578; SpCas9
ggtggctcacgactgtaatccc

SEQ ID NO: 28881 - DNA, 21 bp, Artificial Sequence
  Synthetic: FXN 3 forward 9:69038554-69038578; SpCas9
gtggctcacgactgtaatccc

SEQ ID NO: 28882 - DNA, 20 bp, Artificial Sequence
  Synthetic: FXN 3 forward 9:69038555-69038578; SpCas9
tggctcacgactgtaatccc

SEQ ID NO: 28883 - DNA, 19 bp, Artificial Sequence
  Synthetic: FXN 3 forward 9:69038556-69038578; SpCas9
ggctcacgactgtaatccc

SEQ ID NO: 28884 - DNA, 18 bp, Artificial Sequence
  Synthetic: FXN 3 forward 9:69038557-69038578; SpCas9
gctcacgactgtaatccc

SEQ ID NO: 28885 - DNA, 25 bp, Artificial Sequence
  Synthetic: FXN 3 forward 9:69038557-69038585; SpCas9
gctcacgactgtaatcccaggactt

SEQ ID NO: 28886 - DNA, 24 bp, Artificial Sequence
  Synthetic: FXN 3 forward 9:69038558-69038585; SpCas9
ctcacgactgtaatcccaggactt

SEQ ID NO: 28887 - DNA, 23 bp, Artificial Sequence
  Synthetic: FXN 3 forward 9:69038559-69038585; SpCas9
tcacgactgtaatcccaggactt

SEQ ID NO: 28888 - DNA, 22 bp, Artificial Sequence
  Synthetic: FXN 3 forward 9:69038560-69038585; SpCas9
cacgactgtaatcccaggactt

SEQ ID NO: 28889 - DNA, 21 bp, Artificial Sequence
  Synthetic: FXN 3 forward 9:69038561-69038585; SpCas9
acgactgtaatcccaggactt

SEQ ID NO: 28890 - DNA, 20 bp, Artificial Sequence
  Synthetic: FXN 3 forward 9:69038562-69038585; SpCas9
cgactgtaatcccaggactt

SEQ ID NO: 28891 - DNA, 19 bp, Artificial Sequence
  Synthetic: FXN 3 forward 9:69038563-69038585; SpCas9
gactgtaatcccaggactt

SEQ ID NO: 28892 - DNA, 18 bp, Artificial Sequence
  Synthetic: FXN 3 forward 9:69038564-69038585; SpCas9
actgtaatcccaggactt

SEQ ID NO: 28893 - DNA, 25 bp, Artificial Sequence
  Synthetic: FXN 3 forward 9:69038558-69038586; SpCas9
ctcacgactgtaatcccaggacttt

SEQ ID NO: 28894 - DNA, 24 bp, Artificial Sequence
  Synthetic: FXN 3 forward 9:69038559-69038586; SpCas9
tcacgactgtaatcccaggacttt

SEQ ID NO: 28895 - DNA, 23 bp, Artificial Sequence
  Synthetic: FXN 3 forward 9:69038560-69038586; SpCas9
cacgactgtaatcccaggacttt

SEQ ID NO: 28896 - DNA, 22 bp, Artificial Sequence
  Synthetic: FXN 3 forward 9:69038561-69038586; SpCas9
acgactgtaatcccaggacttt

SEQ ID NO: 28897 - DNA, 21 bp, Artificial Sequence
  Synthetic: FXN 3 forward 9:69038562-69038586; SpCas9
cgactgtaatcccaggacttt

SEQ ID NO: 28898 - DNA, 20 bp, Artificial Sequence
  Synthetic: FXN 3 forward 9:69038563-69038586; SpCas9
gactgtaatcccaggacttt

SEQ ID NO: 28899 - DNA, 19 bp, Artificial Sequence
  Synthetic: FXN 3 forward 9:69038564-69038586; SpCas9
actgtaatcccaggacttt

SEQ ID NO: 28900 - DNA, 18 bp, Artificial Sequence
  Synthetic: FXN 3 forward 9:69038565-69038586; SpCas9
ctgtaatcccaggacttt

SEQ ID NO: 28901 - DNA, 25 bp, Artificial Sequence
  Synthetic: FXN 3 reverse 9:69038558-69038586; SpCas9
cccaaagtcctgggattacagtcgt

SEQ ID NO: 28902 - DNA, 24 bp, Artificial Sequence
  Synthetic: FXN 3 reverse 9:69038559-69038586; SpCas9
ccaaagtcctgggattacagtcgt

SEQ ID NO: 28903 - DNA, 23 bp, Artificial Sequence
  Synthetic: FXN 3 reverse 9:69038560-69038586; SpCas9
caaagtcctgggattacagtcgt

SEQ ID NO: 28904 - DNA, 22 bp, Artificial Sequence
  Synthetic: FXN 3 reverse 9:69038561-69038586; SpCas9
aaagtcctgggattacagtcgt

SEQ ID NO: 28905 - DNA, 21 bp, Artificial Sequence
  Synthetic: FXN 3 reverse 9:69038562-69038586; SpCas9
aagtcctgggattacagtcgt

SEQ ID NO: 28906 - DNA, 20 bp, Artificial Sequence
  Synthetic: FXN 3 reverse 9:69038563-69038586; SpCas9
agtcctgggattacagtcgt

SEQ ID NO: 28907 - DNA, 19 bp, Artificial Sequence
  Synthetic: FXN 3 reverse 9:69038564-69038586; SpCas9
gtcctgggattacagtcgt

SEQ ID NO: 28908 - DNA, 18 bp, Artificial Sequence
  Synthetic: FXN 3 reverse 9:69038565-69038586; SpCas9
tcctgggattacagtcgt

SEQ ID NO: 28909 - DNA, 25 bp, Artificial Sequence
  Synthetic: FXN 3 forward 9:69038560-69038588; SpCas9
cacgactgtaatcccaggactttgg

SEQ ID NO: 28910 - DNA, 24 bp, Artificial Sequence
  Synthetic: FXN 3 forward 9:69038561-69038588; SpCas9
acgactgtaatcccaggactttgg

SEQ ID NO: 28911 - DNA, 23 bp, Artificial Sequence
  Synthetic: FXN 3 forward 9:69038562-69038588; SpCas9
cgactgtaatcccaggactttgg

SEQ ID NO: 28912 - DNA, 22 bp, Artificial Sequence
  Synthetic: FXN 3 forward 9:69038563-69038588; SpCas9
gactgtaatcccaggactttgg

SEQ ID NO: 28913 - DNA, 21 bp, Artificial Sequence
  Synthetic: FXN 3 forward 9:69038564-69038588; SpCas9
actgtaatcccaggactttgg

SEQ ID NO: 28914 - DNA, 20 bp, Artificial Sequence
  Synthetic: FXN 3 forward 9:69038565-69038588; SpCas9
ctgtaatcccaggactttgg

SEQ ID NO: 28915 - DNA, 19 bp, Artificial Sequence
  Synthetic: FXN 3 forward 9:69038566-69038588; SpCas9
tgtaatcccaggactttgg

SEQ ID NO: 28916 - DNA, 18 bp, Artificial Sequence
  Synthetic: FXN 3 forward 9:69038567-69038588; SpCas9
gtaatcccaggactttgg

SEQ ID NO: 28917 - DNA, 25 bp, Artificial Sequence
  Synthetic: FXN 3 forward 9:69038561-69038589; SpCas9
acgactgtaatcccaggactttggg

SEQ ID NO: 28918 - DNA, 24 bp, Artificial Sequence
  Synthetic: FXN 3 forward 9:69038562-69038589; SpCas9
cgactgtaatcccaggactttggg

SEQ ID NO: 28919 - DNA, 23 bp, Artificial Sequence
  Synthetic: FXN 3 forward 9:69038563-69038589; SpCas9
gactgtaatcccaggactttggg

SEQ ID NO: 28920 - DNA, 22 bp, Artificial Sequence
  Synthetic: FXN 3 forward 9:69038564-69038589; SpCas9
actgtaatcccaggactttggg

SEQ ID NO: 28921 - DNA, 21 bp, Artificial Sequence
  Synthetic: FXN 3 forward 9:69038565-69038589; SpCas9
ctgtaatcccaggactttggg

SEQ ID NO: 28922 - DNA, 20 bp, Artificial Sequence
  Synthetic: FXN 3 forward 9:69038566-69038589; SpCas9
tgtaatcccaggactttggg

SEQ ID NO: 28923 - DNA, 19 bp, Artificial Sequence
  Synthetic: FXN 3 forward 9:69038567-69038589; SpCas9
gtaatcccaggactttggg

SEQ ID NO: 28924 - DNA, 18 bp, Artificial Sequence
  Synthetic: FXN 3 forward 9:69038568-69038589; SpCas9
taatcccaggactttggg

SEQ ID NO: 28925 - DNA, 25 bp, Artificial Sequence
  Synthetic: FXN 3 reverse 9:69038565-69038593; SpCas9
tcggcctcccaaagtcctgggatta

SEQ ID NO: 28926 - DNA, 24 bp, Artificial Sequence
  Synthetic: FXN 3 reverse 9:69038566-69038593; SpCas9
cggcctcccaaagtcctgggatta

SEQ ID NO: 28927 - DNA, 23 bp, Artificial Sequence
  Synthetic: FXN 3 reverse 9:69038567-69038593; SpCas9
ggcctcccaaagtcctgggatta

SEQ ID NO: 28928 - DNA, 22 bp, Artificial Sequence
  Synthetic: FXN 3 reverse 9:69038568-69038593; SpCas9
gcctcccaaagtcctgggatta

SEQ ID NO: 28929 - DNA, 21 bp, Artificial Sequence
  Synthetic: FXN 3 reverse 9:69038569-69038593; SpCas9
cctcccaaagtcctgggatta

SEQ ID NO: 28930 - DNA, 20 bp, Artificial Sequence
  Synthetic: FXN 3 reverse 9:69038570-69038593; SpCas9
ctcccaaagtcctgggatta

SEQ ID NO: 28931 - DNA, 19 bp, Artificial Sequence
  Synthetic: FXN 3 reverse 9:69038571-69038593; SpCas9
tcccaaagtcctgggatta

SEQ ID NO: 28932 - DNA, 18 bp, Artificial Sequence
  Synthetic: FXN 3 reverse 9:69038572-69038593; SpCas9
cccaaagtcctgggatta

SEQ ID NO: 28933 - DNA, 25 bp, Artificial Sequence
  Synthetic: FXN 3 forward 9:69038566-69038594; SpCas9
tgtaatcccaggactttgggaggcc

SEQ ID NO: 28934 - DNA, 24 bp, Artificial Sequence
  Synthetic: FXN 3 forward 9:69038567-69038594; SpCas9
gtaatcccaggactttgggaggcc

SEQ ID NO: 28935 - DNA, 23 bp, Artificial Sequence
  Synthetic: FXN 3 forward 9:69038568-69038594; SpCas9
taatcccaggactttgggaggcc

SEQ ID NO: 28936 - DNA, 22 bp, Artificial Sequence
  Synthetic: FXN 3 forward 9:69038569-69038594; SpCas9
aatcccaggactttgggaggcc

SEQ ID NO: 28937 - DNA, 21 bp, Artificial Sequence
  Synthetic: FXN 3 forward 9:69038570-69038594; SpCas9
atcccaggactttgggaggcc

SEQ ID NO: 28938 - DNA, 20 bp, Artificial Sequence
  Synthetic: FXN 3 forward 9:69038571-69038594; SpCas9
tcccaggactttgggaggcc

SEQ ID NO: 28939 - DNA, 19 bp, Artificial Sequence
  Synthetic: FXN 3 forward 9:69038572-69038594; SpCas9
cccaggactttgggaggcc

SEQ ID NO: 28940 - DNA, 18 bp, Artificial Sequence
  Synthetic: FXN 3 forward 9:69038573-69038594; SpCas9
ccaggactttgggaggcc

SEQ ID NO: 28941 - DNA, 25 bp, Artificial Sequence
  Synthetic: FXN 3 forward 9:69038567-69038595; SpCas9
gtaatcccaggactttgggaggccg

SEQ ID NO: 28942 - DNA, 24 bp, Artificial Sequence
  Synthetic: FXN 3 forward 9:69038568-69038595; SpCas9
taatcccaggactttgggaggccg

SEQ ID NO: 28943 - DNA, 23 bp, Artificial Sequence
  Synthetic: FXN 3 forward 9:69038569-69038595; SpCas9
aatcccaggactttgggaggccg

SEQ ID NO: 28944 - DNA, 22 bp, Artificial Sequence
  Synthetic: FXN 3 forward 9:69038570-69038595; SpCas9
atcccaggactttgggaggccg

SEQ ID NO: 28945 - DNA, 21 bp, Artificial Sequence
  Synthetic: FXN 3 forward 9:69038571-69038595; SpCas9
tcccaggactttgggaggccg

SEQ ID NO: 28946 - DNA, 20 bp, Artificial Sequence
  Synthetic: FXN 3 forward 9:69038572-69038595; SpCas9
cccaggactttgggaggccg

SEQ ID NO: 28947 - DNA, 19 bp, Artificial Sequence
  Synthetic: FXN 3 forward 9:69038573-69038595; SpCas9
ccaggactttgggaggccg

SEQ ID NO: 28948 - DNA, 18 bp, Artificial Sequence
  Synthetic: FXN 3 forward 9:69038574-69038595; SpCas9
caggactttgggaggccg

SEQ ID NO: 28949 - DNA, 25 bp, Artificial Sequence
  Synthetic: FXN 3 forward 9:69038571-69038599; SpCas9
tcccaggactttgggaggccgaggc

SEQ ID NO: 28950 - DNA, 24 bp, Artificial Sequence
  Synthetic: FXN 3 forward 9:69038572-69038599; SpCas9
cccaggactttgggaggccgaggc

SEQ ID NO: 28951 - DNA, 23 bp, Artificial Sequence
  Synthetic: FXN 3 forward 9:69038573-69038599; SpCas9
ccaggactttgggaggccgaggc

SEQ ID NO: 28952 - DNA, 22 bp, Artificial Sequence
  Synthetic: FXN 3 forward 9:69038574-69038599; SpCas9
caggactttgggaggccgaggc

SEQ ID NO: 28953 - DNA, 21 bp, Artificial Sequence
  Synthetic: FXN 3 forward 9:69038575-69038599; SpCas9
aggactttgggaggccgaggc

SEQ ID NO: 28954 - DNA, 20 bp, Artificial Sequence
  Synthetic: FXN 3 forward 9:69038576-69038599; SpCas9
ggactttgggaggccgaggc

SEQ ID NO: 28955 - DNA, 19 bp, Artificial Sequence
  Synthetic: FXN 3 forward 9:69038577-69038599; SpCas9
gactttgggaggccgaggc

SEQ ID NO: 28956 - DNA, 18 bp, Artificial Sequence
  Synthetic: FXN 3 forward 9:69038578-69038599; SpCas9
actttgggaggccgaggc

SEQ ID NO: 28957 - DNA, 25 bp, Artificial Sequence
  Synthetic: FXN 3 reverse 9:69038572-69038600; SpCas9
actcgcctcggcctcccaaagtcct

SEQ ID NO: 28958 - DNA, 24 bp, Artificial Sequence
  Synthetic: FXN 3 reverse 9:69038573-69038600; SpCas9
ctcgcctcggcctcccaaagtcct

SEQ ID NO: 28959 - DNA, 23 bp, Artificial Sequence
  Synthetic: FXN 3 reverse 9:69038574-69038600; SpCas9
tcgcctcggcctcccaaagtcct

SEQ ID NO: 28960 - DNA, 22 bp, Artificial Sequence
  Synthetic: FXN 3 reverse 9:69038575-69038600; SpCas9
cgcctcggcctcccaaagtcct

SEQ ID NO: 28961 - DNA, 21 bp, Artificial Sequence
  Synthetic: FXN 3 reverse 9:69038576-69038600; SpCas9
gcctcggcctcccaaagtcct

SEQ ID NO: 28962 - DNA, 20 bp, Artificial Sequence
  Synthetic: FXN 3 reverse 9:69038577-69038600; SpCas9
cctcggcctcccaaagtcct

SEQ ID NO: 28963 - DNA, 19 bp, Artificial Sequence
  Synthetic: FXN 3 reverse 9:69038578-69038600; SpCas9
ctcggcctcccaaagtcct

SEQ ID NO: 28964 - DNA, 18 bp, Artificial Sequence
  Synthetic: FXN 3 reverse 9:69038579-69038600; SpCas9
tcggcctcccaaagtcct

SEQ ID NO: 28965 - DNA, 25 bp, Artificial Sequence
  Synthetic: FXN 3 reverse 9:69038573-69038601; SpCas9
cactcgcctcggcctcccaaagtcc

SEQ ID NO: 28966 - DNA, 24 bp, Artificial Sequence
  Synthetic: FXN 3 reverse 9:69038574-69038601; SpCas9
actcgcctcggcctcccaaagtcc

SEQ ID NO: 28967 - DNA, 23 bp, Artificial Sequence
  Synthetic: FXN 3 reverse 9:69038575-69038601; SpCas9
ctcgcctcggcctcccaaagtcc

SEQ ID NO: 28968 - DNA, 22 bp, Artificial Sequence
  Synthetic: FXN 3 reverse 9:69038576-69038601; SpCas9
tcgcctcggcctcccaaagtcc

SEQ ID NO: 28969 - DNA, 21 bp, Artificial Sequence
  Synthetic: FXN 3 reverse 9:69038577-69038601; SpCas9
cgcctcggcctcccaaagtcc

SEQ ID NO: 28970 - DNA, 20 bp, Artificial Sequence
  Synthetic: FXN 3 reverse 9:69038578-69038601; SpCas9
gcctcggcctcccaaagtcc

SEQ ID NO: 28971 - DNA, 19 bp, Artificial Sequence
  Synthetic: FXN 3 reverse 9:69038579-69038601; SpCas9
cctcggcctcccaaagtcc

SEQ ID NO: 28972 - DNA, 18 bp, Artificial Sequence
  Synthetic: FXN 3 reverse 9:69038580-69038601; SpCas9
ctcggcctcccaaagtcc

SEQ ID NO: 28973 - DNA, 25 bp, Artificial Sequence
  Synthetic: FXN 3 forward 9:69038574-69038602; SpCas9
caggactttgggaggccgaggcgag

SEQ ID NO: 28974 - DNA, 24 bp, Artificial Sequence
  Synthetic: FXN 3 forward 9:69038575-69038602; SpCas9
aggactttgggaggccgaggcgag

SEQ ID NO: 28975 - DNA, 23 bp, Artificial Sequence
  Synthetic: FXN 3 forward 9:69038576-69038602; SpCas9
ggactttgggaggccgaggcgag

SEQ ID NO: 28976 - DNA, 22 bp, Artificial Sequence
  Synthetic: FXN 3 forward 9:69038577-69038602; SpCas9
gactttgggaggccgaggcgag

SEQ ID NO: 28977 - DNA, 21 bp, Artificial Sequence
  Synthetic: FXN 3 forward 9:69038578-69038602; SpCas9
actttgggaggccgaggcgag

SEQ ID NO: 28978 - DNA, 20 bp, Artificial Sequence
  Synthetic: FXN 3 forward 9:69038579-69038602; SpCas9
ctttgggaggccgaggcgag

SEQ ID NO: 28979 - DNA, 19 bp, Artificial Sequence
  Synthetic: FXN 3 forward 9:69038580-69038602; SpCas9
tttgggaggccgaggcgag

SEQ ID NO: 28980 - DNA, 18 bp, Artificial Sequence
  Synthetic: FXN 3 forward 9:69038581-69038602; SpCas9
ttgggaggccgaggcgag

SEQ ID NO: 28981 - DNA, 25 bp, Artificial Sequence
  Synthetic: FXN 3 reverse 9:69038579-69038607; SpCas9
atgatccactcgcctcggcctccca

SEQ ID NO: 28982 - DNA, 24 bp, Artificial Sequence
  Synthetic: FXN 3 reverse 9:69038580-69038607; SpCas9
tgatccactcgcctcggcctccca

SEQ ID NO: 28983 - DNA, 23 bp, Artificial Sequence
  Synthetic: FXN 3 reverse 9:69038581-69038607; SpCas9
gatccactcgcctcggcctccca

SEQ ID NO: 28984 - DNA, 22 bp, Artificial Sequence
  Synthetic: FXN 3 reverse 9:69038582-69038607; SpCas9
atccactcgcctcggcctccca

SEQ ID NO: 28985 - DNA, 21 bp, Artificial Sequence
  Synthetic: FXN 3 reverse 9:69038583-69038607; SpCas9
tccactcgcctcggcctccca

SEQ ID NO: 28986 - DNA, 20 bp, Artificial Sequence
  Synthetic: FXN 3 reverse 9:69038584-69038607; SpCas9
ccactcgcctcggcctccca

SEQ ID NO: 28987 - DNA, 19 bp, Artificial Sequence
  Synthetic: FXN 3 reverse 9:69038585-69038607; SpCas9
cactcgcctcggcctccca

SEQ ID NO: 28988 - DNA, 18 bp, Artificial Sequence
  Synthetic: FXN 3 reverse 9:69038586-69038607; SpCas9
actcgcctcggcctccca

SEQ ID NO: 28989 - DNA, 25 bp, Artificial Sequence
  Synthetic: FXN 3 forward 9:69038584-69038612; SpCas9
ggaggccgaggcgagtggatcatct

SEQ ID NO: 28990 - DNA, 24 bp, Artificial Sequence
  Synthetic: FXN 3 forward 9:69038585-69038612; SpCas9
gaggccgaggcgagtggatcatct

SEQ ID NO: 28991 - DNA, 23 bp, Artificial Sequence
  Synthetic: FXN 3 forward 9:69038586-69038612; SpCas9
aggccgaggcgagtggatcatct

SEQ ID NO: 28992 - DNA, 22 bp, Artificial Sequence
  Synthetic: FXN 3 forward 9:69038587-69038612; SpCas9
ggccgaggcgagtggatcatct

SEQ ID NO: 28993 - DNA, 21 bp, Artificial Sequence
  Synthetic: FXN 3 forward 9:69038588-69038612; SpCas9
gccgaggcgagtggatcatct

SEQ ID NO: 28994 - DNA, 20 bp, Artificial Sequence
  Synthetic: FXN 3 forward 9:69038589-69038612; SpCas9
ccgaggcgagtggatcatct

SEQ ID NO: 28995 - DNA, 19 bp, Artificial Sequence
  Synthetic: FXN 3 forward 9:69038590-69038612; SpCas9
cgaggcgagtggatcatct

SEQ ID NO: 28996 - DNA, 18 bp, Artificial Sequence
  Synthetic: FXN 3 forward 9:69038591-69038612; SpCas9
gaggcgagtggatcatct

SEQ ID NO: 28997 - DNA, 25 bp, Artificial Sequence
  Synthetic: FXN 3 forward 9:69038589-69038617; SpCas9
ccgaggcgagtggatcatctgagat

SEQ ID NO: 28998 - DNA, 24 bp, Artificial Sequence
  Synthetic: FXN 3 forward 9:69038590-69038617; SpCas9
cgaggcgagtggatcatctgagat

SEQ ID NO: 28999 - DNA, 23 bp, Artificial Sequence
  Synthetic: FXN 3 forward 9:69038591-69038617; SpCas9
gaggcgagtggatcatctgagat

SEQ ID NO: 29000 - DNA, 22 bp, Artificial Sequence
  Synthetic: FXN 3 forward 9:69038592-69038617; SpCas9
aggcgagtggatcatctgagat

SEQ ID NO: 29001 - DNA, 21 bp, Artificial Sequence
  Synthetic: FXN 3 forward 9:69038593-69038617; SpCas9
ggcgagtggatcatctgagat

SEQ ID NO: 29002 - DNA, 20 bp, Artificial Sequence
  Synthetic: FXN 3 forward 9:69038594-69038617; SpCas9
gcgagtggatcatctgagat

SEQ ID NO: 29003 - DNA, 19 bp, Artificial Sequence
  Synthetic: FXN 3 forward 9:69038595-69038617; SpCas9
cgagtggatcatctgagat

SEQ ID NO: 29004 - DNA, 18 bp, Artificial Sequence
  Synthetic: FXN 3 forward 9:69038596-69038617; SpCas9
gagtggatcatctgagat

SEQ ID NO: 29005 - DNA, 25 bp, Artificial Sequence
  Synthetic: FXN 3 reverse 9:69038589-69038617; SpCas9
ctgatctcagatgatccactcgcct

SEQ ID NO: 29006 - DNA, 24 bp, Artificial Sequence
  Synthetic: FXN 3 reverse 9:69038590-69038617; SpCas9
tgatctcagatgatccactcgcct

SEQ ID NO: 29007 - DNA, 23 bp, Artificial Sequence
  Synthetic: FXN 3 reverse 9:69038591-69038617; SpCas9
gatctcagatgatccactcgcct

SEQ ID NO: 29008 - DNA, 22 bp, Artificial Sequence
  Synthetic: FXN 3 reverse 9:69038592-69038617; SpCas9
atctcagatgatccactcgcct

SEQ ID NO: 29009 - DNA, 21 bp, Artificial Sequence
  Synthetic: FXN 3 reverse 9:69038593-69038617; SpCas9
tctcagatgatccactcgcct

SEQ ID NO: 29010 - DNA, 20 bp, Artificial Sequence
  Synthetic: FXN 3 reverse 9:69038594-69038617; SpCas9
ctcagatgatccactcgcct

SEQ ID NO: 29011 - DNA, 19 bp, Artificial Sequence
  Synthetic: FXN 3 reverse 9:69038595-69038617; SpCas9
tcagatgatccactcgcct

SEQ ID NO: 29012 - DNA, 18 bp, Artificial Sequence
  Synthetic: FXN 3 reverse 9:69038596-69038617; SpCas9
cagatgatccactcgcct

SEQ ID NO: 29013 - DNA, 25 bp, Artificial Sequence
  Synthetic: FXN 3 forward 9:69038590-69038618; SpCas9
cgaggcgagtggatcatctgagatc

SEQ ID NO: 29014 - DNA, 24 bp, Artificial Sequence
  Synthetic: FXN 3 forward 9:69038591-69038618; SpCas9
gaggcgagtggatcatctgagatc

SEQ ID NO: 29015 - DNA, 23 bp, Artificial Sequence
  Synthetic: FXN 3 forward 9:69038592-69038618; SpCas9
aggcgagtggatcatctgagatc

SEQ ID NO: 29016 - DNA, 22 bp, Artificial Sequence
  Synthetic: FXN 3 forward 9:69038593-69038618; SpCas9
ggcgagtggatcatctgagatc

SEQ ID NO: 29017 - DNA, 21 bp, Artificial Sequence
  Synthetic: FXN 3 forward 9:69038594-69038618; SpCas9
gcgagtggatcatctgagatc

SEQ ID NO: 29018 - DNA, 20 bp, Artificial Sequence
  Synthetic: FXN 3 forward 9:69038595-69038618; SpCas9
cgagtggatcatctgagatc

SEQ ID NO: 29019 - DNA, 19 bp, Artificial Sequence
  Synthetic: FXN 3 forward 9:69038596-69038618; SpCas9
gagtggatcatctgagatc

SEQ ID NO: 29020 - DNA, 18 bp, Artificial Sequence
  Synthetic: FXN 3 forward 9:69038597-69038618; SpCas9
agtggatcatctgagatc

SEQ ID NO: 29021 - DNA, 25 bp, Artificial Sequence
  Synthetic: FXN 3 forward 9:69038592-69038620; SpCas9
aggcgagtggatcatctgagatcag

SEQ ID NO: 29022 - DNA, 24 bp, Artificial Sequence
  Synthetic: FXN 3 forward 9:69038593-69038620; SpCas9
ggcgagtggatcatctgagatcag

SEQ ID NO: 29023 - DNA, 23 bp, Artificial Sequence
  Synthetic: FXN 3 forward 9:69038594-69038620; SpCas9
gcgagtggatcatctgagatcag

SEQ ID NO: 29024 - DNA, 22 bp, Artificial Sequence
  Synthetic: FXN 3 forward 9:69038595-69038620; SpCas9
cgagtggatcatctgagatcag

SEQ ID NO: 29025 - DNA, 21 bp, Artificial Sequence
  Synthetic: FXN 3 forward 9:69038596-69038620; SpCas9
gagtggatcatctgagatcag

SEQ ID NO: 29026 - DNA, 20 bp, Artificial Sequence
  Synthetic: FXN 3 forward 9:69038597-69038620; SpCas9
agtggatcatctgagatcag

SEQ ID NO: 29027 - DNA, 19 bp, Artificial Sequence
  Synthetic: FXN 3 forward 9:69038598-69038620; SpCas9
gtggatcatctgagatcag

SEQ ID NO: 29028 - DNA, 18 bp, Artificial Sequence
  Synthetic: FXN 3 forward 9:69038599-69038620; SpCas9
tggatcatctgagatcag

SEQ ID NO: 29029 - DNA, 25 bp, Artificial Sequence
  Synthetic: FXN 3 forward 9:69038598-69038626; SpCas9
gtggatcatctgagatcaggagttc

SEQ ID NO: 29030 - DNA, 24 bp, Artificial Sequence
  Synthetic: FXN 3 forward 9:69038599-69038626; SpCas9
tggatcatctgagatcaggagttc

SEQ ID NO: 29031 - DNA, 23 bp, Artificial Sequence
  Synthetic: FXN 3 forward 9:69038600-69038626; SpCas9
ggatcatctgagatcaggagttc

SEQ ID NO: 29032 - DNA, 22 bp, Artificial Sequence
  Synthetic: FXN 3 forward 9:69038601-69038626; SpCas9
gatcatctgagatcaggagttc

SEQ ID NO: 29033 - DNA, 21 bp, Artificial Sequence
  Synthetic: FXN 3 forward 9:69038602-69038626; SpCas9
atcatctgagatcaggagttc

SEQ ID NO: 29034 - DNA, 20 bp, Artificial Sequence
  Synthetic: FXN 3 forward 9:69038603-69038626; SpCas9
tcatctgagatcaggagttc

SEQ ID NO: 29035 - DNA, 19 bp, Artificial Sequence
  Synthetic: FXN 3 forward 9:69038604-69038626; SpCas9
catctgagatcaggagttc

SEQ ID NO: 29036 - DNA, 18 bp, Artificial Sequence
  Synthetic: FXN 3 forward 9:69038605-69038626; SpCas9
atctgagatcaggagttc

SEQ ID NO: 29037 - DNA, 25 bp, Artificial Sequence
  Synthetic: FXN 3 forward 9:69038603-69038631; SpCas9
tcatctgagatcaggagttcaagac

SEQ ID NO: 29038 - DNA, 24 bp, Artificial Sequence
  Synthetic: FXN 3 forward 9:69038604-69038631; SpCas9
catctgagatcaggagttcaagac

SEQ ID NO: 29039 - DNA, 23 bp, Artificial Sequence
  Synthetic: FXN 3 forward 9:69038605-69038631; SpCas9
atctgagatcaggagttcaagac

SEQ ID NO: 29040 - DNA, 22 bp, Artificial Sequence
  Synthetic: FXN 3 forward 9:69038606-69038631; SpCas9
tctgagatcaggagttcaagac

SEQ ID NO: 29041 - DNA, 21 bp, Artificial Sequence
  Synthetic: FXN 3 forward 9:69038607-69038631; SpCas9
ctgagatcaggagttcaagac

SEQ ID NO: 29042 - DNA, 20 bp, Artificial Sequence
  Synthetic: FXN 3 forward 9:69038608-69038631; SpCas9
tgagatcaggagttcaagac

SEQ ID NO: 29043 - DNA, 19 bp, Artificial Sequence
  Synthetic: FXN 3 forward 9:69038609-69038631; SpCas9
gagatcaggagttcaagac

SEQ ID NO: 29044 - DNA, 18 bp, Artificial Sequence
  Synthetic: FXN 3 forward 9:69038610-69038631; SpCas9
agatcaggagttcaagac

SEQ ID NO: 29045 - DNA, 25 bp, Artificial Sequence
  Synthetic: FXN 3 reverse 9:69038607-69038635; SpCas9
caggctggtcttgaactcctgatct

SEQ ID NO: 29046 - DNA, 24 bp, Artificial Sequence
  Synthetic: FXN 3 reverse 9:69038608-69038635; SpCas9
aggctggtcttgaactcctgatct

SEQ ID NO: 29047 - DNA, 23 bp, Artificial Sequence
  Synthetic: FXN 3 reverse 9:69038609-69038635; SpCas9
ggctggtcttgaactcctgatct

SEQ ID NO: 29048 - DNA, 22 bp, Artificial Sequence
  Synthetic: FXN 3 reverse 9:69038610-69038635; SpCas9
gctggtcttgaactcctgatct

SEQ ID NO: 29049 - DNA, 21 bp, Artificial Sequence
  Synthetic: FXN 3 reverse 9:69038611-69038635; SpCas9
ctggtcttgaactcctgatct

SEQ ID NO: 29050 - DNA, 20 bp, Artificial Sequence
  Synthetic: FXN 3 reverse 9:69038612-69038635; SpCas9
tggtcttgaactcctgatct

SEQ ID NO: 29051 - DNA, 19 bp, Artificial Sequence
  Synthetic: FXN 3 reverse 9:69038613-69038635; SpCas9
ggtcttgaactcctgatct

SEQ ID NO: 29052 - DNA, 18 bp, Artificial Sequence
  Synthetic: FXN 3 reverse 9:69038614-69038635; SpCas9
gtcttgaactcctgatct

SEQ ID NO: 29053 - DNA, 25 bp, Artificial Sequence
  Synthetic: FXN 3 forward 9:69038608-69038636; SpCas9
tgagatcaggagttcaagaccagcc

SEQ ID NO: 29054 - DNA, 24 bp, Artificial Sequence
  Synthetic: FXN 3 forward 9:69038609-69038636; SpCas9
gagatcaggagttcaagaccagcc

SEQ ID NO: 29055 - DNA, 23 bp, Artificial Sequence
  Synthetic: FXN 3 forward 9:69038610-69038636; SpCas9
agatcaggagttcaagaccagcc

SEQ ID NO: 29056 - DNA, 22 bp, Artificial Sequence
  Synthetic: FXN 3 forward 9:69038611-69038636; SpCas9
gatcaggagttcaagaccagcc

SEQ ID NO: 29057 - DNA, 21 bp, Artificial Sequence
  Synthetic: FXN 3 forward 9:69038612-69038636; SpCas9
atcaggagttcaagaccagcc

SEQ ID NO: 29058 - DNA, 20 bp, Artificial Sequence
  Synthetic: FXN 3 forward 9:69038613-69038636; SpCas9
tcaggagttcaagaccagcc

SEQ ID NO: 29059 - DNA, 19 bp, Artificial Sequence
  Synthetic: FXN 3 forward 9:69038614-69038636; SpCas9
caggagttcaagaccagcc

SEQ ID NO: 29060 - DNA, 18 bp, Artificial Sequence
  Synthetic: FXN 3 forward 9:69038615-69038636; SpCas9
aggagttcaagaccagcc

SEQ ID NO: 29061 - DNA, 25 bp, Artificial Sequence
  Synthetic: FXN 3 forward 9:69038617-69038645; SpCas9
gagttcaagaccagcctggccaaca

SEQ ID NO: 29062 - DNA, 24 bp, Artificial Sequence
  Synthetic: FXN 3 forward 9:69038618-69038645; SpCas9
agttcaagaccagcctggccaaca

SEQ ID NO: 29063 - DNA, 23 bp, Artificial Sequence
  Synthetic: FXN 3 forward 9:69038619-69038645; SpCas9
gttcaagaccagcctggccaaca

SEQ ID NO: 29064 - DNA, 22 bp, Artificial Sequence
  Synthetic: FXN 3 forward 9:69038620-69038645; SpCas9
ttcaagaccagcctggccaaca

SEQ ID NO: 29065 - DNA, 21 bp, Artificial Sequence
  Synthetic: FXN 3 forward 9:69038621-69038645; SpCas9
tcaagaccagcctggccaaca

SEQ ID NO: 29066 - DNA, 20 bp, Artificial Sequence
  Synthetic: FXN 3 forward 9:69038622-69038645; SpCas9
caagaccagcctggccaaca

SEQ ID NO: 29067 - DNA, 19 bp, Artificial Sequence
  Synthetic: FXN 3 forward 9:69038623-69038645; SpCas9
aagaccagcctggccaaca

SEQ ID NO: 29068 - DNA, 18 bp, Artificial Sequence
  Synthetic: FXN 3 forward 9:69038624-69038645; SpCas9
agaccagcctggccaaca

SEQ ID NO: 29069 - DNA, 25 bp, Artificial Sequence
  Synthetic: FXN 3 reverse 9:69038627-69038655; SpCas9
tggggtttcaccatgttggccaggc

SEQ ID NO: 29070 - DNA, 24 bp, Artificial Sequence
  Synthetic: FXN 3 reverse 9:69038628-69038655; SpCas9
ggggtttcaccatgttggccaggc

SEQ ID NO: 29071 - DNA, 23 bp, Artificial Sequence
  Synthetic: FXN 3 reverse 9:69038629-69038655; SpCas9
gggtttcaccatgttggccaggc

SEQ ID NO: 29072 - DNA, 22 bp, Artificial Sequence
  Synthetic: FXN 3 reverse 9:69038630-69038655; SpCas9
ggtttcaccatgttggccaggc

SEQ ID NO: 29073 - DNA, 21 bp, Artificial Sequence
  Synthetic: FXN 3 reverse 9:69038631-69038655; SpCas9
gtttcaccatgttggccaggc

SEQ ID NO: 29074 - DNA, 20 bp, Artificial Sequence
  Synthetic: FXN 3 reverse 9:69038632-69038655; SpCas9
tttcaccatgttggccaggc

SEQ ID NO: 29075 - DNA, 19 bp, Artificial Sequence
  Synthetic: FXN 3 reverse 9:69038633-69038655; SpCas9
ttcaccatgttggccaggc

SEQ ID NO: 29076 - DNA, 18 bp, Artificial Sequence
  Synthetic: FXN 3 reverse 9:69038634-69038655; SpCas9
tcaccatgttggccaggc

SEQ ID NO: 29077 - DNA, 25 bp, Artificial Sequence
  Synthetic: FXN 3 reverse 9:69038631-69038659; SpCas9
gagatggggtttcaccatgttggcc

SEQ ID NO: 29078 - DNA, 24 bp, Artificial Sequence
  Synthetic: FXN 3 reverse 9:69038632-69038659; SpCas9
agatggggtttcaccatgttggcc

SEQ ID NO: 29079 - DNA, 23 bp, Artificial Sequence
  Synthetic: FXN 3 reverse 9:69038633-69038659; SpCas9
gatggggtttcaccatgttggcc

SEQ ID NO: 29080 - DNA, 22 bp, Artificial Sequence
  Synthetic: FXN 3 reverse 9:69038634-69038659; SpCas9
atggggtttcaccatgttggcc

SEQ ID NO: 29081 - DNA, 21 bp, Artificial Sequence
  Synthetic: FXN 3 reverse 9:69038635-69038659; SpCas9
tggggtttcaccatgttggcc

SEQ ID NO: 29082 - DNA, 20 bp, Artificial Sequence
  Synthetic: FXN 3 reverse 9:69038636-69038659; SpCas9
ggggtttcaccatgttggcc

SEQ ID NO: 29083 - DNA, 19 bp, Artificial Sequence
  Synthetic: FXN 3 reverse 9:69038637-69038659; SpCas9
gggtttcaccatgttggcc

SEQ ID NO: 29084 - DNA, 18 bp, Artificial Sequence
  Synthetic: FXN 3 reverse 9:69038638-69038659; SpCas9
ggtttcaccatgttggcc

SEQ ID NO: 29085 - DNA, 25 bp, Artificial Sequence
  Synthetic: FXN 3 reverse 9:69038632-69038660; SpCas9
agagatggggtttcaccatgttggc

SEQ ID NO: 29086 - DNA, 24 bp, Artificial Sequence
  Synthetic: FXN 3 reverse 9:69038633-69038660; SpCas9
gagatggggtttcaccatgttggc

SEQ ID NO: 29087 - DNA, 23 bp, Artificial Sequence
  Synthetic: FXN 3 reverse 9:69038634-69038660; SpCas9
agatggggtttcaccatgttggc

SEQ ID NO: 29088 - DNA, 22 bp, Artificial Sequence
  Synthetic: FXN 3 reverse 9:69038635-69038660; SpCas9
gatggggtttcaccatgttggc

SEQ ID NO: 29089 - DNA, 21 bp, Artificial Sequence
  Synthetic: FXN 3 reverse 9:69038636-69038660; SpCas9
atggggtttcaccatgttggc

SEQ ID NO: 29090 - DNA, 20 bp, Artificial Sequence
  Synthetic: FXN 3 reverse 9:69038637-69038660; SpCas9
tggggtttcaccatgttggc

SEQ ID NO: 29091 - DNA, 19 bp, Artificial Sequence
  Synthetic: FXN 3 reverse 9:69038638-69038660; SpCas9
ggggtttcaccatgttggc

SEQ ID NO: 29092 - DNA, 18 bp, Artificial Sequence
  Synthetic: FXN 3 reverse 9:69038639-69038660; SpCas9
gggtttcaccatgttggc

SEQ ID NO: 29093 - DNA, 25 bp, Artificial Sequence
  Synthetic: FXN 3 reverse 9:69038636-69038664; SpCas9
tagtagagatggggtttcaccatgt

SEQ ID NO: 29094 - DNA, 24 bp, Artificial Sequence
  Synthetic: FXN 3 reverse 9:69038637-69038664; SpCas9
agtagagatggggtttcaccatgt

SEQ ID NO: 29095 - DNA, 23 bp, Artificial Sequence
  Synthetic: FXN 3 reverse 9:69038638-69038664; SpCas9
gtagagatggggtttcaccatgt

SEQ ID NO: 29096 - DNA, 22 bp, Artificial Sequence
  Synthetic: FXN 3 reverse 9:69038639-69038664; SpCas9
tagagatggggtttcaccatgt

SEQ ID NO: 29097 - DNA, 21 bp, Artificial Sequence
  Synthetic: FXN 3 reverse 9:69038640-69038664; SpCas9
agagatggggtttcaccatgt

SEQ ID NO: 29098 - DNA, 20 bp, Artificial Sequence
  Synthetic: FXN 3 reverse 9:69038641-69038664; SpCas9
gagatggggtttcaccatgt

SEQ ID NO: 29099 - DNA, 19 bp, Artificial Sequence
  Synthetic: FXN 3 reverse 9:69038642-69038664; SpCas9
agatggggtttcaccatgt

SEQ ID NO: 29100 - DNA, 18 bp, Artificial Sequence
  Synthetic: FXN 3 reverse 9:69038643-69038664; SpCas9
gatggggtttcaccatgt

SEQ ID NO: 29101 - DNA, 25 bp, Artificial Sequence
  Synthetic: FXN 3 forward 9:69038644-69038672; SpCas9
gtgaaaccccatctctactaaaaac

SEQ ID NO: 29102 - DNA, 24 bp, Artificial Sequence
  Synthetic: FXN 3 forward 9:69038645-69038672; SpCas9
tgaaaccccatctctactaaaaac

SEQ ID NO: 29103 - DNA, 23 bp, Artificial Sequence
  Synthetic: FXN 3 forward 9:69038646-69038672; SpCas9
gaaaccccatctctactaaaaac

SEQ ID NO: 29104 - DNA, 22 bp, Artificial Sequence
  Synthetic: FXN 3 forward 9:69038647-69038672; SpCas9
aaaccccatctctactaaaaac

SEQ ID NO: 29105 - DNA, 21 bp, Artificial Sequence
  Synthetic: FXN 3 forward 9:69038648-69038672; SpCas9
aaccccatctctactaaaaac

SEQ ID NO: 29106 - DNA, 20 bp, Artificial Sequence
  Synthetic: FXN 3 forward 9:69038649-69038672; SpCas9
accccatctctactaaaaac

SEQ ID NO: 29107 - DNA, 19 bp, Artificial Sequence
  Synthetic: FXN 3 forward 9:69038650-69038672; SpCas9
ccccatctctactaaaaac

SEQ ID NO: 29108 - DNA, 18 bp, Artificial Sequence
  Synthetic: FXN 3 forward 9:69038651-69038672; SpCas9
cccatctctactaaaaac

SEQ ID NO: 29109 - DNA, 25 bp, Artificial Sequence
  Synthetic: FXN 3 forward 9:69038649-69038677; SpCas9
accccatctctactaaaaactagct

SEQ ID NO: 29110 - DNA, 24 bp, Artificial Sequence
  Synthetic: FXN 3 forward 9:69038650-69038677; SpCas9
ccccatctctactaaaaactagct

SEQ ID NO: 29111 - DNA, 23 bp, Artificial Sequence
  Synthetic: FXN 3 forward 9:69038651-69038677; SpCas9
cccatctctactaaaaactagct

SEQ ID NO: 29112 - DNA, 22 bp, Artificial Sequence
  Synthetic: FXN 3 forward 9:69038652-69038677; SpCas9
ccatctctactaaaaactagct

SEQ ID NO: 29113 - DNA, 21 bp, Artificial Sequence
  Synthetic: FXN 3 forward 9:69038653-69038677; SpCas9
catctctactaaaaactagct

SEQ ID NO: 29114 - DNA, 20 bp, Artificial Sequence
  Synthetic: FXN 3 forward 9:69038654-69038677; SpCas9
atctctactaaaaactagct

SEQ ID NO: 29115 - DNA, 19 bp, Artificial Sequence
  Synthetic: FXN 3 forward 9:69038655-69038677; SpCas9
tctctactaaaaactagct

SEQ ID NO: 29116 - DNA, 18 bp, Artificial Sequence
  Synthetic: FXN 3 forward 9:69038656-69038677; SpCas9
ctctactaaaaactagct

SEQ ID NO: 29117 - DNA, 25 bp, Artificial Sequence
  Synthetic: FXN 3 reverse 9:69038650-69038678; SpCas9
gctgagctagtttttagtagagatg

SEQ ID NO: 29118 - DNA, 24 bp, Artificial Sequence
  Synthetic: FXN 3 reverse 9:69038651-69038678; SpCas9
ctgagctagtttttagtagagatg

SEQ ID NO: 29119 - DNA, 23 bp, Artificial Sequence
  Synthetic: FXN 3 reverse 9:69038652-69038678; SpCas9
tgagctagtttttagtagagatg

SEQ ID NO: 29120 - DNA, 22 bp, Artificial Sequence
  Synthetic: FXN 3 reverse 9:69038653-69038678; SpCas9
gagctagtttttagtagagatg

SEQ ID NO: 29121 - DNA, 21 bp, Artificial Sequence
  Synthetic: FXN 3 reverse 9:69038654-69038678; SpCas9
agctagtttttagtagagatg

SEQ ID NO: 29122 - DNA, 20 bp, Artificial Sequence
  Synthetic: FXN 3 reverse 9:69038655-69038678; SpCas9
gctagtttttagtagagatg

SEQ ID NO: 29123 - DNA, 19 bp, Artificial Sequence
  Synthetic: FXN 3 reverse 9:69038656-69038678; SpCas9
ctagtttttagtagagatg

SEQ ID NO: 29124 - DNA, 18 bp, Artificial Sequence
  Synthetic: FXN 3 reverse 9:69038657-69038678; SpCas9
tagtttttagtagagatg

SEQ ID NO: 29125 - DNA, 25 bp, Artificial Sequence
  Synthetic: FXN 3 reverse 9:69038651-69038679; SpCas9
tgctgagctagtttttagtagagat

SEQ ID NO: 29126 - DNA, 24 bp, Artificial Sequence
  Synthetic: FXN 3 reverse 9:69038652-69038679; SpCas9
gctgagctagtttttagtagagat

SEQ ID NO: 29127 - DNA, 23 bp, Artificial Sequence
  Synthetic: FXN 3 reverse 9:69038653-69038679; SpCas9
ctgagctagtttttagtagagat

SEQ ID NO: 29128 - DNA, 22 bp, Artificial Sequence
  Synthetic: FXN 3 reverse 9:69038654-69038679; SpCas9
tgagctagtttttagtagagat

SEQ ID NO: 29129 - DNA, 21 bp, Artificial Sequence
  Synthetic: FXN 3 reverse 9:69038655-69038679; SpCas9
gagctagtttttagtagagat

SEQ ID NO: 29130 - DNA, 20 bp, Artificial Sequence
  Synthetic: FXN 3 reverse 9:69038656-69038679; SpCas9
agctagtttttagtagagat

SEQ ID NO: 29131 - DNA, 19 bp, Artificial Sequence
  Synthetic: FXN 3 reverse 9:69038657-69038679; SpCas9
gctagtttttagtagagat

SEQ ID NO: 29132 - DNA, 18 bp, Artificial Sequence
  Synthetic: FXN 3 reverse 9:69038658-69038679; SpCas9
ctagtttttagtagagat

SEQ ID NO: 29133 - DNA, 25 bp, Artificial Sequence
  Synthetic: FXN 3 reverse 9:69038652-69038680; SpCas9
atgctgagctagtttttagtagaga

SEQ ID NO: 29134 - DNA, 24 bp, Artificial Sequence
  Synthetic: FXN 3 reverse 9:69038653-69038680; SpCas9
tgctgagctagtttttagtagaga

SEQ ID NO: 29135 - DNA, 23 bp, Artificial Sequence
  Synthetic: FXN 3 reverse 9:69038654-69038680; SpCas9
gctgagctagtttttagtagaga

SEQ ID NO: 29136 - DNA, 22 bp, Artificial Sequence
  Synthetic: FXN 3 reverse 9:69038655-69038680; SpCas9
ctgagctagtttttagtagaga

SEQ ID NO: 29137 - DNA, 21 bp, Artificial Sequence
  Synthetic: FXN 3 reverse 9:69038656-69038680; SpCas9
tgagctagtttttagtagaga

SEQ ID NO: 29138 - DNA, 20 bp, Artificial Sequence
  Synthetic: FXN 3 reverse 9:69038657-69038680; SpCas9
gagctagtttttagtagaga

SEQ ID NO: 29139 - DNA, 19 bp, Artificial Sequence
  Synthetic: FXN 3 reverse 9:69038658-69038680; SpCas9
agctagtttttagtagaga

SEQ ID NO: 29140 - DNA, 18 bp, Artificial Sequence
  Synthetic: FXN 3 reverse 9:69038659-69038680; SpCas9
gctagtttttagtagaga

SEQ ID NO: 29141 - DNA, 25 bp, Artificial Sequence
  Synthetic: FXN 3 forward 9:69038654-69038682; SpCas9
atctctactaaaaactagctcagca

SEQ ID NO: 29142 - DNA, 24 bp, Artificial Sequence
  Synthetic: FXN 3 forward 9:69038655-69038682; SpCas9
tctctactaaaaactagctcagca

SEQ ID NO: 29143 - DNA, 23 bp, Artificial Sequence
  Synthetic: FXN 3 forward 9:69038656-69038682; SpCas9
ctctactaaaaactagctcagca

SEQ ID NO: 29144 - DNA, 22 bp, Artificial Sequence
  Synthetic: FXN 3 forward 9:69038657-69038682; SpCas9
tctactaaaaactagctcagca

SEQ ID NO: 29145 - DNA, 21 bp, Artificial Sequence
  Synthetic: FXN 3 forward 9:69038658-69038682; SpCas9
ctactaaaaactagctcagca

SEQ ID NO: 29146 - DNA, 20 bp, Artificial Sequence
  Synthetic: FXN 3 forward 9:69038659-69038682; SpCas9
tactaaaaactagctcagca

SEQ ID NO: 29147 - DNA, 19 bp, Artificial Sequence
  Synthetic: FXN 3 forward 9:69038660-69038682; SpCas9
actaaaaactagctcagca

SEQ ID NO: 29148 - DNA, 18 bp, Artificial Sequence
  Synthetic: FXN 3 forward 9:69038661-69038682; SpCas9
ctaaaaactagctcagca

SEQ ID NO: 29149 - DNA, 25 bp, Artificial Sequence
  Synthetic: FXN 3 reverse 9:69038656-69038684; SpCas9
caccatgctgagctagtttttagta

SEQ ID NO: 29150 - DNA, 24 bp, Artificial Sequence
  Synthetic: FXN 3 reverse 9:69038657-69038684; SpCas9
accatgctgagctagtttttagta

SEQ ID NO: 29151 - DNA, 23 bp, Artificial Sequence
  Synthetic: FXN 3 reverse 9:69038658-69038684; SpCas9
ccatgctgagctagtttttagta

SEQ ID NO: 29152 - DNA, 22 bp, Artificial Sequence
  Synthetic: FXN 3 reverse 9:69038659-69038684; SpCas9
catgctgagctagtttttagta

SEQ ID NO: 29153 - DNA, 21 bp, Artificial Sequence
  Synthetic: FXN 3 reverse 9:69038660-69038684; SpCas9
atgctgagctagtttttagta

SEQ ID NO: 29154 - DNA, 20 bp, Artificial Sequence
  Synthetic: FXN 3 reverse 9:69038661-69038684; SpCas9
tgctgagctagtttttagta

SEQ ID NO: 29155 - DNA, 19 bp, Artificial Sequence
  Synthetic: FXN 3 reverse 9:69038662-69038684; SpCas9
gctgagctagtttttagta

SEQ ID NO: 29156 - DNA, 18 bp, Artificial Sequence
  Synthetic: FXN 3 reverse 9:69038663-69038684; SpCas9
ctgagctagtttttagta

SEQ ID NO: 29157 - DNA, 25 bp, Artificial Sequence
  Synthetic: FXN 3 forward 9:69038657-69038685; SpCas9
tctactaaaaactagctcagcatgg

SEQ ID NO: 29158 - DNA, 24 bp, Artificial Sequence
  Synthetic: FXN 3 forward 9:69038658-69038685; SpCas9
ctactaaaaactagctcagcatgg

SEQ ID NO: 29159 - DNA, 23 bp, Artificial Sequence
  Synthetic: FXN 3 forward 9:69038659-69038685; SpCas9
tactaaaaactagctcagcatgg

SEQ ID NO: 29160 - DNA, 22 bp, Artificial Sequence
  Synthetic: FXN 3 forward 9:69038660-69038685; SpCas9
actaaaaactagctcagcatgg

SEQ ID NO: 29161 - DNA, 21 bp, Artificial Sequence
  Synthetic: FXN 3 forward 9:69038661-69038685; SpCas9
ctaaaaactagctcagcatgg

SEQ ID NO: 29162 - DNA, 20 bp, Artificial Sequence
  Synthetic: FXN 3 forward 9:69038662-69038685; SpCas9
taaaaactagctcagcatgg

SEQ ID NO: 29163 - DNA, 19 bp, Artificial Sequence
  Synthetic: FXN 3 forward 9:69038663-69038685; SpCas9
aaaaactagctcagcatgg

SEQ ID NO: 29164 - DNA, 18 bp, Artificial Sequence
  Synthetic: FXN 3 forward 9:69038664-69038685; SpCas9
aaaactagctcagcatgg

SEQ ID NO: 29165 - DNA, 25 bp, Artificial Sequence
  Synthetic: FXN 3 reverse 9:69038658-69038686; SpCas9
accaccatgctgagctagtttttag

SEQ ID NO: 29166 - DNA, 24 bp, Artificial Sequence
  Synthetic: FXN 3 reverse 9:69038659-69038686; SpCas9
ccaccatgctgagctagtttttag

SEQ ID NO: 29167 - DNA, 23 bp, Artificial Sequence
  Synthetic: FXN 3 reverse 9:69038660-69038686; SpCas9
caccatgctgagctagtttttag

SEQ ID NO: 29168 - DNA, 22 bp, Artificial Sequence
  Synthetic: FXN 3 reverse 9:69038661-69038686; SpCas9
accatgctgagctagtttttag

SEQ ID NO: 29169 - DNA, 21 bp, Artificial Sequence
  Synthetic: FXN 3 reverse 9:69038662-69038686; SpCas9
ccatgctgagctagtttttag

SEQ ID NO: 29170 - DNA, 20 bp, Artificial Sequence
  Synthetic: FXN 3 reverse 9:69038663-69038686; SpCas9
catgctgagctagtttttag

SEQ ID NO: 29171 - DNA, 19 bp, Artificial Sequence
  Synthetic: FXN 3 reverse 9:69038664-69038686; SpCas9
atgctgagctagtttttag

SEQ ID NO: 29172 - DNA, 18 bp, Artificial Sequence
  Synthetic: FXN 3 reverse 9:69038665-69038686; SpCas9
tgctgagctagtttttag

SEQ ID NO: 29173 - DNA, 25 bp, Artificial Sequence
  Synthetic: FXN 3 forward 9:69038660-69038688; SpCas9
actaaaaactagctcagcatggtgg

SEQ ID NO: 29174 - DNA, 24 bp, Artificial Sequence
  Synthetic: FXN 3 forward 9:69038661-69038688; SpCas9
ctaaaaactagctcagcatggtgg

SEQ ID NO: 29175 - DNA, 23 bp, Artificial Sequence
  Synthetic: FXN 3 forward 9:69038662-69038688; SpCas9
taaaaactagctcagcatggtgg

SEQ ID NO: 29176 - DNA, 22 bp, Artificial Sequence
  Synthetic: FXN 3 forward 9:69038663-69038688; SpCas9
aaaaactagctcagcatggtgg

SEQ ID NO: 29177 - DNA, 21 bp, Artificial Sequence
  Synthetic: FXN 3 forward 9:69038664-69038688; SpCas9
aaaactagctcagcatggtgg

SEQ ID NO: 29178 - DNA, 20 bp, Artificial Sequence
  Synthetic: FXN 3 forward 9:69038665-69038688; SpCas9
aaactagctcagcatggtgg

SEQ ID NO: 29179 - DNA, 19 bp, Artificial Sequence
  Synthetic: FXN 3 forward 9:69038666-69038688; SpCas9
aactagctcagcatggtgg

SEQ ID NO: 29180 - DNA, 18 bp, Artificial Sequence
  Synthetic: FXN 3 forward 9:69038667-69038688; SpCas9
actagctcagcatggtgg

SEQ ID NO: 29181 - DNA, 25 bp, Artificial Sequence
  Synthetic: FXN 3 forward 9:69038661-69038689; SpCas9
ctaaaaactagctcagcatggtggt

SEQ ID NO: 29182 - DNA, 24 bp, Artificial Sequence
  Synthetic: FXN 3 forward 9:69038662-69038689; SpCas9
taaaaactagctcagcatggtggt

SEQ ID NO: 29183 - DNA, 23 bp, Artificial Sequence
  Synthetic: FXN 3 forward 9:69038663-69038689; SpCas9
aaaaactagctcagcatggtggt

SEQ ID NO: 29184 - DNA, 22 bp, Artificial Sequence
  Synthetic: FXN 3 forward 9:69038664-69038689; SpCas9
aaaactagctcagcatggtggt

SEQ ID NO: 29185 - DNA, 21 bp, Artificial Sequence
  Synthetic: FXN 3 forward 9:69038665-69038689; SpCas9
aaactagctcagcatggtggt

SEQ ID NO: 29186 - DNA, 20 bp, Artificial Sequence
  Synthetic: FXN 3 forward 9:69038666-69038689; SpCas9
aactagctcagcatggtggt

SEQ ID NO: 29187 - DNA, 19 bp, Artificial Sequence
  Synthetic: FXN 3 forward 9:69038667-69038689; SpCas9
actagctcagcatggtggt

SEQ ID NO: 29188 - DNA, 18 bp, Artificial Sequence
  Synthetic: FXN 3 forward 9:69038668-69038689; SpCas9
ctagctcagcatggtggt

SEQ ID NO: 29189 - DNA, 25 bp, Artificial Sequence
  Synthetic: FXN 3 reverse 9:69038661-69038689; SpCas9
cccaccaccatgctgagctagtttt

SEQ ID NO: 29190 - DNA, 24 bp, Artificial Sequence
  Synthetic: FXN 3 reverse 9:69038662-69038689; SpCas9
ccaccaccatgctgagctagtttt

SEQ ID NO: 29191 - DNA, 23 bp, Artificial Sequence
  Synthetic: FXN 3 reverse 9:69038663-69038689; SpCas9
caccaccatgctgagctagtttt

SEQ ID NO: 29192 - DNA, 22 bp, Artificial Sequence
  Synthetic: FXN 3 reverse 9:69038664-69038689; SpCas9
accaccatgctgagctagtttt

SEQ ID NO: 29193 - DNA, 21 bp, Artificial Sequence
  Synthetic: FXN 3 reverse 9:69038665-69038689; SpCas9
ccaccatgctgagctagtttt

SEQ ID NO: 29194 - DNA, 20 bp, Artificial Sequence
  Synthetic: FXN 3 reverse 9:69038666-69038689; SpCas9
caccatgctgagctagtttt

SEQ ID NO: 29195 - DNA, 19 bp, Artificial Sequence
  Synthetic: FXN 3 reverse 9:69038667-69038689; SpCas9
accatgctgagctagtttt

SEQ ID NO: 29196 - DNA, 18 bp, Artificial Sequence
  Synthetic: FXN 3 reverse 9:69038668-69038689; SpCas9
ccatgctgagctagtttt

SEQ ID NO: 29197 - DNA, 25 bp, Artificial Sequence
  Synthetic: FXN 3 reverse 9:69038668-69038696; SpCas9
acaggcacccaccaccatgctgagc

SEQ ID NO: 29198 - DNA, 24 bp, Artificial Sequence
  Synthetic: FXN 3 reverse 9:69038669-69038696; SpCas9
caggcacccaccaccatgctgagc

SEQ ID NO: 29199 - DNA, 23 bp, Artificial Sequence
  Synthetic: FXN 3 reverse 9:69038670-69038696; SpCas9
aggcacccaccaccatgctgagc

SEQ ID NO: 29200 - DNA, 22 bp, Artificial Sequence
  Synthetic: FXN 3 reverse 9:69038671-69038696; SpCas9
ggcacccaccaccatgctgagc

SEQ ID NO: 29201 - DNA, 21 bp, Artificial Sequence
  Synthetic: FXN 3 reverse 9:69038672-69038696; SpCas9
gcacccaccaccatgctgagc

SEQ ID NO: 29202 - DNA, 20 bp, Artificial Sequence
  Synthetic: FXN 3 reverse 9:69038673-69038696; SpCas9
cacccaccaccatgctgagc

SEQ ID NO: 29203 - DNA, 19 bp, Artificial Sequence
  Synthetic: FXN 3 reverse 9:69038674-69038696; SpCas9
acccaccaccatgctgagc

SEQ ID NO: 29204 - DNA, 18 bp, Artificial Sequence
  Synthetic: FXN 3 reverse 9:69038675-69038696; SpCas9
cccaccaccatgctgagc

SEQ ID NO: 29205 - DNA, 25 bp, Artificial Sequence
  Synthetic: FXN 3 forward 9:69038670-69038698; SpCas9
agctcagcatggtggtgggtgcctg

SEQ ID NO: 29206 - DNA, 24 bp, Artificial Sequence
  Synthetic: FXN 3 forward 9:69038671-69038698; SpCas9
gctcagcatggtggtgggtgcctg

SEQ ID NO: 29207 - DNA, 23 bp, Artificial Sequence
  Synthetic: FXN 3 forward 9:69038672-69038698; SpCas9
ctcagcatggtggtgggtgcctg

SEQ ID NO: 29208 - DNA, 22 bp, Artificial Sequence
  Synthetic: FXN 3 forward 9:69038673-69038698; SpCas9
tcagcatggtggtgggtgcctg

SEQ ID NO: 29209 - DNA, 21 bp, Artificial Sequence
  Synthetic: FXN 3 forward 9:69038674-69038698; SpCas9
cagcatggtggtgggtgcctg

SEQ ID NO: 29210 - DNA, 20 bp, Artificial Sequence
  Synthetic: FXN 3 forward 9:69038675-69038698; SpCas9
agcatggtggtgggtgcctg

SEQ ID NO: 29211 - DNA, 19 bp, Artificial Sequence
  Synthetic: FXN 3 forward 9:69038676-69038698; SpCas9
gcatggtggtgggtgcctg

SEQ ID NO: 29212 - DNA, 18 bp, Artificial Sequence
  Synthetic: FXN 3 forward 9:69038677-69038698; SpCas9
catggtggtgggtgcctg

SEQ ID NO: 29213 - DNA, 25 bp, Artificial Sequence
  Synthetic: FXN 3 reverse 9:69038672-69038700; SpCas9
gactacaggcacccaccaccatgct

SEQ ID NO: 29214 - DNA, 24 bp, Artificial Sequence
  Synthetic: FXN 3 reverse 9:69038673-69038700; SpCas9
actacaggcacccaccaccatgct

SEQ ID NO: 29215 - DNA, 23 bp, Artificial Sequence
  Synthetic: FXN 3 reverse 9:69038674-69038700; SpCas9
ctacaggcacccaccaccatgct

SEQ ID NO: 29216 - DNA, 22 bp, Artificial Sequence
  Synthetic: FXN 3 reverse 9:69038675-69038700; SpCas9
tacaggcacccaccaccatgct

SEQ ID NO: 29217 - DNA, 21 bp, Artificial Sequence
  Synthetic: FXN 3 reverse 9:69038676-69038700; SpCas9
acaggcacccaccaccatgct

SEQ ID NO: 29218 - DNA, 20 bp, Artificial Sequence
  Synthetic: FXN 3 reverse 9:69038677-69038700; SpCas9
caggcacccaccaccatgct

SEQ ID NO: 29219 - DNA, 19 bp, Artificial Sequence
  Synthetic: FXN 3 reverse 9:69038678-69038700; SpCas9
aggcacccaccaccatgct

SEQ ID NO: 29220 - DNA, 18 bp, Artificial Sequence
  Synthetic: FXN 3 reverse 9:69038679-69038700; SpCas9
ggcacccaccaccatgct

SEQ ID NO: 29221 - DNA, 25 bp, Artificial Sequence
  Synthetic: FXN 3 forward 9:69038676-69038704; SpCas9
gcatggtggtgggtgcctgtagtcc

SEQ ID NO: 29222 - DNA, 24 bp, Artificial Sequence
  Synthetic: FXN 3 forward 9:69038677-69038704; SpCas9
catggtggtgggtgcctgtagtcc

SEQ ID NO: 29223 - DNA, 23 bp, Artificial Sequence
  Synthetic: FXN 3 forward 9:69038678-69038704; SpCas9
atggtggtgggtgcctgtagtcc

SEQ ID NO: 29224 - DNA, 22 bp, Artificial Sequence
  Synthetic: FXN 3 forward 9:69038679-69038704; SpCas9
tggtggtgggtgcctgtagtcc

SEQ ID NO: 29225 - DNA, 21 bp, Artificial Sequence
  Synthetic: FXN 3 forward 9:69038680-69038704; SpCas9
ggtggtgggtgcctgtagtcc

SEQ ID NO: 29226 - DNA, 20 bp, Artificial Sequence
  Synthetic: FXN 3 forward 9:69038681-69038704; SpCas9
gtggtgggtgcctgtagtcc

SEQ ID NO: 29227 - DNA, 19 bp, Artificial Sequence
  Synthetic: FXN 3 forward 9:69038682-69038704; SpCas9
tggtgggtgcctgtagtcc

SEQ ID NO: 29228 - DNA, 18 bp, Artificial Sequence
  Synthetic: FXN 3 forward 9:69038683-69038704; SpCas9
ggtgggtgcctgtagtcc

SEQ ID NO: 29229 - DNA, 25 bp, Artificial Sequence
  Synthetic: FXN 3 forward 9:69038684-69038712; SpCas9
gtgggtgcctgtagtcccagctact

SEQ ID NO: 29230 - DNA, 24 bp, Artificial Sequence
  Synthetic: FXN 3 forward 9:69038685-69038712; SpCas9
tgggtgcctgtagtcccagctact

SEQ ID NO: 29231 - DNA, 23 bp, Artificial Sequence
  Synthetic: FXN 3 forward 9:69038686-69038712; SpCas9
gggtgcctgtagtcccagctact

SEQ ID NO: 29232 - DNA, 22 bp, Artificial Sequence
  Synthetic: FXN 3 forward 9:69038687-69038712; SpCas9
ggtgcctgtagtcccagctact

SEQ ID NO: 29233 - DNA, 21 bp, Artificial Sequence
  Synthetic: FXN 3 forward 9:69038688-69038712; SpCas9
gtgcctgtagtcccagctact

SEQ ID NO: 29234 - DNA, 20 bp, Artificial Sequence
  Synthetic: FXN 3 forward 9:69038689-69038712; SpCas9
tgcctgtagtcccagctact

SEQ ID NO: 29235 - DNA, 19 bp, Artificial Sequence
  Synthetic: FXN 3 forward 9:69038690-69038712; SpCas9
gcctgtagtcccagctact

SEQ ID NO: 29236 - DNA, 18 bp, Artificial Sequence
  Synthetic: FXN 3 forward 9:69038691-69038712; SpCas9
cctgtagtcccagctact

SEQ ID NO: 29237 - DNA, 25 bp, Artificial Sequence
  Synthetic: FXN 3 forward 9:69038685-69038713; SpCas9
tgggtgcctgtagtcccagctactc

SEQ ID NO: 29238 - DNA, 24 bp, Artificial Sequence
  Synthetic: FXN 3 forward 9:69038686-69038713; SpCas9
gggtgcctgtagtcccagctactc

SEQ ID NO: 29239 - DNA, 23 bp, Artificial Sequence
  Synthetic: FXN 3 forward 9:69038687-69038713; SpCas9
ggtgcctgtagtcccagctactc

SEQ ID NO: 29240 - DNA, 22 bp, Artificial Sequence
  Synthetic: FXN 3 forward 9:69038688-69038713; SpCas9
gtgcctgtagtcccagctactc

SEQ ID NO: 29241 - DNA, 21 bp, Artificial Sequence
  Synthetic: FXN 3 forward 9:69038689-69038713; SpCas9
tgcctgtagtcccagctactc

SEQ ID NO: 29242 - DNA, 20 bp, Artificial Sequence
  Synthetic: FXN 3 forward 9:69038690-69038713; SpCas9
gcctgtagtcccagctactc

SEQ ID NO: 29243 - DNA, 19 bp, Artificial Sequence
  Synthetic: FXN 3 forward 9:69038691-69038713; SpCas9
cctgtagtcccagctactc

SEQ ID NO: 29244 - DNA, 18 bp, Artificial Sequence
  Synthetic: FXN 3 forward 9:69038692-69038713; SpCas9
ctgtagtcccagctactc

SEQ ID NO: 29245 - DNA, 25 bp, Artificial Sequence
  Synthetic: FXN 3 forward 9:69038687-69038715; SpCas9
ggtgcctgtagtcccagctactcgg

SEQ ID NO: 29246 - DNA, 24 bp, Artificial Sequence
  Synthetic: FXN 3 forward 9:69038688-69038715; SpCas9
gtgcctgtagtcccagctactcgg

SEQ ID NO: 29247 - DNA, 23 bp, Artificial Sequence
  Synthetic: FXN 3 forward 9:69038689-69038715; SpCas9
tgcctgtagtcccagctactcgg

SEQ ID NO: 29248 - DNA, 22 bp, Artificial Sequence
  Synthetic: FXN 3 forward 9:69038690-69038715; SpCas9
gcctgtagtcccagctactcgg

SEQ ID NO: 29249 - DNA, 21 bp, Artificial Sequence
  Synthetic: FXN 3 forward 9:69038691-69038715; SpCas9
cctgtagtcccagctactcgg

SEQ ID NO: 29250 - DNA, 20 bp, Artificial Sequence
  Synthetic: FXN 3 forward 9:69038692-69038715; SpCas9
ctgtagtcccagctactcgg

SEQ ID NO: 29251 - DNA, 19 bp, Artificial Sequence
  Synthetic: FXN 3 forward 9:69038693-69038715; SpCas9
tgtagtcccagctactcgg

SEQ ID NO: 29252 - DNA, 18 bp, Artificial Sequence
  Synthetic: FXN 3 forward 9:69038694-69038715; SpCas9
gtagtcccagctactcgg

SEQ ID NO: 29253 - DNA, 25 bp, Artificial Sequence
  Synthetic: FXN 3 forward 9:69038688-69038716; SpCas9
gtgcctgtagtcccagctactcggg

SEQ ID NO: 29254 - DNA, 24 bp, Artificial Sequence
  Synthetic: FXN 3 forward 9:69038689-69038716; SpCas9
tgcctgtagtcccagctactcggg

SEQ ID NO: 29255 - DNA, 23 bp, Artificial Sequence
  Synthetic: FXN 3 forward 9:69038690-69038716; SpCas9
gcctgtagtcccagctactcggg

SEQ ID NO: 29256 - DNA, 22 bp, Artificial Sequence
  Synthetic: FXN 3 forward 9:69038691-69038716; SpCas9
cctgtagtcccagctactcggg

SEQ ID NO: 29257 - DNA, 21 bp, Artificial Sequence
  Synthetic: FXN 3 forward 9:69038692-69038716; SpCas9
ctgtagtcccagctactcggg

SEQ ID NO: 29258 - DNA, 20 bp, Artificial Sequence
  Synthetic: FXN 3 forward 9:69038693-69038716; SpCas9
tgtagtcccagctactcggg

SEQ ID NO: 29259 - DNA, 19 bp, Artificial Sequence
  Synthetic: FXN 3 forward 9:69038694-69038716; SpCas9
gtagtcccagctactcggg

SEQ ID NO: 29260 - DNA, 18 bp, Artificial Sequence
  Synthetic: FXN 3 forward 9:69038695-69038716; SpCas9
tagtcccagctactcggg

SEQ ID NO: 29261 - DNA, 25 bp, Artificial Sequence
  Synthetic: FXN 3 reverse 9:69038691-69038719; SpCas9
cagcctcccgagtagctgggactac

SEQ ID NO: 29262 - DNA, 24 bp, Artificial Sequence
  Synthetic: FXN 3 reverse 9:69038692-69038719; SpCas9
agcctcccgagtagctgggactac

SEQ ID NO: 29263 - DNA, 23 bp, Artificial Sequence
  Synthetic: FXN 3 reverse 9:69038693-69038719; SpCas9
gcctcccgagtagctgggactac

SEQ ID NO: 29264 - DNA, 22 bp, Artificial Sequence
  Synthetic: FXN 3 reverse 9:69038694-69038719; SpCas9
cctcccgagtagctgggactac

SEQ ID NO: 29265 - DNA, 21 bp, Artificial Sequence
  Synthetic: FXN 3 reverse 9:69038695-69038719; SpCas9
ctcccgagtagctgggactac

SEQ ID NO: 29266 - DNA, 20 bp, Artificial Sequence
  Synthetic: FXN 3 reverse 9:69038696-69038719; SpCas9
tcccgagtagctgggactac

SEQ ID NO: 29267 - DNA, 19 bp, Artificial Sequence
  Synthetic: FXN 3 reverse 9:69038697-69038719; SpCas9
cccgagtagctgggactac

SEQ ID NO: 29268 - DNA, 18 bp, Artificial Sequence
  Synthetic: FXN 3 reverse 9:69038698-69038719; SpCas9
ccgagtagctgggactac

SEQ ID NO: 29269 - DNA, 25 bp, Artificial Sequence
  Synthetic: FXN 3 reverse 9:69038692-69038720; SpCas9
tcagcctcccgagtagctgggacta

SEQ ID NO: 29270 - DNA, 24 bp, Artificial Sequence
  Synthetic: FXN 3 reverse 9:69038693-69038720; SpCas9
cagcctcccgagtagctgggacta

SEQ ID NO: 29271 - DNA, 23 bp, Artificial Sequence
  Synthetic: FXN 3 reverse 9:69038694-69038720; SpCas9
agcctcccgagtagctgggacta

SEQ ID NO: 29272 - DNA, 22 bp, Artificial Sequence
  Synthetic: FXN 3 reverse 9:69038695-69038720; SpCas9
gcctcccgagtagctgggacta

SEQ ID NO: 29273 - DNA, 21 bp, Artificial Sequence
  Synthetic: FXN 3 reverse 9:69038696-69038720; SpCas9
cctcccgagtagctgggacta

SEQ ID NO: 29274 - DNA, 20 bp, Artificial Sequence
  Synthetic: FXN 3 reverse 9:69038697-69038720; SpCas9
ctcccgagtagctgggacta

SEQ ID NO: 29275 - DNA, 19 bp, Artificial Sequence
  Synthetic: FXN 3 reverse 9:69038698-69038720; SpCas9
tcccgagtagctgggacta

SEQ ID NO: 29276 - DNA, 18 bp, Artificial Sequence
  Synthetic: FXN 3 reverse 9:69038699-69038720; SpCas9
cccgagtagctgggacta

SEQ ID NO: 29277 - DNA, 25 bp, Artificial Sequence
  Synthetic: FXN 3 forward 9:69038693-69038721; SpCas9
tgtagtcccagctactcgggaggct

SEQ ID NO: 29278 - DNA, 24 bp, Artificial Sequence
  Synthetic: FXN 3 forward 9:69038694-69038721; SpCas9
gtagtcccagctactcgggaggct

SEQ ID NO: 29279 - DNA, 23 bp, Artificial Sequence
  Synthetic: FXN 3 forward 9:69038695-69038721; SpCas9
tagtcccagctactcgggaggct

SEQ ID NO: 29280 - DNA, 22 bp, Artificial Sequence
  Synthetic: FXN 3 forward 9:69038696-69038721; SpCas9
agtcccagctactcgggaggct

SEQ ID NO: 29281 - DNA, 21 bp, Artificial Sequence
  Synthetic: FXN 3 forward 9:69038697-69038721; SpCas9
gtcccagctactcgggaggct

SEQ ID NO: 29282 - DNA, 20 bp, Artificial Sequence
  Synthetic: FXN 3 forward 9:69038698-69038721; SpCas9
tcccagctactcgggaggct

SEQ ID NO: 29283 - DNA, 19 bp, Artificial Sequence
  Synthetic: FXN 3 forward 9:69038699-69038721; SpCas9
cccagctactcgggaggct

SEQ ID NO: 29284 - DNA, 18 bp, Artificial Sequence
  Synthetic: FXN 3 forward 9:69038700-69038721; SpCas9
ccagctactcgggaggct

SEQ ID NO: 29285 - DNA, 25 bp, Artificial Sequence
  Synthetic: FXN 3 forward 9:69038694-69038722; SpCas9
gtagtcccagctactcgggaggctg

SEQ ID NO: 29286 - DNA, 24 bp, Artificial Sequence
  Synthetic: FXN 3 forward 9:69038695-69038722; SpCas9
tagtcccagctactcgggaggctg

SEQ ID NO: 29287 - DNA, 23 bp, Artificial Sequence
  Synthetic: FXN 3 forward 9:69038696-69038722; SpCas9
agtcccagctactcgggaggctg

SEQ ID NO: 29288 - DNA, 22 bp, Artificial Sequence
  Synthetic: FXN 3 forward 9:69038697-69038722; SpCas9
gtcccagctactcgggaggctg

SEQ ID NO: 29289 - DNA, 21 bp, Artificial Sequence
  Synthetic: FXN 3 forward 9:69038698-69038722; SpCas9
tcccagctactcgggaggctg

SEQ ID NO: 29290 - DNA, 20 bp, Artificial Sequence
  Synthetic: FXN 3 forward 9:69038699-69038722; SpCas9
cccagctactcgggaggctg

SEQ ID NO: 29291 - DNA, 19 bp, Artificial Sequence
  Synthetic: FXN 3 forward 9:69038700-69038722; SpCas9
ccagctactcgggaggctg

SEQ ID NO: 29292 - DNA, 18 bp, Artificial Sequence
  Synthetic: FXN 3 forward 9:69038701-69038722; SpCas9
cagctactcgggaggctg

SEQ ID NO: 29293 - DNA, 25 bp, Artificial Sequence
  Synthetic: FXN 3 reverse 9:69038699-69038727; SpCas9
tcatgcctcagcctcccgagtagct

SEQ ID NO: 29294 - DNA, 24 bp, Artificial Sequence
  Synthetic: FXN 3 reverse 9:69038700-69038727; SpCas9
catgcctcagcctcccgagtagct

SEQ ID NO: 29295 - DNA, 23 bp, Artificial Sequence
  Synthetic: FXN 3 reverse 9:69038701-69038727; SpCas9
atgcctcagcctcccgagtagct

SEQ ID NO: 29296 - DNA, 22 bp, Artificial Sequence
  Synthetic: FXN 3 reverse 9:69038702-69038727; SpCas9
tgcctcagcctcccgagtagct

SEQ ID NO: 29297 - DNA, 21 bp, Artificial Sequence
  Synthetic: FXN 3 reverse 9:69038703-69038727; SpCas9
gcctcagcctcccgagtagct

SEQ ID NO: 29298 - DNA, 20 bp, Artificial Sequence
  Synthetic: FXN 3 reverse 9:69038704-69038727; SpCas9
cctcagcctcccgagtagct

SEQ ID NO: 29299 - DNA, 19 bp, Artificial Sequence
  Synthetic: FXN 3 reverse 9:69038705-69038727; SpCas9
ctcagcctcccgagtagct

SEQ ID NO: 29300 - DNA, 18 bp, Artificial Sequence
  Synthetic: FXN 3 reverse 9:69038706-69038727; SpCas9
tcagcctcccgagtagct

SEQ ID NO: 29301 - DNA, 25 bp, Artificial Sequence
  Synthetic: FXN 3 forward 9:69038700-69038728; SpCas9
ccagctactcgggaggctgaggcat

SEQ ID NO: 29302 - DNA, 24 bp, Artificial Sequence
  Synthetic: FXN 3 forward 9:69038701-69038728; SpCas9
cagctactcgggaggctgaggcat

SEQ ID NO: 29303 - DNA, 23 bp, Artificial Sequence
  Synthetic: FXN 3 forward 9:69038702-69038728; SpCas9
agctactcgggaggctgaggcat

SEQ ID NO: 29304 - DNA, 22 bp, Artificial Sequence
  Synthetic: FXN 3 forward 9:69038703-69038728; SpCas9
gctactcgggaggctgaggcat

SEQ ID NO: 29305 - DNA, 21 bp, Artificial Sequence
  Synthetic: FXN 3 forward 9:69038704-69038728; SpCas9
ctactcgggaggctgaggcat

SEQ ID NO: 29306 - DNA, 20 bp, Artificial Sequence
  Synthetic: FXN 3 forward 9:69038705-69038728; SpCas9
tactcgggaggctgaggcat

SEQ ID NO: 29307 - DNA, 19 bp, Artificial Sequence
  Synthetic: FXN 3 forward 9:69038706-69038728; SpCas9
actcgggaggctgaggcat

SEQ ID NO: 29308 - DNA, 18 bp, Artificial Sequence
  Synthetic: FXN 3 forward 9:69038707-69038728; SpCas9
ctcgggaggctgaggcat

SEQ ID NO: 29309 - DNA, 25 bp, Artificial Sequence
  Synthetic: FXN 3 reverse 9:69038700-69038728; SpCas9
ctcatgcctcagcctcccgagtagc

SEQ ID NO: 29310 - DNA, 24 bp, Artificial Sequence
  Synthetic: FXN 3 reverse 9:69038701-69038728; SpCas9
tcatgcctcagcctcccgagtagc

SEQ ID NO: 29311 - DNA, 23 bp, Artificial Sequence
  Synthetic: FXN 3 reverse 9:69038702-69038728; SpCas9
catgcctcagcctcccgagtagc

SEQ ID NO: 29312 - DNA, 22 bp, Artificial Sequence
  Synthetic: FXN 3 reverse 9:69038703-69038728; SpCas9
atgcctcagcctcccgagtagc

SEQ ID NO: 29313 - DNA, 21 bp, Artificial Sequence
  Synthetic: FXN 3 reverse 9:69038704-69038728; SpCas9
tgcctcagcctcccgagtagc

SEQ ID NO: 29314 - DNA, 20 bp, Artificial Sequence
  Synthetic: FXN 3 reverse 9:69038705-69038728; SpCas9
gcctcagcctcccgagtagc

SEQ ID NO: 29315 - DNA, 19 bp, Artificial Sequence
  Synthetic: FXN 3 reverse 9:69038706-69038728; SpCas9
cctcagcctcccgagtagc

SEQ ID NO: 29316 - DNA, 18 bp, Artificial Sequence
  Synthetic: FXN 3 reverse 9:69038707-69038728; SpCas9
ctcagcctcccgagtagc

SEQ ID NO: 29317 - DNA, 25 bp, Artificial Sequence
  Synthetic: FXN 3 reverse 9:69038704-69038732; SpCas9
gattctcatgcctcagcctcccgag

SEQ ID NO: 29318 - DNA, 24 bp, Artificial Sequence
  Synthetic: FXN 3 reverse 9:69038705-69038732; SpCas9
attctcatgcctcagcctcccgag

SEQ ID NO: 29319 - DNA, 23 bp, Artificial Sequence
  Synthetic: FXN 3 reverse 9:69038706-69038732; SpCas9
ttctcatgcctcagcctcccgag

SEQ ID NO: 29320 - DNA, 22 bp, Artificial Sequence
  Synthetic: FXN 3 reverse 9:69038707-69038732; SpCas9
tctcatgcctcagcctcccgag

SEQ ID NO: 29321 - DNA, 21 bp, Artificial Sequence
  Synthetic: FXN 3 reverse 9:69038708-69038732; SpCas9
ctcatgcctcagcctcccgag

SEQ ID NO: 29322 - DNA, 20 bp, Artificial Sequence
  Synthetic: FXN 3 reverse 9:69038709-69038732; SpCas9
tcatgcctcagcctcccgag

SEQ ID NO: 29323 - DNA, 19 bp, Artificial Sequence
  Synthetic: FXN 3 reverse 9:69038710-69038732; SpCas9
catgcctcagcctcccgag

SEQ ID NO: 29324 - DNA, 18 bp, Artificial Sequence
  Synthetic: FXN 3 reverse 9:69038711-69038732; SpCas9
atgcctcagcctcccgag

SEQ ID NO: 29325 - DNA, 25 bp, Artificial Sequence
  Synthetic: FXN 3 reverse 9:69038707-69038735; SpCas9
agtgattctcatgcctcagcctccc

SEQ ID NO: 29326 - DNA, 24 bp, Artificial Sequence
  Synthetic: FXN 3 reverse 9:69038708-69038735; SpCas9
gtgattctcatgcctcagcctccc

SEQ ID NO: 29327 - DNA, 23 bp, Artificial Sequence
  Synthetic: FXN 3 reverse 9:69038709-69038735; SpCas9
tgattctcatgcctcagcctccc

SEQ ID NO: 29328 - DNA, 22 bp, Artificial Sequence
  Synthetic: FXN 3 reverse 9:69038710-69038735; SpCas9
gattctcatgcctcagcctccc

SEQ ID NO: 29329 - DNA, 21 bp, Artificial Sequence
  Synthetic: FXN 3 reverse 9:69038711-69038735; SpCas9
attctcatgcctcagcctccc

SEQ ID NO: 29330 - DNA, 20 bp, Artificial Sequence
  Synthetic: FXN 3 reverse 9:69038712-69038735; SpCas9
ttctcatgcctcagcctccc

SEQ ID NO: 29331 - DNA, 19 bp, Artificial Sequence
  Synthetic: FXN 3 reverse 9:69038713-69038735; SpCas9
tctcatgcctcagcctccc

SEQ ID NO: 29332 - DNA, 18 bp, Artificial Sequence
  Synthetic: FXN 3 reverse 9:69038714-69038735; SpCas9
ctcatgcctcagcctccc

SEQ ID NO: 29333 - DNA, 25 bp, Artificial Sequence
  Synthetic: FXN 3 forward 9:69038711-69038739; SpCas9
ggaggctgaggcatgagaatcactt

SEQ ID NO: 29334 - DNA, 24 bp, Artificial Sequence
  Synthetic: FXN 3 forward 9:69038712-69038739; SpCas9
gaggctgaggcatgagaatcactt

SEQ ID NO: 29335 - DNA, 23 bp, Artificial Sequence
  Synthetic: FXN 3 forward 9:69038713-69038739; SpCas9
aggctgaggcatgagaatcactt

SEQ ID NO: 29336 - DNA, 22 bp, Artificial Sequence
  Synthetic: FXN 3 forward 9:69038714-69038739; SpCas9
ggctgaggcatgagaatcactt

SEQ ID NO: 29337 - DNA, 21 bp, Artificial Sequence
  Synthetic: FXN 3 forward 9:69038715-69038739; SpCas9
gctgaggcatgagaatcactt

SEQ ID NO: 29338 - DNA, 20 bp, Artificial Sequence
  Synthetic: FXN 3 forward 9:69038716-69038739; SpCas9
ctgaggcatgagaatcactt

SEQ ID NO: 29339 - DNA, 19 bp, Artificial Sequence
  Synthetic: FXN 3 forward 9:69038717-69038739; SpCas9
tgaggcatgagaatcactt

SEQ ID NO: 29340 - DNA, 18 bp, Artificial Sequence
  Synthetic: FXN 3 forward 9:69038718-69038739; SpCas9
gaggcatgagaatcactt

SEQ ID NO: 29341 - DNA, 25 bp, Artificial Sequence
  Synthetic: FXN 3 forward 9:69038716-69038744; SpCas9
ctgaggcatgagaatcacttgagcc

SEQ ID NO: 29342 - DNA, 24 bp, Artificial Sequence
  Synthetic: FXN 3 forward 9:69038717-69038744; SpCas9
tgaggcatgagaatcacttgagcc

SEQ ID NO: 29343 - DNA, 23 bp, Artificial Sequence
  Synthetic: FXN 3 forward 9:69038718-69038744; SpCas9
gaggcatgagaatcacttgagcc

SEQ ID NO: 29344 - DNA, 22 bp, Artificial Sequence
  Synthetic: FXN 3 forward 9:69038719-69038744; SpCas9
aggcatgagaatcacttgagcc

SEQ ID NO: 29345 - DNA, 21 bp, Artificial Sequence
  Synthetic: FXN 3 forward 9:69038720-69038744; SpCas9
ggcatgagaatcacttgagcc

SEQ ID NO: 29346 - DNA, 20 bp, Artificial Sequence
  Synthetic: FXN 3 forward 9:69038721-69038744; SpCas9
gcatgagaatcacttgagcc

SEQ ID NO: 29347 - DNA, 19 bp, Artificial Sequence
  Synthetic: FXN 3 forward 9:69038722-69038744; SpCas9
catgagaatcacttgagcc

SEQ ID NO: 29348 - DNA, 18 bp, Artificial Sequence
  Synthetic: FXN 3 forward 9:69038723-69038744; SpCas9
atgagaatcacttgagcc

SEQ ID NO: 29349 - DNA, 25 bp, Artificial Sequence
  Synthetic: FXN 3 reverse 9:69038716-69038744; SpCas9
ctgggctcaagtgattctcatgcct

SEQ ID NO: 29350 - DNA, 24 bp, Artificial Sequence
  Synthetic: FXN 3 reverse 9:69038717-69038744; SpCas9
tgggctcaagtgattctcatgcct

SEQ ID NO: 29351 - DNA, 23 bp, Artificial Sequence
  Synthetic: FXN 3 reverse 9:69038718-69038744; SpCas9
gggctcaagtgattctcatgcct

SEQ ID NO: 29352 - DNA, 22 bp, Artificial Sequence
  Synthetic: FXN 3 reverse 9:69038719-69038744; SpCas9
ggctcaagtgattctcatgcct

SEQ ID NO: 29353 - DNA, 21 bp, Artificial Sequence
  Synthetic: FXN 3 reverse 9:69038720-69038744; SpCas9
gctcaagtgattctcatgcct

SEQ ID NO: 29354 - DNA, 20 bp, Artificial Sequence
  Synthetic: FXN 3 reverse 9:69038721-69038744; SpCas9
ctcaagtgattctcatgcct

SEQ ID NO: 29355 - DNA, 19 bp, Artificial Sequence
  Synthetic: FXN 3 reverse 9:69038722-69038744; SpCas9
tcaagtgattctcatgcct

SEQ ID NO: 29356 - DNA, 18 bp, Artificial Sequence
  Synthetic: FXN 3 reverse 9:69038723-69038744; SpCas9
caagtgattctcatgcct

SEQ ID NO: 29357 - DNA, 25 bp, Artificial Sequence
  Synthetic: FXN 3 forward 9:69038717-69038745; SpCas9
tgaggcatgagaatcacttgagccc

SEQ ID NO: 29358 - DNA, 24 bp, Artificial Sequence
  Synthetic: FXN 3 forward 9:69038718-69038745; SpCas9
gaggcatgagaatcacttgagccc

SEQ ID NO: 29359 - DNA, 23 bp, Artificial Sequence
  Synthetic: FXN 3 forward 9:69038719-69038745; SpCas9
aggcatgagaatcacttgagccc

SEQ ID NO: 29360 - DNA, 22 bp, Artificial Sequence
  Synthetic: FXN 3 forward 9:69038720-69038745; SpCas9
ggcatgagaatcacttgagccc

SEQ ID NO: 29361 - DNA, 21 bp, Artificial Sequence
  Synthetic: FXN 3 forward 9:69038721-69038745; SpCas9
gcatgagaatcacttgagccc

SEQ ID NO: 29362 - DNA, 20 bp, Artificial Sequence
  Synthetic: FXN 3 forward 9:69038722-69038745; SpCas9
catgagaatcacttgagccc

SEQ ID NO: 29363 - DNA, 19 bp, Artificial Sequence
  Synthetic: FXN 3 forward 9:69038723-69038745; SpCas9
atgagaatcacttgagccc

SEQ ID NO: 29364 - DNA, 18 bp, Artificial Sequence
  Synthetic: FXN 3 forward 9:69038724-69038745; SpCas9
tgagaatcacttgagccc

SEQ ID NO: 29365 - DNA, 25 bp, Artificial Sequence
  Synthetic: FXN 3 forward 9:69038719-69038747; SpCas9
aggcatgagaatcacttgagcccag

SEQ ID NO: 29366 - DNA, 24 bp, Artificial Sequence
  Synthetic: FXN 3 forward 9:69038720-69038747; SpCas9
ggcatgagaatcacttgagcccag

SEQ ID NO: 29367 - DNA, 23 bp, Artificial Sequence
  Synthetic: FXN 3 forward 9:69038721-69038747; SpCas9
gcatgagaatcacttgagcccag

SEQ ID NO: 29368 - DNA, 22 bp, Artificial Sequence
  Synthetic: FXN 3 forward 9:69038722-69038747; SpCas9
catgagaatcacttgagcccag

SEQ ID NO: 29369 - DNA, 21 bp, Artificial Sequence
  Synthetic: FXN 3 forward 9:69038723-69038747; SpCas9
atgagaatcacttgagcccag

SEQ ID NO: 29370 - DNA, 20 bp, Artificial Sequence
  Synthetic: FXN 3 forward 9:69038724-69038747; SpCas9
tgagaatcacttgagcccag

SEQ ID NO: 29371 - DNA, 19 bp, Artificial Sequence
  Synthetic: FXN 3 forward 9:69038725-69038747; SpCas9
gagaatcacttgagcccag

SEQ ID NO: 29372 - DNA, 18 bp, Artificial Sequence
  Synthetic: FXN 3 forward 9:69038726-69038747; SpCas9
agaatcacttgagcccag

SEQ ID NO: 29373 - DNA, 25 bp, Artificial Sequence
  Synthetic: FXN 3 forward 9:69038720-69038748; SpCas9
ggcatgagaatcacttgagcccagg

SEQ ID NO: 29374 - DNA, 24 bp, Artificial Sequence
  Synthetic: FXN 3 forward 9:69038721-69038748; SpCas9
gcatgagaatcacttgagcccagg

SEQ ID NO: 29375 - DNA, 23 bp, Artificial Sequence
  Synthetic: FXN 3 forward 9:69038722-69038748; SpCas9
catgagaatcacttgagcccagg

SEQ ID NO: 29376 - DNA, 22 bp, Artificial Sequence
  Synthetic: FXN 3 forward 9:69038723-69038748; SpCas9
atgagaatcacttgagcccagg

SEQ ID NO: 29377 - DNA, 21 bp, Artificial Sequence
  Synthetic: FXN 3 forward 9:69038724-69038748; SpCas9
tgagaatcacttgagcccagg

SEQ ID NO: 29378 - DNA, 20 bp, Artificial Sequence
  Synthetic: FXN 3 forward 9:69038725-69038748; SpCas9
gagaatcacttgagcccagg

SEQ ID NO: 29379 - DNA, 19 bp, Artificial Sequence
  Synthetic: FXN 3 forward 9:69038726-69038748; SpCas9
agaatcacttgagcccagg

SEQ ID NO: 29380 - DNA, 18 bp, Artificial Sequence
  Synthetic: FXN 3 forward 9:69038727-69038748; SpCas9
gaatcacttgagcccagg

SEQ ID NO: 29381 - DNA, 25 bp, Artificial Sequence
  Synthetic: FXN 3 forward 9:69038723-69038751; SpCas9
atgagaatcacttgagcccaggagg

SEQ ID NO: 29382 - DNA, 24 bp, Artificial Sequence
  Synthetic: FXN 3 forward 9:69038724-69038751; SpCas9
tgagaatcacttgagcccaggagg

SEQ ID NO: 29383 - DNA, 23 bp, Artificial Sequence
  Synthetic: FXN 3 forward 9:69038725-69038751; SpCas9
gagaatcacttgagcccaggagg

SEQ ID NO: 29384 - DNA, 22 bp, Artificial Sequence
  Synthetic: FXN 3 forward 9:69038726-69038751; SpCas9
agaatcacttgagcccaggagg

SEQ ID NO: 29385 - DNA, 21 bp, Artificial Sequence
  Synthetic: FXN 3 forward 9:69038727-69038751; SpCas9
gaatcacttgagcccaggagg

SEQ ID NO: 29386 - DNA, 20 bp, Artificial Sequence
  Synthetic: FXN 3 forward 9:69038728-69038751; SpCas9
aatcacttgagcccaggagg

SEQ ID NO: 29387 - DNA, 19 bp, Artificial Sequence
  Synthetic: FXN 3 forward 9:69038729-69038751; SpCas9
atcacttgagcccaggagg

SEQ ID NO: 29388 - DNA, 18 bp, Artificial Sequence
  Synthetic: FXN 3 forward 9:69038730-69038751; SpCas9
tcacttgagcccaggagg

SEQ ID NO: 29389 - DNA, 25 bp, Artificial Sequence
  Synthetic: FXN 3 forward 9:69038725-69038753; SpCas9
gagaatcacttgagcccaggaggca

SEQ ID NO: 29390 - DNA, 24 bp, Artificial Sequence
  Synthetic: FXN 3 forward 9:69038726-69038753; SpCas9
agaatcacttgagcccaggaggca

SEQ ID NO: 29391 - DNA, 23 bp, Artificial Sequence
  Synthetic: FXN 3 forward 9:69038727-69038753; SpCas9
gaatcacttgagcccaggaggca

SEQ ID NO: 29392 - DNA, 22 bp, Artificial Sequence
  Synthetic: FXN 3 forward 9:69038728-69038753; SpCas9
aatcacttgagcccaggaggca

SEQ ID NO: 29393 - DNA, 21 bp, Artificial Sequence
  Synthetic: FXN 3 forward 9:69038729-69038753; SpCas9
atcacttgagcccaggaggca

SEQ ID NO: 29394 - DNA, 20 bp, Artificial Sequence
  Synthetic: FXN 3 forward 9:69038730-69038753; SpCas9
tcacttgagcccaggaggca

SEQ ID NO: 29395 - DNA, 19 bp, Artificial Sequence
  Synthetic: FXN 3 forward 9:69038731-69038753; SpCas9
cacttgagcccaggaggca

SEQ ID NO: 29396 - DNA, 18 bp, Artificial Sequence
  Synthetic: FXN 3 forward 9:69038732-69038753; SpCas9
acttgagcccaggaggca

SEQ ID NO: 29397 - DNA, 25 bp, Artificial Sequence
  Synthetic: FXN 3 forward 9:69038726-69038754; SpCas9
agaatcacttgagcccaggaggcag

SEQ ID NO: 29398 - DNA, 24 bp, Artificial Sequence
  Synthetic: FXN 3 forward 9:69038727-69038754; SpCas9
gaatcacttgagcccaggaggcag

SEQ ID NO: 29399 - DNA, 23 bp, Artificial Sequence
  Synthetic: FXN 3 forward 9:69038728-69038754; SpCas9
aatcacttgagcccaggaggcag

SEQ ID NO: 29400 - DNA, 22 bp, Artificial Sequence
  Synthetic: FXN 3 forward 9:69038729-69038754; SpCas9
atcacttgagcccaggaggcag

SEQ ID NO: 29401 - DNA, 21 bp, Artificial Sequence
  Synthetic: FXN 3 forward 9:69038730-69038754; SpCas9
tcacttgagcccaggaggcag

SEQ ID NO: 29402 - DNA, 20 bp, Artificial Sequence
  Synthetic: FXN 3 forward 9:69038731-69038754; SpCas9
cacttgagcccaggaggcag

SEQ ID NO: 29403 - DNA, 19 bp, Artificial Sequence
  Synthetic: FXN 3 forward 9:69038732-69038754; SpCas9
acttgagcccaggaggcag

SEQ ID NO: 29404 - DNA, 18 bp, Artificial Sequence
  Synthetic: FXN 3 forward 9:69038733-69038754; SpCas9
cttgagcccaggaggcag

SEQ ID NO: 29405 - DNA, 25 bp, Artificial Sequence
  Synthetic: FXN 3 forward 9:69038732-69038760; SpCas9
acttgagcccaggaggcagaggttg

SEQ ID NO: 29406 - DNA, 24 bp, Artificial Sequence
  Synthetic: FXN 3 forward 9:69038733-69038760; SpCas9
cttgagcccaggaggcagaggttg

SEQ ID NO: 29407 - DNA, 23 bp, Artificial Sequence
  Synthetic: FXN 3 forward 9:69038734-69038760; SpCas9
ttgagcccaggaggcagaggttg

SEQ ID NO: 29408 - DNA, 22 bp, Artificial Sequence
  Synthetic: FXN 3 forward 9:69038735-69038760; SpCas9
tgagcccaggaggcagaggttg

SEQ ID NO: 29409 - DNA, 21 bp, Artificial Sequence
  Synthetic: FXN 3 forward 9:69038736-69038760; SpCas9
gagcccaggaggcagaggttg

SEQ ID NO: 29410 - DNA, 20 bp, Artificial Sequence
  Synthetic: FXN 3 forward 9:69038737-69038760; SpCas9
agcccaggaggcagaggttg

SEQ ID NO: 29411 - DNA, 19 bp, Artificial Sequence
  Synthetic: FXN 3 forward 9:69038738-69038760; SpCas9
gcccaggaggcagaggttg

SEQ ID NO: 29412 - DNA, 18 bp, Artificial Sequence
  Synthetic: FXN 3 forward 9:69038739-69038760; SpCas9
cccaggaggcagaggttg

SEQ ID NO: 29413 - DNA, 25 bp, Artificial Sequence
  Synthetic: FXN 3 reverse 9:69038733-69038761; SpCas9
actgcaacctctgcctcctgggctc

SEQ ID NO: 29414 - DNA, 24 bp, Artificial Sequence
  Synthetic: FXN 3 reverse 9:69038734-69038761; SpCas9
ctgcaacctctgcctcctgggctc

SEQ ID NO: 29415 - DNA, 23 bp, Artificial Sequence
  Synthetic: FXN 3 reverse 9:69038735-69038761; SpCas9
tgcaacctctgcctcctgggctc

SEQ ID NO: 29416 - DNA, 22 bp, Artificial Sequence
  Synthetic: FXN 3 reverse 9:69038736-69038761; SpCas9
gcaacctctgcctcctgggctc

SEQ ID NO: 29417 - DNA, 21 bp, Artificial Sequence
  Synthetic: FXN 3 reverse 9:69038737-69038761; SpCas9
caacctctgcctcctgggctc

SEQ ID NO: 29418 - DNA, 20 bp, Artificial Sequence
  Synthetic: FXN 3 reverse 9:69038738-69038761; SpCas9
aacctctgcctcctgggctc

SEQ ID NO: 29419 - DNA, 19 bp, Artificial Sequence
  Synthetic: FXN 3 reverse 9:69038739-69038761; SpCas9
acctctgcctcctgggctc

SEQ ID NO: 29420 - DNA, 18 bp, Artificial Sequence
  Synthetic: FXN 3 reverse 9:69038740-69038761; SpCas9
cctctgcctcctgggctc

SEQ ID NO: 29421 - DNA, 25 bp, Artificial Sequence
  Synthetic: FXN 3 forward 9:69038736-69038764; SpCas9
gagcccaggaggcagaggttgcagt

SEQ ID NO: 29422 - DNA, 24 bp, Artificial Sequence
  Synthetic: FXN 3 forward 9:69038737-69038764; SpCas9
agcccaggaggcagaggttgcagt

SEQ ID NO: 29423 - DNA, 23 bp, Artificial Sequence
  Synthetic: FXN 3 forward 9:69038738-69038764; SpCas9
gcccaggaggcagaggttgcagt

SEQ ID NO: 29424 - DNA, 22 bp, Artificial Sequence
  Synthetic: FXN 3 forward 9:69038739-69038764; SpCas9
cccaggaggcagaggttgcagt

SEQ ID NO: 29425 - DNA, 21 bp, Artificial Sequence
  Synthetic: FXN 3 forward 9:69038740-69038764; SpCas9
ccaggaggcagaggttgcagt

SEQ ID NO: 29426 - DNA, 20 bp, Artificial Sequence
  Synthetic: FXN 3 forward 9:69038741-69038764; SpCas9
caggaggcagaggttgcagt

SEQ ID NO: 29427 - DNA, 19 bp, Artificial Sequence
  Synthetic: FXN 3 forward 9:69038742-69038764; SpCas9
aggaggcagaggttgcagt

SEQ ID NO: 29428 - DNA, 18 bp, Artificial Sequence
  Synthetic: FXN 3 forward 9:69038743-69038764; SpCas9
ggaggcagaggttgcagt

SEQ ID NO: 29429 - DNA, 25 bp, Artificial Sequence
  Synthetic: FXN 3 reverse 9:69038739-69038767; SpCas9
tggctcactgcaacctctgcctcct

SEQ ID NO: 29430 - DNA, 24 bp, Artificial Sequence
  Synthetic: FXN 3 reverse 9:69038740-69038767; SpCas9
ggctcactgcaacctctgcctcct

SEQ ID NO: 29431 - DNA, 23 bp, Artificial Sequence
  Synthetic: FXN 3 reverse 9:69038741-69038767; SpCas9
gctcactgcaacctctgcctcct

SEQ ID NO: 29432 - DNA, 22 bp, Artificial Sequence
  Synthetic: FXN 3 reverse 9:69038742-69038767; SpCas9
ctcactgcaacctctgcctcct

SEQ ID NO: 29433 - DNA, 21 bp, Artificial Sequence
  Synthetic: FXN 3 reverse 9:69038743-69038767; SpCas9
tcactgcaacctctgcctcct

SEQ ID NO: 29434 - DNA, 20 bp, Artificial Sequence
  Synthetic: FXN 3 reverse 9:69038744-69038767; SpCas9
cactgcaacctctgcctcct

SEQ ID NO: 29435 - DNA, 19 bp, Artificial Sequence
  Synthetic: FXN 3 reverse 9:69038745-69038767; SpCas9
actgcaacctctgcctcct

SEQ ID NO: 29436 - DNA, 18 bp, Artificial Sequence
  Synthetic: FXN 3 reverse 9:69038746-69038767; SpCas9
ctgcaacctctgcctcct

SEQ ID NO: 29437 - DNA, 25 bp, Artificial Sequence
  Synthetic: FXN 3 reverse 9:69038740-69038768; SpCas9
ttggctcactgcaacctctgcctcc

SEQ ID NO: 29438 - DNA, 24 bp, Artificial Sequence
  Synthetic: FXN 3 reverse 9:69038741-69038768; SpCas9
tggctcactgcaacctctgcctcc

SEQ ID NO: 29439 - DNA, 23 bp, Artificial Sequence
  Synthetic: FXN 3 reverse 9:69038742-69038768; SpCas9
ggctcactgcaacctctgcctcc

SEQ ID NO: 29440 - DNA, 22 bp, Artificial Sequence
  Synthetic: FXN 3 reverse 9:69038743-69038768; SpCas9
gctcactgcaacctctgcctcc

SEQ ID NO: 29441 - DNA, 21 bp, Artificial Sequence
  Synthetic: FXN 3 reverse 9:69038744-69038768; SpCas9
ctcactgcaacctctgcctcc

SEQ ID NO: 29442 - DNA, 20 bp, Artificial Sequence
  Synthetic: FXN 3 reverse 9:69038745-69038768; SpCas9
tcactgcaacctctgcctcc

SEQ ID NO: 29443 - DNA, 19 bp, Artificial Sequence
  Synthetic: FXN 3 reverse 9:69038746-69038768; SpCas9
cactgcaacctctgcctcc

SEQ ID NO: 29444 - DNA, 18 bp, Artificial Sequence
  Synthetic: FXN 3 reverse 9:69038747-69038768; SpCas9
actgcaacctctgcctcc

SEQ ID NO: 29445 - DNA, 25 bp, Artificial Sequence
  Synthetic: FXN 3 forward 9:69038741-69038769; SpCas9
caggaggcagaggttgcagtgagcc

SEQ ID NO: 29446 - DNA, 24 bp, Artificial Sequence
  Synthetic: FXN 3 forward 9:69038742-69038769; SpCas9
aggaggcagaggttgcagtgagcc

SEQ ID NO: 29447 - DNA, 23 bp, Artificial Sequence
  Synthetic: FXN 3 forward 9:69038743-69038769; SpCas9
ggaggcagaggttgcagtgagcc

SEQ ID NO: 29448 - DNA, 22 bp, Artificial Sequence
  Synthetic: FXN 3 forward 9:69038744-69038769; SpCas9
gaggcagaggttgcagtgagcc

SEQ ID NO: 29449 - DNA, 21 bp, Artificial Sequence
  Synthetic: FXN 3 forward 9:69038745-69038769; SpCas9
aggcagaggttgcagtgagcc

SEQ ID NO: 29450 - DNA, 20 bp, Artificial Sequence
  Synthetic: FXN 3 forward 9:69038746-69038769; SpCas9
ggcagaggttgcagtgagcc

SEQ ID NO: 29451 - DNA, 19 bp, Artificial Sequence
  Synthetic: FXN 3 forward 9:69038747-69038769; SpCas9
gcagaggttgcagtgagcc

SEQ ID NO: 29452 - DNA, 18 bp, Artificial Sequence
  Synthetic: FXN 3 forward 9:69038748-69038769; SpCas9
cagaggttgcagtgagcc

SEQ ID NO: 29453 - DNA, 25 bp, Artificial Sequence
  Synthetic: FXN 3 forward 9:69038748-69038776; SpCas9
cagaggttgcagtgagccaagattt

SEQ ID NO: 29454 - DNA, 24 bp, Artificial Sequence
  Synthetic: FXN 3 forward 9:69038749-69038776; SpCas9
agaggttgcagtgagccaagattt

SEQ ID NO: 29455 - DNA, 23 bp, Artificial Sequence
  Synthetic: FXN 3 forward 9:69038750-69038776; SpCas9
gaggttgcagtgagccaagattt

SEQ ID NO: 29456 - DNA, 22 bp, Artificial Sequence
  Synthetic: FXN 3 forward 9:69038751-69038776; SpCas9
aggttgcagtgagccaagattt

SEQ ID NO: 29457 - DNA, 21 bp, Artificial Sequence
  Synthetic: FXN 3 forward 9:69038752-69038776; SpCas9
ggttgcagtgagccaagattt

SEQ ID NO: 29458 - DNA, 20 bp, Artificial Sequence
  Synthetic: FXN 3 forward 9:69038753-69038776; SpCas9
gttgcagtgagccaagattt

SEQ ID NO: 29459 - DNA, 19 bp, Artificial Sequence
  Synthetic: FXN 3 forward 9:69038754-69038776; SpCas9
ttgcagtgagccaagattt

SEQ ID NO: 29460 - DNA, 18 bp, Artificial Sequence
  Synthetic: FXN 3 forward 9:69038755-69038776; SpCas9
tgcagtgagccaagattt

SEQ ID NO: 29461 - DNA, 25 bp, Artificial Sequence
  Synthetic: FXN 3 forward 9:69038749-69038777; SpCas9
agaggttgcagtgagccaagatttt

SEQ ID NO: 29462 - DNA, 24 bp, Artificial Sequence
  Synthetic: FXN 3 forward 9:69038750-69038777; SpCas9
gaggttgcagtgagccaagatttt

SEQ ID NO: 29463 - DNA, 23 bp, Artificial Sequence
  Synthetic: FXN 3 forward 9:69038751-69038777; SpCas9
aggttgcagtgagccaagatttt

SEQ ID NO: 29464 - DNA, 22 bp, Artificial Sequence
  Synthetic: FXN 3 forward 9:69038752-69038777; SpCas9
ggttgcagtgagccaagatttt

SEQ ID NO: 29465 - DNA, 21 bp, Artificial Sequence
  Synthetic: FXN 3 forward 9:69038753-69038777; SpCas9
gttgcagtgagccaagatttt

SEQ ID NO: 29466 - DNA, 20 bp, Artificial Sequence
  Synthetic: FXN 3 forward 9:69038754-69038777; SpCas9
ttgcagtgagccaagatttt

SEQ ID NO: 29467 - DNA, 19 bp, Artificial Sequence
  Synthetic: FXN 3 forward 9:69038755-69038777; SpCas9
tgcagtgagccaagatttt

SEQ ID NO: 29468 - DNA, 18 bp, Artificial Sequence
  Synthetic: FXN 3 forward 9:69038756-69038777; SpCas9
gcagtgagccaagatttt

SEQ ID NO: 29469 - DNA, 25 bp, Artificial Sequence
  Synthetic: FXN 3 forward 9:69038750-69038778; SpCas9
gaggttgcagtgagccaagattttg

SEQ ID NO: 29470 - DNA, 24 bp, Artificial Sequence
  Synthetic: FXN 3 forward 9:69038751-69038778; SpCas9
aggttgcagtgagccaagattttg

SEQ ID NO: 29471 - DNA, 23 bp, Artificial Sequence
  Synthetic: FXN 3 forward 9:69038752-69038778; SpCas9
ggttgcagtgagccaagattttg

SEQ ID NO: 29472 - DNA, 22 bp, Artificial Sequence
  Synthetic: FXN 3 forward 9:69038753-69038778; SpCas9
gttgcagtgagccaagattttg

SEQ ID NO: 29473 - DNA, 21 bp, Artificial Sequence
  Synthetic: FXN 3 forward 9:69038754-69038778; SpCas9
ttgcagtgagccaagattttg

SEQ ID NO: 29474 - DNA, 20 bp, Artificial Sequence
  Synthetic: FXN 3 forward 9:69038755-69038778; SpCas9
tgcagtgagccaagattttg

SEQ ID NO: 29475 - DNA, 19 bp, Artificial Sequence
  Synthetic: FXN 3 forward 9:69038756-69038778; SpCas9
gcagtgagccaagattttg

SEQ ID NO: 29476 - DNA, 18 bp, Artificial Sequence
  Synthetic: FXN 3 forward 9:69038757-69038778; SpCas9
cagtgagccaagattttg

SEQ ID NO: 29477 - DNA, 25 bp, Artificial Sequence
  Synthetic: FXN 3 forward 9:69038751-69038779; SpCas9
aggttgcagtgagccaagattttgg

SEQ ID NO: 29478 - DNA, 24 bp, Artificial Sequence
  Synthetic: FXN 3 forward 9:69038752-69038779; SpCas9
ggttgcagtgagccaagattttgg

SEQ ID NO: 29479 - DNA, 23 bp, Artificial Sequence
  Synthetic: FXN 3 forward 9:69038753-69038779; SpCas9
gttgcagtgagccaagattttgg

SEQ ID NO: 29480 - DNA, 22 bp, Artificial Sequence
  Synthetic: FXN 3 forward 9:69038754-69038779; SpCas9
ttgcagtgagccaagattttgg

SEQ ID NO: 29481 - DNA, 21 bp, Artificial Sequence
  Synthetic: FXN 3 forward 9:69038755-69038779; SpCas9
tgcagtgagccaagattttgg

SEQ ID NO: 29482 - DNA, 20 bp, Artificial Sequence
  Synthetic: FXN 3 forward 9:69038756-69038779; SpCas9
gcagtgagccaagattttgg

SEQ ID NO: 29483 - DNA, 19 bp, Artificial Sequence
  Synthetic: FXN 3 forward 9:69038757-69038779; SpCas9
cagtgagccaagattttgg

SEQ ID NO: 29484 - DNA, 18 bp, Artificial Sequence
  Synthetic: FXN 3 forward 9:69038758-69038779; SpCas9
agtgagccaagattttgg

SEQ ID NO: 29485 - DNA, 25 bp, Artificial Sequence
  Synthetic: FXN 3 reverse 9:69038764-69038792; SpCas9
tatgtcacagaatcccccaaaatct

SEQ ID NO: 29486 - DNA, 24 bp, Artificial Sequence
  Synthetic: FXN 3 reverse 9:69038765-69038792; SpCas9
atgtcacagaatcccccaaaatct

SEQ ID NO: 29487 - DNA, 23 bp, Artificial Sequence
  Synthetic: FXN 3 reverse 9:69038766-69038792; SpCas9
tgtcacagaatcccccaaaatct

SEQ ID NO: 29488 - DNA, 22 bp, Artificial Sequence
  Synthetic: FXN 3 reverse 9:69038767-69038792; SpCas9
gtcacagaatcccccaaaatct

SEQ ID NO: 29489 - DNA, 21 bp, Artificial Sequence
  Synthetic: FXN 3 reverse 9:69038768-69038792; SpCas9
tcacagaatcccccaaaatct

SEQ ID NO: 29490 - DNA, 20 bp, Artificial Sequence
  Synthetic: FXN 3 reverse 9:69038769-69038792; SpCas9
cacagaatcccccaaaatct

SEQ ID NO: 29491 - DNA, 19 bp, Artificial Sequence
  Synthetic: FXN 3 reverse 9:69038770-69038792; SpCas9
acagaatcccccaaaatct

SEQ ID NO: 29492 - DNA, 18 bp, Artificial Sequence
  Synthetic: FXN 3 reverse 9:69038771-69038792; SpCas9
cagaatcccccaaaatct

SEQ ID NO: 29493 - DNA, 25 bp, Artificial Sequence
  Synthetic: FXN 3 forward 9:69038777-69038805; SpCas9
ggattctgtgacatacaaaaaaaat

SEQ ID NO: 29494 - DNA, 24 bp, Artificial Sequence
  Synthetic: FXN 3 forward 9:69038778-69038805; SpCas9
gattctgtgacatacaaaaaaaat

SEQ ID NO: 29495 - DNA, 23 bp, Artificial Sequence
  Synthetic: FXN 3 forward 9:69038779-69038805; SpCas9
attctgtgacatacaaaaaaaat

SEQ ID NO: 29496 - DNA, 22 bp, Artificial Sequence
  Synthetic: FXN 3 forward 9:69038780-69038805; SpCas9
ttctgtgacatacaaaaaaaat

SEQ ID NO: 29497 - DNA, 21 bp, Artificial Sequence
  Synthetic: FXN 3 forward 9:69038781-69038805; SpCas9
tctgtgacatacaaaaaaaat

SEQ ID NO: 29498 - DNA, 20 bp, Artificial Sequence
  Synthetic: FXN 3 forward 9:69038782-69038805; SpCas9
ctgtgacatacaaaaaaaat

SEQ ID NO: 29499 - DNA, 19 bp, Artificial Sequence
  Synthetic: FXN 3 forward 9:69038783-69038805; SpCas9
tgtgacatacaaaaaaaat

SEQ ID NO: 29500 - DNA, 18 bp, Artificial Sequence
  Synthetic: FXN 3 forward 9:69038784-69038805; SpCas9
gtgacatacaaaaaaaat

SEQ ID NO: 29501 - DNA, 25 bp, Artificial Sequence
  Synthetic: FXN 3 reverse 9:69038782-69038810; SpCas9
tattactgattttttttgtatgtca

SEQ ID NO: 29502 - DNA, 24 bp, Artificial Sequence
  Synthetic: FXN 3 reverse 9:69038783-69038810; SpCas9
attactgattttttttgtatgtca

SEQ ID NO: 29503 - DNA, 23 bp, Artificial Sequence
  Synthetic: FXN 3 reverse 9:69038784-69038810; SpCas9
ttactgattttttttgtatgtca

SEQ ID NO: 29504 - DNA, 22 bp, Artificial Sequence
  Synthetic: FXN 3 reverse 9:69038785-69038810; SpCas9
tactgattttttttgtatgtca

SEQ ID NO: 29505 - DNA, 21 bp, Artificial Sequence
  Synthetic: FXN 3 reverse 9:69038786-69038810; SpCas9
actgattttttttgtatgtca

SEQ ID NO: 29506 - DNA, 20 bp, Artificial Sequence
  Synthetic: FXN 3 reverse 9:69038787-69038810; SpCas9
ctgattttttttgtatgtca

SEQ ID NO: 29507 - DNA, 19 bp, Artificial Sequence
  Synthetic: FXN 3 reverse 9:69038788-69038810; SpCas9
tgattttttttgtatgtca

SEQ ID NO: 29508 - DNA, 18 bp, Artificial Sequence
  Synthetic: FXN 3 reverse 9:69038789-69038810; SpCas9
gattttttttgtatgtca

SEQ ID NO: 29509 - DNA, 25 bp, Artificial Sequence
  Synthetic: FXN 3 forward 9:69038784-69038812; SpCas9
gtgacatacaaaaaaaatcagtaat

SEQ ID NO: 29510 - DNA, 24 bp, Artificial Sequence
  Synthetic: FXN 3 forward 9:69038785-69038812; SpCas9
tgacatacaaaaaaaatcagtaat

SEQ ID NO: 29511 - DNA, 23 bp, Artificial Sequence
  Synthetic: FXN 3 forward 9:69038786-69038812; SpCas9
gacatacaaaaaaaatcagtaat

SEQ ID NO: 29512 - DNA, 22 bp, Artificial Sequence
  Synthetic: FXN 3 forward 9:69038787-69038812; SpCas9
acatacaaaaaaaatcagtaat

SEQ ID NO: 29513 - DNA, 21 bp, Artificial Sequence
  Synthetic: FXN 3 forward 9:69038788-69038812; SpCas9
catacaaaaaaaatcagtaat

SEQ ID NO: 29514 - DNA, 20 bp, Artificial Sequence
  Synthetic: FXN 3 forward 9:69038789-69038812; SpCas9
atacaaaaaaaatcagtaat

SEQ ID NO: 29515 - DNA, 19 bp, Artificial Sequence
  Synthetic: FXN 3 forward 9:69038790-69038812; SpCas9
tacaaaaaaaatcagtaat

SEQ ID NO: 29516 - DNA, 18 bp, Artificial Sequence
  Synthetic: FXN 3 forward 9:69038791-69038812; SpCas9
acaaaaaaaatcagtaat

SEQ ID NO: 29517 - DNA, 25 bp, Artificial Sequence
  Synthetic: FXN 3 reverse 9:69038816-69038844; SpCas9
gtatatgagtacgaaaagagtatgc

SEQ ID NO: 29518 - DNA, 24 bp, Artificial Sequence
  Synthetic: FXN 3 reverse 9:69038817-69038844; SpCas9
tatatgagtacgaaaagagtatgc

SEQ ID NO: 29519 - DNA, 23 bp, Artificial Sequence
  Synthetic: FXN 3 reverse 9:69038818-69038844; SpCas9
atatgagtacgaaaagagtatgc

SEQ ID NO: 29520 - DNA, 22 bp, Artificial Sequence
  Synthetic: FXN 3 reverse 9:69038819-69038844; SpCas9
tatgagtacgaaaagagtatgc

SEQ ID NO: 29521 - DNA, 21 bp, Artificial Sequence
  Synthetic: FXN 3 reverse 9:69038820-69038844; SpCas9
atgagtacgaaaagagtatgc

SEQ ID NO: 29522 - DNA, 20 bp, Artificial Sequence
  Synthetic: FXN 3 reverse 9:69038821-69038844; SpCas9
tgagtacgaaaagagtatgc

SEQ ID NO: 29523 - DNA, 19 bp, Artificial Sequence
  Synthetic: FXN 3 reverse 9:69038822-69038844; SpCas9
gagtacgaaaagagtatgc

SEQ ID NO: 29524 - DNA, 18 bp, Artificial Sequence
  Synthetic: FXN 3 reverse 9:69038823-69038844; SpCas9
agtacgaaaagagtatgc

SEQ ID NO: 29525 - DNA, 25 bp, Artificial Sequence
  Synthetic: FXN 3 forward 9:69038822-69038850; SpCas9
tactcttttcgtactcatatacttc

SEQ ID NO: 29526 - DNA, 24 bp, Artificial Sequence
  Synthetic: FXN 3 forward 9:69038823-69038850; SpCas9
actcttttcgtactcatatacttc

SEQ ID NO: 29527 - DNA, 23 bp, Artificial Sequence
  Synthetic: FXN 3 forward 9:69038824-69038850; SpCas9
ctcttttcgtactcatatacttc

SEQ ID NO: 29528 - DNA, 22 bp, Artificial Sequence
  Synthetic: FXN 3 forward 9:69038825-69038850; SpCas9
tcttttcgtactcatatacttc

SEQ ID NO: 29529 - DNA, 21 bp, Artificial Sequence
  Synthetic: FXN 3 forward 9:69038826-69038850; SpCas9
cttttcgtactcatatacttc

SEQ ID NO: 29530 - DNA, 20 bp, Artificial Sequence
  Synthetic: FXN 3 forward 9:69038827-69038850; SpCas9
ttttcgtactcatatacttc

SEQ ID NO: 29531 - DNA, 19 bp, Artificial Sequence
  Synthetic: FXN 3 forward 9:69038828-69038850; SpCas9
tttcgtactcatatacttc

SEQ ID NO: 29532 - DNA, 18 bp, Artificial Sequence
  Synthetic: FXN 3 forward 9:69038829-69038850; SpCas9
ttcgtactcatatacttc

SEQ ID NO: 29533 - DNA, 25 bp, Artificial Sequence
  Synthetic: FXN 3 reverse 9:69038824-69038852; SpCas9
tgctggaagtatatgagtacgaaaa

SEQ ID NO: 29534 - DNA, 24 bp, Artificial Sequence
  Synthetic: FXN 3 reverse 9:69038825-69038852; SpCas9
gctggaagtatatgagtacgaaaa

SEQ ID NO: 29535 - DNA, 23 bp, Artificial Sequence
  Synthetic: FXN 3 reverse 9:69038826-69038852; SpCas9
ctggaagtatatgagtacgaaaa

SEQ ID NO: 29536 - DNA, 22 bp, Artificial Sequence
  Synthetic: FXN 3 reverse 9:69038827-69038852; SpCas9
tggaagtatatgagtacgaaaa

SEQ ID NO: 29537 - DNA, 21 bp, Artificial Sequence
  Synthetic: FXN 3 reverse 9:69038828-69038852; SpCas9
ggaagtatatgagtacgaaaa

SEQ ID NO: 29538 - DNA, 20 bp, Artificial Sequence
  Synthetic: FXN 3 reverse 9:69038829-69038852; SpCas9
gaagtatatgagtacgaaaa

SEQ ID NO: 29539 - DNA, 19 bp, Artificial Sequence
  Synthetic: FXN 3 reverse 9:69038830-69038852; SpCas9
aagtatatgagtacgaaaa

SEQ ID NO: 29540 - DNA, 18 bp, Artificial Sequence
  Synthetic: FXN 3 reverse 9:69038831-69038852; SpCas9
agtatatgagtacgaaaa

SEQ ID NO: 29541 - DNA, 25 bp, Artificial Sequence
  Synthetic: FXN 3 reverse 9:69038826-69038854; SpCas9
tatgctggaagtatatgagtacgaa

SEQ ID NO: 29542 - DNA, 24 bp, Artificial Sequence
  Synthetic: FXN 3 reverse 9:69038827-69038854; SpCas9
atgctggaagtatatgagtacgaa

SEQ ID NO: 29543 - DNA, 23 bp, Artificial Sequence
  Synthetic: FXN 3 reverse 9:69038828-69038854; SpCas9
tgctggaagtatatgagtacgaa

SEQ ID NO: 29544 - DNA, 22 bp, Artificial Sequence
  Synthetic: FXN 3 reverse 9:69038829-69038854; SpCas9
gctggaagtatatgagtacgaa

SEQ ID NO: 29545 - DNA, 21 bp, Artificial Sequence
  Synthetic: FXN 3 reverse 9:69038830-69038854; SpCas9
ctggaagtatatgagtacgaa

SEQ ID NO: 29546 - DNA, 20 bp, Artificial Sequence
  Synthetic: FXN 3 reverse 9:69038831-69038854; SpCas9
tggaagtatatgagtacgaa

SEQ ID NO: 29547 - DNA, 19 bp, Artificial Sequence
  Synthetic: FXN 3 reverse 9:69038832-69038854; SpCas9
ggaagtatatgagtacgaa

SEQ ID NO: 29548 - DNA, 18 bp, Artificial Sequence
  Synthetic: FXN 3 reverse 9:69038833-69038854; SpCas9
gaagtatatgagtacgaa

SEQ ID NO: 29549 - DNA, 25 bp, Artificial Sequence
  Synthetic: FXN 3 reverse 9:69038835-69038863; SpCas9
gaattgagatatgctggaagtatat

SEQ ID NO: 29550 - DNA, 24 bp, Artificial Sequence
  Synthetic: FXN 3 reverse 9:69038836-69038863; SpCas9
aattgagatatgctggaagtatat

SEQ ID NO: 29551 - DNA, 23 bp, Artificial Sequence
  Synthetic: FXN 3 reverse 9:69038837-69038863; SpCas9
attgagatatgctggaagtatat

SEQ ID NO: 29552 - DNA, 22 bp, Artificial Sequence
  Synthetic: FXN 3 reverse 9:69038838-69038863; SpCas9
ttgagatatgctggaagtatat

SEQ ID NO: 29553 - DNA, 21 bp, Artificial Sequence
  Synthetic: FXN 3 reverse 9:69038839-69038863; SpCas9
tgagatatgctggaagtatat

SEQ ID NO: 29554 - DNA, 20 bp, Artificial Sequence
  Synthetic: FXN 3 reverse 9:69038840-69038863; SpCas9
gagatatgctggaagtatat

SEQ ID NO: 29555 - DNA, 19 bp, Artificial Sequence
  Synthetic: FXN 3 reverse 9:69038841-69038863; SpCas9
agatatgctggaagtatat

SEQ ID NO: 29556 - DNA, 18 bp, Artificial Sequence
  Synthetic: FXN 3 reverse 9:69038842-69038863; SpCas9
gatatgctggaagtatat

SEQ ID NO: 29557 - DNA, 25 bp, Artificial Sequence
  Synthetic: FXN 3 reverse 9:69038843-69038871; SpCas9
gaaattgtgaattgagatatgctgg

SEQ ID NO: 29558 - DNA, 24 bp, Artificial Sequence
  Synthetic: FXN 3 reverse 9:69038844-69038871; SpCas9
aaattgtgaattgagatatgctgg

SEQ ID NO: 29559 - DNA, 23 bp, Artificial Sequence
  Synthetic: FXN 3 reverse 9:69038845-69038871; SpCas9
aattgtgaattgagatatgctgg

SEQ ID NO: 29560 - DNA, 22 bp, Artificial Sequence
  Synthetic: FXN 3 reverse 9:69038846-69038871; SpCas9
attgtgaattgagatatgctgg

SEQ ID NO: 29561 - DNA, 21 bp, Artificial Sequence
  Synthetic: FXN 3 reverse 9:69038847-69038871; SpCas9
ttgtgaattgagatatgctgg

SEQ ID NO: 29562 - DNA, 20 bp, Artificial Sequence
  Synthetic: FXN 3 reverse 9:69038848-69038871; SpCas9
tgtgaattgagatatgctgg

SEQ ID NO: 29563 - DNA, 19 bp, Artificial Sequence
  Synthetic: FXN 3 reverse 9:69038849-69038871; SpCas9
gtgaattgagatatgctgg

SEQ ID NO: 29564 - DNA, 18 bp, Artificial Sequence
  Synthetic: FXN 3 reverse 9:69038850-69038871; SpCas9
tgaattgagatatgctgg

SEQ ID NO: 29565 - DNA, 25 bp, Artificial Sequence
  Synthetic: FXN 3 reverse 9:69038846-69038874; SpCas9
ttagaaattgtgaattgagatatgc

SEQ ID NO: 29566 - DNA, 24 bp, Artificial Sequence
  Synthetic: FXN 3 reverse 9:69038847-69038874; SpCas9
tagaaattgtgaattgagatatgc

SEQ ID NO: 29567 - DNA, 23 bp, Artificial Sequence
  Synthetic: FXN 3 reverse 9:69038848-69038874; SpCas9
agaaattgtgaattgagatatgc

SEQ ID NO: 29568 - DNA, 22 bp, Artificial Sequence
  Synthetic: FXN 3 reverse 9:69038849-69038874; SpCas9
gaaattgtgaattgagatatgc

SEQ ID NO: 29569 - DNA, 21 bp, Artificial Sequence
  Synthetic: FXN 3 reverse 9:69038850-69038874; SpCas9
aaattgtgaattgagatatgc

SEQ ID NO: 29570 - DNA, 20 bp, Artificial Sequence
  Synthetic: FXN 3 reverse 9:69038851-69038874; SpCas9
aattgtgaattgagatatgc

SEQ ID NO: 29571 - DNA, 19 bp, Artificial Sequence
  Synthetic: FXN 3 reverse 9:69038852-69038874; SpCas9
attgtgaattgagatatgc

SEQ ID NO: 29572 - DNA, 18 bp, Artificial Sequence
  Synthetic: FXN 3 reverse 9:69038853-69038874; SpCas9
ttgtgaattgagatatgc

SEQ ID NO: 29573 - DNA, 25 bp, Artificial Sequence
  Synthetic: FXN 3 forward 9:69038847-69038875; SpCas9
cagcatatctcaattcacaatttct

SEQ ID NO: 29574 - DNA, 24 bp, Artificial Sequence
  Synthetic: FXN 3 forward 9:69038848-69038875; SpCas9
agcatatctcaattcacaatttct

SEQ ID NO: 29575 - DNA, 23 bp, Artificial Sequence
  Synthetic: FXN 3 forward 9:69038849-69038875; SpCas9
gcatatctcaattcacaatttct

SEQ ID NO: 29576 - DNA, 22 bp, Artificial Sequence
  Synthetic: FXN 3 forward 9:69038850-69038875; SpCas9
catatctcaattcacaatttct

SEQ ID NO: 29577 - DNA, 21 bp, Artificial Sequence
  Synthetic: FXN 3 forward 9:69038851-69038875; SpCas9
atatctcaattcacaatttct

SEQ ID NO: 29578 - DNA, 20 bp, Artificial Sequence
  Synthetic: FXN 3 forward 9:69038852-69038875; SpCas9
tatctcaattcacaatttct

SEQ ID NO: 29579 - DNA, 19 bp, Artificial Sequence
  Synthetic: FXN 3 forward 9:69038853-69038875; SpCas9
atctcaattcacaatttct

SEQ ID NO: 29580 - DNA, 18 bp, Artificial Sequence
  Synthetic: FXN 3 forward 9:69038854-69038875; SpCas9
tctcaattcacaatttct

SEQ ID NO: 29581 - DNA, 25 bp, Artificial Sequence
  Synthetic: FXN 3 reverse 9:69038855-69038883; SpCas9
agcatttacttagaaattgtgaatt

SEQ ID NO: 29582 - DNA, 24 bp, Artificial Sequence
  Synthetic: FXN 3 reverse 9:69038856-69038883; SpCas9
gcatttacttagaaattgtgaatt

SEQ ID NO: 29583 - DNA, 23 bp, Artificial Sequence
  Synthetic: FXN 3 reverse 9:69038857-69038883; SpCas9
catttacttagaaattgtgaatt

SEQ ID NO: 29584 - DNA, 22 bp, Artificial Sequence
  Synthetic: FXN 3 reverse 9:69038858-69038883; SpCas9
atttacttagaaattgtgaatt

SEQ ID NO: 29585 - DNA, 21 bp, Artificial Sequence
  Synthetic: FXN 3 reverse 9:69038859-69038883; SpCas9
tttacttagaaattgtgaatt

SEQ ID NO: 29586 - DNA, 20 bp, Artificial Sequence
  Synthetic: FXN 3 reverse 9:69038860-69038883; SpCas9
ttacttagaaattgtgaatt

SEQ ID NO: 29587 - DNA, 19 bp, Artificial Sequence
  Synthetic: FXN 3 reverse 9:69038861-69038883; SpCas9
tacttagaaattgtgaatt

SEQ ID NO: 29588 - DNA, 18 bp, Artificial Sequence
  Synthetic: FXN 3 reverse 9:69038862-69038883; SpCas9
acttagaaattgtgaatt

SEQ ID NO: 29589 - DNA, 25 bp, Artificial Sequence
  Synthetic: FXN 3 reverse 9:69038870-69038898; SpCas9
agtaaatacagatagagcatttact

SEQ ID NO: 29590 - DNA, 24 bp, Artificial Sequence
  Synthetic: FXN 3 reverse 9:69038871-69038898; SpCas9
gtaaatacagatagagcatttact

SEQ ID NO: 29591 - DNA, 23 bp, Artificial Sequence
  Synthetic: FXN 3 reverse 9:69038872-69038898; SpCas9
taaatacagatagagcatttact

SEQ ID NO: 29592 - DNA, 22 bp, Artificial Sequence
  Synthetic: FXN 3 reverse 9:69038873-69038898; SpCas9
aaatacagatagagcatttact

SEQ ID NO: 29593 - DNA, 21 bp, Artificial Sequence
  Synthetic: FXN 3 reverse 9:69038874-69038898; SpCas9
aatacagatagagcatttact

SEQ ID NO: 29594 - DNA, 20 bp, Artificial Sequence
  Synthetic: FXN 3 reverse 9:69038875-69038898; SpCas9
atacagatagagcatttact

SEQ ID NO: 29595 - DNA, 19 bp, Artificial Sequence
  Synthetic: FXN 3 reverse 9:69038876-69038898; SpCas9
tacagatagagcatttact

SEQ ID NO: 29596 - DNA, 18 bp, Artificial Sequence
  Synthetic: FXN 3 reverse 9:69038877-69038898; SpCas9
acagatagagcatttact

SEQ ID NO: 29597 - DNA, 25 bp, Artificial Sequence
  Synthetic: FXN 3 reverse 9:69038881-69038909; SpCas9
aattttataaaagtaaatacagata

SEQ ID NO: 29598 - DNA, 24 bp, Artificial Sequence
  Synthetic: FXN 3 reverse 9:69038882-69038909; SpCas9
attttataaaagtaaatacagata

SEQ ID NO: 29599 - DNA, 23 bp, Artificial Sequence
  Synthetic: FXN 3 reverse 9:69038883-69038909; SpCas9
ttttataaaagtaaatacagata

SEQ ID NO: 29600 - DNA, 22 bp, Artificial Sequence
  Synthetic: FXN 3 reverse 9:69038884-69038909; SpCas9
tttataaaagtaaatacagata

SEQ ID NO: 29601 - DNA, 21 bp, Artificial Sequence
  Synthetic: FXN 3 reverse 9:69038885-69038909; SpCas9
ttataaaagtaaatacagata

SEQ ID NO: 29602 - DNA, 20 bp, Artificial Sequence
  Synthetic: FXN 3 reverse 9:69038886-69038909; SpCas9
tataaaagtaaatacagata

SEQ ID NO: 29603 - DNA, 19 bp, Artificial Sequence
  Synthetic: FXN 3 reverse 9:69038887-69038909; SpCas9
ataaaagtaaatacagata

SEQ ID NO: 29604 - DNA, 18 bp, Artificial Sequence
  Synthetic: FXN 3 reverse 9:69038888-69038909; SpCas9
taaaagtaaatacagata

SEQ ID NO: 29605 - DNA, 25 bp, Artificial Sequence
  Synthetic: FXN 3 reverse 9:69038883-69038911; SpCas9
tgaattttataaaagtaaatacaga

SEQ ID NO: 29606 - DNA, 24 bp, Artificial Sequence
  Synthetic: FXN 3 reverse 9:69038884-69038911; SpCas9
gaattttataaaagtaaatacaga

SEQ ID NO: 29607 - DNA, 23 bp, Artificial Sequence
  Synthetic: FXN 3 reverse 9:69038885-69038911; SpCas9
aattttataaaagtaaatacaga

SEQ ID NO: 29608 - DNA, 22 bp, Artificial Sequence
  Synthetic: FXN 3 reverse 9:69038886-69038911; SpCas9
attttataaaagtaaatacaga

SEQ ID NO: 29609 - DNA, 21 bp, Artificial Sequence
  Synthetic: FXN 3 reverse 9:69038887-69038911; SpCas9
ttttataaaagtaaatacaga

SEQ ID NO: 29610 - DNA, 20 bp, Artificial Sequence
  Synthetic: FXN 3 reverse 9:69038888-69038911; SpCas9
tttataaaagtaaatacaga

SEQ ID NO: 29611 - DNA, 19 bp, Artificial Sequence
  Synthetic: FXN 3 reverse 9:69038889-69038911; SpCas9
ttataaaagtaaatacaga

SEQ ID NO: 29612 - DNA, 18 bp, Artificial Sequence
  Synthetic: FXN 3 reverse 9:69038890-69038911; SpCas9
tataaaagtaaatacaga

SEQ ID NO: 29613 - DNA, 25 bp, Artificial Sequence
  Synthetic: FXN 3 reverse 9:69038887-69038915; SpCas9
attgtgaattttataaaagtaaata

SEQ ID NO: 29614 - DNA, 24 bp, Artificial Sequence
  Synthetic: FXN 3 reverse 9:69038888-69038915; SpCas9
ttgtgaattttataaaagtaaata

SEQ ID NO: 29615 - DNA, 23 bp, Artificial Sequence
  Synthetic: FXN 3 reverse 9:69038889-69038915; SpCas9
tgtgaattttataaaagtaaata

SEQ ID NO: 29616 - DNA, 22 bp, Artificial Sequence
  Synthetic: FXN 3 reverse 9:69038890-69038915; SpCas9
gtgaattttataaaagtaaata

SEQ ID NO: 29617 - DNA, 21 bp, Artificial Sequence
  Synthetic: FXN 3 reverse 9:69038891-69038915; SpCas9
tgaattttataaaagtaaata

SEQ ID NO: 29618 - DNA, 20 bp, Artificial Sequence
  Synthetic: FXN 3 reverse 9:69038892-69038915; SpCas9
gaattttataaaagtaaata

SEQ ID NO: 29619 - DNA, 19 bp, Artificial Sequence
  Synthetic: FXN 3 reverse 9:69038893-69038915; SpCas9
aattttataaaagtaaata

SEQ ID NO: 29620 - DNA, 18 bp, Artificial Sequence
  Synthetic: FXN 3 reverse 9:69038894-69038915; SpCas9
attttataaaagtaaata

SEQ ID NO: 29621 - DNA, 25 bp, Artificial Sequence
  Synthetic: FXN 3 reverse 9:69038896-69038924; SpCas9
tcatttttaattgtgaattttataa

SEQ ID NO: 29622 - DNA, 24 bp, Artificial Sequence
  Synthetic: FXN 3 reverse 9:69038897-69038924; SpCas9
catttttaattgtgaattttataa

SEQ ID NO: 29623 - DNA, 23 bp, Artificial Sequence
  Synthetic: FXN 3 reverse 9:69038898-69038924; SpCas9
atttttaattgtgaattttataa

SEQ ID NO: 29624 - DNA, 22 bp, Artificial Sequence
  Synthetic: FXN 3 reverse 9:69038899-69038924; SpCas9
tttttaattgtgaattttataa

SEQ ID NO: 29625 - DNA, 21 bp, Artificial Sequence
  Synthetic: FXN 3 reverse 9:69038900-69038924; SpCas9
ttttaattgtgaattttataa

SEQ ID NO: 29626 - DNA, 20 bp, Artificial Sequence
  Synthetic: FXN 3 reverse 9:69038901-69038924; SpCas9
tttaattgtgaattttataa

SEQ ID NO: 29627 - DNA, 19 bp, Artificial Sequence
  Synthetic: FXN 3 reverse 9:69038902-69038924; SpCas9
ttaattgtgaattttataa

SEQ ID NO: 29628 - DNA, 18 bp, Artificial Sequence
  Synthetic: FXN 3 reverse 9:69038903-69038924; SpCas9
taattgtgaattttataa

SEQ ID NO: 29629 - DNA, 25 bp, Artificial Sequence
  Synthetic: FXN 3 forward 9:69038898-69038926; SpCas9
tttataaaattcacaattaaaaatg

SEQ ID NO: 29630 - DNA, 24 bp, Artificial Sequence
  Synthetic: FXN 3 forward 9:69038899-69038926; SpCas9
ttataaaattcacaattaaaaatg

SEQ ID NO: 29631 - DNA, 23 bp, Artificial Sequence
  Synthetic: FXN 3 forward 9:69038900-69038926; SpCas9
tataaaattcacaattaaaaatg

SEQ ID NO: 29632 - DNA, 22 bp, Artificial Sequence
  Synthetic: FXN 3 forward 9:69038901-69038926; SpCas9
ataaaattcacaattaaaaatg

SEQ ID NO: 29633 - DNA, 21 bp, Artificial Sequence
  Synthetic: FXN 3 forward 9:69038902-69038926; SpCas9
taaaattcacaattaaaaatg

SEQ ID NO: 29634 - DNA, 20 bp, Artificial Sequence
  Synthetic: FXN 3 forward 9:69038903-69038926; SpCas9
aaaattcacaattaaaaatg

SEQ ID NO: 29635 - DNA, 19 bp, Artificial Sequence
  Synthetic: FXN 3 forward 9:69038904-69038926; SpCas9
aaattcacaattaaaaatg

SEQ ID NO: 29636 - DNA, 18 bp, Artificial Sequence
  Synthetic: FXN 3 forward 9:69038905-69038926; SpCas9
aattcacaattaaaaatg

SEQ ID NO: 29637 - DNA, 25 bp, Artificial Sequence
  Synthetic: FXN 3 forward 9:69038899-69038927; SpCas9
ttataaaattcacaattaaaaatga

SEQ ID NO: 29638 - DNA, 24 bp, Artificial Sequence
  Synthetic: FXN 3 forward 9:69038900-69038927; SpCas9
tataaaattcacaattaaaaatga

SEQ ID NO: 29639 - DNA, 23 bp, Artificial Sequence
  Synthetic: FXN 3 forward 9:69038901-69038927; SpCas9
ataaaattcacaattaaaaatga

SEQ ID NO: 29640 - DNA, 22 bp, Artificial Sequence
  Synthetic: FXN 3 forward 9:69038902-69038927; SpCas9
taaaattcacaattaaaaatga

SEQ ID NO: 29641 - DNA, 21 bp, Artificial Sequence
  Synthetic: FXN 3 forward 9:69038903-69038927; SpCas9
aaaattcacaattaaaaatga

SEQ ID NO: 29642 - DNA, 20 bp, Artificial Sequence
  Synthetic: FXN 3 forward 9:69038904-69038927; SpCas9
aaattcacaattaaaaatga

SEQ ID NO: 29643 - DNA, 19 bp, Artificial Sequence
  Synthetic: FXN 3 forward 9:69038905-69038927; SpCas9
aattcacaattaaaaatga

SEQ ID NO: 29644 - DNA, 18 bp, Artificial Sequence
  Synthetic: FXN 3 forward 9:69038906-69038927; SpCas9
attcacaattaaaaatga

SEQ ID NO: 29645 - DNA, 25 bp, Artificial Sequence
  Synthetic: FXN 3 forward 9:69038908-69038936; SpCas9
tcacaattaaaaatgaaggttcaca

SEQ ID NO: 29646 - DNA, 24 bp, Artificial Sequence
  Synthetic: FXN 3 forward 9:69038909-69038936; SpCas9
cacaattaaaaatgaaggttcaca

SEQ ID NO: 29647 - DNA, 23 bp, Artificial Sequence
  Synthetic: FXN 3 forward 9:69038910-69038936; SpCas9
acaattaaaaatgaaggttcaca

SEQ ID NO: 29648 - DNA, 22 bp, Artificial Sequence
  Synthetic: FXN 3 forward 9:69038911-69038936; SpCas9
caattaaaaatgaaggttcaca

SEQ ID NO: 29649 - DNA, 21 bp, Artificial Sequence
  Synthetic: FXN 3 forward 9:69038912-69038936; SpCas9
aattaaaaatgaaggttcaca

SEQ ID NO: 29650 - DNA, 20 bp, Artificial Sequence
  Synthetic: FXN 3 forward 9:69038913-69038936; SpCas9
attaaaaatgaaggttcaca

SEQ ID NO: 29651 - DNA, 19 bp, Artificial Sequence
  Synthetic: FXN 3 forward 9:69038914-69038936; SpCas9
ttaaaaatgaaggttcaca

SEQ ID NO: 29652 - DNA, 18 bp, Artificial Sequence
  Synthetic: FXN 3 forward 9:69038915-69038936; SpCas9
taaaaatgaaggttcaca

SEQ ID NO: 29653 - DNA, 25 bp, Artificial Sequence
  Synthetic: FXN 3 forward 9:69038913-69038941; SpCas9
attaaaaatgaaggttcacatagtc

SEQ ID NO: 29654 - DNA, 24 bp, Artificial Sequence
  Synthetic: FXN 3 forward 9:69038914-69038941; SpCas9
ttaaaaatgaaggttcacatagtc

SEQ ID NO: 29655 - DNA, 23 bp, Artificial Sequence
  Synthetic: FXN 3 forward 9:69038915-69038941; SpCas9
taaaaatgaaggttcacatagtc

SEQ ID NO: 29656 - DNA, 22 bp, Artificial Sequence
  Synthetic: FXN 3 forward 9:69038916-69038941; SpCas9
aaaaatgaaggttcacatagtc

SEQ ID NO: 29657 - DNA, 21 bp, Artificial Sequence
  Synthetic: FXN 3 forward 9:69038917-69038941; SpCas9
aaaatgaaggttcacatagtc

SEQ ID NO: 29658 - DNA, 20 bp, Artificial Sequence
  Synthetic: FXN 3 forward 9:69038918-69038941; SpCas9
aaatgaaggttcacatagtc

SEQ ID NO: 29659 - DNA, 19 bp, Artificial Sequence
  Synthetic: FXN 3 forward 9:69038919-69038941; SpCas9
aatgaaggttcacatagtc

SEQ ID NO: 29660 - DNA, 18 bp, Artificial Sequence
  Synthetic: FXN 3 forward 9:69038920-69038941; SpCas9
atgaaggttcacatagtc

SEQ ID NO: 29661 - DNA, 25 bp, Artificial Sequence
  Synthetic: FXN 3 forward 9:69038943-69038971; SpCas9
gttccaaacacacttaaatgtctcc

SEQ ID NO: 29662 - DNA, 24 bp, Artificial Sequence
  Synthetic: FXN 3 forward 9:69038944-69038971; SpCas9
ttccaaacacacttaaatgtctcc

SEQ ID NO: 29663 - DNA, 23 bp, Artificial Sequence
  Synthetic: FXN 3 forward 9:69038945-69038971; SpCas9
tccaaacacacttaaatgtctcc

SEQ ID NO: 29664 - DNA, 22 bp, Artificial Sequence
  Synthetic: FXN 3 forward 9:69038946-69038971; SpCas9
ccaaacacacttaaatgtctcc

SEQ ID NO: 29665 - DNA, 21 bp, Artificial Sequence
  Synthetic: FXN 3 forward 9:69038947-69038971; SpCas9
caaacacacttaaatgtctcc

SEQ ID NO: 29666 - DNA, 20 bp, Artificial Sequence
  Synthetic: FXN 3 forward 9:69038948-69038971; SpCas9
aaacacacttaaatgtctcc

SEQ ID NO: 29667 - DNA, 19 bp, Artificial Sequence
  Synthetic: FXN 3 forward 9:69038949-69038971; SpCas9
aacacacttaaatgtctcc

SEQ ID NO: 29668 - DNA, 18 bp, Artificial Sequence
  Synthetic: FXN 3 forward 9:69038950-69038971; SpCas9
acacacttaaatgtctcc

SEQ ID NO: 29669 - DNA, 25 bp, Artificial Sequence
  Synthetic: FXN 3 forward 9:69038944-69038972; SpCas9
ttccaaacacacttaaatgtctcct

SEQ ID NO: 29670 - DNA, 24 bp, Artificial Sequence
  Synthetic: FXN 3 forward 9:69038945-69038972; SpCas9
tccaaacacacttaaatgtctcct

SEQ ID NO: 29671 - DNA, 23 bp, Artificial Sequence
  Synthetic: FXN 3 forward 9:69038946-69038972; SpCas9
ccaaacacacttaaatgtctcct

SEQ ID NO: 29672 - DNA, 22 bp, Artificial Sequence
  Synthetic: FXN 3 forward 9:69038947-69038972; SpCas9
caaacacacttaaatgtctcct

SEQ ID NO: 29673 - DNA, 21 bp, Artificial Sequence
  Synthetic: FXN 3 forward 9:69038948-69038972; SpCas9
aaacacacttaaatgtctcct

SEQ ID NO: 29674 - DNA, 20 bp, Artificial Sequence
  Synthetic: FXN 3 forward 9:69038949-69038972; SpCas9
aacacacttaaatgtctcct

SEQ ID NO: 29675 - DNA, 19 bp, Artificial Sequence
  Synthetic: FXN 3 forward 9:69038950-69038972; SpCas9
acacacttaaatgtctcct

SEQ ID NO: 29676 - DNA, 18 bp, Artificial Sequence
  Synthetic: FXN 3 forward 9:69038951-69038972; SpCas9
cacacttaaatgtctcct

SEQ ID NO: 29677 - DNA, 25 bp, Artificial Sequence
  Synthetic: FXN 3 reverse 9:69038946-69038974; SpCas9
agcctaggagacatttaagtgtgtt

SEQ ID NO: 29678 - DNA, 24 bp, Artificial Sequence
  Synthetic: FXN 3 reverse 9:69038947-69038974; SpCas9
gcctaggagacatttaagtgtgtt

SEQ ID NO: 29679 - DNA, 23 bp, Artificial Sequence
  Synthetic: FXN 3 reverse 9:69038948-69038974; SpCas9
cctaggagacatttaagtgtgtt

SEQ ID NO: 29680 - DNA, 22 bp, Artificial Sequence
  Synthetic: FXN 3 reverse 9:69038949-69038974; SpCas9
ctaggagacatttaagtgtgtt

SEQ ID NO: 29681 - DNA, 21 bp, Artificial Sequence
  Synthetic: FXN 3 reverse 9:69038950-69038974; SpCas9
taggagacatttaagtgtgtt

SEQ ID NO: 29682 - DNA, 20 bp, Artificial Sequence
  Synthetic: FXN 3 reverse 9:69038951-69038974; SpCas9
aggagacatttaagtgtgtt

SEQ ID NO: 29683 - DNA, 19 bp, Artificial Sequence
  Synthetic: FXN 3 reverse 9:69038952-69038974; SpCas9
ggagacatttaagtgtgtt

SEQ ID NO: 29684 - DNA, 18 bp, Artificial Sequence
  Synthetic: FXN 3 reverse 9:69038953-69038974; SpCas9
gagacatttaagtgtgtt

SEQ ID NO: 29685 - DNA, 25 bp, Artificial Sequence
  Synthetic: FXN 3 forward 9:69038948-69038976; SpCas9
aaacacacttaaatgtctcctaggc

SEQ ID NO: 29686 - DNA, 24 bp, Artificial Sequence
  Synthetic: FXN 3 forward 9:69038949-69038976; SpCas9
aacacacttaaatgtctcctaggc

SEQ ID NO: 29687 - DNA, 23 bp, Artificial Sequence
  Synthetic: FXN 3 forward 9:69038950-69038976; SpCas9
acacacttaaatgtctcctaggc

SEQ ID NO: 29688 - DNA, 22 bp, Artificial Sequence
  Synthetic: FXN 3 forward 9:69038951-69038976; SpCas9
cacacttaaatgtctcctaggc

SEQ ID NO: 29689 - DNA, 21 bp, Artificial Sequence
  Synthetic: FXN 3 forward 9:69038952-69038976; SpCas9
acacttaaatgtctcctaggc

SEQ ID NO: 29690 - DNA, 20 bp, Artificial Sequence
  Synthetic: FXN 3 forward 9:69038953-69038976; SpCas9
cacttaaatgtctcctaggc

SEQ ID NO: 29691 - DNA, 19 bp, Artificial Sequence
  Synthetic: FXN 3 forward 9:69038954-69038976; SpCas9
acttaaatgtctcctaggc

SEQ ID NO: 29692 - DNA, 18 bp, Artificial Sequence
  Synthetic: FXN 3 forward 9:69038955-69038976; SpCas9
cttaaatgtctcctaggc

SEQ ID NO: 29693 - DNA, 25 bp, Artificial Sequence
  Synthetic: FXN 3 forward 9:69038949-69038977; SpCas9
aacacacttaaatgtctcctaggct

SEQ ID NO: 29694 - DNA, 24 bp, Artificial Sequence
  Synthetic: FXN 3 forward 9:69038950-69038977; SpCas9
acacacttaaatgtctcctaggct

SEQ ID NO: 29695 - DNA, 23 bp, Artificial Sequence
  Synthetic: FXN 3 forward 9:69038951-69038977; SpCas9
cacacttaaatgtctcctaggct

SEQ ID NO: 29696 - DNA, 22 bp, Artificial Sequence
  Synthetic: FXN 3 forward 9:69038952-69038977; SpCas9
acacttaaatgtctcctaggct

SEQ ID NO: 29697 - DNA, 21 bp, Artificial Sequence
  Synthetic: FXN 3 forward 9:69038953-69038977; SpCas9
cacttaaatgtctcctaggct

SEQ ID NO: 29698 - DNA, 20 bp, Artificial Sequence
  Synthetic: FXN 3 forward 9:69038954-69038977; SpCas9
acttaaatgtctcctaggct

SEQ ID NO: 29699 - DNA, 19 bp, Artificial Sequence
  Synthetic: FXN 3 forward 9:69038955-69038977; SpCas9
cttaaatgtctcctaggct

SEQ ID NO: 29700 - DNA, 18 bp, Artificial Sequence
  Synthetic: FXN 3 forward 9:69038956-69038977; SpCas9
ttaaatgtctcctaggct

SEQ ID NO: 29701 - DNA, 25 bp, Artificial Sequence
  Synthetic: FXN 3 forward 9:69038954-69038982; SpCas9
acttaaatgtctcctaggctgggtg

SEQ ID NO: 29702 - DNA, 24 bp, Artificial Sequence
  Synthetic: FXN 3 forward 9:69038955-69038982; SpCas9
cttaaatgtctcctaggctgggtg

SEQ ID NO: 29703 - DNA, 23 bp, Artificial Sequence
  Synthetic: FXN 3 forward 9:69038956-69038982; SpCas9
ttaaatgtctcctaggctgggtg

SEQ ID NO: 29704 - DNA, 22 bp, Artificial Sequence
  Synthetic: FXN 3 forward 9:69038957-69038982; SpCas9
taaatgtctcctaggctgggtg

SEQ ID NO: 29705 - DNA, 21 bp, Artificial Sequence
  Synthetic: FXN 3 forward 9:69038958-69038982; SpCas9
aaatgtctcctaggctgggtg

SEQ ID NO: 29706 - DNA, 20 bp, Artificial Sequence
  Synthetic: FXN 3 forward 9:69038959-69038982; SpCas9
aatgtctcctaggctgggtg

SEQ ID NO: 29707 - DNA, 19 bp, Artificial Sequence
  Synthetic: FXN 3 forward 9:69038960-69038982; SpCas9
atgtctcctaggctgggtg

SEQ ID NO: 29708 - DNA, 18 bp, Artificial Sequence
  Synthetic: FXN 3 forward 9:69038961-69038982; SpCas9
tgtctcctaggctgggtg

SEQ ID NO: 29709 - DNA, 25 bp, Artificial Sequence
  Synthetic: FXN 3 reverse 9:69038955-69038983; SpCas9
accacacccagcctaggagacattt

SEQ ID NO: 29710 - DNA, 24 bp, Artificial Sequence
  Synthetic: FXN 3 reverse 9:69038956-69038983; SpCas9
ccacacccagcctaggagacattt

SEQ ID NO: 29711 - DNA, 23 bp, Artificial Sequence
  Synthetic: FXN 3 reverse 9:69038957-69038983; SpCas9
cacacccagcctaggagacattt

SEQ ID NO: 29712 - DNA, 22 bp, Artificial Sequence
  Synthetic: FXN 3 reverse 9:69038958-69038983; SpCas9
acacccagcctaggagacattt

SEQ ID NO: 29713 - DNA, 21 bp, Artificial Sequence
  Synthetic: FXN 3 reverse 9:69038959-69038983; SpCas9
cacccagcctaggagacattt

SEQ ID NO: 29714 - DNA, 20 bp, Artificial Sequence
  Synthetic: FXN 3 reverse 9:69038960-69038983; SpCas9
acccagcctaggagacattt

SEQ ID NO: 29715 - DNA, 19 bp, Artificial Sequence
  Synthetic: FXN 3 reverse 9:69038961-69038983; SpCas9
cccagcctaggagacattt

SEQ ID NO: 29716 - DNA, 18 bp, Artificial Sequence
  Synthetic: FXN 3 reverse 9:69038962-69038983; SpCas9
ccagcctaggagacattt

SEQ ID NO: 29717 - DNA, 25 bp, Artificial Sequence
  Synthetic: FXN 3 reverse 9:69038964-69038992; SpCas9
gtgtgagcaaccacacccagcctag

SEQ ID NO: 29718 - DNA, 24 bp, Artificial Sequence
  Synthetic: FXN 3 reverse 9:69038965-69038992; SpCas9
tgtgagcaaccacacccagcctag

SEQ ID NO: 29719 - DNA, 23 bp, Artificial Sequence
  Synthetic: FXN 3 reverse 9:69038966-69038992; SpCas9
gtgagcaaccacacccagcctag

SEQ ID NO: 29720 - DNA, 22 bp, Artificial Sequence
  Synthetic: FXN 3 reverse 9:69038967-69038992; SpCas9
tgagcaaccacacccagcctag

SEQ ID NO: 29721 - DNA, 21 bp, Artificial Sequence
  Synthetic: FXN 3 reverse 9:69038968-69038992; SpCas9
gagcaaccacacccagcctag

SEQ ID NO: 29722 - DNA, 20 bp, Artificial Sequence
  Synthetic: FXN 3 reverse 9:69038969-69038992; SpCas9
agcaaccacacccagcctag

SEQ ID NO: 29723 - DNA, 19 bp, Artificial Sequence
  Synthetic: FXN 3 reverse 9:69038970-69038992; SpCas9
gcaaccacacccagcctag

SEQ ID NO: 29724 - DNA, 18 bp, Artificial Sequence
  Synthetic: FXN 3 reverse 9:69038971-69038992; SpCas9
caaccacacccagcctag

SEQ ID NO: 29725 - DNA, 25 bp, Artificial Sequence
  Synthetic: FXN 3 reverse 9:69038966-69038994; SpCas9
aggtgtgagcaaccacacccagcct

SEQ ID NO: 29726 - DNA, 24 bp, Artificial Sequence
  Synthetic: FXN 3 reverse 9:69038967-69038994; SpCas9
ggtgtgagcaaccacacccagcct

SEQ ID NO: 29727 - DNA, 23 bp, Artificial Sequence
  Synthetic: FXN 3 reverse 9:69038968-69038994; SpCas9
gtgtgagcaaccacacccagcct

SEQ ID NO: 29728 - DNA, 22 bp, Artificial Sequence
  Synthetic: FXN 3 reverse 9:69038969-69038994; SpCas9
tgtgagcaaccacacccagcct

SEQ ID NO: 29729 - DNA, 21 bp, Artificial Sequence
  Synthetic: FXN 3 reverse 9:69038970-69038994; SpCas9
gtgagcaaccacacccagcct

SEQ ID NO: 29730 - DNA, 20 bp, Artificial Sequence
  Synthetic: FXN 3 reverse 9:69038971-69038994; SpCas9
tgagcaaccacacccagcct

SEQ ID NO: 29731 - DNA, 19 bp, Artificial Sequence
  Synthetic: FXN 3 reverse 9:69038972-69038994; SpCas9
gagcaaccacacccagcct

SEQ ID NO: 29732 - DNA, 18 bp, Artificial Sequence
  Synthetic: FXN 3 reverse 9:69038973-69038994; SpCas9
agcaaccacacccagcct

SEQ ID NO: 29733 - DNA, 25 bp, Artificial Sequence
  Synthetic: FXN 3 reverse 9:69038967-69038995; SpCas9
caggtgtgagcaaccacacccagcc

SEQ ID NO: 29734 - DNA, 24 bp, Artificial Sequence
  Synthetic: FXN 3 reverse 9:69038968-69038995; SpCas9
aggtgtgagcaaccacacccagcc

SEQ ID NO: 29735 - DNA, 23 bp, Artificial Sequence
  Synthetic: FXN 3 reverse 9:69038969-69038995; SpCas9
ggtgtgagcaaccacacccagcc

SEQ ID NO: 29736 - DNA, 22 bp, Artificial Sequence
  Synthetic: FXN 3 reverse 9:69038970-69038995; SpCas9
gtgtgagcaaccacacccagcc

SEQ ID NO: 29737 - DNA, 21 bp, Artificial Sequence
  Synthetic: FXN 3 reverse 9:69038971-69038995; SpCas9
tgtgagcaaccacacccagcc

SEQ ID NO: 29738 - DNA, 20 bp, Artificial Sequence
  Synthetic: FXN 3 reverse 9:69038972-69038995; SpCas9
gtgagcaaccacacccagcc

SEQ ID NO: 29739 - DNA, 19 bp, Artificial Sequence
  Synthetic: FXN 3 reverse 9:69038973-69038995; SpCas9
tgagcaaccacacccagcc

SEQ ID NO: 29740 - DNA, 18 bp, Artificial Sequence
  Synthetic: FXN 3 reverse 9:69038974-69038995; SpCas9
gagcaaccacacccagcc

SEQ ID NO: 29741 - DNA, 25 bp, Artificial Sequence
  Synthetic: FXN 3 reverse 9:69038972-69039000; SpCas9
gattacaggtgtgagcaaccacacc

SEQ ID NO: 29742 - DNA, 24 bp, Artificial Sequence
  Synthetic: FXN 3 reverse 9:69038973-69039000; SpCas9
attacaggtgtgagcaaccacacc

SEQ ID NO: 29743 - DNA, 23 bp, Artificial Sequence
  Synthetic: FXN 3 reverse 9:69038974-69039000; SpCas9
ttacaggtgtgagcaaccacacc

SEQ ID NO: 29744 - DNA, 22 bp, Artificial Sequence
  Synthetic: FXN 3 reverse 9:69038975-69039000; SpCas9
tacaggtgtgagcaaccacacc

SEQ ID NO: 29745 - DNA, 21 bp, Artificial Sequence
  Synthetic: FXN 3 reverse 9:69038976-69039000; SpCas9
acaggtgtgagcaaccacacc

SEQ ID NO: 29746 - DNA, 20 bp, Artificial Sequence
  Synthetic: FXN 3 reverse 9:69038977-69039000; SpCas9
caggtgtgagcaaccacacc

SEQ ID NO: 29747 - DNA, 19 bp, Artificial Sequence
  Synthetic: FXN 3 reverse 9:69038978-69039000; SpCas9
aggtgtgagcaaccacacc

SEQ ID NO: 29748 - DNA, 18 bp, Artificial Sequence
  Synthetic: FXN 3 reverse 9:69038979-69039000; SpCas9
ggtgtgagcaaccacacc

SEQ ID NO: 29749 - DNA, 25 bp, Artificial Sequence
  Synthetic: FXN 3 forward 9:69038976-69039004; SpCas9
gtgtggttgctcacacctgtaatcc

SEQ ID NO: 29750 - DNA, 24 bp, Artificial Sequence
  Synthetic: FXN 3 forward 9:69038977-69039004; SpCas9
tgtggttgctcacacctgtaatcc

SEQ ID NO: 29751 - DNA, 23 bp, Artificial Sequence
  Synthetic: FXN 3 forward 9:69038978-69039004; SpCas9
gtggttgctcacacctgtaatcc

SEQ ID NO: 29752 - DNA, 22 bp, Artificial Sequence
  Synthetic: FXN 3 forward 9:69038979-69039004; SpCas9
tggttgctcacacctgtaatcc

SEQ ID NO: 29753 - DNA, 21 bp, Artificial Sequence
  Synthetic: FXN 3 forward 9:69038980-69039004; SpCas9
ggttgctcacacctgtaatcc

SEQ ID NO: 29754 - DNA, 20 bp, Artificial Sequence
  Synthetic: FXN 3 forward 9:69038981-69039004; SpCas9
gttgctcacacctgtaatcc

SEQ ID NO: 29755 - DNA, 19 bp, Artificial Sequence
  Synthetic: FXN 3 forward 9:69038982-69039004; SpCas9
ttgctcacacctgtaatcc

SEQ ID NO: 29756 - DNA, 18 bp, Artificial Sequence
  Synthetic: FXN 3 forward 9:69038983-69039004; SpCas9
tgctcacacctgtaatcc

SEQ ID NO: 29757 - DNA, 25 bp, Artificial Sequence
  Synthetic: FXN 3 forward 9:69038984-69039012; SpCas9
gctcacacctgtaatcccagcactt

SEQ ID NO: 29758 - DNA, 24 bp, Artificial Sequence
  Synthetic: FXN 3 forward 9:69038985-69039012; SpCas9
ctcacacctgtaatcccagcactt

SEQ ID NO: 29759 - DNA, 23 bp, Artificial Sequence
  Synthetic: FXN 3 forward 9:69038986-69039012; SpCas9
tcacacctgtaatcccagcactt

SEQ ID NO: 29760 - DNA, 22 bp, Artificial Sequence
  Synthetic: FXN 3 forward 9:69038987-69039012; SpCas9
cacacctgtaatcccagcactt

SEQ ID NO: 29761 - DNA, 21 bp, Artificial Sequence
  Synthetic: FXN 3 forward 9:69038988-69039012; SpCas9
acacctgtaatcccagcactt

SEQ ID NO: 29762 - DNA, 20 bp, Artificial Sequence
  Synthetic: FXN 3 forward 9:69038989-69039012; SpCas9
cacctgtaatcccagcactt

SEQ ID NO: 29763 - DNA, 19 bp, Artificial Sequence
  Synthetic: FXN 3 forward 9:69038990-69039012; SpCas9
acctgtaatcccagcactt

SEQ ID NO: 29764 - DNA, 18 bp, Artificial Sequence
  Synthetic: FXN 3 forward 9:69038991-69039012; SpCas9
cctgtaatcccagcactt

SEQ ID NO: 29765 - DNA, 25 bp, Artificial Sequence
  Synthetic: FXN 3 forward 9:69038985-69039013; SpCas9
ctcacacctgtaatcccagcacttt

SEQ ID NO: 29766 - DNA, 24 bp, Artificial Sequence
  Synthetic: FXN 3 forward 9:69038986-69039013; SpCas9
tcacacctgtaatcccagcacttt

SEQ ID NO: 29767 - DNA, 23 bp, Artificial Sequence
  Synthetic: FXN 3 forward 9:69038987-69039013; SpCas9
cacacctgtaatcccagcacttt

SEQ ID NO: 29768 - DNA, 22 bp, Artificial Sequence
  Synthetic: FXN 3 forward 9:69038988-69039013; SpCas9
acacctgtaatcccagcacttt

SEQ ID NO: 29769 - DNA, 21 bp, Artificial Sequence
  Synthetic: FXN 3 forward 9:69038989-69039013; SpCas9
cacctgtaatcccagcacttt

SEQ ID NO: 29770 - DNA, 20 bp, Artificial Sequence
  Synthetic: FXN 3 forward 9:69038990-69039013; SpCas9
acctgtaatcccagcacttt

SEQ ID NO: 29771 - DNA, 19 bp, Artificial Sequence
  Synthetic: FXN 3 forward 9:69038991-69039013; SpCas9
cctgtaatcccagcacttt

SEQ ID NO: 29772 - DNA, 18 bp, Artificial Sequence
  Synthetic: FXN 3 forward 9:69038992-69039013; SpCas9
ctgtaatcccagcacttt

SEQ ID NO: 29773 - DNA, 25 bp, Artificial Sequence
  Synthetic: FXN 3 reverse 9:69038985-69039013; SpCas9
cccaaagtgctgggattacaggtgt

SEQ ID NO: 29774 - DNA, 24 bp, Artificial Sequence
  Synthetic: FXN 3 reverse 9:69038986-69039013; SpCas9
ccaaagtgctgggattacaggtgt

SEQ ID NO: 29775 - DNA, 23 bp, Artificial Sequence
  Synthetic: FXN 3 reverse 9:69038987-69039013; SpCas9
caaagtgctgggattacaggtgt

SEQ ID NO: 29776 - DNA, 22 bp, Artificial Sequence
  Synthetic: FXN 3 reverse 9:69038988-69039013; SpCas9
aaagtgctgggattacaggtgt

SEQ ID NO: 29777 - DNA, 21 bp, Artificial Sequence
  Synthetic: FXN 3 reverse 9:69038989-69039013; SpCas9
aagtgctgggattacaggtgt

SEQ ID NO: 29778 - DNA, 20 bp, Artificial Sequence
  Synthetic: FXN 3 reverse 9:69038990-69039013; SpCas9
agtgctgggattacaggtgt

SEQ ID NO: 29779 - DNA, 19 bp, Artificial Sequence
  Synthetic: FXN 3 reverse 9:69038991-69039013; SpCas9
gtgctgggattacaggtgt

SEQ ID NO: 29780 - DNA, 18 bp, Artificial Sequence
  Synthetic: FXN 3 reverse 9:69038992-69039013; SpCas9
tgctgggattacaggtgt

SEQ ID NO: 29781 - DNA, 25 bp, Artificial Sequence
  Synthetic: FXN 3 forward 9:69038987-69039015; SpCas9
cacacctgtaatcccagcactttgg

SEQ ID NO: 29782 - DNA, 24 bp, Artificial Sequence
  Synthetic: FXN 3 forward 9:69038988-69039015; SpCas9
acacctgtaatcccagcactttgg

SEQ ID NO: 29783 - DNA, 23 bp, Artificial Sequence
  Synthetic: FXN 3 forward 9:69038989-69039015; SpCas9
cacctgtaatcccagcactttgg

SEQ ID NO: 29784 - DNA, 22 bp, Artificial Sequence
  Synthetic: FXN 3 forward 9:69038990-69039015; SpCas9
acctgtaatcccagcactttgg

SEQ ID NO: 29785 - DNA, 21 bp, Artificial Sequence
  Synthetic: FXN 3 forward 9:69038991-69039015; SpCas9
cctgtaatcccagcactttgg

SEQ ID NO: 29786 - DNA, 20 bp, Artificial Sequence
  Synthetic: FXN 3 forward 9:69038992-69039015; SpCas9
ctgtaatcccagcactttgg

SEQ ID NO: 29787 - DNA, 19 bp, Artificial Sequence
  Synthetic: FXN 3 forward 9:69038993-69039015; SpCas9
tgtaatcccagcactttgg

SEQ ID NO: 29788 - DNA, 18 bp, Artificial Sequence
  Synthetic: FXN 3 forward 9:69038994-69039015; SpCas9
gtaatcccagcactttgg

SEQ ID NO: 29789 - DNA, 25 bp, Artificial Sequence
  Synthetic: FXN 3 forward 9:69038988-69039016; SpCas9
acacctgtaatcccagcactttggg

SEQ ID NO: 29790 - DNA, 24 bp, Artificial Sequence
  Synthetic: FXN 3 forward 9:69038989-69039016; SpCas9
cacctgtaatcccagcactttggg

SEQ ID NO: 29791 - DNA, 23 bp, Artificial Sequence
  Synthetic: FXN 3 forward 9:69038990-69039016; SpCas9
acctgtaatcccagcactttggg

SEQ ID NO: 29792 - DNA, 22 bp, Artificial Sequence
  Synthetic: FXN 3 forward 9:69038991-69039016; SpCas9
cctgtaatcccagcactttggg

SEQ ID NO: 29793 - DNA, 21 bp, Artificial Sequence
  Synthetic: FXN 3 forward 9:69038992-69039016; SpCas9
ctgtaatcccagcactttggg

SEQ ID NO: 29794 - DNA, 20 bp, Artificial Sequence
  Synthetic: FXN 3 forward 9:69038993-69039016; SpCas9
tgtaatcccagcactttggg

SEQ ID NO: 29795 - DNA, 19 bp, Artificial Sequence
  Synthetic: FXN 3 forward 9:69038994-69039016; SpCas9
gtaatcccagcactttggg

SEQ ID NO: 29796 - DNA, 18 bp, Artificial Sequence
  Synthetic: FXN 3 forward 9:69038995-69039016; SpCas9
taatcccagcactttggg

SEQ ID NO: 29797 - DNA, 25 bp, Artificial Sequence
  Synthetic: FXN 3 reverse 9:69038991-69039019; SpCas9
cagcctcccaaagtgctgggattac

SEQ ID NO: 29798 - DNA, 24 bp, Artificial Sequence
  Synthetic: FXN 3 reverse 9:69038992-69039019; SpCas9
agcctcccaaagtgctgggattac

SEQ ID NO: 29799 - DNA, 23 bp, Artificial Sequence
  Synthetic: FXN 3 reverse 9:69038993-69039019; SpCas9
gcctcccaaagtgctgggattac

SEQ ID NO: 29800 - DNA, 22 bp, Artificial Sequence
  Synthetic: FXN 3 reverse 9:69038994-69039019; SpCas9
cctcccaaagtgctgggattac

SEQ ID NO: 29801 - DNA, 21 bp, Artificial Sequence
  Synthetic: FXN 3 reverse 9:69038995-69039019; SpCas9
ctcccaaagtgctgggattac

SEQ ID NO: 29802 - DNA, 20 bp, Artificial Sequence
  Synthetic: FXN 3 reverse 9:69038996-69039019; SpCas9
tcccaaagtgctgggattac

SEQ ID NO: 29803 - DNA, 19 bp, Artificial Sequence
  Synthetic: FXN 3 reverse 9:69038997-69039019; SpCas9
cccaaagtgctgggattac

SEQ ID NO: 29804 - DNA, 18 bp, Artificial Sequence
  Synthetic: FXN 3 reverse 9:69038998-69039019; SpCas9
ccaaagtgctgggattac

SEQ ID NO: 29805 - DNA, 25 bp, Artificial Sequence
  Synthetic: FXN 3 reverse 9:69038992-69039020; SpCas9
tcagcctcccaaagtgctgggatta

SEQ ID NO: 29806 - DNA, 24 bp, Artificial Sequence
  Synthetic: FXN 3 reverse 9:69038993-69039020; SpCas9
cagcctcccaaagtgctgggatta

SEQ ID NO: 29807 - DNA, 23 bp, Artificial Sequence
  Synthetic: FXN 3 reverse 9:69038994-69039020; SpCas9
agcctcccaaagtgctgggatta

SEQ ID NO: 29808 - DNA, 22 bp, Artificial Sequence
  Synthetic: FXN 3 reverse 9:69038995-69039020; SpCas9
gcctcccaaagtgctgggatta

SEQ ID NO: 29809 - DNA, 21 bp, Artificial Sequence
  Synthetic: FXN 3 reverse 9:69038996-69039020; SpCas9
cctcccaaagtgctgggatta

SEQ ID NO: 29810 - DNA, 20 bp, Artificial Sequence
  Synthetic: FXN 3 reverse 9:69038997-69039020; SpCas9
ctcccaaagtgctgggatta

SEQ ID NO: 29811 - DNA, 19 bp, Artificial Sequence
  Synthetic: FXN 3 reverse 9:69038998-69039020; SpCas9
tcccaaagtgctgggatta

SEQ ID NO: 29812 - DNA, 18 bp, Artificial Sequence
  Synthetic: FXN 3 reverse 9:69038999-69039020; SpCas9
cccaaagtgctgggatta

SEQ ID NO: 29813 - DNA, 25 bp, Artificial Sequence
  Synthetic: FXN 3 forward 9:69038993-69039021; SpCas9
tgtaatcccagcactttgggaggct

SEQ ID NO: 29814 - DNA, 24 bp, Artificial Sequence
  Synthetic: FXN 3 forward 9:69038994-69039021; SpCas9
gtaatcccagcactttgggaggct

SEQ ID NO: 29815 - DNA, 23 bp, Artificial Sequence
  Synthetic: FXN 3 forward 9:69038995-69039021; SpCas9
taatcccagcactttgggaggct

SEQ ID NO: 29816 - DNA, 22 bp, Artificial Sequence
  Synthetic: FXN 3 forward 9:69038996-69039021; SpCas9
aatcccagcactttgggaggct

SEQ ID NO: 29817 - DNA, 21 bp, Artificial Sequence
  Synthetic: FXN 3 forward 9:69038997-69039021; SpCas9
atcccagcactttgggaggct

SEQ ID NO: 29818 - DNA, 20 bp, Artificial Sequence
  Synthetic: FXN 3 forward 9:69038998-69039021; SpCas9
tcccagcactttgggaggct

SEQ ID NO: 29819 - DNA, 19 bp, Artificial Sequence
  Synthetic: FXN 3 forward 9:69038999-69039021; SpCas9
cccagcactttgggaggct

SEQ ID NO: 29820 - DNA, 18 bp, Artificial Sequence
  Synthetic: FXN 3 forward 9:69039000-69039021; SpCas9
ccagcactttgggaggct

SEQ ID NO: 29821 - DNA, 25 bp, Artificial Sequence
  Synthetic: FXN 3 forward 9:69038997-69039025; SpCas9
atcccagcactttgggaggctgaga

SEQ ID NO: 29822 - DNA, 24 bp, Artificial Sequence
  Synthetic: FXN 3 forward 9:69038998-69039025; SpCas9
tcccagcactttgggaggctgaga

SEQ ID NO: 29823 - DNA, 23 bp, Artificial Sequence
  Synthetic: FXN 3 forward 9:69038999-69039025; SpCas9
cccagcactttgggaggctgaga

SEQ ID NO: 29824 - DNA, 22 bp, Artificial Sequence
  Synthetic: FXN 3 forward 9:69039000-69039025; SpCas9
ccagcactttgggaggctgaga

SEQ ID NO: 29825 - DNA, 21 bp, Artificial Sequence
  Synthetic: FXN 3 forward 9:69039001-69039025; SpCas9
cagcactttgggaggctgaga

SEQ ID NO: 29826 - DNA, 20 bp, Artificial Sequence
  Synthetic: FXN 3 forward 9:69039002-69039025; SpCas9
agcactttgggaggctgaga

SEQ ID NO: 29827 - DNA, 19 bp, Artificial Sequence
  Synthetic: FXN 3 forward 9:69039003-69039025; SpCas9
gcactttgggaggctgaga

SEQ ID NO: 29828 - DNA, 18 bp, Artificial Sequence
  Synthetic: FXN 3 forward 9:69039004-69039025; SpCas9
cactttgggaggctgaga

SEQ ID NO: 29829 - DNA, 25 bp, Artificial Sequence
  Synthetic: FXN 3 forward 9:69038998-69039026; SpCas9
tcccagcactttgggaggctgagat

SEQ ID NO: 29830 - DNA, 24 bp, Artificial Sequence
  Synthetic: FXN 3 forward 9:69038999-69039026; SpCas9
cccagcactttgggaggctgagat

SEQ ID NO: 29831 - DNA, 23 bp, Artificial Sequence
  Synthetic: FXN 3 forward 9:69039000-69039026; SpCas9
ccagcactttgggaggctgagat

SEQ ID NO: 29832 - DNA, 22 bp, Artificial Sequence
  Synthetic: FXN 3 forward 9:69039001-69039026; SpCas9
cagcactttgggaggctgagat

SEQ ID NO: 29833 - DNA, 21 bp, Artificial Sequence
  Synthetic: FXN 3 forward 9:69039002-69039026; SpCas9
agcactttgggaggctgagat

SEQ ID NO: 29834 - DNA, 20 bp, Artificial Sequence
  Synthetic: FXN 3 forward 9:69039003-69039026; SpCas9
gcactttgggaggctgagat

SEQ ID NO: 29835 - DNA, 19 bp, Artificial Sequence
  Synthetic: FXN 3 forward 9:69039004-69039026; SpCas9
cactttgggaggctgagat

SEQ ID NO: 29836 - DNA, 18 bp, Artificial Sequence
  Synthetic: FXN 3 forward 9:69039005-69039026; SpCas9
actttgggaggctgagat

SEQ ID NO: 29837 - DNA, 25 bp, Artificial Sequence
  Synthetic: FXN 3 reverse 9:69038999-69039027; SpCas9
gcccatctcagcctcccaaagtgct

SEQ ID NO: 29838 - DNA, 24 bp, Artificial Sequence
  Synthetic: FXN 3 reverse 9:69039000-69039027; SpCas9
cccatctcagcctcccaaagtgct

SEQ ID NO: 29839 - DNA, 23 bp, Artificial Sequence
  Synthetic: FXN 3 reverse 9:69039001-69039027; SpCas9
ccatctcagcctcccaaagtgct

SEQ ID NO: 29840 - DNA, 22 bp, Artificial Sequence
  Synthetic: FXN 3 reverse 9:69039002-69039027; SpCas9
catctcagcctcccaaagtgct

SEQ ID NO: 29841 - DNA, 21 bp, Artificial Sequence
  Synthetic: FXN 3 reverse 9:69039003-69039027; SpCas9
atctcagcctcccaaagtgct

SEQ ID NO: 29842 - DNA, 20 bp, Artificial Sequence
  Synthetic: FXN 3 reverse 9:69039004-69039027; SpCas9
tctcagcctcccaaagtgct

SEQ ID NO: 29843 - DNA, 19 bp, Artificial Sequence
  Synthetic: FXN 3 reverse 9:69039005-69039027; SpCas9
ctcagcctcccaaagtgct

SEQ ID NO: 29844 - DNA, 18 bp, Artificial Sequence
  Synthetic: FXN 3 reverse 9:69039006-69039027; SpCas9
tcagcctcccaaagtgct

SEQ ID NO: 29845 - DNA, 25 bp, Artificial Sequence
  Synthetic: FXN 3 reverse 9:69039000-69039028; SpCas9
cgcccatctcagcctcccaaagtgc

SEQ ID NO: 29846 - DNA, 24 bp, Artificial Sequence
  Synthetic: FXN 3 reverse 9:69039001-69039028; SpCas9
gcccatctcagcctcccaaagtgc

SEQ ID NO: 29847 - DNA, 23 bp, Artificial Sequence
  Synthetic: FXN 3 reverse 9:69039002-69039028; SpCas9
cccatctcagcctcccaaagtgc

SEQ ID NO: 29848 - DNA, 22 bp, Artificial Sequence
  Synthetic: FXN 3 reverse 9:69039003-69039028; SpCas9
ccatctcagcctcccaaagtgc

SEQ ID NO: 29849 - DNA, 21 bp, Artificial Sequence
  Synthetic: FXN 3 reverse 9:69039004-69039028; SpCas9
catctcagcctcccaaagtgc

SEQ ID NO: 29850 - DNA, 20 bp, Artificial Sequence
  Synthetic: FXN 3 reverse 9:69039005-69039028; SpCas9
atctcagcctcccaaagtgc

SEQ ID NO: 29851 - DNA, 19 bp, Artificial Sequence
  Synthetic: FXN 3 reverse 9:69039006-69039028; SpCas9
tctcagcctcccaaagtgc

SEQ ID NO: 29852 - DNA, 18 bp, Artificial Sequence
  Synthetic: FXN 3 reverse 9:69039007-69039028; SpCas9
ctcagcctcccaaagtgc

SEQ ID NO: 29853 - DNA, 25 bp, Artificial Sequence
  Synthetic: FXN 3 forward 9:69039001-69039029; SpCas9
cagcactttgggaggctgagatggg

SEQ ID NO: 29854 - DNA, 24 bp, Artificial Sequence
  Synthetic: FXN 3 forward 9:69039002-69039029; SpCas9
agcactttgggaggctgagatggg

SEQ ID NO: 29855 - DNA, 23 bp, Artificial Sequence
  Synthetic: FXN 3 forward 9:69039003-69039029; SpCas9
gcactttgggaggctgagatggg

SEQ ID NO: 29856 - DNA, 22 bp, Artificial Sequence
  Synthetic: FXN 3 forward 9:69039004-69039029; SpCas9
cactttgggaggctgagatggg

SEQ ID NO: 29857 - DNA, 21 bp, Artificial Sequence
  Synthetic: FXN 3 forward 9:69039005-69039029; SpCas9
actttgggaggctgagatggg

SEQ ID NO: 29858 - DNA, 20 bp, Artificial Sequence
  Synthetic: FXN 3 forward 9:69039006-69039029; SpCas9
ctttgggaggctgagatggg

SEQ ID NO: 29859 - DNA, 19 bp, Artificial Sequence
  Synthetic: FXN 3 forward 9:69039007-69039029; SpCas9
tttgggaggctgagatggg

SEQ ID NO: 29860 - DNA, 18 bp, Artificial Sequence
  Synthetic: FXN 3 forward 9:69039008-69039029; SpCas9
ttgggaggctgagatggg

SEQ ID NO: 29861 - DNA, 25 bp, Artificial Sequence
  Synthetic: FXN 3 reverse 9:69039006-69039034; SpCas9
gtgatccgcccatctcagcctccca

SEQ ID NO: 29862 - DNA, 24 bp, Artificial Sequence
  Synthetic: FXN 3 reverse 9:69039007-69039034; SpCas9
tgatccgcccatctcagcctccca

SEQ ID NO: 29863 - DNA, 23 bp, Artificial Sequence
  Synthetic: FXN 3 reverse 9:69039008-69039034; SpCas9
gatccgcccatctcagcctccca

SEQ ID NO: 29864 - DNA, 22 bp, Artificial Sequence
  Synthetic: FXN 3 reverse 9:69039009-69039034; SpCas9
atccgcccatctcagcctccca

SEQ ID NO: 29865 - DNA, 21 bp, Artificial Sequence
  Synthetic: FXN 3 reverse 9:69039010-69039034; SpCas9
tccgcccatctcagcctccca

SEQ ID NO: 29866 - DNA, 20 bp, Artificial Sequence
  Synthetic: FXN 3 reverse 9:69039011-69039034; SpCas9
ccgcccatctcagcctccca

SEQ ID NO: 29867 - DNA, 19 bp, Artificial Sequence
  Synthetic: FXN 3 reverse 9:69039012-69039034; SpCas9
cgcccatctcagcctccca

SEQ ID NO: 29868 - DNA, 18 bp, Artificial Sequence
  Synthetic: FXN 3 reverse 9:69039013-69039034; SpCas9
gcccatctcagcctccca

SEQ ID NO: 29869 - DNA, 25 bp, Artificial Sequence
  Synthetic: FXN 3 forward 9:69039011-69039039; SpCas9
ggaggctgagatgggcggatcacct

SEQ ID NO: 29870 - DNA, 24 bp, Artificial Sequence
  Synthetic: FXN 3 forward 9:69039012-69039039; SpCas9
gaggctgagatgggcggatcacct

SEQ ID NO: 29871 - DNA, 23 bp, Artificial Sequence
  Synthetic: FXN 3 forward 9:69039013-69039039; SpCas9
aggctgagatgggcggatcacct

SEQ ID NO: 29872 - DNA, 22 bp, Artificial Sequence
  Synthetic: FXN 3 forward 9:69039014-69039039; SpCas9
ggctgagatgggcggatcacct

SEQ ID NO: 29873 - DNA, 21 bp, Artificial Sequence
  Synthetic: FXN 3 forward 9:69039015-69039039; SpCas9
gctgagatgggcggatcacct

SEQ ID NO: 29874 - DNA, 20 bp, Artificial Sequence
  Synthetic: FXN 3 forward 9:69039016-69039039; SpCas9
ctgagatgggcggatcacct

SEQ ID NO: 29875 - DNA, 19 bp, Artificial Sequence
  Synthetic: FXN 3 forward 9:69039017-69039039; SpCas9
tgagatgggcggatcacct

SEQ ID NO: 29876 - DNA, 18 bp, Artificial Sequence
  Synthetic: FXN 3 forward 9:69039018-69039039; SpCas9
gagatgggcggatcacct

SEQ ID NO: 29877 - DNA, 25 bp, Artificial Sequence
  Synthetic: FXN 3 forward 9:69039012-69039040; SpCas9
gaggctgagatgggcggatcacctg

SEQ ID NO: 29878 - DNA, 24 bp, Artificial Sequence
  Synthetic: FXN 3 forward 9:69039013-69039040; SpCas9
aggctgagatgggcggatcacctg

SEQ ID NO: 29879 - DNA, 23 bp, Artificial Sequence
  Synthetic: FXN 3 forward 9:69039014-69039040; SpCas9
ggctgagatgggcggatcacctg

SEQ ID NO: 29880 - DNA, 22 bp, Artificial Sequence
  Synthetic: FXN 3 forward 9:69039015-69039040; SpCas9
gctgagatgggcggatcacctg

SEQ ID NO: 29881 - DNA, 21 bp, Artificial Sequence
  Synthetic: FXN 3 forward 9:69039016-69039040; SpCas9
ctgagatgggcggatcacctg

SEQ ID NO: 29882 - DNA, 20 bp, Artificial Sequence
  Synthetic: FXN 3 forward 9:69039017-69039040; SpCas9
tgagatgggcggatcacctg

SEQ ID NO: 29883 - DNA, 19 bp, Artificial Sequence
  Synthetic: FXN 3 forward 9:69039018-69039040; SpCas9
gagatgggcggatcacctg

SEQ ID NO: 29884 - DNA, 18 bp, Artificial Sequence
  Synthetic: FXN 3 forward 9:69039019-69039040; SpCas9
agatgggcggatcacctg

SEQ ID NO: 29885 - DNA, 25 bp, Artificial Sequence
  Synthetic: FXN 3 forward 9:69039016-69039044; SpCas9
ctgagatgggcggatcacctgaggt

SEQ ID NO: 29886 - DNA, 24 bp, Artificial Sequence
  Synthetic: FXN 3 forward 9:69039017-69039044; SpCas9
tgagatgggcggatcacctgaggt

SEQ ID NO: 29887 - DNA, 23 bp, Artificial Sequence
  Synthetic: FXN 3 forward 9:69039018-69039044; SpCas9
gagatgggcggatcacctgaggt

SEQ ID NO: 29888 - DNA, 22 bp, Artificial Sequence
  Synthetic: FXN 3 forward 9:69039019-69039044; SpCas9
agatgggcggatcacctgaggt

SEQ ID NO: 29889 - DNA, 21 bp, Artificial Sequence
  Synthetic: FXN 3 forward 9:69039020-69039044; SpCas9
gatgggcggatcacctgaggt

SEQ ID NO: 29890 - DNA, 20 bp, Artificial Sequence
  Synthetic: FXN 3 forward 9:69039021-69039044; SpCas9
atgggcggatcacctgaggt

SEQ ID NO: 29891 - DNA, 19 bp, Artificial Sequence
  Synthetic: FXN 3 forward 9:69039022-69039044; SpCas9
tgggcggatcacctgaggt

SEQ ID NO: 29892 - DNA, 18 bp, Artificial Sequence
  Synthetic: FXN 3 forward 9:69039023-69039044; SpCas9
gggcggatcacctgaggt

SEQ ID NO: 29893 - DNA, 25 bp, Artificial Sequence
  Synthetic: FXN 3 reverse 9:69039016-69039044; SpCas9
ctgacctcaggtgatccgcccatct

SEQ ID NO: 29894 - DNA, 24 bp, Artificial Sequence
  Synthetic: FXN 3 reverse 9:69039017-69039044; SpCas9
tgacctcaggtgatccgcccatct

SEQ ID NO: 29895 - DNA, 23 bp, Artificial Sequence
  Synthetic: FXN 3 reverse 9:69039018-69039044; SpCas9
gacctcaggtgatccgcccatct

SEQ ID NO: 29896 - DNA, 22 bp, Artificial Sequence
  Synthetic: FXN 3 reverse 9:69039019-69039044; SpCas9
acctcaggtgatccgcccatct

SEQ ID NO: 29897 - DNA, 21 bp, Artificial Sequence
  Synthetic: FXN 3 reverse 9:69039020-69039044; SpCas9
cctcaggtgatccgcccatct

SEQ ID NO: 29898 - DNA, 20 bp, Artificial Sequence
  Synthetic: FXN 3 reverse 9:69039021-69039044; SpCas9
ctcaggtgatccgcccatct

SEQ ID NO: 29899 - DNA, 19 bp, Artificial Sequence
  Synthetic: FXN 3 reverse 9:69039022-69039044; SpCas9
tcaggtgatccgcccatct

SEQ ID NO: 29900 - DNA, 18 bp, Artificial Sequence
  Synthetic: FXN 3 reverse 9:69039023-69039044; SpCas9
caggtgatccgcccatct

SEQ ID NO: 29901 - DNA, 25 bp, Artificial Sequence
  Synthetic: FXN 3 forward 9:69039017-69039045; SpCas9
tgagatgggcggatcacctgaggtc

SEQ ID NO: 29902 - DNA, 24 bp, Artificial Sequence
  Synthetic: FXN 3 forward 9:69039018-69039045; SpCas9
gagatgggcggatcacctgaggtc

SEQ ID NO: 29903 - DNA, 23 bp, Artificial Sequence
  Synthetic: FXN 3 forward 9:69039019-69039045; SpCas9
agatgggcggatcacctgaggtc

SEQ ID NO: 29904 - DNA, 22 bp, Artificial Sequence
  Synthetic: FXN 3 forward 9:69039020-69039045; SpCas9
gatgggcggatcacctgaggtc

SEQ ID NO: 29905 - DNA, 21 bp, Artificial Sequence
  Synthetic: FXN 3 forward 9:69039021-69039045; SpCas9
atgggcggatcacctgaggtc

SEQ ID NO: 29906 - DNA, 20 bp, Artificial Sequence
  Synthetic: FXN 3 forward 9:69039022-69039045; SpCas9
tgggcggatcacctgaggtc

SEQ ID NO: 29907 - DNA, 19 bp, Artificial Sequence
  Synthetic: FXN 3 forward 9:69039023-69039045; SpCas9
gggcggatcacctgaggtc

SEQ ID NO: 29908 - DNA, 18 bp, Artificial Sequence
  Synthetic: FXN 3 forward 9:69039024-69039045; SpCas9
ggcggatcacctgaggtc

SEQ ID NO: 29909 - DNA, 25 bp, Artificial Sequence
  Synthetic: FXN 3 forward 9:69039019-69039047; SpCas9
agatgggcggatcacctgaggtcag

SEQ ID NO: 29910 - DNA, 24 bp, Artificial Sequence
  Synthetic: FXN 3 forward 9:69039020-69039047; SpCas9
gatgggcggatcacctgaggtcag

SEQ ID NO: 29911 - DNA, 23 bp, Artificial Sequence
  Synthetic: FXN 3 forward 9:69039021-69039047; SpCas9
atgggcggatcacctgaggtcag

SEQ ID NO: 29912 - DNA, 22 bp, Artificial Sequence
  Synthetic: FXN 3 forward 9:69039022-69039047; SpCas9
tgggcggatcacctgaggtcag

SEQ ID NO: 29913 - DNA, 21 bp, Artificial Sequence
  Synthetic: FXN 3 forward 9:69039023-69039047; SpCas9
gggcggatcacctgaggtcag

SEQ ID NO: 29914 - DNA, 20 bp, Artificial Sequence
  Synthetic: FXN 3 forward 9:69039024-69039047; SpCas9
ggcggatcacctgaggtcag

SEQ ID NO: 29915 - DNA, 19 bp, Artificial Sequence
  Synthetic: FXN 3 forward 9:69039025-69039047; SpCas9
gcggatcacctgaggtcag

SEQ ID NO: 29916 - DNA, 18 bp, Artificial Sequence
  Synthetic: FXN 3 forward 9:69039026-69039047; SpCas9
cggatcacctgaggtcag

SEQ ID NO: 29917 - DNA, 25 bp, Artificial Sequence
  Synthetic: FXN 3 forward 9:69039025-69039053; SpCas9
gcggatcacctgaggtcaggagttt

SEQ ID NO: 29918 - DNA, 24 bp, Artificial Sequence
  Synthetic: FXN 3 forward 9:69039026-69039053; SpCas9
cggatcacctgaggtcaggagttt

SEQ ID NO: 29919 - DNA, 23 bp, Artificial Sequence
  Synthetic: FXN 3 forward 9:69039027-69039053; SpCas9
ggatcacctgaggtcaggagttt

SEQ ID NO: 29920 - DNA, 22 bp, Artificial Sequence
  Synthetic: FXN 3 forward 9:69039028-69039053; SpCas9
gatcacctgaggtcaggagttt

SEQ ID NO: 29921 - DNA, 21 bp, Artificial Sequence
  Synthetic: FXN 3 forward 9:69039029-69039053; SpCas9
atcacctgaggtcaggagttt

SEQ ID NO: 29922 - DNA, 20 bp, Artificial Sequence
  Synthetic: FXN 3 forward 9:69039030-69039053; SpCas9
tcacctgaggtcaggagttt

SEQ ID NO: 29923 - DNA, 19 bp, Artificial Sequence
  Synthetic: FXN 3 forward 9:69039031-69039053; SpCas9
cacctgaggtcaggagttt

SEQ ID NO: 29924 - DNA, 18 bp, Artificial Sequence
  Synthetic: FXN 3 forward 9:69039032-69039053; SpCas9
acctgaggtcaggagttt

SEQ ID NO: 29925 - DNA, 25 bp, Artificial Sequence
  Synthetic: FXN 3 forward 9:69039030-69039058; SpCas9
tcacctgaggtcaggagtttgagac

SEQ ID NO: 29926 - DNA, 24 bp, Artificial Sequence
  Synthetic: FXN 3 forward 9:69039031-69039058; SpCas9
cacctgaggtcaggagtttgagac

SEQ ID NO: 29927 - DNA, 23 bp, Artificial Sequence
  Synthetic: FXN 3 forward 9:69039032-69039058; SpCas9
acctgaggtcaggagtttgagac

SEQ ID NO: 29928 - DNA, 22 bp, Artificial Sequence
  Synthetic: FXN 3 forward 9:69039033-69039058; SpCas9
cctgaggtcaggagtttgagac

SEQ ID NO: 29929 - DNA, 21 bp, Artificial Sequence
  Synthetic: FXN 3 forward 9:69039034-69039058; SpCas9
ctgaggtcaggagtttgagac

SEQ ID NO: 29930 - DNA, 20 bp, Artificial Sequence
  Synthetic: FXN 3 forward 9:69039035-69039058; SpCas9
tgaggtcaggagtttgagac

SEQ ID NO: 29931 - DNA, 19 bp, Artificial Sequence
  Synthetic: FXN 3 forward 9:69039036-69039058; SpCas9
gaggtcaggagtttgagac

SEQ ID NO: 29932 - DNA, 18 bp, Artificial Sequence
  Synthetic: FXN 3 forward 9:69039037-69039058; SpCas9
aggtcaggagtttgagac

SEQ ID NO: 29933 - DNA, 25 bp, Artificial Sequence
  Synthetic: FXN 3 reverse 9:69039033-69039061; SpCas9
aggctggtctcaaactcctgacctc

SEQ ID NO: 29934 - DNA, 24 bp, Artificial Sequence
  Synthetic: FXN 3 reverse 9:69039034-69039061; SpCas9
ggctggtctcaaactcctgacctc

SEQ ID NO: 29935 - DNA, 23 bp, Artificial Sequence
  Synthetic: FXN 3 reverse 9:69039035-69039061; SpCas9
gctggtctcaaactcctgacctc

SEQ ID NO: 29936 - DNA, 22 bp, Artificial Sequence
  Synthetic: FXN 3 reverse 9:69039036-69039061; SpCas9
ctggtctcaaactcctgacctc

SEQ ID NO: 29937 - DNA, 21 bp, Artificial Sequence
  Synthetic: FXN 3 reverse 9:69039037-69039061; SpCas9
tggtctcaaactcctgacctc

SEQ ID NO: 29938 - DNA, 20 bp, Artificial Sequence
  Synthetic: FXN 3 reverse 9:69039038-69039061; SpCas9
ggtctcaaactcctgacctc

SEQ ID NO: 29939 - DNA, 19 bp, Artificial Sequence
  Synthetic: FXN 3 reverse 9:69039039-69039061; SpCas9
gtctcaaactcctgacctc

SEQ ID NO: 29940 - DNA, 18 bp, Artificial Sequence
  Synthetic: FXN 3 reverse 9:69039040-69039061; SpCas9
tctcaaactcctgacctc

SEQ ID NO: 29941 - DNA, 25 bp, Artificial Sequence
  Synthetic: FXN 3 reverse 9:69039034-69039062; SpCas9
caggctggtctcaaactcctgacct

SEQ ID NO: 29942 - DNA, 24 bp, Artificial Sequence
  Synthetic: FXN 3 reverse 9:69039035-69039062; SpCas9
aggctggtctcaaactcctgacct

SEQ ID NO: 29943 - DNA, 23 bp, Artificial Sequence
  Synthetic: FXN 3 reverse 9:69039036-69039062; SpCas9
ggctggtctcaaactcctgacct

SEQ ID NO: 29944 - DNA, 22 bp, Artificial Sequence
  Synthetic: FXN 3 reverse 9:69039037-69039062; SpCas9
gctggtctcaaactcctgacct

SEQ ID NO: 29945 - DNA, 21 bp, Artificial Sequence
  Synthetic: FXN 3 reverse 9:69039038-69039062; SpCas9
ctggtctcaaactcctgacct

SEQ ID NO: 29946 - DNA, 20 bp, Artificial Sequence
  Synthetic: FXN 3 reverse 9:69039039-69039062; SpCas9
tggtctcaaactcctgacct

SEQ ID NO: 29947 - DNA, 19 bp, Artificial Sequence
  Synthetic: FXN 3 reverse 9:69039040-69039062; SpCas9
ggtctcaaactcctgacct

SEQ ID NO: 29948 - DNA, 18 bp, Artificial Sequence
  Synthetic: FXN 3 reverse 9:69039041-69039062; SpCas9
gtctcaaactcctgacct

SEQ ID NO: 29949 - DNA, 25 bp, Artificial Sequence
  Synthetic: FXN 3 forward 9:69039035-69039063; SpCas9
tgaggtcaggagtttgagaccagcc

SEQ ID NO: 29950 - DNA, 24 bp, Artificial Sequence
  Synthetic: FXN 3 forward 9:69039036-69039063; SpCas9
gaggtcaggagtttgagaccagcc

SEQ ID NO: 29951 - DNA, 23 bp, Artificial Sequence
  Synthetic: FXN 3 forward 9:69039037-69039063; SpCas9
aggtcaggagtttgagaccagcc

SEQ ID NO: 29952 - DNA, 22 bp, Artificial Sequence
  Synthetic: FXN 3 forward 9:69039038-69039063; SpCas9
ggtcaggagtttgagaccagcc

SEQ ID NO: 29953 - DNA, 21 bp, Artificial Sequence
  Synthetic: FXN 3 forward 9:69039039-69039063; SpCas9
gtcaggagtttgagaccagcc

SEQ ID NO: 29954 - DNA, 20 bp, Artificial Sequence
  Synthetic: FXN 3 forward 9:69039040-69039063; SpCas9
tcaggagtttgagaccagcc

SEQ ID NO: 29955 - DNA, 19 bp, Artificial Sequence
  Synthetic: FXN 3 forward 9:69039041-69039063; SpCas9
caggagtttgagaccagcc

SEQ ID NO: 29956 - DNA, 18 bp, Artificial Sequence
  Synthetic: FXN 3 forward 9:69039042-69039063; SpCas9
aggagtttgagaccagcc

SEQ ID NO: 29957 - DNA, 25 bp, Artificial Sequence
  Synthetic: FXN 3 forward 9:69039044-69039072; SpCas9
gagtttgagaccagcctggccaaca

SEQ ID NO: 29958 - DNA, 24 bp, Artificial Sequence
  Synthetic: FXN 3 forward 9:69039045-69039072; SpCas9
agtttgagaccagcctggccaaca

SEQ ID NO: 29959 - DNA, 23 bp, Artificial Sequence
  Synthetic: FXN 3 forward 9:69039046-69039072; SpCas9
gtttgagaccagcctggccaaca

SEQ ID NO: 29960 - DNA, 22 bp, Artificial Sequence
  Synthetic: FXN 3 forward 9:69039047-69039072; SpCas9
tttgagaccagcctggccaaca

SEQ ID NO: 29961 - DNA, 21 bp, Artificial Sequence
  Synthetic: FXN 3 forward 9:69039048-69039072; SpCas9
ttgagaccagcctggccaaca

SEQ ID NO: 29962 - DNA, 20 bp, Artificial Sequence
  Synthetic: FXN 3 forward 9:69039049-69039072; SpCas9
tgagaccagcctggccaaca

SEQ ID NO: 29963 - DNA, 19 bp, Artificial Sequence
  Synthetic: FXN 3 forward 9:69039050-69039072; SpCas9
gagaccagcctggccaaca

SEQ ID NO: 29964 - DNA, 18 bp, Artificial Sequence
  Synthetic: FXN 3 forward 9:69039051-69039072; SpCas9
agaccagcctggccaaca

SEQ ID NO: 29965 - DNA, 25 bp, Artificial Sequence
  Synthetic: FXN 3 reverse 9:69039054-69039082; SpCas9
cggggtttcaccatgttggccaggc

SEQ ID NO: 29966 - DNA, 24 bp, Artificial Sequence
  Synthetic: FXN 3 reverse 9:69039055-69039082; SpCas9
ggggtttcaccatgttggccaggc

SEQ ID NO: 29967 - DNA, 23 bp, Artificial Sequence
  Synthetic: FXN 3 reverse 9:69039056-69039082; SpCas9
gggtttcaccatgttggccaggc

SEQ ID NO: 29968 - DNA, 22 bp, Artificial Sequence
  Synthetic: FXN 3 reverse 9:69039057-69039082; SpCas9
ggtttcaccatgttggccaggc

SEQ ID NO: 29969 - DNA, 21 bp, Artificial Sequence
  Synthetic: FXN 3 reverse 9:69039058-69039082; SpCas9
gtttcaccatgttggccaggc

SEQ ID NO: 29970 - DNA, 20 bp, Artificial Sequence
  Synthetic: FXN 3 reverse 9:69039059-69039082; SpCas9
tttcaccatgttggccaggc

SEQ ID NO: 29971 - DNA, 19 bp, Artificial Sequence
  Synthetic: FXN 3 reverse 9:69039060-69039082; SpCas9
ttcaccatgttggccaggc

SEQ ID NO: 29972 - DNA, 18 bp, Artificial Sequence
  Synthetic: FXN 3 reverse 9:69039061-69039082; SpCas9
tcaccatgttggccaggc

SEQ ID NO: 29973 - DNA, 25 bp, Artificial Sequence
  Synthetic: FXN 3 reverse 9:69039058-69039086; SpCas9
gagacggggtttcaccatgttggcc

SEQ ID NO: 29974 - DNA, 24 bp, Artificial Sequence
  Synthetic: FXN 3 reverse 9:69039059-69039086; SpCas9
agacggggtttcaccatgttggcc

SEQ ID NO: 29975 - DNA, 23 bp, Artificial Sequence
  Synthetic: FXN 3 reverse 9:69039060-69039086; SpCas9
gacggggtttcaccatgttggcc

SEQ ID NO: 29976 - DNA, 22 bp, Artificial Sequence
  Synthetic: FXN 3 reverse 9:69039061-69039086; SpCas9
acggggtttcaccatgttggcc

SEQ ID NO: 29977 - DNA, 21 bp, Artificial Sequence
  Synthetic: FXN 3 reverse 9:69039062-69039086; SpCas9
cggggtttcaccatgttggcc

SEQ ID NO: 29978 - DNA, 20 bp, Artificial Sequence
  Synthetic: FXN 3 reverse 9:69039063-69039086; SpCas9
ggggtttcaccatgttggcc

SEQ ID NO: 29979 - DNA, 19 bp, Artificial Sequence
  Synthetic: FXN 3 reverse 9:69039064-69039086; SpCas9
gggtttcaccatgttggcc

SEQ ID NO: 29980 - DNA, 18 bp, Artificial Sequence
  Synthetic: FXN 3 reverse 9:69039065-69039086; SpCas9
ggtttcaccatgttggcc

SEQ ID NO: 29981 - DNA, 25 bp, Artificial Sequence
  Synthetic: FXN 3 reverse 9:69039059-69039087; SpCas9
agagacggggtttcaccatgttggc

SEQ ID NO: 29982 - DNA, 24 bp, Artificial Sequence
  Synthetic: FXN 3 reverse 9:69039060-69039087; SpCas9
gagacggggtttcaccatgttggc

SEQ ID NO: 29983 - DNA, 23 bp, Artificial Sequence
  Synthetic: FXN 3 reverse 9:69039061-69039087; SpCas9
agacggggtttcaccatgttggc

SEQ ID NO: 29984 - DNA, 22 bp, Artificial Sequence
  Synthetic: FXN 3 reverse 9:69039062-69039087; SpCas9
gacggggtttcaccatgttggc

SEQ ID NO: 29985 - DNA, 21 bp, Artificial Sequence
  Synthetic: FXN 3 reverse 9:69039063-69039087; SpCas9
acggggtttcaccatgttggc

SEQ ID NO: 29986 - DNA, 20 bp, Artificial Sequence
  Synthetic: FXN 3 reverse 9:69039064-69039087; SpCas9
cggggtttcaccatgttggc

SEQ ID NO: 29987 - DNA, 19 bp, Artificial Sequence
  Synthetic: FXN 3 reverse 9:69039065-69039087; SpCas9
ggggtttcaccatgttggc

SEQ ID NO: 29988 - DNA, 18 bp, Artificial Sequence
  Synthetic: FXN 3 reverse 9:69039066-69039087; SpCas9
gggtttcaccatgttggc

SEQ ID NO: 29989 - DNA, 25 bp, Artificial Sequence
  Synthetic: FXN 3 reverse 9:69039063-69039091; SpCas9
tagtagagacggggtttcaccatgt

SEQ ID NO: 29990 - DNA, 24 bp, Artificial Sequence
  Synthetic: FXN 3 reverse 9:69039064-69039091; SpCas9
agtagagacggggtttcaccatgt

SEQ ID NO: 29991 - DNA, 23 bp, Artificial Sequence
  Synthetic: FXN 3 reverse 9:69039065-69039091; SpCas9
gtagagacggggtttcaccatgt

SEQ ID NO: 29992 - DNA, 22 bp, Artificial Sequence
  Synthetic: FXN 3 reverse 9:69039066-69039091; SpCas9
tagagacggggtttcaccatgt

SEQ ID NO: 29993 - DNA, 21 bp, Artificial Sequence
  Synthetic: FXN 3 reverse 9:69039067-69039091; SpCas9
agagacggggtttcaccatgt

SEQ ID NO: 29994 - DNA, 20 bp, Artificial Sequence
  Synthetic: FXN 3 reverse 9:69039068-69039091; SpCas9
gagacggggtttcaccatgt

SEQ ID NO: 29995 - DNA, 19 bp, Artificial Sequence
  Synthetic: FXN 3 reverse 9:69039069-69039091; SpCas9
agacggggtttcaccatgt

SEQ ID NO: 29996 - DNA, 18 bp, Artificial Sequence
  Synthetic: FXN 3 reverse 9:69039070-69039091; SpCas9
gacggggtttcaccatgt

SEQ ID NO: 29997 - DNA, 25 bp, Artificial Sequence
  Synthetic: FXN 3 reverse 9:69039077-69039105; SpCas9
aatttttgtatttttagtagagacg

SEQ ID NO: 29998 - DNA, 24 bp, Artificial Sequence
  Synthetic: FXN 3 reverse 9:69039078-69039105; SpCas9
atttttgtatttttagtagagacg

SEQ ID NO: 29999 - DNA, 23 bp, Artificial Sequence
  Synthetic: FXN 3 reverse 9:69039079-69039105; SpCas9
tttttgtatttttagtagagacg

SEQ ID NO: 30000 - DNA, 22 bp, Artificial Sequence
  Synthetic: FXN 3 reverse 9:69039080-69039105; SpCas9
ttttgtatttttagtagagacg

SEQ ID NO: 30001 - DNA, 21 bp, Artificial Sequence
  Synthetic: FXN 3 reverse 9:69039081-69039105; SpCas9
tttgtatttttagtagagacg

SEQ ID NO: 30002 - DNA, 20 bp, Artificial Sequence
  Synthetic: FXN 3 reverse 9:69039082-69039105; SpCas9
ttgtatttttagtagagacg

SEQ ID NO: 30003 - DNA, 19 bp, Artificial Sequence
  Synthetic: FXN 3 reverse 9:69039083-69039105; SpCas9
tgtatttttagtagagacg

SEQ ID NO: 30004 - DNA, 18 bp, Artificial Sequence
  Synthetic: FXN 3 reverse 9:69039084-69039105; SpCas9
gtatttttagtagagacg

SEQ ID NO: 30005 - DNA, 25 bp, Artificial Sequence
  Synthetic: FXN 3 reverse 9:69039078-69039106; SpCas9
taatttttgtatttttagtagagac

SEQ ID NO: 30006 - DNA, 24 bp, Artificial Sequence
  Synthetic: FXN 3 reverse 9:69039079-69039106; SpCas9
aatttttgtatttttagtagagac

SEQ ID NO: 30007 - DNA, 23 bp, Artificial Sequence
  Synthetic: FXN 3 reverse 9:69039080-69039106; SpCas9
atttttgtatttttagtagagac

SEQ ID NO: 30008 - DNA, 22 bp, Artificial Sequence
  Synthetic: FXN 3 reverse 9:69039081-69039106; SpCas9
tttttgtatttttagtagagac

SEQ ID NO: 30009 - DNA, 21 bp, Artificial Sequence
  Synthetic: FXN 3 reverse 9:69039082-69039106; SpCas9
ttttgtatttttagtagagac

SEQ ID NO: 30010 - DNA, 20 bp, Artificial Sequence
  Synthetic: FXN 3 reverse 9:69039083-69039106; SpCas9
tttgtatttttagtagagac

SEQ ID NO: 30011 - DNA, 19 bp, Artificial Sequence
  Synthetic: FXN 3 reverse 9:69039084-69039106; SpCas9
ttgtatttttagtagagac

SEQ ID NO: 30012 - DNA, 18 bp, Artificial Sequence
  Synthetic: FXN 3 reverse 9:69039085-69039106; SpCas9
tgtatttttagtagagac

SEQ ID NO: 30013 - DNA, 25 bp, Artificial Sequence
  Synthetic: FXN 3 forward 9:69039079-69039107; SpCas9
ccgtctctactaaaaatacaaaaat

SEQ ID NO: 30014 - DNA, 24 bp, Artificial Sequence
  Synthetic: FXN 3 forward 9:69039080-69039107; SpCas9
cgtctctactaaaaatacaaaaat

SEQ ID NO: 30015 - DNA, 23 bp, Artificial Sequence
  Synthetic: FXN 3 forward 9:69039081-69039107; SpCas9
gtctctactaaaaatacaaaaat

SEQ ID NO: 30016 - DNA, 22 bp, Artificial Sequence
  Synthetic: FXN 3 forward 9:69039082-69039107; SpCas9
tctctactaaaaatacaaaaat

SEQ ID NO: 30017 - DNA, 21 bp, Artificial Sequence
  Synthetic: FXN 3 forward 9:69039083-69039107; SpCas9
ctctactaaaaatacaaaaat

SEQ ID NO: 30018 - DNA, 20 bp, Artificial Sequence
  Synthetic: FXN 3 forward 9:69039084-69039107; SpCas9
tctactaaaaatacaaaaat

SEQ ID NO: 30019 - DNA, 19 bp, Artificial Sequence
  Synthetic: FXN 3 forward 9:69039085-69039107; SpCas9
ctactaaaaatacaaaaat

SEQ ID NO: 30020 - DNA, 18 bp, Artificial Sequence
  Synthetic: FXN 3 forward 9:69039086-69039107; SpCas9
tactaaaaatacaaaaat

SEQ ID NO: 30021 - DNA, 25 bp, Artificial Sequence
  Synthetic: FXN 3 reverse 9:69039079-69039107; SpCas9
ctaatttttgtatttttagtagaga

SEQ ID NO: 30022 - DNA, 24 bp, Artificial Sequence
  Synthetic: FXN 3 reverse 9:69039080-69039107; SpCas9
taatttttgtatttttagtagaga

SEQ ID NO: 30023 - DNA, 23 bp, Artificial Sequence
  Synthetic: FXN 3 reverse 9:69039081-69039107; SpCas9
aatttttgtatttttagtagaga

SEQ ID NO: 30024 - DNA, 22 bp, Artificial Sequence
  Synthetic: FXN 3 reverse 9:69039082-69039107; SpCas9
atttttgtatttttagtagaga

SEQ ID NO: 30025 - DNA, 21 bp, Artificial Sequence
  Synthetic: FXN 3 reverse 9:69039083-69039107; SpCas9
tttttgtatttttagtagaga

SEQ ID NO: 30026 - DNA, 20 bp, Artificial Sequence
  Synthetic: FXN 3 reverse 9:69039084-69039107; SpCas9
ttttgtatttttagtagaga

SEQ ID NO: 30027 - DNA, 19 bp, Artificial Sequence
  Synthetic: FXN 3 reverse 9:69039085-69039107; SpCas9
tttgtatttttagtagaga

SEQ ID NO: 30028 - DNA, 18 bp, Artificial Sequence
  Synthetic: FXN 3 reverse 9:69039086-69039107; SpCas9
ttgtatttttagtagaga

SEQ ID NO: 30029 - DNA, 25 bp, Artificial Sequence
  Synthetic: FXN 3 forward 9:69039083-69039111; SpCas9
ctctactaaaaatacaaaaattagc

SEQ ID NO: 30030 - DNA, 24 bp, Artificial Sequence
  Synthetic: FXN 3 forward 9:69039084-69039111; SpCas9
tctactaaaaatacaaaaattagc

SEQ ID NO: 30031 - DNA, 23 bp, Artificial Sequence
  Synthetic: FXN 3 forward 9:69039085-69039111; SpCas9
ctactaaaaatacaaaaattagc

SEQ ID NO: 30032 - DNA, 22 bp, Artificial Sequence
  Synthetic: FXN 3 forward 9:69039086-69039111; SpCas9
tactaaaaatacaaaaattagc

SEQ ID NO: 30033 - DNA, 21 bp, Artificial Sequence
  Synthetic: FXN 3 forward 9:69039087-69039111; SpCas9
actaaaaatacaaaaattagc

SEQ ID NO: 30034 - DNA, 20 bp, Artificial Sequence
  Synthetic: FXN 3 forward 9:69039088-69039111; SpCas9
ctaaaaatacaaaaattagc

SEQ ID NO: 30035 - DNA, 19 bp, Artificial Sequence
  Synthetic: FXN 3 forward 9:69039089-69039111; SpCas9
taaaaatacaaaaattagc

SEQ ID NO: 30036 - DNA, 18 bp, Artificial Sequence
  Synthetic: FXN 3 forward 9:69039090-69039111; SpCas9
aaaaatacaaaaattagc

SEQ ID NO: 30037 - DNA, 25 bp, Artificial Sequence
  Synthetic: FXN 3 reverse 9:69039083-69039111; SpCas9
ccagctaatttttgtatttttagta

SEQ ID NO: 30038 - DNA, 24 bp, Artificial Sequence
  Synthetic: FXN 3 reverse 9:69039084-69039111; SpCas9
cagctaatttttgtatttttagta

SEQ ID NO: 30039 - DNA, 23 bp, Artificial Sequence
  Synthetic: FXN 3 reverse 9:69039085-69039111; SpCas9
agctaatttttgtatttttagta

SEQ ID NO: 30040 - DNA, 22 bp, Artificial Sequence
  Synthetic: FXN 3 reverse 9:69039086-69039111; SpCas9
gctaatttttgtatttttagta

SEQ ID NO: 30041 - DNA, 21 bp, Artificial Sequence
  Synthetic: FXN 3 reverse 9:69039087-69039111; SpCas9
ctaatttttgtatttttagta

SEQ ID NO: 30042 - DNA, 20 bp, Artificial Sequence
  Synthetic: FXN 3 reverse 9:69039088-69039111; SpCas9
taatttttgtatttttagta

SEQ ID NO: 30043 - DNA, 19 bp, Artificial Sequence
  Synthetic: FXN 3 reverse 9:69039089-69039111; SpCas9
aatttttgtatttttagta

SEQ ID NO: 30044 - DNA, 18 bp, Artificial Sequence
  Synthetic: FXN 3 reverse 9:69039090-69039111; SpCas9
atttttgtatttttagta

SEQ ID NO: 30045 - DNA, 25 bp, Artificial Sequence
  Synthetic: FXN 3 reverse 9:69039085-69039113; SpCas9
atccagctaatttttgtatttttag

SEQ ID NO: 30046 - DNA, 24 bp, Artificial Sequence
  Synthetic: FXN 3 reverse 9:69039086-69039113; SpCas9
tccagctaatttttgtatttttag

SEQ ID NO: 30047 - DNA, 23 bp, Artificial Sequence
  Synthetic: FXN 3 reverse 9:69039087-69039113; SpCas9
ccagctaatttttgtatttttag

SEQ ID NO: 30048 - DNA, 22 bp, Artificial Sequence
  Synthetic: FXN 3 reverse 9:69039088-69039113; SpCas9
cagctaatttttgtatttttag

SEQ ID NO: 30049 - DNA, 21 bp, Artificial Sequence
  Synthetic: FXN 3 reverse 9:69039089-69039113; SpCas9
agctaatttttgtatttttag

SEQ ID NO: 30050 - DNA, 20 bp, Artificial Sequence
  Synthetic: FXN 3 reverse 9:69039090-69039113; SpCas9
gctaatttttgtatttttag

SEQ ID NO: 30051 - DNA, 19 bp, Artificial Sequence
  Synthetic: FXN 3 reverse 9:69039091-69039113; SpCas9
ctaatttttgtatttttag

SEQ ID NO: 30052 - DNA, 18 bp, Artificial Sequence
  Synthetic: FXN 3 reverse 9:69039092-69039113; SpCas9
taatttttgtatttttag

SEQ ID NO: 30053 - DNA, 25 bp, Artificial Sequence
  Synthetic: FXN 3 reverse 9:69039088-69039116; SpCas9
cacatccagctaatttttgtatttt

SEQ ID NO: 30054 - DNA, 24 bp, Artificial Sequence
  Synthetic: FXN 3 reverse 9:69039089-69039116; SpCas9
acatccagctaatttttgtatttt

SEQ ID NO: 30055 - DNA, 23 bp, Artificial Sequence
  Synthetic: FXN 3 reverse 9:69039090-69039116; SpCas9
catccagctaatttttgtatttt

SEQ ID NO: 30056 - DNA, 22 bp, Artificial Sequence
  Synthetic: FXN 3 reverse 9:69039091-69039116; SpCas9
atccagctaatttttgtatttt

SEQ ID NO: 30057 - DNA, 21 bp, Artificial Sequence
  Synthetic: FXN 3 reverse 9:69039092-69039116; SpCas9
tccagctaatttttgtatttt

SEQ ID NO: 30058 - DNA, 20 bp, Artificial Sequence
  Synthetic: FXN 3 reverse 9:69039093-69039116; SpCas9
ccagctaatttttgtatttt

SEQ ID NO: 30059 - DNA, 19 bp, Artificial Sequence
  Synthetic: FXN 3 reverse 9:69039094-69039116; SpCas9
cagctaatttttgtatttt

SEQ ID NO: 30060 - DNA, 18 bp, Artificial Sequence
  Synthetic: FXN 3 reverse 9:69039095-69039116; SpCas9
agctaatttttgtatttt

SEQ ID NO: 30061 - DNA, 25 bp, Artificial Sequence
  Synthetic: FXN 3 forward 9:69039089-69039117; SpCas9
taaaaatacaaaaattagctggatg

SEQ ID NO: 30062 - DNA, 24 bp, Artificial Sequence
  Synthetic: FXN 3 forward 9:69039090-69039117; SpCas9
aaaaatacaaaaattagctggatg

SEQ ID NO: 30063 - DNA, 23 bp, Artificial Sequence
  Synthetic: FXN 3 forward 9:69039091-69039117; SpCas9
aaaatacaaaaattagctggatg

SEQ ID NO: 30064 - DNA, 22 bp, Artificial Sequence
  Synthetic: FXN 3 forward 9:69039092-69039117; SpCas9
aaatacaaaaattagctggatg

SEQ ID NO: 30065 - DNA, 21 bp, Artificial Sequence
  Synthetic: FXN 3 forward 9:69039093-69039117; SpCas9
aatacaaaaattagctggatg

SEQ ID NO: 30066 - DNA, 20 bp, Artificial Sequence
  Synthetic: FXN 3 forward 9:69039094-69039117; SpCas9
atacaaaaattagctggatg

SEQ ID NO: 30067 - DNA, 19 bp, Artificial Sequence
  Synthetic: FXN 3 forward 9:69039095-69039117; SpCas9
tacaaaaattagctggatg

SEQ ID NO: 30068 - DNA, 18 bp, Artificial Sequence
  Synthetic: FXN 3 forward 9:69039096-69039117; SpCas9
acaaaaattagctggatg

SEQ ID NO: 30069 - DNA, 25 bp, Artificial Sequence
  Synthetic: FXN 3 forward 9:69039092-69039120; SpCas9
aaatacaaaaattagctggatgtgg

SEQ ID NO: 30070 - DNA, 24 bp, Artificial Sequence
  Synthetic: FXN 3 forward 9:69039093-69039120; SpCas9
aatacaaaaattagctggatgtgg

SEQ ID NO: 30071 - DNA, 23 bp, Artificial Sequence
  Synthetic: FXN 3 forward 9:69039094-69039120; SpCas9
atacaaaaattagctggatgtgg

SEQ ID NO: 30072 - DNA, 22 bp, Artificial Sequence
  Synthetic: FXN 3 forward 9:69039095-69039120; SpCas9
tacaaaaattagctggatgtgg

SEQ ID NO: 30073 - DNA, 21 bp, Artificial Sequence
  Synthetic: FXN 3 forward 9:69039096-69039120; SpCas9
acaaaaattagctggatgtgg

SEQ ID NO: 30074 - DNA, 20 bp, Artificial Sequence
  Synthetic: FXN 3 forward 9:69039097-69039120; SpCas9
caaaaattagctggatgtgg

SEQ ID NO: 30075 - DNA, 19 bp, Artificial Sequence
  Synthetic: FXN 3 forward 9:69039098-69039120; SpCas9
aaaaattagctggatgtgg

SEQ ID NO: 30076 - DNA, 18 bp, Artificial Sequence
  Synthetic: FXN 3 forward 9:69039099-69039120; SpCas9
aaaattagctggatgtgg

SEQ ID NO: 30077 - DNA, 25 bp, Artificial Sequence
  Synthetic: FXN 3 reverse 9:69039107-69039135; SpCas9
gattacaggtgagtgccaccacatc

SEQ ID NO: 30078 - DNA, 24 bp, Artificial Sequence
  Synthetic: FXN 3 reverse 9:69039108-69039135; SpCas9
attacaggtgagtgccaccacatc

SEQ ID NO: 30079 - DNA, 23 bp, Artificial Sequence
  Synthetic: FXN 3 reverse 9:69039109-69039135; SpCas9
ttacaggtgagtgccaccacatc

SEQ ID NO: 30080 - DNA, 22 bp, Artificial Sequence
  Synthetic: FXN 3 reverse 9:69039110-69039135; SpCas9
tacaggtgagtgccaccacatc

SEQ ID NO: 30081 - DNA, 21 bp, Artificial Sequence
  Synthetic: FXN 3 reverse 9:69039111-69039135; SpCas9
acaggtgagtgccaccacatc

SEQ ID NO: 30082 - DNA, 20 bp, Artificial Sequence
  Synthetic: FXN 3 reverse 9:69039112-69039135; SpCas9
caggtgagtgccaccacatc

SEQ ID NO: 30083 - DNA, 19 bp, Artificial Sequence
  Synthetic: FXN 3 reverse 9:69039113-69039135; SpCas9
aggtgagtgccaccacatc

SEQ ID NO: 30084 - DNA, 18 bp, Artificial Sequence
  Synthetic: FXN 3 reverse 9:69039114-69039135; SpCas9
ggtgagtgccaccacatc

SEQ ID NO: 30085 - DNA, 25 bp, Artificial Sequence
  Synthetic: FXN 3 forward 9:69039111-69039139; SpCas9
atgtggtggcactcacctgtaatcc

SEQ ID NO: 30086 - DNA, 24 bp, Artificial Sequence
  Synthetic: FXN 3 forward 9:69039112-69039139; SpCas9
tgtggtggcactcacctgtaatcc

SEQ ID NO: 30087 - DNA, 23 bp, Artificial Sequence
  Synthetic: FXN 3 forward 9:69039113-69039139; SpCas9
gtggtggcactcacctgtaatcc

SEQ ID NO: 30088 - DNA, 22 bp, Artificial Sequence
  Synthetic: FXN 3 forward 9:69039114-69039139; SpCas9
tggtggcactcacctgtaatcc

SEQ ID NO: 30089 - DNA, 21 bp, Artificial Sequence
  Synthetic: FXN 3 forward 9:69039115-69039139; SpCas9
ggtggcactcacctgtaatcc

SEQ ID NO: 30090 - DNA, 20 bp, Artificial Sequence
  Synthetic: FXN 3 forward 9:69039116-69039139; SpCas9
gtggcactcacctgtaatcc

SEQ ID NO: 30091 - DNA, 19 bp, Artificial Sequence
  Synthetic: FXN 3 forward 9:69039117-69039139; SpCas9
tggcactcacctgtaatcc

SEQ ID NO: 30092 - DNA, 18 bp, Artificial Sequence
  Synthetic: FXN 3 forward 9:69039118-69039139; SpCas9
ggcactcacctgtaatcc

SEQ ID NO: 30093 - DNA, 25 bp, Artificial Sequence
  Synthetic: FXN 3 forward 9:69039119-69039147; SpCas9
gcactcacctgtaatcccagctact

SEQ ID NO: 30094 - DNA, 24 bp, Artificial Sequence
  Synthetic: FXN 3 forward 9:69039120-69039147; SpCas9
cactcacctgtaatcccagctact

SEQ ID NO: 30095 - DNA, 23 bp, Artificial Sequence
  Synthetic: FXN 3 forward 9:69039121-69039147; SpCas9
actcacctgtaatcccagctact

SEQ ID NO: 30096 - DNA, 22 bp, Artificial Sequence
  Synthetic: FXN 3 forward 9:69039122-69039147; SpCas9
ctcacctgtaatcccagctact

SEQ ID NO: 30097 - DNA, 21 bp, Artificial Sequence
  Synthetic: FXN 3 forward 9:69039123-69039147; SpCas9
tcacctgtaatcccagctact

SEQ ID NO: 30098 - DNA, 20 bp, Artificial Sequence
  Synthetic: FXN 3 forward 9:69039124-69039147; SpCas9
cacctgtaatcccagctact

SEQ ID NO: 30099 - DNA, 19 bp, Artificial Sequence
  Synthetic: FXN 3 forward 9:69039125-69039147; SpCas9
acctgtaatcccagctact

SEQ ID NO: 30100 - DNA, 18 bp, Artificial Sequence
  Synthetic: FXN 3 forward 9:69039126-69039147; SpCas9
cctgtaatcccagctact

SEQ ID NO: 30101 - DNA, 25 bp, Artificial Sequence
  Synthetic: FXN 3 forward 9:69039120-69039148; SpCas9
cactcacctgtaatcccagctactc

SEQ ID NO: 30102 - DNA, 24 bp, Artificial Sequence
  Synthetic: FXN 3 forward 9:69039121-69039148; SpCas9
actcacctgtaatcccagctactc

SEQ ID NO: 30103 - DNA, 23 bp, Artificial Sequence
  Synthetic: FXN 3 forward 9:69039122-69039148; SpCas9
ctcacctgtaatcccagctactc

SEQ ID NO: 30104 - DNA, 22 bp, Artificial Sequence
  Synthetic: FXN 3 forward 9:69039123-69039148; SpCas9
tcacctgtaatcccagctactc

SEQ ID NO: 30105 - DNA, 21 bp, Artificial Sequence
  Synthetic: FXN 3 forward 9:69039124-69039148; SpCas9
cacctgtaatcccagctactc

SEQ ID NO: 30106 - DNA, 20 bp, Artificial Sequence
  Synthetic: FXN 3 forward 9:69039125-69039148; SpCas9
acctgtaatcccagctactc

SEQ ID NO: 30107 - DNA, 19 bp, Artificial Sequence
  Synthetic: FXN 3 forward 9:69039126-69039148; SpCas9
cctgtaatcccagctactc

SEQ ID NO: 30108 - DNA, 18 bp, Artificial Sequence
  Synthetic: FXN 3 forward 9:69039127-69039148; SpCas9
ctgtaatcccagctactc

SEQ ID NO: 30109 - DNA, 25 bp, Artificial Sequence
  Synthetic: FXN 3 forward 9:69039122-69039150; SpCas9
ctcacctgtaatcccagctactcag

SEQ ID NO: 30110 - DNA, 24 bp, Artificial Sequence
  Synthetic: FXN 3 forward 9:69039123-69039150; SpCas9
tcacctgtaatcccagctactcag

SEQ ID NO: 30111 - DNA, 23 bp, Artificial Sequence
  Synthetic: FXN 3 forward 9:69039124-69039150; SpCas9
cacctgtaatcccagctactcag

SEQ ID NO: 30112 - DNA, 22 bp, Artificial Sequence
  Synthetic: FXN 3 forward 9:69039125-69039150; SpCas9
acctgtaatcccagctactcag

SEQ ID NO: 30113 - DNA, 21 bp, Artificial Sequence
  Synthetic: FXN 3 forward 9:69039126-69039150; SpCas9
cctgtaatcccagctactcag

SEQ ID NO: 30114 - DNA, 20 bp, Artificial Sequence
  Synthetic: FXN 3 forward 9:69039127-69039150; SpCas9
ctgtaatcccagctactcag

SEQ ID NO: 30115 - DNA, 19 bp, Artificial Sequence
  Synthetic: FXN 3 forward 9:69039128-69039150; SpCas9
tgtaatcccagctactcag

SEQ ID NO: 30116 - DNA, 18 bp, Artificial Sequence
  Synthetic: FXN 3 forward 9:69039129-69039150; SpCas9
gtaatcccagctactcag

SEQ ID NO: 30117 - DNA, 25 bp, Artificial Sequence
  Synthetic: FXN 3 reverse 9:69039122-69039150; SpCas9
ctcctgagtagctgggattacaggt

SEQ ID NO: 30118 - DNA, 24 bp, Artificial Sequence
  Synthetic: FXN 3 reverse 9:69039123-69039150; SpCas9
tcctgagtagctgggattacaggt

SEQ ID NO: 30119 - DNA, 23 bp, Artificial Sequence
  Synthetic: FXN 3 reverse 9:69039124-69039150; SpCas9
cctgagtagctgggattacaggt

SEQ ID NO: 30120 - DNA, 22 bp, Artificial Sequence
  Synthetic: FXN 3 reverse 9:69039125-69039150; SpCas9
ctgagtagctgggattacaggt

SEQ ID NO: 30121 - DNA, 21 bp, Artificial Sequence
  Synthetic: FXN 3 reverse 9:69039126-69039150; SpCas9
tgagtagctgggattacaggt

SEQ ID NO: 30122 - DNA, 20 bp, Artificial Sequence
  Synthetic: FXN 3 reverse 9:69039127-69039150; SpCas9
gagtagctgggattacaggt

SEQ ID NO: 30123 - DNA, 19 bp, Artificial Sequence
  Synthetic: FXN 3 reverse 9:69039128-69039150; SpCas9
agtagctgggattacaggt

SEQ ID NO: 30124 - DNA, 18 bp, Artificial Sequence
  Synthetic: FXN 3 reverse 9:69039129-69039150; SpCas9
gtagctgggattacaggt

SEQ ID NO: 30125 - DNA, 25 bp, Artificial Sequence
  Synthetic: FXN 3 forward 9:69039123-69039151; SpCas9
tcacctgtaatcccagctactcagg

SEQ ID NO: 30126 - DNA, 24 bp, Artificial Sequence
  Synthetic: FXN 3 forward 9:69039124-69039151; SpCas9
cacctgtaatcccagctactcagg

SEQ ID NO: 30127 - DNA, 23 bp, Artificial Sequence
  Synthetic: FXN 3 forward 9:69039125-69039151; SpCas9
acctgtaatcccagctactcagg

SEQ ID NO: 30128 - DNA, 22 bp, Artificial Sequence
  Synthetic: FXN 3 forward 9:69039126-69039151; SpCas9
cctgtaatcccagctactcagg

SEQ ID NO: 30129 - DNA, 21 bp, Artificial Sequence
  Synthetic: FXN 3 forward 9:69039127-69039151; SpCas9
ctgtaatcccagctactcagg

SEQ ID NO: 30130 - DNA, 20 bp, Artificial Sequence
  Synthetic: FXN 3 forward 9:69039128-69039151; SpCas9
tgtaatcccagctactcagg

SEQ ID NO: 30131 - DNA, 19 bp, Artificial Sequence
  Synthetic: FXN 3 forward 9:69039129-69039151; SpCas9
gtaatcccagctactcagg

SEQ ID NO: 30132 - DNA, 18 bp, Artificial Sequence
  Synthetic: FXN 3 forward 9:69039130-69039151; SpCas9
taatcccagctactcagg

SEQ ID NO: 30133 - DNA, 25 bp, Artificial Sequence
  Synthetic: FXN 3 reverse 9:69039126-69039154; SpCas9
cagcctcctgagtagctgggattac

SEQ ID NO: 30134 - DNA, 24 bp, Artificial Sequence
  Synthetic: FXN 3 reverse 9:69039127-69039154; SpCas9
agcctcctgagtagctgggattac

SEQ ID NO: 30135 - DNA, 23 bp, Artificial Sequence
  Synthetic: FXN 3 reverse 9:69039128-69039154; SpCas9
gcctcctgagtagctgggattac

SEQ ID NO: 30136 - DNA, 22 bp, Artificial Sequence
  Synthetic: FXN 3 reverse 9:69039129-69039154; SpCas9
cctcctgagtagctgggattac

SEQ ID NO: 30137 - DNA, 21 bp, Artificial Sequence
  Synthetic: FXN 3 reverse 9:69039130-69039154; SpCas9
ctcctgagtagctgggattac

SEQ ID NO: 30138 - DNA, 20 bp, Artificial Sequence
  Synthetic: FXN 3 reverse 9:69039131-69039154; SpCas9
tcctgagtagctgggattac

SEQ ID NO: 30139 - DNA, 19 bp, Artificial Sequence
  Synthetic: FXN 3 reverse 9:69039132-69039154; SpCas9
cctgagtagctgggattac

SEQ ID NO: 30140 - DNA, 18 bp, Artificial Sequence
  Synthetic: FXN 3 reverse 9:69039133-69039154; SpCas9
ctgagtagctgggattac

SEQ ID NO: 30141 - DNA, 25 bp, Artificial Sequence
  Synthetic: FXN 3 reverse 9:69039127-69039155; SpCas9
tcagcctcctgagtagctgggatta

SEQ ID NO: 30142 - DNA, 24 bp, Artificial Sequence
  Synthetic: FXN 3 reverse 9:69039128-69039155; SpCas9
cagcctcctgagtagctgggatta

SEQ ID NO: 30143 - DNA, 23 bp, Artificial Sequence
  Synthetic: FXN 3 reverse 9:69039129-69039155; SpCas9
agcctcctgagtagctgggatta

SEQ ID NO: 30144 - DNA, 22 bp, Artificial Sequence
  Synthetic: FXN 3 reverse 9:69039130-69039155; SpCas9
gcctcctgagtagctgggatta

SEQ ID NO: 30145 - DNA, 21 bp, Artificial Sequence
  Synthetic: FXN 3 reverse 9:69039131-69039155; SpCas9
cctcctgagtagctgggatta

SEQ ID NO: 30146 - DNA, 20 bp, Artificial Sequence
  Synthetic: FXN 3 reverse 9:69039132-69039155; SpCas9
ctcctgagtagctgggatta

SEQ ID NO: 30147 - DNA, 19 bp, Artificial Sequence
  Synthetic: FXN 3 reverse 9:69039133-69039155; SpCas9
tcctgagtagctgggatta

SEQ ID NO: 30148 - DNA, 18 bp, Artificial Sequence
  Synthetic: FXN 3 reverse 9:69039134-69039155; SpCas9
cctgagtagctgggatta

SEQ ID NO: 30149 - DNA, 25 bp, Artificial Sequence
  Synthetic: FXN 3 forward 9:69039128-69039156; SpCas9
tgtaatcccagctactcaggaggct

SEQ ID NO: 30150 - DNA, 24 bp, Artificial Sequence
  Synthetic: FXN 3 forward 9:69039129-69039156; SpCas9
gtaatcccagctactcaggaggct

SEQ ID NO: 30151 - DNA, 23 bp, Artificial Sequence
  Synthetic: FXN 3 forward 9:69039130-69039156; SpCas9
taatcccagctactcaggaggct

SEQ ID NO: 30152 - DNA, 22 bp, Artificial Sequence
  Synthetic: FXN 3 forward 9:69039131-69039156; SpCas9
aatcccagctactcaggaggct

SEQ ID NO: 30153 - DNA, 21 bp, Artificial Sequence
  Synthetic: FXN 3 forward 9:69039132-69039156; SpCas9
atcccagctactcaggaggct

SEQ ID NO: 30154 - DNA, 20 bp, Artificial Sequence
  Synthetic: FXN 3 forward 9:69039133-69039156; SpCas9
tcccagctactcaggaggct

SEQ ID NO: 30155 - DNA, 19 bp, Artificial Sequence
  Synthetic: FXN 3 forward 9:69039134-69039156; SpCas9
cccagctactcaggaggct

SEQ ID NO: 30156 - DNA, 18 bp, Artificial Sequence
  Synthetic: FXN 3 forward 9:69039135-69039156; SpCas9
ccagctactcaggaggct

SEQ ID NO: 30157 - DNA, 25 bp, Artificial Sequence
  Synthetic: FXN 3 forward 9:69039129-69039157; SpCas9
gtaatcccagctactcaggaggctg

SEQ ID NO: 30158 - DNA, 24 bp, Artificial Sequence
  Synthetic: FXN 3 forward 9:69039130-69039157; SpCas9
taatcccagctactcaggaggctg

SEQ ID NO: 30159 - DNA, 23 bp, Artificial Sequence
  Synthetic: FXN 3 forward 9:69039131-69039157; SpCas9
aatcccagctactcaggaggctg

SEQ ID NO: 30160 - DNA, 22 bp, Artificial Sequence
  Synthetic: FXN 3 forward 9:69039132-69039157; SpCas9
atcccagctactcaggaggctg

SEQ ID NO: 30161 - DNA, 21 bp, Artificial Sequence
  Synthetic: FXN 3 forward 9:69039133-69039157; SpCas9
tcccagctactcaggaggctg

SEQ ID NO: 30162 - DNA, 20 bp, Artificial Sequence
  Synthetic: FXN 3 forward 9:69039134-69039157; SpCas9
cccagctactcaggaggctg

SEQ ID NO: 30163 - DNA, 19 bp, Artificial Sequence
  Synthetic: FXN 3 forward 9:69039135-69039157; SpCas9
ccagctactcaggaggctg

SEQ ID NO: 30164 - DNA, 18 bp, Artificial Sequence
  Synthetic: FXN 3 forward 9:69039136-69039157; SpCas9
cagctactcaggaggctg

SEQ ID NO: 30165 - DNA, 25 bp, Artificial Sequence
  Synthetic: FXN 3 forward 9:69039132-69039160; SpCas9
atcccagctactcaggaggctgagg

SEQ ID NO: 30166 - DNA, 24 bp, Artificial Sequence
  Synthetic: FXN 3 forward 9:69039133-69039160; SpCas9
tcccagctactcaggaggctgagg

SEQ ID NO: 30167 - DNA, 23 bp, Artificial Sequence
  Synthetic: FXN 3 forward 9:69039134-69039160; SpCas9
cccagctactcaggaggctgagg

SEQ ID NO: 30168 - DNA, 22 bp, Artificial Sequence
  Synthetic: FXN 3 forward 9:69039135-69039160; SpCas9
ccagctactcaggaggctgagg

SEQ ID NO: 30169 - DNA, 21 bp, Artificial Sequence
  Synthetic: FXN 3 forward 9:69039136-69039160; SpCas9
cagctactcaggaggctgagg

SEQ ID NO: 30170 - DNA, 20 bp, Artificial Sequence
  Synthetic: FXN 3 forward 9:69039137-69039160; SpCas9
agctactcaggaggctgagg

SEQ ID NO: 30171 - DNA, 19 bp, Artificial Sequence
  Synthetic: FXN 3 forward 9:69039138-69039160; SpCas9
gctactcaggaggctgagg

SEQ ID NO: 30172 - DNA, 18 bp, Artificial Sequence
  Synthetic: FXN 3 forward 9:69039139-69039160; SpCas9
ctactcaggaggctgagg

SEQ ID NO: 30173 - DNA, 25 bp, Artificial Sequence
  Synthetic: FXN 3 forward 9:69039133-69039161; SpCas9
tcccagctactcaggaggctgaggc

SEQ ID NO: 30174 - DNA, 24 bp, Artificial Sequence
  Synthetic: FXN 3 forward 9:69039134-69039161; SpCas9
cccagctactcaggaggctgaggc

SEQ ID NO: 30175 - DNA, 23 bp, Artificial Sequence
  Synthetic: FXN 3 forward 9:69039135-69039161; SpCas9
ccagctactcaggaggctgaggc

SEQ ID NO: 30176 - DNA, 22 bp, Artificial Sequence
  Synthetic: FXN 3 forward 9:69039136-69039161; SpCas9
cagctactcaggaggctgaggc

SEQ ID NO: 30177 - DNA, 21 bp, Artificial Sequence
  Synthetic: FXN 3 forward 9:69039137-69039161; SpCas9
agctactcaggaggctgaggc

SEQ ID NO: 30178 - DNA, 20 bp, Artificial Sequence
  Synthetic: FXN 3 forward 9:69039138-69039161; SpCas9
gctactcaggaggctgaggc

SEQ ID NO: 30179 - DNA, 19 bp, Artificial Sequence
  Synthetic: FXN 3 forward 9:69039139-69039161; SpCas9
ctactcaggaggctgaggc

SEQ ID NO: 30180 - DNA, 18 bp, Artificial Sequence
  Synthetic: FXN 3 forward 9:69039140-69039161; SpCas9
tactcaggaggctgaggc

SEQ ID NO: 30181 - DNA, 25 bp, Artificial Sequence
  Synthetic: FXN 3 reverse 9:69039134-69039162; SpCas9
tcctgcctcagcctcctgagtagct

SEQ ID NO: 30182 - DNA, 24 bp, Artificial Sequence
  Synthetic: FXN 3 reverse 9:69039135-69039162; SpCas9
cctgcctcagcctcctgagtagct

SEQ ID NO: 30183 - DNA, 23 bp, Artificial Sequence
  Synthetic: FXN 3 reverse 9:69039136-69039162; SpCas9
ctgcctcagcctcctgagtagct

SEQ ID NO: 30184 - DNA, 22 bp, Artificial Sequence
  Synthetic: FXN 3 reverse 9:69039137-69039162; SpCas9
tgcctcagcctcctgagtagct

SEQ ID NO: 30185 - DNA, 21 bp, Artificial Sequence
  Synthetic: FXN 3 reverse 9:69039138-69039162; SpCas9
gcctcagcctcctgagtagct

SEQ ID NO: 30186 - DNA, 20 bp, Artificial Sequence
  Synthetic: FXN 3 reverse 9:69039139-69039162; SpCas9
cctcagcctcctgagtagct

SEQ ID NO: 30187 - DNA, 19 bp, Artificial Sequence
  Synthetic: FXN 3 reverse 9:69039140-69039162; SpCas9
ctcagcctcctgagtagct

SEQ ID NO: 30188 - DNA, 18 bp, Artificial Sequence
  Synthetic: FXN 3 reverse 9:69039141-69039162; SpCas9
tcagcctcctgagtagct

SEQ ID NO: 30189 - DNA, 25 bp, Artificial Sequence
  Synthetic: FXN 3 reverse 9:69039135-69039163; SpCas9
atcctgcctcagcctcctgagtagc

SEQ ID NO: 30190 - DNA, 24 bp, Artificial Sequence
  Synthetic: FXN 3 reverse 9:69039136-69039163; SpCas9
tcctgcctcagcctcctgagtagc

SEQ ID NO: 30191 - DNA, 23 bp, Artificial Sequence
  Synthetic: FXN 3 reverse 9:69039137-69039163; SpCas9
cctgcctcagcctcctgagtagc

SEQ ID NO: 30192 - DNA, 22 bp, Artificial Sequence
  Synthetic: FXN 3 reverse 9:69039138-69039163; SpCas9
ctgcctcagcctcctgagtagc

SEQ ID NO: 30193 - DNA, 21 bp, Artificial Sequence
  Synthetic: FXN 3 reverse 9:69039139-69039163; SpCas9
tgcctcagcctcctgagtagc

SEQ ID NO: 30194 - DNA, 20 bp, Artificial Sequence
  Synthetic: FXN 3 reverse 9:69039140-69039163; SpCas9
gcctcagcctcctgagtagc

SEQ ID NO: 30195 - DNA, 19 bp, Artificial Sequence
  Synthetic: FXN 3 reverse 9:69039141-69039163; SpCas9
cctcagcctcctgagtagc

SEQ ID NO: 30196 - DNA, 18 bp, Artificial Sequence
  Synthetic: FXN 3 reverse 9:69039142-69039163; SpCas9
ctcagcctcctgagtagc

SEQ ID NO: 30197 - DNA, 25 bp, Artificial Sequence
  Synthetic: FXN 3 reverse 9:69039139-69039167; SpCas9
aattatcctgcctcagcctcctgag

SEQ ID NO: 30198 - DNA, 24 bp, Artificial Sequence
  Synthetic: FXN 3 reverse 9:69039140-69039167; SpCas9
attatcctgcctcagcctcctgag

SEQ ID NO: 30199 - DNA, 23 bp, Artificial Sequence
  Synthetic: FXN 3 reverse 9:69039141-69039167; SpCas9
ttatcctgcctcagcctcctgag

SEQ ID NO: 30200 - DNA, 22 bp, Artificial Sequence
  Synthetic: FXN 3 reverse 9:69039142-69039167; SpCas9
tatcctgcctcagcctcctgag

SEQ ID NO: 30201 - DNA, 21 bp, Artificial Sequence
  Synthetic: FXN 3 reverse 9:69039143-69039167; SpCas9
atcctgcctcagcctcctgag

SEQ ID NO: 30202 - DNA, 20 bp, Artificial Sequence
  Synthetic: FXN 3 reverse 9:69039144-69039167; SpCas9
tcctgcctcagcctcctgag

SEQ ID NO: 30203 - DNA, 19 bp, Artificial Sequence
  Synthetic: FXN 3 reverse 9:69039145-69039167; SpCas9
cctgcctcagcctcctgag

SEQ ID NO: 30204 - DNA, 18 bp, Artificial Sequence
  Synthetic: FXN 3 reverse 9:69039146-69039167; SpCas9
ctgcctcagcctcctgag

SEQ ID NO: 30205 - DNA, 25 bp, Artificial Sequence
  Synthetic: FXN 3 reverse 9:69039142-69039170; SpCas9
agcaattatcctgcctcagcctcct

SEQ ID NO: 30206 - DNA, 24 bp, Artificial Sequence
  Synthetic: FXN 3 reverse 9:69039143-69039170; SpCas9
gcaattatcctgcctcagcctcct

SEQ ID NO: 30207 - DNA, 23 bp, Artificial Sequence
  Synthetic: FXN 3 reverse 9:69039144-69039170; SpCas9
caattatcctgcctcagcctcct

SEQ ID NO: 30208 - DNA, 22 bp, Artificial Sequence
  Synthetic: FXN 3 reverse 9:69039145-69039170; SpCas9
aattatcctgcctcagcctcct

SEQ ID NO: 30209 - DNA, 21 bp, Artificial Sequence
  Synthetic: FXN 3 reverse 9:69039146-69039170; SpCas9
attatcctgcctcagcctcct

SEQ ID NO: 30210 - DNA, 20 bp, Artificial Sequence
  Synthetic: FXN 3 reverse 9:69039147-69039170; SpCas9
ttatcctgcctcagcctcct

SEQ ID NO: 30211 - DNA, 19 bp, Artificial Sequence
  Synthetic: FXN 3 reverse 9:69039148-69039170; SpCas9
tatcctgcctcagcctcct

SEQ ID NO: 30212 - DNA, 18 bp, Artificial Sequence
  Synthetic: FXN 3 reverse 9:69039149-69039170; SpCas9
atcctgcctcagcctcct

SEQ ID NO: 30213 - DNA, 25 bp, Artificial Sequence
  Synthetic: FXN 3 forward 9:69039151-69039179; SpCas9
ctgaggcaggataattgcttgaacc

SEQ ID NO: 30214 - DNA, 24 bp, Artificial Sequence
  Synthetic: FXN 3 forward 9:69039152-69039179; SpCas9
tgaggcaggataattgcttgaacc

SEQ ID NO: 30215 - DNA, 23 bp, Artificial Sequence
  Synthetic: FXN 3 forward 9:69039153-69039179; SpCas9
gaggcaggataattgcttgaacc

SEQ ID NO: 30216 - DNA, 22 bp, Artificial Sequence
  Synthetic: FXN 3 forward 9:69039154-69039179; SpCas9
aggcaggataattgcttgaacc

SEQ ID NO: 30217 - DNA, 21 bp, Artificial Sequence
  Synthetic: FXN 3 forward 9:69039155-69039179; SpCas9
ggcaggataattgcttgaacc

SEQ ID NO: 30218 - DNA, 20 bp, Artificial Sequence
  Synthetic: FXN 3 forward 9:69039156-69039179; SpCas9
gcaggataattgcttgaacc

SEQ ID NO: 30219 - DNA, 19 bp, Artificial Sequence
  Synthetic: FXN 3 forward 9:69039157-69039179; SpCas9
caggataattgcttgaacc

SEQ ID NO: 30220 - DNA, 18 bp, Artificial Sequence
  Synthetic: FXN 3 forward 9:69039158-69039179; SpCas9
aggataattgcttgaacc

SEQ ID NO: 30221 - DNA, 25 bp, Artificial Sequence
  Synthetic: FXN 3 reverse 9:69039151-69039179; SpCas9
ccgggttcaagcaattatcctgcct

SEQ ID NO: 30222 - DNA, 24 bp, Artificial Sequence
  Synthetic: FXN 3 reverse 9:69039152-69039179; SpCas9
cgggttcaagcaattatcctgcct

SEQ ID NO: 30223 - DNA, 23 bp, Artificial Sequence
  Synthetic: FXN 3 reverse 9:69039153-69039179; SpCas9
gggttcaagcaattatcctgcct

SEQ ID NO: 30224 - DNA, 22 bp, Artificial Sequence
  Synthetic: FXN 3 reverse 9:69039154-69039179; SpCas9
ggttcaagcaattatcctgcct

SEQ ID NO: 30225 - DNA, 21 bp, Artificial Sequence
  Synthetic: FXN 3 reverse 9:69039155-69039179; SpCas9
gttcaagcaattatcctgcct

SEQ ID NO: 30226 - DNA, 20 bp, Artificial Sequence
  Synthetic: FXN 3 reverse 9:69039156-69039179; SpCas9
ttcaagcaattatcctgcct

SEQ ID NO: 30227 - DNA, 19 bp, Artificial Sequence
  Synthetic: FXN 3 reverse 9:69039157-69039179; SpCas9
tcaagcaattatcctgcct

SEQ ID NO: 30228 - DNA, 18 bp, Artificial Sequence
  Synthetic: FXN 3 reverse 9:69039158-69039179; SpCas9
caagcaattatcctgcct

SEQ ID NO: 30229 - DNA, 25 bp, Artificial Sequence
  Synthetic: FXN 3 forward 9:69039152-69039180; SpCas9
tgaggcaggataattgcttgaaccc

SEQ ID NO: 30230 - DNA, 24 bp, Artificial Sequence
  Synthetic: FXN 3 forward 9:69039153-69039180; SpCas9
gaggcaggataattgcttgaaccc

SEQ ID NO: 30231 - DNA, 23 bp, Artificial Sequence
  Synthetic: FXN 3 forward 9:69039154-69039180; SpCas9
aggcaggataattgcttgaaccc

SEQ ID NO: 30232 - DNA, 22 bp, Artificial Sequence
  Synthetic: FXN 3 forward 9:69039155-69039180; SpCas9
ggcaggataattgcttgaaccc

SEQ ID NO: 30233 - DNA, 21 bp, Artificial Sequence
  Synthetic: FXN 3 forward 9:69039156-69039180; SpCas9
gcaggataattgcttgaaccc

SEQ ID NO: 30234 - DNA, 20 bp, Artificial Sequence
  Synthetic: FXN 3 forward 9:69039157-69039180; SpCas9
caggataattgcttgaaccc

SEQ ID NO: 30235 - DNA, 19 bp, Artificial Sequence
  Synthetic: FXN 3 forward 9:69039158-69039180; SpCas9
aggataattgcttgaaccc

SEQ ID NO: 30236 - DNA, 18 bp, Artificial Sequence
  Synthetic: FXN 3 forward 9:69039159-69039180; SpCas9
ggataattgcttgaaccc

SEQ ID NO: 30237 - DNA, 25 bp, Artificial Sequence
  Synthetic: FXN 3 forward 9:69039154-69039182; SpCas9
aggcaggataattgcttgaacccgg

SEQ ID NO: 30238 - DNA, 24 bp, Artificial Sequence
  Synthetic: FXN 3 forward 9:69039155-69039182; SpCas9
ggcaggataattgcttgaacccgg

SEQ ID NO: 30239 - DNA, 23 bp, Artificial Sequence
  Synthetic: FXN 3 forward 9:69039156-69039182; SpCas9
gcaggataattgcttgaacccgg

SEQ ID NO: 30240 - DNA, 22 bp, Artificial Sequence
  Synthetic: FXN 3 forward 9:69039157-69039182; SpCas9
caggataattgcttgaacccgg

SEQ ID NO: 30241 - DNA, 21 bp, Artificial Sequence
  Synthetic: FXN 3 forward 9:69039158-69039182; SpCas9
aggataattgcttgaacccgg

SEQ ID NO: 30242 - DNA, 20 bp, Artificial Sequence
  Synthetic: FXN 3 forward 9:69039159-69039182; SpCas9
ggataattgcttgaacccgg

SEQ ID NO: 30243 - DNA, 19 bp, Artificial Sequence
  Synthetic: FXN 3 forward 9:69039160-69039182; SpCas9
gataattgcttgaacccgg

SEQ ID NO: 30244 - DNA, 18 bp, Artificial Sequence
  Synthetic: FXN 3 forward 9:69039161-69039182; SpCas9
ataattgcttgaacccgg

SEQ ID NO: 30245 - DNA, 25 bp, Artificial Sequence
  Synthetic: FXN 3 forward 9:69039155-69039183; SpCas9
ggcaggataattgcttgaacccggg

SEQ ID NO: 30246 - DNA, 24 bp, Artificial Sequence
  Synthetic: FXN 3 forward 9:69039156-69039183; SpCas9
gcaggataattgcttgaacccggg

SEQ ID NO: 30247 - DNA, 23 bp, Artificial Sequence
  Synthetic: FXN 3 forward 9:69039157-69039183; SpCas9
caggataattgcttgaacccggg

SEQ ID NO: 30248 - DNA, 22 bp, Artificial Sequence
  Synthetic: FXN 3 forward 9:69039158-69039183; SpCas9
aggataattgcttgaacccggg

SEQ ID NO: 30249 - DNA, 21 bp, Artificial Sequence
  Synthetic: FXN 3 forward 9:69039159-69039183; SpCas9
ggataattgcttgaacccggg

SEQ ID NO: 30250 - DNA, 20 bp, Artificial Sequence
  Synthetic: FXN 3 forward 9:69039160-69039183; SpCas9
gataattgcttgaacccggg

SEQ ID NO: 30251 - DNA, 19 bp, Artificial Sequence
  Synthetic: FXN 3 forward 9:69039161-69039183; SpCas9
ataattgcttgaacccggg

SEQ ID NO: 30252 - DNA, 18 bp, Artificial Sequence
  Synthetic: FXN 3 forward 9:69039162-69039183; SpCas9
taattgcttgaacccggg

SEQ ID NO: 30253 - DNA, 25 bp, Artificial Sequence
  Synthetic: FXN 3 forward 9:69039158-69039186; SpCas9
aggataattgcttgaacccgggagg

SEQ ID NO: 30254 - DNA, 24 bp, Artificial Sequence
  Synthetic: FXN 3 forward 9:69039159-69039186; SpCas9
ggataattgcttgaacccgggagg

SEQ ID NO: 30255 - DNA, 23 bp, Artificial Sequence
  Synthetic: FXN 3 forward 9:69039160-69039186; SpCas9
gataattgcttgaacccgggagg

SEQ ID NO: 30256 - DNA, 22 bp, Artificial Sequence
  Synthetic: FXN 3 forward 9:69039161-69039186; SpCas9
ataattgcttgaacccgggagg

SEQ ID NO: 30257 - DNA, 21 bp, Artificial Sequence
  Synthetic: FXN 3 forward 9:69039162-69039186; SpCas9
taattgcttgaacccgggagg

SEQ ID NO: 30258 - DNA, 20 bp, Artificial Sequence
  Synthetic: FXN 3 forward 9:69039163-69039186; SpCas9
aattgcttgaacccgggagg

SEQ ID NO: 30259 - DNA, 19 bp, Artificial Sequence
  Synthetic: FXN 3 forward 9:69039164-69039186; SpCas9
attgcttgaacccgggagg

SEQ ID NO: 30260 - DNA, 18 bp, Artificial Sequence
  Synthetic: FXN 3 forward 9:69039165-69039186; SpCas9
ttgcttgaacccgggagg

SEQ ID NO: 30261 - DNA, 25 bp, Artificial Sequence
  Synthetic: FXN 3 forward 9:69039161-69039189; SpCas9
ataattgcttgaacccgggaggtgg

SEQ ID NO: 30262 - DNA, 24 bp, Artificial Sequence
  Synthetic: FXN 3 forward 9:69039162-69039189; SpCas9
taattgcttgaacccgggaggtgg

SEQ ID NO: 30263 - DNA, 23 bp, Artificial Sequence
  Synthetic: FXN 3 forward 9:69039163-69039189; SpCas9
aattgcttgaacccgggaggtgg

SEQ ID NO: 30264 - DNA, 22 bp, Artificial Sequence
  Synthetic: FXN 3 forward 9:69039164-69039189; SpCas9
attgcttgaacccgggaggtgg

SEQ ID NO: 30265 - DNA, 21 bp, Artificial Sequence
  Synthetic: FXN 3 forward 9:69039165-69039189; SpCas9
ttgcttgaacccgggaggtgg

SEQ ID NO: 30266 - DNA, 20 bp, Artificial Sequence
  Synthetic: FXN 3 forward 9:69039166-69039189; SpCas9
tgcttgaacccgggaggtgg

SEQ ID NO: 30267 - DNA, 19 bp, Artificial Sequence
  Synthetic: FXN 3 forward 9:69039167-69039189; SpCas9
gcttgaacccgggaggtgg

SEQ ID NO: 30268 - DNA, 18 bp, Artificial Sequence
  Synthetic: FXN 3 forward 9:69039168-69039189; SpCas9
cttgaacccgggaggtgg

SEQ ID NO: 30269 - DNA, 25 bp, Artificial Sequence
  Synthetic: FXN 3 forward 9:69039163-69039191; SpCas9
aattgcttgaacccgggaggtggtg

SEQ ID NO: 30270 - DNA, 24 bp, Artificial Sequence
  Synthetic: FXN 3 forward 9:69039164-69039191; SpCas9
attgcttgaacccgggaggtggtg

SEQ ID NO: 30271 - DNA, 23 bp, Artificial Sequence
  Synthetic: FXN 3 forward 9:69039165-69039191; SpCas9
ttgcttgaacccgggaggtggtg

SEQ ID NO: 30272 - DNA, 22 bp, Artificial Sequence
  Synthetic: FXN 3 forward 9:69039166-69039191; SpCas9
tgcttgaacccgggaggtggtg

SEQ ID NO: 30273 - DNA, 21 bp, Artificial Sequence
  Synthetic: FXN 3 forward 9:69039167-69039191; SpCas9
gcttgaacccgggaggtggtg

SEQ ID NO: 30274 - DNA, 20 bp, Artificial Sequence
  Synthetic: FXN 3 forward 9:69039168-69039191; SpCas9
cttgaacccgggaggtggtg

SEQ ID NO: 30275 - DNA, 19 bp, Artificial Sequence
  Synthetic: FXN 3 forward 9:69039169-69039191; SpCas9
ttgaacccgggaggtggtg

SEQ ID NO: 30276 - DNA, 18 bp, Artificial Sequence
  Synthetic: FXN 3 forward 9:69039170-69039191; SpCas9
tgaacccgggaggtggtg

SEQ ID NO: 30277 - DNA, 25 bp, Artificial Sequence
  Synthetic: FXN 3 forward 9:69039164-69039192; SpCas9
attgcttgaacccgggaggtggtgg

SEQ ID NO: 30278 - DNA, 24 bp, Artificial Sequence
  Synthetic: FXN 3 forward 9:69039165-69039192; SpCas9
ttgcttgaacccgggaggtggtgg

SEQ ID NO: 30279 - DNA, 23 bp, Artificial Sequence
  Synthetic: FXN 3 forward 9:69039166-69039192; SpCas9
tgcttgaacccgggaggtggtgg

SEQ ID NO: 30280 - DNA, 22 bp, Artificial Sequence
  Synthetic: FXN 3 forward 9:69039167-69039192; SpCas9
gcttgaacccgggaggtggtgg

SEQ ID NO: 30281 - DNA, 21 bp, Artificial Sequence
  Synthetic: FXN 3 forward 9:69039168-69039192; SpCas9
cttgaacccgggaggtggtgg

SEQ ID NO: 30282 - DNA, 20 bp, Artificial Sequence
  Synthetic: FXN 3 forward 9:69039169-69039192; SpCas9
ttgaacccgggaggtggtgg

SEQ ID NO: 30283 - DNA, 19 bp, Artificial Sequence
  Synthetic: FXN 3 forward 9:69039170-69039192; SpCas9
tgaacccgggaggtggtgg

SEQ ID NO: 30284 - DNA, 18 bp, Artificial Sequence
  Synthetic: FXN 3 forward 9:69039171-69039192; SpCas9
gaacccgggaggtggtgg

SEQ ID NO: 30285 - DNA, 25 bp, Artificial Sequence
  Synthetic: FXN 3 reverse 9:69039168-69039196; SpCas9
gcaacctccaccacctcccgggttc

SEQ ID NO: 30286 - DNA, 24 bp, Artificial Sequence
  Synthetic: FXN 3 reverse 9:69039169-69039196; SpCas9
caacctccaccacctcccgggttc

SEQ ID NO: 30287 - DNA, 23 bp, Artificial Sequence
  Synthetic: FXN 3 reverse 9:69039170-69039196; SpCas9
aacctccaccacctcccgggttc

SEQ ID NO: 30288 - DNA, 22 bp, Artificial Sequence
  Synthetic: FXN 3 reverse 9:69039171-69039196; SpCas9
acctccaccacctcccgggttc

SEQ ID NO: 30289 - DNA, 21 bp, Artificial Sequence
  Synthetic: FXN 3 reverse 9:69039172-69039196; SpCas9
cctccaccacctcccgggttc

SEQ ID NO: 30290 - DNA, 20 bp, Artificial Sequence
  Synthetic: FXN 3 reverse 9:69039173-69039196; SpCas9
ctccaccacctcccgggttc

SEQ ID NO: 30291 - DNA, 19 bp, Artificial Sequence
  Synthetic: FXN 3 reverse 9:69039174-69039196; SpCas9
tccaccacctcccgggttc

SEQ ID NO: 30292 - DNA, 18 bp, Artificial Sequence
  Synthetic: FXN 3 reverse 9:69039175-69039196; SpCas9
ccaccacctcccgggttc

SEQ ID NO: 30293 - DNA, 25 bp, Artificial Sequence
  Synthetic: FXN 3 forward 9:69039170-69039198; SpCas9
tgaacccgggaggtggtggaggttg

SEQ ID NO: 30294 - DNA, 24 bp, Artificial Sequence
  Synthetic: FXN 3 forward 9:69039171-69039198; SpCas9
gaacccgggaggtggtggaggttg

SEQ ID NO: 30295 - DNA, 23 bp, Artificial Sequence
  Synthetic: FXN 3 forward 9:69039172-69039198; SpCas9
aacccgggaggtggtggaggttg

SEQ ID NO: 30296 - DNA, 22 bp, Artificial Sequence
  Synthetic: FXN 3 forward 9:69039173-69039198; SpCas9
acccgggaggtggtggaggttg

SEQ ID NO: 30297 - DNA, 21 bp, Artificial Sequence
  Synthetic: FXN 3 forward 9:69039174-69039198; SpCas9
cccgggaggtggtggaggttg

SEQ ID NO: 30298 - DNA, 20 bp, Artificial Sequence
  Synthetic: FXN 3 forward 9:69039175-69039198; SpCas9
ccgggaggtggtggaggttg

SEQ ID NO: 30299 - DNA, 19 bp, Artificial Sequence
  Synthetic: FXN 3 forward 9:69039176-69039198; SpCas9
cgggaggtggtggaggttg

SEQ ID NO: 30300 - DNA, 18 bp, Artificial Sequence
  Synthetic: FXN 3 forward 9:69039177-69039198; SpCas9
gggaggtggtggaggttg

SEQ ID NO: 30301 - DNA, 25 bp, Artificial Sequence
  Synthetic: FXN 3 forward 9:69039174-69039202; SpCas9
cccgggaggtggtggaggttgcagt

SEQ ID NO: 30302 - DNA, 24 bp, Artificial Sequence
  Synthetic: FXN 3 forward 9:69039175-69039202; SpCas9
ccgggaggtggtggaggttgcagt

SEQ ID NO: 30303 - DNA, 23 bp, Artificial Sequence
  Synthetic: FXN 3 forward 9:69039176-69039202; SpCas9
cgggaggtggtggaggttgcagt

SEQ ID NO: 30304 - DNA, 22 bp, Artificial Sequence
  Synthetic: FXN 3 forward 9:69039177-69039202; SpCas9
gggaggtggtggaggttgcagt

SEQ ID NO: 30305 - DNA, 21 bp, Artificial Sequence
  Synthetic: FXN 3 forward 9:69039178-69039202; SpCas9
ggaggtggtggaggttgcagt

SEQ ID NO: 30306 - DNA, 20 bp, Artificial Sequence
  Synthetic: FXN 3 forward 9:69039179-69039202; SpCas9
gaggtggtggaggttgcagt

SEQ ID NO: 30307 - DNA, 19 bp, Artificial Sequence
  Synthetic: FXN 3 forward 9:69039180-69039202; SpCas9
aggtggtggaggttgcagt

SEQ ID NO: 30308 - DNA, 18 bp, Artificial Sequence
  Synthetic: FXN 3 forward 9:69039181-69039202; SpCas9
ggtggtggaggttgcagt

SEQ ID NO: 30309 - DNA, 25 bp, Artificial Sequence
  Synthetic: FXN 3 reverse 9:69039174-69039202; SpCas9
ctcactgcaacctccaccacctccc

SEQ ID NO: 30310 - DNA, 24 bp, Artificial Sequence
  Synthetic: FXN 3 reverse 9:69039175-69039202; SpCas9
tcactgcaacctccaccacctccc

SEQ ID NO: 30311 - DNA, 23 bp, Artificial Sequence
  Synthetic: FXN 3 reverse 9:69039176-69039202; SpCas9
cactgcaacctccaccacctccc

SEQ ID NO: 30312 - DNA, 22 bp, Artificial Sequence
  Synthetic: FXN 3 reverse 9:69039177-69039202; SpCas9
actgcaacctccaccacctccc

SEQ ID NO: 30313 - DNA, 21 bp, Artificial Sequence
  Synthetic: FXN 3 reverse 9:69039178-69039202; SpCas9
ctgcaacctccaccacctccc

SEQ ID NO: 30314 - DNA, 20 bp, Artificial Sequence
  Synthetic: FXN 3 reverse 9:69039179-69039202; SpCas9
tgcaacctccaccacctccc

SEQ ID NO: 30315 - DNA, 19 bp, Artificial Sequence
  Synthetic: FXN 3 reverse 9:69039180-69039202; SpCas9
gcaacctccaccacctccc

SEQ ID NO: 30316 - DNA, 18 bp, Artificial Sequence
  Synthetic: FXN 3 reverse 9:69039181-69039202; SpCas9
caacctccaccacctccc

SEQ ID NO: 30317 - DNA, 25 bp, Artificial Sequence
  Synthetic: FXN 3 reverse 9:69039175-69039203; SpCas9
gctcactgcaacctccaccacctcc

SEQ ID NO: 30318 - DNA, 24 bp, Artificial Sequence
  Synthetic: FXN 3 reverse 9:69039176-69039203; SpCas9
ctcactgcaacctccaccacctcc

SEQ ID NO: 30319 - DNA, 23 bp, Artificial Sequence
  Synthetic: FXN 3 reverse 9:69039177-69039203; SpCas9
tcactgcaacctccaccacctcc

SEQ ID NO: 30320 - DNA, 22 bp, Artificial Sequence
  Synthetic: FXN 3 reverse 9:69039178-69039203; SpCas9
cactgcaacctccaccacctcc

SEQ ID NO: 30321 - DNA, 21 bp, Artificial Sequence
  Synthetic: FXN 3 reverse 9:69039179-69039203; SpCas9
actgcaacctccaccacctcc

SEQ ID NO: 30322 - DNA, 20 bp, Artificial Sequence
  Synthetic: FXN 3 reverse 9:69039180-69039203; SpCas9
ctgcaacctccaccacctcc

SEQ ID NO: 30323 - DNA, 19 bp, Artificial Sequence
  Synthetic: FXN 3 reverse 9:69039181-69039203; SpCas9
tgcaacctccaccacctcc

SEQ ID NO: 30324 - DNA, 18 bp, Artificial Sequence
  Synthetic: FXN 3 reverse 9:69039182-69039203; SpCas9
gcaacctccaccacctcc

SEQ ID NO: 30325 - DNA, 25 bp, Artificial Sequence
  Synthetic: FXN 3 forward 9:69039179-69039207; SpCas9
gaggtggtggaggttgcagtgagcc

SEQ ID NO: 30326 - DNA, 24 bp, Artificial Sequence
  Synthetic: FXN 3 forward 9:69039180-69039207; SpCas9
aggtggtggaggttgcagtgagcc

SEQ ID NO: 30327 - DNA, 23 bp, Artificial Sequence
  Synthetic: FXN 3 forward 9:69039181-69039207; SpCas9
ggtggtggaggttgcagtgagcc

SEQ ID NO: 30328 - DNA, 22 bp, Artificial Sequence
  Synthetic: FXN 3 forward 9:69039182-69039207; SpCas9
gtggtggaggttgcagtgagcc

SEQ ID NO: 30329 - DNA, 21 bp, Artificial Sequence
  Synthetic: FXN 3 forward 9:69039183-69039207; SpCas9
tggtggaggttgcagtgagcc

SEQ ID NO: 30330 - DNA, 20 bp, Artificial Sequence
  Synthetic: FXN 3 forward 9:69039184-69039207; SpCas9
ggtggaggttgcagtgagcc

SEQ ID NO: 30331 - DNA, 19 bp, Artificial Sequence
  Synthetic: FXN 3 forward 9:69039185-69039207; SpCas9
gtggaggttgcagtgagcc

SEQ ID NO: 30332 - DNA, 18 bp, Artificial Sequence
  Synthetic: FXN 3 forward 9:69039186-69039207; SpCas9
tggaggttgcagtgagcc

SEQ ID NO: 30333 - DNA, 25 bp, Artificial Sequence
  Synthetic: FXN 3 reverse 9:69039202-69039230; SpCas9
aggttggaaggcagtggtgcgatct

SEQ ID NO: 30334 - DNA, 24 bp, Artificial Sequence
  Synthetic: FXN 3 reverse 9:69039203-69039230; SpCas9
ggttggaaggcagtggtgcgatct

SEQ ID NO: 30335 - DNA, 23 bp, Artificial Sequence
  Synthetic: FXN 3 reverse 9:69039204-69039230; SpCas9
gttggaaggcagtggtgcgatct

SEQ ID NO: 30336 - DNA, 22 bp, Artificial Sequence
  Synthetic: FXN 3 reverse 9:69039205-69039230; SpCas9
ttggaaggcagtggtgcgatct

SEQ ID NO: 30337 - DNA, 21 bp, Artificial Sequence
  Synthetic: FXN 3 reverse 9:69039206-69039230; SpCas9
tggaaggcagtggtgcgatct

SEQ ID NO: 30338 - DNA, 20 bp, Artificial Sequence
  Synthetic: FXN 3 reverse 9:69039207-69039230; SpCas9
ggaaggcagtggtgcgatct

SEQ ID NO: 30339 - DNA, 19 bp, Artificial Sequence
  Synthetic: FXN 3 reverse 9:69039208-69039230; SpCas9
gaaggcagtggtgcgatct

SEQ ID NO: 30340 - DNA, 18 bp, Artificial Sequence
  Synthetic: FXN 3 reverse 9:69039209-69039230; SpCas9
aaggcagtggtgcgatct

SEQ ID NO: 30341 - DNA, 25 bp, Artificial Sequence
  Synthetic: FXN 3 forward 9:69039204-69039232; SpCas9
gagatcgcaccactgccttccaacc

SEQ ID NO: 30342 - DNA, 24 bp, Artificial Sequence
  Synthetic: FXN 3 forward 9:69039205-69039232; SpCas9
agatcgcaccactgccttccaacc

SEQ ID NO: 30343 - DNA, 23 bp, Artificial Sequence
  Synthetic: FXN 3 forward 9:69039206-69039232; SpCas9
gatcgcaccactgccttccaacc

SEQ ID NO: 30344 - DNA, 22 bp, Artificial Sequence
  Synthetic: FXN 3 forward 9:69039207-69039232; SpCas9
atcgcaccactgccttccaacc

SEQ ID NO: 30345 - DNA, 21 bp, Artificial Sequence
  Synthetic: FXN 3 forward 9:69039208-69039232; SpCas9
tcgcaccactgccttccaacc

SEQ ID NO: 30346 - DNA, 20 bp, Artificial Sequence
  Synthetic: FXN 3 forward 9:69039209-69039232; SpCas9
cgcaccactgccttccaacc

SEQ ID NO: 30347 - DNA, 19 bp, Artificial Sequence
  Synthetic: FXN 3 forward 9:69039210-69039232; SpCas9
gcaccactgccttccaacc

SEQ ID NO: 30348 - DNA, 18 bp, Artificial Sequence
  Synthetic: FXN 3 forward 9:69039211-69039232; SpCas9
caccactgccttccaacc

SEQ ID NO: 30349 - DNA, 25 bp, Artificial Sequence
  Synthetic: FXN 3 forward 9:69039205-69039233; SpCas9
agatcgcaccactgccttccaacct

SEQ ID NO: 30350 - DNA, 24 bp, Artificial Sequence
  Synthetic: FXN 3 forward 9:69039206-69039233; SpCas9
gatcgcaccactgccttccaacct

SEQ ID NO: 30351 - DNA, 23 bp, Artificial Sequence
  Synthetic: FXN 3 forward 9:69039207-69039233; SpCas9
atcgcaccactgccttccaacct

SEQ ID NO: 30352 - DNA, 22 bp, Artificial Sequence
  Synthetic: FXN 3 forward 9:69039208-69039233; SpCas9
tcgcaccactgccttccaacct

SEQ ID NO: 30353 - DNA, 21 bp, Artificial Sequence
  Synthetic: FXN 3 forward 9:69039209-69039233; SpCas9
cgcaccactgccttccaacct

SEQ ID NO: 30354 - DNA, 20 bp, Artificial Sequence
  Synthetic: FXN 3 forward 9:69039210-69039233; SpCas9
gcaccactgccttccaacct

SEQ ID NO: 30355 - DNA, 19 bp, Artificial Sequence
  Synthetic: FXN 3 forward 9:69039211-69039233; SpCas9
caccactgccttccaacct

SEQ ID NO: 30356 - DNA, 18 bp, Artificial Sequence
  Synthetic: FXN 3 forward 9:69039212-69039233; SpCas9
accactgccttccaacct

SEQ ID NO: 30357 - DNA, 25 bp, Artificial Sequence
  Synthetic: FXN 3 forward 9:69039211-69039239; SpCas9
caccactgccttccaacctgggcga

SEQ ID NO: 30358 - DNA, 24 bp, Artificial Sequence
  Synthetic: FXN 3 forward 9:69039212-69039239; SpCas9
accactgccttccaacctgggcga

SEQ ID NO: 30359 - DNA, 23 bp, Artificial Sequence
  Synthetic: FXN 3 forward 9:69039213-69039239; SpCas9
ccactgccttccaacctgggcga

SEQ ID NO: 30360 - DNA, 22 bp, Artificial Sequence
  Synthetic: FXN 3 forward 9:69039214-69039239; SpCas9
cactgccttccaacctgggcga

SEQ ID NO: 30361 - DNA, 21 bp, Artificial Sequence
  Synthetic: FXN 3 forward 9:69039215-69039239; SpCas9
actgccttccaacctgggcga

SEQ ID NO: 30362 - DNA, 20 bp, Artificial Sequence
  Synthetic: FXN 3 forward 9:69039216-69039239; SpCas9
ctgccttccaacctgggcga

SEQ ID NO: 30363 - DNA, 19 bp, Artificial Sequence
  Synthetic: FXN 3 forward 9:69039217-69039239; SpCas9
tgccttccaacctgggcga

SEQ ID NO: 30364 - DNA, 18 bp, Artificial Sequence
  Synthetic: FXN 3 forward 9:69039218-69039239; SpCas9
gccttccaacctgggcga

SEQ ID NO: 30365 - DNA, 25 bp, Artificial Sequence
  Synthetic: FXN 3 forward 9:69039213-69039241; SpCas9
ccactgccttccaacctgggcgaca

SEQ ID NO: 30366 - DNA, 24 bp, Artificial Sequence
  Synthetic: FXN 3 forward 9:69039214-69039241; SpCas9
cactgccttccaacctgggcgaca

SEQ ID NO: 30367 - DNA, 23 bp, Artificial Sequence
  Synthetic: FXN 3 forward 9:69039215-69039241; SpCas9
actgccttccaacctgggcgaca

SEQ ID NO: 30368 - DNA, 22 bp, Artificial Sequence
  Synthetic: FXN 3 forward 9:69039216-69039241; SpCas9
ctgccttccaacctgggcgaca

SEQ ID NO: 30369 - DNA, 21 bp, Artificial Sequence
  Synthetic: FXN 3 forward 9:69039217-69039241; SpCas9
tgccttccaacctgggcgaca

SEQ ID NO: 30370 - DNA, 20 bp, Artificial Sequence
  Synthetic: FXN 3 forward 9:69039218-69039241; SpCas9
gccttccaacctgggcgaca

SEQ ID NO: 30371 - DNA, 19 bp, Artificial Sequence
  Synthetic: FXN 3 forward 9:69039219-69039241; SpCas9
ccttccaacctgggcgaca

SEQ ID NO: 30372 - DNA, 18 bp, Artificial Sequence
  Synthetic: FXN 3 forward 9:69039220-69039241; SpCas9
cttccaacctgggcgaca

SEQ ID NO: 30373 - DNA, 25 bp, Artificial Sequence
  Synthetic: FXN 3 reverse 9:69039213-69039241; SpCas9
ctctgtcgcccaggttggaaggcag

SEQ ID NO: 30374 - DNA, 24 bp, Artificial Sequence
  Synthetic: FXN 3 reverse 9:69039214-69039241; SpCas9
tctgtcgcccaggttggaaggcag

SEQ ID NO: 30375 - DNA, 23 bp, Artificial Sequence
  Synthetic: FXN 3 reverse 9:69039215-69039241; SpCas9
ctgtcgcccaggttggaaggcag

SEQ ID NO: 30376 - DNA, 22 bp, Artificial Sequence
  Synthetic: FXN 3 reverse 9:69039216-69039241; SpCas9
tgtcgcccaggttggaaggcag

SEQ ID NO: 30377 - DNA, 21 bp, Artificial Sequence
  Synthetic: FXN 3 reverse 9:69039217-69039241; SpCas9
gtcgcccaggttggaaggcag

SEQ ID NO: 30378 - DNA, 20 bp, Artificial Sequence
  Synthetic: FXN 3 reverse 9:69039218-69039241; SpCas9
tcgcccaggttggaaggcag

SEQ ID NO: 30379 - DNA, 19 bp, Artificial Sequence
  Synthetic: FXN 3 reverse 9:69039219-69039241; SpCas9
cgcccaggttggaaggcag

SEQ ID NO: 30380 - DNA, 18 bp, Artificial Sequence
  Synthetic: FXN 3 reverse 9:69039220-69039241; SpCas9
gcccaggttggaaggcag

SEQ ID NO: 30381 - DNA, 25 bp, Artificial Sequence
  Synthetic: FXN 3 reverse 9:69039216-69039244; SpCas9
tcgctctgtcgcccaggttggaagg

SEQ ID NO: 30382 - DNA, 24 bp, Artificial Sequence
  Synthetic: FXN 3 reverse 9:69039217-69039244; SpCas9
cgctctgtcgcccaggttggaagg

SEQ ID NO: 30383 - DNA, 23 bp, Artificial Sequence
  Synthetic: FXN 3 reverse 9:69039218-69039244; SpCas9
gctctgtcgcccaggttggaagg

SEQ ID NO: 30384 - DNA, 22 bp, Artificial Sequence
  Synthetic: FXN 3 reverse 9:69039219-69039244; SpCas9
ctctgtcgcccaggttggaagg

SEQ ID NO: 30385 - DNA, 21 bp, Artificial Sequence
  Synthetic: FXN 3 reverse 9:69039220-69039244; SpCas9
tctgtcgcccaggttggaagg

SEQ ID NO: 30386 - DNA, 20 bp, Artificial Sequence
  Synthetic: FXN 3 reverse 9:69039221-69039244; SpCas9
ctgtcgcccaggttggaagg

SEQ ID NO: 30387 - DNA, 19 bp, Artificial Sequence
  Synthetic: FXN 3 reverse 9:69039222-69039244; SpCas9
tgtcgcccaggttggaagg

SEQ ID NO: 30388 - DNA, 18 bp, Artificial Sequence
  Synthetic: FXN 3 reverse 9:69039223-69039244; SpCas9
gtcgcccaggttggaagg

SEQ ID NO: 30389 - DNA, 25 bp, Artificial Sequence
  Synthetic: FXN 3 forward 9:69039217-69039245; SpCas9
tgccttccaacctgggcgacagagc

SEQ ID NO: 30390 - DNA, 24 bp, Artificial Sequence
  Synthetic: FXN 3 forward 9:69039218-69039245; SpCas9
gccttccaacctgggcgacagagc

SEQ ID NO: 30391 - DNA, 23 bp, Artificial Sequence
  Synthetic: FXN 3 forward 9:69039219-69039245; SpCas9
ccttccaacctgggcgacagagc

SEQ ID NO: 30392 - DNA, 22 bp, Artificial Sequence
  Synthetic: FXN 3 forward 9:69039220-69039245; SpCas9
cttccaacctgggcgacagagc

SEQ ID NO: 30393 - DNA, 21 bp, Artificial Sequence
  Synthetic: FXN 3 forward 9:69039221-69039245; SpCas9
ttccaacctgggcgacagagc

SEQ ID NO: 30394 - DNA, 20 bp, Artificial Sequence
  Synthetic: FXN 3 forward 9:69039222-69039245; SpCas9
tccaacctgggcgacagagc

SEQ ID NO: 30395 - DNA, 19 bp, Artificial Sequence
  Synthetic: FXN 3 forward 9:69039223-69039245; SpCas9
ccaacctgggcgacagagc

SEQ ID NO: 30396 - DNA, 18 bp, Artificial Sequence
  Synthetic: FXN 3 forward 9:69039224-69039245; SpCas9
caacctgggcgacagagc

SEQ ID NO: 30397 - DNA, 25 bp, Artificial Sequence
  Synthetic: FXN 3 reverse 9:69039219-69039247; SpCas9
gtctcgctctgtcgcccaggttgga

SEQ ID NO: 30398 - DNA, 24 bp, Artificial Sequence
  Synthetic: FXN 3 reverse 9:69039220-69039247; SpCas9
tctcgctctgtcgcccaggttgga

SEQ ID NO: 30399 - DNA, 23 bp, Artificial Sequence
  Synthetic: FXN 3 reverse 9:69039221-69039247; SpCas9
ctcgctctgtcgcccaggttgga

SEQ ID NO: 30400 - DNA, 22 bp, Artificial Sequence
  Synthetic: FXN 3 reverse 9:69039222-69039247; SpCas9
tcgctctgtcgcccaggttgga

SEQ ID NO: 30401 - DNA, 21 bp, Artificial Sequence
  Synthetic: FXN 3 reverse 9:69039223-69039247; SpCas9
cgctctgtcgcccaggttgga

SEQ ID NO: 30402 - DNA, 20 bp, Artificial Sequence
  Synthetic: FXN 3 reverse 9:69039224-69039247; SpCas9
gctctgtcgcccaggttgga

SEQ ID NO: 30403 - DNA, 19 bp, Artificial Sequence
  Synthetic: FXN 3 reverse 9:69039225-69039247; SpCas9
ctctgtcgcccaggttgga

SEQ ID NO: 30404 - DNA, 18 bp, Artificial Sequence
  Synthetic: FXN 3 reverse 9:69039226-69039247; SpCas9
tctgtcgcccaggttgga

SEQ ID NO: 30405 - DNA, 25 bp, Artificial Sequence
  Synthetic: FXN 3 reverse 9:69039220-69039248; SpCas9
agtctcgctctgtcgcccaggttgg

SEQ ID NO: 30406 - DNA, 24 bp, Artificial Sequence
  Synthetic: FXN 3 reverse 9:69039221-69039248; SpCas9
gtctcgctctgtcgcccaggttgg

SEQ ID NO: 30407 - DNA, 23 bp, Artificial Sequence
  Synthetic: FXN 3 reverse 9:69039222-69039248; SpCas9
tctcgctctgtcgcccaggttgg

SEQ ID NO: 30408 - DNA, 22 bp, Artificial Sequence
  Synthetic: FXN 3 reverse 9:69039223-69039248; SpCas9
ctcgctctgtcgcccaggttgg

SEQ ID NO: 30409 - DNA, 21 bp, Artificial Sequence
  Synthetic: FXN 3 reverse 9:69039224-69039248; SpCas9
tcgctctgtcgcccaggttgg

SEQ ID NO: 30410 - DNA, 20 bp, Artificial Sequence
  Synthetic: FXN 3 reverse 9:69039225-69039248; SpCas9
cgctctgtcgcccaggttgg

SEQ ID NO: 30411 - DNA, 19 bp, Artificial Sequence
  Synthetic: FXN 3 reverse 9:69039226-69039248; SpCas9
gctctgtcgcccaggttgg

SEQ ID NO: 30412 - DNA, 18 bp, Artificial Sequence
  Synthetic: FXN 3 reverse 9:69039227-69039248; SpCas9
ctctgtcgcccaggttgg

SEQ ID NO: 30413 - DNA, 25 bp, Artificial Sequence
  Synthetic: FXN 3 reverse 9:69039223-69039251; SpCas9
cggagtctcgctctgtcgcccaggt

SEQ ID NO: 30414 - DNA, 24 bp, Artificial Sequence
  Synthetic: FXN 3 reverse 9:69039224-69039251; SpCas9
ggagtctcgctctgtcgcccaggt

SEQ ID NO: 30415 - DNA, 23 bp, Artificial Sequence
  Synthetic: FXN 3 reverse 9:69039225-69039251; SpCas9
gagtctcgctctgtcgcccaggt

SEQ ID NO: 30416 - DNA, 22 bp, Artificial Sequence
  Synthetic: FXN 3 reverse 9:69039226-69039251; SpCas9
agtctcgctctgtcgcccaggt

SEQ ID NO: 30417 - DNA, 21 bp, Artificial Sequence
  Synthetic: FXN 3 reverse 9:69039227-69039251; SpCas9
gtctcgctctgtcgcccaggt

SEQ ID NO: 30418 - DNA, 20 bp, Artificial Sequence
  Synthetic: FXN 3 reverse 9:69039228-69039251; SpCas9
tctcgctctgtcgcccaggt

SEQ ID NO: 30419 - DNA, 19 bp, Artificial Sequence
  Synthetic: FXN 3 reverse 9:69039229-69039251; SpCas9
ctcgctctgtcgcccaggt

SEQ ID NO: 30420 - DNA, 18 bp, Artificial Sequence
  Synthetic: FXN 3 reverse 9:69039230-69039251; SpCas9
tcgctctgtcgcccaggt

SEQ ID NO: 30421 - DNA, 25 bp, Artificial Sequence
  Synthetic: FXN 3 reverse 9:69039227-69039255; SpCas9
gagacggagtctcgctctgtcgccc

SEQ ID NO: 30422 - DNA, 24 bp, Artificial Sequence
  Synthetic: FXN 3 reverse 9:69039228-69039255; SpCas9
agacggagtctcgctctgtcgccc

SEQ ID NO: 30423 - DNA, 23 bp, Artificial Sequence
  Synthetic: FXN 3 reverse 9:69039229-69039255; SpCas9
gacggagtctcgctctgtcgccc

SEQ ID NO: 30424 - DNA, 22 bp, Artificial Sequence
  Synthetic: FXN 3 reverse 9:69039230-69039255; SpCas9
acggagtctcgctctgtcgccc

SEQ ID NO: 30425 - DNA, 21 bp, Artificial Sequence
  Synthetic: FXN 3 reverse 9:69039231-69039255; SpCas9
cggagtctcgctctgtcgccc

SEQ ID NO: 30426 - DNA, 20 bp, Artificial Sequence
  Synthetic: FXN 3 reverse 9:69039232-69039255; SpCas9
ggagtctcgctctgtcgccc

SEQ ID NO: 30427 - DNA, 19 bp, Artificial Sequence
  Synthetic: FXN 3 reverse 9:69039233-69039255; SpCas9
gagtctcgctctgtcgccc

SEQ ID NO: 30428 - DNA, 18 bp, Artificial Sequence
  Synthetic: FXN 3 reverse 9:69039234-69039255; SpCas9
agtctcgctctgtcgccc

SEQ ID NO: 30429 - DNA, 25 bp, Artificial Sequence
  Synthetic: FXN 3 reverse 9:69039228-69039256; SpCas9
tgagacggagtctcgctctgtcgcc

SEQ ID NO: 30430 - DNA, 24 bp, Artificial Sequence
  Synthetic: FXN 3 reverse 9:69039229-69039256; SpCas9
gagacggagtctcgctctgtcgcc

SEQ ID NO: 30431 - DNA, 23 bp, Artificial Sequence
  Synthetic: FXN 3 reverse 9:69039230-69039256; SpCas9
agacggagtctcgctctgtcgcc

SEQ ID NO: 30432 - DNA, 22 bp, Artificial Sequence
  Synthetic: FXN 3 reverse 9:69039231-69039256; SpCas9
gacggagtctcgctctgtcgcc

SEQ ID NO: 30433 - DNA, 21 bp, Artificial Sequence
  Synthetic: FXN 3 reverse 9:69039232-69039256; SpCas9
acggagtctcgctctgtcgcc

SEQ ID NO: 30434 - DNA, 20 bp, Artificial Sequence
  Synthetic: FXN 3 reverse 9:69039233-69039256; SpCas9
cggagtctcgctctgtcgcc

SEQ ID NO: 30435 - DNA, 19 bp, Artificial Sequence
  Synthetic: FXN 3 reverse 9:69039234-69039256; SpCas9
ggagtctcgctctgtcgcc

SEQ ID NO: 30436 - DNA, 18 bp, Artificial Sequence
  Synthetic: FXN 3 reverse 9:69039235-69039256; SpCas9
gagtctcgctctgtcgcc

SEQ ID NO: 30437 - DNA, 25 bp, Artificial Sequence
  Synthetic: FXN 3 forward 9:69039242-69039270; SpCas9
gagactccgtctcaaaaaaaaaaaa

SEQ ID NO: 30438 - DNA, 24 bp, Artificial Sequence
  Synthetic: FXN 3 forward 9:69039243-69039270; SpCas9
agactccgtctcaaaaaaaaaaaa

SEQ ID NO: 30439 - DNA, 23 bp, Artificial Sequence
  Synthetic: FXN 3 forward 9:69039244-69039270; SpCas9
gactccgtctcaaaaaaaaaaaa

SEQ ID NO: 30440 - DNA, 22 bp, Artificial Sequence
  Synthetic: FXN 3 forward 9:69039245-69039270; SpCas9
actccgtctcaaaaaaaaaaaa

SEQ ID NO: 30441 - DNA, 21 bp, Artificial Sequence
  Synthetic: FXN 3 forward 9:69039246-69039270; SpCas9
ctccgtctcaaaaaaaaaaaa

SEQ ID NO: 30442 - DNA, 20 bp, Artificial Sequence
  Synthetic: FXN 3 forward 9:69039247-69039270; SpCas9
tccgtctcaaaaaaaaaaaa

SEQ ID NO: 30443 - DNA, 19 bp, Artificial Sequence
  Synthetic: FXN 3 forward 9:69039248-69039270; SpCas9
ccgtctcaaaaaaaaaaaa

SEQ ID NO: 30444 - DNA, 18 bp, Artificial Sequence
  Synthetic: FXN 3 forward 9:69039249-69039270; SpCas9
cgtctcaaaaaaaaaaaa

SEQ ID NO: 30445 - DNA, 25 bp, Artificial Sequence
  Synthetic: FXN 3 forward 9:69039243-69039271; SpCas9
agactccgtctcaaaaaaaaaaaaa

SEQ ID NO: 30446 - DNA, 24 bp, Artificial Sequence
  Synthetic: FXN 3 forward 9:69039244-69039271; SpCas9
gactccgtctcaaaaaaaaaaaaa

SEQ ID NO: 30447 - DNA, 23 bp, Artificial Sequence
  Synthetic: FXN 3 forward 9:69039245-69039271; SpCas9
actccgtctcaaaaaaaaaaaaa

SEQ ID NO: 30448 - DNA, 22 bp, Artificial Sequence
  Synthetic: FXN 3 forward 9:69039246-69039271; SpCas9
ctccgtctcaaaaaaaaaaaaa

SEQ ID NO: 30449 - DNA, 21 bp, Artificial Sequence
  Synthetic: FXN 3 forward 9:69039247-69039271; SpCas9
tccgtctcaaaaaaaaaaaaa

SEQ ID NO: 30450 - DNA, 20 bp, Artificial Sequence
  Synthetic: FXN 3 forward 9:69039248-69039271; SpCas9
ccgtctcaaaaaaaaaaaaa

SEQ ID NO: 30451 - DNA, 19 bp, Artificial Sequence
  Synthetic: FXN 3 forward 9:69039249-69039271; SpCas9
cgtctcaaaaaaaaaaaaa

SEQ ID NO: 30452 - DNA, 18 bp, Artificial Sequence
  Synthetic: FXN 3 forward 9:69039250-69039271; SpCas9
gtctcaaaaaaaaaaaaa

SEQ ID NO: 30453 - DNA, 25 bp, Artificial Sequence
  Synthetic: FXN 3 reverse 9:69039246-69039274; SpCas9
gagccttttttttttttttgagacg

SEQ ID NO: 30454 - DNA, 24 bp, Artificial Sequence
  Synthetic: FXN 3 reverse 9:69039247-69039274; SpCas9
agccttttttttttttttgagacg

SEQ ID NO: 30455 - DNA, 23 bp, Artificial Sequence
  Synthetic: FXN 3 reverse 9:69039248-69039274; SpCas9
gccttttttttttttttgagacg

SEQ ID NO: 30456 - DNA, 22 bp, Artificial Sequence
  Synthetic: FXN 3 reverse 9:69039249-69039274; SpCas9
ccttttttttttttttgagacg

SEQ ID NO: 30457 - DNA, 21 bp, Artificial Sequence
  Synthetic: FXN 3 reverse 9:69039250-69039274; SpCas9
cttttttttttttttgagacg

SEQ ID NO: 30458 - DNA, 20 bp, Artificial Sequence
  Synthetic: FXN 3 reverse 9:69039251-69039274; SpCas9
ttttttttttttttgagacg

SEQ ID NO: 30459 - DNA, 19 bp, Artificial Sequence
  Synthetic: FXN 3 reverse 9:69039252-69039274; SpCas9
tttttttttttttgagacg

SEQ ID NO: 30460 - DNA, 18 bp, Artificial Sequence
  Synthetic: FXN 3 reverse 9:69039253-69039274; SpCas9
ttttttttttttgagacg

SEQ ID NO: 30461 - DNA, 25 bp, Artificial Sequence
  Synthetic: FXN 3 reverse 9:69039248-69039276; SpCas9
aggagccttttttttttttttgaga

SEQ ID NO: 30462 - DNA, 24 bp, Artificial Sequence
  Synthetic: FXN 3 reverse 9:69039249-69039276; SpCas9
ggagccttttttttttttttgaga

SEQ ID NO: 30463 - DNA, 23 bp, Artificial Sequence
  Synthetic: FXN 3 reverse 9:69039250-69039276; SpCas9
gagccttttttttttttttgaga

SEQ ID NO: 30464 - DNA, 22 bp, Artificial Sequence
  Synthetic: FXN 3 reverse 9:69039251-69039276; SpCas9
agccttttttttttttttgaga

SEQ ID NO: 30465 - DNA, 21 bp, Artificial Sequence
  Synthetic: FXN 3 reverse 9:69039252-69039276; SpCas9
gccttttttttttttttgaga

SEQ ID NO: 30466 - DNA, 20 bp, Artificial Sequence
  Synthetic: FXN 3 reverse 9:69039253-69039276; SpCas9
ccttttttttttttttgaga

SEQ ID NO: 30467 - DNA, 19 bp, Artificial Sequence
  Synthetic: FXN 3 reverse 9:69039254-69039276; SpCas9
cttttttttttttttgaga

SEQ ID NO: 30468 - DNA, 18 bp, Artificial Sequence
  Synthetic: FXN 3 reverse 9:69039255-69039276; SpCas9
ttttttttttttttgaga

SEQ ID NO: 30469 - DNA, 25 bp, Artificial Sequence
  Synthetic: FXN 3 reverse 9:69039252-69039280; SpCas9
tattaggagcctttttttttttttt

SEQ ID NO: 30470 - DNA, 24 bp, Artificial Sequence
  Synthetic: FXN 3 reverse 9:69039253-69039280; SpCas9
attaggagcctttttttttttttt

SEQ ID NO: 30471 - DNA, 23 bp, Artificial Sequence
  Synthetic: FXN 3 reverse 9:69039254-69039280; SpCas9
ttaggagcctttttttttttttt

SEQ ID NO: 30472 - DNA, 22 bp, Artificial Sequence
  Synthetic: FXN 3 reverse 9:69039255-69039280; SpCas9
taggagcctttttttttttttt

SEQ ID NO: 30473 - DNA, 21 bp, Artificial Sequence
  Synthetic: FXN 3 reverse 9:69039256-69039280; SpCas9
aggagcctttttttttttttt

SEQ ID NO: 30474 - DNA, 20 bp, Artificial Sequence
  Synthetic: FXN 3 reverse 9:69039257-69039280; SpCas9
ggagcctttttttttttttt

SEQ ID NO: 30475 - DNA, 19 bp, Artificial Sequence
  Synthetic: FXN 3 reverse 9:69039258-69039280; SpCas9
gagcctttttttttttttt

SEQ ID NO: 30476 - DNA, 18 bp, Artificial Sequence
  Synthetic: FXN 3 reverse 9:69039259-69039280; SpCas9
agcctttttttttttttt

SEQ ID NO: 30477 - DNA, 25 bp, Artificial Sequence
  Synthetic: FXN 3 reverse 9:69039271-69039299; SpCas9
gataataaagtaataaagttattag

SEQ ID NO: 30478 - DNA, 24 bp, Artificial Sequence
  Synthetic: FXN 3 reverse 9:69039272-69039299; SpCas9
ataataaagtaataaagttattag

SEQ ID NO: 30479 - DNA, 23 bp, Artificial Sequence
  Synthetic: FXN 3 reverse 9:69039273-69039299; SpCas9
taataaagtaataaagttattag

SEQ ID NO: 30480 - DNA, 22 bp, Artificial Sequence
  Synthetic: FXN 3 reverse 9:69039274-69039299; SpCas9
aataaagtaataaagttattag

SEQ ID NO: 30481 - DNA, 21 bp, Artificial Sequence
  Synthetic: FXN 3 reverse 9:69039275-69039299; SpCas9
ataaagtaataaagttattag

SEQ ID NO: 30482 - DNA, 20 bp, Artificial Sequence
  Synthetic: FXN 3 reverse 9:69039276-69039299; SpCas9
taaagtaataaagttattag

SEQ ID NO: 30483 - DNA, 19 bp, Artificial Sequence
  Synthetic: FXN 3 reverse 9:69039277-69039299; SpCas9
aaagtaataaagttattag

SEQ ID NO: 30484 - DNA, 18 bp, Artificial Sequence
  Synthetic: FXN 3 reverse 9:69039278-69039299; SpCas9
aagtaataaagttattag

SEQ ID NO: 30485 - DNA, 25 bp, Artificial Sequence
  Synthetic: FXN 3 reverse 9:69039273-69039301; SpCas9
gtgataataaagtaataaagttatt

SEQ ID NO: 30486 - DNA, 24 bp, Artificial Sequence
  Synthetic: FXN 3 reverse 9:69039274-69039301; SpCas9
tgataataaagtaataaagttatt

SEQ ID NO: 30487 - DNA, 23 bp, Artificial Sequence
  Synthetic: FXN 3 reverse 9:69039275-69039301; SpCas9
gataataaagtaataaagttatt

SEQ ID NO: 30488 - DNA, 22 bp, Artificial Sequence
  Synthetic: FXN 3 reverse 9:69039276-69039301; SpCas9
ataataaagtaataaagttatt

SEQ ID NO: 30489 - DNA, 21 bp, Artificial Sequence
  Synthetic: FXN 3 reverse 9:69039277-69039301; SpCas9
taataaagtaataaagttatt

SEQ ID NO: 30490 - DNA, 20 bp, Artificial Sequence
  Synthetic: FXN 3 reverse 9:69039278-69039301; SpCas9
aataaagtaataaagttatt

SEQ ID NO: 30491 - DNA, 19 bp, Artificial Sequence
  Synthetic: FXN 3 reverse 9:69039279-69039301; SpCas9
ataaagtaataaagttatt

SEQ ID NO: 30492 - DNA, 18 bp, Artificial Sequence
  Synthetic: FXN 3 reverse 9:69039280-69039301; SpCas9
taaagtaataaagttatt

SEQ ID NO: 30493 - DNA, 25 bp, Artificial Sequence
  Synthetic: FXN 3 reverse 9:69039274-69039302; SpCas9
ggtgataataaagtaataaagttat

SEQ ID NO: 30494 - DNA, 24 bp, Artificial Sequence
  Synthetic: FXN 3 reverse 9:69039275-69039302; SpCas9
gtgataataaagtaataaagttat

SEQ ID NO: 30495 - DNA, 23 bp, Artificial Sequence
  Synthetic: FXN 3 reverse 9:69039276-69039302; SpCas9
tgataataaagtaataaagttat

SEQ ID NO: 30496 - DNA, 22 bp, Artificial Sequence
  Synthetic: FXN 3 reverse 9:69039277-69039302; SpCas9
gataataaagtaataaagttat

SEQ ID NO: 30497 - DNA, 21 bp, Artificial Sequence
  Synthetic: FXN 3 reverse 9:69039278-69039302; SpCas9
ataataaagtaataaagttat

SEQ ID NO: 30498 - DNA, 20 bp, Artificial Sequence
  Synthetic: FXN 3 reverse 9:69039279-69039302; SpCas9
taataaagtaataaagttat

SEQ ID NO: 30499 - DNA, 19 bp, Artificial Sequence
  Synthetic: FXN 3 reverse 9:69039280-69039302; SpCas9
aataaagtaataaagttat

SEQ ID NO: 30500 - DNA, 18 bp, Artificial Sequence
  Synthetic: FXN 3 reverse 9:69039281-69039302; SpCas9
ataaagtaataaagttat

SEQ ID NO: 30501 - DNA, 25 bp, Artificial Sequence
  Synthetic: FXN 3 reverse 9:69039281-69039309; SpCas9
tatttgaggtgataataaagtaata

SEQ ID NO: 30502 - DNA, 24 bp, Artificial Sequence
  Synthetic: FXN 3 reverse 9:69039282-69039309; SpCas9
atttgaggtgataataaagtaata

SEQ ID NO: 30503 - DNA, 23 bp, Artificial Sequence
  Synthetic: FXN 3 reverse 9:69039283-69039309; SpCas9
tttgaggtgataataaagtaata

SEQ ID NO: 30504 - DNA, 22 bp, Artificial Sequence
  Synthetic: FXN 3 reverse 9:69039284-69039309; SpCas9
ttgaggtgataataaagtaata

SEQ ID NO: 30505 - DNA, 21 bp, Artificial Sequence
  Synthetic: FXN 3 reverse 9:69039285-69039309; SpCas9
tgaggtgataataaagtaata

SEQ ID NO: 30506 - DNA, 20 bp, Artificial Sequence
  Synthetic: FXN 3 reverse 9:69039286-69039309; SpCas9
gaggtgataataaagtaata

SEQ ID NO: 30507 - DNA, 19 bp, Artificial Sequence
  Synthetic: FXN 3 reverse 9:69039287-69039309; SpCas9
aggtgataataaagtaata

SEQ ID NO: 30508 - DNA, 18 bp, Artificial Sequence
  Synthetic: FXN 3 reverse 9:69039288-69039309; SpCas9
ggtgataataaagtaata

SEQ ID NO: 30509 - DNA, 25 bp, Artificial Sequence
  Synthetic: FXN 3 reverse 9:69039289-69039317; SpCas9
attttaattatttgaggtgataata

SEQ ID NO: 30510 - DNA, 24 bp, Artificial Sequence
  Synthetic: FXN 3 reverse 9:69039290-69039317; SpCas9
ttttaattatttgaggtgataata

SEQ ID NO: 30511 - DNA, 23 bp, Artificial Sequence
  Synthetic: FXN 3 reverse 9:69039291-69039317; SpCas9
tttaattatttgaggtgataata

SEQ ID NO: 30512 - DNA, 22 bp, Artificial Sequence
  Synthetic: FXN 3 reverse 9:69039292-69039317; SpCas9
ttaattatttgaggtgataata

SEQ ID NO: 30513 - DNA, 21 bp, Artificial Sequence
  Synthetic: FXN 3 reverse 9:69039293-69039317; SpCas9
taattatttgaggtgataata

SEQ ID NO: 30514 - DNA, 20 bp, Artificial Sequence
  Synthetic: FXN 3 reverse 9:69039294-69039317; SpCas9
aattatttgaggtgataata

SEQ ID NO: 30515 - DNA, 19 bp, Artificial Sequence
  Synthetic: FXN 3 reverse 9:69039295-69039317; SpCas9
attatttgaggtgataata

SEQ ID NO: 30516 - DNA, 18 bp, Artificial Sequence
  Synthetic: FXN 3 reverse 9:69039296-69039317; SpCas9
ttatttgaggtgataata

SEQ ID NO: 30517 - DNA, 25 bp, Artificial Sequence
  Synthetic: FXN 3 forward 9:69039298-69039326; SpCas9
cacctcaaataattaaaattaaatg

SEQ ID NO: 30518 - DNA, 24 bp, Artificial Sequence
  Synthetic: FXN 3 forward 9:69039299-69039326; SpCas9
acctcaaataattaaaattaaatg

SEQ ID NO: 30519 - DNA, 23 bp, Artificial Sequence
  Synthetic: FXN 3 forward 9:69039300-69039326; SpCas9
cctcaaataattaaaattaaatg

SEQ ID NO: 30520 - DNA, 22 bp, Artificial Sequence
  Synthetic: FXN 3 forward 9:69039301-69039326; SpCas9
ctcaaataattaaaattaaatg

SEQ ID NO: 30521 - DNA, 21 bp, Artificial Sequence
  Synthetic: FXN 3 forward 9:69039302-69039326; SpCas9
tcaaataattaaaattaaatg

SEQ ID NO: 30522 - DNA, 20 bp, Artificial Sequence
  Synthetic: FXN 3 forward 9:69039303-69039326; SpCas9
caaataattaaaattaaatg

SEQ ID NO: 30523 - DNA, 19 bp, Artificial Sequence
  Synthetic: FXN 3 forward 9:69039304-69039326; SpCas9
aaataattaaaattaaatg

SEQ ID NO: 30524 - DNA, 18 bp, Artificial Sequence
  Synthetic: FXN 3 forward 9:69039305-69039326; SpCas9
aataattaaaattaaatg

SEQ ID NO: 30525 - DNA, 25 bp, Artificial Sequence
  Synthetic: FXN 3 reverse 9:69039300-69039328; SpCas9
aacttcatttaattttaattatttg

SEQ ID NO: 30526 - DNA, 24 bp, Artificial Sequence
  Synthetic: FXN 3 reverse 9:69039301-69039328; SpCas9
acttcatttaattttaattatttg

SEQ ID NO: 30527 - DNA, 23 bp, Artificial Sequence
  Synthetic: FXN 3 reverse 9:69039302-69039328; SpCas9
cttcatttaattttaattatttg

SEQ ID NO: 30528 - DNA, 22 bp, Artificial Sequence
  Synthetic: FXN 3 reverse 9:69039303-69039328; SpCas9
ttcatttaattttaattatttg

SEQ ID NO: 30529 - DNA, 21 bp, Artificial Sequence
  Synthetic: FXN 3 reverse 9:69039304-69039328; SpCas9
tcatttaattttaattatttg

SEQ ID NO: 30530 - DNA, 20 bp, Artificial Sequence
  Synthetic: FXN 3 reverse 9:69039305-69039328; SpCas9
catttaattttaattatttg

SEQ ID NO: 30531 - DNA, 19 bp, Artificial Sequence
  Synthetic: FXN 3 reverse 9:69039306-69039328; SpCas9
atttaattttaattatttg

SEQ ID NO: 30532 - DNA, 18 bp, Artificial Sequence
  Synthetic: FXN 3 reverse 9:69039307-69039328; SpCas9
tttaattttaattatttg

SEQ ID NO: 30533 - DNA, 25 bp, Artificial Sequence
  Synthetic: FXN 3 reverse 9:69039301-69039329; SpCas9
caacttcatttaattttaattattt

SEQ ID NO: 30534 - DNA, 24 bp, Artificial Sequence
  Synthetic: FXN 3 reverse 9:69039302-69039329; SpCas9
aacttcatttaattttaattattt

SEQ ID NO: 30535 - DNA, 23 bp, Artificial Sequence
  Synthetic: FXN 3 reverse 9:69039303-69039329; SpCas9
acttcatttaattttaattattt

SEQ ID NO: 30536 - DNA, 22 bp, Artificial Sequence
  Synthetic: FXN 3 reverse 9:69039304-69039329; SpCas9
cttcatttaattttaattattt

SEQ ID NO: 30537 - DNA, 21 bp, Artificial Sequence
  Synthetic: FXN 3 reverse 9:69039305-69039329; SpCas9
ttcatttaattttaattattt

SEQ ID NO: 30538 - DNA, 20 bp, Artificial Sequence
  Synthetic: FXN 3 reverse 9:69039306-69039329; SpCas9
tcatttaattttaattattt

SEQ ID NO: 30539 - DNA, 19 bp, Artificial Sequence
  Synthetic: FXN 3 reverse 9:69039307-69039329; SpCas9
catttaattttaattattt

SEQ ID NO: 30540 - DNA, 18 bp, Artificial Sequence
  Synthetic: FXN 3 reverse 9:69039308-69039329; SpCas9
atttaattttaattattt

SEQ ID NO: 30541 - DNA, 25 bp, Artificial Sequence
  Synthetic: FXN 3 forward 9:69039310-69039338; SpCas9
ttaaaattaaatgaagttgaaaatc

SEQ ID NO: 30542 - DNA, 24 bp, Artificial Sequence
  Synthetic: FXN 3 forward 9:69039311-69039338; SpCas9
taaaattaaatgaagttgaaaatc

SEQ ID NO: 30543 - DNA, 23 bp, Artificial Sequence
  Synthetic: FXN 3 forward 9:69039312-69039338; SpCas9
aaaattaaatgaagttgaaaatc

SEQ ID NO: 30544 - DNA, 22 bp, Artificial Sequence
  Synthetic: FXN 3 forward 9:69039313-69039338; SpCas9
aaattaaatgaagttgaaaatc

SEQ ID NO: 30545 - DNA, 21 bp, Artificial Sequence
  Synthetic: FXN 3 forward 9:69039314-69039338; SpCas9
aattaaatgaagttgaaaatc

SEQ ID NO: 30546 - DNA, 20 bp, Artificial Sequence
  Synthetic: FXN 3 forward 9:69039315-69039338; SpCas9
attaaatgaagttgaaaatc

SEQ ID NO: 30547 - DNA, 19 bp, Artificial Sequence
  Synthetic: FXN 3 forward 9:69039316-69039338; SpCas9
ttaaatgaagttgaaaatc

SEQ ID NO: 30548 - DNA, 18 bp, Artificial Sequence
  Synthetic: FXN 3 forward 9:69039317-69039338; SpCas9
taaatgaagttgaaaatc

SEQ ID NO: 30549 - DNA, 25 bp, Artificial Sequence
  Synthetic: FXN 3 forward 9:69039311-69039339; SpCas9
taaaattaaatgaagttgaaaatcc

SEQ ID NO: 30550 - DNA, 24 bp, Artificial Sequence
  Synthetic: FXN 3 forward 9:69039312-69039339; SpCas9
aaaattaaatgaagttgaaaatcc

SEQ ID NO: 30551 - DNA, 23 bp, Artificial Sequence
  Synthetic: FXN 3 forward 9:69039313-69039339; SpCas9
aaattaaatgaagttgaaaatcc

SEQ ID NO: 30552 - DNA, 22 bp, Artificial Sequence
  Synthetic: FXN 3 forward 9:69039314-69039339; SpCas9
aattaaatgaagttgaaaatcc

SEQ ID NO: 30553 - DNA, 21 bp, Artificial Sequence
  Synthetic: FXN 3 forward 9:69039315-69039339; SpCas9
attaaatgaagttgaaaatcc

SEQ ID NO: 30554 - DNA, 20 bp, Artificial Sequence
  Synthetic: FXN 3 forward 9:69039316-69039339; SpCas9
ttaaatgaagttgaaaatcc

SEQ ID NO: 30555 - DNA, 19 bp, Artificial Sequence
  Synthetic: FXN 3 forward 9:69039317-69039339; SpCas9
taaatgaagttgaaaatcc

SEQ ID NO: 30556 - DNA, 18 bp, Artificial Sequence
  Synthetic: FXN 3 forward 9:69039318-69039339; SpCas9
aaatgaagttgaaaatcc

SEQ ID NO: 30557 - DNA, 25 bp, Artificial Sequence
  Synthetic: FXN 3 forward 9:69039318-69039346; SpCas9
aaatgaagttgaaaatccaggtcct

SEQ ID NO: 30558 - DNA, 24 bp, Artificial Sequence
  Synthetic: FXN 3 forward 9:69039319-69039346; SpCas9
aatgaagttgaaaatccaggtcct

SEQ ID NO: 30559 - DNA, 23 bp, Artificial Sequence
  Synthetic: FXN 3 forward 9:69039320-69039346; SpCas9
atgaagttgaaaatccaggtcct

SEQ ID NO: 30560 - DNA, 22 bp, Artificial Sequence
  Synthetic: FXN 3 forward 9:69039321-69039346; SpCas9
tgaagttgaaaatccaggtcct

SEQ ID NO: 30561 - DNA, 21 bp, Artificial Sequence
  Synthetic: FXN 3 forward 9:69039322-69039346; SpCas9
gaagttgaaaatccaggtcct

SEQ ID NO: 30562 - DNA, 20 bp, Artificial Sequence
  Synthetic: FXN 3 forward 9:69039323-69039346; SpCas9
aagttgaaaatccaggtcct

SEQ ID NO: 30563 - DNA, 19 bp, Artificial Sequence
  Synthetic: FXN 3 forward 9:69039324-69039346; SpCas9
agttgaaaatccaggtcct

SEQ ID NO: 30564 - DNA, 18 bp, Artificial Sequence
  Synthetic: FXN 3 forward 9:69039325-69039346; SpCas9
gttgaaaatccaggtcct

SEQ ID NO: 30565 - DNA, 25 bp, Artificial Sequence
  Synthetic: FXN 3 forward 9:69039327-69039355; SpCas9
tgaaaatccaggtcctcagtcccat

SEQ ID NO: 30566 - DNA, 24 bp, Artificial Sequence
  Synthetic: FXN 3 forward 9:69039328-69039355; SpCas9
gaaaatccaggtcctcagtcccat

SEQ ID NO: 30567 - DNA, 23 bp, Artificial Sequence
  Synthetic: FXN 3 forward 9:69039329-69039355; SpCas9
aaaatccaggtcctcagtcccat

SEQ ID NO: 30568 - DNA, 22 bp, Artificial Sequence
  Synthetic: FXN 3 forward 9:69039330-69039355; SpCas9
aaatccaggtcctcagtcccat

SEQ ID NO: 30569 - DNA, 21 bp, Artificial Sequence
  Synthetic: FXN 3 forward 9:69039331-69039355; SpCas9
aatccaggtcctcagtcccat

SEQ ID NO: 30570 - DNA, 20 bp, Artificial Sequence
  Synthetic: FXN 3 forward 9:69039332-69039355; SpCas9
atccaggtcctcagtcccat

SEQ ID NO: 30571 - DNA, 19 bp, Artificial Sequence
  Synthetic: FXN 3 forward 9:69039333-69039355; SpCas9
tccaggtcctcagtcccat

SEQ ID NO: 30572 - DNA, 18 bp, Artificial Sequence
  Synthetic: FXN 3 forward 9:69039334-69039355; SpCas9
ccaggtcctcagtcccat

SEQ ID NO: 30573 - DNA, 25 bp, Artificial Sequence
  Synthetic: FXN 3 reverse 9:69039334-69039362; SpCas9
aatgtggctaatgggactgaggacc

SEQ ID NO: 30574 - DNA, 24 bp, Artificial Sequence
  Synthetic: FXN 3 reverse 9:69039335-69039362; SpCas9
atgtggctaatgggactgaggacc

SEQ ID NO: 30575 - DNA, 23 bp, Artificial Sequence
  Synthetic: FXN 3 reverse 9:69039336-69039362; SpCas9
tgtggctaatgggactgaggacc

SEQ ID NO: 30576 - DNA, 22 bp, Artificial Sequence
  Synthetic: FXN 3 reverse 9:69039337-69039362; SpCas9
gtggctaatgggactgaggacc

SEQ ID NO: 30577 - DNA, 21 bp, Artificial Sequence
  Synthetic: FXN 3 reverse 9:69039338-69039362; SpCas9
tggctaatgggactgaggacc

SEQ ID NO: 30578 - DNA, 20 bp, Artificial Sequence
  Synthetic: FXN 3 reverse 9:69039339-69039362; SpCas9
ggctaatgggactgaggacc

SEQ ID NO: 30579 - DNA, 19 bp, Artificial Sequence
  Synthetic: FXN 3 reverse 9:69039340-69039362; SpCas9
gctaatgggactgaggacc

SEQ ID NO: 30580 - DNA, 18 bp, Artificial Sequence
  Synthetic: FXN 3 reverse 9:69039341-69039362; SpCas9
ctaatgggactgaggacc

SEQ ID NO: 30581 - DNA, 25 bp, Artificial Sequence
  Synthetic: FXN 3 forward 9:69039339-69039367; SpCas9
tcctcagtcccattagccacatttc

SEQ ID NO: 30582 - DNA, 24 bp, Artificial Sequence
  Synthetic: FXN 3 forward 9:69039340-69039367; SpCas9
cctcagtcccattagccacatttc

SEQ ID NO: 30583 - DNA, 23 bp, Artificial Sequence
  Synthetic: FXN 3 forward 9:69039341-69039367; SpCas9
ctcagtcccattagccacatttc

SEQ ID NO: 30584 - DNA, 22 bp, Artificial Sequence
  Synthetic: FXN 3 forward 9:69039342-69039367; SpCas9
tcagtcccattagccacatttc

SEQ ID NO: 30585 - DNA, 21 bp, Artificial Sequence
  Synthetic: FXN 3 forward 9:69039343-69039367; SpCas9
cagtcccattagccacatttc

SEQ ID NO: 30586 - DNA, 20 bp, Artificial Sequence
  Synthetic: FXN 3 forward 9:69039344-69039367; SpCas9
agtcccattagccacatttc

SEQ ID NO: 30587 - DNA, 19 bp, Artificial Sequence
  Synthetic: FXN 3 forward 9:69039345-69039367; SpCas9
gtcccattagccacatttc

SEQ ID NO: 30588 - DNA, 18 bp, Artificial Sequence
  Synthetic: FXN 3 forward 9:69039346-69039367; SpCas9
tcccattagccacatttc

SEQ ID NO: 30589 - DNA, 25 bp, Artificial Sequence
  Synthetic: FXN 3 reverse 9:69039340-69039368; SpCas9
actagaaatgtggctaatgggactg

SEQ ID NO: 30590 - DNA, 24 bp, Artificial Sequence
  Synthetic: FXN 3 reverse 9:69039341-69039368; SpCas9
ctagaaatgtggctaatgggactg

SEQ ID NO: 30591 - DNA, 23 bp, Artificial Sequence
  Synthetic: FXN 3 reverse 9:69039342-69039368; SpCas9
tagaaatgtggctaatgggactg

SEQ ID NO: 30592 - DNA, 22 bp, Artificial Sequence
  Synthetic: FXN 3 reverse 9:69039343-69039368; SpCas9
agaaatgtggctaatgggactg

SEQ ID NO: 30593 - DNA, 21 bp, Artificial Sequence
  Synthetic: FXN 3 reverse 9:69039344-69039368; SpCas9
gaaatgtggctaatgggactg

SEQ ID NO: 30594 - DNA, 20 bp, Artificial Sequence
  Synthetic: FXN 3 reverse 9:69039345-69039368; SpCas9
aaatgtggctaatgggactg

SEQ ID NO: 30595 - DNA, 19 bp, Artificial Sequence
  Synthetic: FXN 3 reverse 9:69039346-69039368; SpCas9
aatgtggctaatgggactg

SEQ ID NO: 30596 - DNA, 18 bp, Artificial Sequence
  Synthetic: FXN 3 reverse 9:69039347-69039368; SpCas9
atgtggctaatgggactg

SEQ ID NO: 30597 - DNA, 25 bp, Artificial Sequence
  Synthetic: FXN 3 reverse 9:69039341-69039369; SpCas9
cactagaaatgtggctaatgggact

SEQ ID NO: 30598 - DNA, 24 bp, Artificial Sequence
  Synthetic: FXN 3 reverse 9:69039342-69039369; SpCas9
actagaaatgtggctaatgggact

SEQ ID NO: 30599 - DNA, 23 bp, Artificial Sequence
  Synthetic: FXN 3 reverse 9:69039343-69039369; SpCas9
ctagaaatgtggctaatgggact

SEQ ID NO: 30600 - DNA, 22 bp, Artificial Sequence
  Synthetic: FXN 3 reverse 9:69039344-69039369; SpCas9
tagaaatgtggctaatgggact

SEQ ID NO: 30601 - DNA, 21 bp, Artificial Sequence
  Synthetic: FXN 3 reverse 9:69039345-69039369; SpCas9
agaaatgtggctaatgggact

SEQ ID NO: 30602 - DNA, 20 bp, Artificial Sequence
  Synthetic: FXN 3 reverse 9:69039346-69039369; SpCas9
gaaatgtggctaatgggact

SEQ ID NO: 30603 - DNA, 19 bp, Artificial Sequence
  Synthetic: FXN 3 reverse 9:69039347-69039369; SpCas9
aaatgtggctaatgggact

SEQ ID NO: 30604 - DNA, 18 bp, Artificial Sequence
  Synthetic: FXN 3 reverse 9:69039348-69039369; SpCas9
aatgtggctaatgggact

SEQ ID NO: 30605 - DNA, 25 bp, Artificial Sequence
  Synthetic: FXN 3 forward 9:69039346-69039374; SpCas9
tcccattagccacatttctagtgct

SEQ ID NO: 30606 - DNA, 24 bp, Artificial Sequence
  Synthetic: FXN 3 forward 9:69039347-69039374; SpCas9
cccattagccacatttctagtgct

SEQ ID NO: 30607 - DNA, 23 bp, Artificial Sequence
  Synthetic: FXN 3 forward 9:69039348-69039374; SpCas9
ccattagccacatttctagtgct

SEQ ID NO: 30608 - DNA, 22 bp, Artificial Sequence
  Synthetic: FXN 3 forward 9:69039349-69039374; SpCas9
cattagccacatttctagtgct

SEQ ID NO: 30609 - DNA, 21 bp, Artificial Sequence
  Synthetic: FXN 3 forward 9:69039350-69039374; SpCas9
attagccacatttctagtgct

SEQ ID NO: 30610 - DNA, 20 bp, Artificial Sequence
  Synthetic: FXN 3 forward 9:69039351-69039374; SpCas9
ttagccacatttctagtgct

SEQ ID NO: 30611 - DNA, 19 bp, Artificial Sequence
  Synthetic: FXN 3 forward 9:69039352-69039374; SpCas9
tagccacatttctagtgct

SEQ ID NO: 30612 - DNA, 18 bp, Artificial Sequence
  Synthetic: FXN 3 forward 9:69039353-69039374; SpCas9
agccacatttctagtgct

SEQ ID NO: 30613 - DNA, 25 bp, Artificial Sequence
  Synthetic: FXN 3 reverse 9:69039347-69039375; SpCas9
actgagcactagaaatgtggctaat

SEQ ID NO: 30614 - DNA, 24 bp, Artificial Sequence
  Synthetic: FXN 3 reverse 9:69039348-69039375; SpCas9
ctgagcactagaaatgtggctaat

SEQ ID NO: 30615 - DNA, 23 bp, Artificial Sequence
  Synthetic: FXN 3 reverse 9:69039349-69039375; SpCas9
tgagcactagaaatgtggctaat

SEQ ID NO: 30616 - DNA, 22 bp, Artificial Sequence
  Synthetic: FXN 3 reverse 9:69039350-69039375; SpCas9
gagcactagaaatgtggctaat

SEQ ID NO: 30617 - DNA, 21 bp, Artificial Sequence
  Synthetic: FXN 3 reverse 9:69039351-69039375; SpCas9
agcactagaaatgtggctaat

SEQ ID NO: 30618 - DNA, 20 bp, Artificial Sequence
  Synthetic: FXN 3 reverse 9:69039352-69039375; SpCas9
gcactagaaatgtggctaat

SEQ ID NO: 30619 - DNA, 19 bp, Artificial Sequence
  Synthetic: FXN 3 reverse 9:69039353-69039375; SpCas9
cactagaaatgtggctaat

SEQ ID NO: 30620 - DNA, 18 bp, Artificial Sequence
  Synthetic: FXN 3 reverse 9:69039354-69039375; SpCas9
actagaaatgtggctaat

SEQ ID NO: 30621 - DNA, 25 bp, Artificial Sequence
  Synthetic: FXN 3 reverse 9:69039348-69039376; SpCas9
tactgagcactagaaatgtggctaa

SEQ ID NO: 30622 - DNA, 24 bp, Artificial Sequence
  Synthetic: FXN 3 reverse 9:69039349-69039376; SpCas9
actgagcactagaaatgtggctaa

SEQ ID NO: 30623 - DNA, 23 bp, Artificial Sequence
  Synthetic: FXN 3 reverse 9:69039350-69039376; SpCas9
ctgagcactagaaatgtggctaa

SEQ ID NO: 30624 - DNA, 22 bp, Artificial Sequence
  Synthetic: FXN 3 reverse 9:69039351-69039376; SpCas9
tgagcactagaaatgtggctaa

SEQ ID NO: 30625 - DNA, 21 bp, Artificial Sequence
  Synthetic: FXN 3 reverse 9:69039352-69039376; SpCas9
gagcactagaaatgtggctaa

SEQ ID NO: 30626 - DNA, 20 bp, Artificial Sequence
  Synthetic: FXN 3 reverse 9:69039353-69039376; SpCas9
agcactagaaatgtggctaa

SEQ ID NO: 30627 - DNA, 19 bp, Artificial Sequence
  Synthetic: FXN 3 reverse 9:69039354-69039376; SpCas9
gcactagaaatgtggctaa

SEQ ID NO: 30628 - DNA, 18 bp, Artificial Sequence
  Synthetic: FXN 3 reverse 9:69039355-69039376; SpCas9
cactagaaatgtggctaa

SEQ ID NO: 30629 - DNA, 25 bp, Artificial Sequence
  Synthetic: FXN 3 forward 9:69039349-69039377; SpCas9
cattagccacatttctagtgctcag

SEQ ID NO: 30630 - DNA, 24 bp, Artificial Sequence
  Synthetic: FXN 3 forward 9:69039350-69039377; SpCas9
attagccacatttctagtgctcag

SEQ ID NO: 30631 - DNA, 23 bp, Artificial Sequence
  Synthetic: FXN 3 forward 9:69039351-69039377; SpCas9
ttagccacatttctagtgctcag

SEQ ID NO: 30632 - DNA, 22 bp, Artificial Sequence
  Synthetic: FXN 3 forward 9:69039352-69039377; SpCas9
tagccacatttctagtgctcag

SEQ ID NO: 30633 - DNA, 21 bp, Artificial Sequence
  Synthetic: FXN 3 forward 9:69039353-69039377; SpCas9
agccacatttctagtgctcag

SEQ ID NO: 30634 - DNA, 20 bp, Artificial Sequence
  Synthetic: FXN 3 forward 9:69039354-69039377; SpCas9
gccacatttctagtgctcag

SEQ ID NO: 30635 - DNA, 19 bp, Artificial Sequence
  Synthetic: FXN 3 forward 9:69039355-69039377; SpCas9
ccacatttctagtgctcag

SEQ ID NO: 30636 - DNA, 18 bp, Artificial Sequence
  Synthetic: FXN 3 forward 9:69039356-69039377; SpCas9
cacatttctagtgctcag

SEQ ID NO: 30637 - DNA, 25 bp, Artificial Sequence
  Synthetic: FXN 3 forward 9:69039355-69039383; SpCas9
ccacatttctagtgctcagtagcca

SEQ ID NO: 30638 - DNA, 24 bp, Artificial Sequence
  Synthetic: FXN 3 forward 9:69039356-69039383; SpCas9
cacatttctagtgctcagtagcca

SEQ ID NO: 30639 - DNA, 23 bp, Artificial Sequence
  Synthetic: FXN 3 forward 9:69039357-69039383; SpCas9
acatttctagtgctcagtagcca

SEQ ID NO: 30640 - DNA, 22 bp, Artificial Sequence
  Synthetic: FXN 3 forward 9:69039358-69039383; SpCas9
catttctagtgctcagtagcca

SEQ ID NO: 30641 - DNA, 21 bp, Artificial Sequence
  Synthetic: FXN 3 forward 9:69039359-69039383; SpCas9
atttctagtgctcagtagcca

SEQ ID NO: 30642 - DNA, 20 bp, Artificial Sequence
  Synthetic: FXN 3 forward 9:69039360-69039383; SpCas9
tttctagtgctcagtagcca

SEQ ID NO: 30643 - DNA, 19 bp, Artificial Sequence
  Synthetic: FXN 3 forward 9:69039361-69039383; SpCas9
ttctagtgctcagtagcca

SEQ ID NO: 30644 - DNA, 18 bp, Artificial Sequence
  Synthetic: FXN 3 forward 9:69039362-69039383; SpCas9
tctagtgctcagtagcca

SEQ ID NO: 30645 - DNA, 25 bp, Artificial Sequence
  Synthetic: FXN 3 reverse 9:69039355-69039383; SpCas9
ccgtggctactgagcactagaaatg

SEQ ID NO: 30646 - DNA, 24 bp, Artificial Sequence
  Synthetic: FXN 3 reverse 9:69039356-69039383; SpCas9
cgtggctactgagcactagaaatg

SEQ ID NO: 30647 - DNA, 23 bp, Artificial Sequence
  Synthetic: FXN 3 reverse 9:69039357-69039383; SpCas9
gtggctactgagcactagaaatg

SEQ ID NO: 30648 - DNA, 22 bp, Artificial Sequence
  Synthetic: FXN 3 reverse 9:69039358-69039383; SpCas9
tggctactgagcactagaaatg

SEQ ID NO: 30649 - DNA, 21 bp, Artificial Sequence
  Synthetic: FXN 3 reverse 9:69039359-69039383; SpCas9
ggctactgagcactagaaatg

SEQ ID NO: 30650 - DNA, 20 bp, Artificial Sequence
  Synthetic: FXN 3 reverse 9:69039360-69039383; SpCas9
gctactgagcactagaaatg

SEQ ID NO: 30651 - DNA, 19 bp, Artificial Sequence
  Synthetic: FXN 3 reverse 9:69039361-69039383; SpCas9
ctactgagcactagaaatg

SEQ ID NO: 30652 - DNA, 18 bp, Artificial Sequence
  Synthetic: FXN 3 reverse 9:69039362-69039383; SpCas9
tactgagcactagaaatg

SEQ ID NO: 30653 - DNA, 25 bp, Artificial Sequence
  Synthetic: FXN 3 forward 9:69039356-69039384; SpCas9
cacatttctagtgctcagtagccac

SEQ ID NO: 30654 - DNA, 24 bp, Artificial Sequence
  Synthetic: FXN 3 forward 9:69039357-69039384; SpCas9
acatttctagtgctcagtagccac

SEQ ID NO: 30655 - DNA, 23 bp, Artificial Sequence
  Synthetic: FXN 3 forward 9:69039358-69039384; SpCas9
catttctagtgctcagtagccac

SEQ ID NO: 30656 - DNA, 22 bp, Artificial Sequence
  Synthetic: FXN 3 forward 9:69039359-69039384; SpCas9
atttctagtgctcagtagccac

SEQ ID NO: 30657 - DNA, 21 bp, Artificial Sequence
  Synthetic: FXN 3 forward 9:69039360-69039384; SpCas9
tttctagtgctcagtagccac

SEQ ID NO: 30658 - DNA, 20 bp, Artificial Sequence
  Synthetic: FXN 3 forward 9:69039361-69039384; SpCas9
ttctagtgctcagtagccac

SEQ ID NO: 30659 - DNA, 19 bp, Artificial Sequence
  Synthetic: FXN 3 forward 9:69039362-69039384; SpCas9
tctagtgctcagtagccac

SEQ ID NO: 30660 - DNA, 18 bp, Artificial Sequence
  Synthetic: FXN 3 forward 9:69039363-69039384; SpCas9
ctagtgctcagtagccac

SEQ ID NO: 30661 - DNA, 25 bp, Artificial Sequence
  Synthetic: FXN 3 forward 9:69039357-69039385; SpCas9
acatttctagtgctcagtagccacg

SEQ ID NO: 30662 - DNA, 24 bp, Artificial Sequence
  Synthetic: FXN 3 forward 9:69039358-69039385; SpCas9
catttctagtgctcagtagccacg

SEQ ID NO: 30663 - DNA, 23 bp, Artificial Sequence
  Synthetic: FXN 3 forward 9:69039359-69039385; SpCas9
atttctagtgctcagtagccacg

SEQ ID NO: 30664 - DNA, 22 bp, Artificial Sequence
  Synthetic: FXN 3 forward 9:69039360-69039385; SpCas9
tttctagtgctcagtagccacg

SEQ ID NO: 30665 - DNA, 21 bp, Artificial Sequence
  Synthetic: FXN 3 forward 9:69039361-69039385; SpCas9
ttctagtgctcagtagccacg

SEQ ID NO: 30666 - DNA, 20 bp, Artificial Sequence
  Synthetic: FXN 3 forward 9:69039362-69039385; SpCas9
tctagtgctcagtagccacg

SEQ ID NO: 30667 - DNA, 19 bp, Artificial Sequence
  Synthetic: FXN 3 forward 9:69039363-69039385; SpCas9
ctagtgctcagtagccacg

SEQ ID NO: 30668 - DNA, 18 bp, Artificial Sequence
  Synthetic: FXN 3 forward 9:69039364-69039385; SpCas9
tagtgctcagtagccacg

SEQ ID NO: 30669 - DNA, 25 bp, Artificial Sequence
  Synthetic: FXN 3 forward 9:69039358-69039386; SpCas9
catttctagtgctcagtagccacgg

SEQ ID NO: 30670 - DNA, 24 bp, Artificial Sequence
  Synthetic: FXN 3 forward 9:69039359-69039386; SpCas9
atttctagtgctcagtagccacgg

SEQ ID NO: 30671 - DNA, 23 bp, Artificial Sequence
  Synthetic: FXN 3 forward 9:69039360-69039386; SpCas9
tttctagtgctcagtagccacgg

SEQ ID NO: 30672 - DNA, 22 bp, Artificial Sequence
  Synthetic: FXN 3 forward 9:69039361-69039386; SpCas9
ttctagtgctcagtagccacgg

SEQ ID NO: 30673 - DNA, 21 bp, Artificial Sequence
  Synthetic: FXN 3 forward 9:69039362-69039386; SpCas9
tctagtgctcagtagccacgg

SEQ ID NO: 30674 - DNA, 20 bp, Artificial Sequence
  Synthetic: FXN 3 forward 9:69039363-69039386; SpCas9
ctagtgctcagtagccacgg

SEQ ID NO: 30675 - DNA, 19 bp, Artificial Sequence
  Synthetic: FXN 3 forward 9:69039364-69039386; SpCas9
tagtgctcagtagccacgg

SEQ ID NO: 30676 - DNA, 18 bp, Artificial Sequence
  Synthetic: FXN 3 forward 9:69039365-69039386; SpCas9
agtgctcagtagccacgg

SEQ ID NO: 30677 - DNA, 25 bp, Artificial Sequence
  Synthetic: FXN 3 forward 9:69039362-69039390; SpCas9
tctagtgctcagtagccacgggggc

SEQ ID NO: 30678 - DNA, 24 bp, Artificial Sequence
  Synthetic: FXN 3 forward 9:69039363-69039390; SpCas9
ctagtgctcagtagccacgggggc

SEQ ID NO: 30679 - DNA, 23 bp, Artificial Sequence
  Synthetic: FXN 3 forward 9:69039364-69039390; SpCas9
tagtgctcagtagccacgggggc

SEQ ID NO: 30680 - DNA, 22 bp, Artificial Sequence
  Synthetic: FXN 3 forward 9:69039365-69039390; SpCas9
agtgctcagtagccacgggggc

SEQ ID NO: 30681 - DNA, 21 bp, Artificial Sequence
  Synthetic: FXN 3 forward 9:69039366-69039390; SpCas9
gtgctcagtagccacgggggc

SEQ ID NO: 30682 - DNA, 20 bp, Artificial Sequence
  Synthetic: FXN 3 forward 9:69039367-69039390; SpCas9
tgctcagtagccacgggggc

SEQ ID NO: 30683 - DNA, 19 bp, Artificial Sequence
  Synthetic: FXN 3 forward 9:69039368-69039390; SpCas9
gctcagtagccacgggggc

SEQ ID NO: 30684 - DNA, 18 bp, Artificial Sequence
  Synthetic: FXN 3 forward 9:69039369-69039390; SpCas9
ctcagtagccacgggggc

SEQ ID NO: 30685 - DNA, 25 bp, Artificial Sequence
  Synthetic: FXN 3 reverse 9:69039363-69039391; SpCas9
accagcccccgtggctactgagcac

SEQ ID NO: 30686 - DNA, 24 bp, Artificial Sequence
  Synthetic: FXN 3 reverse 9:69039364-69039391; SpCas9
ccagcccccgtggctactgagcac

SEQ ID NO: 30687 - DNA, 23 bp, Artificial Sequence
  Synthetic: FXN 3 reverse 9:69039365-69039391; SpCas9
cagcccccgtggctactgagcac

SEQ ID NO: 30688 - DNA, 22 bp, Artificial Sequence
  Synthetic: FXN 3 reverse 9:69039366-69039391; SpCas9
agcccccgtggctactgagcac

SEQ ID NO: 30689 - DNA, 21 bp, Artificial Sequence
  Synthetic: FXN 3 reverse 9:69039367-69039391; SpCas9
gcccccgtggctactgagcac

SEQ ID NO: 30690 - DNA, 20 bp, Artificial Sequence
  Synthetic: FXN 3 reverse 9:69039368-69039391; SpCas9
cccccgtggctactgagcac

SEQ ID NO: 30691 - DNA, 19 bp, Artificial Sequence
  Synthetic: FXN 3 reverse 9:69039369-69039391; SpCas9
ccccgtggctactgagcac

SEQ ID NO: 30692 - DNA, 18 bp, Artificial Sequence
  Synthetic: FXN 3 reverse 9:69039370-69039391; SpCas9
cccgtggctactgagcac

SEQ ID NO: 30693 - DNA, 25 bp, Artificial Sequence
  Synthetic: FXN 3 reverse 9:69039369-69039397; SpCas9
gtggtcaccagcccccgtggctact

SEQ ID NO: 30694 - DNA, 24 bp, Artificial Sequence
  Synthetic: FXN 3 reverse 9:69039370-69039397; SpCas9
tggtcaccagcccccgtggctact

SEQ ID NO: 30695 - DNA, 23 bp, Artificial Sequence
  Synthetic: FXN 3 reverse 9:69039371-69039397; SpCas9
ggtcaccagcccccgtggctact

SEQ ID NO: 30696 - DNA, 22 bp, Artificial Sequence
  Synthetic: FXN 3 reverse 9:69039372-69039397; SpCas9
gtcaccagcccccgtggctact

SEQ ID NO: 30697 - DNA, 21 bp, Artificial Sequence
  Synthetic: FXN 3 reverse 9:69039373-69039397; SpCas9
tcaccagcccccgtggctact

SEQ ID NO: 30698 - DNA, 20 bp, Artificial Sequence
  Synthetic: FXN 3 reverse 9:69039374-69039397; SpCas9
caccagcccccgtggctact

SEQ ID NO: 30699 - DNA, 19 bp, Artificial Sequence
  Synthetic: FXN 3 reverse 9:69039375-69039397; SpCas9
accagcccccgtggctact

SEQ ID NO: 30700 - DNA, 18 bp, Artificial Sequence
  Synthetic: FXN 3 reverse 9:69039376-69039397; SpCas9
ccagcccccgtggctact

SEQ ID NO: 30701 - DNA, 25 bp, Artificial Sequence
  Synthetic: FXN 3 forward 9:69039376-69039404; SpCas9
gccacgggggctggtgaccaccaca

SEQ ID NO: 30702 - DNA, 24 bp, Artificial Sequence
  Synthetic: FXN 3 forward 9:69039377-69039404; SpCas9
ccacgggggctggtgaccaccaca

SEQ ID NO: 30703 - DNA, 23 bp, Artificial Sequence
  Synthetic: FXN 3 forward 9:69039378-69039404; SpCas9
cacgggggctggtgaccaccaca

SEQ ID NO: 30704 - DNA, 22 bp, Artificial Sequence
  Synthetic: FXN 3 forward 9:69039379-69039404; SpCas9
acgggggctggtgaccaccaca

SEQ ID NO: 30705 - DNA, 21 bp, Artificial Sequence
  Synthetic: FXN 3 forward 9:69039380-69039404; SpCas9
cgggggctggtgaccaccaca

SEQ ID NO: 30706 - DNA, 20 bp, Artificial Sequence
  Synthetic: FXN 3 forward 9:69039381-69039404; SpCas9
gggggctggtgaccaccaca

SEQ ID NO: 30707 - DNA, 19 bp, Artificial Sequence
  Synthetic: FXN 3 forward 9:69039382-69039404; SpCas9
ggggctggtgaccaccaca

SEQ ID NO: 30708 - DNA, 18 bp, Artificial Sequence
  Synthetic: FXN 3 forward 9:69039383-69039404; SpCas9
gggctggtgaccaccaca

SEQ ID NO: 30709 - DNA, 25 bp, Artificial Sequence
  Synthetic: FXN 3 forward 9:69039377-69039405; SpCas9
ccacgggggctggtgaccaccacat

SEQ ID NO: 30710 - DNA, 24 bp, Artificial Sequence
  Synthetic: FXN 3 forward 9:69039378-69039405; SpCas9
cacgggggctggtgaccaccacat

SEQ ID NO: 30711 - DNA, 23 bp, Artificial Sequence
  Synthetic: FXN 3 forward 9:69039379-69039405; SpCas9
acgggggctggtgaccaccacat

SEQ ID NO: 30712 - DNA, 22 bp, Artificial Sequence
  Synthetic: FXN 3 forward 9:69039380-69039405; SpCas9
cgggggctggtgaccaccacat

SEQ ID NO: 30713 - DNA, 21 bp, Artificial Sequence
  Synthetic: FXN 3 forward 9:69039381-69039405; SpCas9
gggggctggtgaccaccacat

SEQ ID NO: 30714 - DNA, 20 bp, Artificial Sequence
  Synthetic: FXN 3 forward 9:69039382-69039405; SpCas9
ggggctggtgaccaccacat

SEQ ID NO: 30715 - DNA, 19 bp, Artificial Sequence
  Synthetic: FXN 3 forward 9:69039383-69039405; SpCas9
gggctggtgaccaccacat

SEQ ID NO: 30716 - DNA, 18 bp, Artificial Sequence
  Synthetic: FXN 3 forward 9:69039384-69039405; SpCas9
ggctggtgaccaccacat

SEQ ID NO: 30717 - DNA, 25 bp, Artificial Sequence
  Synthetic: FXN 3 reverse 9:69039377-69039405; SpCas9
cccatgtggtggtcaccagcccccg

SEQ ID NO: 30718 - DNA, 24 bp, Artificial Sequence
  Synthetic: FXN 3 reverse 9:69039378-69039405; SpCas9
ccatgtggtggtcaccagcccccg

SEQ ID NO: 30719 - DNA, 23 bp, Artificial Sequence
  Synthetic: FXN 3 reverse 9:69039379-69039405; SpCas9
catgtggtggtcaccagcccccg

SEQ ID NO: 30720 - DNA, 22 bp, Artificial Sequence
  Synthetic: FXN 3 reverse 9:69039380-69039405; SpCas9
atgtggtggtcaccagcccccg

SEQ ID NO: 30721 - DNA, 21 bp, Artificial Sequence
  Synthetic: FXN 3 reverse 9:69039381-69039405; SpCas9
tgtggtggtcaccagcccccg

SEQ ID NO: 30722 - DNA, 20 bp, Artificial Sequence
  Synthetic: FXN 3 reverse 9:69039382-69039405; SpCas9
gtggtggtcaccagcccccg

SEQ ID NO: 30723 - DNA, 19 bp, Artificial Sequence
  Synthetic: FXN 3 reverse 9:69039383-69039405; SpCas9
tggtggtcaccagcccccg

SEQ ID NO: 30724 - DNA, 18 bp, Artificial Sequence
  Synthetic: FXN 3 reverse 9:69039384-69039405; SpCas9
ggtggtcaccagcccccg

SEQ ID NO: 30725 - DNA, 25 bp, Artificial Sequence
  Synthetic: FXN 3 forward 9:69039381-69039409; SpCas9
gggggctggtgaccaccacatggga

SEQ ID NO: 30726 - DNA, 24 bp, Artificial Sequence
  Synthetic: FXN 3 forward 9:69039382-69039409; SpCas9
ggggctggtgaccaccacatggga

SEQ ID NO: 30727 - DNA, 23 bp, Artificial Sequence
  Synthetic: FXN 3 forward 9:69039383-69039409; SpCas9
gggctggtgaccaccacatggga

SEQ ID NO: 30728 - DNA, 22 bp, Artificial Sequence
  Synthetic: FXN 3 forward 9:69039384-69039409; SpCas9
ggctggtgaccaccacatggga

SEQ ID NO: 30729 - DNA, 21 bp, Artificial Sequence
  Synthetic: FXN 3 forward 9:69039385-69039409; SpCas9
gctggtgaccaccacatggga

SEQ ID NO: 30730 - DNA, 20 bp, Artificial Sequence
  Synthetic: FXN 3 forward 9:69039386-69039409; SpCas9
ctggtgaccaccacatggga

SEQ ID NO: 30731 - DNA, 19 bp, Artificial Sequence
  Synthetic: FXN 3 forward 9:69039387-69039409; SpCas9
tggtgaccaccacatggga

SEQ ID NO: 30732 - DNA, 18 bp, Artificial Sequence
  Synthetic: FXN 3 forward 9:69039388-69039409; SpCas9
ggtgaccaccacatggga

SEQ ID NO: 30733 - DNA, 25 bp, Artificial Sequence
  Synthetic: FXN 3 reverse 9:69039386-69039414; SpCas9
atatgctgtcccatgtggtggtcac

SEQ ID NO: 30734 - DNA, 24 bp, Artificial Sequence
  Synthetic: FXN 3 reverse 9:69039387-69039414; SpCas9
tatgctgtcccatgtggtggtcac

SEQ ID NO: 30735 - DNA, 23 bp, Artificial Sequence
  Synthetic: FXN 3 reverse 9:69039388-69039414; SpCas9
atgctgtcccatgtggtggtcac

SEQ ID NO: 30736 - DNA, 22 bp, Artificial Sequence
  Synthetic: FXN 3 reverse 9:69039389-69039414; SpCas9
tgctgtcccatgtggtggtcac

SEQ ID NO: 30737 - DNA, 21 bp, Artificial Sequence
  Synthetic: FXN 3 reverse 9:69039390-69039414; SpCas9
gctgtcccatgtggtggtcac

SEQ ID NO: 30738 - DNA, 20 bp, Artificial Sequence
  Synthetic: FXN 3 reverse 9:69039391-69039414; SpCas9
ctgtcccatgtggtggtcac

SEQ ID NO: 30739 - DNA, 19 bp, Artificial Sequence
  Synthetic: FXN 3 reverse 9:69039392-69039414; SpCas9
tgtcccatgtggtggtcac

SEQ ID NO: 30740 - DNA, 18 bp, Artificial Sequence
  Synthetic: FXN 3 reverse 9:69039393-69039414; SpCas9
gtcccatgtggtggtcac

SEQ ID NO: 30741 - DNA, 25 bp, Artificial Sequence
  Synthetic: FXN 3 forward 9:69039390-69039418; SpCas9
tgaccaccacatgggacagcatatt

SEQ ID NO: 30742 - DNA, 24 bp, Artificial Sequence
  Synthetic: FXN 3 forward 9:69039391-69039418; SpCas9
gaccaccacatgggacagcatatt

SEQ ID NO: 30743 - DNA, 23 bp, Artificial Sequence
  Synthetic: FXN 3 forward 9:69039392-69039418; SpCas9
accaccacatgggacagcatatt

SEQ ID NO: 30744 - DNA, 22 bp, Artificial Sequence
  Synthetic: FXN 3 forward 9:69039393-69039418; SpCas9
ccaccacatgggacagcatatt

SEQ ID NO: 30745 - DNA, 21 bp, Artificial Sequence
  Synthetic: FXN 3 forward 9:69039394-69039418; SpCas9
caccacatgggacagcatatt

SEQ ID NO: 30746 - DNA, 20 bp, Artificial Sequence
  Synthetic: FXN 3 forward 9:69039395-69039418; SpCas9
accacatgggacagcatatt

SEQ ID NO: 30747 - DNA, 19 bp, Artificial Sequence
  Synthetic: FXN 3 forward 9:69039396-69039418; SpCas9
ccacatgggacagcatatt

SEQ ID NO: 30748 - DNA, 18 bp, Artificial Sequence
  Synthetic: FXN 3 forward 9:69039397-69039418; SpCas9
cacatgggacagcatatt

SEQ ID NO: 30749 - DNA, 25 bp, Artificial Sequence
  Synthetic: FXN 3 reverse 9:69039393-69039421; SpCas9
gtactaaatatgctgtcccatgtgg

SEQ ID NO: 30750 - DNA, 24 bp, Artificial Sequence
  Synthetic: FXN 3 reverse 9:69039394-69039421; SpCas9
tactaaatatgctgtcccatgtgg

SEQ ID NO: 30751 - DNA, 23 bp, Artificial Sequence
  Synthetic: FXN 3 reverse 9:69039395-69039421; SpCas9
actaaatatgctgtcccatgtgg

SEQ ID NO: 30752 - DNA, 22 bp, Artificial Sequence
  Synthetic: FXN 3 reverse 9:69039396-69039421; SpCas9
ctaaatatgctgtcccatgtgg

SEQ ID NO: 30753 - DNA, 21 bp, Artificial Sequence
  Synthetic: FXN 3 reverse 9:69039397-69039421; SpCas9
taaatatgctgtcccatgtgg

SEQ ID NO: 30754 - DNA, 20 bp, Artificial Sequence
  Synthetic: FXN 3 reverse 9:69039398-69039421; SpCas9
aaatatgctgtcccatgtgg

SEQ ID NO: 30755 - DNA, 19 bp, Artificial Sequence
  Synthetic: FXN 3 reverse 9:69039399-69039421; SpCas9
aatatgctgtcccatgtgg

SEQ ID NO: 30756 - DNA, 18 bp, Artificial Sequence
  Synthetic: FXN 3 reverse 9:69039400-69039421; SpCas9
atatgctgtcccatgtgg

SEQ ID NO: 30757 - DNA, 25 bp, Artificial Sequence
  Synthetic: FXN 3 reverse 9:69039396-69039424; SpCas9
caggtactaaatatgctgtcccatg

SEQ ID NO: 30758 - DNA, 24 bp, Artificial Sequence
  Synthetic: FXN 3 reverse 9:69039397-69039424; SpCas9
aggtactaaatatgctgtcccatg

SEQ ID NO: 30759 - DNA, 23 bp, Artificial Sequence
  Synthetic: FXN 3 reverse 9:69039398-69039424; SpCas9
ggtactaaatatgctgtcccatg

SEQ ID NO: 30760 - DNA, 22 bp, Artificial Sequence
  Synthetic: FXN 3 reverse 9:69039399-69039424; SpCas9
gtactaaatatgctgtcccatg

SEQ ID NO: 30761 - DNA, 21 bp, Artificial Sequence
  Synthetic: FXN 3 reverse 9:69039400-69039424; SpCas9
tactaaatatgctgtcccatg

SEQ ID NO: 30762 - DNA, 20 bp, Artificial Sequence
  Synthetic: FXN 3 reverse 9:69039401-69039424; SpCas9
actaaatatgctgtcccatg

SEQ ID NO: 30763 - DNA, 19 bp, Artificial Sequence
  Synthetic: FXN 3 reverse 9:69039402-69039424; SpCas9
ctaaatatgctgtcccatg

SEQ ID NO: 30764 - DNA, 18 bp, Artificial Sequence
  Synthetic: FXN 3 reverse 9:69039403-69039424; SpCas9
taaatatgctgtcccatg

SEQ ID NO: 30765 - DNA, 25 bp, Artificial Sequence
  Synthetic: FXN 3 forward 9:69039404-69039432; SpCas9
gacagcatatttagtacctgatcat

SEQ ID NO: 30766 - DNA, 24 bp, Artificial Sequence
  Synthetic: FXN 3 forward 9:69039405-69039432; SpCas9
acagcatatttagtacctgatcat

SEQ ID NO: 30767 - DNA, 23 bp, Artificial Sequence
  Synthetic: FXN 3 forward 9:69039406-69039432; SpCas9
cagcatatttagtacctgatcat

SEQ ID NO: 30768 - DNA, 22 bp, Artificial Sequence
  Synthetic: FXN 3 forward 9:69039407-69039432; SpCas9
agcatatttagtacctgatcat

SEQ ID NO: 30769 - DNA, 21 bp, Artificial Sequence
  Synthetic: FXN 3 forward 9:69039408-69039432; SpCas9
gcatatttagtacctgatcat

SEQ ID NO: 30770 - DNA, 20 bp, Artificial Sequence
  Synthetic: FXN 3 forward 9:69039409-69039432; SpCas9
catatttagtacctgatcat

SEQ ID NO: 30771 - DNA, 19 bp, Artificial Sequence
  Synthetic: FXN 3 forward 9:69039410-69039432; SpCas9
atatttagtacctgatcat

SEQ ID NO: 30772 - DNA, 18 bp, Artificial Sequence
  Synthetic: FXN 3 forward 9:69039411-69039432; SpCas9
tatttagtacctgatcat

SEQ ID NO: 30773 - DNA, 25 bp, Artificial Sequence
  Synthetic: FXN 3 forward 9:69039411-69039439; SpCas9
tatttagtacctgatcattggttct

SEQ ID NO: 30774 - DNA, 24 bp, Artificial Sequence
  Synthetic: FXN 3 forward 9:69039412-69039439; SpCas9
atttagtacctgatcattggttct

SEQ ID NO: 30775 - DNA, 23 bp, Artificial Sequence
  Synthetic: FXN 3 forward 9:69039413-69039439; SpCas9
tttagtacctgatcattggttct

SEQ ID NO: 30776 - DNA, 22 bp, Artificial Sequence
  Synthetic: FXN 3 forward 9:69039414-69039439; SpCas9
ttagtacctgatcattggttct

SEQ ID NO: 30777 - DNA, 21 bp, Artificial Sequence
  Synthetic: FXN 3 forward 9:69039415-69039439; SpCas9
tagtacctgatcattggttct

SEQ ID NO: 30778 - DNA, 20 bp, Artificial Sequence
  Synthetic: FXN 3 forward 9:69039416-69039439; SpCas9
agtacctgatcattggttct

SEQ ID NO: 30779 - DNA, 19 bp, Artificial Sequence
  Synthetic: FXN 3 forward 9:69039417-69039439; SpCas9
gtacctgatcattggttct

SEQ ID NO: 30780 - DNA, 18 bp, Artificial Sequence
  Synthetic: FXN 3 forward 9:69039418-69039439; SpCas9
tacctgatcattggttct

SEQ ID NO: 30781 - DNA, 25 bp, Artificial Sequence
  Synthetic: FXN 3 forward 9:69039417-69039445; SpCas9
gtacctgatcattggttctcagatc

SEQ ID NO: 30782 - DNA, 24 bp, Artificial Sequence
  Synthetic: FXN 3 forward 9:69039418-69039445; SpCas9
tacctgatcattggttctcagatc

SEQ ID NO: 30783 - DNA, 23 bp, Artificial Sequence
  Synthetic: FXN 3 forward 9:69039419-69039445; SpCas9
acctgatcattggttctcagatc

SEQ ID NO: 30784 - DNA, 22 bp, Artificial Sequence
  Synthetic: FXN 3 forward 9:69039420-69039445; SpCas9
cctgatcattggttctcagatc

SEQ ID NO: 30785 - DNA, 21 bp, Artificial Sequence
  Synthetic: FXN 3 forward 9:69039421-69039445; SpCas9
ctgatcattggttctcagatc

SEQ ID NO: 30786 - DNA, 20 bp, Artificial Sequence
  Synthetic: FXN 3 forward 9:69039422-69039445; SpCas9
tgatcattggttctcagatc

SEQ ID NO: 30787 - DNA, 19 bp, Artificial Sequence
  Synthetic: FXN 3 forward 9:69039423-69039445; SpCas9
gatcattggttctcagatc

SEQ ID NO: 30788 - DNA, 18 bp, Artificial Sequence
  Synthetic: FXN 3 forward 9:69039424-69039445; SpCas9
atcattggttctcagatc

SEQ ID NO: 30789 - DNA, 25 bp, Artificial Sequence
  Synthetic: FXN 3 reverse 9:69039420-69039448; SpCas9
tagccagatctgagaaccaatgatc

SEQ ID NO: 30790 - DNA, 24 bp, Artificial Sequence
  Synthetic: FXN 3 reverse 9:69039421-69039448; SpCas9
agccagatctgagaaccaatgatc

SEQ ID NO: 30791 - DNA, 23 bp, Artificial Sequence
  Synthetic: FXN 3 reverse 9:69039422-69039448; SpCas9
gccagatctgagaaccaatgatc

SEQ ID NO: 30792 - DNA, 22 bp, Artificial Sequence
  Synthetic: FXN 3 reverse 9:69039423-69039448; SpCas9
ccagatctgagaaccaatgatc

SEQ ID NO: 30793 - DNA, 21 bp, Artificial Sequence
  Synthetic: FXN 3 reverse 9:69039424-69039448; SpCas9
cagatctgagaaccaatgatc

SEQ ID NO: 30794 - DNA, 20 bp, Artificial Sequence
  Synthetic: FXN 3 reverse 9:69039425-69039448; SpCas9
agatctgagaaccaatgatc

SEQ ID NO: 30795 - DNA, 19 bp, Artificial Sequence
  Synthetic: FXN 3 reverse 9:69039426-69039448; SpCas9
gatctgagaaccaatgatc

SEQ ID NO: 30796 - DNA, 18 bp, Artificial Sequence
  Synthetic: FXN 3 reverse 9:69039427-69039448; SpCas9
atctgagaaccaatgatc

SEQ ID NO: 30797 - DNA, 25 bp, Artificial Sequence
  Synthetic: FXN 3 reverse 9:69039421-69039449; SpCas9
gtagccagatctgagaaccaatgat

SEQ ID NO: 30798 - DNA, 24 bp, Artificial Sequence
  Synthetic: FXN 3 reverse 9:69039422-69039449; SpCas9
tagccagatctgagaaccaatgat

SEQ ID NO: 30799 - DNA, 23 bp, Artificial Sequence
  Synthetic: FXN 3 reverse 9:69039423-69039449; SpCas9
agccagatctgagaaccaatgat

SEQ ID NO: 30800 - DNA, 22 bp, Artificial Sequence
  Synthetic: FXN 3 reverse 9:69039424-69039449; SpCas9
gccagatctgagaaccaatgat

SEQ ID NO: 30801 - DNA, 21 bp, Artificial Sequence
  Synthetic: FXN 3 reverse 9:69039425-69039449; SpCas9
ccagatctgagaaccaatgat

SEQ ID NO: 30802 - DNA, 20 bp, Artificial Sequence
  Synthetic: FXN 3 reverse 9:69039426-69039449; SpCas9
cagatctgagaaccaatgat

SEQ ID NO: 30803 - DNA, 19 bp, Artificial Sequence
  Synthetic: FXN 3 reverse 9:69039427-69039449; SpCas9
agatctgagaaccaatgat

SEQ ID NO: 30804 - DNA, 18 bp, Artificial Sequence
  Synthetic: FXN 3 reverse 9:69039428-69039449; SpCas9
gatctgagaaccaatgat

SEQ ID NO: 30805 - DNA, 25 bp, Artificial Sequence
  Synthetic: FXN 3 forward 9:69039425-69039453; SpCas9
tcattggttctcagatctggctact

SEQ ID NO: 30806 - DNA, 24 bp, Artificial Sequence
  Synthetic: FXN 3 forward 9:69039426-69039453; SpCas9
cattggttctcagatctggctact

SEQ ID NO: 30807 - DNA, 23 bp, Artificial Sequence
  Synthetic: FXN 3 forward 9:69039427-69039453; SpCas9
attggttctcagatctggctact

SEQ ID NO: 30808 - DNA, 22 bp, Artificial Sequence
  Synthetic: FXN 3 forward 9:69039428-69039453; SpCas9
ttggttctcagatctggctact

SEQ ID NO: 30809 - DNA, 21 bp, Artificial Sequence
  Synthetic: FXN 3 forward 9:69039429-69039453; SpCas9
tggttctcagatctggctact

SEQ ID NO: 30810 - DNA, 20 bp, Artificial Sequence
  Synthetic: FXN 3 forward 9:69039430-69039453; SpCas9
ggttctcagatctggctact

SEQ ID NO: 30811 - DNA, 19 bp, Artificial Sequence
  Synthetic: FXN 3 forward 9:69039431-69039453; SpCas9
gttctcagatctggctact

SEQ ID NO: 30812 - DNA, 18 bp, Artificial Sequence
  Synthetic: FXN 3 forward 9:69039432-69039453; SpCas9
ttctcagatctggctact

SEQ ID NO: 30813 - DNA, 25 bp, Artificial Sequence
  Synthetic: FXN 3 forward 9:69039428-69039456; SpCas9
ttggttctcagatctggctactcag

SEQ ID NO: 30814 - DNA, 24 bp, Artificial Sequence
  Synthetic: FXN 3 forward 9:69039429-69039456; SpCas9
tggttctcagatctggctactcag

SEQ ID NO: 30815 - DNA, 23 bp, Artificial Sequence
  Synthetic: FXN 3 forward 9:69039430-69039456; SpCas9
ggttctcagatctggctactcag

SEQ ID NO: 30816 - DNA, 22 bp, Artificial Sequence
  Synthetic: FXN 3 forward 9:69039431-69039456; SpCas9
gttctcagatctggctactcag

SEQ ID NO: 30817 - DNA, 21 bp, Artificial Sequence
  Synthetic: FXN 3 forward 9:69039432-69039456; SpCas9
ttctcagatctggctactcag

SEQ ID NO: 30818 - DNA, 20 bp, Artificial Sequence
  Synthetic: FXN 3 forward 9:69039433-69039456; SpCas9
tctcagatctggctactcag

SEQ ID NO: 30819 - DNA, 19 bp, Artificial Sequence
  Synthetic: FXN 3 forward 9:69039434-69039456; SpCas9
ctcagatctggctactcag

SEQ ID NO: 30820 - DNA, 18 bp, Artificial Sequence
  Synthetic: FXN 3 forward 9:69039435-69039456; SpCas9
tcagatctggctactcag

SEQ ID NO: 30821 - DNA, 25 bp, Artificial Sequence
  Synthetic: FXN 3 reverse 9:69039434-69039462; SpCas9
ttggttctgctgagtagccagatct

SEQ ID NO: 30822 - DNA, 24 bp, Artificial Sequence
  Synthetic: FXN 3 reverse 9:69039435-69039462; SpCas9
tggttctgctgagtagccagatct

SEQ ID NO: 30823 - DNA, 23 bp, Artificial Sequence
  Synthetic: FXN 3 reverse 9:69039436-69039462; SpCas9
ggttctgctgagtagccagatct

SEQ ID NO: 30824 - DNA, 22 bp, Artificial Sequence
  Synthetic: FXN 3 reverse 9:69039437-69039462; SpCas9
gttctgctgagtagccagatct

SEQ ID NO: 30825 - DNA, 21 bp, Artificial Sequence
  Synthetic: FXN 3 reverse 9:69039438-69039462; SpCas9
ttctgctgagtagccagatct

SEQ ID NO: 30826 - DNA, 20 bp, Artificial Sequence
  Synthetic: FXN 3 reverse 9:69039439-69039462; SpCas9
tctgctgagtagccagatct

SEQ ID NO: 30827 - DNA, 19 bp, Artificial Sequence
  Synthetic: FXN 3 reverse 9:69039440-69039462; SpCas9
ctgctgagtagccagatct

SEQ ID NO: 30828 - DNA, 18 bp, Artificial Sequence
  Synthetic: FXN 3 reverse 9:69039441-69039462; SpCas9
tgctgagtagccagatct

SEQ ID NO: 30829 - DNA, 25 bp, Artificial Sequence
  Synthetic: FXN 3 forward 9:69039435-69039463; SpCas9
tcagatctggctactcagcagaacc

SEQ ID NO: 30830 - DNA, 24 bp, Artificial Sequence
  Synthetic: FXN 3 forward 9:69039436-69039463; SpCas9
cagatctggctactcagcagaacc

SEQ ID NO: 30831 - DNA, 23 bp, Artificial Sequence
  Synthetic: FXN 3 forward 9:69039437-69039463; SpCas9
agatctggctactcagcagaacc

SEQ ID NO: 30832 - DNA, 22 bp, Artificial Sequence
  Synthetic: FXN 3 forward 9:69039438-69039463; SpCas9
gatctggctactcagcagaacc

SEQ ID NO: 30833 - DNA, 21 bp, Artificial Sequence
  Synthetic: FXN 3 forward 9:69039439-69039463; SpCas9
atctggctactcagcagaacc

SEQ ID NO: 30834 - DNA, 20 bp, Artificial Sequence
  Synthetic: FXN 3 forward 9:69039440-69039463; SpCas9
tctggctactcagcagaacc

SEQ ID NO: 30835 - DNA, 19 bp, Artificial Sequence
  Synthetic: FXN 3 forward 9:69039441-69039463; SpCas9
ctggctactcagcagaacc

SEQ ID NO: 30836 - DNA, 18 bp, Artificial Sequence
  Synthetic: FXN 3 forward 9:69039442-69039463; SpCas9
tggctactcagcagaacc

SEQ ID NO: 30837 - DNA, 25 bp, Artificial Sequence
  Synthetic: FXN 3 reverse 9:69039441-69039469; SpCas9
tggattcttggttctgctgagtagc

SEQ ID NO: 30838 - DNA, 24 bp, Artificial Sequence
  Synthetic: FXN 3 reverse 9:69039442-69039469; SpCas9
ggattcttggttctgctgagtagc

SEQ ID NO: 30839 - DNA, 23 bp, Artificial Sequence
  Synthetic: FXN 3 reverse 9:69039443-69039469; SpCas9
gattcttggttctgctgagtagc

SEQ ID NO: 30840 - DNA, 22 bp, Artificial Sequence
  Synthetic: FXN 3 reverse 9:69039444-69039469; SpCas9
attcttggttctgctgagtagc

SEQ ID NO: 30841 - DNA, 21 bp, Artificial Sequence
  Synthetic: FXN 3 reverse 9:69039445-69039469; SpCas9
ttcttggttctgctgagtagc

SEQ ID NO: 30842 - DNA, 20 bp, Artificial Sequence
  Synthetic: FXN 3 reverse 9:69039446-69039469; SpCas9
tcttggttctgctgagtagc

SEQ ID NO: 30843 - DNA, 19 bp, Artificial Sequence
  Synthetic: FXN 3 reverse 9:69039447-69039469; SpCas9
cttggttctgctgagtagc

SEQ ID NO: 30844 - DNA, 18 bp, Artificial Sequence
  Synthetic: FXN 3 reverse 9:69039448-69039469; SpCas9
ttggttctgctgagtagc

SEQ ID NO: 30845 - DNA, 25 bp, Artificial Sequence
  Synthetic: FXN 3 forward 9:69039444-69039472; SpCas9
gctactcagcagaaccaagaatcca

SEQ ID NO: 30846 - DNA, 24 bp, Artificial Sequence
  Synthetic: FXN 3 forward 9:69039445-69039472; SpCas9
ctactcagcagaaccaagaatcca

SEQ ID NO: 30847 - DNA, 23 bp, Artificial Sequence
  Synthetic: FXN 3 forward 9:69039446-69039472; SpCas9
tactcagcagaaccaagaatcca

SEQ ID NO: 30848 - DNA, 22 bp, Artificial Sequence
  Synthetic: FXN 3 forward 9:69039447-69039472; SpCas9
actcagcagaaccaagaatcca

SEQ ID NO: 30849 - DNA, 21 bp, Artificial Sequence
  Synthetic: FXN 3 forward 9:69039448-69039472; SpCas9
ctcagcagaaccaagaatcca

SEQ ID NO: 30850 - DNA, 20 bp, Artificial Sequence
  Synthetic: FXN 3 forward 9:69039449-69039472; SpCas9
tcagcagaaccaagaatcca

SEQ ID NO: 30851 - DNA, 19 bp, Artificial Sequence
  Synthetic: FXN 3 forward 9:69039450-69039472; SpCas9
cagcagaaccaagaatcca

SEQ ID NO: 30852 - DNA, 18 bp, Artificial Sequence
  Synthetic: FXN 3 forward 9:69039451-69039472; SpCas9
agcagaaccaagaatcca

SEQ ID NO: 30853 - DNA, 25 bp, Artificial Sequence
  Synthetic: FXN 3 reverse 9:69039445-69039473; SpCas9
tctgtggattcttggttctgctgag

SEQ ID NO: 30854 - DNA, 24 bp, Artificial Sequence
  Synthetic: FXN 3 reverse 9:69039446-69039473; SpCas9
ctgtggattcttggttctgctgag

SEQ ID NO: 30855 - DNA, 23 bp, Artificial Sequence
  Synthetic: FXN 3 reverse 9:69039447-69039473; SpCas9
tgtggattcttggttctgctgag

SEQ ID NO: 30856 - DNA, 22 bp, Artificial Sequence
  Synthetic: FXN 3 reverse 9:69039448-69039473; SpCas9
gtggattcttggttctgctgag

SEQ ID NO: 30857 - DNA, 21 bp, Artificial Sequence
  Synthetic: FXN 3 reverse 9:69039449-69039473; SpCas9
tggattcttggttctgctgag

SEQ ID NO: 30858 - DNA, 20 bp, Artificial Sequence
  Synthetic: FXN 3 reverse 9:69039450-69039473; SpCas9
ggattcttggttctgctgag

SEQ ID NO: 30859 - DNA, 19 bp, Artificial Sequence
  Synthetic: FXN 3 reverse 9:69039451-69039473; SpCas9
gattcttggttctgctgag

SEQ ID NO: 30860 - DNA, 18 bp, Artificial Sequence
  Synthetic: FXN 3 reverse 9:69039452-69039473; SpCas9
attcttggttctgctgag

SEQ ID NO: 30861 - DNA, 25 bp, Artificial Sequence
  Synthetic: FXN 3 reverse 9:69039448-69039476; SpCas9
gtttctgtggattcttggttctgct

SEQ ID NO: 30862 - DNA, 24 bp, Artificial Sequence
  Synthetic: FXN 3 reverse 9:69039449-69039476; SpCas9
tttctgtggattcttggttctgct

SEQ ID NO: 30863 - DNA, 23 bp, Artificial Sequence
  Synthetic: FXN 3 reverse 9:69039450-69039476; SpCas9
ttctgtggattcttggttctgct

SEQ ID NO: 30864 - DNA, 22 bp, Artificial Sequence
  Synthetic: FXN 3 reverse 9:69039451-69039476; SpCas9
tctgtggattcttggttctgct

SEQ ID NO: 30865 - DNA, 21 bp, Artificial Sequence
  Synthetic: FXN 3 reverse 9:69039452-69039476; SpCas9
ctgtggattcttggttctgct

SEQ ID NO: 30866 - DNA, 20 bp, Artificial Sequence
  Synthetic: FXN 3 reverse 9:69039453-69039476; SpCas9
tgtggattcttggttctgct

SEQ ID NO: 30867 - DNA, 19 bp, Artificial Sequence
  Synthetic: FXN 3 reverse 9:69039454-69039476; SpCas9
gtggattcttggttctgct

SEQ ID NO: 30868 - DNA, 18 bp, Artificial Sequence
  Synthetic: FXN 3 reverse 9:69039455-69039476; SpCas9
tggattcttggttctgct

SEQ ID NO: 30869 - DNA, 25 bp, Artificial Sequence
  Synthetic: FXN 3 forward 9:69039450-69039478; SpCas9
cagcagaaccaagaatccacagaaa

SEQ ID NO: 30870 - DNA, 24 bp, Artificial Sequence
  Synthetic: FXN 3 forward 9:69039451-69039478; SpCas9
agcagaaccaagaatccacagaaa

SEQ ID NO: 30871 - DNA, 23 bp, Artificial Sequence
  Synthetic: FXN 3 forward 9:69039452-69039478; SpCas9
gcagaaccaagaatccacagaaa

SEQ ID NO: 30872 - DNA, 22 bp, Artificial Sequence
  Synthetic: FXN 3 forward 9:69039453-69039478; SpCas9
cagaaccaagaatccacagaaa

SEQ ID NO: 30873 - DNA, 21 bp, Artificial Sequence
  Synthetic: FXN 3 forward 9:69039454-69039478; SpCas9
agaaccaagaatccacagaaa

SEQ ID NO: 30874 - DNA, 20 bp, Artificial Sequence
  Synthetic: FXN 3 forward 9:69039455-69039478; SpCas9
gaaccaagaatccacagaaa

SEQ ID NO: 30875 - DNA, 19 bp, Artificial Sequence
  Synthetic: FXN 3 forward 9:69039456-69039478; SpCas9
aaccaagaatccacagaaa

SEQ ID NO: 30876 - DNA, 18 bp, Artificial Sequence
  Synthetic: FXN 3 forward 9:69039457-69039478; SpCas9
accaagaatccacagaaa

SEQ ID NO: 30877 - DNA, 25 bp, Artificial Sequence
  Synthetic: FXN 3 reverse 9:69039458-69039486; SpCas9
tttaaaagccgtttctgtggattct

SEQ ID NO: 30878 - DNA, 24 bp, Artificial Sequence
  Synthetic: FXN 3 reverse 9:69039459-69039486; SpCas9
ttaaaagccgtttctgtggattct

SEQ ID NO: 30879 - DNA, 23 bp, Artificial Sequence
  Synthetic: FXN 3 reverse 9:69039460-69039486; SpCas9
taaaagccgtttctgtggattct

SEQ ID NO: 30880 - DNA, 22 bp, Artificial Sequence
  Synthetic: FXN 3 reverse 9:69039461-69039486; SpCas9
aaaagccgtttctgtggattct

SEQ ID NO: 30881 - DNA, 21 bp, Artificial Sequence
  Synthetic: FXN 3 reverse 9:69039462-69039486; SpCas9
aaagccgtttctgtggattct

SEQ ID NO: 30882 - DNA, 20 bp, Artificial Sequence
  Synthetic: FXN 3 reverse 9:69039463-69039486; SpCas9
aagccgtttctgtggattct

SEQ ID NO: 30883 - DNA, 19 bp, Artificial Sequence
  Synthetic: FXN 3 reverse 9:69039464-69039486; SpCas9
agccgtttctgtggattct

SEQ ID NO: 30884 - DNA, 18 bp, Artificial Sequence
  Synthetic: FXN 3 reverse 9:69039465-69039486; SpCas9
gccgtttctgtggattct

SEQ ID NO: 30885 - DNA, 25 bp, Artificial Sequence
  Synthetic: FXN 3 forward 9:69039460-69039488; SpCas9
aagaatccacagaaacggcttttaa

SEQ ID NO: 30886 - DNA, 24 bp, Artificial Sequence
  Synthetic: FXN 3 forward 9:69039461-69039488; SpCas9
agaatccacagaaacggcttttaa

SEQ ID NO: 30887 - DNA, 23 bp, Artificial Sequence
  Synthetic: FXN 3 forward 9:69039462-69039488; SpCas9
gaatccacagaaacggcttttaa

SEQ ID NO: 30888 - DNA, 22 bp, Artificial Sequence
  Synthetic: FXN 3 forward 9:69039463-69039488; SpCas9
aatccacagaaacggcttttaa

SEQ ID NO: 30889 - DNA, 21 bp, Artificial Sequence
  Synthetic: FXN 3 forward 9:69039464-69039488; SpCas9
atccacagaaacggcttttaa

SEQ ID NO: 30890 - DNA, 20 bp, Artificial Sequence
  Synthetic: FXN 3 forward 9:69039465-69039488; SpCas9
tccacagaaacggcttttaa

SEQ ID NO: 30891 - DNA, 19 bp, Artificial Sequence
  Synthetic: FXN 3 forward 9:69039466-69039488; SpCas9
ccacagaaacggcttttaa

SEQ ID NO: 30892 - DNA, 18 bp, Artificial Sequence
  Synthetic: FXN 3 forward 9:69039467-69039488; SpCas9
cacagaaacggcttttaa

SEQ ID NO: 30893 - DNA, 25 bp, Artificial Sequence
  Synthetic: FXN 3 forward 9:69039465-69039493; SpCas9
tccacagaaacggcttttaaaagca

SEQ ID NO: 30894 - DNA, 24 bp, Artificial Sequence
  Synthetic: FXN 3 forward 9:69039466-69039493; SpCas9
ccacagaaacggcttttaaaagca

SEQ ID NO: 30895 - DNA, 23 bp, Artificial Sequence
  Synthetic: FXN 3 forward 9:69039467-69039493; SpCas9
cacagaaacggcttttaaaagca

SEQ ID NO: 30896 - DNA, 22 bp, Artificial Sequence
  Synthetic: FXN 3 forward 9:69039468-69039493; SpCas9
acagaaacggcttttaaaagca

SEQ ID NO: 30897 - DNA, 21 bp, Artificial Sequence
  Synthetic: FXN 3 forward 9:69039469-69039493; SpCas9
cagaaacggcttttaaaagca

SEQ ID NO: 30898 - DNA, 20 bp, Artificial Sequence
  Synthetic: FXN 3 forward 9:69039470-69039493; SpCas9
agaaacggcttttaaaagca

SEQ ID NO: 30899 - DNA, 19 bp, Artificial Sequence
  Synthetic: FXN 3 forward 9:69039471-69039493; SpCas9
gaaacggcttttaaaagca

SEQ ID NO: 30900 - DNA, 18 bp, Artificial Sequence
  Synthetic: FXN 3 forward 9:69039472-69039493; SpCas9
aaacggcttttaaaagca

SEQ ID NO: 30901 - DNA, 25 bp, Artificial Sequence
  Synthetic: FXN 3 reverse 9:69039466-69039494; SpCas9
gctgtgcttttaaaagccgtttctg

SEQ ID NO: 30902 - DNA, 24 bp, Artificial Sequence
  Synthetic: FXN 3 reverse 9:69039467-69039494; SpCas9
ctgtgcttttaaaagccgtttctg

SEQ ID NO: 30903 - DNA, 23 bp, Artificial Sequence
  Synthetic: FXN 3 reverse 9:69039468-69039494; SpCas9
tgtgcttttaaaagccgtttctg

SEQ ID NO: 30904 - DNA, 22 bp, Artificial Sequence
  Synthetic: FXN 3 reverse 9:69039469-69039494; SpCas9
gtgcttttaaaagccgtttctg

SEQ ID NO: 30905 - DNA, 21 bp, Artificial Sequence
  Synthetic: FXN 3 reverse 9:69039470-69039494; SpCas9
tgcttttaaaagccgtttctg

SEQ ID NO: 30906 - DNA, 20 bp, Artificial Sequence
  Synthetic: FXN 3 reverse 9:69039471-69039494; SpCas9
gcttttaaaagccgtttctg

SEQ ID NO: 30907 - DNA, 19 bp, Artificial Sequence
  Synthetic: FXN 3 reverse 9:69039472-69039494; SpCas9
cttttaaaagccgtttctg

SEQ ID NO: 30908 - DNA, 18 bp, Artificial Sequence
  Synthetic: FXN 3 reverse 9:69039473-69039494; SpCas9
ttttaaaagccgtttctg

SEQ ID NO: 30909 - DNA, 25 bp, Artificial Sequence
  Synthetic: FXN 3 forward 9:69039473-69039501; SpCas9
aacggcttttaaaagcacagcccca

SEQ ID NO: 30910 - DNA, 24 bp, Artificial Sequence
  Synthetic: FXN 3 forward 9:69039474-69039501; SpCas9
acggcttttaaaagcacagcccca

SEQ ID NO: 30911 - DNA, 23 bp, Artificial Sequence
  Synthetic: FXN 3 forward 9:69039475-69039501; SpCas9
cggcttttaaaagcacagcccca

SEQ ID NO: 30912 - DNA, 22 bp, Artificial Sequence
  Synthetic: FXN 3 forward 9:69039476-69039501; SpCas9
ggcttttaaaagcacagcccca

SEQ ID NO: 30913 - DNA, 21 bp, Artificial Sequence
  Synthetic: FXN 3 forward 9:69039477-69039501; SpCas9
gcttttaaaagcacagcccca

SEQ ID NO: 30914 - DNA, 20 bp, Artificial Sequence
  Synthetic: FXN 3 forward 9:69039478-69039501; SpCas9
cttttaaaagcacagcccca

SEQ ID NO: 30915 - DNA, 19 bp, Artificial Sequence
  Synthetic: FXN 3 forward 9:69039479-69039501; SpCas9
ttttaaaagcacagcccca

SEQ ID NO: 30916 - DNA, 18 bp, Artificial Sequence
  Synthetic: FXN 3 forward 9:69039480-69039501; SpCas9
tttaaaagcacagcccca

SEQ ID NO: 30917 - DNA, 25 bp, Artificial Sequence
  Synthetic: FXN 3 reverse 9:69039478-69039506; SpCas9
gggggctgtggggctgtgcttttaa

SEQ ID NO: 30918 - DNA, 24 bp, Artificial Sequence
  Synthetic: FXN 3 reverse 9:69039479-69039506; SpCas9
ggggctgtggggctgtgcttttaa

SEQ ID NO: 30919 - DNA, 23 bp, Artificial Sequence
  Synthetic: FXN 3 reverse 9:69039480-69039506; SpCas9
gggctgtggggctgtgcttttaa

SEQ ID NO: 30920 - DNA, 22 bp, Artificial Sequence
  Synthetic: FXN 3 reverse 9:69039481-69039506; SpCas9
ggctgtggggctgtgcttttaa

SEQ ID NO: 30921 - DNA, 21 bp, Artificial Sequence
  Synthetic: FXN 3 reverse 9:69039482-69039506; SpCas9
gctgtggggctgtgcttttaa

SEQ ID NO: 30922 - DNA, 20 bp, Artificial Sequence
  Synthetic: FXN 3 reverse 9:69039483-69039506; SpCas9
ctgtggggctgtgcttttaa

SEQ ID NO: 30923 - DNA, 19 bp, Artificial Sequence
  Synthetic: FXN 3 reverse 9:69039484-69039506; SpCas9
tgtggggctgtgcttttaa

SEQ ID NO: 30924 - DNA, 18 bp, Artificial Sequence
  Synthetic: FXN 3 reverse 9:69039485-69039506; SpCas9
gtggggctgtgcttttaa

SEQ ID NO: 30925 - DNA, 25 bp, Artificial Sequence
  Synthetic: FXN 3 forward 9:69039480-69039508; SpCas9
tttaaaagcacagccccacagcccc

SEQ ID NO: 30926 - DNA, 24 bp, Artificial Sequence
  Synthetic: FXN 3 forward 9:69039481-69039508; SpCas9
ttaaaagcacagccccacagcccc

SEQ ID NO: 30927 - DNA, 23 bp, Artificial Sequence
  Synthetic: FXN 3 forward 9:69039482-69039508; SpCas9
taaaagcacagccccacagcccc

SEQ ID NO: 30928 - DNA, 22 bp, Artificial Sequence
  Synthetic: FXN 3 forward 9:69039483-69039508; SpCas9
aaaagcacagccccacagcccc

SEQ ID NO: 30929 - DNA, 21 bp, Artificial Sequence
  Synthetic: FXN 3 forward 9:69039484-69039508; SpCas9
aaagcacagccccacagcccc

SEQ ID NO: 30930 - DNA, 20 bp, Artificial Sequence
  Synthetic: FXN 3 forward 9:69039485-69039508; SpCas9
aagcacagccccacagcccc

SEQ ID NO: 30931 - DNA, 19 bp, Artificial Sequence
  Synthetic: FXN 3 forward 9:69039486-69039508; SpCas9
agcacagccccacagcccc

SEQ ID NO: 30932 - DNA, 18 bp, Artificial Sequence
  Synthetic: FXN 3 forward 9:69039487-69039508; SpCas9
gcacagccccacagcccc

SEQ ID NO: 30933 - DNA, 25 bp, Artificial Sequence
  Synthetic: FXN 3 forward 9:69039486-69039514; SpCas9
agcacagccccacagcccccagccc

SEQ ID NO: 30934 - DNA, 24 bp, Artificial Sequence
  Synthetic: FXN 3 forward 9:69039487-69039514; SpCas9
gcacagccccacagcccccagccc

SEQ ID NO: 30935 - DNA, 23 bp, Artificial Sequence
  Synthetic: FXN 3 forward 9:69039488-69039514; SpCas9
cacagccccacagcccccagccc

SEQ ID NO: 30936 - DNA, 22 bp, Artificial Sequence
  Synthetic: FXN 3 forward 9:69039489-69039514; SpCas9
acagccccacagcccccagccc

SEQ ID NO: 30937 - DNA, 21 bp, Artificial Sequence
  Synthetic: FXN 3 forward 9:69039490-69039514; SpCas9
cagccccacagcccccagccc

SEQ ID NO: 30938 - DNA, 20 bp, Artificial Sequence
  Synthetic: FXN 3 forward 9:69039491-69039514; SpCas9
agccccacagcccccagccc

SEQ ID NO: 30939 - DNA, 19 bp, Artificial Sequence
  Synthetic: FXN 3 forward 9:69039492-69039514; SpCas9
gccccacagcccccagccc

SEQ ID NO: 30940 - DNA, 18 bp, Artificial Sequence
  Synthetic: FXN 3 forward 9:69039493-69039514; SpCas9
ccccacagcccccagccc

SEQ ID NO: 30941 - DNA, 25 bp, Artificial Sequence
  Synthetic: FXN 3 reverse 9:69039493-69039521; SpCas9
ggtaaggctggggctgggggctgtg

SEQ ID NO: 30942 - DNA, 24 bp, Artificial Sequence
  Synthetic: FXN 3 reverse 9:69039494-69039521; SpCas9
gtaaggctggggctgggggctgtg

SEQ ID NO: 30943 - DNA, 23 bp, Artificial Sequence
  Synthetic: FXN 3 reverse 9:69039495-69039521; SpCas9
taaggctggggctgggggctgtg

SEQ ID NO: 30944 - DNA, 22 bp, Artificial Sequence
  Synthetic: FXN 3 reverse 9:69039496-69039521; SpCas9
aaggctggggctgggggctgtg

SEQ ID NO: 30945 - DNA, 21 bp, Artificial Sequence
  Synthetic: FXN 3 reverse 9:69039497-69039521; SpCas9
aggctggggctgggggctgtg

SEQ ID NO: 30946 - DNA, 20 bp, Artificial Sequence
  Synthetic: FXN 3 reverse 9:69039498-69039521; SpCas9
ggctggggctgggggctgtg

SEQ ID NO: 30947 - DNA, 19 bp, Artificial Sequence
  Synthetic: FXN 3 reverse 9:69039499-69039521; SpCas9
gctggggctgggggctgtg

SEQ ID NO: 30948 - DNA, 18 bp, Artificial Sequence
  Synthetic: FXN 3 reverse 9:69039500-69039521; SpCas9
ctggggctgggggctgtg

SEQ ID NO: 30949 - DNA, 25 bp, Artificial Sequence
  Synthetic: FXN 3 reverse 9:69039494-69039522; SpCas9
aggtaaggctggggctgggggctgt

SEQ ID NO: 30950 - DNA, 24 bp, Artificial Sequence
  Synthetic: FXN 3 reverse 9:69039495-69039522; SpCas9
ggtaaggctggggctgggggctgt

SEQ ID NO: 30951 - DNA, 23 bp, Artificial Sequence
  Synthetic: FXN 3 reverse 9:69039496-69039522; SpCas9
gtaaggctggggctgggggctgt

SEQ ID NO: 30952 - DNA, 22 bp, Artificial Sequence
  Synthetic: FXN 3 reverse 9:69039497-69039522; SpCas9
taaggctggggctgggggctgt

SEQ ID NO: 30953 - DNA, 21 bp, Artificial Sequence
  Synthetic: FXN 3 reverse 9:69039498-69039522; SpCas9
aaggctggggctgggggctgt

SEQ ID NO: 30954 - DNA, 20 bp, Artificial Sequence
  Synthetic: FXN 3 reverse 9:69039499-69039522; SpCas9
aggctggggctgggggctgt

SEQ ID NO: 30955 - DNA, 19 bp, Artificial Sequence
  Synthetic: FXN 3 reverse 9:69039500-69039522; SpCas9
ggctggggctgggggctgt

SEQ ID NO: 30956 - DNA, 18 bp, Artificial Sequence
  Synthetic: FXN 3 reverse 9:69039501-69039522; SpCas9
gctggggctgggggctgt

SEQ ID NO: 30957 - DNA, 25 bp, Artificial Sequence
  Synthetic: FXN 3 reverse 9:69039495-69039523; SpCas9
taggtaaggctggggctgggggctg

SEQ ID NO: 30958 - DNA, 24 bp, Artificial Sequence
  Synthetic: FXN 3 reverse 9:69039496-69039523; SpCas9
aggtaaggctggggctgggggctg

SEQ ID NO: 30959 - DNA, 23 bp, Artificial Sequence
  Synthetic: FXN 3 reverse 9:69039497-69039523; SpCas9
ggtaaggctggggctgggggctg

SEQ ID NO: 30960 - DNA, 22 bp, Artificial Sequence
  Synthetic: FXN 3 reverse 9:69039498-69039523; SpCas9
gtaaggctggggctgggggctg

SEQ ID NO: 30961 - DNA, 21 bp, Artificial Sequence
  Synthetic: FXN 3 reverse 9:69039499-69039523; SpCas9
taaggctggggctgggggctg

SEQ ID NO: 30962 - DNA, 20 bp, Artificial Sequence
  Synthetic: FXN 3 reverse 9:69039500-69039523; SpCas9
aaggctggggctgggggctg

SEQ ID NO: 30963 - DNA, 19 bp, Artificial Sequence
  Synthetic: FXN 3 reverse 9:69039501-69039523; SpCas9
aggctggggctgggggctg

SEQ ID NO: 30964 - DNA, 18 bp, Artificial Sequence
  Synthetic: FXN 3 reverse 9:69039502-69039523; SpCas9
ggctggggctgggggctg

SEQ ID NO: 30965 - DNA, 25 bp, Artificial Sequence
  Synthetic: FXN 3 forward 9:69039500-69039528; SpCas9
gcccccagccccagccttacctacc

SEQ ID NO: 30966 - DNA, 24 bp, Artificial Sequence
  Synthetic: FXN 3 forward 9:69039501-69039528; SpCas9
cccccagccccagccttacctacc

SEQ ID NO: 30967 - DNA, 23 bp, Artificial Sequence
  Synthetic: FXN 3 forward 9:69039502-69039528; SpCas9
ccccagccccagccttacctacc

SEQ ID NO: 30968 - DNA, 22 bp, Artificial Sequence
  Synthetic: FXN 3 forward 9:69039503-69039528; SpCas9
cccagccccagccttacctacc

SEQ ID NO: 30969 - DNA, 21 bp, Artificial Sequence
  Synthetic: FXN 3 forward 9:69039504-69039528; SpCas9
ccagccccagccttacctacc

SEQ ID NO: 30970 - DNA, 20 bp, Artificial Sequence
  Synthetic: FXN 3 forward 9:69039505-69039528; SpCas9
cagccccagccttacctacc

SEQ ID NO: 30971 - DNA, 19 bp, Artificial Sequence
  Synthetic: FXN 3 forward 9:69039506-69039528; SpCas9
agccccagccttacctacc

SEQ ID NO: 30972 - DNA, 18 bp, Artificial Sequence
  Synthetic: FXN 3 forward 9:69039507-69039528; SpCas9
gccccagccttacctacc

SEQ ID NO: 30973 - DNA, 25 bp, Artificial Sequence
  Synthetic: FXN 3 reverse 9:69039501-69039529; SpCas9
tccaggtaggtaaggctggggctgg

SEQ ID NO: 30974 - DNA, 24 bp, Artificial Sequence
  Synthetic: FXN 3 reverse 9:69039502-69039529; SpCas9
ccaggtaggtaaggctggggctgg

SEQ ID NO: 30975 - DNA, 23 bp, Artificial Sequence
  Synthetic: FXN 3 reverse 9:69039503-69039529; SpCas9
caggtaggtaaggctggggctgg

SEQ ID NO: 30976 - DNA, 22 bp, Artificial Sequence
  Synthetic: FXN 3 reverse 9:69039504-69039529; SpCas9
aggtaggtaaggctggggctgg

SEQ ID NO: 30977 - DNA, 21 bp, Artificial Sequence
  Synthetic: FXN 3 reverse 9:69039505-69039529; SpCas9
ggtaggtaaggctggggctgg

SEQ ID NO: 30978 - DNA, 20 bp, Artificial Sequence
  Synthetic: FXN 3 reverse 9:69039506-69039529; SpCas9
gtaggtaaggctggggctgg

SEQ ID NO: 30979 - DNA, 19 bp, Artificial Sequence
  Synthetic: FXN 3 reverse 9:69039507-69039529; SpCas9
taggtaaggctggggctgg

SEQ ID NO: 30980 - DNA, 18 bp, Artificial Sequence
  Synthetic: FXN 3 reverse 9:69039508-69039529; SpCas9
aggtaaggctggggctgg

SEQ ID NO: 30981 - DNA, 25 bp, Artificial Sequence
  Synthetic: FXN 3 forward 9:69039502-69039530; SpCas9
ccccagccccagccttacctacctg

SEQ ID NO: 30982 - DNA, 24 bp, Artificial Sequence
  Synthetic: FXN 3 forward 9:69039503-69039530; SpCas9
cccagccccagccttacctacctg

SEQ ID NO: 30983 - DNA, 23 bp, Artificial Sequence
  Synthetic: FXN 3 forward 9:69039504-69039530; SpCas9
ccagccccagccttacctacctg

SEQ ID NO: 30984 - DNA, 22 bp, Artificial Sequence
  Synthetic: FXN 3 forward 9:69039505-69039530; SpCas9
cagccccagccttacctacctg

SEQ ID NO: 30985 - DNA, 21 bp, Artificial Sequence
  Synthetic: FXN 3 forward 9:69039506-69039530; SpCas9
agccccagccttacctacctg

SEQ ID NO: 30986 - DNA, 20 bp, Artificial Sequence
  Synthetic: FXN 3 forward 9:69039507-69039530; SpCas9
gccccagccttacctacctg

SEQ ID NO: 30987 - DNA, 19 bp, Artificial Sequence
  Synthetic: FXN 3 forward 9:69039508-69039530; SpCas9
ccccagccttacctacctg

SEQ ID NO: 30988 - DNA, 18 bp, Artificial Sequence
  Synthetic: FXN 3 forward 9:69039509-69039530; SpCas9
cccagccttacctacctg

SEQ ID NO: 30989 - DNA, 25 bp, Artificial Sequence
  Synthetic: FXN 3 reverse 9:69039502-69039530; SpCas9
ctccaggtaggtaaggctggggctg

SEQ ID NO: 30990 - DNA, 24 bp, Artificial Sequence
  Synthetic: FXN 3 reverse 9:69039503-69039530; SpCas9
tccaggtaggtaaggctggggctg

SEQ ID NO: 30991 - DNA, 23 bp, Artificial Sequence
  Synthetic: FXN 3 reverse 9:69039504-69039530; SpCas9
ccaggtaggtaaggctggggctg

SEQ ID NO: 30992 - DNA, 22 bp, Artificial Sequence
  Synthetic: FXN 3 reverse 9:69039505-69039530; SpCas9
caggtaggtaaggctggggctg

SEQ ID NO: 30993 - DNA, 21 bp, Artificial Sequence
  Synthetic: FXN 3 reverse 9:69039506-69039530; SpCas9
aggtaggtaaggctggggctg

SEQ ID NO: 30994 - DNA, 20 bp, Artificial Sequence
  Synthetic: FXN 3 reverse 9:69039507-69039530; SpCas9
ggtaggtaaggctggggctg

SEQ ID NO: 30995 - DNA, 19 bp, Artificial Sequence
  Synthetic: FXN 3 reverse 9:69039508-69039530; SpCas9
gtaggtaaggctggggctg

SEQ ID NO: 30996 - DNA, 18 bp, Artificial Sequence
  Synthetic: FXN 3 reverse 9:69039509-69039530; SpCas9
taggtaaggctggggctg

SEQ ID NO: 30997 - DNA, 25 bp, Artificial Sequence
  Synthetic: FXN 3 forward 9:69039503-69039531; SpCas9
cccagccccagccttacctacctgg

SEQ ID NO: 30998 - DNA, 24 bp, Artificial Sequence
  Synthetic: FXN 3 forward 9:69039504-69039531; SpCas9
ccagccccagccttacctacctgg

SEQ ID NO: 30999 - DNA, 23 bp, Artificial Sequence
  Synthetic: FXN 3 forward 9:69039505-69039531; SpCas9
cagccccagccttacctacctgg

SEQ ID NO: 31000 - DNA, 22 bp, Artificial Sequence
  Synthetic: FXN 3 forward 9:69039506-69039531; SpCas9
agccccagccttacctacctgg

SEQ ID NO: 31001 - DNA, 21 bp, Artificial Sequence
  Synthetic: FXN 3 forward 9:69039507-69039531; SpCas9
gccccagccttacctacctgg

SEQ ID NO: 31002 - DNA, 20 bp, Artificial Sequence
  Synthetic: FXN 3 forward 9:69039508-69039531; SpCas9
ccccagccttacctacctgg

SEQ ID NO: 31003 - DNA, 19 bp, Artificial Sequence
  Synthetic: FXN 3 forward 9:69039509-69039531; SpCas9
cccagccttacctacctgg

SEQ ID NO: 31004 - DNA, 18 bp, Artificial Sequence
  Synthetic: FXN 3 forward 9:69039510-69039531; SpCas9
ccagccttacctacctgg

SEQ ID NO: 31005 - DNA, 25 bp, Artificial Sequence
  Synthetic: FXN 3 reverse 9:69039503-69039531; SpCas9
cctccaggtaggtaaggctggggct

SEQ ID NO: 31006 - DNA, 24 bp, Artificial Sequence
  Synthetic: FXN 3 reverse 9:69039504-69039531; SpCas9
ctccaggtaggtaaggctggggct

SEQ ID NO: 31007 - DNA, 23 bp, Artificial Sequence
  Synthetic: FXN 3 reverse 9:69039505-69039531; SpCas9
tccaggtaggtaaggctggggct

SEQ ID NO: 31008 - DNA, 22 bp, Artificial Sequence
  Synthetic: FXN 3 reverse 9:69039506-69039531; SpCas9
ccaggtaggtaaggctggggct

SEQ ID NO: 31009 - DNA, 21 bp, Artificial Sequence
  Synthetic: FXN 3 reverse 9:69039507-69039531; SpCas9
caggtaggtaaggctggggct

SEQ ID NO: 31010 - DNA, 20 bp, Artificial Sequence
  Synthetic: FXN 3 reverse 9:69039508-69039531; SpCas9
aggtaggtaaggctggggct

SEQ ID NO: 31011 - DNA, 19 bp, Artificial Sequence
  Synthetic: FXN 3 reverse 9:69039509-69039531; SpCas9
ggtaggtaaggctggggct

SEQ ID NO: 31012 - DNA, 18 bp, Artificial Sequence
  Synthetic: FXN 3 reverse 9:69039510-69039531; SpCas9
gtaggtaaggctggggct

SEQ ID NO: 31013 - DNA, 25 bp, Artificial Sequence
  Synthetic: FXN 3 reverse 9:69039504-69039532; SpCas9
gcctccaggtaggtaaggctggggc

SEQ ID NO: 31014 - DNA, 24 bp, Artificial Sequence
  Synthetic: FXN 3 reverse 9:69039505-69039532; SpCas9
cctccaggtaggtaaggctggggc

SEQ ID NO: 31015 - DNA, 23 bp, Artificial Sequence
  Synthetic: FXN 3 reverse 9:69039506-69039532; SpCas9
ctccaggtaggtaaggctggggc

SEQ ID NO: 31016 - DNA, 22 bp, Artificial Sequence
  Synthetic: FXN 3 reverse 9:69039507-69039532; SpCas9
tccaggtaggtaaggctggggc

SEQ ID NO: 31017 - DNA, 21 bp, Artificial Sequence
  Synthetic: FXN 3 reverse 9:69039508-69039532; SpCas9
ccaggtaggtaaggctggggc

SEQ ID NO: 31018 - DNA, 20 bp, Artificial Sequence
  Synthetic: FXN 3 reverse 9:69039509-69039532; SpCas9
caggtaggtaaggctggggc

SEQ ID NO: 31019 - DNA, 19 bp, Artificial Sequence
  Synthetic: FXN 3 reverse 9:69039510-69039532; SpCas9
aggtaggtaaggctggggc

SEQ ID NO: 31020 - DNA, 18 bp, Artificial Sequence
  Synthetic: FXN 3 reverse 9:69039511-69039532; SpCas9
ggtaggtaaggctggggc

SEQ ID NO: 31021 - DNA, 25 bp, Artificial Sequence
  Synthetic: FXN 3 forward 9:69039507-69039535; SpCas9
gccccagccttacctacctggaggc

SEQ ID NO: 31022 - DNA, 24 bp, Artificial Sequence
  Synthetic: FXN 3 forward 9:69039508-69039535; SpCas9
ccccagccttacctacctggaggc

SEQ ID NO: 31023 - DNA, 23 bp, Artificial Sequence
  Synthetic: FXN 3 forward 9:69039509-69039535; SpCas9
cccagccttacctacctggaggc

SEQ ID NO: 31024 - DNA, 22 bp, Artificial Sequence
  Synthetic: FXN 3 forward 9:69039510-69039535; SpCas9
ccagccttacctacctggaggc

SEQ ID NO: 31025 - DNA, 21 bp, Artificial Sequence
  Synthetic: FXN 3 forward 9:69039511-69039535; SpCas9
cagccttacctacctggaggc

SEQ ID NO: 31026 - DNA, 20 bp, Artificial Sequence
  Synthetic: FXN 3 forward 9:69039512-69039535; SpCas9
agccttacctacctggaggc

SEQ ID NO: 31027 - DNA, 19 bp, Artificial Sequence
  Synthetic: FXN 3 forward 9:69039513-69039535; SpCas9
gccttacctacctggaggc

SEQ ID NO: 31028 - DNA, 18 bp, Artificial Sequence
  Synthetic: FXN 3 forward 9:69039514-69039535; SpCas9
ccttacctacctggaggc

SEQ ID NO: 31029 - DNA, 25 bp, Artificial Sequence
  Synthetic: FXN 3 forward 9:69039508-69039536; SpCas9
ccccagccttacctacctggaggct

SEQ ID NO: 31030 - DNA, 24 bp, Artificial Sequence
  Synthetic: FXN 3 forward 9:69039509-69039536; SpCas9
cccagccttacctacctggaggct

SEQ ID NO: 31031 - DNA, 23 bp, Artificial Sequence
  Synthetic: FXN 3 forward 9:69039510-69039536; SpCas9
ccagccttacctacctggaggct

SEQ ID NO: 31032 - DNA, 22 bp, Artificial Sequence
  Synthetic: FXN 3 forward 9:69039511-69039536; SpCas9
cagccttacctacctggaggct

SEQ ID NO: 31033 - DNA, 21 bp, Artificial Sequence
  Synthetic: FXN 3 forward 9:69039512-69039536; SpCas9
agccttacctacctggaggct

SEQ ID NO: 31034 - DNA, 20 bp, Artificial Sequence
  Synthetic: FXN 3 forward 9:69039513-69039536; SpCas9
gccttacctacctggaggct

SEQ ID NO: 31035 - DNA, 19 bp, Artificial Sequence
  Synthetic: FXN 3 forward 9:69039514-69039536; SpCas9
ccttacctacctggaggct

SEQ ID NO: 31036 - DNA, 18 bp, Artificial Sequence
  Synthetic: FXN 3 forward 9:69039515-69039536; SpCas9
cttacctacctggaggct

SEQ ID NO: 31037 - DNA, 25 bp, Artificial Sequence
  Synthetic: FXN 3 reverse 9:69039508-69039536; SpCas9
cccagcctccaggtaggtaaggctg

SEQ ID NO: 31038 - DNA, 24 bp, Artificial Sequence
  Synthetic: FXN 3 reverse 9:69039509-69039536; SpCas9
ccagcctccaggtaggtaaggctg

SEQ ID NO: 31039 - DNA, 23 bp, Artificial Sequence
  Synthetic: FXN 3 reverse 9:69039510-69039536; SpCas9
cagcctccaggtaggtaaggctg

SEQ ID NO: 31040 - DNA, 22 bp, Artificial Sequence
  Synthetic: FXN 3 reverse 9:69039511-69039536; SpCas9
agcctccaggtaggtaaggctg

SEQ ID NO: 31041 - DNA, 21 bp, Artificial Sequence
  Synthetic: FXN 3 reverse 9:69039512-69039536; SpCas9
gcctccaggtaggtaaggctg

SEQ ID NO: 31042 - DNA, 20 bp, Artificial Sequence
  Synthetic: FXN 3 reverse 9:69039513-69039536; SpCas9
cctccaggtaggtaaggctg

SEQ ID NO: 31043 - DNA, 19 bp, Artificial Sequence
  Synthetic: FXN 3 reverse 9:69039514-69039536; SpCas9
ctccaggtaggtaaggctg

SEQ ID NO: 31044 - DNA, 18 bp, Artificial Sequence
  Synthetic: FXN 3 reverse 9:69039515-69039536; SpCas9
tccaggtaggtaaggctg

SEQ ID NO: 31045 - DNA, 25 bp, Artificial Sequence
  Synthetic: FXN 3 reverse 9:69039509-69039537; SpCas9
tcccagcctccaggtaggtaaggct

SEQ ID NO: 31046 - DNA, 24 bp, Artificial Sequence
  Synthetic: FXN 3 reverse 9:69039510-69039537; SpCas9
cccagcctccaggtaggtaaggct

SEQ ID NO: 31047 - DNA, 23 bp, Artificial Sequence
  Synthetic: FXN 3 reverse 9:69039511-69039537; SpCas9
ccagcctccaggtaggtaaggct

SEQ ID NO: 31048 - DNA, 22 bp, Artificial Sequence
  Synthetic: FXN 3 reverse 9:69039512-69039537; SpCas9
cagcctccaggtaggtaaggct

SEQ ID NO: 31049 - DNA, 21 bp, Artificial Sequence
  Synthetic: FXN 3 reverse 9:69039513-69039537; SpCas9
agcctccaggtaggtaaggct

SEQ ID NO: 31050 - DNA, 20 bp, Artificial Sequence
  Synthetic: FXN 3 reverse 9:69039514-69039537; SpCas9
gcctccaggtaggtaaggct

SEQ ID NO: 31051 - DNA, 19 bp, Artificial Sequence
  Synthetic: FXN 3 reverse 9:69039515-69039537; SpCas9
cctccaggtaggtaaggct

SEQ ID NO: 31052 - DNA, 18 bp, Artificial Sequence
  Synthetic: FXN 3 reverse 9:69039516-69039537; SpCas9
ctccaggtaggtaaggct

SEQ ID NO: 31053 - DNA, 25 bp, Artificial Sequence
  Synthetic: FXN 3 reverse 9:69039510-69039538; SpCas9
ttcccagcctccaggtaggtaaggc

SEQ ID NO: 31054 - DNA, 24 bp, Artificial Sequence
  Synthetic: FXN 3 reverse 9:69039511-69039538; SpCas9
tcccagcctccaggtaggtaaggc

SEQ ID NO: 31055 - DNA, 23 bp, Artificial Sequence
  Synthetic: FXN 3 reverse 9:69039512-69039538; SpCas9
cccagcctccaggtaggtaaggc

SEQ ID NO: 31056 - DNA, 22 bp, Artificial Sequence
  Synthetic: FXN 3 reverse 9:69039513-69039538; SpCas9
ccagcctccaggtaggtaaggc

SEQ ID NO: 31057 - DNA, 21 bp, Artificial Sequence
  Synthetic: FXN 3 reverse 9:69039514-69039538; SpCas9
cagcctccaggtaggtaaggc

SEQ ID NO: 31058 - DNA, 20 bp, Artificial Sequence
  Synthetic: FXN 3 reverse 9:69039515-69039538; SpCas9
agcctccaggtaggtaaggc

SEQ ID NO: 31059 - DNA, 19 bp, Artificial Sequence
  Synthetic: FXN 3 reverse 9:69039516-69039538; SpCas9
gcctccaggtaggtaaggc

SEQ ID NO: 31060 - DNA, 18 bp, Artificial Sequence
  Synthetic: FXN 3 reverse 9:69039517-69039538; SpCas9
cctccaggtaggtaaggc

SEQ ID NO: 31061 - DNA, 25 bp, Artificial Sequence
  Synthetic: FXN 3 forward 9:69039511-69039539; SpCas9
cagccttacctacctggaggctggg

SEQ ID NO: 31062 - DNA, 24 bp, Artificial Sequence
  Synthetic: FXN 3 forward 9:69039512-69039539; SpCas9
agccttacctacctggaggctggg

SEQ ID NO: 31063 - DNA, 23 bp, Artificial Sequence
  Synthetic: FXN 3 forward 9:69039513-69039539; SpCas9
gccttacctacctggaggctggg

SEQ ID NO: 31064 - DNA, 22 bp, Artificial Sequence
  Synthetic: FXN 3 forward 9:69039514-69039539; SpCas9
ccttacctacctggaggctggg

SEQ ID NO: 31065 - DNA, 21 bp, Artificial Sequence
  Synthetic: FXN 3 forward 9:69039515-69039539; SpCas9
cttacctacctggaggctggg

SEQ ID NO: 31066 - DNA, 20 bp, Artificial Sequence
  Synthetic: FXN 3 forward 9:69039516-69039539; SpCas9
ttacctacctggaggctggg

SEQ ID NO: 31067 - DNA, 19 bp, Artificial Sequence
  Synthetic: FXN 3 forward 9:69039517-69039539; SpCas9
tacctacctggaggctggg

SEQ ID NO: 31068 - DNA, 18 bp, Artificial Sequence
  Synthetic: FXN 3 forward 9:69039518-69039539; SpCas9
acctacctggaggctggg

SEQ ID NO: 31069 - DNA, 25 bp, Artificial Sequence
  Synthetic: FXN 3 forward 9:69039512-69039540; SpCas9
agccttacctacctggaggctggga

SEQ ID NO: 31070 - DNA, 24 bp, Artificial Sequence
  Synthetic: FXN 3 forward 9:69039513-69039540; SpCas9
gccttacctacctggaggctggga

SEQ ID NO: 31071 - DNA, 23 bp, Artificial Sequence
  Synthetic: FXN 3 forward 9:69039514-69039540; SpCas9
ccttacctacctggaggctggga

SEQ ID NO: 31072 - DNA, 22 bp, Artificial Sequence
  Synthetic: FXN 3 forward 9:69039515-69039540; SpCas9
cttacctacctggaggctggga

SEQ ID NO: 31073 - DNA, 21 bp, Artificial Sequence
  Synthetic: FXN 3 forward 9:69039516-69039540; SpCas9
ttacctacctggaggctggga

SEQ ID NO: 31074 - DNA, 20 bp, Artificial Sequence
  Synthetic: FXN 3 forward 9:69039517-69039540; SpCas9
tacctacctggaggctggga

SEQ ID NO: 31075 - DNA, 19 bp, Artificial Sequence
  Synthetic: FXN 3 forward 9:69039518-69039540; SpCas9
acctacctggaggctggga

SEQ ID NO: 31076 - DNA, 18 bp, Artificial Sequence
  Synthetic: FXN 3 forward 9:69039519-69039540; SpCas9
cctacctggaggctggga

SEQ ID NO: 31077 - DNA, 25 bp, Artificial Sequence
  Synthetic: FXN 3 reverse 9:69039514-69039542; SpCas9
gtccttcccagcctccaggtaggta

SEQ ID NO: 31078 - DNA, 24 bp, Artificial Sequence
  Synthetic: FXN 3 reverse 9:69039515-69039542; SpCas9
tccttcccagcctccaggtaggta

SEQ ID NO: 31079 - DNA, 23 bp, Artificial Sequence
  Synthetic: FXN 3 reverse 9:69039516-69039542; SpCas9
ccttcccagcctccaggtaggta

SEQ ID NO: 31080 - DNA, 22 bp, Artificial Sequence
  Synthetic: FXN 3 reverse 9:69039517-69039542; SpCas9
cttcccagcctccaggtaggta

SEQ ID NO: 31081 - DNA, 21 bp, Artificial Sequence
  Synthetic: FXN 3 reverse 9:69039518-69039542; SpCas9
ttcccagcctccaggtaggta

SEQ ID NO: 31082 - DNA, 20 bp, Artificial Sequence
  Synthetic: FXN 3 reverse 9:69039519-69039542; SpCas9
tcccagcctccaggtaggta

SEQ ID NO: 31083 - DNA, 19 bp, Artificial Sequence
  Synthetic: FXN 3 reverse 9:69039520-69039542; SpCas9
cccagcctccaggtaggta

SEQ ID NO: 31084 - DNA, 18 bp, Artificial Sequence
  Synthetic: FXN 3 reverse 9:69039521-69039542; SpCas9
ccagcctccaggtaggta

SEQ ID NO: 31085 - DNA, 25 bp, Artificial Sequence
  Synthetic: FXN 3 reverse 9:69039515-69039543; SpCas9
agtccttcccagcctccaggtaggt

SEQ ID NO: 31086 - DNA, 24 bp, Artificial Sequence
  Synthetic: FXN 3 reverse 9:69039516-69039543; SpCas9
gtccttcccagcctccaggtaggt

SEQ ID NO: 31087 - DNA, 23 bp, Artificial Sequence
  Synthetic: FXN 3 reverse 9:69039517-69039543; SpCas9
tccttcccagcctccaggtaggt

SEQ ID NO: 31088 - DNA, 22 bp, Artificial Sequence
  Synthetic: FXN 3 reverse 9:69039518-69039543; SpCas9
ccttcccagcctccaggtaggt

SEQ ID NO: 31089 - DNA, 21 bp, Artificial Sequence
  Synthetic: FXN 3 reverse 9:69039519-69039543; SpCas9
cttcccagcctccaggtaggt

SEQ ID NO: 31090 - DNA, 20 bp, Artificial Sequence
  Synthetic: FXN 3 reverse 9:69039520-69039543; SpCas9
ttcccagcctccaggtaggt

SEQ ID NO: 31091 - DNA, 19 bp, Artificial Sequence
  Synthetic: FXN 3 reverse 9:69039521-69039543; SpCas9
tcccagcctccaggtaggt

SEQ ID NO: 31092 - DNA, 18 bp, Artificial Sequence
  Synthetic: FXN 3 reverse 9:69039522-69039543; SpCas9
cccagcctccaggtaggt

SEQ ID NO: 31093 - DNA, 25 bp, Artificial Sequence
  Synthetic: FXN 3 reverse 9:69039519-69039547; SpCas9
tcagagtccttcccagcctccaggt

SEQ ID NO: 31094 - DNA, 24 bp, Artificial Sequence
  Synthetic: FXN 3 reverse 9:69039520-69039547; SpCas9
cagagtccttcccagcctccaggt

SEQ ID NO: 31095 - DNA, 23 bp, Artificial Sequence
  Synthetic: FXN 3 reverse 9:69039521-69039547; SpCas9
agagtccttcccagcctccaggt

SEQ ID NO: 31096 - DNA, 22 bp, Artificial Sequence
  Synthetic: FXN 3 reverse 9:69039522-69039547; SpCas9
gagtccttcccagcctccaggt

SEQ ID NO: 31097 - DNA, 21 bp, Artificial Sequence
  Synthetic: FXN 3 reverse 9:69039523-69039547; SpCas9
agtccttcccagcctccaggt

SEQ ID NO: 31098 - DNA, 20 bp, Artificial Sequence
  Synthetic: FXN 3 reverse 9:69039524-69039547; SpCas9
gtccttcccagcctccaggt

SEQ ID NO: 31099 - DNA, 19 bp, Artificial Sequence
  Synthetic: FXN 3 reverse 9:69039525-69039547; SpCas9
tccttcccagcctccaggt

SEQ ID NO: 31100 - DNA, 18 bp, Artificial Sequence
  Synthetic: FXN 3 reverse 9:69039526-69039547; SpCas9
ccttcccagcctccaggt

SEQ ID NO: 31101 - DNA, 25 bp, Artificial Sequence
  Synthetic: FXN 3 reverse 9:69039520-69039548; SpCas9
atcagagtccttcccagcctccagg

SEQ ID NO: 31102 - DNA, 24 bp, Artificial Sequence
  Synthetic: FXN 3 reverse 9:69039521-69039548; SpCas9
tcagagtccttcccagcctccagg

SEQ ID NO: 31103 - DNA, 23 bp, Artificial Sequence
  Synthetic: FXN 3 reverse 9:69039522-69039548; SpCas9
cagagtccttcccagcctccagg

SEQ ID NO: 31104 - DNA, 22 bp, Artificial Sequence
  Synthetic: FXN 3 reverse 9:69039523-69039548; SpCas9
agagtccttcccagcctccagg

SEQ ID NO: 31105 - DNA, 21 bp, Artificial Sequence
  Synthetic: FXN 3 reverse 9:69039524-69039548; SpCas9
gagtccttcccagcctccagg

SEQ ID NO: 31106 - DNA, 20 bp, Artificial Sequence
  Synthetic: FXN 3 reverse 9:69039525-69039548; SpCas9
agtccttcccagcctccagg

SEQ ID NO: 31107 - DNA, 19 bp, Artificial Sequence
  Synthetic: FXN 3 reverse 9:69039526-69039548; SpCas9
gtccttcccagcctccagg

SEQ ID NO: 31108 - DNA, 18 bp, Artificial Sequence
  Synthetic: FXN 3 reverse 9:69039527-69039548; SpCas9
tccttcccagcctccagg

SEQ ID NO: 31109 - DNA, 25 bp, Artificial Sequence
  Synthetic: FXN 3 reverse 9:69039523-69039551; SpCas9
ggaatcagagtccttcccagcctcc

SEQ ID NO: 31110 - DNA, 24 bp, Artificial Sequence
  Synthetic: FXN 3 reverse 9:69039524-69039551; SpCas9
gaatcagagtccttcccagcctcc

SEQ ID NO: 31111 - DNA, 23 bp, Artificial Sequence
  Synthetic: FXN 3 reverse 9:69039525-69039551; SpCas9
aatcagagtccttcccagcctcc

SEQ ID NO: 31112 - DNA, 22 bp, Artificial Sequence
  Synthetic: FXN 3 reverse 9:69039526-69039551; SpCas9
atcagagtccttcccagcctcc

SEQ ID NO: 31113 - DNA, 21 bp, Artificial Sequence
  Synthetic: FXN 3 reverse 9:69039527-69039551; SpCas9
tcagagtccttcccagcctcc

SEQ ID NO: 31114 - DNA, 20 bp, Artificial Sequence
  Synthetic: FXN 3 reverse 9:69039528-69039551; SpCas9
cagagtccttcccagcctcc

SEQ ID NO: 31115 - DNA, 19 bp, Artificial Sequence
  Synthetic: FXN 3 reverse 9:69039529-69039551; SpCas9
agagtccttcccagcctcc

SEQ ID NO: 31116 - DNA, 18 bp, Artificial Sequence
  Synthetic: FXN 3 reverse 9:69039530-69039551; SpCas9
gagtccttcccagcctcc

SEQ ID NO: 31117 - DNA, 25 bp, Artificial Sequence
  Synthetic: FXN 3 reverse 9:69039524-69039552; SpCas9
tggaatcagagtccttcccagcctc

SEQ ID NO: 31118 - DNA, 24 bp, Artificial Sequence
  Synthetic: FXN 3 reverse 9:69039525-69039552; SpCas9
ggaatcagagtccttcccagcctc

SEQ ID NO: 31119 - DNA, 23 bp, Artificial Sequence
  Synthetic: FXN 3 reverse 9:69039526-69039552; SpCas9
gaatcagagtccttcccagcctc

SEQ ID NO: 31120 - DNA, 22 bp, Artificial Sequence
  Synthetic: FXN 3 reverse 9:69039527-69039552; SpCas9
aatcagagtccttcccagcctc

SEQ ID NO: 31121 - DNA, 21 bp, Artificial Sequence
  Synthetic: FXN 3 reverse 9:69039528-69039552; SpCas9
atcagagtccttcccagcctc

SEQ ID NO: 31122 - DNA, 20 bp, Artificial Sequence
  Synthetic: FXN 3 reverse 9:69039529-69039552; SpCas9
tcagagtccttcccagcctc

SEQ ID NO: 31123 - DNA, 19 bp, Artificial Sequence
  Synthetic: FXN 3 reverse 9:69039530-69039552; SpCas9
cagagtccttcccagcctc

SEQ ID NO: 31124 - DNA, 18 bp, Artificial Sequence
  Synthetic: FXN 3 reverse 9:69039531-69039552; SpCas9
agagtccttcccagcctc

SEQ ID NO: 31125 - DNA, 25 bp, Artificial Sequence
  Synthetic: FXN 3 forward 9:69039528-69039556; SpCas9
aggctgggaaggactctgattccac

SEQ ID NO: 31126 - DNA, 24 bp, Artificial Sequence
  Synthetic: FXN 3 forward 9:69039529-69039556; SpCas9
ggctgggaaggactctgattccac

SEQ ID NO: 31127 - DNA, 23 bp, Artificial Sequence
  Synthetic: FXN 3 forward 9:69039530-69039556; SpCas9
gctgggaaggactctgattccac

SEQ ID NO: 31128 - DNA, 22 bp, Artificial Sequence
  Synthetic: FXN 3 forward 9:69039531-69039556; SpCas9
ctgggaaggactctgattccac

SEQ ID NO: 31129 - DNA, 21 bp, Artificial Sequence
  Synthetic: FXN 3 forward 9:69039532-69039556; SpCas9
tgggaaggactctgattccac

SEQ ID NO: 31130 - DNA, 20 bp, Artificial Sequence
  Synthetic: FXN 3 forward 9:69039533-69039556; SpCas9
gggaaggactctgattccac

SEQ ID NO: 31131 - DNA, 19 bp, Artificial Sequence
  Synthetic: FXN 3 forward 9:69039534-69039556; SpCas9
ggaaggactctgattccac

SEQ ID NO: 31132 - DNA, 18 bp, Artificial Sequence
  Synthetic: FXN 3 forward 9:69039535-69039556; SpCas9
gaaggactctgattccac

SEQ ID NO: 31133 - DNA, 25 bp, Artificial Sequence
  Synthetic: FXN 3 forward 9:69039529-69039557; SpCas9
ggctgggaaggactctgattccacg

SEQ ID NO: 31134 - DNA, 24 bp, Artificial Sequence
  Synthetic: FXN 3 forward 9:69039530-69039557; SpCas9
gctgggaaggactctgattccacg

SEQ ID NO: 31135 - DNA, 23 bp, Artificial Sequence
  Synthetic: FXN 3 forward 9:69039531-69039557; SpCas9
ctgggaaggactctgattccacg

SEQ ID NO: 31136 - DNA, 22 bp, Artificial Sequence
  Synthetic: FXN 3 forward 9:69039532-69039557; SpCas9
tgggaaggactctgattccacg

SEQ ID NO: 31137 - DNA, 21 bp, Artificial Sequence
  Synthetic: FXN 3 forward 9:69039533-69039557; SpCas9
gggaaggactctgattccacg

SEQ ID NO: 31138 - DNA, 20 bp, Artificial Sequence
  Synthetic: FXN 3 forward 9:69039534-69039557; SpCas9
ggaaggactctgattccacg

SEQ ID NO: 31139 - DNA, 19 bp, Artificial Sequence
  Synthetic: FXN 3 forward 9:69039535-69039557; SpCas9
gaaggactctgattccacg

SEQ ID NO: 31140 - DNA, 18 bp, Artificial Sequence
  Synthetic: FXN 3 forward 9:69039536-69039557; SpCas9
aaggactctgattccacg

SEQ ID NO: 31141 - DNA, 25 bp, Artificial Sequence
  Synthetic: FXN 3 reverse 9:69039531-69039559; SpCas9
tgcctcgtggaatcagagtccttcc

SEQ ID NO: 31142 - DNA, 24 bp, Artificial Sequence
  Synthetic: FXN 3 reverse 9:69039532-69039559; SpCas9
gcctcgtggaatcagagtccttcc

SEQ ID NO: 31143 - DNA, 23 bp, Artificial Sequence
  Synthetic: FXN 3 reverse 9:69039533-69039559; SpCas9
cctcgtggaatcagagtccttcc

SEQ ID NO: 31144 - DNA, 22 bp, Artificial Sequence
  Synthetic: FXN 3 reverse 9:69039534-69039559; SpCas9
ctcgtggaatcagagtccttcc

SEQ ID NO: 31145 - DNA, 21 bp, Artificial Sequence
  Synthetic: FXN 3 reverse 9:69039535-69039559; SpCas9
tcgtggaatcagagtccttcc

SEQ ID NO: 31146 - DNA, 20 bp, Artificial Sequence
  Synthetic: FXN 3 reverse 9:69039536-69039559; SpCas9
cgtggaatcagagtccttcc

SEQ ID NO: 31147 - DNA, 19 bp, Artificial Sequence
  Synthetic: FXN 3 reverse 9:69039537-69039559; SpCas9
gtggaatcagagtccttcc

SEQ ID NO: 31148 - DNA, 18 bp, Artificial Sequence
  Synthetic: FXN 3 reverse 9:69039538-69039559; SpCas9
tggaatcagagtccttcc

SEQ ID NO: 31149 - DNA, 25 bp, Artificial Sequence
  Synthetic: FXN 3 forward 9:69039532-69039560; SpCas9
tgggaaggactctgattccacgagg

SEQ ID NO: 31150 - DNA, 24 bp, Artificial Sequence
  Synthetic: FXN 3 forward 9:69039533-69039560; SpCas9
gggaaggactctgattccacgagg

SEQ ID NO: 31151 - DNA, 23 bp, Artificial Sequence
  Synthetic: FXN 3 forward 9:69039534-69039560; SpCas9
ggaaggactctgattccacgagg

SEQ ID NO: 31152 - DNA, 22 bp, Artificial Sequence
  Synthetic: FXN 3 forward 9:69039535-69039560; SpCas9
gaaggactctgattccacgagg

SEQ ID NO: 31153 - DNA, 21 bp, Artificial Sequence
  Synthetic: FXN 3 forward 9:69039536-69039560; SpCas9
aaggactctgattccacgagg

SEQ ID NO: 31154 - DNA, 20 bp, Artificial Sequence
  Synthetic: FXN 3 forward 9:69039537-69039560; SpCas9
aggactctgattccacgagg

SEQ ID NO: 31155 - DNA, 19 bp, Artificial Sequence
  Synthetic: FXN 3 forward 9:69039538-69039560; SpCas9
ggactctgattccacgagg

SEQ ID NO: 31156 - DNA, 18 bp, Artificial Sequence
  Synthetic: FXN 3 forward 9:69039539-69039560; SpCas9
gactctgattccacgagg

SEQ ID NO: 31157 - DNA, 25 bp, Artificial Sequence
  Synthetic: FXN 3 reverse 9:69039541-69039569; SpCas9
aaacataggctgcctcgtggaatca

SEQ ID NO: 31158 - DNA, 24 bp, Artificial Sequence
  Synthetic: FXN 3 reverse 9:69039542-69039569; SpCas9
aacataggctgcctcgtggaatca

SEQ ID NO: 31159 - DNA, 23 bp, Artificial Sequence
  Synthetic: FXN 3 reverse 9:69039543-69039569; SpCas9
acataggctgcctcgtggaatca

SEQ ID NO: 31160 - DNA, 22 bp, Artificial Sequence
  Synthetic: FXN 3 reverse 9:69039544-69039569; SpCas9
cataggctgcctcgtggaatca

SEQ ID NO: 31161 - DNA, 21 bp, Artificial Sequence
  Synthetic: FXN 3 reverse 9:69039545-69039569; SpCas9
ataggctgcctcgtggaatca

SEQ ID NO: 31162 - DNA, 20 bp, Artificial Sequence
  Synthetic: FXN 3 reverse 9:69039546-69039569; SpCas9
taggctgcctcgtggaatca

SEQ ID NO: 31163 - DNA, 19 bp, Artificial Sequence
  Synthetic: FXN 3 reverse 9:69039547-69039569; SpCas9
aggctgcctcgtggaatca

SEQ ID NO: 31164 - DNA, 18 bp, Artificial Sequence
  Synthetic: FXN 3 reverse 9:69039548-69039569; SpCas9
ggctgcctcgtggaatca

SEQ ID NO: 31165 - DNA, 25 bp, Artificial Sequence
  Synthetic: FXN 3 reverse 9:69039543-69039571; SpCas9
aaaaacataggctgcctcgtggaat

SEQ ID NO: 31166 - DNA, 24 bp, Artificial Sequence
  Synthetic: FXN 3 reverse 9:69039544-69039571; SpCas9
aaaacataggctgcctcgtggaat

SEQ ID NO: 31167 - DNA, 23 bp, Artificial Sequence
  Synthetic: FXN 3 reverse 9:69039545-69039571; SpCas9
aaacataggctgcctcgtggaat

SEQ ID NO: 31168 - DNA, 22 bp, Artificial Sequence
  Synthetic: FXN 3 reverse 9:69039546-69039571; SpCas9
aacataggctgcctcgtggaat

SEQ ID NO: 31169 - DNA, 21 bp, Artificial Sequence
  Synthetic: FXN 3 reverse 9:69039547-69039571; SpCas9
acataggctgcctcgtggaat

SEQ ID NO: 31170 - DNA, 20 bp, Artificial Sequence
  Synthetic: FXN 3 reverse 9:69039548-69039571; SpCas9
cataggctgcctcgtggaat

SEQ ID NO: 31171 - DNA, 19 bp, Artificial Sequence
  Synthetic: FXN 3 reverse 9:69039549-69039571; SpCas9
ataggctgcctcgtggaat

SEQ ID NO: 31172 - DNA, 18 bp, Artificial Sequence
  Synthetic: FXN 3 reverse 9:69039550-69039571; SpCas9
taggctgcctcgtggaat

SEQ ID NO: 31173 - DNA, 25 bp, Artificial Sequence
  Synthetic: FXN 3 forward 9:69039549-69039577; SpCas9
ccacgaggcagcctatgttttttga

SEQ ID NO: 31174 - DNA, 24 bp, Artificial Sequence
  Synthetic: FXN 3 forward 9:69039550-69039577; SpCas9
cacgaggcagcctatgttttttga

SEQ ID NO: 31175 - DNA, 23 bp, Artificial Sequence
  Synthetic: FXN 3 forward 9:69039551-69039577; SpCas9
acgaggcagcctatgttttttga

SEQ ID NO: 31176 - DNA, 22 bp, Artificial Sequence
  Synthetic: FXN 3 forward 9:69039552-69039577; SpCas9
cgaggcagcctatgttttttga

SEQ ID NO: 31177 - DNA, 21 bp, Artificial Sequence
  Synthetic: FXN 3 forward 9:69039553-69039577; SpCas9
gaggcagcctatgttttttga

SEQ ID NO: 31178 - DNA, 20 bp, Artificial Sequence
  Synthetic: FXN 3 forward 9:69039554-69039577; SpCas9
aggcagcctatgttttttga

SEQ ID NO: 31179 - DNA, 19 bp, Artificial Sequence
  Synthetic: FXN 3 forward 9:69039555-69039577; SpCas9
ggcagcctatgttttttga

SEQ ID NO: 31180 - DNA, 18 bp, Artificial Sequence
  Synthetic: FXN 3 forward 9:69039556-69039577; SpCas9
gcagcctatgttttttga

SEQ ID NO: 31181 - DNA, 25 bp, Artificial Sequence
  Synthetic: FXN 3 reverse 9:69039549-69039577; SpCas9
ccatcaaaaaacataggctgcctcg

SEQ ID NO: 31182 - DNA, 24 bp, Artificial Sequence
  Synthetic: FXN 3 reverse 9:69039550-69039577; SpCas9
catcaaaaaacataggctgcctcg

SEQ ID NO: 31183 - DNA, 23 bp, Artificial Sequence
  Synthetic: FXN 3 reverse 9:69039551-69039577; SpCas9
atcaaaaaacataggctgcctcg

SEQ ID NO: 31184 - DNA, 22 bp, Artificial Sequence
  Synthetic: FXN 3 reverse 9:69039552-69039577; SpCas9
tcaaaaaacataggctgcctcg

SEQ ID NO: 31185 - DNA, 21 bp, Artificial Sequence
  Synthetic: FXN 3 reverse 9:69039553-69039577; SpCas9
caaaaaacataggctgcctcg

SEQ ID NO: 31186 - DNA, 20 bp, Artificial Sequence
  Synthetic: FXN 3 reverse 9:69039554-69039577; SpCas9
aaaaaacataggctgcctcg

SEQ ID NO: 31187 - DNA, 19 bp, Artificial Sequence
  Synthetic: FXN 3 reverse 9:69039555-69039577; SpCas9
aaaaacataggctgcctcg

SEQ ID NO: 31188 - DNA, 18 bp, Artificial Sequence
  Synthetic: FXN 3 reverse 9:69039556-69039577; SpCas9
aaaacataggctgcctcg

SEQ ID NO: 31189 - DNA, 25 bp, Artificial Sequence
  Synthetic: FXN 3 forward 9:69039551-69039579; SpCas9
acgaggcagcctatgttttttgatg

SEQ ID NO: 31190 - DNA, 24 bp, Artificial Sequence
  Synthetic: FXN 3 forward 9:69039552-69039579; SpCas9
cgaggcagcctatgttttttgatg

SEQ ID NO: 31191 - DNA, 23 bp, Artificial Sequence
  Synthetic: FXN 3 forward 9:69039553-69039579; SpCas9
gaggcagcctatgttttttgatg

SEQ ID NO: 31192 - DNA, 22 bp, Artificial Sequence
  Synthetic: FXN 3 forward 9:69039554-69039579; SpCas9
aggcagcctatgttttttgatg

SEQ ID NO: 31193 - DNA, 21 bp, Artificial Sequence
  Synthetic: FXN 3 forward 9:69039555-69039579; SpCas9
ggcagcctatgttttttgatg

SEQ ID NO: 31194 - DNA, 20 bp, Artificial Sequence
  Synthetic: FXN 3 forward 9:69039556-69039579; SpCas9
gcagcctatgttttttgatg

SEQ ID NO: 31195 - DNA, 19 bp, Artificial Sequence
  Synthetic: FXN 3 forward 9:69039557-69039579; SpCas9
cagcctatgttttttgatg

SEQ ID NO: 31196 - DNA, 18 bp, Artificial Sequence
  Synthetic: FXN 3 forward 9:69039558-69039579; SpCas9
agcctatgttttttgatg

SEQ ID NO: 31197 - DNA, 25 bp, Artificial Sequence
  Synthetic: FXN 3 forward 9:69039552-69039580; SpCas9
cgaggcagcctatgttttttgatgg

SEQ ID NO: 31198 - DNA, 24 bp, Artificial Sequence
  Synthetic: FXN 3 forward 9:69039553-69039580; SpCas9
gaggcagcctatgttttttgatgg

SEQ ID NO: 31199 - DNA, 23 bp, Artificial Sequence
  Synthetic: FXN 3 forward 9:69039554-69039580; SpCas9
aggcagcctatgttttttgatgg

SEQ ID NO: 31200 - DNA, 22 bp, Artificial Sequence
  Synthetic: FXN 3 forward 9:69039555-69039580; SpCas9
ggcagcctatgttttttgatgg

SEQ ID NO: 31201 - DNA, 21 bp, Artificial Sequence
  Synthetic: FXN 3 forward 9:69039556-69039580; SpCas9
gcagcctatgttttttgatgg

SEQ ID NO: 31202 - DNA, 20 bp, Artificial Sequence
  Synthetic: FXN 3 forward 9:69039557-69039580; SpCas9
cagcctatgttttttgatgg

SEQ ID NO: 31203 - DNA, 19 bp, Artificial Sequence
  Synthetic: FXN 3 forward 9:69039558-69039580; SpCas9
agcctatgttttttgatgg

SEQ ID NO: 31204 - DNA, 18 bp, Artificial Sequence
  Synthetic: FXN 3 forward 9:69039559-69039580; SpCas9
gcctatgttttttgatgg

SEQ ID NO: 31205 - DNA, 25 bp, Artificial Sequence
  Synthetic: FXN 3 forward 9:69039553-69039581; SpCas9
gaggcagcctatgttttttgatgga

SEQ ID NO: 31206 - DNA, 24 bp, Artificial Sequence
  Synthetic: FXN 3 forward 9:69039554-69039581; SpCas9
aggcagcctatgttttttgatgga

SEQ ID NO: 31207 - DNA, 23 bp, Artificial Sequence
  Synthetic: FXN 3 forward 9:69039555-69039581; SpCas9
ggcagcctatgttttttgatgga

SEQ ID NO: 31208 - DNA, 22 bp, Artificial Sequence
  Synthetic: FXN 3 forward 9:69039556-69039581; SpCas9
gcagcctatgttttttgatgga

SEQ ID NO: 31209 - DNA, 21 bp, Artificial Sequence
  Synthetic: FXN 3 forward 9:69039557-69039581; SpCas9
cagcctatgttttttgatgga

SEQ ID NO: 31210 - DNA, 20 bp, Artificial Sequence
  Synthetic: FXN 3 forward 9:69039558-69039581; SpCas9
agcctatgttttttgatgga

SEQ ID NO: 31211 - DNA, 19 bp, Artificial Sequence
  Synthetic: FXN 3 forward 9:69039559-69039581; SpCas9
gcctatgttttttgatgga

SEQ ID NO: 31212 - DNA, 18 bp, Artificial Sequence
  Synthetic: FXN 3 forward 9:69039560-69039581; SpCas9
cctatgttttttgatgga

SEQ ID NO: 31213 - DNA, 25 bp, Artificial Sequence
  Synthetic: FXN 3 reverse 9:69039560-69039588; SpCas9
gtcacatccctccatcaaaaaacat

SEQ ID NO: 31214 - DNA, 24 bp, Artificial Sequence
  Synthetic: FXN 3 reverse 9:69039561-69039588; SpCas9
tcacatccctccatcaaaaaacat

SEQ ID NO: 31215 - DNA, 23 bp, Artificial Sequence
  Synthetic: FXN 3 reverse 9:69039562-69039588; SpCas9
cacatccctccatcaaaaaacat

SEQ ID NO: 31216 - DNA, 22 bp, Artificial Sequence
  Synthetic: FXN 3 reverse 9:69039563-69039588; SpCas9
acatccctccatcaaaaaacat

SEQ ID NO: 31217 - DNA, 21 bp, Artificial Sequence
  Synthetic: FXN 3 reverse 9:69039564-69039588; SpCas9
catccctccatcaaaaaacat

SEQ ID NO: 31218 - DNA, 20 bp, Artificial Sequence
  Synthetic: FXN 3 reverse 9:69039565-69039588; SpCas9
atccctccatcaaaaaacat

SEQ ID NO: 31219 - DNA, 19 bp, Artificial Sequence
  Synthetic: FXN 3 reverse 9:69039566-69039588; SpCas9
tccctccatcaaaaaacat

SEQ ID NO: 31220 - DNA, 18 bp, Artificial Sequence
  Synthetic: FXN 3 reverse 9:69039567-69039588; SpCas9
ccctccatcaaaaaacat

SEQ ID NO: 31221 - DNA, 25 bp, Artificial Sequence
  Synthetic: FXN 3 reverse 9:69039561-69039589; SpCas9
tgtcacatccctccatcaaaaaaca

SEQ ID NO: 31222 - DNA, 24 bp, Artificial Sequence
  Synthetic: FXN 3 reverse 9:69039562-69039589; SpCas9
gtcacatccctccatcaaaaaaca

SEQ ID NO: 31223 - DNA, 23 bp, Artificial Sequence
  Synthetic: FXN 3 reverse 9:69039563-69039589; SpCas9
tcacatccctccatcaaaaaaca

SEQ ID NO: 31224 - DNA, 22 bp, Artificial Sequence
  Synthetic: FXN 3 reverse 9:69039564-69039589; SpCas9
cacatccctccatcaaaaaaca

SEQ ID NO: 31225 - DNA, 21 bp, Artificial Sequence
  Synthetic: FXN 3 reverse 9:69039565-69039589; SpCas9
acatccctccatcaaaaaaca

SEQ ID NO: 31226 - DNA, 20 bp, Artificial Sequence
  Synthetic: FXN 3 reverse 9:69039566-69039589; SpCas9
catccctccatcaaaaaaca

SEQ ID NO: 31227 - DNA, 19 bp, Artificial Sequence
  Synthetic: FXN 3 reverse 9:69039567-69039589; SpCas9
atccctccatcaaaaaaca

SEQ ID NO: 31228 - DNA, 18 bp, Artificial Sequence
  Synthetic: FXN 3 reverse 9:69039568-69039589; SpCas9
tccctccatcaaaaaaca

SEQ ID NO: 31229 - DNA, 25 bp, Artificial Sequence
  Synthetic: FXN 3 forward 9:69039562-69039590; SpCas9
tatgttttttgatggagggatgtga

SEQ ID NO: 31230 - DNA, 24 bp, Artificial Sequence
  Synthetic: FXN 3 forward 9:69039563-69039590; SpCas9
atgttttttgatggagggatgtga

SEQ ID NO: 31231 - DNA, 23 bp, Artificial Sequence
  Synthetic: FXN 3 forward 9:69039564-69039590; SpCas9
tgttttttgatggagggatgtga

SEQ ID NO: 31232 - DNA, 22 bp, Artificial Sequence
  Synthetic: FXN 3 forward 9:69039565-69039590; SpCas9
gttttttgatggagggatgtga

SEQ ID NO: 31233 - DNA, 21 bp, Artificial Sequence
  Synthetic: FXN 3 forward 9:69039566-69039590; SpCas9
ttttttgatggagggatgtga

SEQ ID NO: 31234 - DNA, 20 bp, Artificial Sequence
  Synthetic: FXN 3 forward 9:69039567-69039590; SpCas9
tttttgatggagggatgtga

SEQ ID NO: 31235 - DNA, 19 bp, Artificial Sequence
  Synthetic: FXN 3 forward 9:69039568-69039590; SpCas9
ttttgatggagggatgtga

SEQ ID NO: 31236 - DNA, 18 bp, Artificial Sequence
  Synthetic: FXN 3 forward 9:69039569-69039590; SpCas9
tttgatggagggatgtga

SEQ ID NO: 31237 - DNA, 25 bp, Artificial Sequence
  Synthetic: FXN 3 forward 9:69039563-69039591; SpCas9
atgttttttgatggagggatgtgac

SEQ ID NO: 31238 - DNA, 24 bp, Artificial Sequence
  Synthetic: FXN 3 forward 9:69039564-69039591; SpCas9
tgttttttgatggagggatgtgac

SEQ ID NO: 31239 - DNA, 23 bp, Artificial Sequence
  Synthetic: FXN 3 forward 9:69039565-69039591; SpCas9
gttttttgatggagggatgtgac

SEQ ID NO: 31240 - DNA, 22 bp, Artificial Sequence
  Synthetic: FXN 3 forward 9:69039566-69039591; SpCas9
ttttttgatggagggatgtgac

SEQ ID NO: 31241 - DNA, 21 bp, Artificial Sequence
  Synthetic: FXN 3 forward 9:69039567-69039591; SpCas9
tttttgatggagggatgtgac

SEQ ID NO: 31242 - DNA, 20 bp, Artificial Sequence
  Synthetic: FXN 3 forward 9:69039568-69039591; SpCas9
ttttgatggagggatgtgac

SEQ ID NO: 31243 - DNA, 19 bp, Artificial Sequence
  Synthetic: FXN 3 forward 9:69039569-69039591; SpCas9
tttgatggagggatgtgac

SEQ ID NO: 31244 - DNA, 18 bp, Artificial Sequence
  Synthetic: FXN 3 forward 9:69039570-69039591; SpCas9
ttgatggagggatgtgac

SEQ ID NO: 31245 - DNA, 25 bp, Artificial Sequence
  Synthetic: FXN 3 forward 9:69039564-69039592; SpCas9
tgttttttgatggagggatgtgaca

SEQ ID NO: 31246 - DNA, 24 bp, Artificial Sequence
  Synthetic: FXN 3 forward 9:69039565-69039592; SpCas9
gttttttgatggagggatgtgaca

SEQ ID NO: 31247 - DNA, 23 bp, Artificial Sequence
  Synthetic: FXN 3 forward 9:69039566-69039592; SpCas9
ttttttgatggagggatgtgaca

SEQ ID NO: 31248 - DNA, 22 bp, Artificial Sequence
  Synthetic: FXN 3 forward 9:69039567-69039592; SpCas9
tttttgatggagggatgtgaca

SEQ ID NO: 31249 - DNA, 21 bp, Artificial Sequence
  Synthetic: FXN 3 forward 9:69039568-69039592; SpCas9
ttttgatggagggatgtgaca

SEQ ID NO: 31250 - DNA, 20 bp, Artificial Sequence
  Synthetic: FXN 3 forward 9:69039569-69039592; SpCas9
tttgatggagggatgtgaca

SEQ ID NO: 31251 - DNA, 19 bp, Artificial Sequence
  Synthetic: FXN 3 forward 9:69039570-69039592; SpCas9
ttgatggagggatgtgaca

SEQ ID NO: 31252 - DNA, 18 bp, Artificial Sequence
  Synthetic: FXN 3 forward 9:69039571-69039592; SpCas9
tgatggagggatgtgaca

SEQ ID NO: 31253 - DNA, 25 bp, Artificial Sequence
  Synthetic: FXN 3 forward 9:69039565-69039593; SpCas9
gttttttgatggagggatgtgacag

SEQ ID NO: 31254 - DNA, 24 bp, Artificial Sequence
  Synthetic: FXN 3 forward 9:69039566-69039593; SpCas9
ttttttgatggagggatgtgacag

SEQ ID NO: 31255 - DNA, 23 bp, Artificial Sequence
  Synthetic: FXN 3 forward 9:69039567-69039593; SpCas9
tttttgatggagggatgtgacag

SEQ ID NO: 31256 - DNA, 22 bp, Artificial Sequence
  Synthetic: FXN 3 forward 9:69039568-69039593; SpCas9
ttttgatggagggatgtgacag

SEQ ID NO: 31257 - DNA, 21 bp, Artificial Sequence
  Synthetic: FXN 3 forward 9:69039569-69039593; SpCas9
tttgatggagggatgtgacag

SEQ ID NO: 31258 - DNA, 20 bp, Artificial Sequence
  Synthetic: FXN 3 forward 9:69039570-69039593; SpCas9
ttgatggagggatgtgacag

SEQ ID NO: 31259 - DNA, 19 bp, Artificial Sequence
  Synthetic: FXN 3 forward 9:69039571-69039593; SpCas9
tgatggagggatgtgacag

SEQ ID NO: 31260 - DNA, 18 bp, Artificial Sequence
  Synthetic: FXN 3 forward 9:69039572-69039593; SpCas9
gatggagggatgtgacag

SEQ ID NO: 31261 - DNA, 25 bp, Artificial Sequence
  Synthetic: FXN 3 reverse 9:69039593-69039621; SpCas9
tatttaagaggaaacgttaaagatg

SEQ ID NO: 31262 - DNA, 24 bp, Artificial Sequence
  Synthetic: FXN 3 reverse 9:69039594-69039621; SpCas9
atttaagaggaaacgttaaagatg

SEQ ID NO: 31263 - DNA, 23 bp, Artificial Sequence
  Synthetic: FXN 3 reverse 9:69039595-69039621; SpCas9
tttaagaggaaacgttaaagatg

SEQ ID NO: 31264 - DNA, 22 bp, Artificial Sequence
  Synthetic: FXN 3 reverse 9:69039596-69039621; SpCas9
ttaagaggaaacgttaaagatg

SEQ ID NO: 31265 - DNA, 21 bp, Artificial Sequence
  Synthetic: FXN 3 reverse 9:69039597-69039621; SpCas9
taagaggaaacgttaaagatg

SEQ ID NO: 31266 - DNA, 20 bp, Artificial Sequence
  Synthetic: FXN 3 reverse 9:69039598-69039621; SpCas9
aagaggaaacgttaaagatg

SEQ ID NO: 31267 - DNA, 19 bp, Artificial Sequence
  Synthetic: FXN 3 reverse 9:69039599-69039621; SpCas9
agaggaaacgttaaagatg

SEQ ID NO: 31268 - DNA, 18 bp, Artificial Sequence
  Synthetic: FXN 3 reverse 9:69039600-69039621; SpCas9
gaggaaacgttaaagatg

SEQ ID NO: 31269 - DNA, 25 bp, Artificial Sequence
  Synthetic: FXN 3 forward 9:69039597-69039625; SpCas9
atctttaacgtttcctcttaaatac

SEQ ID NO: 31270 - DNA, 24 bp, Artificial Sequence
  Synthetic: FXN 3 forward 9:69039598-69039625; SpCas9
tctttaacgtttcctcttaaatac

SEQ ID NO: 31271 - DNA, 23 bp, Artificial Sequence
  Synthetic: FXN 3 forward 9:69039599-69039625; SpCas9
ctttaacgtttcctcttaaatac

SEQ ID NO: 31272 - DNA, 22 bp, Artificial Sequence
  Synthetic: FXN 3 forward 9:69039600-69039625; SpCas9
tttaacgtttcctcttaaatac

SEQ ID NO: 31273 - DNA, 21 bp, Artificial Sequence
  Synthetic: FXN 3 forward 9:69039601-69039625; SpCas9
ttaacgtttcctcttaaatac

SEQ ID NO: 31274 - DNA, 20 bp, Artificial Sequence
  Synthetic: FXN 3 forward 9:69039602-69039625; SpCas9
taacgtttcctcttaaatac

SEQ ID NO: 31275 - DNA, 19 bp, Artificial Sequence
  Synthetic: FXN 3 forward 9:69039603-69039625; SpCas9
aacgtttcctcttaaatac

SEQ ID NO: 31276 - DNA, 18 bp, Artificial Sequence
  Synthetic: FXN 3 forward 9:69039604-69039625; SpCas9
acgtttcctcttaaatac

SEQ ID NO: 31277 - DNA, 25 bp, Artificial Sequence
  Synthetic: FXN 3 forward 9:69039599-69039627; SpCas9
ctttaacgtttcctcttaaatactg

SEQ ID NO: 31278 - DNA, 24 bp, Artificial Sequence
  Synthetic: FXN 3 forward 9:69039600-69039627; SpCas9
tttaacgtttcctcttaaatactg

SEQ ID NO: 31279 - DNA, 23 bp, Artificial Sequence
  Synthetic: FXN 3 forward 9:69039601-69039627; SpCas9
ttaacgtttcctcttaaatactg

SEQ ID NO: 31280 - DNA, 22 bp, Artificial Sequence
  Synthetic: FXN 3 forward 9:69039602-69039627; SpCas9
taacgtttcctcttaaatactg

SEQ ID NO: 31281 - DNA, 21 bp, Artificial Sequence
  Synthetic: FXN 3 forward 9:69039603-69039627; SpCas9
aacgtttcctcttaaatactg

SEQ ID NO: 31282 - DNA, 20 bp, Artificial Sequence
  Synthetic: FXN 3 forward 9:69039604-69039627; SpCas9
acgtttcctcttaaatactg

SEQ ID NO: 31283 - DNA, 19 bp, Artificial Sequence
  Synthetic: FXN 3 forward 9:69039605-69039627; SpCas9
cgtttcctcttaaatactg

SEQ ID NO: 31284 - DNA, 18 bp, Artificial Sequence
  Synthetic: FXN 3 forward 9:69039606-69039627; SpCas9
gtttcctcttaaatactg

SEQ ID NO: 31285 - DNA, 25 bp, Artificial Sequence
  Synthetic: FXN 3 reverse 9:69039599-69039627; SpCas9
ctccagtatttaagaggaaacgtta

SEQ ID NO: 31286 - DNA, 24 bp, Artificial Sequence
  Synthetic: FXN 3 reverse 9:69039600-69039627; SpCas9
tccagtatttaagaggaaacgtta

SEQ ID NO: 31287 - DNA, 23 bp, Artificial Sequence
  Synthetic: FXN 3 reverse 9:69039601-69039627; SpCas9
ccagtatttaagaggaaacgtta

SEQ ID NO: 31288 - DNA, 22 bp, Artificial Sequence
  Synthetic: FXN 3 reverse 9:69039602-69039627; SpCas9
cagtatttaagaggaaacgtta

SEQ ID NO: 31289 - DNA, 21 bp, Artificial Sequence
  Synthetic: FXN 3 reverse 9:69039603-69039627; SpCas9
agtatttaagaggaaacgtta

SEQ ID NO: 31290 - DNA, 20 bp, Artificial Sequence
  Synthetic: FXN 3 reverse 9:69039604-69039627; SpCas9
gtatttaagaggaaacgtta

SEQ ID NO: 31291 - DNA, 19 bp, Artificial Sequence
  Synthetic: FXN 3 reverse 9:69039605-69039627; SpCas9
tatttaagaggaaacgtta

SEQ ID NO: 31292 - DNA, 18 bp, Artificial Sequence
  Synthetic: FXN 3 reverse 9:69039606-69039627; SpCas9
atttaagaggaaacgtta

SEQ ID NO: 31293 - DNA, 25 bp, Artificial Sequence
  Synthetic: FXN 3 forward 9:69039603-69039631; SpCas9
aacgtttcctcttaaatactggaga

SEQ ID NO: 31294 - DNA, 24 bp, Artificial Sequence
  Synthetic: FXN 3 forward 9:69039604-69039631; SpCas9
acgtttcctcttaaatactggaga

SEQ ID NO: 31295 - DNA, 23 bp, Artificial Sequence
  Synthetic: FXN 3 forward 9:69039605-69039631; SpCas9
cgtttcctcttaaatactggaga

SEQ ID NO: 31296 - DNA, 22 bp, Artificial Sequence
  Synthetic: FXN 3 forward 9:69039606-69039631; SpCas9
gtttcctcttaaatactggaga

SEQ ID NO: 31297 - DNA, 21 bp, Artificial Sequence
  Synthetic: FXN 3 forward 9:69039607-69039631; SpCas9
tttcctcttaaatactggaga

SEQ ID NO: 31298 - DNA, 20 bp, Artificial Sequence
  Synthetic: FXN 3 forward 9:69039608-69039631; SpCas9
ttcctcttaaatactggaga

SEQ ID NO: 31299 - DNA, 19 bp, Artificial Sequence
  Synthetic: FXN 3 forward 9:69039609-69039631; SpCas9
tcctcttaaatactggaga

SEQ ID NO: 31300 - DNA, 18 bp, Artificial Sequence
  Synthetic: FXN 3 forward 9:69039610-69039631; SpCas9
cctcttaaatactggaga

SEQ ID NO: 31301 - DNA, 25 bp, Artificial Sequence
  Synthetic: FXN 3 forward 9:69039610-69039638; SpCas9
cctcttaaatactggagacagcttc

SEQ ID NO: 31302 - DNA, 24 bp, Artificial Sequence
  Synthetic: FXN 3 forward 9:69039611-69039638; SpCas9
ctcttaaatactggagacagcttc

SEQ ID NO: 31303 - DNA, 23 bp, Artificial Sequence
  Synthetic: FXN 3 forward 9:69039612-69039638; SpCas9
tcttaaatactggagacagcttc

SEQ ID NO: 31304 - DNA, 22 bp, Artificial Sequence
  Synthetic: FXN 3 forward 9:69039613-69039638; SpCas9
cttaaatactggagacagcttc

SEQ ID NO: 31305 - DNA, 21 bp, Artificial Sequence
  Synthetic: FXN 3 forward 9:69039614-69039638; SpCas9
ttaaatactggagacagcttc

SEQ ID NO: 31306 - DNA, 20 bp, Artificial Sequence
  Synthetic: FXN 3 forward 9:69039615-69039638; SpCas9
taaatactggagacagcttc

SEQ ID NO: 31307 - DNA, 19 bp, Artificial Sequence
  Synthetic: FXN 3 forward 9:69039616-69039638; SpCas9
aaatactggagacagcttc

SEQ ID NO: 31308 - DNA, 18 bp, Artificial Sequence
  Synthetic: FXN 3 forward 9:69039617-69039638; SpCas9
aatactggagacagcttc

SEQ ID NO: 31309 - DNA, 25 bp, Artificial Sequence
  Synthetic: FXN 3 reverse 9:69039610-69039638; SpCas9
ctcgaagctgtctccagtatttaag

SEQ ID NO: 31310 - DNA, 24 bp, Artificial Sequence
  Synthetic: FXN 3 reverse 9:69039611-69039638; SpCas9
tcgaagctgtctccagtatttaag

SEQ ID NO: 31311 - DNA, 23 bp, Artificial Sequence
  Synthetic: FXN 3 reverse 9:69039612-69039638; SpCas9
cgaagctgtctccagtatttaag

SEQ ID NO: 31312 - DNA, 22 bp, Artificial Sequence
  Synthetic: FXN 3 reverse 9:69039613-69039638; SpCas9
gaagctgtctccagtatttaag

SEQ ID NO: 31313 - DNA, 21 bp, Artificial Sequence
  Synthetic: FXN 3 reverse 9:69039614-69039638; SpCas9
aagctgtctccagtatttaag

SEQ ID NO: 31314 - DNA, 20 bp, Artificial Sequence
  Synthetic: FXN 3 reverse 9:69039615-69039638; SpCas9
agctgtctccagtatttaag

SEQ ID NO: 31315 - DNA, 19 bp, Artificial Sequence
  Synthetic: FXN 3 reverse 9:69039616-69039638; SpCas9
gctgtctccagtatttaag

SEQ ID NO: 31316 - DNA, 18 bp, Artificial Sequence
  Synthetic: FXN 3 reverse 9:69039617-69039638; SpCas9
ctgtctccagtatttaag

SEQ ID NO: 31317 - DNA, 25 bp, Artificial Sequence
  Synthetic: FXN 3 forward 9:69039611-69039639; SpCas9
ctcttaaatactggagacagcttcg

SEQ ID NO: 31318 - DNA, 24 bp, Artificial Sequence
  Synthetic: FXN 3 forward 9:69039612-69039639; SpCas9
tcttaaatactggagacagcttcg

SEQ ID NO: 31319 - DNA, 23 bp, Artificial Sequence
  Synthetic: FXN 3 forward 9:69039613-69039639; SpCas9
cttaaatactggagacagcttcg

SEQ ID NO: 31320 - DNA, 22 bp, Artificial Sequence
  Synthetic: FXN 3 forward 9:69039614-69039639; SpCas9
ttaaatactggagacagcttcg

SEQ ID NO: 31321 - DNA, 21 bp, Artificial Sequence
  Synthetic: FXN 3 forward 9:69039615-69039639; SpCas9
taaatactggagacagcttcg

SEQ ID NO: 31322 - DNA, 20 bp, Artificial Sequence
  Synthetic: FXN 3 forward 9:69039616-69039639; SpCas9
aaatactggagacagcttcg

SEQ ID NO: 31323 - DNA, 19 bp, Artificial Sequence
  Synthetic: FXN 3 forward 9:69039617-69039639; SpCas9
aatactggagacagcttcg

SEQ ID NO: 31324 - DNA, 18 bp, Artificial Sequence
  Synthetic: FXN 3 forward 9:69039618-69039639; SpCas9
atactggagacagcttcg

SEQ ID NO: 31325 - DNA, 25 bp, Artificial Sequence
  Synthetic: FXN 3 reverse 9:69039611-69039639; SpCas9
cctcgaagctgtctccagtatttaa

SEQ ID NO: 31326 - DNA, 24 bp, Artificial Sequence
  Synthetic: FXN 3 reverse 9:69039612-69039639; SpCas9
ctcgaagctgtctccagtatttaa

SEQ ID NO: 31327 - DNA, 23 bp, Artificial Sequence
  Synthetic: FXN 3 reverse 9:69039613-69039639; SpCas9
tcgaagctgtctccagtatttaa

SEQ ID NO: 31328 - DNA, 22 bp, Artificial Sequence
  Synthetic: FXN 3 reverse 9:69039614-69039639; SpCas9
cgaagctgtctccagtatttaa

SEQ ID NO: 31329 - DNA, 21 bp, Artificial Sequence
  Synthetic: FXN 3 reverse 9:69039615-69039639; SpCas9
gaagctgtctccagtatttaa

SEQ ID NO: 31330 - DNA, 20 bp, Artificial Sequence
  Synthetic: FXN 3 reverse 9:69039616-69039639; SpCas9
aagctgtctccagtatttaa

SEQ ID NO: 31331 - DNA, 19 bp, Artificial Sequence
  Synthetic: FXN 3 reverse 9:69039617-69039639; SpCas9
agctgtctccagtatttaa

SEQ ID NO: 31332 - DNA, 18 bp, Artificial Sequence
  Synthetic: FXN 3 reverse 9:69039618-69039639; SpCas9
gctgtctccagtatttaa

SEQ ID NO: 31333 - DNA, 25 bp, Artificial Sequence
  Synthetic: FXN 3 forward 9:69039613-69039641; SpCas9
cttaaatactggagacagcttcgag

SEQ ID NO: 31334 - DNA, 24 bp, Artificial Sequence
  Synthetic: FXN 3 forward 9:69039614-69039641; SpCas9
ttaaatactggagacagcttcgag

SEQ ID NO: 31335 - DNA, 23 bp, Artificial Sequence
  Synthetic: FXN 3 forward 9:69039615-69039641; SpCas9
taaatactggagacagcttcgag

SEQ ID NO: 31336 - DNA, 22 bp, Artificial Sequence
  Synthetic: FXN 3 forward 9:69039616-69039641; SpCas9
aaatactggagacagcttcgag

SEQ ID NO: 31337 - DNA, 21 bp, Artificial Sequence
  Synthetic: FXN 3 forward 9:69039617-69039641; SpCas9
aatactggagacagcttcgag

SEQ ID NO: 31338 - DNA, 20 bp, Artificial Sequence
  Synthetic: FXN 3 forward 9:69039618-69039641; SpCas9
atactggagacagcttcgag

SEQ ID NO: 31339 - DNA, 19 bp, Artificial Sequence
  Synthetic: FXN 3 forward 9:69039619-69039641; SpCas9
tactggagacagcttcgag

SEQ ID NO: 31340 - DNA, 18 bp, Artificial Sequence
  Synthetic: FXN 3 forward 9:69039620-69039641; SpCas9
actggagacagcttcgag

SEQ ID NO: 31341 - DNA, 25 bp, Artificial Sequence
  Synthetic: FXN 3 reverse 9:69039613-69039641; SpCas9
ctcctcgaagctgtctccagtattt

SEQ ID NO: 31342 - DNA, 24 bp, Artificial Sequence
  Synthetic: FXN 3 reverse 9:69039614-69039641; SpCas9
tcctcgaagctgtctccagtattt

SEQ ID NO: 31343 - DNA, 23 bp, Artificial Sequence
  Synthetic: FXN 3 reverse 9:69039615-69039641; SpCas9
cctcgaagctgtctccagtattt

SEQ ID NO: 31344 - DNA, 22 bp, Artificial Sequence
  Synthetic: FXN 3 reverse 9:69039616-69039641; SpCas9
ctcgaagctgtctccagtattt

SEQ ID NO: 31345 - DNA, 21 bp, Artificial Sequence
  Synthetic: FXN 3 reverse 9:69039617-69039641; SpCas9
tcgaagctgtctccagtattt

SEQ ID NO: 31346 - DNA, 20 bp, Artificial Sequence
  Synthetic: FXN 3 reverse 9:69039618-69039641; SpCas9
cgaagctgtctccagtattt

SEQ ID NO: 31347 - DNA, 19 bp, Artificial Sequence
  Synthetic: FXN 3 reverse 9:69039619-69039641; SpCas9
gaagctgtctccagtattt

SEQ ID NO: 31348 - DNA, 18 bp, Artificial Sequence
  Synthetic: FXN 3 reverse 9:69039620-69039641; SpCas9
aagctgtctccagtattt

SEQ ID NO: 31349 - DNA, 25 bp, Artificial Sequence
  Synthetic: FXN 3 forward 9:69039614-69039642; SpCas9
ttaaatactggagacagcttcgagg

SEQ ID NO: 31350 - DNA, 24 bp, Artificial Sequence
  Synthetic: FXN 3 forward 9:69039615-69039642; SpCas9
taaatactggagacagcttcgagg

SEQ ID NO: 31351 - DNA, 23 bp, Artificial Sequence
  Synthetic: FXN 3 forward 9:69039616-69039642; SpCas9
aaatactggagacagcttcgagg

SEQ ID NO: 31352 - DNA, 22 bp, Artificial Sequence
  Synthetic: FXN 3 forward 9:69039617-69039642; SpCas9
aatactggagacagcttcgagg

SEQ ID NO: 31353 - DNA, 21 bp, Artificial Sequence
  Synthetic: FXN 3 forward 9:69039618-69039642; SpCas9
atactggagacagcttcgagg

SEQ ID NO: 31354 - DNA, 20 bp, Artificial Sequence
  Synthetic: FXN 3 forward 9:69039619-69039642; SpCas9
tactggagacagcttcgagg

SEQ ID NO: 31355 - DNA, 19 bp, Artificial Sequence
  Synthetic: FXN 3 forward 9:69039620-69039642; SpCas9
actggagacagcttcgagg

SEQ ID NO: 31356 - DNA, 18 bp, Artificial Sequence
  Synthetic: FXN 3 forward 9:69039621-69039642; SpCas9
ctggagacagcttcgagg

SEQ ID NO: 31357 - DNA, 25 bp, Artificial Sequence
  Synthetic: FXN 3 forward 9:69039616-69039644; SpCas9
aaatactggagacagcttcgaggag

SEQ ID NO: 31358 - DNA, 24 bp, Artificial Sequence
  Synthetic: FXN 3 forward 9:69039617-69039644; SpCas9
aatactggagacagcttcgaggag

SEQ ID NO: 31359 - DNA, 23 bp, Artificial Sequence
  Synthetic: FXN 3 forward 9:69039618-69039644; SpCas9
atactggagacagcttcgaggag

SEQ ID NO: 31360 - DNA, 22 bp, Artificial Sequence
  Synthetic: FXN 3 forward 9:69039619-69039644; SpCas9
tactggagacagcttcgaggag

SEQ ID NO: 31361 - DNA, 21 bp, Artificial Sequence
  Synthetic: FXN 3 forward 9:69039620-69039644; SpCas9
actggagacagcttcgaggag

SEQ ID NO: 31362 - DNA, 20 bp, Artificial Sequence
  Synthetic: FXN 3 forward 9:69039621-69039644; SpCas9
ctggagacagcttcgaggag

SEQ ID NO: 31363 - DNA, 19 bp, Artificial Sequence
  Synthetic: FXN 3 forward 9:69039622-69039644; SpCas9
tggagacagcttcgaggag

SEQ ID NO: 31364 - DNA, 18 bp, Artificial Sequence
  Synthetic: FXN 3 forward 9:69039623-69039644; SpCas9
ggagacagcttcgaggag

SEQ ID NO: 31365 - DNA, 25 bp, Artificial Sequence
  Synthetic: FXN 3 reverse 9:69039621-69039649; SpCas9
gttatctcctcctcgaagctgtctc

SEQ ID NO: 31366 - DNA, 24 bp, Artificial Sequence
  Synthetic: FXN 3 reverse 9:69039622-69039649; SpCas9
ttatctcctcctcgaagctgtctc

SEQ ID NO: 31367 - DNA, 23 bp, Artificial Sequence
  Synthetic: FXN 3 reverse 9:69039623-69039649; SpCas9
tatctcctcctcgaagctgtctc

SEQ ID NO: 31368 - DNA, 22 bp, Artificial Sequence
  Synthetic: FXN 3 reverse 9:69039624-69039649; SpCas9
atctcctcctcgaagctgtctc

SEQ ID NO: 31369 - DNA, 21 bp, Artificial Sequence
  Synthetic: FXN 3 reverse 9:69039625-69039649; SpCas9
tctcctcctcgaagctgtctc

SEQ ID NO: 31370 - DNA, 20 bp, Artificial Sequence
  Synthetic: FXN 3 reverse 9:69039626-69039649; SpCas9
ctcctcctcgaagctgtctc

SEQ ID NO: 31371 - DNA, 19 bp, Artificial Sequence
  Synthetic: FXN 3 reverse 9:69039627-69039649; SpCas9
tcctcctcgaagctgtctc

SEQ ID NO: 31372 - DNA, 18 bp, Artificial Sequence
  Synthetic: FXN 3 reverse 9:69039628-69039649; SpCas9
cctcctcgaagctgtctc

SEQ ID NO: 31373 - DNA, 25 bp, Artificial Sequence
  Synthetic: FXN 3 forward 9:69039624-69039652; SpCas9
gagacagcttcgaggaggagataac

SEQ ID NO: 31374 - DNA, 24 bp, Artificial Sequence
  Synthetic: FXN 3 forward 9:69039625-69039652; SpCas9
agacagcttcgaggaggagataac

SEQ ID NO: 31375 - DNA, 23 bp, Artificial Sequence
  Synthetic: FXN 3 forward 9:69039626-69039652; SpCas9
gacagcttcgaggaggagataac

SEQ ID NO: 31376 - DNA, 22 bp, Artificial Sequence
  Synthetic: FXN 3 forward 9:69039627-69039652; SpCas9
acagcttcgaggaggagataac

SEQ ID NO: 31377 - DNA, 21 bp, Artificial Sequence
  Synthetic: FXN 3 forward 9:69039628-69039652; SpCas9
cagcttcgaggaggagataac

SEQ ID NO: 31378 - DNA, 20 bp, Artificial Sequence
  Synthetic: FXN 3 forward 9:69039629-69039652; SpCas9
agcttcgaggaggagataac

SEQ ID NO: 31379 - DNA, 19 bp, Artificial Sequence
  Synthetic: FXN 3 forward 9:69039630-69039652; SpCas9
gcttcgaggaggagataac

SEQ ID NO: 31380 - DNA, 18 bp, Artificial Sequence
  Synthetic: FXN 3 forward 9:69039631-69039652; SpCas9
cttcgaggaggagataac

SEQ ID NO: 31381 - DNA, 25 bp, Artificial Sequence
  Synthetic: FXN 3 reverse 9:69039631-69039659; SpCas9
gacacatccagttatctcctcctcg

SEQ ID NO: 31382 - DNA, 24 bp, Artificial Sequence
  Synthetic: FXN 3 reverse 9:69039632-69039659; SpCas9
acacatccagttatctcctcctcg

SEQ ID NO: 31383 - DNA, 23 bp, Artificial Sequence
  Synthetic: FXN 3 reverse 9:69039633-69039659; SpCas9
cacatccagttatctcctcctcg

SEQ ID NO: 31384 - DNA, 22 bp, Artificial Sequence
  Synthetic: FXN 3 reverse 9:69039634-69039659; SpCas9
acatccagttatctcctcctcg

SEQ ID NO: 31385 - DNA, 21 bp, Artificial Sequence
  Synthetic: FXN 3 reverse 9:69039635-69039659; SpCas9
catccagttatctcctcctcg

SEQ ID NO: 31386 - DNA, 20 bp, Artificial Sequence
  Synthetic: FXN 3 reverse 9:69039636-69039659; SpCas9
atccagttatctcctcctcg

SEQ ID NO: 31387 - DNA, 19 bp, Artificial Sequence
  Synthetic: FXN 3 reverse 9:69039637-69039659; SpCas9
tccagttatctcctcctcg

SEQ ID NO: 31388 - DNA, 18 bp, Artificial Sequence
  Synthetic: FXN 3 reverse 9:69039638-69039659; SpCas9
ccagttatctcctcctcg

SEQ ID NO: 31389 - DNA, 25 bp, Artificial Sequence
  Synthetic: FXN 3 forward 9:69039635-69039663; SpCas9
gaggaggagataactggatgtgtct

SEQ ID NO: 31390 - DNA, 24 bp, Artificial Sequence
  Synthetic: FXN 3 forward 9:69039636-69039663; SpCas9
aggaggagataactggatgtgtct

SEQ ID NO: 31391 - DNA, 23 bp, Artificial Sequence
  Synthetic: FXN 3 forward 9:69039637-69039663; SpCas9
ggaggagataactggatgtgtct

SEQ ID NO: 31392 - DNA, 22 bp, Artificial Sequence
  Synthetic: FXN 3 forward 9:69039638-69039663; SpCas9
gaggagataactggatgtgtct

SEQ ID NO: 31393 - DNA, 21 bp, Artificial Sequence
  Synthetic: FXN 3 forward 9:69039639-69039663; SpCas9
aggagataactggatgtgtct

SEQ ID NO: 31394 - DNA, 20 bp, Artificial Sequence
  Synthetic: FXN 3 forward 9:69039640-69039663; SpCas9
ggagataactggatgtgtct

SEQ ID NO: 31395 - DNA, 19 bp, Artificial Sequence
  Synthetic: FXN 3 forward 9:69039641-69039663; SpCas9
gagataactggatgtgtct

SEQ ID NO: 31396 - DNA, 18 bp, Artificial Sequence
  Synthetic: FXN 3 forward 9:69039642-69039663; SpCas9
agataactggatgtgtct

SEQ ID NO: 31397 - DNA, 25 bp, Artificial Sequence
  Synthetic: FXN 3 forward 9:69039647-69039675; SpCas9
actggatgtgtcttagtccatttga

SEQ ID NO: 31398 - DNA, 24 bp, Artificial Sequence
  Synthetic: FXN 3 forward 9:69039648-69039675; SpCas9
ctggatgtgtcttagtccatttga

SEQ ID NO: 31399 - DNA, 23 bp, Artificial Sequence
  Synthetic: FXN 3 forward 9:69039649-69039675; SpCas9
tggatgtgtcttagtccatttga

SEQ ID NO: 31400 - DNA, 22 bp, Artificial Sequence
  Synthetic: FXN 3 forward 9:69039650-69039675; SpCas9
ggatgtgtcttagtccatttga

SEQ ID NO: 31401 - DNA, 21 bp, Artificial Sequence
  Synthetic: FXN 3 forward 9:69039651-69039675; SpCas9
gatgtgtcttagtccatttga

SEQ ID NO: 31402 - DNA, 20 bp, Artificial Sequence
  Synthetic: FXN 3 forward 9:69039652-69039675; SpCas9
atgtgtcttagtccatttga

SEQ ID NO: 31403 - DNA, 19 bp, Artificial Sequence
  Synthetic: FXN 3 forward 9:69039653-69039675; SpCas9
tgtgtcttagtccatttga

SEQ ID NO: 31404 - DNA, 18 bp, Artificial Sequence
  Synthetic: FXN 3 forward 9:69039654-69039675; SpCas9
gtgtcttagtccatttga

SEQ ID NO: 31405 - DNA, 25 bp, Artificial Sequence
  Synthetic: FXN 3 reverse 9:69039648-69039676; SpCas9
tccatcaaatggactaagacacatc

SEQ ID NO: 31406 - DNA, 24 bp, Artificial Sequence
  Synthetic: FXN 3 reverse 9:69039649-69039676; SpCas9
ccatcaaatggactaagacacatc

SEQ ID NO: 31407 - DNA, 23 bp, Artificial Sequence
  Synthetic: FXN 3 reverse 9:69039650-69039676; SpCas9
catcaaatggactaagacacatc

SEQ ID NO: 31408 - DNA, 22 bp, Artificial Sequence
  Synthetic: FXN 3 reverse 9:69039651-69039676; SpCas9
atcaaatggactaagacacatc

SEQ ID NO: 31409 - DNA, 21 bp, Artificial Sequence
  Synthetic: FXN 3 reverse 9:69039652-69039676; SpCas9
tcaaatggactaagacacatc

SEQ ID NO: 31410 - DNA, 20 bp, Artificial Sequence
  Synthetic: FXN 3 reverse 9:69039653-69039676; SpCas9
caaatggactaagacacatc

SEQ ID NO: 31411 - DNA, 19 bp, Artificial Sequence
  Synthetic: FXN 3 reverse 9:69039654-69039676; SpCas9
aaatggactaagacacatc

SEQ ID NO: 31412 - DNA, 18 bp, Artificial Sequence
  Synthetic: FXN 3 reverse 9:69039655-69039676; SpCas9
aatggactaagacacatc

SEQ ID NO: 31413 - DNA, 25 bp, Artificial Sequence
  Synthetic: FXN 3 forward 9:69039649-69039677; SpCas9
tggatgtgtcttagtccatttgatg

SEQ ID NO: 31414 - DNA, 24 bp, Artificial Sequence
  Synthetic: FXN 3 forward 9:69039650-69039677; SpCas9
ggatgtgtcttagtccatttgatg

SEQ ID NO: 31415 - DNA, 23 bp, Artificial Sequence
  Synthetic: FXN 3 forward 9:69039651-69039677; SpCas9
gatgtgtcttagtccatttgatg

SEQ ID NO: 31416 - DNA, 22 bp, Artificial Sequence
  Synthetic: FXN 3 forward 9:69039652-69039677; SpCas9
atgtgtcttagtccatttgatg

SEQ ID NO: 31417 - DNA, 21 bp, Artificial Sequence
  Synthetic: FXN 3 forward 9:69039653-69039677; SpCas9
tgtgtcttagtccatttgatg

SEQ ID NO: 31418 - DNA, 20 bp, Artificial Sequence
  Synthetic: FXN 3 forward 9:69039654-69039677; SpCas9
gtgtcttagtccatttgatg

SEQ ID NO: 31419 - DNA, 19 bp, Artificial Sequence
  Synthetic: FXN 3 forward 9:69039655-69039677; SpCas9
tgtcttagtccatttgatg

SEQ ID NO: 31420 - DNA, 18 bp, Artificial Sequence
  Synthetic: FXN 3 forward 9:69039656-69039677; SpCas9
gtcttagtccatttgatg

SEQ ID NO: 31421 - DNA, 25 bp, Artificial Sequence
  Synthetic: FXN 3 forward 9:69039650-69039678; SpCas9
ggatgtgtcttagtccatttgatgg

SEQ ID NO: 31422 - DNA, 24 bp, Artificial Sequence
  Synthetic: FXN 3 forward 9:69039651-69039678; SpCas9
gatgtgtcttagtccatttgatgg

SEQ ID NO: 31423 - DNA, 23 bp, Artificial Sequence
  Synthetic: FXN 3 forward 9:69039652-69039678; SpCas9
atgtgtcttagtccatttgatgg

SEQ ID NO: 31424 - DNA, 22 bp, Artificial Sequence
  Synthetic: FXN 3 forward 9:69039653-69039678; SpCas9
tgtgtcttagtccatttgatgg

SEQ ID NO: 31425 - DNA, 21 bp, Artificial Sequence
  Synthetic: FXN 3 forward 9:69039654-69039678; SpCas9
gtgtcttagtccatttgatgg

SEQ ID NO: 31426 - DNA, 20 bp, Artificial Sequence
  Synthetic: FXN 3 forward 9:69039655-69039678; SpCas9
tgtcttagtccatttgatgg

SEQ ID NO: 31427 - DNA, 19 bp, Artificial Sequence
  Synthetic: FXN 3 forward 9:69039656-69039678; SpCas9
gtcttagtccatttgatgg

SEQ ID NO: 31428 - DNA, 18 bp, Artificial Sequence
  Synthetic: FXN 3 forward 9:69039657-69039678; SpCas9
tcttagtccatttgatgg

SEQ ID NO: 31429 - DNA, 25 bp, Artificial Sequence
  Synthetic: FXN 3 forward 9:69039651-69039679; SpCas9
gatgtgtcttagtccatttgatgga

SEQ ID NO: 31430 - DNA, 24 bp, Artificial Sequence
  Synthetic: FXN 3 forward 9:69039652-69039679; SpCas9
atgtgtcttagtccatttgatgga

SEQ ID NO: 31431 - DNA, 23 bp, Artificial Sequence
  Synthetic: FXN 3 forward 9:69039653-69039679; SpCas9
tgtgtcttagtccatttgatgga

SEQ ID NO: 31432 - DNA, 22 bp, Artificial Sequence
  Synthetic: FXN 3 forward 9:69039654-69039679; SpCas9
gtgtcttagtccatttgatgga

SEQ ID NO: 31433 - DNA, 21 bp, Artificial Sequence
  Synthetic: FXN 3 forward 9:69039655-69039679; SpCas9
tgtcttagtccatttgatgga

SEQ ID NO: 31434 - DNA, 20 bp, Artificial Sequence
  Synthetic: FXN 3 forward 9:69039656-69039679; SpCas9
gtcttagtccatttgatgga

SEQ ID NO: 31435 - DNA, 19 bp, Artificial Sequence
  Synthetic: FXN 3 forward 9:69039657-69039679; SpCas9
tcttagtccatttgatgga

SEQ ID NO: 31436 - DNA, 18 bp, Artificial Sequence
  Synthetic: FXN 3 forward 9:69039658-69039679; SpCas9
cttagtccatttgatgga

SEQ ID NO: 31437 - DNA, 25 bp, Artificial Sequence
  Synthetic: FXN 3 reverse 9:69039658-69039686; SpCas9
gtcacatccctccatcaaatggact

SEQ ID NO: 31438 - DNA, 24 bp, Artificial Sequence
  Synthetic: FXN 3 reverse 9:69039659-69039686; SpCas9
tcacatccctccatcaaatggact

SEQ ID NO: 31439 - DNA, 23 bp, Artificial Sequence
  Synthetic: FXN 3 reverse 9:69039660-69039686; SpCas9
cacatccctccatcaaatggact

SEQ ID NO: 31440 - DNA, 22 bp, Artificial Sequence
  Synthetic: FXN 3 reverse 9:69039661-69039686; SpCas9
acatccctccatcaaatggact

SEQ ID NO: 31441 - DNA, 21 bp, Artificial Sequence
  Synthetic: FXN 3 reverse 9:69039662-69039686; SpCas9
catccctccatcaaatggact

SEQ ID NO: 31442 - DNA, 20 bp, Artificial Sequence
  Synthetic: FXN 3 reverse 9:69039663-69039686; SpCas9
atccctccatcaaatggact

SEQ ID NO: 31443 - DNA, 19 bp, Artificial Sequence
  Synthetic: FXN 3 reverse 9:69039664-69039686; SpCas9
tccctccatcaaatggact

SEQ ID NO: 31444 - DNA, 18 bp, Artificial Sequence
  Synthetic: FXN 3 reverse 9:69039665-69039686; SpCas9
ccctccatcaaatggact

SEQ ID NO: 31445 - DNA, 25 bp, Artificial Sequence
  Synthetic: FXN 3 forward 9:69039660-69039688; SpCas9
tagtccatttgatggagggatgtga

SEQ ID NO: 31446 - DNA, 24 bp, Artificial Sequence
  Synthetic: FXN 3 forward 9:69039661-69039688; SpCas9
agtccatttgatggagggatgtga

SEQ ID NO: 31447 - DNA, 23 bp, Artificial Sequence
  Synthetic: FXN 3 forward 9:69039662-69039688; SpCas9
gtccatttgatggagggatgtga

SEQ ID NO: 31448 - DNA, 22 bp, Artificial Sequence
  Synthetic: FXN 3 forward 9:69039663-69039688; SpCas9
tccatttgatggagggatgtga

SEQ ID NO: 31449 - DNA, 21 bp, Artificial Sequence
  Synthetic: FXN 3 forward 9:69039664-69039688; SpCas9
ccatttgatggagggatgtga

SEQ ID NO: 31450 - DNA, 20 bp, Artificial Sequence
  Synthetic: FXN 3 forward 9:69039665-69039688; SpCas9
catttgatggagggatgtga

SEQ ID NO: 31451 - DNA, 19 bp, Artificial Sequence
  Synthetic: FXN 3 forward 9:69039666-69039688; SpCas9
atttgatggagggatgtga

SEQ ID NO: 31452 - DNA, 18 bp, Artificial Sequence
  Synthetic: FXN 3 forward 9:69039667-69039688; SpCas9
tttgatggagggatgtga

SEQ ID NO: 31453 - DNA, 25 bp, Artificial Sequence
  Synthetic: FXN 3 forward 9:69039661-69039689; SpCas9
agtccatttgatggagggatgtgac

SEQ ID NO: 31454 - DNA, 24 bp, Artificial Sequence
  Synthetic: FXN 3 forward 9:69039662-69039689; SpCas9
gtccatttgatggagggatgtgac

SEQ ID NO: 31455 - DNA, 23 bp, Artificial Sequence
  Synthetic: FXN 3 forward 9:69039663-69039689; SpCas9
tccatttgatggagggatgtgac

SEQ ID NO: 31456 - DNA, 22 bp, Artificial Sequence
  Synthetic: FXN 3 forward 9:69039664-69039689; SpCas9
ccatttgatggagggatgtgac

SEQ ID NO: 31457 - DNA, 21 bp, Artificial Sequence
  Synthetic: FXN 3 forward 9:69039665-69039689; SpCas9
catttgatggagggatgtgac

SEQ ID NO: 31458 - DNA, 20 bp, Artificial Sequence
  Synthetic: FXN 3 forward 9:69039666-69039689; SpCas9
atttgatggagggatgtgac

SEQ ID NO: 31459 - DNA, 19 bp, Artificial Sequence
  Synthetic: FXN 3 forward 9:69039667-69039689; SpCas9
tttgatggagggatgtgac

SEQ ID NO: 31460 - DNA, 18 bp, Artificial Sequence
  Synthetic: FXN 3 forward 9:69039668-69039689; SpCas9
ttgatggagggatgtgac

SEQ ID NO: 31461 - DNA, 25 bp, Artificial Sequence
  Synthetic: FXN 3 forward 9:69039662-69039690; SpCas9
gtccatttgatggagggatgtgacg

SEQ ID NO: 31462 - DNA, 24 bp, Artificial Sequence
  Synthetic: FXN 3 forward 9:69039663-69039690; SpCas9
tccatttgatggagggatgtgacg

SEQ ID NO: 31463 - DNA, 23 bp, Artificial Sequence
  Synthetic: FXN 3 forward 9:69039664-69039690; SpCas9
ccatttgatggagggatgtgacg

SEQ ID NO: 31464 - DNA, 22 bp, Artificial Sequence
  Synthetic: FXN 3 forward 9:69039665-69039690; SpCas9
catttgatggagggatgtgacg

SEQ ID NO: 31465 - DNA, 21 bp, Artificial Sequence
  Synthetic: FXN 3 forward 9:69039666-69039690; SpCas9
atttgatggagggatgtgacg

SEQ ID NO: 31466 - DNA, 20 bp, Artificial Sequence
  Synthetic: FXN 3 forward 9:69039667-69039690; SpCas9
tttgatggagggatgtgacg

SEQ ID NO: 31467 - DNA, 19 bp, Artificial Sequence
  Synthetic: FXN 3 forward 9:69039668-69039690; SpCas9
ttgatggagggatgtgacg

SEQ ID NO: 31468 - DNA, 18 bp, Artificial Sequence
  Synthetic: FXN 3 forward 9:69039669-69039690; SpCas9
tgatggagggatgtgacg

SEQ ID NO: 31469 - DNA, 25 bp, Artificial Sequence
  Synthetic: FXN 3 reverse 9:69039664-69039692; SpCas9
agccccgtcacatccctccatcaaa

SEQ ID NO: 31470 - DNA, 24 bp, Artificial Sequence
  Synthetic: FXN 3 reverse 9:69039665-69039692; SpCas9
gccccgtcacatccctccatcaaa

SEQ ID NO: 31471 - DNA, 23 bp, Artificial Sequence
  Synthetic: FXN 3 reverse 9:69039666-69039692; SpCas9
ccccgtcacatccctccatcaaa

SEQ ID NO: 31472 - DNA, 22 bp, Artificial Sequence
  Synthetic: FXN 3 reverse 9:69039667-69039692; SpCas9
cccgtcacatccctccatcaaa

SEQ ID NO: 31473 - DNA, 21 bp, Artificial Sequence
  Synthetic: FXN 3 reverse 9:69039668-69039692; SpCas9
ccgtcacatccctccatcaaa

SEQ ID NO: 31474 - DNA, 20 bp, Artificial Sequence
  Synthetic: FXN 3 reverse 9:69039669-69039692; SpCas9
cgtcacatccctccatcaaa

SEQ ID NO: 31475 - DNA, 19 bp, Artificial Sequence
  Synthetic: FXN 3 reverse 9:69039670-69039692; SpCas9
gtcacatccctccatcaaa

SEQ ID NO: 31476 - DNA, 18 bp, Artificial Sequence
  Synthetic: FXN 3 reverse 9:69039671-69039692; SpCas9
tcacatccctccatcaaa

SEQ ID NO: 31477 - DNA, 25 bp, Artificial Sequence
  Synthetic: FXN 3 reverse 9:69039690-69039718; SpCas9
tatttaagaggaaacgttaaagacg

SEQ ID NO: 31478 - DNA, 24 bp, Artificial Sequence
  Synthetic: FXN 3 reverse 9:69039691-69039718; SpCas9
atttaagaggaaacgttaaagacg

SEQ ID NO: 31479 - DNA, 23 bp, Artificial Sequence
  Synthetic: FXN 3 reverse 9:69039692-69039718; SpCas9
tttaagaggaaacgttaaagacg

SEQ ID NO: 31480 - DNA, 22 bp, Artificial Sequence
  Synthetic: FXN 3 reverse 9:69039693-69039718; SpCas9
ttaagaggaaacgttaaagacg

SEQ ID NO: 31481 - DNA, 21 bp, Artificial Sequence
  Synthetic: FXN 3 reverse 9:69039694-69039718; SpCas9
taagaggaaacgttaaagacg

SEQ ID NO: 31482 - DNA, 20 bp, Artificial Sequence
  Synthetic: FXN 3 reverse 9:69039695-69039718; SpCas9
aagaggaaacgttaaagacg

SEQ ID NO: 31483 - DNA, 19 bp, Artificial Sequence
  Synthetic: FXN 3 reverse 9:69039696-69039718; SpCas9
agaggaaacgttaaagacg

SEQ ID NO: 31484 - DNA, 18 bp, Artificial Sequence
  Synthetic: FXN 3 reverse 9:69039697-69039718; SpCas9
gaggaaacgttaaagacg

SEQ ID NO: 31485 - DNA, 25 bp, Artificial Sequence
  Synthetic: FXN 3 forward 9:69039694-69039722; SpCas9
gtctttaacgtttcctcttaaatac

SEQ ID NO: 31486 - DNA, 24 bp, Artificial Sequence
  Synthetic: FXN 3 forward 9:69039695-69039722; SpCas9
tctttaacgtttcctcttaaatac

SEQ ID NO: 31487 - DNA, 23 bp, Artificial Sequence
  Synthetic: FXN 3 forward 9:69039696-69039722; SpCas9
ctttaacgtttcctcttaaatac

SEQ ID NO: 31488 - DNA, 22 bp, Artificial Sequence
  Synthetic: FXN 3 forward 9:69039697-69039722; SpCas9
tttaacgtttcctcttaaatac

SEQ ID NO: 31489 - DNA, 21 bp, Artificial Sequence
  Synthetic: FXN 3 forward 9:69039698-69039722; SpCas9
ttaacgtttcctcttaaatac

SEQ ID NO: 31490 - DNA, 20 bp, Artificial Sequence
  Synthetic: FXN 3 forward 9:69039699-69039722; SpCas9
taacgtttcctcttaaatac

SEQ ID NO: 31491 - DNA, 19 bp, Artificial Sequence
  Synthetic: FXN 3 forward 9:69039700-69039722; SpCas9
aacgtttcctcttaaatac

SEQ ID NO: 31492 - DNA, 18 bp, Artificial Sequence
  Synthetic: FXN 3 forward 9:69039701-69039722; SpCas9
acgtttcctcttaaatac

SEQ ID NO: 31493 - DNA, 25 bp, Artificial Sequence
  Synthetic: FXN 3 forward 9:69039696-69039724; SpCas9
ctttaacgtttcctcttaaataccg

SEQ ID NO: 31494 - DNA, 24 bp, Artificial Sequence
  Synthetic: FXN 3 forward 9:69039697-69039724; SpCas9
tttaacgtttcctcttaaataccg

SEQ ID NO: 31495 - DNA, 23 bp, Artificial Sequence
  Synthetic: FXN 3 forward 9:69039698-69039724; SpCas9
ttaacgtttcctcttaaataccg

SEQ ID NO: 31496 - DNA, 22 bp, Artificial Sequence
  Synthetic: FXN 3 forward 9:69039699-69039724; SpCas9
taacgtttcctcttaaataccg

SEQ ID NO: 31497 - DNA, 21 bp, Artificial Sequence
  Synthetic: FXN 3 forward 9:69039700-69039724; SpCas9
aacgtttcctcttaaataccg

SEQ ID NO: 31498 - DNA, 20 bp, Artificial Sequence
  Synthetic: FXN 3 forward 9:69039701-69039724; SpCas9
acgtttcctcttaaataccg

SEQ ID NO: 31499 - DNA, 19 bp, Artificial Sequence
  Synthetic: FXN 3 forward 9:69039702-69039724; SpCas9
cgtttcctcttaaataccg

SEQ ID NO: 31500 - DNA, 18 bp, Artificial Sequence
  Synthetic: FXN 3 forward 9:69039703-69039724; SpCas9
gtttcctcttaaataccg

SEQ ID NO: 31501 - DNA, 25 bp, Artificial Sequence
  Synthetic: FXN 3 reverse 9:69039696-69039724; SpCas9
ctccggtatttaagaggaaacgtta

SEQ ID NO: 31502 - DNA, 24 bp, Artificial Sequence
  Synthetic: FXN 3 reverse 9:69039697-69039724; SpCas9
tccggtatttaagaggaaacgtta

SEQ ID NO: 31503 - DNA, 23 bp, Artificial Sequence
  Synthetic: FXN 3 reverse 9:69039698-69039724; SpCas9
ccggtatttaagaggaaacgtta

SEQ ID NO: 31504 - DNA, 22 bp, Artificial Sequence
  Synthetic: FXN 3 reverse 9:69039699-69039724; SpCas9
cggtatttaagaggaaacgtta

SEQ ID NO: 31505 - DNA, 21 bp, Artificial Sequence
  Synthetic: FXN 3 reverse 9:69039700-69039724; SpCas9
ggtatttaagaggaaacgtta

SEQ ID NO: 31506 - DNA, 20 bp, Artificial Sequence
  Synthetic: FXN 3 reverse 9:69039701-69039724; SpCas9
gtatttaagaggaaacgtta

SEQ ID NO: 31507 - DNA, 19 bp, Artificial Sequence
  Synthetic: FXN 3 reverse 9:69039702-69039724; SpCas9
tatttaagaggaaacgtta

SEQ ID NO: 31508 - DNA, 18 bp, Artificial Sequence
  Synthetic: FXN 3 reverse 9:69039703-69039724; SpCas9
atttaagaggaaacgtta

SEQ ID NO: 31509 - DNA, 25 bp, Artificial Sequence
  Synthetic: FXN 3 forward 9:69039700-69039728; SpCas9
aacgtttcctcttaaataccggaga

SEQ ID NO: 31510 - DNA, 24 bp, Artificial Sequence
  Synthetic: FXN 3 forward 9:69039701-69039728; SpCas9
acgtttcctcttaaataccggaga

SEQ ID NO: 31511 - DNA, 23 bp, Artificial Sequence
  Synthetic: FXN 3 forward 9:69039702-69039728; SpCas9
cgtttcctcttaaataccggaga

SEQ ID NO: 31512 - DNA, 22 bp, Artificial Sequence
  Synthetic: FXN 3 forward 9:69039703-69039728; SpCas9
gtttcctcttaaataccggaga

SEQ ID NO: 31513 - DNA, 21 bp, Artificial Sequence
  Synthetic: FXN 3 forward 9:69039704-69039728; SpCas9
tttcctcttaaataccggaga

SEQ ID NO: 31514 - DNA, 20 bp, Artificial Sequence
  Synthetic: FXN 3 forward 9:69039705-69039728; SpCas9
ttcctcttaaataccggaga

SEQ ID NO: 31515 - DNA, 19 bp, Artificial Sequence
  Synthetic: FXN 3 forward 9:69039706-69039728; SpCas9
tcctcttaaataccggaga

SEQ ID NO: 31516 - DNA, 18 bp, Artificial Sequence
  Synthetic: FXN 3 forward 9:69039707-69039728; SpCas9
cctcttaaataccggaga

SEQ ID NO: 31517 - DNA, 25 bp, Artificial Sequence
  Synthetic: FXN 3 forward 9:69039707-69039735; SpCas9
cctcttaaataccggagacagcttc

SEQ ID NO: 31518 - DNA, 24 bp, Artificial Sequence
  Synthetic: FXN 3 forward 9:69039708-69039735; SpCas9
ctcttaaataccggagacagcttc

SEQ ID NO: 31519 - DNA, 23 bp, Artificial Sequence
  Synthetic: FXN 3 forward 9:69039709-69039735; SpCas9
tcttaaataccggagacagcttc

SEQ ID NO: 31520 - DNA, 22 bp, Artificial Sequence
  Synthetic: FXN 3 forward 9:69039710-69039735; SpCas9
cttaaataccggagacagcttc

SEQ ID NO: 31521 - DNA, 21 bp, Artificial Sequence
  Synthetic: FXN 3 forward 9:69039711-69039735; SpCas9
ttaaataccggagacagcttc

SEQ ID NO: 31522 - DNA, 20 bp, Artificial Sequence
  Synthetic: FXN 3 forward 9:69039712-69039735; SpCas9
taaataccggagacagcttc

SEQ ID NO: 31523 - DNA, 19 bp, Artificial Sequence
  Synthetic: FXN 3 forward 9:69039713-69039735; SpCas9
aaataccggagacagcttc

SEQ ID NO: 31524 - DNA, 18 bp, Artificial Sequence
  Synthetic: FXN 3 forward 9:69039714-69039735; SpCas9
aataccggagacagcttc

SEQ ID NO: 31525 - DNA, 25 bp, Artificial Sequence
  Synthetic: FXN 3 reverse 9:69039707-69039735; SpCas9
ctcgaagctgtctccggtatttaag

SEQ ID NO: 31526 - DNA, 24 bp, Artificial Sequence
  Synthetic: FXN 3 reverse 9:69039708-69039735; SpCas9
tcgaagctgtctccggtatttaag

SEQ ID NO: 31527 - DNA, 23 bp, Artificial Sequence
  Synthetic: FXN 3 reverse 9:69039709-69039735; SpCas9
cgaagctgtctccggtatttaag

SEQ ID NO: 31528 - DNA, 22 bp, Artificial Sequence
  Synthetic: FXN 3 reverse 9:69039710-69039735; SpCas9
gaagctgtctccggtatttaag

SEQ ID NO: 31529 - DNA, 21 bp, Artificial Sequence
  Synthetic: FXN 3 reverse 9:69039711-69039735; SpCas9
aagctgtctccggtatttaag

SEQ ID NO: 31530 - DNA, 20 bp, Artificial Sequence
  Synthetic: FXN 3 reverse 9:69039712-69039735; SpCas9
agctgtctccggtatttaag

SEQ ID NO: 31531 - DNA, 19 bp, Artificial Sequence
  Synthetic: FXN 3 reverse 9:69039713-69039735; SpCas9
gctgtctccggtatttaag

SEQ ID NO: 31532 - DNA, 18 bp, Artificial Sequence
  Synthetic: FXN 3 reverse 9:69039714-69039735; SpCas9
ctgtctccggtatttaag

SEQ ID NO: 31533 - DNA, 25 bp, Artificial Sequence
  Synthetic: FXN 3 reverse 9:69039708-69039736; SpCas9
tctcgaagctgtctccggtatttaa

SEQ ID NO: 31534 - DNA, 24 bp, Artificial Sequence
  Synthetic: FXN 3 reverse 9:69039709-69039736; SpCas9
ctcgaagctgtctccggtatttaa

SEQ ID NO: 31535 - DNA, 23 bp, Artificial Sequence
  Synthetic: FXN 3 reverse 9:69039710-69039736; SpCas9
tcgaagctgtctccggtatttaa

SEQ ID NO: 31536 - DNA, 22 bp, Artificial Sequence
  Synthetic: FXN 3 reverse 9:69039711-69039736; SpCas9
cgaagctgtctccggtatttaa

SEQ ID NO: 31537 - DNA, 21 bp, Artificial Sequence
  Synthetic: FXN 3 reverse 9:69039712-69039736; SpCas9
gaagctgtctccggtatttaa

SEQ ID NO: 31538 - DNA, 20 bp, Artificial Sequence
  Synthetic: FXN 3 reverse 9:69039713-69039736; SpCas9
aagctgtctccggtatttaa

SEQ ID NO: 31539 - DNA, 19 bp, Artificial Sequence
  Synthetic: FXN 3 reverse 9:69039714-69039736; SpCas9
agctgtctccggtatttaa

SEQ ID NO: 31540 - DNA, 18 bp, Artificial Sequence
  Synthetic: FXN 3 reverse 9:69039715-69039736; SpCas9
gctgtctccggtatttaa

SEQ ID NO: 31541 - DNA, 25 bp, Artificial Sequence
  Synthetic: FXN 3 forward 9:69039710-69039738; SpCas9
cttaaataccggagacagcttcgag

SEQ ID NO: 31542 - DNA, 24 bp, Artificial Sequence
  Synthetic: FXN 3 forward 9:69039711-69039738; SpCas9
ttaaataccggagacagcttcgag

SEQ ID NO: 31543 - DNA, 23 bp, Artificial Sequence
  Synthetic: FXN 3 forward 9:69039712-69039738; SpCas9
taaataccggagacagcttcgag

SEQ ID NO: 31544 - DNA, 22 bp, Artificial Sequence
  Synthetic: FXN 3 forward 9:69039713-69039738; SpCas9
aaataccggagacagcttcgag

SEQ ID NO: 31545 - DNA, 21 bp, Artificial Sequence
  Synthetic: FXN 3 forward 9:69039714-69039738; SpCas9
aataccggagacagcttcgag

SEQ ID NO: 31546 - DNA, 20 bp, Artificial Sequence
  Synthetic: FXN 3 forward 9:69039715-69039738; SpCas9
ataccggagacagcttcgag

SEQ ID NO: 31547 - DNA, 19 bp, Artificial Sequence
  Synthetic: FXN 3 forward 9:69039716-69039738; SpCas9
taccggagacagcttcgag

SEQ ID NO: 31548 - DNA, 18 bp, Artificial Sequence
  Synthetic: FXN 3 forward 9:69039717-69039738; SpCas9
accggagacagcttcgag

SEQ ID NO: 31549 - DNA, 25 bp, Artificial Sequence
  Synthetic: FXN 3 reverse 9:69039710-69039738; SpCas9
cttctcgaagctgtctccggtattt

SEQ ID NO: 31550 - DNA, 24 bp, Artificial Sequence
  Synthetic: FXN 3 reverse 9:69039711-69039738; SpCas9
ttctcgaagctgtctccggtattt

SEQ ID NO: 31551 - DNA, 23 bp, Artificial Sequence
  Synthetic: FXN 3 reverse 9:69039712-69039738; SpCas9
tctcgaagctgtctccggtattt

SEQ ID NO: 31552 - DNA, 22 bp, Artificial Sequence
  Synthetic: FXN 3 reverse 9:69039713-69039738; SpCas9
ctcgaagctgtctccggtattt

SEQ ID NO: 31553 - DNA, 21 bp, Artificial Sequence
  Synthetic: FXN 3 reverse 9:69039714-69039738; SpCas9
tcgaagctgtctccggtattt

SEQ ID NO: 31554 - DNA, 20 bp, Artificial Sequence
  Synthetic: FXN 3 reverse 9:69039715-69039738; SpCas9
cgaagctgtctccggtattt

SEQ ID NO: 31555 - DNA, 19 bp, Artificial Sequence
  Synthetic: FXN 3 reverse 9:69039716-69039738; SpCas9
gaagctgtctccggtattt

SEQ ID NO: 31556 - DNA, 18 bp, Artificial Sequence
  Synthetic: FXN 3 reverse 9:69039717-69039738; SpCas9
aagctgtctccggtattt

SEQ ID NO: 31557 - DNA, 25 bp, Artificial Sequence
  Synthetic: FXN 3 forward 9:69039711-69039739; SpCas9
ttaaataccggagacagcttcgaga

SEQ ID NO: 31558 - DNA, 24 bp, Artificial Sequence
  Synthetic: FXN 3 forward 9:69039712-69039739; SpCas9
taaataccggagacagcttcgaga

SEQ ID NO: 31559 - DNA, 23 bp, Artificial Sequence
  Synthetic: FXN 3 forward 9:69039713-69039739; SpCas9
aaataccggagacagcttcgaga

SEQ ID NO: 31560 - DNA, 22 bp, Artificial Sequence
  Synthetic: FXN 3 forward 9:69039714-69039739; SpCas9
aataccggagacagcttcgaga

SEQ ID NO: 31561 - DNA, 21 bp, Artificial Sequence
  Synthetic: FXN 3 forward 9:69039715-69039739; SpCas9
ataccggagacagcttcgaga

SEQ ID NO: 31562 - DNA, 20 bp, Artificial Sequence
  Synthetic: FXN 3 forward 9:69039716-69039739; SpCas9
taccggagacagcttcgaga

SEQ ID NO: 31563 - DNA, 19 bp, Artificial Sequence
  Synthetic: FXN 3 forward 9:69039717-69039739; SpCas9
accggagacagcttcgaga

SEQ ID NO: 31564 - DNA, 18 bp, Artificial Sequence
  Synthetic: FXN 3 forward 9:69039718-69039739; SpCas9
ccggagacagcttcgaga

SEQ ID NO: 31565 - DNA, 25 bp, Artificial Sequence
  Synthetic: FXN 3 forward 9:69039713-69039741; SpCas9
aaataccggagacagcttcgagaag

SEQ ID NO: 31566 - DNA, 24 bp, Artificial Sequence
  Synthetic: FXN 3 forward 9:69039714-69039741; SpCas9
aataccggagacagcttcgagaag

SEQ ID NO: 31567 - DNA, 23 bp, Artificial Sequence
  Synthetic: FXN 3 forward 9:69039715-69039741; SpCas9
ataccggagacagcttcgagaag

SEQ ID NO: 31568 - DNA, 22 bp, Artificial Sequence
  Synthetic: FXN 3 forward 9:69039716-69039741; SpCas9
taccggagacagcttcgagaag

SEQ ID NO: 31569 - DNA, 21 bp, Artificial Sequence
  Synthetic: FXN 3 forward 9:69039717-69039741; SpCas9
accggagacagcttcgagaag

SEQ ID NO: 31570 - DNA, 20 bp, Artificial Sequence
  Synthetic: FXN 3 forward 9:69039718-69039741; SpCas9
ccggagacagcttcgagaag

SEQ ID NO: 31571 - DNA, 19 bp, Artificial Sequence
  Synthetic: FXN 3 forward 9:69039719-69039741; SpCas9
cggagacagcttcgagaag

SEQ ID NO: 31572 - DNA, 18 bp, Artificial Sequence
  Synthetic: FXN 3 forward 9:69039720-69039741; SpCas9
ggagacagcttcgagaag

SEQ ID NO: 31573 - DNA, 25 bp, Artificial Sequence
  Synthetic: FXN 3 reverse 9:69039718-69039746; SpCas9
gttatctccttctcgaagctgtctc

SEQ ID NO: 31574 - DNA, 24 bp, Artificial Sequence
  Synthetic: FXN 3 reverse 9:69039719-69039746; SpCas9
ttatctccttctcgaagctgtctc

SEQ ID NO: 31575 - DNA, 23 bp, Artificial Sequence
  Synthetic: FXN 3 reverse 9:69039720-69039746; SpCas9
tatctccttctcgaagctgtctc

SEQ ID NO: 31576 - DNA, 22 bp, Artificial Sequence
  Synthetic: FXN 3 reverse 9:69039721-69039746; SpCas9
atctccttctcgaagctgtctc

SEQ ID NO: 31577 - DNA, 21 bp, Artificial Sequence
  Synthetic: FXN 3 reverse 9:69039722-69039746; SpCas9
tctccttctcgaagctgtctc

SEQ ID NO: 31578 - DNA, 20 bp, Artificial Sequence
  Synthetic: FXN 3 reverse 9:69039723-69039746; SpCas9
ctccttctcgaagctgtctc

SEQ ID NO: 31579 - DNA, 19 bp, Artificial Sequence
  Synthetic: FXN 3 reverse 9:69039724-69039746; SpCas9
tccttctcgaagctgtctc

SEQ ID NO: 31580 - DNA, 18 bp, Artificial Sequence
  Synthetic: FXN 3 reverse 9:69039725-69039746; SpCas9
ccttctcgaagctgtctc

SEQ ID NO: 31581 - DNA, 25 bp, Artificial Sequence
  Synthetic: FXN 3 forward 9:69039721-69039749; SpCas9
gagacagcttcgagaaggagataac

SEQ ID NO: 31582 - DNA, 24 bp, Artificial Sequence
  Synthetic: FXN 3 forward 9:69039722-69039749; SpCas9
agacagcttcgagaaggagataac

SEQ ID NO: 31583 - DNA, 23 bp, Artificial Sequence
  Synthetic: FXN 3 forward 9:69039723-69039749; SpCas9
gacagcttcgagaaggagataac

SEQ ID NO: 31584 - DNA, 22 bp, Artificial Sequence
  Synthetic: FXN 3 forward 9:69039724-69039749; SpCas9
acagcttcgagaaggagataac

SEQ ID NO: 31585 - DNA, 21 bp, Artificial Sequence
  Synthetic: FXN 3 forward 9:69039725-69039749; SpCas9
cagcttcgagaaggagataac

SEQ ID NO: 31586 - DNA, 20 bp, Artificial Sequence
  Synthetic: FXN 3 forward 9:69039726-69039749; SpCas9
agcttcgagaaggagataac

SEQ ID NO: 31587 - DNA, 19 bp, Artificial Sequence
  Synthetic: FXN 3 forward 9:69039727-69039749; SpCas9
gcttcgagaaggagataac

SEQ ID NO: 31588 - DNA, 18 bp, Artificial Sequence
  Synthetic: FXN 3 forward 9:69039728-69039749; SpCas9
cttcgagaaggagataac

SEQ ID NO: 31589 - DNA, 25 bp, Artificial Sequence
  Synthetic: FXN 3 reverse 9:69039728-69039756; SpCas9
gaaacatccagttatctccttctcg

SEQ ID NO: 31590 - DNA, 24 bp, Artificial Sequence
  Synthetic: FXN 3 reverse 9:69039729-69039756; SpCas9
aaacatccagttatctccttctcg

SEQ ID NO: 31591 - DNA, 23 bp, Artificial Sequence
  Synthetic: FXN 3 reverse 9:69039730-69039756; SpCas9
aacatccagttatctccttctcg

SEQ ID NO: 31592 - DNA, 22 bp, Artificial Sequence
  Synthetic: FXN 3 reverse 9:69039731-69039756; SpCas9
acatccagttatctccttctcg

SEQ ID NO: 31593 - DNA, 21 bp, Artificial Sequence
  Synthetic: FXN 3 reverse 9:69039732-69039756; SpCas9
catccagttatctccttctcg

SEQ ID NO: 31594 - DNA, 20 bp, Artificial Sequence
  Synthetic: FXN 3 reverse 9:69039733-69039756; SpCas9
atccagttatctccttctcg

SEQ ID NO: 31595 - DNA, 19 bp, Artificial Sequence
  Synthetic: FXN 3 reverse 9:69039734-69039756; SpCas9
tccagttatctccttctcg

SEQ ID NO: 31596 - DNA, 18 bp, Artificial Sequence
  Synthetic: FXN 3 reverse 9:69039735-69039756; SpCas9
ccagttatctccttctcg

SEQ ID NO: 31597 - DNA, 25 bp, Artificial Sequence
  Synthetic: FXN 3 forward 9:69039732-69039760; SpCas9
gagaaggagataactggatgtttct

SEQ ID NO: 31598 - DNA, 24 bp, Artificial Sequence
  Synthetic: FXN 3 forward 9:69039733-69039760; SpCas9
agaaggagataactggatgtttct

SEQ ID NO: 31599 - DNA, 23 bp, Artificial Sequence
  Synthetic: FXN 3 forward 9:69039734-69039760; SpCas9
gaaggagataactggatgtttct

SEQ ID NO: 31600 - DNA, 22 bp, Artificial Sequence
  Synthetic: FXN 3 forward 9:69039735-69039760; SpCas9
aaggagataactggatgtttct

SEQ ID NO: 31601 - DNA, 21 bp, Artificial Sequence
  Synthetic: FXN 3 forward 9:69039736-69039760; SpCas9
aggagataactggatgtttct

SEQ ID NO: 31602 - DNA, 20 bp, Artificial Sequence
  Synthetic: FXN 3 forward 9:69039737-69039760; SpCas9
ggagataactggatgtttct

SEQ ID NO: 31603 - DNA, 19 bp, Artificial Sequence
  Synthetic: FXN 3 forward 9:69039738-69039760; SpCas9
gagataactggatgtttct

SEQ ID NO: 31604 - DNA, 18 bp, Artificial Sequence
  Synthetic: FXN 3 forward 9:69039739-69039760; SpCas9
agataactggatgtttct

SEQ ID NO: 31605 - DNA, 25 bp, Artificial Sequence
  Synthetic: FXN 3 reverse 9:69039745-69039773; SpCas9
aacagaaaatggactaagaaacatc

SEQ ID NO: 31606 - DNA, 24 bp, Artificial Sequence
  Synthetic: FXN 3 reverse 9:69039746-69039773; SpCas9
acagaaaatggactaagaaacatc

SEQ ID NO: 31607 - DNA, 23 bp, Artificial Sequence
  Synthetic: FXN 3 reverse 9:69039747-69039773; SpCas9
cagaaaatggactaagaaacatc

SEQ ID NO: 31608 - DNA, 22 bp, Artificial Sequence
  Synthetic: FXN 3 reverse 9:69039748-69039773; SpCas9
agaaaatggactaagaaacatc

SEQ ID NO: 31609 - DNA, 21 bp, Artificial Sequence
  Synthetic: FXN 3 reverse 9:69039749-69039773; SpCas9
gaaaatggactaagaaacatc

SEQ ID NO: 31610 - DNA, 20 bp, Artificial Sequence
  Synthetic: FXN 3 reverse 9:69039750-69039773; SpCas9
aaaatggactaagaaacatc

SEQ ID NO: 31611 - DNA, 19 bp, Artificial Sequence
  Synthetic: FXN 3 reverse 9:69039751-69039773; SpCas9
aaatggactaagaaacatc

SEQ ID NO: 31612 - DNA, 18 bp, Artificial Sequence
  Synthetic: FXN 3 reverse 9:69039752-69039773; SpCas9
aatggactaagaaacatc

SEQ ID NO: 31613 - DNA, 25 bp, Artificial Sequence
  Synthetic: FXN 3 reverse 9:69039755-69039783; SpCas9
tgtcacaagcaacagaaaatggact

SEQ ID NO: 31614 - DNA, 24 bp, Artificial Sequence
  Synthetic: FXN 3 reverse 9:69039756-69039783; SpCas9
gtcacaagcaacagaaaatggact

SEQ ID NO: 31615 - DNA, 23 bp, Artificial Sequence
  Synthetic: FXN 3 reverse 9:69039757-69039783; SpCas9
tcacaagcaacagaaaatggact

SEQ ID NO: 31616 - DNA, 22 bp, Artificial Sequence
  Synthetic: FXN 3 reverse 9:69039758-69039783; SpCas9
cacaagcaacagaaaatggact

SEQ ID NO: 31617 - DNA, 21 bp, Artificial Sequence
  Synthetic: FXN 3 reverse 9:69039759-69039783; SpCas9
acaagcaacagaaaatggact

SEQ ID NO: 31618 - DNA, 20 bp, Artificial Sequence
  Synthetic: FXN 3 reverse 9:69039760-69039783; SpCas9
caagcaacagaaaatggact

SEQ ID NO: 31619 - DNA, 19 bp, Artificial Sequence
  Synthetic: FXN 3 reverse 9:69039761-69039783; SpCas9
aagcaacagaaaatggact

SEQ ID NO: 31620 - DNA, 18 bp, Artificial Sequence
  Synthetic: FXN 3 reverse 9:69039762-69039783; SpCas9
agcaacagaaaatggact

SEQ ID NO: 31621 - DNA, 25 bp, Artificial Sequence
  Synthetic: FXN 3 forward 9:69039756-69039784; SpCas9
ttagtccattttctgttgcttgtga

SEQ ID NO: 31622 - DNA, 24 bp, Artificial Sequence
  Synthetic: FXN 3 forward 9:69039757-69039784; SpCas9
tagtccattttctgttgcttgtga

SEQ ID NO: 31623 - DNA, 23 bp, Artificial Sequence
  Synthetic: FXN 3 forward 9:69039758-69039784; SpCas9
agtccattttctgttgcttgtga

SEQ ID NO: 31624 - DNA, 22 bp, Artificial Sequence
  Synthetic: FXN 3 forward 9:69039759-69039784; SpCas9
gtccattttctgttgcttgtga

SEQ ID NO: 31625 - DNA, 21 bp, Artificial Sequence
  Synthetic: FXN 3 forward 9:69039760-69039784; SpCas9
tccattttctgttgcttgtga

SEQ ID NO: 31626 - DNA, 20 bp, Artificial Sequence
  Synthetic: FXN 3 forward 9:69039761-69039784; SpCas9
ccattttctgttgcttgtga

SEQ ID NO: 31627 - DNA, 19 bp, Artificial Sequence
  Synthetic: FXN 3 forward 9:69039762-69039784; SpCas9
cattttctgttgcttgtga

SEQ ID NO: 31628 - DNA, 18 bp, Artificial Sequence
  Synthetic: FXN 3 forward 9:69039763-69039784; SpCas9
attttctgttgcttgtga

SEQ ID NO: 31629 - DNA, 25 bp, Artificial Sequence
  Synthetic: FXN 3 reverse 9:69039761-69039789; SpCas9
gtattctgtcacaagcaacagaaaa

SEQ ID NO: 31630 - DNA, 24 bp, Artificial Sequence
  Synthetic: FXN 3 reverse 9:69039762-69039789; SpCas9
tattctgtcacaagcaacagaaaa

SEQ ID NO: 31631 - DNA, 23 bp, Artificial Sequence
  Synthetic: FXN 3 reverse 9:69039763-69039789; SpCas9
attctgtcacaagcaacagaaaa

SEQ ID NO: 31632 - DNA, 22 bp, Artificial Sequence
  Synthetic: FXN 3 reverse 9:69039764-69039789; SpCas9
ttctgtcacaagcaacagaaaa

SEQ ID NO: 31633 - DNA, 21 bp, Artificial Sequence
  Synthetic: FXN 3 reverse 9:69039765-69039789; SpCas9
tctgtcacaagcaacagaaaa

SEQ ID NO: 31634 - DNA, 20 bp, Artificial Sequence
  Synthetic: FXN 3 reverse 9:69039766-69039789; SpCas9
ctgtcacaagcaacagaaaa

SEQ ID NO: 31635 - DNA, 19 bp, Artificial Sequence
  Synthetic: FXN 3 reverse 9:69039767-69039789; SpCas9
tgtcacaagcaacagaaaa

SEQ ID NO: 31636 - DNA, 18 bp, Artificial Sequence
  Synthetic: FXN 3 reverse 9:69039768-69039789; SpCas9
gtcacaagcaacagaaaa

SEQ ID NO: 31637 - DNA, 25 bp, Artificial Sequence
  Synthetic: FXN 3 reverse 9:69039768-69039796; SpCas9
gtttcaggtattctgtcacaagcaa

SEQ ID NO: 31638 - DNA, 24 bp, Artificial Sequence
  Synthetic: FXN 3 reverse 9:69039769-69039796; SpCas9
tttcaggtattctgtcacaagcaa

SEQ ID NO: 31639 - DNA, 23 bp, Artificial Sequence
  Synthetic: FXN 3 reverse 9:69039770-69039796; SpCas9
ttcaggtattctgtcacaagcaa

SEQ ID NO: 31640 - DNA, 22 bp, Artificial Sequence
  Synthetic: FXN 3 reverse 9:69039771-69039796; SpCas9
tcaggtattctgtcacaagcaa

SEQ ID NO: 31641 - DNA, 21 bp, Artificial Sequence
  Synthetic: FXN 3 reverse 9:69039772-69039796; SpCas9
caggtattctgtcacaagcaa

SEQ ID NO: 31642 - DNA, 20 bp, Artificial Sequence
  Synthetic: FXN 3 reverse 9:69039773-69039796; SpCas9
aggtattctgtcacaagcaa

SEQ ID NO: 31643 - DNA, 19 bp, Artificial Sequence
  Synthetic: FXN 3 reverse 9:69039774-69039796; SpCas9
ggtattctgtcacaagcaa

SEQ ID NO: 31644 - DNA, 18 bp, Artificial Sequence
  Synthetic: FXN 3 reverse 9:69039775-69039796; SpCas9
gtattctgtcacaagcaa

SEQ ID NO: 31645 - DNA, 25 bp, Artificial Sequence
  Synthetic: FXN 3 forward 9:69039771-69039799; SpCas9
ttgcttgtgacagaatacctgaaac

SEQ ID NO: 31646 - DNA, 24 bp, Artificial Sequence
  Synthetic: FXN 3 forward 9:69039772-69039799; SpCas9
tgcttgtgacagaatacctgaaac

SEQ ID NO: 31647 - DNA, 23 bp, Artificial Sequence
  Synthetic: FXN 3 forward 9:69039773-69039799; SpCas9
gcttgtgacagaatacctgaaac

SEQ ID NO: 31648 - DNA, 22 bp, Artificial Sequence
  Synthetic: FXN 3 forward 9:69039774-69039799; SpCas9
cttgtgacagaatacctgaaac

SEQ ID NO: 31649 - DNA, 21 bp, Artificial Sequence
  Synthetic: FXN 3 forward 9:69039775-69039799; SpCas9
ttgtgacagaatacctgaaac

SEQ ID NO: 31650 - DNA, 20 bp, Artificial Sequence
  Synthetic: FXN 3 forward 9:69039776-69039799; SpCas9
tgtgacagaatacctgaaac

SEQ ID NO: 31651 - DNA, 19 bp, Artificial Sequence
  Synthetic: FXN 3 forward 9:69039777-69039799; SpCas9
gtgacagaatacctgaaac

SEQ ID NO: 31652 - DNA, 18 bp, Artificial Sequence
  Synthetic: FXN 3 forward 9:69039778-69039799; SpCas9
tgacagaatacctgaaac

SEQ ID NO: 31653 - DNA, 25 bp, Artificial Sequence
  Synthetic: FXN 3 forward 9:69039772-69039800; SpCas9
tgcttgtgacagaatacctgaaact

SEQ ID NO: 31654 - DNA, 24 bp, Artificial Sequence
  Synthetic: FXN 3 forward 9:69039773-69039800; SpCas9
gcttgtgacagaatacctgaaact

SEQ ID NO: 31655 - DNA, 23 bp, Artificial Sequence
  Synthetic: FXN 3 forward 9:69039774-69039800; SpCas9
cttgtgacagaatacctgaaact

SEQ ID NO: 31656 - DNA, 22 bp, Artificial Sequence
  Synthetic: FXN 3 forward 9:69039775-69039800; SpCas9
ttgtgacagaatacctgaaact

SEQ ID NO: 31657 - DNA, 21 bp, Artificial Sequence
  Synthetic: FXN 3 forward 9:69039776-69039800; SpCas9
tgtgacagaatacctgaaact

SEQ ID NO: 31658 - DNA, 20 bp, Artificial Sequence
  Synthetic: FXN 3 forward 9:69039777-69039800; SpCas9
gtgacagaatacctgaaact

SEQ ID NO: 31659 - DNA, 19 bp, Artificial Sequence
  Synthetic: FXN 3 forward 9:69039778-69039800; SpCas9
tgacagaatacctgaaact

SEQ ID NO: 31660 - DNA, 18 bp, Artificial Sequence
  Synthetic: FXN 3 forward 9:69039779-69039800; SpCas9
gacagaatacctgaaact

SEQ ID NO: 31661 - DNA, 25 bp, Artificial Sequence
  Synthetic: FXN 3 reverse 9:69039774-69039802; SpCas9
tgcccagtttcaggtattctgtcac

SEQ ID NO: 31662 - DNA, 24 bp, Artificial Sequence
  Synthetic: FXN 3 reverse 9:69039775-69039802; SpCas9
gcccagtttcaggtattctgtcac

SEQ ID NO: 31663 - DNA, 23 bp, Artificial Sequence
  Synthetic: FXN 3 reverse 9:69039776-69039802; SpCas9
cccagtttcaggtattctgtcac

SEQ ID NO: 31664 - DNA, 22 bp, Artificial Sequence
  Synthetic: FXN 3 reverse 9:69039777-69039802; SpCas9
ccagtttcaggtattctgtcac

SEQ ID NO: 31665 - DNA, 21 bp, Artificial Sequence
  Synthetic: FXN 3 reverse 9:69039778-69039802; SpCas9
cagtttcaggtattctgtcac

SEQ ID NO: 31666 - DNA, 20 bp, Artificial Sequence
  Synthetic: FXN 3 reverse 9:69039779-69039802; SpCas9
agtttcaggtattctgtcac

SEQ ID NO: 31667 - DNA, 19 bp, Artificial Sequence
  Synthetic: FXN 3 reverse 9:69039780-69039802; SpCas9
gtttcaggtattctgtcac

SEQ ID NO: 31668 - DNA, 18 bp, Artificial Sequence
  Synthetic: FXN 3 reverse 9:69039781-69039802; SpCas9
tttcaggtattctgtcac

SEQ ID NO: 31669 - DNA, 25 bp, Artificial Sequence
  Synthetic: FXN 3 forward 9:69039784-69039812; SpCas9
aatacctgaaactgggcaatttata

SEQ ID NO: 31670 - DNA, 24 bp, Artificial Sequence
  Synthetic: FXN 3 forward 9:69039785-69039812; SpCas9
atacctgaaactgggcaatttata

SEQ ID NO: 31671 - DNA, 23 bp, Artificial Sequence
  Synthetic: FXN 3 forward 9:69039786-69039812; SpCas9
tacctgaaactgggcaatttata

SEQ ID NO: 31672 - DNA, 22 bp, Artificial Sequence
  Synthetic: FXN 3 forward 9:69039787-69039812; SpCas9
acctgaaactgggcaatttata

SEQ ID NO: 31673 - DNA, 21 bp, Artificial Sequence
  Synthetic: FXN 3 forward 9:69039788-69039812; SpCas9
cctgaaactgggcaatttata

SEQ ID NO: 31674 - DNA, 20 bp, Artificial Sequence
  Synthetic: FXN 3 forward 9:69039789-69039812; SpCas9
ctgaaactgggcaatttata

SEQ ID NO: 31675 - DNA, 19 bp, Artificial Sequence
  Synthetic: FXN 3 forward 9:69039790-69039812; SpCas9
tgaaactgggcaatttata

SEQ ID NO: 31676 - DNA, 18 bp, Artificial Sequence
  Synthetic: FXN 3 forward 9:69039791-69039812; SpCas9
gaaactgggcaatttata

SEQ ID NO: 31677 - DNA, 25 bp, Artificial Sequence
  Synthetic: FXN 3 reverse 9:69039788-69039816; SpCas9
tttaccatataaattgcccagtttc

SEQ ID NO: 31678 - DNA, 24 bp, Artificial Sequence
  Synthetic: FXN 3 reverse 9:69039789-69039816; SpCas9
ttaccatataaattgcccagtttc

SEQ ID NO: 31679 - DNA, 23 bp, Artificial Sequence
  Synthetic: FXN 3 reverse 9:69039790-69039816; SpCas9
taccatataaattgcccagtttc

SEQ ID NO: 31680 - DNA, 22 bp, Artificial Sequence
  Synthetic: FXN 3 reverse 9:69039791-69039816; SpCas9
accatataaattgcccagtttc

SEQ ID NO: 31681 - DNA, 21 bp, Artificial Sequence
  Synthetic: FXN 3 reverse 9:69039792-69039816; SpCas9
ccatataaattgcccagtttc

SEQ ID NO: 31682 - DNA, 20 bp, Artificial Sequence
  Synthetic: FXN 3 reverse 9:69039793-69039816; SpCas9
catataaattgcccagtttc

SEQ ID NO: 31683 - DNA, 19 bp, Artificial Sequence
  Synthetic: FXN 3 reverse 9:69039794-69039816; SpCas9
atataaattgcccagtttc

SEQ ID NO: 31684 - DNA, 18 bp, Artificial Sequence
  Synthetic: FXN 3 reverse 9:69039795-69039816; SpCas9
tataaattgcccagtttc

SEQ ID NO: 31685 - DNA, 25 bp, Artificial Sequence
  Synthetic: FXN 3 reverse 9:69039789-69039817; SpCas9
ttttaccatataaattgcccagttt

SEQ ID NO: 31686 - DNA, 24 bp, Artificial Sequence
  Synthetic: FXN 3 reverse 9:69039790-69039817; SpCas9
tttaccatataaattgcccagttt

SEQ ID NO: 31687 - DNA, 23 bp, Artificial Sequence
  Synthetic: FXN 3 reverse 9:69039791-69039817; SpCas9
ttaccatataaattgcccagttt

SEQ ID NO: 31688 - DNA, 22 bp, Artificial Sequence
  Synthetic: FXN 3 reverse 9:69039792-69039817; SpCas9
taccatataaattgcccagttt

SEQ ID NO: 31689 - DNA, 21 bp, Artificial Sequence
  Synthetic: FXN 3 reverse 9:69039793-69039817; SpCas9
accatataaattgcccagttt

SEQ ID NO: 31690 - DNA, 20 bp, Artificial Sequence
  Synthetic: FXN 3 reverse 9:69039794-69039817; SpCas9
ccatataaattgcccagttt

SEQ ID NO: 31691 - DNA, 19 bp, Artificial Sequence
  Synthetic: FXN 3 reverse 9:69039795-69039817; SpCas9
catataaattgcccagttt

SEQ ID NO: 31692 - DNA, 18 bp, Artificial Sequence
  Synthetic: FXN 3 reverse 9:69039796-69039817; SpCas9
atataaattgcccagttt

SEQ ID NO: 31693 - DNA, 25 bp, Artificial Sequence
  Synthetic: FXN 3 reverse 9:69039795-69039823; SpCas9
aaaattttttaccatataaattgcc

SEQ ID NO: 31694 - DNA, 24 bp, Artificial Sequence
  Synthetic: FXN 3 reverse 9:69039796-69039823; SpCas9
aaattttttaccatataaattgcc

SEQ ID NO: 31695 - DNA, 23 bp, Artificial Sequence
  Synthetic: FXN 3 reverse 9:69039797-69039823; SpCas9
aattttttaccatataaattgcc

SEQ ID NO: 31696 - DNA, 22 bp, Artificial Sequence
  Synthetic: FXN 3 reverse 9:69039798-69039823; SpCas9
attttttaccatataaattgcc

SEQ ID NO: 31697 - DNA, 21 bp, Artificial Sequence
  Synthetic: FXN 3 reverse 9:69039799-69039823; SpCas9
ttttttaccatataaattgcc

SEQ ID NO: 31698 - DNA, 20 bp, Artificial Sequence
  Synthetic: FXN 3 reverse 9:69039800-69039823; SpCas9
tttttaccatataaattgcc

SEQ ID NO: 31699 - DNA, 19 bp, Artificial Sequence
  Synthetic: FXN 3 reverse 9:69039801-69039823; SpCas9
ttttaccatataaattgcc

SEQ ID NO: 31700 - DNA, 18 bp, Artificial Sequence
  Synthetic: FXN 3 reverse 9:69039802-69039823; SpCas9
tttaccatataaattgcc

SEQ ID NO: 31701 - DNA, 25 bp, Artificial Sequence
  Synthetic: FXN 3 forward 9:69039811-69039839; SpCas9
gtaaaaaattttcttcttactgctc

SEQ ID NO: 31702 - DNA, 24 bp, Artificial Sequence
  Synthetic: FXN 3 forward 9:69039812-69039839; SpCas9
taaaaaattttcttcttactgctc

SEQ ID NO: 31703 - DNA, 23 bp, Artificial Sequence
  Synthetic: FXN 3 forward 9:69039813-69039839; SpCas9
aaaaaattttcttcttactgctc

SEQ ID NO: 31704 - DNA, 22 bp, Artificial Sequence
  Synthetic: FXN 3 forward 9:69039814-69039839; SpCas9
aaaaattttcttcttactgctc

SEQ ID NO: 31705 - DNA, 21 bp, Artificial Sequence
  Synthetic: FXN 3 forward 9:69039815-69039839; SpCas9
aaaattttcttcttactgctc

SEQ ID NO: 31706 - DNA, 20 bp, Artificial Sequence
  Synthetic: FXN 3 forward 9:69039816-69039839; SpCas9
aaattttcttcttactgctc

SEQ ID NO: 31707 - DNA, 19 bp, Artificial Sequence
  Synthetic: FXN 3 forward 9:69039817-69039839; SpCas9
aattttcttcttactgctc

SEQ ID NO: 31708 - DNA, 18 bp, Artificial Sequence
  Synthetic: FXN 3 forward 9:69039818-69039839; SpCas9
attttcttcttactgctc

SEQ ID NO: 31709 - DNA, 25 bp, Artificial Sequence
  Synthetic: FXN 3 forward 9:69039813-69039841; SpCas9
aaaaaattttcttcttactgctctg

SEQ ID NO: 31710 - DNA, 24 bp, Artificial Sequence
  Synthetic: FXN 3 forward 9:69039814-69039841; SpCas9
aaaaattttcttcttactgctctg

SEQ ID NO: 31711 - DNA, 23 bp, Artificial Sequence
  Synthetic: FXN 3 forward 9:69039815-69039841; SpCas9
aaaattttcttcttactgctctg

SEQ ID NO: 31712 - DNA, 22 bp, Artificial Sequence
  Synthetic: FXN 3 forward 9:69039816-69039841; SpCas9
aaattttcttcttactgctctg

SEQ ID NO: 31713 - DNA, 21 bp, Artificial Sequence
  Synthetic: FXN 3 forward 9:69039817-69039841; SpCas9
aattttcttcttactgctctg

SEQ ID NO: 31714 - DNA, 20 bp, Artificial Sequence
  Synthetic: FXN 3 forward 9:69039818-69039841; SpCas9
attttcttcttactgctctg

SEQ ID NO: 31715 - DNA, 19 bp, Artificial Sequence
  Synthetic: FXN 3 forward 9:69039819-69039841; SpCas9
ttttcttcttactgctctg

SEQ ID NO: 31716 - DNA, 18 bp, Artificial Sequence
  Synthetic: FXN 3 forward 9:69039820-69039841; SpCas9
tttcttcttactgctctg

SEQ ID NO: 31717 - DNA, 25 bp, Artificial Sequence
  Synthetic: FXN 3 forward 9:69039814-69039842; SpCas9
aaaaattttcttcttactgctctgg

SEQ ID NO: 31718 - DNA, 24 bp, Artificial Sequence
  Synthetic: FXN 3 forward 9:69039815-69039842; SpCas9
aaaattttcttcttactgctctgg

SEQ ID NO: 31719 - DNA, 23 bp, Artificial Sequence
  Synthetic: FXN 3 forward 9:69039816-69039842; SpCas9
aaattttcttcttactgctctgg

SEQ ID NO: 31720 - DNA, 22 bp, Artificial Sequence
  Synthetic: FXN 3 forward 9:69039817-69039842; SpCas9
aattttcttcttactgctctgg

SEQ ID NO: 31721 - DNA, 21 bp, Artificial Sequence
  Synthetic: FXN 3 forward 9:69039818-69039842; SpCas9
attttcttcttactgctctgg

SEQ ID NO: 31722 - DNA, 20 bp, Artificial Sequence
  Synthetic: FXN 3 forward 9:69039819-69039842; SpCas9
ttttcttcttactgctctgg

SEQ ID NO: 31723 - DNA, 19 bp, Artificial Sequence
  Synthetic: FXN 3 forward 9:69039820-69039842; SpCas9
tttcttcttactgctctgg

SEQ ID NO: 31724 - DNA, 18 bp, Artificial Sequence
  Synthetic: FXN 3 forward 9:69039821-69039842; SpCas9
ttcttcttactgctctgg

SEQ ID NO: 31725 - DNA, 25 bp, Artificial Sequence
  Synthetic: FXN 3 forward 9:69039819-69039847; SpCas9
ttttcttcttactgctctggaggct

SEQ ID NO: 31726 - DNA, 24 bp, Artificial Sequence
  Synthetic: FXN 3 forward 9:69039820-69039847; SpCas9
tttcttcttactgctctggaggct

SEQ ID NO: 31727 - DNA, 23 bp, Artificial Sequence
  Synthetic: FXN 3 forward 9:69039821-69039847; SpCas9
ttcttcttactgctctggaggct

SEQ ID NO: 31728 - DNA, 22 bp, Artificial Sequence
  Synthetic: FXN 3 forward 9:69039822-69039847; SpCas9
tcttcttactgctctggaggct

SEQ ID NO: 31729 - DNA, 21 bp, Artificial Sequence
  Synthetic: FXN 3 forward 9:69039823-69039847; SpCas9
cttcttactgctctggaggct

SEQ ID NO: 31730 - DNA, 20 bp, Artificial Sequence
  Synthetic: FXN 3 forward 9:69039824-69039847; SpCas9
ttcttactgctctggaggct

SEQ ID NO: 31731 - DNA, 19 bp, Artificial Sequence
  Synthetic: FXN 3 forward 9:69039825-69039847; SpCas9
tcttactgctctggaggct

SEQ ID NO: 31732 - DNA, 18 bp, Artificial Sequence
  Synthetic: FXN 3 forward 9:69039826-69039847; SpCas9
cttactgctctggaggct

SEQ ID NO: 31733 - DNA, 25 bp, Artificial Sequence
  Synthetic: FXN 3 forward 9:69039822-69039850; SpCas9
tcttcttactgctctggaggctgag

SEQ ID NO: 31734 - DNA, 24 bp, Artificial Sequence
  Synthetic: FXN 3 forward 9:69039823-69039850; SpCas9
cttcttactgctctggaggctgag

SEQ ID NO: 31735 - DNA, 23 bp, Artificial Sequence
  Synthetic: FXN 3 forward 9:69039824-69039850; SpCas9
ttcttactgctctggaggctgag

SEQ ID NO: 31736 - DNA, 22 bp, Artificial Sequence
  Synthetic: FXN 3 forward 9:69039825-69039850; SpCas9
tcttactgctctggaggctgag

SEQ ID NO: 31737 - DNA, 21 bp, Artificial Sequence
  Synthetic: FXN 3 forward 9:69039826-69039850; SpCas9
cttactgctctggaggctgag

SEQ ID NO: 31738 - DNA, 20 bp, Artificial Sequence
  Synthetic: FXN 3 forward 9:69039827-69039850; SpCas9
ttactgctctggaggctgag

SEQ ID NO: 31739 - DNA, 19 bp, Artificial Sequence
  Synthetic: FXN 3 forward 9:69039828-69039850; SpCas9
tactgctctggaggctgag

SEQ ID NO: 31740 - DNA, 18 bp, Artificial Sequence
  Synthetic: FXN 3 forward 9:69039829-69039850; SpCas9
actgctctggaggctgag

SEQ ID NO: 31741 - DNA, 25 bp, Artificial Sequence
  Synthetic: FXN 3 reverse 9:69039823-69039851; SpCas9
acttctcagcctccagagcagtaag

SEQ ID NO: 31742 - DNA, 24 bp, Artificial Sequence
  Synthetic: FXN 3 reverse 9:69039824-69039851; SpCas9
cttctcagcctccagagcagtaag

SEQ ID NO: 31743 - DNA, 23 bp, Artificial Sequence
  Synthetic: FXN 3 reverse 9:69039825-69039851; SpCas9
ttctcagcctccagagcagtaag

SEQ ID NO: 31744 - DNA, 22 bp, Artificial Sequence
  Synthetic: FXN 3 reverse 9:69039826-69039851; SpCas9
tctcagcctccagagcagtaag

SEQ ID NO: 31745 - DNA, 21 bp, Artificial Sequence
  Synthetic: FXN 3 reverse 9:69039827-69039851; SpCas9
ctcagcctccagagcagtaag

SEQ ID NO: 31746 - DNA, 20 bp, Artificial Sequence
  Synthetic: FXN 3 reverse 9:69039828-69039851; SpCas9
tcagcctccagagcagtaag

SEQ ID NO: 31747 - DNA, 19 bp, Artificial Sequence
  Synthetic: FXN 3 reverse 9:69039829-69039851; SpCas9
cagcctccagagcagtaag

SEQ ID NO: 31748 - DNA, 18 bp, Artificial Sequence
  Synthetic: FXN 3 reverse 9:69039830-69039851; SpCas9
agcctccagagcagtaag

SEQ ID NO: 31749 - DNA, 25 bp, Artificial Sequence
  Synthetic: FXN 3 reverse 9:69039826-69039854; SpCas9
tggacttctcagcctccagagcagt

SEQ ID NO: 31750 - DNA, 24 bp, Artificial Sequence
  Synthetic: FXN 3 reverse 9:69039827-69039854; SpCas9
ggacttctcagcctccagagcagt

SEQ ID NO: 31751 - DNA, 23 bp, Artificial Sequence
  Synthetic: FXN 3 reverse 9:69039828-69039854; SpCas9
gacttctcagcctccagagcagt

SEQ ID NO: 31752 - DNA, 22 bp, Artificial Sequence
  Synthetic: FXN 3 reverse 9:69039829-69039854; SpCas9
acttctcagcctccagagcagt

SEQ ID NO: 31753 - DNA, 21 bp, Artificial Sequence
  Synthetic: FXN 3 reverse 9:69039830-69039854; SpCas9
cttctcagcctccagagcagt

SEQ ID NO: 31754 - DNA, 20 bp, Artificial Sequence
  Synthetic: FXN 3 reverse 9:69039831-69039854; SpCas9
ttctcagcctccagagcagt

SEQ ID NO: 31755 - DNA, 19 bp, Artificial Sequence
  Synthetic: FXN 3 reverse 9:69039832-69039854; SpCas9
tctcagcctccagagcagt

SEQ ID NO: 31756 - DNA, 18 bp, Artificial Sequence
  Synthetic: FXN 3 reverse 9:69039833-69039854; SpCas9
ctcagcctccagagcagt

SEQ ID NO: 31757 - DNA, 25 bp, Artificial Sequence
  Synthetic: FXN 3 forward 9:69039829-69039857; SpCas9
actgctctggaggctgagaagtcca

SEQ ID NO: 31758 - DNA, 24 bp, Artificial Sequence
  Synthetic: FXN 3 forward 9:69039830-69039857; SpCas9
ctgctctggaggctgagaagtcca

SEQ ID NO: 31759 - DNA, 23 bp, Artificial Sequence
  Synthetic: FXN 3 forward 9:69039831-69039857; SpCas9
tgctctggaggctgagaagtcca

SEQ ID NO: 31760 - DNA, 22 bp, Artificial Sequence
  Synthetic: FXN 3 forward 9:69039832-69039857; SpCas9
gctctggaggctgagaagtcca

SEQ ID NO: 31761 - DNA, 21 bp, Artificial Sequence
  Synthetic: FXN 3 forward 9:69039833-69039857; SpCas9
ctctggaggctgagaagtcca

SEQ ID NO: 31762 - DNA, 20 bp, Artificial Sequence
  Synthetic: FXN 3 forward 9:69039834-69039857; SpCas9
tctggaggctgagaagtcca

SEQ ID NO: 31763 - DNA, 19 bp, Artificial Sequence
  Synthetic: FXN 3 forward 9:69039835-69039857; SpCas9
ctggaggctgagaagtcca

SEQ ID NO: 31764 - DNA, 18 bp, Artificial Sequence
  Synthetic: FXN 3 forward 9:69039836-69039857; SpCas9
tggaggctgagaagtcca

SEQ ID NO: 31765 - DNA, 25 bp, Artificial Sequence
  Synthetic: FXN 3 reverse 9:69039830-69039858; SpCas9
actttggacttctcagcctccagag

SEQ ID NO: 31766 - DNA, 24 bp, Artificial Sequence
  Synthetic: FXN 3 reverse 9:69039831-69039858; SpCas9
ctttggacttctcagcctccagag

SEQ ID NO: 31767 - DNA, 23 bp, Artificial Sequence
  Synthetic: FXN 3 reverse 9:69039832-69039858; SpCas9
tttggacttctcagcctccagag

SEQ ID NO: 31768 - DNA, 22 bp, Artificial Sequence
  Synthetic: FXN 3 reverse 9:69039833-69039858; SpCas9
ttggacttctcagcctccagag

SEQ ID NO: 31769 - DNA, 21 bp, Artificial Sequence
  Synthetic: FXN 3 reverse 9:69039834-69039858; SpCas9
tggacttctcagcctccagag

SEQ ID NO: 31770 - DNA, 20 bp, Artificial Sequence
  Synthetic: FXN 3 reverse 9:69039835-69039858; SpCas9
ggacttctcagcctccagag

SEQ ID NO: 31771 - DNA, 19 bp, Artificial Sequence
  Synthetic: FXN 3 reverse 9:69039836-69039858; SpCas9
gacttctcagcctccagag

SEQ ID NO: 31772 - DNA, 18 bp, Artificial Sequence
  Synthetic: FXN 3 reverse 9:69039837-69039858; SpCas9
acttctcagcctccagag

SEQ ID NO: 31773 - DNA, 25 bp, Artificial Sequence
  Synthetic: FXN 3 reverse 9:69039833-69039861; SpCas9
ttgactttggacttctcagcctcca

SEQ ID NO: 31774 - DNA, 24 bp, Artificial Sequence
  Synthetic: FXN 3 reverse 9:69039834-69039861; SpCas9
tgactttggacttctcagcctcca

SEQ ID NO: 31775 - DNA, 23 bp, Artificial Sequence
  Synthetic: FXN 3 reverse 9:69039835-69039861; SpCas9
gactttggacttctcagcctcca

SEQ ID NO: 31776 - DNA, 22 bp, Artificial Sequence
  Synthetic: FXN 3 reverse 9:69039836-69039861; SpCas9
actttggacttctcagcctcca

SEQ ID NO: 31777 - DNA, 21 bp, Artificial Sequence
  Synthetic: FXN 3 reverse 9:69039837-69039861; SpCas9
ctttggacttctcagcctcca

SEQ ID NO: 31778 - DNA, 20 bp, Artificial Sequence
  Synthetic: FXN 3 reverse 9:69039838-69039861; SpCas9
tttggacttctcagcctcca

SEQ ID NO: 31779 - DNA, 19 bp, Artificial Sequence
  Synthetic: FXN 3 reverse 9:69039839-69039861; SpCas9
ttggacttctcagcctcca

SEQ ID NO: 31780 - DNA, 18 bp, Artificial Sequence
  Synthetic: FXN 3 reverse 9:69039840-69039861; SpCas9
tggacttctcagcctcca

SEQ ID NO: 31781 - DNA, 25 bp, Artificial Sequence
  Synthetic: FXN 3 forward 9:69039834-69039862; SpCas9
tctggaggctgagaagtccaaagtc

SEQ ID NO: 31782 - DNA, 24 bp, Artificial Sequence
  Synthetic: FXN 3 forward 9:69039835-69039862; SpCas9
ctggaggctgagaagtccaaagtc

SEQ ID NO: 31783 - DNA, 23 bp, Artificial Sequence
  Synthetic: FXN 3 forward 9:69039836-69039862; SpCas9
tggaggctgagaagtccaaagtc

SEQ ID NO: 31784 - DNA, 22 bp, Artificial Sequence
  Synthetic: FXN 3 forward 9:69039837-69039862; SpCas9
ggaggctgagaagtccaaagtc

SEQ ID NO: 31785 - DNA, 21 bp, Artificial Sequence
  Synthetic: FXN 3 forward 9:69039838-69039862; SpCas9
gaggctgagaagtccaaagtc

SEQ ID NO: 31786 - DNA, 20 bp, Artificial Sequence
  Synthetic: FXN 3 forward 9:69039839-69039862; SpCas9
aggctgagaagtccaaagtc

SEQ ID NO: 31787 - DNA, 19 bp, Artificial Sequence
  Synthetic: FXN 3 forward 9:69039840-69039862; SpCas9
ggctgagaagtccaaagtc

SEQ ID NO: 31788 - DNA, 18 bp, Artificial Sequence
  Synthetic: FXN 3 forward 9:69039841-69039862; SpCas9
gctgagaagtccaaagtc

SEQ ID NO: 31789 - DNA, 25 bp, Artificial Sequence
  Synthetic: FXN 3 reverse 9:69039835-69039863; SpCas9
acttgactttggacttctcagcctc

SEQ ID NO: 31790 - DNA, 24 bp, Artificial Sequence
  Synthetic: FXN 3 reverse 9:69039836-69039863; SpCas9
cttgactttggacttctcagcctc

SEQ ID NO: 31791 - DNA, 23 bp, Artificial Sequence
  Synthetic: FXN 3 reverse 9:69039837-69039863; SpCas9
ttgactttggacttctcagcctc

SEQ ID NO: 31792 - DNA, 22 bp, Artificial Sequence
  Synthetic: FXN 3 reverse 9:69039838-69039863; SpCas9
tgactttggacttctcagcctc

SEQ ID NO: 31793 - DNA, 21 bp, Artificial Sequence
  Synthetic: FXN 3 reverse 9:69039839-69039863; SpCas9
gactttggacttctcagcctc

SEQ ID NO: 31794 - DNA, 20 bp, Artificial Sequence
  Synthetic: FXN 3 reverse 9:69039840-69039863; SpCas9
actttggacttctcagcctc

SEQ ID NO: 31795 - DNA, 19 bp, Artificial Sequence
  Synthetic: FXN 3 reverse 9:69039841-69039863; SpCas9
ctttggacttctcagcctc

SEQ ID NO: 31796 - DNA, 18 bp, Artificial Sequence
  Synthetic: FXN 3 reverse 9:69039842-69039863; SpCas9
tttggacttctcagcctc

SEQ ID NO: 31797 - DNA, 25 bp, Artificial Sequence
  Synthetic: FXN 3 reverse 9:69039842-69039870; SpCas9
agaagggacttgactttggacttct

SEQ ID NO: 31798 - DNA, 24 bp, Artificial Sequence
  Synthetic: FXN 3 reverse 9:69039843-69039870; SpCas9
gaagggacttgactttggacttct

SEQ ID NO: 31799 - DNA, 23 bp, Artificial Sequence
  Synthetic: FXN 3 reverse 9:69039844-69039870; SpCas9
aagggacttgactttggacttct

SEQ ID NO: 31800 - DNA, 22 bp, Artificial Sequence
  Synthetic: FXN 3 reverse 9:69039845-69039870; SpCas9
agggacttgactttggacttct

SEQ ID NO: 31801 - DNA, 21 bp, Artificial Sequence
  Synthetic: FXN 3 reverse 9:69039846-69039870; SpCas9
gggacttgactttggacttct

SEQ ID NO: 31802 - DNA, 20 bp, Artificial Sequence
  Synthetic: FXN 3 reverse 9:69039847-69039870; SpCas9
ggacttgactttggacttct

SEQ ID NO: 31803 - DNA, 19 bp, Artificial Sequence
  Synthetic: FXN 3 reverse 9:69039848-69039870; SpCas9
gacttgactttggacttct

SEQ ID NO: 31804 - DNA, 18 bp, Artificial Sequence
  Synthetic: FXN 3 reverse 9:69039849-69039870; SpCas9
acttgactttggacttct

SEQ ID NO: 31805 - DNA, 25 bp, Artificial Sequence
  Synthetic: FXN 3 forward 9:69039848-69039876; SpCas9
agtccaaagtcaagtcccttcttgc

SEQ ID NO: 31806 - DNA, 24 bp, Artificial Sequence
  Synthetic: FXN 3 forward 9:69039849-69039876; SpCas9
gtccaaagtcaagtcccttcttgc

SEQ ID NO: 31807 - DNA, 23 bp, Artificial Sequence
  Synthetic: FXN 3 forward 9:69039850-69039876; SpCas9
tccaaagtcaagtcccttcttgc

SEQ ID NO: 31808 - DNA, 22 bp, Artificial Sequence
  Synthetic: FXN 3 forward 9:69039851-69039876; SpCas9
ccaaagtcaagtcccttcttgc

SEQ ID NO: 31809 - DNA, 21 bp, Artificial Sequence
  Synthetic: FXN 3 forward 9:69039852-69039876; SpCas9
caaagtcaagtcccttcttgc

SEQ ID NO: 31810 - DNA, 20 bp, Artificial Sequence
  Synthetic: FXN 3 forward 9:69039853-69039876; SpCas9
aaagtcaagtcccttcttgc

SEQ ID NO: 31811 - DNA, 19 bp, Artificial Sequence
  Synthetic: FXN 3 forward 9:69039854-69039876; SpCas9
aagtcaagtcccttcttgc

SEQ ID NO: 31812 - DNA, 18 bp, Artificial Sequence
  Synthetic: FXN 3 forward 9:69039855-69039876; SpCas9
agtcaagtcccttcttgc

SEQ ID NO: 31813 - DNA, 25 bp, Artificial Sequence
  Synthetic: FXN 3 forward 9:69039851-69039879; SpCas9
ccaaagtcaagtcccttcttgctgg

SEQ ID NO: 31814 - DNA, 24 bp, Artificial Sequence
  Synthetic: FXN 3 forward 9:69039852-69039879; SpCas9
caaagtcaagtcccttcttgctgg

SEQ ID NO: 31815 - DNA, 23 bp, Artificial Sequence
  Synthetic: FXN 3 forward 9:69039853-69039879; SpCas9
aaagtcaagtcccttcttgctgg

SEQ ID NO: 31816 - DNA, 22 bp, Artificial Sequence
  Synthetic: FXN 3 forward 9:69039854-69039879; SpCas9
aagtcaagtcccttcttgctgg

SEQ ID NO: 31817 - DNA, 21 bp, Artificial Sequence
  Synthetic: FXN 3 forward 9:69039855-69039879; SpCas9
agtcaagtcccttcttgctgg

SEQ ID NO: 31818 - DNA, 20 bp, Artificial Sequence
  Synthetic: FXN 3 forward 9:69039856-69039879; SpCas9
gtcaagtcccttcttgctgg

SEQ ID NO: 31819 - DNA, 19 bp, Artificial Sequence
  Synthetic: FXN 3 forward 9:69039857-69039879; SpCas9
tcaagtcccttcttgctgg

SEQ ID NO: 31820 - DNA, 18 bp, Artificial Sequence
  Synthetic: FXN 3 forward 9:69039858-69039879; SpCas9
caagtcccttcttgctgg

SEQ ID NO: 31821 - DNA, 25 bp, Artificial Sequence
  Synthetic: FXN 3 reverse 9:69039851-69039879; SpCas9
ccaccagcaagaagggacttgactt

SEQ ID NO: 31822 - DNA, 24 bp, Artificial Sequence
  Synthetic: FXN 3 reverse 9:69039852-69039879; SpCas9
caccagcaagaagggacttgactt

SEQ ID NO: 31823 - DNA, 23 bp, Artificial Sequence
  Synthetic: FXN 3 reverse 9:69039853-69039879; SpCas9
accagcaagaagggacttgactt

SEQ ID NO: 31824 - DNA, 22 bp, Artificial Sequence
  Synthetic: FXN 3 reverse 9:69039854-69039879; SpCas9
ccagcaagaagggacttgactt

SEQ ID NO: 31825 - DNA, 21 bp, Artificial Sequence
  Synthetic: FXN 3 reverse 9:69039855-69039879; SpCas9
cagcaagaagggacttgactt

SEQ ID NO: 31826 - DNA, 20 bp, Artificial Sequence
  Synthetic: FXN 3 reverse 9:69039856-69039879; SpCas9
agcaagaagggacttgactt

SEQ ID NO: 31827 - DNA, 19 bp, Artificial Sequence
  Synthetic: FXN 3 reverse 9:69039857-69039879; SpCas9
gcaagaagggacttgactt

SEQ ID NO: 31828 - DNA, 18 bp, Artificial Sequence
  Synthetic: FXN 3 reverse 9:69039858-69039879; SpCas9
caagaagggacttgactt

SEQ ID NO: 31829 - DNA, 25 bp, Artificial Sequence
  Synthetic: FXN 3 forward 9:69039852-69039880; SpCas9
caaagtcaagtcccttcttgctggt

SEQ ID NO: 31830 - DNA, 24 bp, Artificial Sequence
  Synthetic: FXN 3 forward 9:69039853-69039880; SpCas9
aaagtcaagtcccttcttgctggt

SEQ ID NO: 31831 - DNA, 23 bp, Artificial Sequence
  Synthetic: FXN 3 forward 9:69039854-69039880; SpCas9
aagtcaagtcccttcttgctggt

SEQ ID NO: 31832 - DNA, 22 bp, Artificial Sequence
  Synthetic: FXN 3 forward 9:69039855-69039880; SpCas9
agtcaagtcccttcttgctggt

SEQ ID NO: 31833 - DNA, 21 bp, Artificial Sequence
  Synthetic: FXN 3 forward 9:69039856-69039880; SpCas9
gtcaagtcccttcttgctggt

SEQ ID NO: 31834 - DNA, 20 bp, Artificial Sequence
  Synthetic: FXN 3 forward 9:69039857-69039880; SpCas9
tcaagtcccttcttgctggt

SEQ ID NO: 31835 - DNA, 19 bp, Artificial Sequence
  Synthetic: FXN 3 forward 9:69039858-69039880; SpCas9
caagtcccttcttgctggt

SEQ ID NO: 31836 - DNA, 18 bp, Artificial Sequence
  Synthetic: FXN 3 forward 9:69039859-69039880; SpCas9
aagtcccttcttgctggt

SEQ ID NO: 31837 - DNA, 25 bp, Artificial Sequence
  Synthetic: FXN 3 forward 9:69039853-69039881; SpCas9
aaagtcaagtcccttcttgctggtg

SEQ ID NO: 31838 - DNA, 24 bp, Artificial Sequence
  Synthetic: FXN 3 forward 9:69039854-69039881; SpCas9
aagtcaagtcccttcttgctggtg

SEQ ID NO: 31839 - DNA, 23 bp, Artificial Sequence
  Synthetic: FXN 3 forward 9:69039855-69039881; SpCas9
agtcaagtcccttcttgctggtg

SEQ ID NO: 31840 - DNA, 22 bp, Artificial Sequence
  Synthetic: FXN 3 forward 9:69039856-69039881; SpCas9
gtcaagtcccttcttgctggtg

SEQ ID NO: 31841 - DNA, 21 bp, Artificial Sequence
  Synthetic: FXN 3 forward 9:69039857-69039881; SpCas9
tcaagtcccttcttgctggtg

SEQ ID NO: 31842 - DNA, 20 bp, Artificial Sequence
  Synthetic: FXN 3 forward 9:69039858-69039881; SpCas9
caagtcccttcttgctggtg

SEQ ID NO: 31843 - DNA, 19 bp, Artificial Sequence
  Synthetic: FXN 3 forward 9:69039859-69039881; SpCas9
aagtcccttcttgctggtg

SEQ ID NO: 31844 - DNA, 18 bp, Artificial Sequence
  Synthetic: FXN 3 forward 9:69039860-69039881; SpCas9
agtcccttcttgctggtg

SEQ ID NO: 31845 - DNA, 25 bp, Artificial Sequence
  Synthetic: FXN 3 forward 9:69039862-69039890; SpCas9
tcccttcttgctggtggggactttg

SEQ ID NO: 31846 - DNA, 24 bp, Artificial Sequence
  Synthetic: FXN 3 forward 9:69039863-69039890; SpCas9
cccttcttgctggtggggactttg

SEQ ID NO: 31847 - DNA, 23 bp, Artificial Sequence
  Synthetic: FXN 3 forward 9:69039864-69039890; SpCas9
ccttcttgctggtggggactttg

SEQ ID NO: 31848 - DNA, 22 bp, Artificial Sequence
  Synthetic: FXN 3 forward 9:69039865-69039890; SpCas9
cttcttgctggtggggactttg

SEQ ID NO: 31849 - DNA, 21 bp, Artificial Sequence
  Synthetic: FXN 3 forward 9:69039866-69039890; SpCas9
ttcttgctggtggggactttg

SEQ ID NO: 31850 - DNA, 20 bp, Artificial Sequence
  Synthetic: FXN 3 forward 9:69039867-69039890; SpCas9
tcttgctggtggggactttg

SEQ ID NO: 31851 - DNA, 19 bp, Artificial Sequence
  Synthetic: FXN 3 forward 9:69039868-69039890; SpCas9
cttgctggtggggactttg

SEQ ID NO: 31852 - DNA, 18 bp, Artificial Sequence
  Synthetic: FXN 3 forward 9:69039869-69039890; SpCas9
ttgctggtggggactttg

SEQ ID NO: 31853 - DNA, 25 bp, Artificial Sequence
  Synthetic: FXN 3 reverse 9:69039863-69039891; SpCas9
tctgcaaagtccccaccagcaagaa

SEQ ID NO: 31854 - DNA, 24 bp, Artificial Sequence
  Synthetic: FXN 3 reverse 9:69039864-69039891; SpCas9
ctgcaaagtccccaccagcaagaa

SEQ ID NO: 31855 - DNA, 23 bp, Artificial Sequence
  Synthetic: FXN 3 reverse 9:69039865-69039891; SpCas9
tgcaaagtccccaccagcaagaa

SEQ ID NO: 31856 - DNA, 22 bp, Artificial Sequence
  Synthetic: FXN 3 reverse 9:69039866-69039891; SpCas9
gcaaagtccccaccagcaagaa

SEQ ID NO: 31857 - DNA, 21 bp, Artificial Sequence
  Synthetic: FXN 3 reverse 9:69039867-69039891; SpCas9
caaagtccccaccagcaagaa

SEQ ID NO: 31858 - DNA, 20 bp, Artificial Sequence
  Synthetic: FXN 3 reverse 9:69039868-69039891; SpCas9
aaagtccccaccagcaagaa

SEQ ID NO: 31859 - DNA, 19 bp, Artificial Sequence
  Synthetic: FXN 3 reverse 9:69039869-69039891; SpCas9
aagtccccaccagcaagaa

SEQ ID NO: 31860 - DNA, 18 bp, Artificial Sequence
  Synthetic: FXN 3 reverse 9:69039870-69039891; SpCas9
agtccccaccagcaagaa

SEQ ID NO: 31861 - DNA, 25 bp, Artificial Sequence
  Synthetic: FXN 3 forward 9:69039864-69039892; SpCas9
ccttcttgctggtggggactttgca

SEQ ID NO: 31862 - DNA, 24 bp, Artificial Sequence
  Synthetic: FXN 3 forward 9:69039865-69039892; SpCas9
cttcttgctggtggggactttgca

SEQ ID NO: 31863 - DNA, 23 bp, Artificial Sequence
  Synthetic: FXN 3 forward 9:69039866-69039892; SpCas9
ttcttgctggtggggactttgca

SEQ ID NO: 31864 - DNA, 22 bp, Artificial Sequence
  Synthetic: FXN 3 forward 9:69039867-69039892; SpCas9
tcttgctggtggggactttgca

SEQ ID NO: 31865 - DNA, 21 bp, Artificial Sequence
  Synthetic: FXN 3 forward 9:69039868-69039892; SpCas9
cttgctggtggggactttgca

SEQ ID NO: 31866 - DNA, 20 bp, Artificial Sequence
  Synthetic: FXN 3 forward 9:69039869-69039892; SpCas9
ttgctggtggggactttgca

SEQ ID NO: 31867 - DNA, 19 bp, Artificial Sequence
  Synthetic: FXN 3 forward 9:69039870-69039892; SpCas9
tgctggtggggactttgca

SEQ ID NO: 31868 - DNA, 18 bp, Artificial Sequence
  Synthetic: FXN 3 forward 9:69039871-69039892; SpCas9
gctggtggggactttgca

SEQ ID NO: 31869 - DNA, 25 bp, Artificial Sequence
  Synthetic: FXN 3 reverse 9:69039864-69039892; SpCas9
ctctgcaaagtccccaccagcaaga

SEQ ID NO: 31870 - DNA, 24 bp, Artificial Sequence
  Synthetic: FXN 3 reverse 9:69039865-69039892; SpCas9
tctgcaaagtccccaccagcaaga

SEQ ID NO: 31871 - DNA, 23 bp, Artificial Sequence
  Synthetic: FXN 3 reverse 9:69039866-69039892; SpCas9
ctgcaaagtccccaccagcaaga

SEQ ID NO: 31872 - DNA, 22 bp, Artificial Sequence
  Synthetic: FXN 3 reverse 9:69039867-69039892; SpCas9
tgcaaagtccccaccagcaaga

SEQ ID NO: 31873 - DNA, 21 bp, Artificial Sequence
  Synthetic: FXN 3 reverse 9:69039868-69039892; SpCas9
gcaaagtccccaccagcaaga

SEQ ID NO: 31874 - DNA, 20 bp, Artificial Sequence
  Synthetic: FXN 3 reverse 9:69039869-69039892; SpCas9
caaagtccccaccagcaaga

SEQ ID NO: 31875 - DNA, 19 bp, Artificial Sequence
  Synthetic: FXN 3 reverse 9:69039870-69039892; SpCas9
aaagtccccaccagcaaga

SEQ ID NO: 31876 - DNA, 18 bp, Artificial Sequence
  Synthetic: FXN 3 reverse 9:69039871-69039892; SpCas9
aagtccccaccagcaaga

SEQ ID NO: 31877 - DNA, 25 bp, Artificial Sequence
  Synthetic: FXN 3 reverse 9:69039865-69039893; SpCas9
actctgcaaagtccccaccagcaag

SEQ ID NO: 31878 - DNA, 24 bp, Artificial Sequence
  Synthetic: FXN 3 reverse 9:69039866-69039893; SpCas9
ctctgcaaagtccccaccagcaag

SEQ ID NO: 31879 - DNA, 23 bp, Artificial Sequence
  Synthetic: FXN 3 reverse 9:69039867-69039893; SpCas9
tctgcaaagtccccaccagcaag

SEQ ID NO: 31880 - DNA, 22 bp, Artificial Sequence
  Synthetic: FXN 3 reverse 9:69039868-69039893; SpCas9
ctgcaaagtccccaccagcaag

SEQ ID NO: 31881 - DNA, 21 bp, Artificial Sequence
  Synthetic: FXN 3 reverse 9:69039869-69039893; SpCas9
tgcaaagtccccaccagcaag

SEQ ID NO: 31882 - DNA, 20 bp, Artificial Sequence
  Synthetic: FXN 3 reverse 9:69039870-69039893; SpCas9
gcaaagtccccaccagcaag

SEQ ID NO: 31883 - DNA, 19 bp, Artificial Sequence
  Synthetic: FXN 3 reverse 9:69039871-69039893; SpCas9
caaagtccccaccagcaag

SEQ ID NO: 31884 - DNA, 18 bp, Artificial Sequence
  Synthetic: FXN 3 reverse 9:69039872-69039893; SpCas9
aaagtccccaccagcaag

SEQ ID NO: 31885 - DNA, 25 bp, Artificial Sequence
  Synthetic: FXN 3 reverse 9:69039868-69039896; SpCas9
aatactctgcaaagtccccaccagc

SEQ ID NO: 31886 - DNA, 24 bp, Artificial Sequence
  Synthetic: FXN 3 reverse 9:69039869-69039896; SpCas9
atactctgcaaagtccccaccagc

SEQ ID NO: 31887 - DNA, 23 bp, Artificial Sequence
  Synthetic: FXN 3 reverse 9:69039870-69039896; SpCas9
tactctgcaaagtccccaccagc

SEQ ID NO: 31888 - DNA, 22 bp, Artificial Sequence
  Synthetic: FXN 3 reverse 9:69039871-69039896; SpCas9
actctgcaaagtccccaccagc

SEQ ID NO: 31889 - DNA, 21 bp, Artificial Sequence
  Synthetic: FXN 3 reverse 9:69039872-69039896; SpCas9
ctctgcaaagtccccaccagc

SEQ ID NO: 31890 - DNA, 20 bp, Artificial Sequence
  Synthetic: FXN 3 reverse 9:69039873-69039896; SpCas9
tctgcaaagtccccaccagc

SEQ ID NO: 31891 - DNA, 19 bp, Artificial Sequence
  Synthetic: FXN 3 reverse 9:69039874-69039896; SpCas9
ctgcaaagtccccaccagc

SEQ ID NO: 31892 - DNA, 18 bp, Artificial Sequence
  Synthetic: FXN 3 reverse 9:69039875-69039896; SpCas9
tgcaaagtccccaccagc

SEQ ID NO: 31893 - DNA, 25 bp, Artificial Sequence
  Synthetic: FXN 3 forward 9:69039871-69039899; SpCas9
gctggtggggactttgcagagtatt

SEQ ID NO: 31894 - DNA, 24 bp, Artificial Sequence
  Synthetic: FXN 3 forward 9:69039872-69039899; SpCas9
ctggtggggactttgcagagtatt

SEQ ID NO: 31895 - DNA, 23 bp, Artificial Sequence
  Synthetic: FXN 3 forward 9:69039873-69039899; SpCas9
tggtggggactttgcagagtatt

SEQ ID NO: 31896 - DNA, 22 bp, Artificial Sequence
  Synthetic: FXN 3 forward 9:69039874-69039899; SpCas9
ggtggggactttgcagagtatt

SEQ ID NO: 31897 - DNA, 21 bp, Artificial Sequence
  Synthetic: FXN 3 forward 9:69039875-69039899; SpCas9
gtggggactttgcagagtatt

SEQ ID NO: 31898 - DNA, 20 bp, Artificial Sequence
  Synthetic: FXN 3 forward 9:69039876-69039899; SpCas9
tggggactttgcagagtatt

SEQ ID NO: 31899 - DNA, 19 bp, Artificial Sequence
  Synthetic: FXN 3 forward 9:69039877-69039899; SpCas9
ggggactttgcagagtatt

SEQ ID NO: 31900 - DNA, 18 bp, Artificial Sequence
  Synthetic: FXN 3 forward 9:69039878-69039899; SpCas9
gggactttgcagagtatt

SEQ ID NO: 31901 - DNA, 25 bp, Artificial Sequence
  Synthetic: FXN 3 forward 9:69039872-69039900; SpCas9
ctggtggggactttgcagagtattg

SEQ ID NO: 31902 - DNA, 24 bp, Artificial Sequence
  Synthetic: FXN 3 forward 9:69039873-69039900; SpCas9
tggtggggactttgcagagtattg

SEQ ID NO: 31903 - DNA, 23 bp, Artificial Sequence
  Synthetic: FXN 3 forward 9:69039874-69039900; SpCas9
ggtggggactttgcagagtattg

SEQ ID NO: 31904 - DNA, 22 bp, Artificial Sequence
  Synthetic: FXN 3 forward 9:69039875-69039900; SpCas9
gtggggactttgcagagtattg

SEQ ID NO: 31905 - DNA, 21 bp, Artificial Sequence
  Synthetic: FXN 3 forward 9:69039876-69039900; SpCas9
tggggactttgcagagtattg

SEQ ID NO: 31906 - DNA, 20 bp, Artificial Sequence
  Synthetic: FXN 3 forward 9:69039877-69039900; SpCas9
ggggactttgcagagtattg

SEQ ID NO: 31907 - DNA, 19 bp, Artificial Sequence
  Synthetic: FXN 3 forward 9:69039878-69039900; SpCas9
gggactttgcagagtattg

SEQ ID NO: 31908 - DNA, 18 bp, Artificial Sequence
  Synthetic: FXN 3 forward 9:69039879-69039900; SpCas9
ggactttgcagagtattg

SEQ ID NO: 31909 - DNA, 25 bp, Artificial Sequence
  Synthetic: FXN 3 reverse 9:69039872-69039900; SpCas9
cctcaatactctgcaaagtccccac

SEQ ID NO: 31910 - DNA, 24 bp, Artificial Sequence
  Synthetic: FXN 3 reverse 9:69039873-69039900; SpCas9
ctcaatactctgcaaagtccccac

SEQ ID NO: 31911 - DNA, 23 bp, Artificial Sequence
  Synthetic: FXN 3 reverse 9:69039874-69039900; SpCas9
tcaatactctgcaaagtccccac

SEQ ID NO: 31912 - DNA, 22 bp, Artificial Sequence
  Synthetic: FXN 3 reverse 9:69039875-69039900; SpCas9
caatactctgcaaagtccccac

SEQ ID NO: 31913 - DNA, 21 bp, Artificial Sequence
  Synthetic: FXN 3 reverse 9:69039876-69039900; SpCas9
aatactctgcaaagtccccac

SEQ ID NO: 31914 - DNA, 20 bp, Artificial Sequence
  Synthetic: FXN 3 reverse 9:69039877-69039900; SpCas9
atactctgcaaagtccccac

SEQ ID NO: 31915 - DNA, 19 bp, Artificial Sequence
  Synthetic: FXN 3 reverse 9:69039878-69039900; SpCas9
tactctgcaaagtccccac

SEQ ID NO: 31916 - DNA, 18 bp, Artificial Sequence
  Synthetic: FXN 3 reverse 9:69039879-69039900; SpCas9
actctgcaaagtccccac

SEQ ID NO: 31917 - DNA, 25 bp, Artificial Sequence
  Synthetic: FXN 3 forward 9:69039875-69039903; SpCas9
gtggggactttgcagagtattgagg

SEQ ID NO: 31918 - DNA, 24 bp, Artificial Sequence
  Synthetic: FXN 3 forward 9:69039876-69039903; SpCas9
tggggactttgcagagtattgagg

SEQ ID NO: 31919 - DNA, 23 bp, Artificial Sequence
  Synthetic: FXN 3 forward 9:69039877-69039903; SpCas9
ggggactttgcagagtattgagg

SEQ ID NO: 31920 - DNA, 22 bp, Artificial Sequence
  Synthetic: FXN 3 forward 9:69039878-69039903; SpCas9
gggactttgcagagtattgagg

SEQ ID NO: 31921 - DNA, 21 bp, Artificial Sequence
  Synthetic: FXN 3 forward 9:69039879-69039903; SpCas9
ggactttgcagagtattgagg

SEQ ID NO: 31922 - DNA, 20 bp, Artificial Sequence
  Synthetic: FXN 3 forward 9:69039880-69039903; SpCas9
gactttgcagagtattgagg

SEQ ID NO: 31923 - DNA, 19 bp, Artificial Sequence
  Synthetic: FXN 3 forward 9:69039881-69039903; SpCas9
actttgcagagtattgagg

SEQ ID NO: 31924 - DNA, 18 bp, Artificial Sequence
  Synthetic: FXN 3 forward 9:69039882-69039903; SpCas9
ctttgcagagtattgagg

SEQ ID NO: 31925 - DNA, 25 bp, Artificial Sequence
  Synthetic: FXN 3 forward 9:69039881-69039909; SpCas9
actttgcagagtattgaggcggcac

SEQ ID NO: 31926 - DNA, 24 bp, Artificial Sequence
  Synthetic: FXN 3 forward 9:69039882-69039909; SpCas9
ctttgcagagtattgaggcggcac

SEQ ID NO: 31927 - DNA, 23 bp, Artificial Sequence
  Synthetic: FXN 3 forward 9:69039883-69039909; SpCas9
tttgcagagtattgaggcggcac

SEQ ID NO: 31928 - DNA, 22 bp, Artificial Sequence
  Synthetic: FXN 3 forward 9:69039884-69039909; SpCas9
ttgcagagtattgaggcggcac

SEQ ID NO: 31929 - DNA, 21 bp, Artificial Sequence
  Synthetic: FXN 3 forward 9:69039885-69039909; SpCas9
tgcagagtattgaggcggcac

SEQ ID NO: 31930 - DNA, 20 bp, Artificial Sequence
  Synthetic: FXN 3 forward 9:69039886-69039909; SpCas9
gcagagtattgaggcggcac

SEQ ID NO: 31931 - DNA, 19 bp, Artificial Sequence
  Synthetic: FXN 3 forward 9:69039887-69039909; SpCas9
cagagtattgaggcggcac

SEQ ID NO: 31932 - DNA, 18 bp, Artificial Sequence
  Synthetic: FXN 3 forward 9:69039888-69039909; SpCas9
agagtattgaggcggcac

SEQ ID NO: 31933 - DNA, 25 bp, Artificial Sequence
  Synthetic: FXN 3 forward 9:69039882-69039910; SpCas9
ctttgcagagtattgaggcggcacc

SEQ ID NO: 31934 - DNA, 24 bp, Artificial Sequence
  Synthetic: FXN 3 forward 9:69039883-69039910; SpCas9
tttgcagagtattgaggcggcacc

SEQ ID NO: 31935 - DNA, 23 bp, Artificial Sequence
  Synthetic: FXN 3 forward 9:69039884-69039910; SpCas9
ttgcagagtattgaggcggcacc

SEQ ID NO: 31936 - DNA, 22 bp, Artificial Sequence
  Synthetic: FXN 3 forward 9:69039885-69039910; SpCas9
tgcagagtattgaggcggcacc

SEQ ID NO: 31937 - DNA, 21 bp, Artificial Sequence
  Synthetic: FXN 3 forward 9:69039886-69039910; SpCas9
gcagagtattgaggcggcacc

SEQ ID NO: 31938 - DNA, 20 bp, Artificial Sequence
  Synthetic: FXN 3 forward 9:69039887-69039910; SpCas9
cagagtattgaggcggcacc

SEQ ID NO: 31939 - DNA, 19 bp, Artificial Sequence
  Synthetic: FXN 3 forward 9:69039888-69039910; SpCas9
agagtattgaggcggcacc

SEQ ID NO: 31940 - DNA, 18 bp, Artificial Sequence
  Synthetic: FXN 3 forward 9:69039889-69039910; SpCas9
gagtattgaggcggcacc

SEQ ID NO: 31941 - DNA, 25 bp, Artificial Sequence
  Synthetic: FXN 3 reverse 9:69039882-69039910; SpCas9
cccggtgccgcctcaatactctgca

SEQ ID NO: 31942 - DNA, 24 bp, Artificial Sequence
  Synthetic: FXN 3 reverse 9:69039883-69039910; SpCas9
ccggtgccgcctcaatactctgca

SEQ ID NO: 31943 - DNA, 23 bp, Artificial Sequence
  Synthetic: FXN 3 reverse 9:69039884-69039910; SpCas9
cggtgccgcctcaatactctgca

SEQ ID NO: 31944 - DNA, 22 bp, Artificial Sequence
  Synthetic: FXN 3 reverse 9:69039885-69039910; SpCas9
ggtgccgcctcaatactctgca

SEQ ID NO: 31945 - DNA, 21 bp, Artificial Sequence
  Synthetic: FXN 3 reverse 9:69039886-69039910; SpCas9
gtgccgcctcaatactctgca

SEQ ID NO: 31946 - DNA, 20 bp, Artificial Sequence
  Synthetic: FXN 3 reverse 9:69039887-69039910; SpCas9
tgccgcctcaatactctgca

SEQ ID NO: 31947 - DNA, 19 bp, Artificial Sequence
  Synthetic: FXN 3 reverse 9:69039888-69039910; SpCas9
gccgcctcaatactctgca

SEQ ID NO: 31948 - DNA, 18 bp, Artificial Sequence
  Synthetic: FXN 3 reverse 9:69039889-69039910; SpCas9
ccgcctcaatactctgca

SEQ ID NO: 31949 - DNA, 25 bp, Artificial Sequence
  Synthetic: FXN 3 forward 9:69039892-69039920; SpCas9
tattgaggcggcaccgggcgtcata

SEQ ID NO: 31950 - DNA, 24 bp, Artificial Sequence
  Synthetic: FXN 3 forward 9:69039893-69039920; SpCas9
attgaggcggcaccgggcgtcata

SEQ ID NO: 31951 - DNA, 23 bp, Artificial Sequence
  Synthetic: FXN 3 forward 9:69039894-69039920; SpCas9
ttgaggcggcaccgggcgtcata

SEQ ID NO: 31952 - DNA, 22 bp, Artificial Sequence
  Synthetic: FXN 3 forward 9:69039895-69039920; SpCas9
tgaggcggcaccgggcgtcata

SEQ ID NO: 31953 - DNA, 21 bp, Artificial Sequence
  Synthetic: FXN 3 forward 9:69039896-69039920; SpCas9
gaggcggcaccgggcgtcata

SEQ ID NO: 31954 - DNA, 20 bp, Artificial Sequence
  Synthetic: FXN 3 forward 9:69039897-69039920; SpCas9
aggcggcaccgggcgtcata

SEQ ID NO: 31955 - DNA, 19 bp, Artificial Sequence
  Synthetic: FXN 3 forward 9:69039898-69039920; SpCas9
ggcggcaccgggcgtcata

SEQ ID NO: 31956 - DNA, 18 bp, Artificial Sequence
  Synthetic: FXN 3 forward 9:69039899-69039920; SpCas9
gcggcaccgggcgtcata

SEQ ID NO: 31957 - DNA, 25 bp, Artificial Sequence
  Synthetic: FXN 3 forward 9:69039896-69039924; SpCas9
gaggcggcaccgggcgtcatatggt

SEQ ID NO: 31958 - DNA, 24 bp, Artificial Sequence
  Synthetic: FXN 3 forward 9:69039897-69039924; SpCas9
aggcggcaccgggcgtcatatggt

SEQ ID NO: 31959 - DNA, 23 bp, Artificial Sequence
  Synthetic: FXN 3 forward 9:69039898-69039924; SpCas9
ggcggcaccgggcgtcatatggt

SEQ ID NO: 31960 - DNA, 22 bp, Artificial Sequence
  Synthetic: FXN 3 forward 9:69039899-69039924; SpCas9
gcggcaccgggcgtcatatggt

SEQ ID NO: 31961 - DNA, 21 bp, Artificial Sequence
  Synthetic: FXN 3 forward 9:69039900-69039924; SpCas9
cggcaccgggcgtcatatggt

SEQ ID NO: 31962 - DNA, 20 bp, Artificial Sequence
  Synthetic: FXN 3 forward 9:69039901-69039924; SpCas9
ggcaccgggcgtcatatggt

SEQ ID NO: 31963 - DNA, 19 bp, Artificial Sequence
  Synthetic: FXN 3 forward 9:69039902-69039924; SpCas9
gcaccgggcgtcatatggt

SEQ ID NO: 31964 - DNA, 18 bp, Artificial Sequence
  Synthetic: FXN 3 forward 9:69039903-69039924; SpCas9
caccgggcgtcatatggt

SEQ ID NO: 31965 - DNA, 25 bp, Artificial Sequence
  Synthetic: FXN 3 forward 9:69039897-69039925; SpCas9
aggcggcaccgggcgtcatatggta

SEQ ID NO: 31966 - DNA, 24 bp, Artificial Sequence
  Synthetic: FXN 3 forward 9:69039898-69039925; SpCas9
ggcggcaccgggcgtcatatggta

SEQ ID NO: 31967 - DNA, 23 bp, Artificial Sequence
  Synthetic: FXN 3 forward 9:69039899-69039925; SpCas9
gcggcaccgggcgtcatatggta

SEQ ID NO: 31968 - DNA, 22 bp, Artificial Sequence
  Synthetic: FXN 3 forward 9:69039900-69039925; SpCas9
cggcaccgggcgtcatatggta

SEQ ID NO: 31969 - DNA, 21 bp, Artificial Sequence
  Synthetic: FXN 3 forward 9:69039901-69039925; SpCas9
ggcaccgggcgtcatatggta

SEQ ID NO: 31970 - DNA, 20 bp, Artificial Sequence
  Synthetic: FXN 3 forward 9:69039902-69039925; SpCas9
gcaccgggcgtcatatggta

SEQ ID NO: 31971 - DNA, 19 bp, Artificial Sequence
  Synthetic: FXN 3 forward 9:69039903-69039925; SpCas9
caccgggcgtcatatggta

SEQ ID NO: 31972 - DNA, 18 bp, Artificial Sequence
  Synthetic: FXN 3 forward 9:69039904-69039925; SpCas9
accgggcgtcatatggta

SEQ ID NO: 31973 - DNA, 25 bp, Artificial Sequence
  Synthetic: FXN 3 forward 9:69039898-69039926; SpCas9
ggcggcaccgggcgtcatatggtaa

SEQ ID NO: 31974 - DNA, 24 bp, Artificial Sequence
  Synthetic: FXN 3 forward 9:69039899-69039926; SpCas9
gcggcaccgggcgtcatatggtaa

SEQ ID NO: 31975 - DNA, 23 bp, Artificial Sequence
  Synthetic: FXN 3 forward 9:69039900-69039926; SpCas9
cggcaccgggcgtcatatggtaa

SEQ ID NO: 31976 - DNA, 22 bp, Artificial Sequence
  Synthetic: FXN 3 forward 9:69039901-69039926; SpCas9
ggcaccgggcgtcatatggtaa

SEQ ID NO: 31977 - DNA, 21 bp, Artificial Sequence
  Synthetic: FXN 3 forward 9:69039902-69039926; SpCas9
gcaccgggcgtcatatggtaa

SEQ ID NO: 31978 - DNA, 20 bp, Artificial Sequence
  Synthetic: FXN 3 forward 9:69039903-69039926; SpCas9
caccgggcgtcatatggtaa

SEQ ID NO: 31979 - DNA, 19 bp, Artificial Sequence
  Synthetic: FXN 3 forward 9:69039904-69039926; SpCas9
accgggcgtcatatggtaa

SEQ ID NO: 31980 - DNA, 18 bp, Artificial Sequence
  Synthetic: FXN 3 forward 9:69039905-69039926; SpCas9
ccgggcgtcatatggtaa

SEQ ID NO: 31981 - DNA, 25 bp, Artificial Sequence
  Synthetic: FXN 3 forward 9:69039899-69039927; SpCas9
gcggcaccgggcgtcatatggtaag

SEQ ID NO: 31982 - DNA, 24 bp, Artificial Sequence
  Synthetic: FXN 3 forward 9:69039900-69039927; SpCas9
cggcaccgggcgtcatatggtaag

SEQ ID NO: 31983 - DNA, 23 bp, Artificial Sequence
  Synthetic: FXN 3 forward 9:69039901-69039927; SpCas9
ggcaccgggcgtcatatggtaag

SEQ ID NO: 31984 - DNA, 22 bp, Artificial Sequence
  Synthetic: FXN 3 forward 9:69039902-69039927; SpCas9
gcaccgggcgtcatatggtaag

SEQ ID NO: 31985 - DNA, 21 bp, Artificial Sequence
  Synthetic: FXN 3 forward 9:69039903-69039927; SpCas9
caccgggcgtcatatggtaag

SEQ ID NO: 31986 - DNA, 20 bp, Artificial Sequence
  Synthetic: FXN 3 forward 9:69039904-69039927; SpCas9
accgggcgtcatatggtaag

SEQ ID NO: 31987 - DNA, 19 bp, Artificial Sequence
  Synthetic: FXN 3 forward 9:69039905-69039927; SpCas9
ccgggcgtcatatggtaag

SEQ ID NO: 31988 - DNA, 18 bp, Artificial Sequence
  Synthetic: FXN 3 forward 9:69039906-69039927; SpCas9
cgggcgtcatatggtaag

SEQ ID NO: 31989 - DNA, 25 bp, Artificial Sequence
  Synthetic: FXN 3 forward 9:69039904-69039932; SpCas9
accgggcgtcatatggtaaggggct

SEQ ID NO: 31990 - DNA, 24 bp, Artificial Sequence
  Synthetic: FXN 3 forward 9:69039905-69039932; SpCas9
ccgggcgtcatatggtaaggggct

SEQ ID NO: 31991 - DNA, 23 bp, Artificial Sequence
  Synthetic: FXN 3 forward 9:69039906-69039932; SpCas9
cgggcgtcatatggtaaggggct

SEQ ID NO: 31992 - DNA, 22 bp, Artificial Sequence
  Synthetic: FXN 3 forward 9:69039907-69039932; SpCas9
gggcgtcatatggtaaggggct

SEQ ID NO: 31993 - DNA, 21 bp, Artificial Sequence
  Synthetic: FXN 3 forward 9:69039908-69039932; SpCas9
ggcgtcatatggtaaggggct

SEQ ID NO: 31994 - DNA, 20 bp, Artificial Sequence
  Synthetic: FXN 3 forward 9:69039909-69039932; SpCas9
gcgtcatatggtaaggggct

SEQ ID NO: 31995 - DNA, 19 bp, Artificial Sequence
  Synthetic: FXN 3 forward 9:69039910-69039932; SpCas9
cgtcatatggtaaggggct

SEQ ID NO: 31996 - DNA, 18 bp, Artificial Sequence
  Synthetic: FXN 3 forward 9:69039911-69039932; SpCas9
gtcatatggtaaggggct

SEQ ID NO: 31997 - DNA, 25 bp, Artificial Sequence
  Synthetic: FXN 3 reverse 9:69039905-69039933; SpCas9
actcagccccttaccatatgacgcc

SEQ ID NO: 31998 - DNA, 24 bp, Artificial Sequence
  Synthetic: FXN 3 reverse 9:69039906-69039933; SpCas9
ctcagccccttaccatatgacgcc

SEQ ID NO: 31999 - DNA, 23 bp, Artificial Sequence
  Synthetic: FXN 3 reverse 9:69039907-69039933; SpCas9
tcagccccttaccatatgacgcc

SEQ ID NO: 32000 - DNA, 22 bp, Artificial Sequence
  Synthetic: FXN 3 reverse 9:69039908-69039933; SpCas9
cagccccttaccatatgacgcc

SEQ ID NO: 32001 - DNA, 21 bp, Artificial Sequence
  Synthetic: FXN 3 reverse 9:69039909-69039933; SpCas9
agccccttaccatatgacgcc

SEQ ID NO: 32002 - DNA, 20 bp, Artificial Sequence
  Synthetic: FXN 3 reverse 9:69039910-69039933; SpCas9
gccccttaccatatgacgcc

SEQ ID NO: 32003 - DNA, 19 bp, Artificial Sequence
  Synthetic: FXN 3 reverse 9:69039911-69039933; SpCas9
ccccttaccatatgacgcc

SEQ ID NO: 32004 - DNA, 18 bp, Artificial Sequence
  Synthetic: FXN 3 reverse 9:69039912-69039933; SpCas9
cccttaccatatgacgcc

SEQ ID NO: 32005 - DNA, 25 bp, Artificial Sequence
  Synthetic: FXN 3 forward 9:69039917-69039945; SpCas9
tggtaaggggctgagtgtgctacct

SEQ ID NO: 32006 - DNA, 24 bp, Artificial Sequence
  Synthetic: FXN 3 forward 9:69039918-69039945; SpCas9
ggtaaggggctgagtgtgctacct

SEQ ID NO: 32007 - DNA, 23 bp, Artificial Sequence
  Synthetic: FXN 3 forward 9:69039919-69039945; SpCas9
gtaaggggctgagtgtgctacct

SEQ ID NO: 32008 - DNA, 22 bp, Artificial Sequence
  Synthetic: FXN 3 forward 9:69039920-69039945; SpCas9
taaggggctgagtgtgctacct

SEQ ID NO: 32009 - DNA, 21 bp, Artificial Sequence
  Synthetic: FXN 3 forward 9:69039921-69039945; SpCas9
aaggggctgagtgtgctacct

SEQ ID NO: 32010 - DNA, 20 bp, Artificial Sequence
  Synthetic: FXN 3 forward 9:69039922-69039945; SpCas9
aggggctgagtgtgctacct

SEQ ID NO: 32011 - DNA, 19 bp, Artificial Sequence
  Synthetic: FXN 3 forward 9:69039923-69039945; SpCas9
ggggctgagtgtgctacct

SEQ ID NO: 32012 - DNA, 18 bp, Artificial Sequence
  Synthetic: FXN 3 forward 9:69039924-69039945; SpCas9
gggctgagtgtgctacct

SEQ ID NO: 32013 - DNA, 25 bp, Artificial Sequence
  Synthetic: FXN 3 forward 9:69039918-69039946; SpCas9
ggtaaggggctgagtgtgctacctc

SEQ ID NO: 32014 - DNA, 24 bp, Artificial Sequence
  Synthetic: FXN 3 forward 9:69039919-69039946; SpCas9
gtaaggggctgagtgtgctacctc

SEQ ID NO: 32015 - DNA, 23 bp, Artificial Sequence
  Synthetic: FXN 3 forward 9:69039920-69039946; SpCas9
taaggggctgagtgtgctacctc

SEQ ID NO: 32016 - DNA, 22 bp, Artificial Sequence
  Synthetic: FXN 3 forward 9:69039921-69039946; SpCas9
aaggggctgagtgtgctacctc

SEQ ID NO: 32017 - DNA, 21 bp, Artificial Sequence
  Synthetic: FXN 3 forward 9:69039922-69039946; SpCas9
aggggctgagtgtgctacctc

SEQ ID NO: 32018 - DNA, 20 bp, Artificial Sequence
  Synthetic: FXN 3 forward 9:69039923-69039946; SpCas9
ggggctgagtgtgctacctc

SEQ ID NO: 32019 - DNA, 19 bp, Artificial Sequence
  Synthetic: FXN 3 forward 9:69039924-69039946; SpCas9
gggctgagtgtgctacctc

SEQ ID NO: 32020 - DNA, 18 bp, Artificial Sequence
  Synthetic: FXN 3 forward 9:69039925-69039946; SpCas9
ggctgagtgtgctacctc

SEQ ID NO: 32021 - DNA, 25 bp, Artificial Sequence
  Synthetic: FXN 3 reverse 9:69039927-69039955; SpCas9
aaaaagacacctgaggtagcacact

SEQ ID NO: 32022 - DNA, 24 bp, Artificial Sequence
  Synthetic: FXN 3 reverse 9:69039928-69039955; SpCas9
aaaagacacctgaggtagcacact

SEQ ID NO: 32023 - DNA, 23 bp, Artificial Sequence
  Synthetic: FXN 3 reverse 9:69039929-69039955; SpCas9
aaagacacctgaggtagcacact

SEQ ID NO: 32024 - DNA, 22 bp, Artificial Sequence
  Synthetic: FXN 3 reverse 9:69039930-69039955; SpCas9
aagacacctgaggtagcacact

SEQ ID NO: 32025 - DNA, 21 bp, Artificial Sequence
  Synthetic: FXN 3 reverse 9:69039931-69039955; SpCas9
agacacctgaggtagcacact

SEQ ID NO: 32026 - DNA, 20 bp, Artificial Sequence
  Synthetic: FXN 3 reverse 9:69039932-69039955; SpCas9
gacacctgaggtagcacact

SEQ ID NO: 32027 - DNA, 19 bp, Artificial Sequence
  Synthetic: FXN 3 reverse 9:69039933-69039955; SpCas9
acacctgaggtagcacact

SEQ ID NO: 32028 - DNA, 18 bp, Artificial Sequence
  Synthetic: FXN 3 reverse 9:69039934-69039955; SpCas9
cacctgaggtagcacact

SEQ ID NO: 32029 - DNA, 25 bp, Artificial Sequence
  Synthetic: FXN 3 reverse 9:69039936-69039964; SpCas9
taagaaaagaaaaagacacctgagg

SEQ ID NO: 32030 - DNA, 24 bp, Artificial Sequence
  Synthetic: FXN 3 reverse 9:69039937-69039964; SpCas9
aagaaaagaaaaagacacctgagg

SEQ ID NO: 32031 - DNA, 23 bp, Artificial Sequence
  Synthetic: FXN 3 reverse 9:69039938-69039964; SpCas9
agaaaagaaaaagacacctgagg

SEQ ID NO: 32032 - DNA, 22 bp, Artificial Sequence
  Synthetic: FXN 3 reverse 9:69039939-69039964; SpCas9
gaaaagaaaaagacacctgagg

SEQ ID NO: 32033 - DNA, 21 bp, Artificial Sequence
  Synthetic: FXN 3 reverse 9:69039940-69039964; SpCas9
aaaagaaaaagacacctgagg

SEQ ID NO: 32034 - DNA, 20 bp, Artificial Sequence
  Synthetic: FXN 3 reverse 9:69039941-69039964; SpCas9
aaagaaaaagacacctgagg

SEQ ID NO: 32035 - DNA, 19 bp, Artificial Sequence
  Synthetic: FXN 3 reverse 9:69039942-69039964; SpCas9
aagaaaaagacacctgagg

SEQ ID NO: 32036 - DNA, 18 bp, Artificial Sequence
  Synthetic: FXN 3 reverse 9:69039943-69039964; SpCas9
agaaaaagacacctgagg

SEQ ID NO: 32037 - DNA, 25 bp, Artificial Sequence
  Synthetic: FXN 3 reverse 9:69039939-69039967; SpCas9
ttataagaaaagaaaaagacacctg

SEQ ID NO: 32038 - DNA, 24 bp, Artificial Sequence
  Synthetic: FXN 3 reverse 9:69039940-69039967; SpCas9
tataagaaaagaaaaagacacctg

SEQ ID NO: 32039 - DNA, 23 bp, Artificial Sequence
  Synthetic: FXN 3 reverse 9:69039941-69039967; SpCas9
ataagaaaagaaaaagacacctg

SEQ ID NO: 32040 - DNA, 22 bp, Artificial Sequence
  Synthetic: FXN 3 reverse 9:69039942-69039967; SpCas9
taagaaaagaaaaagacacctg

SEQ ID NO: 32041 - DNA, 21 bp, Artificial Sequence
  Synthetic: FXN 3 reverse 9:69039943-69039967; SpCas9
aagaaaagaaaaagacacctg

SEQ ID NO: 32042 - DNA, 20 bp, Artificial Sequence
  Synthetic: FXN 3 reverse 9:69039944-69039967; SpCas9
agaaaagaaaaagacacctg

SEQ ID NO: 32043 - DNA, 19 bp, Artificial Sequence
  Synthetic: FXN 3 reverse 9:69039945-69039967; SpCas9
gaaaagaaaaagacacctg

SEQ ID NO: 32044 - DNA, 18 bp, Artificial Sequence
  Synthetic: FXN 3 reverse 9:69039946-69039967; SpCas9
aaaagaaaaagacacctg

SEQ ID NO: 32045 - DNA, 25 bp, Artificial Sequence
  Synthetic: FXN 3 reverse 9:69039940-69039968; SpCas9
tttataagaaaagaaaaagacacct

SEQ ID NO: 32046 - DNA, 24 bp, Artificial Sequence
  Synthetic: FXN 3 reverse 9:69039941-69039968; SpCas9
ttataagaaaagaaaaagacacct

SEQ ID NO: 32047 - DNA, 23 bp, Artificial Sequence
  Synthetic: FXN 3 reverse 9:69039942-69039968; SpCas9
tataagaaaagaaaaagacacct

SEQ ID NO: 32048 - DNA, 22 bp, Artificial Sequence
  Synthetic: FXN 3 reverse 9:69039943-69039968; SpCas9
ataagaaaagaaaaagacacct

SEQ ID NO: 32049 - DNA, 21 bp, Artificial Sequence
  Synthetic: FXN 3 reverse 9:69039944-69039968; SpCas9
taagaaaagaaaaagacacct

SEQ ID NO: 32050 - DNA, 20 bp, Artificial Sequence
  Synthetic: FXN 3 reverse 9:69039945-69039968; SpCas9
aagaaaagaaaaagacacct

SEQ ID NO: 32051 - DNA, 19 bp, Artificial Sequence
  Synthetic: FXN 3 reverse 9:69039946-69039968; SpCas9
agaaaagaaaaagacacct

SEQ ID NO: 32052 - DNA, 18 bp, Artificial Sequence
  Synthetic: FXN 3 reverse 9:69039947-69039968; SpCas9
gaaaagaaaaagacacct

SEQ ID NO: 32053 - DNA, 25 bp, Artificial Sequence
  Synthetic: FXN 3 forward 9:69039941-69039969; SpCas9
tcaggtgtctttttcttttcttata

SEQ ID NO: 32054 - DNA, 24 bp, Artificial Sequence
  Synthetic: FXN 3 forward 9:69039942-69039969; SpCas9
caggtgtctttttcttttcttata

SEQ ID NO: 32055 - DNA, 23 bp, Artificial Sequence
  Synthetic: FXN 3 forward 9:69039943-69039969; SpCas9
aggtgtctttttcttttcttata

SEQ ID NO: 32056 - DNA, 22 bp, Artificial Sequence
  Synthetic: FXN 3 forward 9:69039944-69039969; SpCas9
ggtgtctttttcttttcttata

SEQ ID NO: 32057 - DNA, 21 bp, Artificial Sequence
  Synthetic: FXN 3 forward 9:69039945-69039969; SpCas9
gtgtctttttcttttcttata

SEQ ID NO: 32058 - DNA, 20 bp, Artificial Sequence
  Synthetic: FXN 3 forward 9:69039946-69039969; SpCas9
tgtctttttcttttcttata

SEQ ID NO: 32059 - DNA, 19 bp, Artificial Sequence
  Synthetic: FXN 3 forward 9:69039947-69039969; SpCas9
gtctttttcttttcttata

SEQ ID NO: 32060 - DNA, 18 bp, Artificial Sequence
  Synthetic: FXN 3 forward 9:69039948-69039969; SpCas9
tctttttcttttcttata

SEQ ID NO: 32061 - DNA, 25 bp, Artificial Sequence
  Synthetic: FXN 3 reverse 9:69039949-69039977; SpCas9
tagttaggctttataagaaaagaaa

SEQ ID NO: 32062 - DNA, 24 bp, Artificial Sequence
  Synthetic: FXN 3 reverse 9:69039950-69039977; SpCas9
agttaggctttataagaaaagaaa

SEQ ID NO: 32063 - DNA, 23 bp, Artificial Sequence
  Synthetic: FXN 3 reverse 9:69039951-69039977; SpCas9
gttaggctttataagaaaagaaa

SEQ ID NO: 32064 - DNA, 22 bp, Artificial Sequence
  Synthetic: FXN 3 reverse 9:69039952-69039977; SpCas9
ttaggctttataagaaaagaaa

SEQ ID NO: 32065 - DNA, 21 bp, Artificial Sequence
  Synthetic: FXN 3 reverse 9:69039953-69039977; SpCas9
taggctttataagaaaagaaa

SEQ ID NO: 32066 - DNA, 20 bp, Artificial Sequence
  Synthetic: FXN 3 reverse 9:69039954-69039977; SpCas9
aggctttataagaaaagaaa

SEQ ID NO: 32067 - DNA, 19 bp, Artificial Sequence
  Synthetic: FXN 3 reverse 9:69039955-69039977; SpCas9
ggctttataagaaaagaaa

SEQ ID NO: 32068 - DNA, 18 bp, Artificial Sequence
  Synthetic: FXN 3 reverse 9:69039956-69039977; SpCas9
gctttataagaaaagaaa

SEQ ID NO: 32069 - DNA, 25 bp, Artificial Sequence
  Synthetic: FXN 3 forward 9:69039950-69039978; SpCas9
tttttcttttcttataaagcctaac

SEQ ID NO: 32070 - DNA, 24 bp, Artificial Sequence
  Synthetic: FXN 3 forward 9:69039951-69039978; SpCas9
ttttcttttcttataaagcctaac

SEQ ID NO: 32071 - DNA, 23 bp, Artificial Sequence
  Synthetic: FXN 3 forward 9:69039952-69039978; SpCas9
tttcttttcttataaagcctaac

SEQ ID NO: 32072 - DNA, 22 bp, Artificial Sequence
  Synthetic: FXN 3 forward 9:69039953-69039978; SpCas9
ttcttttcttataaagcctaac

SEQ ID NO: 32073 - DNA, 21 bp, Artificial Sequence
  Synthetic: FXN 3 forward 9:69039954-69039978; SpCas9
tcttttcttataaagcctaac

SEQ ID NO: 32074 - DNA, 20 bp, Artificial Sequence
  Synthetic: FXN 3 forward 9:69039955-69039978; SpCas9
cttttcttataaagcctaac

SEQ ID NO: 32075 - DNA, 19 bp, Artificial Sequence
  Synthetic: FXN 3 forward 9:69039956-69039978; SpCas9
ttttcttataaagcctaac

SEQ ID NO: 32076 - DNA, 18 bp, Artificial Sequence
  Synthetic: FXN 3 forward 9:69039957-69039978; SpCas9
tttcttataaagcctaac

SEQ ID NO: 32077 - DNA, 25 bp, Artificial Sequence
  Synthetic: FXN 3 reverse 9:69039955-69039983; SpCas9
tgaaactagttaggctttataagaa

SEQ ID NO: 32078 - DNA, 24 bp, Artificial Sequence
  Synthetic: FXN 3 reverse 9:69039956-69039983; SpCas9
gaaactagttaggctttataagaa

SEQ ID NO: 32079 - DNA, 23 bp, Artificial Sequence
  Synthetic: FXN 3 reverse 9:69039957-69039983; SpCas9
aaactagttaggctttataagaa

SEQ ID NO: 32080 - DNA, 22 bp, Artificial Sequence
  Synthetic: FXN 3 reverse 9:69039958-69039983; SpCas9
aactagttaggctttataagaa

SEQ ID NO: 32081 - DNA, 21 bp, Artificial Sequence
  Synthetic: FXN 3 reverse 9:69039959-69039983; SpCas9
actagttaggctttataagaa

SEQ ID NO: 32082 - DNA, 20 bp, Artificial Sequence
  Synthetic: FXN 3 reverse 9:69039960-69039983; SpCas9
ctagttaggctttataagaa

SEQ ID NO: 32083 - DNA, 19 bp, Artificial Sequence
  Synthetic: FXN 3 reverse 9:69039961-69039983; SpCas9
tagttaggctttataagaa

SEQ ID NO: 32084 - DNA, 18 bp, Artificial Sequence
  Synthetic: FXN 3 reverse 9:69039962-69039983; SpCas9
agttaggctttataagaa

SEQ ID NO: 32085 - DNA, 25 bp, Artificial Sequence
  Synthetic: FXN 3 reverse 9:69039960-69039988; SpCas9
gggagtgaaactagttaggctttat

SEQ ID NO: 32086 - DNA, 24 bp, Artificial Sequence
  Synthetic: FXN 3 reverse 9:69039961-69039988; SpCas9
ggagtgaaactagttaggctttat

SEQ ID NO: 32087 - DNA, 23 bp, Artificial Sequence
  Synthetic: FXN 3 reverse 9:69039962-69039988; SpCas9
gagtgaaactagttaggctttat

SEQ ID NO: 32088 - DNA, 22 bp, Artificial Sequence
  Synthetic: FXN 3 reverse 9:69039963-69039988; SpCas9
agtgaaactagttaggctttat

SEQ ID NO: 32089 - DNA, 21 bp, Artificial Sequence
  Synthetic: FXN 3 reverse 9:69039964-69039988; SpCas9
gtgaaactagttaggctttat

SEQ ID NO: 32090 - DNA, 20 bp, Artificial Sequence
  Synthetic: FXN 3 reverse 9:69039965-69039988; SpCas9
tgaaactagttaggctttat

SEQ ID NO: 32091 - DNA, 19 bp, Artificial Sequence
  Synthetic: FXN 3 reverse 9:69039966-69039988; SpCas9
gaaactagttaggctttat

SEQ ID NO: 32092 - DNA, 18 bp, Artificial Sequence
  Synthetic: FXN 3 reverse 9:69039967-69039988; SpCas9
aaactagttaggctttat

SEQ ID NO: 32093 - DNA, 25 bp, Artificial Sequence
  Synthetic: FXN 3 reverse 9:69039969-69039997; SpCas9
ggttatcatgggagtgaaactagtt

SEQ ID NO: 32094 - DNA, 24 bp, Artificial Sequence
  Synthetic: FXN 3 reverse 9:69039970-69039997; SpCas9
gttatcatgggagtgaaactagtt

SEQ ID NO: 32095 - DNA, 23 bp, Artificial Sequence
  Synthetic: FXN 3 reverse 9:69039971-69039997; SpCas9
ttatcatgggagtgaaactagtt

SEQ ID NO: 32096 - DNA, 22 bp, Artificial Sequence
  Synthetic: FXN 3 reverse 9:69039972-69039997; SpCas9
tatcatgggagtgaaactagtt

SEQ ID NO: 32097 - DNA, 21 bp, Artificial Sequence
  Synthetic: FXN 3 reverse 9:69039973-69039997; SpCas9
atcatgggagtgaaactagtt

SEQ ID NO: 32098 - DNA, 20 bp, Artificial Sequence
  Synthetic: FXN 3 reverse 9:69039974-69039997; SpCas9
tcatgggagtgaaactagtt

SEQ ID NO: 32099 - DNA, 19 bp, Artificial Sequence
  Synthetic: FXN 3 reverse 9:69039975-69039997; SpCas9
catgggagtgaaactagtt

SEQ ID NO: 32100 - DNA, 18 bp, Artificial Sequence
  Synthetic: FXN 3 reverse 9:69039976-69039997; SpCas9
atgggagtgaaactagtt

SEQ ID NO: 32101 - DNA, 25 bp, Artificial Sequence
  Synthetic: FXN 3 reverse 9:69039970-69039998; SpCas9
gggttatcatgggagtgaaactagt

SEQ ID NO: 32102 - DNA, 24 bp, Artificial Sequence
  Synthetic: FXN 3 reverse 9:69039971-69039998; SpCas9
ggttatcatgggagtgaaactagt

SEQ ID NO: 32103 - DNA, 23 bp, Artificial Sequence
  Synthetic: FXN 3 reverse 9:69039972-69039998; SpCas9
gttatcatgggagtgaaactagt

SEQ ID NO: 32104 - DNA, 22 bp, Artificial Sequence
  Synthetic: FXN 3 reverse 9:69039973-69039998; SpCas9
ttatcatgggagtgaaactagt

SEQ ID NO: 32105 - DNA, 21 bp, Artificial Sequence
  Synthetic: FXN 3 reverse 9:69039974-69039998; SpCas9
tatcatgggagtgaaactagt

SEQ ID NO: 32106 - DNA, 20 bp, Artificial Sequence
  Synthetic: FXN 3 reverse 9:69039975-69039998; SpCas9
atcatgggagtgaaactagt

SEQ ID NO: 32107 - DNA, 19 bp, Artificial Sequence
  Synthetic: FXN 3 reverse 9:69039976-69039998; SpCas9
tcatgggagtgaaactagt

SEQ ID NO: 32108 - DNA, 18 bp, Artificial Sequence
  Synthetic: FXN 3 reverse 9:69039977-69039998; SpCas9
catgggagtgaaactagt

SEQ ID NO: 32109 - DNA, 25 bp, Artificial Sequence
  Synthetic: FXN 3 reverse 9:69039974-69040002; SpCas9
taatgggttatcatgggagtgaaac

SEQ ID NO: 32110 - DNA, 24 bp, Artificial Sequence
  Synthetic: FXN 3 reverse 9:69039975-69040002; SpCas9
aatgggttatcatgggagtgaaac

SEQ ID NO: 32111 - DNA, 23 bp, Artificial Sequence
  Synthetic: FXN 3 reverse 9:69039976-69040002; SpCas9
atgggttatcatgggagtgaaac

SEQ ID NO: 32112 - DNA, 22 bp, Artificial Sequence
  Synthetic: FXN 3 reverse 9:69039977-69040002; SpCas9
tgggttatcatgggagtgaaac

SEQ ID NO: 32113 - DNA, 21 bp, Artificial Sequence
  Synthetic: FXN 3 reverse 9:69039978-69040002; SpCas9
gggttatcatgggagtgaaac

SEQ ID NO: 32114 - DNA, 20 bp, Artificial Sequence
  Synthetic: FXN 3 reverse 9:69039979-69040002; SpCas9
ggttatcatgggagtgaaac

SEQ ID NO: 32115 - DNA, 19 bp, Artificial Sequence
  Synthetic: FXN 3 reverse 9:69039980-69040002; SpCas9
gttatcatgggagtgaaac

SEQ ID NO: 32116 - DNA, 18 bp, Artificial Sequence
  Synthetic: FXN 3 reverse 9:69039981-69040002; SpCas9
ttatcatgggagtgaaac

SEQ ID NO: 32117 - DNA, 25 bp, Artificial Sequence
  Synthetic: FXN 3 reverse 9:69039983-69040011; SpCas9
ttcatagattaatgggttatcatgg

SEQ ID NO: 32118 - DNA, 24 bp, Artificial Sequence
  Synthetic: FXN 3 reverse 9:69039984-69040011; SpCas9
tcatagattaatgggttatcatgg

SEQ ID NO: 32119 - DNA, 23 bp, Artificial Sequence
  Synthetic: FXN 3 reverse 9:69039985-69040011; SpCas9
catagattaatgggttatcatgg

SEQ ID NO: 32120 - DNA, 22 bp, Artificial Sequence
  Synthetic: FXN 3 reverse 9:69039986-69040011; SpCas9
atagattaatgggttatcatgg

SEQ ID NO: 32121 - DNA, 21 bp, Artificial Sequence
  Synthetic: FXN 3 reverse 9:69039987-69040011; SpCas9
tagattaatgggttatcatgg

SEQ ID NO: 32122 - DNA, 20 bp, Artificial Sequence
  Synthetic: FXN 3 reverse 9:69039988-69040011; SpCas9
agattaatgggttatcatgg

SEQ ID NO: 32123 - DNA, 19 bp, Artificial Sequence
  Synthetic: FXN 3 reverse 9:69039989-69040011; SpCas9
gattaatgggttatcatgg

SEQ ID NO: 32124 - DNA, 18 bp, Artificial Sequence
  Synthetic: FXN 3 reverse 9:69039990-69040011; SpCas9
attaatgggttatcatgg

SEQ ID NO: 32125 - DNA, 25 bp, Artificial Sequence
  Synthetic: FXN 3 reverse 9:69039985-69040013; SpCas9
cattcatagattaatgggttatcat

SEQ ID NO: 32126 - DNA, 24 bp, Artificial Sequence
  Synthetic: FXN 3 reverse 9:69039986-69040013; SpCas9
attcatagattaatgggttatcat

SEQ ID NO: 32127 - DNA, 23 bp, Artificial Sequence
  Synthetic: FXN 3 reverse 9:69039987-69040013; SpCas9
ttcatagattaatgggttatcat

SEQ ID NO: 32128 - DNA, 22 bp, Artificial Sequence
  Synthetic: FXN 3 reverse 9:69039988-69040013; SpCas9
tcatagattaatgggttatcat

SEQ ID NO: 32129 - DNA, 21 bp, Artificial Sequence
  Synthetic: FXN 3 reverse 9:69039989-69040013; SpCas9
catagattaatgggttatcat

SEQ ID NO: 32130 - DNA, 20 bp, Artificial Sequence
  Synthetic: FXN 3 reverse 9:69039990-69040013; SpCas9
atagattaatgggttatcat

SEQ ID NO: 32131 - DNA, 19 bp, Artificial Sequence
  Synthetic: FXN 3 reverse 9:69039991-69040013; SpCas9
tagattaatgggttatcat

SEQ ID NO: 32132 - DNA, 18 bp, Artificial Sequence
  Synthetic: FXN 3 reverse 9:69039992-69040013; SpCas9
agattaatgggttatcat

SEQ ID NO: 32133 - DNA, 25 bp, Artificial Sequence
  Synthetic: FXN 3 forward 9:69039986-69040014; SpCas9
ccatgataacccattaatctatgaa

SEQ ID NO: 32134 - DNA, 24 bp, Artificial Sequence
  Synthetic: FXN 3 forward 9:69039987-69040014; SpCas9
catgataacccattaatctatgaa

SEQ ID NO: 32135 - DNA, 23 bp, Artificial Sequence
  Synthetic: FXN 3 forward 9:69039988-69040014; SpCas9
atgataacccattaatctatgaa

SEQ ID NO: 32136 - DNA, 22 bp, Artificial Sequence
  Synthetic: FXN 3 forward 9:69039989-69040014; SpCas9
tgataacccattaatctatgaa

SEQ ID NO: 32137 - DNA, 21 bp, Artificial Sequence
  Synthetic: FXN 3 forward 9:69039990-69040014; SpCas9
gataacccattaatctatgaa

SEQ ID NO: 32138 - DNA, 20 bp, Artificial Sequence
  Synthetic: FXN 3 forward 9:69039991-69040014; SpCas9
ataacccattaatctatgaa

SEQ ID NO: 32139 - DNA, 19 bp, Artificial Sequence
  Synthetic: FXN 3 forward 9:69039992-69040014; SpCas9
taacccattaatctatgaa

SEQ ID NO: 32140 - DNA, 18 bp, Artificial Sequence
  Synthetic: FXN 3 forward 9:69039993-69040014; SpCas9
aacccattaatctatgaa

SEQ ID NO: 32141 - DNA, 25 bp, Artificial Sequence
  Synthetic: FXN 3 reverse 9:69039986-69040014; SpCas9
ccattcatagattaatgggttatca

SEQ ID NO: 32142 - DNA, 24 bp, Artificial Sequence
  Synthetic: FXN 3 reverse 9:69039987-69040014; SpCas9
cattcatagattaatgggttatca

SEQ ID NO: 32143 - DNA, 23 bp, Artificial Sequence
  Synthetic: FXN 3 reverse 9:69039988-69040014; SpCas9
attcatagattaatgggttatca

SEQ ID NO: 32144 - DNA, 22 bp, Artificial Sequence
  Synthetic: FXN 3 reverse 9:69039989-69040014; SpCas9
ttcatagattaatgggttatca

SEQ ID NO: 32145 - DNA, 21 bp, Artificial Sequence
  Synthetic: FXN 3 reverse 9:69039990-69040014; SpCas9
tcatagattaatgggttatca

SEQ ID NO: 32146 - DNA, 20 bp, Artificial Sequence
  Synthetic: FXN 3 reverse 9:69039991-69040014; SpCas9
catagattaatgggttatca

SEQ ID NO: 32147 - DNA, 19 bp, Artificial Sequence
  Synthetic: FXN 3 reverse 9:69039992-69040014; SpCas9
atagattaatgggttatca

SEQ ID NO: 32148 - DNA, 18 bp, Artificial Sequence
  Synthetic: FXN 3 reverse 9:69039993-69040014; SpCas9
tagattaatgggttatca

SEQ ID NO: 32149 - DNA, 25 bp, Artificial Sequence
  Synthetic: FXN 3 reverse 9:69039995-69040023; SpCas9
tggattaatccattcatagattaat

SEQ ID NO: 32150 - DNA, 24 bp, Artificial Sequence
  Synthetic: FXN 3 reverse 9:69039996-69040023; SpCas9
ggattaatccattcatagattaat

SEQ ID NO: 32151 - DNA, 23 bp, Artificial Sequence
  Synthetic: FXN 3 reverse 9:69039997-69040023; SpCas9
gattaatccattcatagattaat

SEQ ID NO: 32152 - DNA, 22 bp, Artificial Sequence
  Synthetic: FXN 3 reverse 9:69039998-69040023; SpCas9
attaatccattcatagattaat

SEQ ID NO: 32153 - DNA, 21 bp, Artificial Sequence
  Synthetic: FXN 3 reverse 9:69039999-69040023; SpCas9
ttaatccattcatagattaat

SEQ ID NO: 32154 - DNA, 20 bp, Artificial Sequence
  Synthetic: FXN 3 reverse 9:69040000-69040023; SpCas9
taatccattcatagattaat

SEQ ID NO: 32155 - DNA, 19 bp, Artificial Sequence
  Synthetic: FXN 3 reverse 9:69040001-69040023; SpCas9
aatccattcatagattaat

SEQ ID NO: 32156 - DNA, 18 bp, Artificial Sequence
  Synthetic: FXN 3 reverse 9:69040002-69040023; SpCas9
atccattcatagattaat

SEQ ID NO: 32157 - DNA, 25 bp, Artificial Sequence
  Synthetic: FXN 3 reverse 9:69039996-69040024; SpCas9
atggattaatccattcatagattaa

SEQ ID NO: 32158 - DNA, 24 bp, Artificial Sequence
  Synthetic: FXN 3 reverse 9:69039997-69040024; SpCas9
tggattaatccattcatagattaa

SEQ ID NO: 32159 - DNA, 23 bp, Artificial Sequence
  Synthetic: FXN 3 reverse 9:69039998-69040024; SpCas9
ggattaatccattcatagattaa

SEQ ID NO: 32160 - DNA, 22 bp, Artificial Sequence
  Synthetic: FXN 3 reverse 9:69039999-69040024; SpCas9
gattaatccattcatagattaa

SEQ ID NO: 32161 - DNA, 21 bp, Artificial Sequence
  Synthetic: FXN 3 reverse 9:69040000-69040024; SpCas9
attaatccattcatagattaa

SEQ ID NO: 32162 - DNA, 20 bp, Artificial Sequence
  Synthetic: FXN 3 reverse 9:69040001-69040024; SpCas9
ttaatccattcatagattaa

SEQ ID NO: 32163 - DNA, 19 bp, Artificial Sequence
  Synthetic: FXN 3 reverse 9:69040002-69040024; SpCas9
taatccattcatagattaa

SEQ ID NO: 32164 - DNA, 18 bp, Artificial Sequence
  Synthetic: FXN 3 reverse 9:69040003-69040024; SpCas9
aatccattcatagattaa

SEQ ID NO: 32165 - DNA, 25 bp, Artificial Sequence
  Synthetic: FXN 3 forward 9:69040003-69040031; SpCas9
tctatgaatggattaatccattatt

SEQ ID NO: 32166 - DNA, 24 bp, Artificial Sequence
  Synthetic: FXN 3 forward 9:69040004-69040031; SpCas9
ctatgaatggattaatccattatt

SEQ ID NO: 32167 - DNA, 23 bp, Artificial Sequence
  Synthetic: FXN 3 forward 9:69040005-69040031; SpCas9
tatgaatggattaatccattatt

SEQ ID NO: 32168 - DNA, 22 bp, Artificial Sequence
  Synthetic: FXN 3 forward 9:69040006-69040031; SpCas9
atgaatggattaatccattatt

SEQ ID NO: 32169 - DNA, 21 bp, Artificial Sequence
  Synthetic: FXN 3 forward 9:69040007-69040031; SpCas9
tgaatggattaatccattatt

SEQ ID NO: 32170 - DNA, 20 bp, Artificial Sequence
  Synthetic: FXN 3 forward 9:69040008-69040031; SpCas9
gaatggattaatccattatt

SEQ ID NO: 32171 - DNA, 19 bp, Artificial Sequence
  Synthetic: FXN 3 forward 9:69040009-69040031; SpCas9
aatggattaatccattatt

SEQ ID NO: 32172 - DNA, 18 bp, Artificial Sequence
  Synthetic: FXN 3 forward 9:69040010-69040031; SpCas9
atggattaatccattatt

SEQ ID NO: 32173 - DNA, 25 bp, Artificial Sequence
  Synthetic: FXN 3 forward 9:69040004-69040032; SpCas9
ctatgaatggattaatccattattg

SEQ ID NO: 32174 - DNA, 24 bp, Artificial Sequence
  Synthetic: FXN 3 forward 9:69040005-69040032; SpCas9
tatgaatggattaatccattattg

SEQ ID NO: 32175 - DNA, 23 bp, Artificial Sequence
  Synthetic: FXN 3 forward 9:69040006-69040032; SpCas9
atgaatggattaatccattattg

SEQ ID NO: 32176 - DNA, 22 bp, Artificial Sequence
  Synthetic: FXN 3 forward 9:69040007-69040032; SpCas9
tgaatggattaatccattattg

SEQ ID NO: 32177 - DNA, 21 bp, Artificial Sequence
  Synthetic: FXN 3 forward 9:69040008-69040032; SpCas9
gaatggattaatccattattg

SEQ ID NO: 32178 - DNA, 20 bp, Artificial Sequence
  Synthetic: FXN 3 forward 9:69040009-69040032; SpCas9
aatggattaatccattattg

SEQ ID NO: 32179 - DNA, 19 bp, Artificial Sequence
  Synthetic: FXN 3 forward 9:69040010-69040032; SpCas9
atggattaatccattattg

SEQ ID NO: 32180 - DNA, 18 bp, Artificial Sequence
  Synthetic: FXN 3 forward 9:69040011-69040032; SpCas9
tggattaatccattattg

SEQ ID NO: 32181 - DNA, 25 bp, Artificial Sequence
  Synthetic: FXN 3 reverse 9:69040004-69040032; SpCas9
cctcaataatggattaatccattca

SEQ ID NO: 32182 - DNA, 24 bp, Artificial Sequence
  Synthetic: FXN 3 reverse 9:69040005-69040032; SpCas9
ctcaataatggattaatccattca

SEQ ID NO: 32183 - DNA, 23 bp, Artificial Sequence
  Synthetic: FXN 3 reverse 9:69040006-69040032; SpCas9
tcaataatggattaatccattca

SEQ ID NO: 32184 - DNA, 22 bp, Artificial Sequence
  Synthetic: FXN 3 reverse 9:69040007-69040032; SpCas9
caataatggattaatccattca

SEQ ID NO: 32185 - DNA, 21 bp, Artificial Sequence
  Synthetic: FXN 3 reverse 9:69040008-69040032; SpCas9
aataatggattaatccattca

SEQ ID NO: 32186 - DNA, 20 bp, Artificial Sequence
  Synthetic: FXN 3 reverse 9:69040009-69040032; SpCas9
ataatggattaatccattca

SEQ ID NO: 32187 - DNA, 19 bp, Artificial Sequence
  Synthetic: FXN 3 reverse 9:69040010-69040032; SpCas9
taatggattaatccattca

SEQ ID NO: 32188 - DNA, 18 bp, Artificial Sequence
  Synthetic: FXN 3 reverse 9:69040011-69040032; SpCas9
aatggattaatccattca

SEQ ID NO: 32189 - DNA, 25 bp, Artificial Sequence
  Synthetic: FXN 3 forward 9:69040005-69040033; SpCas9
tatgaatggattaatccattattga

SEQ ID NO: 32190 - DNA, 24 bp, Artificial Sequence
  Synthetic: FXN 3 forward 9:69040006-69040033; SpCas9
atgaatggattaatccattattga

SEQ ID NO: 32191 - DNA, 23 bp, Artificial Sequence
  Synthetic: FXN 3 forward 9:69040007-69040033; SpCas9
tgaatggattaatccattattga

SEQ ID NO: 32192 - DNA, 22 bp, Artificial Sequence
  Synthetic: FXN 3 forward 9:69040008-69040033; SpCas9
gaatggattaatccattattga

SEQ ID NO: 32193 - DNA, 21 bp, Artificial Sequence
  Synthetic: FXN 3 forward 9:69040009-69040033; SpCas9
aatggattaatccattattga

SEQ ID NO: 32194 - DNA, 20 bp, Artificial Sequence
  Synthetic: FXN 3 forward 9:69040010-69040033; SpCas9
atggattaatccattattga

SEQ ID NO: 32195 - DNA, 19 bp, Artificial Sequence
  Synthetic: FXN 3 forward 9:69040011-69040033; SpCas9
tggattaatccattattga

SEQ ID NO: 32196 - DNA, 18 bp, Artificial Sequence
  Synthetic: FXN 3 forward 9:69040012-69040033; SpCas9
ggattaatccattattga

SEQ ID NO: 32197 - DNA, 25 bp, Artificial Sequence
  Synthetic: FXN 3 forward 9:69040008-69040036; SpCas9
gaatggattaatccattattgaggg

SEQ ID NO: 32198 - DNA, 24 bp, Artificial Sequence
  Synthetic: FXN 3 forward 9:69040009-69040036; SpCas9
aatggattaatccattattgaggg

SEQ ID NO: 32199 - DNA, 23 bp, Artificial Sequence
  Synthetic: FXN 3 forward 9:69040010-69040036; SpCas9
atggattaatccattattgaggg

SEQ ID NO: 32200 - DNA, 22 bp, Artificial Sequence
  Synthetic: FXN 3 forward 9:69040011-69040036; SpCas9
tggattaatccattattgaggg

SEQ ID NO: 32201 - DNA, 21 bp, Artificial Sequence
  Synthetic: FXN 3 forward 9:69040012-69040036; SpCas9
ggattaatccattattgaggg

SEQ ID NO: 32202 - DNA, 20 bp, Artificial Sequence
  Synthetic: FXN 3 forward 9:69040013-69040036; SpCas9
gattaatccattattgaggg

SEQ ID NO: 32203 - DNA, 19 bp, Artificial Sequence
  Synthetic: FXN 3 forward 9:69040014-69040036; SpCas9
attaatccattattgaggg

SEQ ID NO: 32204 - DNA, 18 bp, Artificial Sequence
  Synthetic: FXN 3 forward 9:69040015-69040036; SpCas9
ttaatccattattgaggg

SEQ ID NO: 32205 - DNA, 25 bp, Artificial Sequence
  Synthetic: FXN 3 reverse 9:69040020-69040048; SpCas9
gtcatgaaggttcttccctcaataa

SEQ ID NO: 32206 - DNA, 24 bp, Artificial Sequence
  Synthetic: FXN 3 reverse 9:69040021-69040048; SpCas9
tcatgaaggttcttccctcaataa

SEQ ID NO: 32207 - DNA, 23 bp, Artificial Sequence
  Synthetic: FXN 3 reverse 9:69040022-69040048; SpCas9
catgaaggttcttccctcaataa

SEQ ID NO: 32208 - DNA, 22 bp, Artificial Sequence
  Synthetic: FXN 3 reverse 9:69040023-69040048; SpCas9
atgaaggttcttccctcaataa

SEQ ID NO: 32209 - DNA, 21 bp, Artificial Sequence
  Synthetic: FXN 3 reverse 9:69040024-69040048; SpCas9
tgaaggttcttccctcaataa

SEQ ID NO: 32210 - DNA, 20 bp, Artificial Sequence
  Synthetic: FXN 3 reverse 9:69040025-69040048; SpCas9
gaaggttcttccctcaataa

SEQ ID NO: 32211 - DNA, 19 bp, Artificial Sequence
  Synthetic: FXN 3 reverse 9:69040026-69040048; SpCas9
aaggttcttccctcaataa

SEQ ID NO: 32212 - DNA, 18 bp, Artificial Sequence
  Synthetic: FXN 3 reverse 9:69040027-69040048; SpCas9
aggttcttccctcaataa

SEQ ID NO: 32213 - DNA, 25 bp, Artificial Sequence
  Synthetic: FXN 3 forward 9:69040024-69040052; SpCas9
tattgagggaagaaccttcatgacc

SEQ ID NO: 32214 - DNA, 24 bp, Artificial Sequence
  Synthetic: FXN 3 forward 9:69040025-69040052; SpCas9
attgagggaagaaccttcatgacc

SEQ ID NO: 32215 - DNA, 23 bp, Artificial Sequence
  Synthetic: FXN 3 forward 9:69040026-69040052; SpCas9
ttgagggaagaaccttcatgacc

SEQ ID NO: 32216 - DNA, 22 bp, Artificial Sequence
  Synthetic: FXN 3 forward 9:69040027-69040052; SpCas9
tgagggaagaaccttcatgacc

SEQ ID NO: 32217 - DNA, 21 bp, Artificial Sequence
  Synthetic: FXN 3 forward 9:69040028-69040052; SpCas9
gagggaagaaccttcatgacc

SEQ ID NO: 32218 - DNA, 20 bp, Artificial Sequence
  Synthetic: FXN 3 forward 9:69040029-69040052; SpCas9
agggaagaaccttcatgacc

SEQ ID NO: 32219 - DNA, 19 bp, Artificial Sequence
  Synthetic: FXN 3 forward 9:69040030-69040052; SpCas9
gggaagaaccttcatgacc

SEQ ID NO: 32220 - DNA, 18 bp, Artificial Sequence
  Synthetic: FXN 3 forward 9:69040031-69040052; SpCas9
ggaagaaccttcatgacc

SEQ ID NO: 32221 - DNA, 25 bp, Artificial Sequence
  Synthetic: FXN 3 forward 9:69040037-69040065; SpCas9
accttcatgacccagtcaccgctta

SEQ ID NO: 32222 - DNA, 24 bp, Artificial Sequence
  Synthetic: FXN 3 forward 9:69040038-69040065; SpCas9
ccttcatgacccagtcaccgctta

SEQ ID NO: 32223 - DNA, 23 bp, Artificial Sequence
  Synthetic: FXN 3 forward 9:69040039-69040065; SpCas9
cttcatgacccagtcaccgctta

SEQ ID NO: 32224 - DNA, 22 bp, Artificial Sequence
  Synthetic: FXN 3 forward 9:69040040-69040065; SpCas9
ttcatgacccagtcaccgctta

SEQ ID NO: 32225 - DNA, 21 bp, Artificial Sequence
  Synthetic: FXN 3 forward 9:69040041-69040065; SpCas9
tcatgacccagtcaccgctta

SEQ ID NO: 32226 - DNA, 20 bp, Artificial Sequence
  Synthetic: FXN 3 forward 9:69040042-69040065; SpCas9
catgacccagtcaccgctta

SEQ ID NO: 32227 - DNA, 19 bp, Artificial Sequence
  Synthetic: FXN 3 forward 9:69040043-69040065; SpCas9
atgacccagtcaccgctta

SEQ ID NO: 32228 - DNA, 18 bp, Artificial Sequence
  Synthetic: FXN 3 forward 9:69040044-69040065; SpCas9
tgacccagtcaccgctta

SEQ ID NO: 32229 - DNA, 25 bp, Artificial Sequence
  Synthetic: FXN 3 forward 9:69040038-69040066; SpCas9
ccttcatgacccagtcaccgcttaa

SEQ ID NO: 32230 - DNA, 24 bp, Artificial Sequence
  Synthetic: FXN 3 forward 9:69040039-69040066; SpCas9
cttcatgacccagtcaccgcttaa

SEQ ID NO: 32231 - DNA, 23 bp, Artificial Sequence
  Synthetic: FXN 3 forward 9:69040040-69040066; SpCas9
ttcatgacccagtcaccgcttaa

SEQ ID NO: 32232 - DNA, 22 bp, Artificial Sequence
  Synthetic: FXN 3 forward 9:69040041-69040066; SpCas9
tcatgacccagtcaccgcttaa

SEQ ID NO: 32233 - DNA, 21 bp, Artificial Sequence
  Synthetic: FXN 3 forward 9:69040042-69040066; SpCas9
catgacccagtcaccgcttaa

SEQ ID NO: 32234 - DNA, 20 bp, Artificial Sequence
  Synthetic: FXN 3 forward 9:69040043-69040066; SpCas9
atgacccagtcaccgcttaa

SEQ ID NO: 32235 - DNA, 19 bp, Artificial Sequence
  Synthetic: FXN 3 forward 9:69040044-69040066; SpCas9
tgacccagtcaccgcttaa

SEQ ID NO: 32236 - DNA, 18 bp, Artificial Sequence
  Synthetic: FXN 3 forward 9:69040045-69040066; SpCas9
gacccagtcaccgcttaa

SEQ ID NO: 32237 - DNA, 25 bp, Artificial Sequence
  Synthetic: FXN 3 reverse 9:69040038-69040066; SpCas9
cctttaagcggtgactgggtcatga

SEQ ID NO: 32238 - DNA, 24 bp, Artificial Sequence
  Synthetic: FXN 3 reverse 9:69040039-69040066; SpCas9
ctttaagcggtgactgggtcatga

SEQ ID NO: 32239 - DNA, 23 bp, Artificial Sequence
  Synthetic: FXN 3 reverse 9:69040040-69040066; SpCas9
tttaagcggtgactgggtcatga

SEQ ID NO: 32240 - DNA, 22 bp, Artificial Sequence
  Synthetic: FXN 3 reverse 9:69040041-69040066; SpCas9
ttaagcggtgactgggtcatga

SEQ ID NO: 32241 - DNA, 21 bp, Artificial Sequence
  Synthetic: FXN 3 reverse 9:69040042-69040066; SpCas9
taagcggtgactgggtcatga

SEQ ID NO: 32242 - DNA, 20 bp, Artificial Sequence
  Synthetic: FXN 3 reverse 9:69040043-69040066; SpCas9
aagcggtgactgggtcatga

SEQ ID NO: 32243 - DNA, 19 bp, Artificial Sequence
  Synthetic: FXN 3 reverse 9:69040044-69040066; SpCas9
agcggtgactgggtcatga

SEQ ID NO: 32244 - DNA, 18 bp, Artificial Sequence
  Synthetic: FXN 3 reverse 9:69040045-69040066; SpCas9
gcggtgactgggtcatga

SEQ ID NO: 32245 - DNA, 25 bp, Artificial Sequence
  Synthetic: FXN 3 reverse 9:69040039-69040067; SpCas9
gcctttaagcggtgactgggtcatg

SEQ ID NO: 32246 - DNA, 24 bp, Artificial Sequence
  Synthetic: FXN 3 reverse 9:69040040-69040067; SpCas9
cctttaagcggtgactgggtcatg

SEQ ID NO: 32247 - DNA, 23 bp, Artificial Sequence
  Synthetic: FXN 3 reverse 9:69040041-69040067; SpCas9
ctttaagcggtgactgggtcatg

SEQ ID NO: 32248 - DNA, 22 bp, Artificial Sequence
  Synthetic: FXN 3 reverse 9:69040042-69040067; SpCas9
tttaagcggtgactgggtcatg

SEQ ID NO: 32249 - DNA, 21 bp, Artificial Sequence
  Synthetic: FXN 3 reverse 9:69040043-69040067; SpCas9
ttaagcggtgactgggtcatg

SEQ ID NO: 32250 - DNA, 20 bp, Artificial Sequence
  Synthetic: FXN 3 reverse 9:69040044-69040067; SpCas9
taagcggtgactgggtcatg

SEQ ID NO: 32251 - DNA, 19 bp, Artificial Sequence
  Synthetic: FXN 3 reverse 9:69040045-69040067; SpCas9
aagcggtgactgggtcatg

SEQ ID NO: 32252 - DNA, 18 bp, Artificial Sequence
  Synthetic: FXN 3 reverse 9:69040046-69040067; SpCas9
agcggtgactgggtcatg

SEQ ID NO: 32253 - DNA, 25 bp, Artificial Sequence
  Synthetic: FXN 3 reverse 9:69040047-69040075; SpCas9
gaggtggggcctttaagcggtgact

SEQ ID NO: 32254 - DNA, 24 bp, Artificial Sequence
  Synthetic: FXN 3 reverse 9:69040048-69040075; SpCas9
aggtggggcctttaagcggtgact

SEQ ID NO: 32255 - DNA, 23 bp, Artificial Sequence
  Synthetic: FXN 3 reverse 9:69040049-69040075; SpCas9
ggtggggcctttaagcggtgact

SEQ ID NO: 32256 - DNA, 22 bp, Artificial Sequence
  Synthetic: FXN 3 reverse 9:69040050-69040075; SpCas9
gtggggcctttaagcggtgact

SEQ ID NO: 32257 - DNA, 21 bp, Artificial Sequence
  Synthetic: FXN 3 reverse 9:69040051-69040075; SpCas9
tggggcctttaagcggtgact

SEQ ID NO: 32258 - DNA, 20 bp, Artificial Sequence
  Synthetic: FXN 3 reverse 9:69040052-69040075; SpCas9
ggggcctttaagcggtgact

SEQ ID NO: 32259 - DNA, 19 bp, Artificial Sequence
  Synthetic: FXN 3 reverse 9:69040053-69040075; SpCas9
gggcctttaagcggtgact

SEQ ID NO: 32260 - DNA, 18 bp, Artificial Sequence
  Synthetic: FXN 3 reverse 9:69040054-69040075; SpCas9
ggcctttaagcggtgact

SEQ ID NO: 32261 - DNA, 25 bp, Artificial Sequence
  Synthetic: FXN 3 reverse 9:69040048-69040076; SpCas9
agaggtggggcctttaagcggtgac

SEQ ID NO: 32262 - DNA, 24 bp, Artificial Sequence
  Synthetic: FXN 3 reverse 9:69040049-69040076; SpCas9
gaggtggggcctttaagcggtgac

SEQ ID NO: 32263 - DNA, 23 bp, Artificial Sequence
  Synthetic: FXN 3 reverse 9:69040050-69040076; SpCas9
aggtggggcctttaagcggtgac

SEQ ID NO: 32264 - DNA, 22 bp, Artificial Sequence
  Synthetic: FXN 3 reverse 9:69040051-69040076; SpCas9
ggtggggcctttaagcggtgac

SEQ ID NO: 32265 - DNA, 21 bp, Artificial Sequence
  Synthetic: FXN 3 reverse 9:69040052-69040076; SpCas9
gtggggcctttaagcggtgac

SEQ ID NO: 32266 - DNA, 20 bp, Artificial Sequence
  Synthetic: FXN 3 reverse 9:69040053-69040076; SpCas9
tggggcctttaagcggtgac

SEQ ID NO: 32267 - DNA, 19 bp, Artificial Sequence
  Synthetic: FXN 3 reverse 9:69040054-69040076; SpCas9
ggggcctttaagcggtgac

SEQ ID NO: 32268 - DNA, 18 bp, Artificial Sequence
  Synthetic: FXN 3 reverse 9:69040055-69040076; SpCas9
gggcctttaagcggtgac

SEQ ID NO: 32269 - DNA, 25 bp, Artificial Sequence
  Synthetic: FXN 3 reverse 9:69040055-69040083; SpCas9
agtattgagaggtggggcctttaag

SEQ ID NO: 32270 - DNA, 24 bp, Artificial Sequence
  Synthetic: FXN 3 reverse 9:69040056-69040083; SpCas9
gtattgagaggtggggcctttaag

SEQ ID NO: 32271 - DNA, 23 bp, Artificial Sequence
  Synthetic: FXN 3 reverse 9:69040057-69040083; SpCas9
tattgagaggtggggcctttaag

SEQ ID NO: 32272 - DNA, 22 bp, Artificial Sequence
  Synthetic: FXN 3 reverse 9:69040058-69040083; SpCas9
attgagaggtggggcctttaag

SEQ ID NO: 32273 - DNA, 21 bp, Artificial Sequence
  Synthetic: FXN 3 reverse 9:69040059-69040083; SpCas9
ttgagaggtggggcctttaag

SEQ ID NO: 32274 - DNA, 20 bp, Artificial Sequence
  Synthetic: FXN 3 reverse 9:69040060-69040083; SpCas9
tgagaggtggggcctttaag

SEQ ID NO: 32275 - DNA, 19 bp, Artificial Sequence
  Synthetic: FXN 3 reverse 9:69040061-69040083; SpCas9
gagaggtggggcctttaag

SEQ ID NO: 32276 - DNA, 18 bp, Artificial Sequence
  Synthetic: FXN 3 reverse 9:69040062-69040083; SpCas9
agaggtggggcctttaag

SEQ ID NO: 32277 - DNA, 25 bp, Artificial Sequence
  Synthetic: FXN 3 reverse 9:69040058-69040086; SpCas9
ggcagtattgagaggtggggccttt

SEQ ID NO: 32278 - DNA, 24 bp, Artificial Sequence
  Synthetic: FXN 3 reverse 9:69040059-69040086; SpCas9
gcagtattgagaggtggggccttt

SEQ ID NO: 32279 - DNA, 23 bp, Artificial Sequence
  Synthetic: FXN 3 reverse 9:69040060-69040086; SpCas9
cagtattgagaggtggggccttt

SEQ ID NO: 32280 - DNA, 22 bp, Artificial Sequence
  Synthetic: FXN 3 reverse 9:69040061-69040086; SpCas9
agtattgagaggtggggccttt

SEQ ID NO: 32281 - DNA, 21 bp, Artificial Sequence
  Synthetic: FXN 3 reverse 9:69040062-69040086; SpCas9
gtattgagaggtggggccttt

SEQ ID NO: 32282 - DNA, 20 bp, Artificial Sequence
  Synthetic: FXN 3 reverse 9:69040063-69040086; SpCas9
tattgagaggtggggccttt

SEQ ID NO: 32283 - DNA, 19 bp, Artificial Sequence
  Synthetic: FXN 3 reverse 9:69040064-69040086; SpCas9
attgagaggtggggccttt

SEQ ID NO: 32284 - DNA, 18 bp, Artificial Sequence
  Synthetic: FXN 3 reverse 9:69040065-69040086; SpCas9
ttgagaggtggggccttt

SEQ ID NO: 32285 - DNA, 25 bp, Artificial Sequence
  Synthetic: FXN 3 forward 9:69040065-69040093; SpCas9
gccccacctctcaatactgccacat

SEQ ID NO: 32286 - DNA, 24 bp, Artificial Sequence
  Synthetic: FXN 3 forward 9:69040066-69040093; SpCas9
ccccacctctcaatactgccacat

SEQ ID NO: 32287 - DNA, 23 bp, Artificial Sequence
  Synthetic: FXN 3 forward 9:69040067-69040093; SpCas9
cccacctctcaatactgccacat

SEQ ID NO: 32288 - DNA, 22 bp, Artificial Sequence
  Synthetic: FXN 3 forward 9:69040068-69040093; SpCas9
ccacctctcaatactgccacat

SEQ ID NO: 32289 - DNA, 21 bp, Artificial Sequence
  Synthetic: FXN 3 forward 9:69040069-69040093; SpCas9
cacctctcaatactgccacat

SEQ ID NO: 32290 - DNA, 20 bp, Artificial Sequence
  Synthetic: FXN 3 forward 9:69040070-69040093; SpCas9
acctctcaatactgccacat

SEQ ID NO: 32291 - DNA, 19 bp, Artificial Sequence
  Synthetic: FXN 3 forward 9:69040071-69040093; SpCas9
cctctcaatactgccacat

SEQ ID NO: 32292 - DNA, 18 bp, Artificial Sequence
  Synthetic: FXN 3 forward 9:69040072-69040093; SpCas9
ctctcaatactgccacat

SEQ ID NO: 32293 - DNA, 25 bp, Artificial Sequence
  Synthetic: FXN 3 forward 9:69040066-69040094; SpCas9
ccccacctctcaatactgccacatc

SEQ ID NO: 32294 - DNA, 24 bp, Artificial Sequence
  Synthetic: FXN 3 forward 9:69040067-69040094; SpCas9
cccacctctcaatactgccacatc

SEQ ID NO: 32295 - DNA, 23 bp, Artificial Sequence
  Synthetic: FXN 3 forward 9:69040068-69040094; SpCas9
ccacctctcaatactgccacatc

SEQ ID NO: 32296 - DNA, 22 bp, Artificial Sequence
  Synthetic: FXN 3 forward 9:69040069-69040094; SpCas9
cacctctcaatactgccacatc

SEQ ID NO: 32297 - DNA, 21 bp, Artificial Sequence
  Synthetic: FXN 3 forward 9:69040070-69040094; SpCas9
acctctcaatactgccacatc

SEQ ID NO: 32298 - DNA, 20 bp, Artificial Sequence
  Synthetic: FXN 3 forward 9:69040071-69040094; SpCas9
cctctcaatactgccacatc

SEQ ID NO: 32299 - DNA, 19 bp, Artificial Sequence
  Synthetic: FXN 3 forward 9:69040072-69040094; SpCas9
ctctcaatactgccacatc

SEQ ID NO: 32300 - DNA, 18 bp, Artificial Sequence
  Synthetic: FXN 3 forward 9:69040073-69040094; SpCas9
tctcaatactgccacatc

SEQ ID NO: 32301 - DNA, 25 bp, Artificial Sequence
  Synthetic: FXN 3 reverse 9:69040066-69040094; SpCas9
cccgatgtggcagtattgagaggtg

SEQ ID NO: 32302 - DNA, 24 bp, Artificial Sequence
  Synthetic: FXN 3 reverse 9:69040067-69040094; SpCas9
ccgatgtggcagtattgagaggtg

SEQ ID NO: 32303 - DNA, 23 bp, Artificial Sequence
  Synthetic: FXN 3 reverse 9:69040068-69040094; SpCas9
cgatgtggcagtattgagaggtg

SEQ ID NO: 32304 - DNA, 22 bp, Artificial Sequence
  Synthetic: FXN 3 reverse 9:69040069-69040094; SpCas9
gatgtggcagtattgagaggtg

SEQ ID NO: 32305 - DNA, 21 bp, Artificial Sequence
  Synthetic: FXN 3 reverse 9:69040070-69040094; SpCas9
atgtggcagtattgagaggtg

SEQ ID NO: 32306 - DNA, 20 bp, Artificial Sequence
  Synthetic: FXN 3 reverse 9:69040071-69040094; SpCas9
tgtggcagtattgagaggtg

SEQ ID NO: 32307 - DNA, 19 bp, Artificial Sequence
  Synthetic: FXN 3 reverse 9:69040072-69040094; SpCas9
gtggcagtattgagaggtg

SEQ ID NO: 32308 - DNA, 18 bp, Artificial Sequence
  Synthetic: FXN 3 reverse 9:69040073-69040094; SpCas9
tggcagtattgagaggtg

SEQ ID NO: 32309 - DNA, 25 bp, Artificial Sequence
  Synthetic: FXN 3 reverse 9:69040067-69040095; SpCas9
tcccgatgtggcagtattgagaggt

SEQ ID NO: 32310 - DNA, 24 bp, Artificial Sequence
  Synthetic: FXN 3 reverse 9:69040068-69040095; SpCas9
cccgatgtggcagtattgagaggt

SEQ ID NO: 32311 - DNA, 23 bp, Artificial Sequence
  Synthetic: FXN 3 reverse 9:69040069-69040095; SpCas9
ccgatgtggcagtattgagaggt

SEQ ID NO: 32312 - DNA, 22 bp, Artificial Sequence
  Synthetic: FXN 3 reverse 9:69040070-69040095; SpCas9
cgatgtggcagtattgagaggt

SEQ ID NO: 32313 - DNA, 21 bp, Artificial Sequence
  Synthetic: FXN 3 reverse 9:69040071-69040095; SpCas9
gatgtggcagtattgagaggt

SEQ ID NO: 32314 - DNA, 20 bp, Artificial Sequence
  Synthetic: FXN 3 reverse 9:69040072-69040095; SpCas9
atgtggcagtattgagaggt

SEQ ID NO: 32315 - DNA, 19 bp, Artificial Sequence
  Synthetic: FXN 3 reverse 9:69040073-69040095; SpCas9
tgtggcagtattgagaggt

SEQ ID NO: 32316 - DNA, 18 bp, Artificial Sequence
  Synthetic: FXN 3 reverse 9:69040074-69040095; SpCas9
gtggcagtattgagaggt

SEQ ID NO: 32317 - DNA, 25 bp, Artificial Sequence
  Synthetic: FXN 3 reverse 9:69040068-69040096; SpCas9
ttcccgatgtggcagtattgagagg

SEQ ID NO: 32318 - DNA, 24 bp, Artificial Sequence
  Synthetic: FXN 3 reverse 9:69040069-69040096; SpCas9
tcccgatgtggcagtattgagagg

SEQ ID NO: 32319 - DNA, 23 bp, Artificial Sequence
  Synthetic: FXN 3 reverse 9:69040070-69040096; SpCas9
cccgatgtggcagtattgagagg

SEQ ID NO: 32320 - DNA, 22 bp, Artificial Sequence
  Synthetic: FXN 3 reverse 9:69040071-69040096; SpCas9
ccgatgtggcagtattgagagg

SEQ ID NO: 32321 - DNA, 21 bp, Artificial Sequence
  Synthetic: FXN 3 reverse 9:69040072-69040096; SpCas9
cgatgtggcagtattgagagg

SEQ ID NO: 32322 - DNA, 20 bp, Artificial Sequence
  Synthetic: FXN 3 reverse 9:69040073-69040096; SpCas9
gatgtggcagtattgagagg

SEQ ID NO: 32323 - DNA, 19 bp, Artificial Sequence
  Synthetic: FXN 3 reverse 9:69040074-69040096; SpCas9
atgtggcagtattgagagg

SEQ ID NO: 32324 - DNA, 18 bp, Artificial Sequence
  Synthetic: FXN 3 reverse 9:69040075-69040096; SpCas9
tgtggcagtattgagagg

SEQ ID NO: 32325 - DNA, 25 bp, Artificial Sequence
  Synthetic: FXN 3 reverse 9:69040071-69040099; SpCas9
taattcccgatgtggcagtattgag

SEQ ID NO: 32326 - DNA, 24 bp, Artificial Sequence
  Synthetic: FXN 3 reverse 9:69040072-69040099; SpCas9
aattcccgatgtggcagtattgag

SEQ ID NO: 32327 - DNA, 23 bp, Artificial Sequence
  Synthetic: FXN 3 reverse 9:69040073-69040099; SpCas9
attcccgatgtggcagtattgag

SEQ ID NO: 32328 - DNA, 22 bp, Artificial Sequence
  Synthetic: FXN 3 reverse 9:69040074-69040099; SpCas9
ttcccgatgtggcagtattgag

SEQ ID NO: 32329 - DNA, 21 bp, Artificial Sequence
  Synthetic: FXN 3 reverse 9:69040075-69040099; SpCas9
tcccgatgtggcagtattgag

SEQ ID NO: 32330 - DNA, 20 bp, Artificial Sequence
  Synthetic: FXN 3 reverse 9:69040076-69040099; SpCas9
cccgatgtggcagtattgag

SEQ ID NO: 32331 - DNA, 19 bp, Artificial Sequence
  Synthetic: FXN 3 reverse 9:69040077-69040099; SpCas9
ccgatgtggcagtattgag

SEQ ID NO: 32332 - DNA, 18 bp, Artificial Sequence
  Synthetic: FXN 3 reverse 9:69040078-69040099; SpCas9
cgatgtggcagtattgag

SEQ ID NO: 32333 - DNA, 25 bp, Artificial Sequence
  Synthetic: FXN 3 reverse 9:69040072-69040100; SpCas9
ttaattcccgatgtggcagtattga

SEQ ID NO: 32334 - DNA, 24 bp, Artificial Sequence
  Synthetic: FXN 3 reverse 9:69040073-69040100; SpCas9
taattcccgatgtggcagtattga

SEQ ID NO: 32335 - DNA, 23 bp, Artificial Sequence
  Synthetic: FXN 3 reverse 9:69040074-69040100; SpCas9
aattcccgatgtggcagtattga

SEQ ID NO: 32336 - DNA, 22 bp, Artificial Sequence
  Synthetic: FXN 3 reverse 9:69040075-69040100; SpCas9
attcccgatgtggcagtattga

SEQ ID NO: 32337 - DNA, 21 bp, Artificial Sequence
  Synthetic: FXN 3 reverse 9:69040076-69040100; SpCas9
ttcccgatgtggcagtattga

SEQ ID NO: 32338 - DNA, 20 bp, Artificial Sequence
  Synthetic: FXN 3 reverse 9:69040077-69040100; SpCas9
tcccgatgtggcagtattga

SEQ ID NO: 32339 - DNA, 19 bp, Artificial Sequence
  Synthetic: FXN 3 reverse 9:69040078-69040100; SpCas9
cccgatgtggcagtattga

SEQ ID NO: 32340 - DNA, 18 bp, Artificial Sequence
  Synthetic: FXN 3 reverse 9:69040079-69040100; SpCas9
ccgatgtggcagtattga

SEQ ID NO: 32341 - DNA, 25 bp, Artificial Sequence
  Synthetic: FXN 3 forward 9:69040073-69040101; SpCas9
tctcaatactgccacatcgggaatt

SEQ ID NO: 32342 - DNA, 24 bp, Artificial Sequence
  Synthetic: FXN 3 forward 9:69040074-69040101; SpCas9
ctcaatactgccacatcgggaatt

SEQ ID NO: 32343 - DNA, 23 bp, Artificial Sequence
  Synthetic: FXN 3 forward 9:69040075-69040101; SpCas9
tcaatactgccacatcgggaatt

SEQ ID NO: 32344 - DNA, 22 bp, Artificial Sequence
  Synthetic: FXN 3 forward 9:69040076-69040101; SpCas9
caatactgccacatcgggaatt

SEQ ID NO: 32345 - DNA, 21 bp, Artificial Sequence
  Synthetic: FXN 3 forward 9:69040077-69040101; SpCas9
aatactgccacatcgggaatt

SEQ ID NO: 32346 - DNA, 20 bp, Artificial Sequence
  Synthetic: FXN 3 forward 9:69040078-69040101; SpCas9
atactgccacatcgggaatt

SEQ ID NO: 32347 - DNA, 19 bp, Artificial Sequence
  Synthetic: FXN 3 forward 9:69040079-69040101; SpCas9
tactgccacatcgggaatt

SEQ ID NO: 32348 - DNA, 18 bp, Artificial Sequence
  Synthetic: FXN 3 forward 9:69040080-69040101; SpCas9
actgccacatcgggaatt

SEQ ID NO: 32349 - DNA, 25 bp, Artificial Sequence
  Synthetic: FXN 3 reverse 9:69040074-69040102; SpCas9
acttaattcccgatgtggcagtatt

SEQ ID NO: 32350 - DNA, 24 bp, Artificial Sequence
  Synthetic: FXN 3 reverse 9:69040075-69040102; SpCas9
cttaattcccgatgtggcagtatt

SEQ ID NO: 32351 - DNA, 23 bp, Artificial Sequence
  Synthetic: FXN 3 reverse 9:69040076-69040102; SpCas9
ttaattcccgatgtggcagtatt

SEQ ID NO: 32352 - DNA, 22 bp, Artificial Sequence
  Synthetic: FXN 3 reverse 9:69040077-69040102; SpCas9
taattcccgatgtggcagtatt

SEQ ID NO: 32353 - DNA, 21 bp, Artificial Sequence
  Synthetic: FXN 3 reverse 9:69040078-69040102; SpCas9
aattcccgatgtggcagtatt

SEQ ID NO: 32354 - DNA, 20 bp, Artificial Sequence
  Synthetic: FXN 3 reverse 9:69040079-69040102; SpCas9
attcccgatgtggcagtatt

SEQ ID NO: 32355 - DNA, 19 bp, Artificial Sequence
  Synthetic: FXN 3 reverse 9:69040080-69040102; SpCas9
ttcccgatgtggcagtatt

SEQ ID NO: 32356 - DNA, 18 bp, Artificial Sequence
  Synthetic: FXN 3 reverse 9:69040081-69040102; SpCas9
tcccgatgtggcagtatt

SEQ ID NO: 32357 - DNA, 25 bp, Artificial Sequence
  Synthetic: FXN 3 reverse 9:69040081-69040109; SpCas9
tgttgaaacttaattcccgatgtgg

SEQ ID NO: 32358 - DNA, 24 bp, Artificial Sequence
  Synthetic: FXN 3 reverse 9:69040082-69040109; SpCas9
gttgaaacttaattcccgatgtgg

SEQ ID NO: 32359 - DNA, 23 bp, Artificial Sequence
  Synthetic: FXN 3 reverse 9:69040083-69040109; SpCas9
ttgaaacttaattcccgatgtgg

SEQ ID NO: 32360 - DNA, 22 bp, Artificial Sequence
  Synthetic: FXN 3 reverse 9:69040084-69040109; SpCas9
tgaaacttaattcccgatgtgg

SEQ ID NO: 32361 - DNA, 21 bp, Artificial Sequence
  Synthetic: FXN 3 reverse 9:69040085-69040109; SpCas9
gaaacttaattcccgatgtgg

SEQ ID NO: 32362 - DNA, 20 bp, Artificial Sequence
  Synthetic: FXN 3 reverse 9:69040086-69040109; SpCas9
aaacttaattcccgatgtgg

SEQ ID NO: 32363 - DNA, 19 bp, Artificial Sequence
  Synthetic: FXN 3 reverse 9:69040087-69040109; SpCas9
aacttaattcccgatgtgg

SEQ ID NO: 32364 - DNA, 18 bp, Artificial Sequence
  Synthetic: FXN 3 reverse 9:69040088-69040109; SpCas9
acttaattcccgatgtgg

SEQ ID NO: 32365 - DNA, 25 bp, Artificial Sequence
  Synthetic: FXN 3 reverse 9:69040084-69040112; SpCas9
tcatgttgaaacttaattcccgatg

SEQ ID NO: 32366 - DNA, 24 bp, Artificial Sequence
  Synthetic: FXN 3 reverse 9:69040085-69040112; SpCas9
catgttgaaacttaattcccgatg

SEQ ID NO: 32367 - DNA, 23 bp, Artificial Sequence
  Synthetic: FXN 3 reverse 9:69040086-69040112; SpCas9
atgttgaaacttaattcccgatg

SEQ ID NO: 32368 - DNA, 22 bp, Artificial Sequence
  Synthetic: FXN 3 reverse 9:69040087-69040112; SpCas9
tgttgaaacttaattcccgatg

SEQ ID NO: 32369 - DNA, 21 bp, Artificial Sequence
  Synthetic: FXN 3 reverse 9:69040088-69040112; SpCas9
gttgaaacttaattcccgatg

SEQ ID NO: 32370 - DNA, 20 bp, Artificial Sequence
  Synthetic: FXN 3 reverse 9:69040089-69040112; SpCas9
ttgaaacttaattcccgatg

SEQ ID NO: 32371 - DNA, 19 bp, Artificial Sequence
  Synthetic: FXN 3 reverse 9:69040090-69040112; SpCas9
tgaaacttaattcccgatg

SEQ ID NO: 32372 - DNA, 18 bp, Artificial Sequence
  Synthetic: FXN 3 reverse 9:69040091-69040112; SpCas9
gaaacttaattcccgatg

SEQ ID NO: 32373 - DNA, 25 bp, Artificial Sequence
  Synthetic: FXN 3 forward 9:69040085-69040113; SpCas9
cacatcgggaattaagtttcaacat

SEQ ID NO: 32374 - DNA, 24 bp, Artificial Sequence
  Synthetic: FXN 3 forward 9:69040086-69040113; SpCas9
acatcgggaattaagtttcaacat

SEQ ID NO: 32375 - DNA, 23 bp, Artificial Sequence
  Synthetic: FXN 3 forward 9:69040087-69040113; SpCas9
catcgggaattaagtttcaacat

SEQ ID NO: 32376 - DNA, 22 bp, Artificial Sequence
  Synthetic: FXN 3 forward 9:69040088-69040113; SpCas9
atcgggaattaagtttcaacat

SEQ ID NO: 32377 - DNA, 21 bp, Artificial Sequence
  Synthetic: FXN 3 forward 9:69040089-69040113; SpCas9
tcgggaattaagtttcaacat

SEQ ID NO: 32378 - DNA, 20 bp, Artificial Sequence
  Synthetic: FXN 3 forward 9:69040090-69040113; SpCas9
cgggaattaagtttcaacat

SEQ ID NO: 32379 - DNA, 19 bp, Artificial Sequence
  Synthetic: FXN 3 forward 9:69040091-69040113; SpCas9
gggaattaagtttcaacat

SEQ ID NO: 32380 - DNA, 18 bp, Artificial Sequence
  Synthetic: FXN 3 forward 9:69040092-69040113; SpCas9
ggaattaagtttcaacat

SEQ ID NO: 32381 - DNA, 25 bp, Artificial Sequence
  Synthetic: FXN 3 forward 9:69040091-69040119; SpCas9
gggaattaagtttcaacatgagttt

SEQ ID NO: 32382 - DNA, 24 bp, Artificial Sequence
  Synthetic: FXN 3 forward 9:69040092-69040119; SpCas9
ggaattaagtttcaacatgagttt

SEQ ID NO: 32383 - DNA, 23 bp, Artificial Sequence
  Synthetic: FXN 3 forward 9:69040093-69040119; SpCas9
gaattaagtttcaacatgagttt

SEQ ID NO: 32384 - DNA, 22 bp, Artificial Sequence
  Synthetic: FXN 3 forward 9:69040094-69040119; SpCas9
aattaagtttcaacatgagttt

SEQ ID NO: 32385 - DNA, 21 bp, Artificial Sequence
  Synthetic: FXN 3 forward 9:69040095-69040119; SpCas9
attaagtttcaacatgagttt

SEQ ID NO: 32386 - DNA, 20 bp, Artificial Sequence
  Synthetic: FXN 3 forward 9:69040096-69040119; SpCas9
ttaagtttcaacatgagttt

SEQ ID NO: 32387 - DNA, 19 bp, Artificial Sequence
  Synthetic: FXN 3 forward 9:69040097-69040119; SpCas9
taagtttcaacatgagttt

SEQ ID NO: 32388 - DNA, 18 bp, Artificial Sequence
  Synthetic: FXN 3 forward 9:69040098-69040119; SpCas9
aagtttcaacatgagttt

SEQ ID NO: 32389 - DNA, 25 bp, Artificial Sequence
  Synthetic: FXN 3 forward 9:69040093-69040121; SpCas9
gaattaagtttcaacatgagtttcg

SEQ ID NO: 32390 - DNA, 24 bp, Artificial Sequence
  Synthetic: FXN 3 forward 9:69040094-69040121; SpCas9
aattaagtttcaacatgagtttcg

SEQ ID NO: 32391 - DNA, 23 bp, Artificial Sequence
  Synthetic: FXN 3 forward 9:69040095-69040121; SpCas9
attaagtttcaacatgagtttcg

SEQ ID NO: 32392 - DNA, 22 bp, Artificial Sequence
  Synthetic: FXN 3 forward 9:69040096-69040121; SpCas9
ttaagtttcaacatgagtttcg

SEQ ID NO: 32393 - DNA, 21 bp, Artificial Sequence
  Synthetic: FXN 3 forward 9:69040097-69040121; SpCas9
taagtttcaacatgagtttcg

SEQ ID NO: 32394 - DNA, 20 bp, Artificial Sequence
  Synthetic: FXN 3 forward 9:69040098-69040121; SpCas9
aagtttcaacatgagtttcg

SEQ ID NO: 32395 - DNA, 19 bp, Artificial Sequence
  Synthetic: FXN 3 forward 9:69040099-69040121; SpCas9
agtttcaacatgagtttcg

SEQ ID NO: 32396 - DNA, 18 bp, Artificial Sequence
  Synthetic: FXN 3 forward 9:69040100-69040121; SpCas9
gtttcaacatgagtttcg

SEQ ID NO: 32397 - DNA, 25 bp, Artificial Sequence
  Synthetic: FXN 3 forward 9:69040094-69040122; SpCas9
aattaagtttcaacatgagtttcgg

SEQ ID NO: 32398 - DNA, 24 bp, Artificial Sequence
  Synthetic: FXN 3 forward 9:69040095-69040122; SpCas9
attaagtttcaacatgagtttcgg

SEQ ID NO: 32399 - DNA, 23 bp, Artificial Sequence
  Synthetic: FXN 3 forward 9:69040096-69040122; SpCas9
ttaagtttcaacatgagtttcgg

SEQ ID NO: 32400 - DNA, 22 bp, Artificial Sequence
  Synthetic: FXN 3 forward 9:69040097-69040122; SpCas9
taagtttcaacatgagtttcgg

SEQ ID NO: 32401 - DNA, 21 bp, Artificial Sequence
  Synthetic: FXN 3 forward 9:69040098-69040122; SpCas9
aagtttcaacatgagtttcgg

SEQ ID NO: 32402 - DNA, 20 bp, Artificial Sequence
  Synthetic: FXN 3 forward 9:69040099-69040122; SpCas9
agtttcaacatgagtttcgg

SEQ ID NO: 32403 - DNA, 19 bp, Artificial Sequence
  Synthetic: FXN 3 forward 9:69040100-69040122; SpCas9
gtttcaacatgagtttcgg

SEQ ID NO: 32404 - DNA, 18 bp, Artificial Sequence
  Synthetic: FXN 3 forward 9:69040101-69040122; SpCas9
tttcaacatgagtttcgg

SEQ ID NO: 32405 - DNA, 25 bp, Artificial Sequence
  Synthetic: FXN 3 forward 9:69040115-69040143; SpCas9
tcggaggtgacaaacattcaaacca

SEQ ID NO: 32406 - DNA, 24 bp, Artificial Sequence
  Synthetic: FXN 3 forward 9:69040116-69040143; SpCas9
cggaggtgacaaacattcaaacca

SEQ ID NO: 32407 - DNA, 23 bp, Artificial Sequence
  Synthetic: FXN 3 forward 9:69040117-69040143; SpCas9
ggaggtgacaaacattcaaacca

SEQ ID NO: 32408 - DNA, 22 bp, Artificial Sequence
  Synthetic: FXN 3 forward 9:69040118-69040143; SpCas9
gaggtgacaaacattcaaacca

SEQ ID NO: 32409 - DNA, 21 bp, Artificial Sequence
  Synthetic: FXN 3 forward 9:69040119-69040143; SpCas9
aggtgacaaacattcaaacca

SEQ ID NO: 32410 - DNA, 20 bp, Artificial Sequence
  Synthetic: FXN 3 forward 9:69040120-69040143; SpCas9
ggtgacaaacattcaaacca

SEQ ID NO: 32411 - DNA, 19 bp, Artificial Sequence
  Synthetic: FXN 3 forward 9:69040121-69040143; SpCas9
gtgacaaacattcaaacca

SEQ ID NO: 32412 - DNA, 18 bp, Artificial Sequence
  Synthetic: FXN 3 forward 9:69040122-69040143; SpCas9
tgacaaacattcaaacca

SEQ ID NO: 32413 - DNA, 25 bp, Artificial Sequence
  Synthetic: FXN 3 reverse 9:69040137-69040165; SpCas9
gagtcatttaagagacagcatgcta

SEQ ID NO: 32414 - DNA, 24 bp, Artificial Sequence
  Synthetic: FXN 3 reverse 9:69040138-69040165; SpCas9
agtcatttaagagacagcatgcta

SEQ ID NO: 32415 - DNA, 23 bp, Artificial Sequence
  Synthetic: FXN 3 reverse 9:69040139-69040165; SpCas9
gtcatttaagagacagcatgcta

SEQ ID NO: 32416 - DNA, 22 bp, Artificial Sequence
  Synthetic: FXN 3 reverse 9:69040140-69040165; SpCas9
tcatttaagagacagcatgcta

SEQ ID NO: 32417 - DNA, 21 bp, Artificial Sequence
  Synthetic: FXN 3 reverse 9:69040141-69040165; SpCas9
catttaagagacagcatgcta

SEQ ID NO: 32418 - DNA, 20 bp, Artificial Sequence
  Synthetic: FXN 3 reverse 9:69040142-69040165; SpCas9
atttaagagacagcatgcta

SEQ ID NO: 32419 - DNA, 19 bp, Artificial Sequence
  Synthetic: FXN 3 reverse 9:69040143-69040165; SpCas9
tttaagagacagcatgcta

SEQ ID NO: 32420 - DNA, 18 bp, Artificial Sequence
  Synthetic: FXN 3 reverse 9:69040144-69040165; SpCas9
ttaagagacagcatgcta

SEQ ID NO: 32421 - DNA, 25 bp, Artificial Sequence
  Synthetic: FXN 3 forward 9:69040143-69040171; SpCas9
catgctgtctcttaaatgactcaat

SEQ ID NO: 32422 - DNA, 24 bp, Artificial Sequence
  Synthetic: FXN 3 forward 9:69040144-69040171; SpCas9
atgctgtctcttaaatgactcaat

SEQ ID NO: 32423 - DNA, 23 bp, Artificial Sequence
  Synthetic: FXN 3 forward 9:69040145-69040171; SpCas9
tgctgtctcttaaatgactcaat

SEQ ID NO: 32424 - DNA, 22 bp, Artificial Sequence
  Synthetic: FXN 3 forward 9:69040146-69040171; SpCas9
gctgtctcttaaatgactcaat

SEQ ID NO: 32425 - DNA, 21 bp, Artificial Sequence
  Synthetic: FXN 3 forward 9:69040147-69040171; SpCas9
ctgtctcttaaatgactcaat

SEQ ID NO: 32426 - DNA, 20 bp, Artificial Sequence
  Synthetic: FXN 3 forward 9:69040148-69040171; SpCas9
tgtctcttaaatgactcaat

SEQ ID NO: 32427 - DNA, 19 bp, Artificial Sequence
  Synthetic: FXN 3 forward 9:69040149-69040171; SpCas9
gtctcttaaatgactcaat

SEQ ID NO: 32428 - DNA, 18 bp, Artificial Sequence
  Synthetic: FXN 3 forward 9:69040150-69040171; SpCas9
tctcttaaatgactcaat

SEQ ID NO: 32429 - DNA, 25 bp, Artificial Sequence
  Synthetic: FXN 3 reverse 9:69040147-69040175; SpCas9
ggagcttattgagtcatttaagaga

SEQ ID NO: 32430 - DNA, 24 bp, Artificial Sequence
  Synthetic: FXN 3 reverse 9:69040148-69040175; SpCas9
gagcttattgagtcatttaagaga

SEQ ID NO: 32431 - DNA, 23 bp, Artificial Sequence
  Synthetic: FXN 3 reverse 9:69040149-69040175; SpCas9
agcttattgagtcatttaagaga

SEQ ID NO: 32432 - DNA, 22 bp, Artificial Sequence
  Synthetic: FXN 3 reverse 9:69040150-69040175; SpCas9
gcttattgagtcatttaagaga

SEQ ID NO: 32433 - DNA, 21 bp, Artificial Sequence
  Synthetic: FXN 3 reverse 9:69040151-69040175; SpCas9
cttattgagtcatttaagaga

SEQ ID NO: 32434 - DNA, 20 bp, Artificial Sequence
  Synthetic: FXN 3 reverse 9:69040152-69040175; SpCas9
ttattgagtcatttaagaga

SEQ ID NO: 32435 - DNA, 19 bp, Artificial Sequence
  Synthetic: FXN 3 reverse 9:69040153-69040175; SpCas9
tattgagtcatttaagaga

SEQ ID NO: 32436 - DNA, 18 bp, Artificial Sequence
  Synthetic: FXN 3 reverse 9:69040154-69040175; SpCas9
attgagtcatttaagaga

SEQ ID NO: 32437 - DNA, 25 bp, Artificial Sequence
  Synthetic: FXN 3 reverse 9:69040151-69040179; SpCas9
cacaggagcttattgagtcatttaa

SEQ ID NO: 32438 - DNA, 24 bp, Artificial Sequence
  Synthetic: FXN 3 reverse 9:69040152-69040179; SpCas9
acaggagcttattgagtcatttaa

SEQ ID NO: 32439 - DNA, 23 bp, Artificial Sequence
  Synthetic: FXN 3 reverse 9:69040153-69040179; SpCas9
caggagcttattgagtcatttaa

SEQ ID NO: 32440 - DNA, 22 bp, Artificial Sequence
  Synthetic: FXN 3 reverse 9:69040154-69040179; SpCas9
aggagcttattgagtcatttaa

SEQ ID NO: 32441 - DNA, 21 bp, Artificial Sequence
  Synthetic: FXN 3 reverse 9:69040155-69040179; SpCas9
ggagcttattgagtcatttaa

SEQ ID NO: 32442 - DNA, 20 bp, Artificial Sequence
  Synthetic: FXN 3 reverse 9:69040156-69040179; SpCas9
gagcttattgagtcatttaa

SEQ ID NO: 32443 - DNA, 19 bp, Artificial Sequence
  Synthetic: FXN 3 reverse 9:69040157-69040179; SpCas9
agcttattgagtcatttaa

SEQ ID NO: 32444 - DNA, 18 bp, Artificial Sequence
  Synthetic: FXN 3 reverse 9:69040158-69040179; SpCas9
gcttattgagtcatttaa

SEQ ID NO: 32445 - DNA, 25 bp, Artificial Sequence
  Synthetic: FXN 3 forward 9:69040152-69040180; SpCas9
tcttaaatgactcaataagctcctg

SEQ ID NO: 32446 - DNA, 24 bp, Artificial Sequence
  Synthetic: FXN 3 forward 9:69040153-69040180; SpCas9
cttaaatgactcaataagctcctg

SEQ ID NO: 32447 - DNA, 23 bp, Artificial Sequence
  Synthetic: FXN 3 forward 9:69040154-69040180; SpCas9
ttaaatgactcaataagctcctg

SEQ ID NO: 32448 - DNA, 22 bp, Artificial Sequence
  Synthetic: FXN 3 forward 9:69040155-69040180; SpCas9
taaatgactcaataagctcctg

SEQ ID NO: 32449 - DNA, 21 bp, Artificial Sequence
  Synthetic: FXN 3 forward 9:69040156-69040180; SpCas9
aaatgactcaataagctcctg

SEQ ID NO: 32450 - DNA, 20 bp, Artificial Sequence
  Synthetic: FXN 3 forward 9:69040157-69040180; SpCas9
aatgactcaataagctcctg

SEQ ID NO: 32451 - DNA, 19 bp, Artificial Sequence
  Synthetic: FXN 3 forward 9:69040158-69040180; SpCas9
atgactcaataagctcctg

SEQ ID NO: 32452 - DNA, 18 bp, Artificial Sequence
  Synthetic: FXN 3 forward 9:69040159-69040180; SpCas9
tgactcaataagctcctg

SEQ ID NO: 32453 - DNA, 25 bp, Artificial Sequence
  Synthetic: FXN 3 reverse 9:69040153-69040181; SpCas9
gccacaggagcttattgagtcattt

SEQ ID NO: 32454 - DNA, 24 bp, Artificial Sequence
  Synthetic: FXN 3 reverse 9:69040154-69040181; SpCas9
ccacaggagcttattgagtcattt

SEQ ID NO: 32455 - DNA, 23 bp, Artificial Sequence
  Synthetic: FXN 3 reverse 9:69040155-69040181; SpCas9
cacaggagcttattgagtcattt

SEQ ID NO: 32456 - DNA, 22 bp, Artificial Sequence
  Synthetic: FXN 3 reverse 9:69040156-69040181; SpCas9
acaggagcttattgagtcattt

SEQ ID NO: 32457 - DNA, 21 bp, Artificial Sequence
  Synthetic: FXN 3 reverse 9:69040157-69040181; SpCas9
caggagcttattgagtcattt

SEQ ID NO: 32458 - DNA, 20 bp, Artificial Sequence
  Synthetic: FXN 3 reverse 9:69040158-69040181; SpCas9
aggagcttattgagtcattt

SEQ ID NO: 32459 - DNA, 19 bp, Artificial Sequence
  Synthetic: FXN 3 reverse 9:69040159-69040181; SpCas9
ggagcttattgagtcattt

SEQ ID NO: 32460 - DNA, 18 bp, Artificial Sequence
  Synthetic: FXN 3 reverse 9:69040160-69040181; SpCas9
gagcttattgagtcattt

SEQ ID NO: 32461 - DNA, 25 bp, Artificial Sequence
  Synthetic: FXN 3 reverse 9:69040162-69040190; SpCas9
gaagtggatgccacaggagcttatt

SEQ ID NO: 32462 - DNA, 24 bp, Artificial Sequence
  Synthetic: FXN 3 reverse 9:69040163-69040190; SpCas9
aagtggatgccacaggagcttatt

SEQ ID NO: 32463 - DNA, 23 bp, Artificial Sequence
  Synthetic: FXN 3 reverse 9:69040164-69040190; SpCas9
agtggatgccacaggagcttatt

SEQ ID NO: 32464 - DNA, 22 bp, Artificial Sequence
  Synthetic: FXN 3 reverse 9:69040165-69040190; SpCas9
gtggatgccacaggagcttatt

SEQ ID NO: 32465 - DNA, 21 bp, Artificial Sequence
  Synthetic: FXN 3 reverse 9:69040166-69040190; SpCas9
tggatgccacaggagcttatt

SEQ ID NO: 32466 - DNA, 20 bp, Artificial Sequence
  Synthetic: FXN 3 reverse 9:69040167-69040190; SpCas9
ggatgccacaggagcttatt

SEQ ID NO: 32467 - DNA, 19 bp, Artificial Sequence
  Synthetic: FXN 3 reverse 9:69040168-69040190; SpCas9
gatgccacaggagcttatt

SEQ ID NO: 32468 - DNA, 18 bp, Artificial Sequence
  Synthetic: FXN 3 reverse 9:69040169-69040190; SpCas9
atgccacaggagcttatt

SEQ ID NO: 32469 - DNA, 25 bp, Artificial Sequence
  Synthetic: FXN 3 reverse 9:69040171-69040199; SpCas9
aggcatgcagaagtggatgccacag

SEQ ID NO: 32470 - DNA, 24 bp, Artificial Sequence
  Synthetic: FXN 3 reverse 9:69040172-69040199; SpCas9
ggcatgcagaagtggatgccacag

SEQ ID NO: 32471 - DNA, 23 bp, Artificial Sequence
  Synthetic: FXN 3 reverse 9:69040173-69040199; SpCas9
gcatgcagaagtggatgccacag

SEQ ID NO: 32472 - DNA, 22 bp, Artificial Sequence
  Synthetic: FXN 3 reverse 9:69040174-69040199; SpCas9
catgcagaagtggatgccacag

SEQ ID NO: 32473 - DNA, 21 bp, Artificial Sequence
  Synthetic: FXN 3 reverse 9:69040175-69040199; SpCas9
atgcagaagtggatgccacag

SEQ ID NO: 32474 - DNA, 20 bp, Artificial Sequence
  Synthetic: FXN 3 reverse 9:69040176-69040199; SpCas9
tgcagaagtggatgccacag

SEQ ID NO: 32475 - DNA, 19 bp, Artificial Sequence
  Synthetic: FXN 3 reverse 9:69040177-69040199; SpCas9
gcagaagtggatgccacag

SEQ ID NO: 32476 - DNA, 18 bp, Artificial Sequence
  Synthetic: FXN 3 reverse 9:69040178-69040199; SpCas9
cagaagtggatgccacag

SEQ ID NO: 32477 - DNA, 25 bp, Artificial Sequence
  Synthetic: FXN 3 reverse 9:69040173-69040201; SpCas9
caaggcatgcagaagtggatgccac

SEQ ID NO: 32478 - DNA, 24 bp, Artificial Sequence
  Synthetic: FXN 3 reverse 9:69040174-69040201; SpCas9
aaggcatgcagaagtggatgccac

SEQ ID NO: 32479 - DNA, 23 bp, Artificial Sequence
  Synthetic: FXN 3 reverse 9:69040175-69040201; SpCas9
aggcatgcagaagtggatgccac

SEQ ID NO: 32480 - DNA, 22 bp, Artificial Sequence
  Synthetic: FXN 3 reverse 9:69040176-69040201; SpCas9
ggcatgcagaagtggatgccac

SEQ ID NO: 32481 - DNA, 21 bp, Artificial Sequence
  Synthetic: FXN 3 reverse 9:69040177-69040201; SpCas9
gcatgcagaagtggatgccac

SEQ ID NO: 32482 - DNA, 20 bp, Artificial Sequence
  Synthetic: FXN 3 reverse 9:69040178-69040201; SpCas9
catgcagaagtggatgccac

SEQ ID NO: 32483 - DNA, 19 bp, Artificial Sequence
  Synthetic: FXN 3 reverse 9:69040179-69040201; SpCas9
atgcagaagtggatgccac

SEQ ID NO: 32484 - DNA, 18 bp, Artificial Sequence
  Synthetic: FXN 3 reverse 9:69040180-69040201; SpCas9
tgcagaagtggatgccac

SEQ ID NO: 32485 - DNA, 25 bp, Artificial Sequence
  Synthetic: FXN 3 forward 9:69040174-69040202; SpCas9
ctgtggcatccacttctgcatgcct

SEQ ID NO: 32486 - DNA, 24 bp, Artificial Sequence
  Synthetic: FXN 3 forward 9:69040175-69040202; SpCas9
tgtggcatccacttctgcatgcct

SEQ ID NO: 32487 - DNA, 23 bp, Artificial Sequence
  Synthetic: FXN 3 forward 9:69040176-69040202; SpCas9
gtggcatccacttctgcatgcct

SEQ ID NO: 32488 - DNA, 22 bp, Artificial Sequence
  Synthetic: FXN 3 forward 9:69040177-69040202; SpCas9
tggcatccacttctgcatgcct

SEQ ID NO: 32489 - DNA, 21 bp, Artificial Sequence
  Synthetic: FXN 3 forward 9:69040178-69040202; SpCas9
ggcatccacttctgcatgcct

SEQ ID NO: 32490 - DNA, 20 bp, Artificial Sequence
  Synthetic: FXN 3 forward 9:69040179-69040202; SpCas9
gcatccacttctgcatgcct

SEQ ID NO: 32491 - DNA, 19 bp, Artificial Sequence
  Synthetic: FXN 3 forward 9:69040180-69040202; SpCas9
catccacttctgcatgcct

SEQ ID NO: 32492 - DNA, 18 bp, Artificial Sequence
  Synthetic: FXN 3 forward 9:69040181-69040202; SpCas9
atccacttctgcatgcct

SEQ ID NO: 32493 - DNA, 25 bp, Artificial Sequence
  Synthetic: FXN 3 reverse 9:69040174-69040202; SpCas9
ccaaggcatgcagaagtggatgcca

SEQ ID NO: 32494 - DNA, 24 bp, Artificial Sequence
  Synthetic: FXN 3 reverse 9:69040175-69040202; SpCas9
caaggcatgcagaagtggatgcca

SEQ ID NO: 32495 - DNA, 23 bp, Artificial Sequence
  Synthetic: FXN 3 reverse 9:69040176-69040202; SpCas9
aaggcatgcagaagtggatgcca

SEQ ID NO: 32496 - DNA, 22 bp, Artificial Sequence
  Synthetic: FXN 3 reverse 9:69040177-69040202; SpCas9
aggcatgcagaagtggatgcca

SEQ ID NO: 32497 - DNA, 21 bp, Artificial Sequence
  Synthetic: FXN 3 reverse 9:69040178-69040202; SpCas9
ggcatgcagaagtggatgcca

SEQ ID NO: 32498 - DNA, 20 bp, Artificial Sequence
  Synthetic: FXN 3 reverse 9:69040179-69040202; SpCas9
gcatgcagaagtggatgcca

SEQ ID NO: 32499 - DNA, 19 bp, Artificial Sequence
  Synthetic: FXN 3 reverse 9:69040180-69040202; SpCas9
catgcagaagtggatgcca

SEQ ID NO: 32500 - DNA, 18 bp, Artificial Sequence
  Synthetic: FXN 3 reverse 9:69040181-69040202; SpCas9
atgcagaagtggatgcca

SEQ ID NO: 32501 - DNA, 25 bp, Artificial Sequence
  Synthetic: FXN 3 forward 9:69040175-69040203; SpCas9
tgtggcatccacttctgcatgcctt

SEQ ID NO: 32502 - DNA, 24 bp, Artificial Sequence
  Synthetic: FXN 3 forward 9:69040176-69040203; SpCas9
gtggcatccacttctgcatgcctt

SEQ ID NO: 32503 - DNA, 23 bp, Artificial Sequence
  Synthetic: FXN 3 forward 9:69040177-69040203; SpCas9
tggcatccacttctgcatgcctt

SEQ ID NO: 32504 - DNA, 22 bp, Artificial Sequence
  Synthetic: FXN 3 forward 9:69040178-69040203; SpCas9
ggcatccacttctgcatgcctt

SEQ ID NO: 32505 - DNA, 21 bp, Artificial Sequence
  Synthetic: FXN 3 forward 9:69040179-69040203; SpCas9
gcatccacttctgcatgcctt

SEQ ID NO: 32506 - DNA, 20 bp, Artificial Sequence
  Synthetic: FXN 3 forward 9:69040180-69040203; SpCas9
catccacttctgcatgcctt

SEQ ID NO: 32507 - DNA, 19 bp, Artificial Sequence
  Synthetic: FXN 3 forward 9:69040181-69040203; SpCas9
atccacttctgcatgcctt

SEQ ID NO: 32508 - DNA, 18 bp, Artificial Sequence
  Synthetic: FXN 3 forward 9:69040182-69040203; SpCas9
tccacttctgcatgcctt

SEQ ID NO: 32509 - DNA, 25 bp, Artificial Sequence
  Synthetic: FXN 3 forward 9:69040178-69040206; SpCas9
ggcatccacttctgcatgccttggg

SEQ ID NO: 32510 - DNA, 24 bp, Artificial Sequence
  Synthetic: FXN 3 forward 9:69040179-69040206; SpCas9
gcatccacttctgcatgccttggg

SEQ ID NO: 32511 - DNA, 23 bp, Artificial Sequence
  Synthetic: FXN 3 forward 9:69040180-69040206; SpCas9
catccacttctgcatgccttggg

SEQ ID NO: 32512 - DNA, 22 bp, Artificial Sequence
  Synthetic: FXN 3 forward 9:69040181-69040206; SpCas9
atccacttctgcatgccttggg

SEQ ID NO: 32513 - DNA, 21 bp, Artificial Sequence
  Synthetic: FXN 3 forward 9:69040182-69040206; SpCas9
tccacttctgcatgccttggg

SEQ ID NO: 32514 - DNA, 20 bp, Artificial Sequence
  Synthetic: FXN 3 forward 9:69040183-69040206; SpCas9
ccacttctgcatgccttggg

SEQ ID NO: 32515 - DNA, 19 bp, Artificial Sequence
  Synthetic: FXN 3 forward 9:69040184-69040206; SpCas9
cacttctgcatgccttggg

SEQ ID NO: 32516 - DNA, 18 bp, Artificial Sequence
  Synthetic: FXN 3 forward 9:69040185-69040206; SpCas9
acttctgcatgccttggg

SEQ ID NO: 32517 - DNA, 25 bp, Artificial Sequence
  Synthetic: FXN 3 reverse 9:69040183-69040211; SpCas9
aaaagctgcccaaggcatgcagaag

SEQ ID NO: 32518 - DNA, 24 bp, Artificial Sequence
  Synthetic: FXN 3 reverse 9:69040184-69040211; SpCas9
aaagctgcccaaggcatgcagaag

SEQ ID NO: 32519 - DNA, 23 bp, Artificial Sequence
  Synthetic: FXN 3 reverse 9:69040185-69040211; SpCas9
aagctgcccaaggcatgcagaag

SEQ ID NO: 32520 - DNA, 22 bp, Artificial Sequence
  Synthetic: FXN 3 reverse 9:69040186-69040211; SpCas9
agctgcccaaggcatgcagaag

SEQ ID NO: 32521 - DNA, 21 bp, Artificial Sequence
  Synthetic: FXN 3 reverse 9:69040187-69040211; SpCas9
gctgcccaaggcatgcagaag

SEQ ID NO: 32522 - DNA, 20 bp, Artificial Sequence
  Synthetic: FXN 3 reverse 9:69040188-69040211; SpCas9
ctgcccaaggcatgcagaag

SEQ ID NO: 32523 - DNA, 19 bp, Artificial Sequence
  Synthetic: FXN 3 reverse 9:69040189-69040211; SpCas9
tgcccaaggcatgcagaag

SEQ ID NO: 32524 - DNA, 18 bp, Artificial Sequence
  Synthetic: FXN 3 reverse 9:69040190-69040211; SpCas9
gcccaaggcatgcagaag

SEQ ID NO: 32525 - DNA, 25 bp, Artificial Sequence
  Synthetic: FXN 3 forward 9:69040185-69040213; SpCas9
acttctgcatgccttgggcagcttt

SEQ ID NO: 32526 - DNA, 24 bp, Artificial Sequence
  Synthetic: FXN 3 forward 9:69040186-69040213; SpCas9
cttctgcatgccttgggcagcttt

SEQ ID NO: 32527 - DNA, 23 bp, Artificial Sequence
  Synthetic: FXN 3 forward 9:69040187-69040213; SpCas9
ttctgcatgccttgggcagcttt

SEQ ID NO: 32528 - DNA, 22 bp, Artificial Sequence
  Synthetic: FXN 3 forward 9:69040188-69040213; SpCas9
tctgcatgccttgggcagcttt

SEQ ID NO: 32529 - DNA, 21 bp, Artificial Sequence
  Synthetic: FXN 3 forward 9:69040189-69040213; SpCas9
ctgcatgccttgggcagcttt

SEQ ID NO: 32530 - DNA, 20 bp, Artificial Sequence
  Synthetic: FXN 3 forward 9:69040190-69040213; SpCas9
tgcatgccttgggcagcttt

SEQ ID NO: 32531 - DNA, 19 bp, Artificial Sequence
  Synthetic: FXN 3 forward 9:69040191-69040213; SpCas9
gcatgccttgggcagcttt

SEQ ID NO: 32532 - DNA, 18 bp, Artificial Sequence
  Synthetic: FXN 3 forward 9:69040192-69040213; SpCas9
catgccttgggcagcttt

SEQ ID NO: 32533 - DNA, 25 bp, Artificial Sequence
  Synthetic: FXN 3 reverse 9:69040186-69040214; SpCas9
tctaaaagctgcccaaggcatgcag

SEQ ID NO: 32534 - DNA, 24 bp, Artificial Sequence
  Synthetic: FXN 3 reverse 9:69040187-69040214; SpCas9
ctaaaagctgcccaaggcatgcag

SEQ ID NO: 32535 - DNA, 23 bp, Artificial Sequence
  Synthetic: FXN 3 reverse 9:69040188-69040214; SpCas9
taaaagctgcccaaggcatgcag

SEQ ID NO: 32536 - DNA, 22 bp, Artificial Sequence
  Synthetic: FXN 3 reverse 9:69040189-69040214; SpCas9
aaaagctgcccaaggcatgcag

SEQ ID NO: 32537 - DNA, 21 bp, Artificial Sequence
  Synthetic: FXN 3 reverse 9:69040190-69040214; SpCas9
aaagctgcccaaggcatgcag

SEQ ID NO: 32538 - DNA, 20 bp, Artificial Sequence
  Synthetic: FXN 3 reverse 9:69040191-69040214; SpCas9
aagctgcccaaggcatgcag

SEQ ID NO: 32539 - DNA, 19 bp, Artificial Sequence
  Synthetic: FXN 3 reverse 9:69040192-69040214; SpCas9
agctgcccaaggcatgcag

SEQ ID NO: 32540 - DNA, 18 bp, Artificial Sequence
  Synthetic: FXN 3 reverse 9:69040193-69040214; SpCas9
gctgcccaaggcatgcag

SEQ ID NO: 32541 - DNA, 25 bp, Artificial Sequence
  Synthetic: FXN 3 reverse 9:69040189-69040217; SpCas9
atgtctaaaagctgcccaaggcatg

SEQ ID NO: 32542 - DNA, 24 bp, Artificial Sequence
  Synthetic: FXN 3 reverse 9:69040190-69040217; SpCas9
tgtctaaaagctgcccaaggcatg

SEQ ID NO: 32543 - DNA, 23 bp, Artificial Sequence
  Synthetic: FXN 3 reverse 9:69040191-69040217; SpCas9
gtctaaaagctgcccaaggcatg

SEQ ID NO: 32544 - DNA, 22 bp, Artificial Sequence
  Synthetic: FXN 3 reverse 9:69040192-69040217; SpCas9
tctaaaagctgcccaaggcatg

SEQ ID NO: 32545 - DNA, 21 bp, Artificial Sequence
  Synthetic: FXN 3 reverse 9:69040193-69040217; SpCas9
ctaaaagctgcccaaggcatg

SEQ ID NO: 32546 - DNA, 20 bp, Artificial Sequence
  Synthetic: FXN 3 reverse 9:69040194-69040217; SpCas9
taaaagctgcccaaggcatg

SEQ ID NO: 32547 - DNA, 19 bp, Artificial Sequence
  Synthetic: FXN 3 reverse 9:69040195-69040217; SpCas9
aaaagctgcccaaggcatg

SEQ ID NO: 32548 - DNA, 18 bp, Artificial Sequence
  Synthetic: FXN 3 reverse 9:69040196-69040217; SpCas9
aaagctgcccaaggcatg

SEQ ID NO: 32549 - DNA, 25 bp, Artificial Sequence
  Synthetic: FXN 3 reverse 9:69040196-69040224; SpCas9
tggacagatgtctaaaagctgccca

SEQ ID NO: 32550 - DNA, 24 bp, Artificial Sequence
  Synthetic: FXN 3 reverse 9:69040197-69040224; SpCas9
ggacagatgtctaaaagctgccca

SEQ ID NO: 32551 - DNA, 23 bp, Artificial Sequence
  Synthetic: FXN 3 reverse 9:69040198-69040224; SpCas9
gacagatgtctaaaagctgccca

SEQ ID NO: 32552 - DNA, 22 bp, Artificial Sequence
  Synthetic: FXN 3 reverse 9:69040199-69040224; SpCas9
acagatgtctaaaagctgccca

SEQ ID NO: 32553 - DNA, 21 bp, Artificial Sequence
  Synthetic: FXN 3 reverse 9:69040200-69040224; SpCas9
cagatgtctaaaagctgccca

SEQ ID NO: 32554 - DNA, 20 bp, Artificial Sequence
  Synthetic: FXN 3 reverse 9:69040201-69040224; SpCas9
agatgtctaaaagctgccca

SEQ ID NO: 32555 - DNA, 19 bp, Artificial Sequence
  Synthetic: FXN 3 reverse 9:69040202-69040224; SpCas9
gatgtctaaaagctgccca

SEQ ID NO: 32556 - DNA, 18 bp, Artificial Sequence
  Synthetic: FXN 3 reverse 9:69040203-69040224; SpCas9
atgtctaaaagctgccca

SEQ ID NO: 32557 - DNA, 25 bp, Artificial Sequence
  Synthetic: FXN 3 reverse 9:69040197-69040225; SpCas9
atggacagatgtctaaaagctgccc

SEQ ID NO: 32558 - DNA, 24 bp, Artificial Sequence
  Synthetic: FXN 3 reverse 9:69040198-69040225; SpCas9
tggacagatgtctaaaagctgccc

SEQ ID NO: 32559 - DNA, 23 bp, Artificial Sequence
  Synthetic: FXN 3 reverse 9:69040199-69040225; SpCas9
ggacagatgtctaaaagctgccc

SEQ ID NO: 32560 - DNA, 22 bp, Artificial Sequence
  Synthetic: FXN 3 reverse 9:69040200-69040225; SpCas9
gacagatgtctaaaagctgccc

SEQ ID NO: 32561 - DNA, 21 bp, Artificial Sequence
  Synthetic: FXN 3 reverse 9:69040201-69040225; SpCas9
acagatgtctaaaagctgccc

SEQ ID NO: 32562 - DNA, 20 bp, Artificial Sequence
  Synthetic: FXN 3 reverse 9:69040202-69040225; SpCas9
cagatgtctaaaagctgccc

SEQ ID NO: 32563 - DNA, 19 bp, Artificial Sequence
  Synthetic: FXN 3 reverse 9:69040203-69040225; SpCas9
agatgtctaaaagctgccc

SEQ ID NO: 32564 - DNA, 18 bp, Artificial Sequence
  Synthetic: FXN 3 reverse 9:69040204-69040225; SpCas9
gatgtctaaaagctgccc

SEQ ID NO: 32565 - DNA, 25 bp, Artificial Sequence
  Synthetic: FXN 3 forward 9:69040205-69040233; SpCas9
gcttttagacatctgtccattttcc

SEQ ID NO: 32566 - DNA, 24 bp, Artificial Sequence
  Synthetic: FXN 3 forward 9:69040206-69040233; SpCas9
cttttagacatctgtccattttcc

SEQ ID NO: 32567 - DNA, 23 bp, Artificial Sequence
  Synthetic: FXN 3 forward 9:69040207-69040233; SpCas9
ttttagacatctgtccattttcc

SEQ ID NO: 32568 - DNA, 22 bp, Artificial Sequence
  Synthetic: FXN 3 forward 9:69040208-69040233; SpCas9
tttagacatctgtccattttcc

SEQ ID NO: 32569 - DNA, 21 bp, Artificial Sequence
  Synthetic: FXN 3 forward 9:69040209-69040233; SpCas9
ttagacatctgtccattttcc

SEQ ID NO: 32570 - DNA, 20 bp, Artificial Sequence
  Synthetic: FXN 3 forward 9:69040210-69040233; SpCas9
tagacatctgtccattttcc

SEQ ID NO: 32571 - DNA, 19 bp, Artificial Sequence
  Synthetic: FXN 3 forward 9:69040211-69040233; SpCas9
agacatctgtccattttcc

SEQ ID NO: 32572 - DNA, 18 bp, Artificial Sequence
  Synthetic: FXN 3 forward 9:69040212-69040233; SpCas9
gacatctgtccattttcc

SEQ ID NO: 32573 - DNA, 25 bp, Artificial Sequence
  Synthetic: FXN 3 reverse 9:69040206-69040234; SpCas9
tctaggaaaatggacagatgtctaa

SEQ ID NO: 32574 - DNA, 24 bp, Artificial Sequence
  Synthetic: FXN 3 reverse 9:69040207-69040234; SpCas9
ctaggaaaatggacagatgtctaa

SEQ ID NO: 32575 - DNA, 23 bp, Artificial Sequence
  Synthetic: FXN 3 reverse 9:69040208-69040234; SpCas9
taggaaaatggacagatgtctaa

SEQ ID NO: 32576 - DNA, 22 bp, Artificial Sequence
  Synthetic: FXN 3 reverse 9:69040209-69040234; SpCas9
aggaaaatggacagatgtctaa

SEQ ID NO: 32577 - DNA, 21 bp, Artificial Sequence
  Synthetic: FXN 3 reverse 9:69040210-69040234; SpCas9
ggaaaatggacagatgtctaa

SEQ ID NO: 32578 - DNA, 20 bp, Artificial Sequence
  Synthetic: FXN 3 reverse 9:69040211-69040234; SpCas9
gaaaatggacagatgtctaa

SEQ ID NO: 32579 - DNA, 19 bp, Artificial Sequence
  Synthetic: FXN 3 reverse 9:69040212-69040234; SpCas9
aaaatggacagatgtctaa

SEQ ID NO: 32580 - DNA, 18 bp, Artificial Sequence
  Synthetic: FXN 3 reverse 9:69040213-69040234; SpCas9
aaatggacagatgtctaa

SEQ ID NO: 32581 - DNA, 25 bp, Artificial Sequence
  Synthetic: FXN 3 forward 9:69040207-69040235; SpCas9
ttttagacatctgtccattttccta

SEQ ID NO: 32582 - DNA, 24 bp, Artificial Sequence
  Synthetic: FXN 3 forward 9:69040208-69040235; SpCas9
tttagacatctgtccattttccta

SEQ ID NO: 32583 - DNA, 23 bp, Artificial Sequence
  Synthetic: FXN 3 forward 9:69040209-69040235; SpCas9
ttagacatctgtccattttccta

SEQ ID NO: 32584 - DNA, 22 bp, Artificial Sequence
  Synthetic: FXN 3 forward 9:69040210-69040235; SpCas9
tagacatctgtccattttccta

SEQ ID NO: 32585 - DNA, 21 bp, Artificial Sequence
  Synthetic: FXN 3 forward 9:69040211-69040235; SpCas9
agacatctgtccattttccta

SEQ ID NO: 32586 - DNA, 20 bp, Artificial Sequence
  Synthetic: FXN 3 forward 9:69040212-69040235; SpCas9
gacatctgtccattttccta

SEQ ID NO: 32587 - DNA, 19 bp, Artificial Sequence
  Synthetic: FXN 3 forward 9:69040213-69040235; SpCas9
acatctgtccattttccta

SEQ ID NO: 32588 - DNA, 18 bp, Artificial Sequence
  Synthetic: FXN 3 forward 9:69040214-69040235; SpCas9
catctgtccattttccta

SEQ ID NO: 32589 - DNA, 25 bp, Artificial Sequence
  Synthetic: FXN 3 forward 9:69040208-69040236; SpCas9
tttagacatctgtccattttcctag

SEQ ID NO: 32590 - DNA, 24 bp, Artificial Sequence
  Synthetic: FXN 3 forward 9:69040209-69040236; SpCas9
ttagacatctgtccattttcctag

SEQ ID NO: 32591 - DNA, 23 bp, Artificial Sequence
  Synthetic: FXN 3 forward 9:69040210-69040236; SpCas9
tagacatctgtccattttcctag

SEQ ID NO: 32592 - DNA, 22 bp, Artificial Sequence
  Synthetic: FXN 3 forward 9:69040211-69040236; SpCas9
agacatctgtccattttcctag

SEQ ID NO: 32593 - DNA, 21 bp, Artificial Sequence
  Synthetic: FXN 3 forward 9:69040212-69040236; SpCas9
gacatctgtccattttcctag

SEQ ID NO: 32594 - DNA, 20 bp, Artificial Sequence
  Synthetic: FXN 3 forward 9:69040213-69040236; SpCas9
acatctgtccattttcctag

SEQ ID NO: 32595 - DNA, 19 bp, Artificial Sequence
  Synthetic: FXN 3 forward 9:69040214-69040236; SpCas9
catctgtccattttcctag

SEQ ID NO: 32596 - DNA, 18 bp, Artificial Sequence
  Synthetic: FXN 3 forward 9:69040215-69040236; SpCas9
atctgtccattttcctag

SEQ ID NO: 32597 - DNA, 25 bp, Artificial Sequence
  Synthetic: FXN 3 forward 9:69040209-69040237; SpCas9
ttagacatctgtccattttcctaga

SEQ ID NO: 32598 - DNA, 24 bp, Artificial Sequence
  Synthetic: FXN 3 forward 9:69040210-69040237; SpCas9
tagacatctgtccattttcctaga

SEQ ID NO: 32599 - DNA, 23 bp, Artificial Sequence
  Synthetic: FXN 3 forward 9:69040211-69040237; SpCas9
agacatctgtccattttcctaga

SEQ ID NO: 32600 - DNA, 22 bp, Artificial Sequence
  Synthetic: FXN 3 forward 9:69040212-69040237; SpCas9
gacatctgtccattttcctaga

SEQ ID NO: 32601 - DNA, 21 bp, Artificial Sequence
  Synthetic: FXN 3 forward 9:69040213-69040237; SpCas9
acatctgtccattttcctaga

SEQ ID NO: 32602 - DNA, 20 bp, Artificial Sequence
  Synthetic: FXN 3 forward 9:69040214-69040237; SpCas9
catctgtccattttcctaga

SEQ ID NO: 32603 - DNA, 19 bp, Artificial Sequence
  Synthetic: FXN 3 forward 9:69040215-69040237; SpCas9
atctgtccattttcctaga

SEQ ID NO: 32604 - DNA, 18 bp, Artificial Sequence
  Synthetic: FXN 3 forward 9:69040216-69040237; SpCas9
tctgtccattttcctaga

SEQ ID NO: 32605 - DNA, 25 bp, Artificial Sequence
  Synthetic: FXN 3 forward 9:69040214-69040242; SpCas9
catctgtccattttcctagagggac

SEQ ID NO: 32606 - DNA, 24 bp, Artificial Sequence
  Synthetic: FXN 3 forward 9:69040215-69040242; SpCas9
atctgtccattttcctagagggac

SEQ ID NO: 32607 - DNA, 23 bp, Artificial Sequence
  Synthetic: FXN 3 forward 9:69040216-69040242; SpCas9
tctgtccattttcctagagggac

SEQ ID NO: 32608 - DNA, 22 bp, Artificial Sequence
  Synthetic: FXN 3 forward 9:69040217-69040242; SpCas9
ctgtccattttcctagagggac

SEQ ID NO: 32609 - DNA, 21 bp, Artificial Sequence
  Synthetic: FXN 3 forward 9:69040218-69040242; SpCas9
tgtccattttcctagagggac

SEQ ID NO: 32610 - DNA, 20 bp, Artificial Sequence
  Synthetic: FXN 3 forward 9:69040219-69040242; SpCas9
gtccattttcctagagggac

SEQ ID NO: 32611 - DNA, 19 bp, Artificial Sequence
  Synthetic: FXN 3 forward 9:69040220-69040242; SpCas9
tccattttcctagagggac

SEQ ID NO: 32612 - DNA, 18 bp, Artificial Sequence
  Synthetic: FXN 3 forward 9:69040221-69040242; SpCas9
ccattttcctagagggac

SEQ ID NO: 32613 - DNA, 25 bp, Artificial Sequence
  Synthetic: FXN 3 reverse 9:69040217-69040245; SpCas9
ggtcttgtccctctaggaaaatgga

SEQ ID NO: 32614 - DNA, 24 bp, Artificial Sequence
  Synthetic: FXN 3 reverse 9:69040218-69040245; SpCas9
gtcttgtccctctaggaaaatgga

SEQ ID NO: 32615 - DNA, 23 bp, Artificial Sequence
  Synthetic: FXN 3 reverse 9:69040219-69040245; SpCas9
tcttgtccctctaggaaaatgga

SEQ ID NO: 32616 - DNA, 22 bp, Artificial Sequence
  Synthetic: FXN 3 reverse 9:69040220-69040245; SpCas9
cttgtccctctaggaaaatgga

SEQ ID NO: 32617 - DNA, 21 bp, Artificial Sequence
  Synthetic: FXN 3 reverse 9:69040221-69040245; SpCas9
ttgtccctctaggaaaatgga

SEQ ID NO: 32618 - DNA, 20 bp, Artificial Sequence
  Synthetic: FXN 3 reverse 9:69040222-69040245; SpCas9
tgtccctctaggaaaatgga

SEQ ID NO: 32619 - DNA, 19 bp, Artificial Sequence
  Synthetic: FXN 3 reverse 9:69040223-69040245; SpCas9
gtccctctaggaaaatgga

SEQ ID NO: 32620 - DNA, 18 bp, Artificial Sequence
  Synthetic: FXN 3 reverse 9:69040224-69040245; SpCas9
tccctctaggaaaatgga

SEQ ID NO: 32621 - DNA, 25 bp, Artificial Sequence
  Synthetic: FXN 3 reverse 9:69040221-69040249; SpCas9
tggtggtcttgtccctctaggaaaa

SEQ ID NO: 32622 - DNA, 24 bp, Artificial Sequence
  Synthetic: FXN 3 reverse 9:69040222-69040249; SpCas9
ggtggtcttgtccctctaggaaaa

SEQ ID NO: 32623 - DNA, 23 bp, Artificial Sequence
  Synthetic: FXN 3 reverse 9:69040223-69040249; SpCas9
gtggtcttgtccctctaggaaaa

SEQ ID NO: 32624 - DNA, 22 bp, Artificial Sequence
  Synthetic: FXN 3 reverse 9:69040224-69040249; SpCas9
tggtcttgtccctctaggaaaa

SEQ ID NO: 32625 - DNA, 21 bp, Artificial Sequence
  Synthetic: FXN 3 reverse 9:69040225-69040249; SpCas9
ggtcttgtccctctaggaaaa

SEQ ID NO: 32626 - DNA, 20 bp, Artificial Sequence
  Synthetic: FXN 3 reverse 9:69040226-69040249; SpCas9
gtcttgtccctctaggaaaa

SEQ ID NO: 32627 - DNA, 19 bp, Artificial Sequence
  Synthetic: FXN 3 reverse 9:69040227-69040249; SpCas9
tcttgtccctctaggaaaa

SEQ ID NO: 32628 - DNA, 18 bp, Artificial Sequence
  Synthetic: FXN 3 reverse 9:69040228-69040249; SpCas9
cttgtccctctaggaaaa

SEQ ID NO: 32629 - DNA, 25 bp, Artificial Sequence
  Synthetic: FXN 3 reverse 9:69040228-69040256; SpCas9
tcacaggtggtggtcttgtccctct

SEQ ID NO: 32630 - DNA, 24 bp, Artificial Sequence
  Synthetic: FXN 3 reverse 9:69040229-69040256; SpCas9
cacaggtggtggtcttgtccctct

SEQ ID NO: 32631 - DNA, 23 bp, Artificial Sequence
  Synthetic: FXN 3 reverse 9:69040230-69040256; SpCas9
acaggtggtggtcttgtccctct

SEQ ID NO: 32632 - DNA, 22 bp, Artificial Sequence
  Synthetic: FXN 3 reverse 9:69040231-69040256; SpCas9
caggtggtggtcttgtccctct

SEQ ID NO: 32633 - DNA, 21 bp, Artificial Sequence
  Synthetic: FXN 3 reverse 9:69040232-69040256; SpCas9
aggtggtggtcttgtccctct

SEQ ID NO: 32634 - DNA, 20 bp, Artificial Sequence
  Synthetic: FXN 3 reverse 9:69040233-69040256; SpCas9
ggtggtggtcttgtccctct

SEQ ID NO: 32635 - DNA, 19 bp, Artificial Sequence
  Synthetic: FXN 3 reverse 9:69040234-69040256; SpCas9
gtggtggtcttgtccctct

SEQ ID NO: 32636 - DNA, 18 bp, Artificial Sequence
  Synthetic: FXN 3 reverse 9:69040235-69040256; SpCas9
tggtggtcttgtccctct

SEQ ID NO: 32637 - DNA, 25 bp, Artificial Sequence
  Synthetic: FXN 3 reverse 9:69040229-69040257; SpCas9
atcacaggtggtggtcttgtccctc

SEQ ID NO: 32638 - DNA, 24 bp, Artificial Sequence
  Synthetic: FXN 3 reverse 9:69040230-69040257; SpCas9
tcacaggtggtggtcttgtccctc

SEQ ID NO: 32639 - DNA, 23 bp, Artificial Sequence
  Synthetic: FXN 3 reverse 9:69040231-69040257; SpCas9
cacaggtggtggtcttgtccctc

SEQ ID NO: 32640 - DNA, 22 bp, Artificial Sequence
  Synthetic: FXN 3 reverse 9:69040232-69040257; SpCas9
acaggtggtggtcttgtccctc

SEQ ID NO: 32641 - DNA, 21 bp, Artificial Sequence
  Synthetic: FXN 3 reverse 9:69040233-69040257; SpCas9
caggtggtggtcttgtccctc

SEQ ID NO: 32642 - DNA, 20 bp, Artificial Sequence
  Synthetic: FXN 3 reverse 9:69040234-69040257; SpCas9
aggtggtggtcttgtccctc

SEQ ID NO: 32643 - DNA, 19 bp, Artificial Sequence
  Synthetic: FXN 3 reverse 9:69040235-69040257; SpCas9
ggtggtggtcttgtccctc

SEQ ID NO: 32644 - DNA, 18 bp, Artificial Sequence
  Synthetic: FXN 3 reverse 9:69040236-69040257; SpCas9
gtggtggtcttgtccctc

SEQ ID NO: 32645 - DNA, 25 bp, Artificial Sequence
  Synthetic: FXN 3 reverse 9:69040243-69040271; SpCas9
caaaaggtcataggatcacaggtgg

SEQ ID NO: 32646 - DNA, 24 bp, Artificial Sequence
  Synthetic: FXN 3 reverse 9:69040244-69040271; SpCas9
aaaaggtcataggatcacaggtgg

SEQ ID NO: 32647 - DNA, 23 bp, Artificial Sequence
  Synthetic: FXN 3 reverse 9:69040245-69040271; SpCas9
aaaggtcataggatcacaggtgg

SEQ ID NO: 32648 - DNA, 22 bp, Artificial Sequence
  Synthetic: FXN 3 reverse 9:69040246-69040271; SpCas9
aaggtcataggatcacaggtgg

SEQ ID NO: 32649 - DNA, 21 bp, Artificial Sequence
  Synthetic: FXN 3 reverse 9:69040247-69040271; SpCas9
aggtcataggatcacaggtgg

SEQ ID NO: 32650 - DNA, 20 bp, Artificial Sequence
  Synthetic: FXN 3 reverse 9:69040248-69040271; SpCas9
ggtcataggatcacaggtgg

SEQ ID NO: 32651 - DNA, 19 bp, Artificial Sequence
  Synthetic: FXN 3 reverse 9:69040249-69040271; SpCas9
gtcataggatcacaggtgg

SEQ ID NO: 32652 - DNA, 18 bp, Artificial Sequence
  Synthetic: FXN 3 reverse 9:69040250-69040271; SpCas9
tcataggatcacaggtgg

SEQ ID NO: 32653 - DNA, 25 bp, Artificial Sequence
  Synthetic: FXN 3 forward 9:69040244-69040272; SpCas9
caccacctgtgatcctatgaccttt

SEQ ID NO: 32654 - DNA, 24 bp, Artificial Sequence
  Synthetic: FXN 3 forward 9:69040245-69040272; SpCas9
accacctgtgatcctatgaccttt

SEQ ID NO: 32655 - DNA, 23 bp, Artificial Sequence
  Synthetic: FXN 3 forward 9:69040246-69040272; SpCas9
ccacctgtgatcctatgaccttt

SEQ ID NO: 32656 - DNA, 22 bp, Artificial Sequence
  Synthetic: FXN 3 forward 9:69040247-69040272; SpCas9
cacctgtgatcctatgaccttt

SEQ ID NO: 32657 - DNA, 21 bp, Artificial Sequence
  Synthetic: FXN 3 forward 9:69040248-69040272; SpCas9
acctgtgatcctatgaccttt

SEQ ID NO: 32658 - DNA, 20 bp, Artificial Sequence
  Synthetic: FXN 3 forward 9:69040249-69040272; SpCas9
cctgtgatcctatgaccttt

SEQ ID NO: 32659 - DNA, 19 bp, Artificial Sequence
  Synthetic: FXN 3 forward 9:69040250-69040272; SpCas9
ctgtgatcctatgaccttt

SEQ ID NO: 32660 - DNA, 18 bp, Artificial Sequence
  Synthetic: FXN 3 forward 9:69040251-69040272; SpCas9
tgtgatcctatgaccttt

SEQ ID NO: 32661 - DNA, 25 bp, Artificial Sequence
  Synthetic: FXN 3 reverse 9:69040246-69040274; SpCas9
agccaaaaggtcataggatcacagg

SEQ ID NO: 32662 - DNA, 24 bp, Artificial Sequence
  Synthetic: FXN 3 reverse 9:69040247-69040274; SpCas9
gccaaaaggtcataggatcacagg

SEQ ID NO: 32663 - DNA, 23 bp, Artificial Sequence
  Synthetic: FXN 3 reverse 9:69040248-69040274; SpCas9
ccaaaaggtcataggatcacagg

SEQ ID NO: 32664 - DNA, 22 bp, Artificial Sequence
  Synthetic: FXN 3 reverse 9:69040249-69040274; SpCas9
caaaaggtcataggatcacagg

SEQ ID NO: 32665 - DNA, 21 bp, Artificial Sequence
  Synthetic: FXN 3 reverse 9:69040250-69040274; SpCas9
aaaaggtcataggatcacagg

SEQ ID NO: 32666 - DNA, 20 bp, Artificial Sequence
  Synthetic: FXN 3 reverse 9:69040251-69040274; SpCas9
aaaggtcataggatcacagg

SEQ ID NO: 32667 - DNA, 19 bp, Artificial Sequence
  Synthetic: FXN 3 reverse 9:69040252-69040274; SpCas9
aaggtcataggatcacagg

SEQ ID NO: 32668 - DNA, 18 bp, Artificial Sequence
  Synthetic: FXN 3 reverse 9:69040253-69040274; SpCas9
aggtcataggatcacagg

SEQ ID NO: 32669 - DNA, 25 bp, Artificial Sequence
  Synthetic: FXN 3 reverse 9:69040249-69040277; SpCas9
taaagccaaaaggtcataggatcac

SEQ ID NO: 32670 - DNA, 24 bp, Artificial Sequence
  Synthetic: FXN 3 reverse 9:69040250-69040277; SpCas9
aaagccaaaaggtcataggatcac

SEQ ID NO: 32671 - DNA, 23 bp, Artificial Sequence
  Synthetic: FXN 3 reverse 9:69040251-69040277; SpCas9
aagccaaaaggtcataggatcac

SEQ ID NO: 32672 - DNA, 22 bp, Artificial Sequence
  Synthetic: FXN 3 reverse 9:69040252-69040277; SpCas9
agccaaaaggtcataggatcac

SEQ ID NO: 32673 - DNA, 21 bp, Artificial Sequence
  Synthetic: FXN 3 reverse 9:69040253-69040277; SpCas9
gccaaaaggtcataggatcac

SEQ ID NO: 32674 - DNA, 20 bp, Artificial Sequence
  Synthetic: FXN 3 reverse 9:69040254-69040277; SpCas9
ccaaaaggtcataggatcac

SEQ ID NO: 32675 - DNA, 19 bp, Artificial Sequence
  Synthetic: FXN 3 reverse 9:69040255-69040277; SpCas9
caaaaggtcataggatcac

SEQ ID NO: 32676 - DNA, 18 bp, Artificial Sequence
  Synthetic: FXN 3 reverse 9:69040256-69040277; SpCas9
aaaaggtcataggatcac

SEQ ID NO: 32677 - DNA, 25 bp, Artificial Sequence
  Synthetic: FXN 3 forward 9:69040250-69040278; SpCas9
ctgtgatcctatgaccttttggctt

SEQ ID NO: 32678 - DNA, 24 bp, Artificial Sequence
  Synthetic: FXN 3 forward 9:69040251-69040278; SpCas9
tgtgatcctatgaccttttggctt

SEQ ID NO: 32679 - DNA, 23 bp, Artificial Sequence
  Synthetic: FXN 3 forward 9:69040252-69040278; SpCas9
gtgatcctatgaccttttggctt

SEQ ID NO: 32680 - DNA, 22 bp, Artificial Sequence
  Synthetic: FXN 3 forward 9:69040253-69040278; SpCas9
tgatcctatgaccttttggctt

SEQ ID NO: 32681 - DNA, 21 bp, Artificial Sequence
  Synthetic: FXN 3 forward 9:69040254-69040278; SpCas9
gatcctatgaccttttggctt

SEQ ID NO: 32682 - DNA, 20 bp, Artificial Sequence
  Synthetic: FXN 3 forward 9:69040255-69040278; SpCas9
atcctatgaccttttggctt

SEQ ID NO: 32683 - DNA, 19 bp, Artificial Sequence
  Synthetic: FXN 3 forward 9:69040256-69040278; SpCas9
tcctatgaccttttggctt

SEQ ID NO: 32684 - DNA, 18 bp, Artificial Sequence
  Synthetic: FXN 3 forward 9:69040257-69040278; SpCas9
cctatgaccttttggctt

SEQ ID NO: 32685 - DNA, 25 bp, Artificial Sequence
  Synthetic: FXN 3 reverse 9:69040250-69040278; SpCas9
ctaaagccaaaaggtcataggatca

SEQ ID NO: 32686 - DNA, 24 bp, Artificial Sequence
  Synthetic: FXN 3 reverse 9:69040251-69040278; SpCas9
taaagccaaaaggtcataggatca

SEQ ID NO: 32687 - DNA, 23 bp, Artificial Sequence
  Synthetic: FXN 3 reverse 9:69040252-69040278; SpCas9
aaagccaaaaggtcataggatca

SEQ ID NO: 32688 - DNA, 22 bp, Artificial Sequence
  Synthetic: FXN 3 reverse 9:69040253-69040278; SpCas9
aagccaaaaggtcataggatca

SEQ ID NO: 32689 - DNA, 21 bp, Artificial Sequence
  Synthetic: FXN 3 reverse 9:69040254-69040278; SpCas9
agccaaaaggtcataggatca

SEQ ID NO: 32690 - DNA, 20 bp, Artificial Sequence
  Synthetic: FXN 3 reverse 9:69040255-69040278; SpCas9
gccaaaaggtcataggatca

SEQ ID NO: 32691 - DNA, 19 bp, Artificial Sequence
  Synthetic: FXN 3 reverse 9:69040256-69040278; SpCas9
ccaaaaggtcataggatca

SEQ ID NO: 32692 - DNA, 18 bp, Artificial Sequence
  Synthetic: FXN 3 reverse 9:69040257-69040278; SpCas9
caaaaggtcataggatca

SEQ ID NO: 32693 - DNA, 25 bp, Artificial Sequence
  Synthetic: FXN 3 forward 9:69040251-69040279; SpCas9
tgtgatcctatgaccttttggcttt

SEQ ID NO: 32694 - DNA, 24 bp, Artificial Sequence
  Synthetic: FXN 3 forward 9:69040252-69040279; SpCas9
gtgatcctatgaccttttggcttt

SEQ ID NO: 32695 - DNA, 23 bp, Artificial Sequence
  Synthetic: FXN 3 forward 9:69040253-69040279; SpCas9
tgatcctatgaccttttggcttt

SEQ ID NO: 32696 - DNA, 22 bp, Artificial Sequence
  Synthetic: FXN 3 forward 9:69040254-69040279; SpCas9
gatcctatgaccttttggcttt

SEQ ID NO: 32697 - DNA, 21 bp, Artificial Sequence
  Synthetic: FXN 3 forward 9:69040255-69040279; SpCas9
atcctatgaccttttggcttt

SEQ ID NO: 32698 - DNA, 20 bp, Artificial Sequence
  Synthetic: FXN 3 forward 9:69040256-69040279; SpCas9
tcctatgaccttttggcttt

SEQ ID NO: 32699 - DNA, 19 bp, Artificial Sequence
  Synthetic: FXN 3 forward 9:69040257-69040279; SpCas9
cctatgaccttttggcttt

SEQ ID NO: 32700 - DNA, 18 bp, Artificial Sequence
  Synthetic: FXN 3 forward 9:69040258-69040279; SpCas9
ctatgaccttttggcttt

SEQ ID NO: 32701 - DNA, 25 bp, Artificial Sequence
  Synthetic: FXN 3 reverse 9:69040257-69040285; SpCas9
gttaggcctaaagccaaaaggtcat

SEQ ID NO: 32702 - DNA, 24 bp, Artificial Sequence
  Synthetic: FXN 3 reverse 9:69040258-69040285; SpCas9
ttaggcctaaagccaaaaggtcat

SEQ ID NO: 32703 - DNA, 23 bp, Artificial Sequence
  Synthetic: FXN 3 reverse 9:69040259-69040285; SpCas9
taggcctaaagccaaaaggtcat

SEQ ID NO: 32704 - DNA, 22 bp, Artificial Sequence
  Synthetic: FXN 3 reverse 9:69040260-69040285; SpCas9
aggcctaaagccaaaaggtcat

SEQ ID NO: 32705 - DNA, 21 bp, Artificial Sequence
  Synthetic: FXN 3 reverse 9:69040261-69040285; SpCas9
ggcctaaagccaaaaggtcat

SEQ ID NO: 32706 - DNA, 20 bp, Artificial Sequence
  Synthetic: FXN 3 reverse 9:69040262-69040285; SpCas9
gcctaaagccaaaaggtcat

SEQ ID NO: 32707 - DNA, 19 bp, Artificial Sequence
  Synthetic: FXN 3 reverse 9:69040263-69040285; SpCas9
cctaaagccaaaaggtcat

SEQ ID NO: 32708 - DNA, 18 bp, Artificial Sequence
  Synthetic: FXN 3 reverse 9:69040264-69040285; SpCas9
ctaaagccaaaaggtcat

SEQ ID NO: 32709 - DNA, 25 bp, Artificial Sequence
  Synthetic: FXN 3 reverse 9:69040258-69040286; SpCas9
tgttaggcctaaagccaaaaggtca

SEQ ID NO: 32710 - DNA, 24 bp, Artificial Sequence
  Synthetic: FXN 3 reverse 9:69040259-69040286; SpCas9
gttaggcctaaagccaaaaggtca

SEQ ID NO: 32711 - DNA, 23 bp, Artificial Sequence
  Synthetic: FXN 3 reverse 9:69040260-69040286; SpCas9
ttaggcctaaagccaaaaggtca

SEQ ID NO: 32712 - DNA, 22 bp, Artificial Sequence
  Synthetic: FXN 3 reverse 9:69040261-69040286; SpCas9
taggcctaaagccaaaaggtca

SEQ ID NO: 32713 - DNA, 21 bp, Artificial Sequence
  Synthetic: FXN 3 reverse 9:69040262-69040286; SpCas9
aggcctaaagccaaaaggtca

SEQ ID NO: 32714 - DNA, 20 bp, Artificial Sequence
  Synthetic: FXN 3 reverse 9:69040263-69040286; SpCas9
ggcctaaagccaaaaggtca

SEQ ID NO: 32715 - DNA, 19 bp, Artificial Sequence
  Synthetic: FXN 3 reverse 9:69040264-69040286; SpCas9
gcctaaagccaaaaggtca

SEQ ID NO: 32716 - DNA, 18 bp, Artificial Sequence
  Synthetic: FXN 3 reverse 9:69040265-69040286; SpCas9
cctaaagccaaaaggtca

SEQ ID NO: 32717 - DNA, 25 bp, Artificial Sequence
  Synthetic: FXN 3 forward 9:69040260-69040288; SpCas9
atgaccttttggctttaggcctaac

SEQ ID NO: 32718 - DNA, 24 bp, Artificial Sequence
  Synthetic: FXN 3 forward 9:69040261-69040288; SpCas9
tgaccttttggctttaggcctaac

SEQ ID NO: 32719 - DNA, 23 bp, Artificial Sequence
  Synthetic: FXN 3 forward 9:69040262-69040288; SpCas9
gaccttttggctttaggcctaac

SEQ ID NO: 32720 - DNA, 22 bp, Artificial Sequence
  Synthetic: FXN 3 forward 9:69040263-69040288; SpCas9
accttttggctttaggcctaac

SEQ ID NO: 32721 - DNA, 21 bp, Artificial Sequence
  Synthetic: FXN 3 forward 9:69040264-69040288; SpCas9
ccttttggctttaggcctaac

SEQ ID NO: 32722 - DNA, 20 bp, Artificial Sequence
  Synthetic: FXN 3 forward 9:69040265-69040288; SpCas9
cttttggctttaggcctaac

SEQ ID NO: 32723 - DNA, 19 bp, Artificial Sequence
  Synthetic: FXN 3 forward 9:69040266-69040288; SpCas9
ttttggctttaggcctaac

SEQ ID NO: 32724 - DNA, 18 bp, Artificial Sequence
  Synthetic: FXN 3 forward 9:69040267-69040288; SpCas9
tttggctttaggcctaac

SEQ ID NO: 32725 - DNA, 25 bp, Artificial Sequence
  Synthetic: FXN 3 forward 9:69040263-69040291; SpCas9
accttttggctttaggcctaacaag

SEQ ID NO: 32726 - DNA, 24 bp, Artificial Sequence
  Synthetic: FXN 3 forward 9:69040264-69040291; SpCas9
ccttttggctttaggcctaacaag

SEQ ID NO: 32727 - DNA, 23 bp, Artificial Sequence
  Synthetic: FXN 3 forward 9:69040265-69040291; SpCas9
cttttggctttaggcctaacaag

SEQ ID NO: 32728 - DNA, 22 bp, Artificial Sequence
  Synthetic: FXN 3 forward 9:69040266-69040291; SpCas9
ttttggctttaggcctaacaag

SEQ ID NO: 32729 - DNA, 21 bp, Artificial Sequence
  Synthetic: FXN 3 forward 9:69040267-69040291; SpCas9
tttggctttaggcctaacaag

SEQ ID NO: 32730 - DNA, 20 bp, Artificial Sequence
  Synthetic: FXN 3 forward 9:69040268-69040291; SpCas9
ttggctttaggcctaacaag

SEQ ID NO: 32731 - DNA, 19 bp, Artificial Sequence
  Synthetic: FXN 3 forward 9:69040269-69040291; SpCas9
tggctttaggcctaacaag

SEQ ID NO: 32732 - DNA, 18 bp, Artificial Sequence
  Synthetic: FXN 3 forward 9:69040270-69040291; SpCas9
ggctttaggcctaacaag

SEQ ID NO: 32733 - DNA, 25 bp, Artificial Sequence
  Synthetic: FXN 3 forward 9:69040264-69040292; SpCas9
ccttttggctttaggcctaacaagc

SEQ ID NO: 32734 - DNA, 24 bp, Artificial Sequence
  Synthetic: FXN 3 forward 9:69040265-69040292; SpCas9
cttttggctttaggcctaacaagc

SEQ ID NO: 32735 - DNA, 23 bp, Artificial Sequence
  Synthetic: FXN 3 forward 9:69040266-69040292; SpCas9
ttttggctttaggcctaacaagc

SEQ ID NO: 32736 - DNA, 22 bp, Artificial Sequence
  Synthetic: FXN 3 forward 9:69040267-69040292; SpCas9
tttggctttaggcctaacaagc

SEQ ID NO: 32737 - DNA, 21 bp, Artificial Sequence
  Synthetic: FXN 3 forward 9:69040268-69040292; SpCas9
ttggctttaggcctaacaagc

SEQ ID NO: 32738 - DNA, 20 bp, Artificial Sequence
  Synthetic: FXN 3 forward 9:69040269-69040292; SpCas9
tggctttaggcctaacaagc

SEQ ID NO: 32739 - DNA, 19 bp, Artificial Sequence
  Synthetic: FXN 3 forward 9:69040270-69040292; SpCas9
ggctttaggcctaacaagc

SEQ ID NO: 32740 - DNA, 18 bp, Artificial Sequence
  Synthetic: FXN 3 forward 9:69040271-69040292; SpCas9
gctttaggcctaacaagc

SEQ ID NO: 32741 - DNA, 25 bp, Artificial Sequence
  Synthetic: FXN 3 reverse 9:69040264-69040292; SpCas9
cctgcttgttaggcctaaagccaaa

SEQ ID NO: 32742 - DNA, 24 bp, Artificial Sequence
  Synthetic: FXN 3 reverse 9:69040265-69040292; SpCas9
ctgcttgttaggcctaaagccaaa

SEQ ID NO: 32743 - DNA, 23 bp, Artificial Sequence
  Synthetic: FXN 3 reverse 9:69040266-69040292; SpCas9
tgcttgttaggcctaaagccaaa

SEQ ID NO: 32744 - DNA, 22 bp, Artificial Sequence
  Synthetic: FXN 3 reverse 9:69040267-69040292; SpCas9
gcttgttaggcctaaagccaaa

SEQ ID NO: 32745 - DNA, 21 bp, Artificial Sequence
  Synthetic: FXN 3 reverse 9:69040268-69040292; SpCas9
cttgttaggcctaaagccaaa

SEQ ID NO: 32746 - DNA, 20 bp, Artificial Sequence
  Synthetic: FXN 3 reverse 9:69040269-69040292; SpCas9
ttgttaggcctaaagccaaa

SEQ ID NO: 32747 - DNA, 19 bp, Artificial Sequence
  Synthetic: FXN 3 reverse 9:69040270-69040292; SpCas9
tgttaggcctaaagccaaa

SEQ ID NO: 32748 - DNA, 18 bp, Artificial Sequence
  Synthetic: FXN 3 reverse 9:69040271-69040292; SpCas9
gttaggcctaaagccaaa

SEQ ID NO: 32749 - DNA, 25 bp, Artificial Sequence
  Synthetic: FXN 3 reverse 9:69040265-69040293; SpCas9
acctgcttgttaggcctaaagccaa

SEQ ID NO: 32750 - DNA, 24 bp, Artificial Sequence
  Synthetic: FXN 3 reverse 9:69040266-69040293; SpCas9
cctgcttgttaggcctaaagccaa

SEQ ID NO: 32751 - DNA, 23 bp, Artificial Sequence
  Synthetic: FXN 3 reverse 9:69040267-69040293; SpCas9
ctgcttgttaggcctaaagccaa

SEQ ID NO: 32752 - DNA, 22 bp, Artificial Sequence
  Synthetic: FXN 3 reverse 9:69040268-69040293; SpCas9
tgcttgttaggcctaaagccaa

SEQ ID NO: 32753 - DNA, 21 bp, Artificial Sequence
  Synthetic: FXN 3 reverse 9:69040269-69040293; SpCas9
gcttgttaggcctaaagccaa

SEQ ID NO: 32754 - DNA, 20 bp, Artificial Sequence
  Synthetic: FXN 3 reverse 9:69040270-69040293; SpCas9
cttgttaggcctaaagccaa

SEQ ID NO: 32755 - DNA, 19 bp, Artificial Sequence
  Synthetic: FXN 3 reverse 9:69040271-69040293; SpCas9
ttgttaggcctaaagccaa

SEQ ID NO: 32756 - DNA, 18 bp, Artificial Sequence
  Synthetic: FXN 3 reverse 9:69040272-69040293; SpCas9
tgttaggcctaaagccaa

SEQ ID NO: 32757 - DNA, 25 bp, Artificial Sequence
  Synthetic: FXN 3 reverse 9:69040272-69040300; SpCas9
gggtataacctgcttgttaggccta

SEQ ID NO: 32758 - DNA, 24 bp, Artificial Sequence
  Synthetic: FXN 3 reverse 9:69040273-69040300; SpCas9
ggtataacctgcttgttaggccta

SEQ ID NO: 32759 - DNA, 23 bp, Artificial Sequence
  Synthetic: FXN 3 reverse 9:69040274-69040300; SpCas9
gtataacctgcttgttaggccta

SEQ ID NO: 32760 - DNA, 22 bp, Artificial Sequence
  Synthetic: FXN 3 reverse 9:69040275-69040300; SpCas9
tataacctgcttgttaggccta

SEQ ID NO: 32761 - DNA, 21 bp, Artificial Sequence
  Synthetic: FXN 3 reverse 9:69040276-69040300; SpCas9
ataacctgcttgttaggccta

SEQ ID NO: 32762 - DNA, 20 bp, Artificial Sequence
  Synthetic: FXN 3 reverse 9:69040277-69040300; SpCas9
taacctgcttgttaggccta

SEQ ID NO: 32763 - DNA, 19 bp, Artificial Sequence
  Synthetic: FXN 3 reverse 9:69040278-69040300; SpCas9
aacctgcttgttaggccta

SEQ ID NO: 32764 - DNA, 18 bp, Artificial Sequence
  Synthetic: FXN 3 reverse 9:69040279-69040300; SpCas9
acctgcttgttaggccta

SEQ ID NO: 32765 - DNA, 25 bp, Artificial Sequence
  Synthetic: FXN 3 reverse 9:69040279-69040307; SpCas9
tgagtgagggtataacctgcttgtt

SEQ ID NO: 32766 - DNA, 24 bp, Artificial Sequence
  Synthetic: FXN 3 reverse 9:69040280-69040307; SpCas9
gagtgagggtataacctgcttgtt

SEQ ID NO: 32767 - DNA, 23 bp, Artificial Sequence
  Synthetic: FXN 3 reverse 9:69040281-69040307; SpCas9
agtgagggtataacctgcttgtt

SEQ ID NO: 32768 - DNA, 22 bp, Artificial Sequence
  Synthetic: FXN 3 reverse 9:69040282-69040307; SpCas9
gtgagggtataacctgcttgtt

SEQ ID NO: 32769 - DNA, 21 bp, Artificial Sequence
  Synthetic: FXN 3 reverse 9:69040283-69040307; SpCas9
tgagggtataacctgcttgtt

SEQ ID NO: 32770 - DNA, 20 bp, Artificial Sequence
  Synthetic: FXN 3 reverse 9:69040284-69040307; SpCas9
gagggtataacctgcttgtt

SEQ ID NO: 32771 - DNA, 19 bp, Artificial Sequence
  Synthetic: FXN 3 reverse 9:69040285-69040307; SpCas9
agggtataacctgcttgtt

SEQ ID NO: 32772 - DNA, 18 bp, Artificial Sequence
  Synthetic: FXN 3 reverse 9:69040286-69040307; SpCas9
gggtataacctgcttgtt

SEQ ID NO: 32773 - DNA, 25 bp, Artificial Sequence
  Synthetic: FXN 3 reverse 9:69040280-69040308; SpCas9
gtgagtgagggtataacctgcttgt

SEQ ID NO: 32774 - DNA, 24 bp, Artificial Sequence
  Synthetic: FXN 3 reverse 9:69040281-69040308; SpCas9
tgagtgagggtataacctgcttgt

SEQ ID NO: 32775 - DNA, 23 bp, Artificial Sequence
  Synthetic: FXN 3 reverse 9:69040282-69040308; SpCas9
gagtgagggtataacctgcttgt

SEQ ID NO: 32776 - DNA, 22 bp, Artificial Sequence
  Synthetic: FXN 3 reverse 9:69040283-69040308; SpCas9
agtgagggtataacctgcttgt

SEQ ID NO: 32777 - DNA, 21 bp, Artificial Sequence
  Synthetic: FXN 3 reverse 9:69040284-69040308; SpCas9
gtgagggtataacctgcttgt

SEQ ID NO: 32778 - DNA, 20 bp, Artificial Sequence
  Synthetic: FXN 3 reverse 9:69040285-69040308; SpCas9
tgagggtataacctgcttgt

SEQ ID NO: 32779 - DNA, 19 bp, Artificial Sequence
  Synthetic: FXN 3 reverse 9:69040286-69040308; SpCas9
gagggtataacctgcttgt

SEQ ID NO: 32780 - DNA, 18 bp, Artificial Sequence
  Synthetic: FXN 3 reverse 9:69040287-69040308; SpCas9
agggtataacctgcttgt

SEQ ID NO: 32781 - DNA, 25 bp, Artificial Sequence
  Synthetic: FXN 3 reverse 9:69040297-69040325; SpCas9
ataaaaatgatttgaaagtgagtga

SEQ ID NO: 32782 - DNA, 24 bp, Artificial Sequence
  Synthetic: FXN 3 reverse 9:69040298-69040325; SpCas9
taaaaatgatttgaaagtgagtga

SEQ ID NO: 32783 - DNA, 23 bp, Artificial Sequence
  Synthetic: FXN 3 reverse 9:69040299-69040325; SpCas9
aaaaatgatttgaaagtgagtga

SEQ ID NO: 32784 - DNA, 22 bp, Artificial Sequence
  Synthetic: FXN 3 reverse 9:69040300-69040325; SpCas9
aaaatgatttgaaagtgagtga

SEQ ID NO: 32785 - DNA, 21 bp, Artificial Sequence
  Synthetic: FXN 3 reverse 9:69040301-69040325; SpCas9
aaatgatttgaaagtgagtga

SEQ ID NO: 32786 - DNA, 20 bp, Artificial Sequence
  Synthetic: FXN 3 reverse 9:69040302-69040325; SpCas9
aatgatttgaaagtgagtga

SEQ ID NO: 32787 - DNA, 19 bp, Artificial Sequence
  Synthetic: FXN 3 reverse 9:69040303-69040325; SpCas9
atgatttgaaagtgagtga

SEQ ID NO: 32788 - DNA, 18 bp, Artificial Sequence
  Synthetic: FXN 3 reverse 9:69040304-69040325; SpCas9
tgatttgaaagtgagtga

SEQ ID NO: 32789 - DNA, 25 bp, Artificial Sequence
  Synthetic: FXN 3 reverse 9:69040298-69040326; SpCas9
aataaaaatgatttgaaagtgagtg

SEQ ID NO: 32790 - DNA, 24 bp, Artificial Sequence
  Synthetic: FXN 3 reverse 9:69040299-69040326; SpCas9
ataaaaatgatttgaaagtgagtg

SEQ ID NO: 32791 - DNA, 23 bp, Artificial Sequence
  Synthetic: FXN 3 reverse 9:69040300-69040326; SpCas9
taaaaatgatttgaaagtgagtg

SEQ ID NO: 32792 - DNA, 22 bp, Artificial Sequence
  Synthetic: FXN 3 reverse 9:69040301-69040326; SpCas9
aaaaatgatttgaaagtgagtg

SEQ ID NO: 32793 - DNA, 21 bp, Artificial Sequence
  Synthetic: FXN 3 reverse 9:69040302-69040326; SpCas9
aaaatgatttgaaagtgagtg

SEQ ID NO: 32794 - DNA, 20 bp, Artificial Sequence
  Synthetic: FXN 3 reverse 9:69040303-69040326; SpCas9
aaatgatttgaaagtgagtg

SEQ ID NO: 32795 - DNA, 19 bp, Artificial Sequence
  Synthetic: FXN 3 reverse 9:69040304-69040326; SpCas9
aatgatttgaaagtgagtg

SEQ ID NO: 32796 - DNA, 18 bp, Artificial Sequence
  Synthetic: FXN 3 reverse 9:69040305-69040326; SpCas9
atgatttgaaagtgagtg

SEQ ID NO: 32797 - DNA, 25 bp, Artificial Sequence
  Synthetic: FXN 3 reverse 9:69040299-69040327; SpCas9
caataaaaatgatttgaaagtgagt

SEQ ID NO: 32798 - DNA, 24 bp, Artificial Sequence
  Synthetic: FXN 3 reverse 9:69040300-69040327; SpCas9
aataaaaatgatttgaaagtgagt

SEQ ID NO: 32799 - DNA, 23 bp, Artificial Sequence
  Synthetic: FXN 3 reverse 9:69040301-69040327; SpCas9
ataaaaatgatttgaaagtgagt

SEQ ID NO: 32800 - DNA, 22 bp, Artificial Sequence
  Synthetic: FXN 3 reverse 9:69040302-69040327; SpCas9
taaaaatgatttgaaagtgagt

SEQ ID NO: 32801 - DNA, 21 bp, Artificial Sequence
  Synthetic: FXN 3 reverse 9:69040303-69040327; SpCas9
aaaaatgatttgaaagtgagt

SEQ ID NO: 32802 - DNA, 20 bp, Artificial Sequence
  Synthetic: FXN 3 reverse 9:69040304-69040327; SpCas9
aaaatgatttgaaagtgagt

SEQ ID NO: 32803 - DNA, 19 bp, Artificial Sequence
  Synthetic: FXN 3 reverse 9:69040305-69040327; SpCas9
aaatgatttgaaagtgagt

SEQ ID NO: 32804 - DNA, 18 bp, Artificial Sequence
  Synthetic: FXN 3 reverse 9:69040306-69040327; SpCas9
aatgatttgaaagtgagt

SEQ ID NO: 32805 - DNA, 25 bp, Artificial Sequence
  Synthetic: FXN 3 reverse 9:69040303-69040331; SpCas9
aagacaataaaaatgatttgaaagt

SEQ ID NO: 32806 - DNA, 24 bp, Artificial Sequence
  Synthetic: FXN 3 reverse 9:69040304-69040331; SpCas9
agacaataaaaatgatttgaaagt

SEQ ID NO: 32807 - DNA, 23 bp, Artificial Sequence
  Synthetic: FXN 3 reverse 9:69040305-69040331; SpCas9
gacaataaaaatgatttgaaagt

SEQ ID NO: 32808 - DNA, 22 bp, Artificial Sequence
  Synthetic: FXN 3 reverse 9:69040306-69040331; SpCas9
acaataaaaatgatttgaaagt

SEQ ID NO: 32809 - DNA, 21 bp, Artificial Sequence
  Synthetic: FXN 3 reverse 9:69040307-69040331; SpCas9
caataaaaatgatttgaaagt

SEQ ID NO: 32810 - DNA, 20 bp, Artificial Sequence
  Synthetic: FXN 3 reverse 9:69040308-69040331; SpCas9
aataaaaatgatttgaaagt

SEQ ID NO: 32811 - DNA, 19 bp, Artificial Sequence
  Synthetic: FXN 3 reverse 9:69040309-69040331; SpCas9
ataaaaatgatttgaaagt

SEQ ID NO: 32812 - DNA, 18 bp, Artificial Sequence
  Synthetic: FXN 3 reverse 9:69040310-69040331; SpCas9
taaaaatgatttgaaagt

SEQ ID NO: 32813 - DNA, 25 bp, Artificial Sequence
  Synthetic: FXN 3 forward 9:69040307-69040335; SpCas9
ctttcaaatcatttttattgtcttg

SEQ ID NO: 32814 - DNA, 24 bp, Artificial Sequence
  Synthetic: FXN 3 forward 9:69040308-69040335; SpCas9
tttcaaatcatttttattgtcttg

SEQ ID NO: 32815 - DNA, 23 bp, Artificial Sequence
  Synthetic: FXN 3 forward 9:69040309-69040335; SpCas9
ttcaaatcatttttattgtcttg

SEQ ID NO: 32816 - DNA, 22 bp, Artificial Sequence
  Synthetic: FXN 3 forward 9:69040310-69040335; SpCas9
tcaaatcatttttattgtcttg

SEQ ID NO: 32817 - DNA, 21 bp, Artificial Sequence
  Synthetic: FXN 3 forward 9:69040311-69040335; SpCas9
caaatcatttttattgtcttg

SEQ ID NO: 32818 - DNA, 20 bp, Artificial Sequence
  Synthetic: FXN 3 forward 9:69040312-69040335; SpCas9
aaatcatttttattgtcttg

SEQ ID NO: 32819 - DNA, 19 bp, Artificial Sequence
  Synthetic: FXN 3 forward 9:69040313-69040335; SpCas9
aatcatttttattgtcttg

SEQ ID NO: 32820 - DNA, 18 bp, Artificial Sequence
  Synthetic: FXN 3 forward 9:69040314-69040335; SpCas9
atcatttttattgtcttg

SEQ ID NO: 32821 - DNA, 25 bp, Artificial Sequence
  Synthetic: FXN 3 reverse 9:69040307-69040335; SpCas9
ctgcaagacaataaaaatgatttga

SEQ ID NO: 32822 - DNA, 24 bp, Artificial Sequence
  Synthetic: FXN 3 reverse 9:69040308-69040335; SpCas9
tgcaagacaataaaaatgatttga

SEQ ID NO: 32823 - DNA, 23 bp, Artificial Sequence
  Synthetic: FXN 3 reverse 9:69040309-69040335; SpCas9
gcaagacaataaaaatgatttga

SEQ ID NO: 32824 - DNA, 22 bp, Artificial Sequence
  Synthetic: FXN 3 reverse 9:69040310-69040335; SpCas9
caagacaataaaaatgatttga

SEQ ID NO: 32825 - DNA, 21 bp, Artificial Sequence
  Synthetic: FXN 3 reverse 9:69040311-69040335; SpCas9
aagacaataaaaatgatttga

SEQ ID NO: 32826 - DNA, 20 bp, Artificial Sequence
  Synthetic: FXN 3 reverse 9:69040312-69040335; SpCas9
agacaataaaaatgatttga

SEQ ID NO: 32827 - DNA, 19 bp, Artificial Sequence
  Synthetic: FXN 3 reverse 9:69040313-69040335; SpCas9
gacaataaaaatgatttga

SEQ ID NO: 32828 - DNA, 18 bp, Artificial Sequence
  Synthetic: FXN 3 reverse 9:69040314-69040335; SpCas9
acaataaaaatgatttga

SEQ ID NO: 32829 - DNA, 25 bp, Artificial Sequence
  Synthetic: FXN 3 forward 9:69040321-69040349; SpCas9
ttattgtcttgcagacaatttacac

SEQ ID NO: 32830 - DNA, 24 bp, Artificial Sequence
  Synthetic: FXN 3 forward 9:69040322-69040349; SpCas9
tattgtcttgcagacaatttacac

SEQ ID NO: 32831 - DNA, 23 bp, Artificial Sequence
  Synthetic: FXN 3 forward 9:69040323-69040349; SpCas9
attgtcttgcagacaatttacac

SEQ ID NO: 32832 - DNA, 22 bp, Artificial Sequence
  Synthetic: FXN 3 forward 9:69040324-69040349; SpCas9
ttgtcttgcagacaatttacac

SEQ ID NO: 32833 - DNA, 21 bp, Artificial Sequence
  Synthetic: FXN 3 forward 9:69040325-69040349; SpCas9
tgtcttgcagacaatttacac

SEQ ID NO: 32834 - DNA, 20 bp, Artificial Sequence
  Synthetic: FXN 3 forward 9:69040326-69040349; SpCas9
gtcttgcagacaatttacac

SEQ ID NO: 32835 - DNA, 19 bp, Artificial Sequence
  Synthetic: FXN 3 forward 9:69040327-69040349; SpCas9
tcttgcagacaatttacac

SEQ ID NO: 32836 - DNA, 18 bp, Artificial Sequence
  Synthetic: FXN 3 forward 9:69040328-69040349; SpCas9
cttgcagacaatttacac

SEQ ID NO: 32837 - DNA, 25 bp, Artificial Sequence
  Synthetic: FXN 3 reverse 9:69040328-69040356; SpCas9
gtgtaaacttgtgtaaattgtctgc

SEQ ID NO: 32838 - DNA, 24 bp, Artificial Sequence
  Synthetic: FXN 3 reverse 9:69040329-69040356; SpCas9
tgtaaacttgtgtaaattgtctgc

SEQ ID NO: 32839 - DNA, 23 bp, Artificial Sequence
  Synthetic: FXN 3 reverse 9:69040330-69040356; SpCas9
gtaaacttgtgtaaattgtctgc

SEQ ID NO: 32840 - DNA, 22 bp, Artificial Sequence
  Synthetic: FXN 3 reverse 9:69040331-69040356; SpCas9
taaacttgtgtaaattgtctgc

SEQ ID NO: 32841 - DNA, 21 bp, Artificial Sequence
  Synthetic: FXN 3 reverse 9:69040332-69040356; SpCas9
aaacttgtgtaaattgtctgc

SEQ ID NO: 32842 - DNA, 20 bp, Artificial Sequence
  Synthetic: FXN 3 reverse 9:69040333-69040356; SpCas9
aacttgtgtaaattgtctgc

SEQ ID NO: 32843 - DNA, 19 bp, Artificial Sequence
  Synthetic: FXN 3 reverse 9:69040334-69040356; SpCas9
acttgtgtaaattgtctgc

SEQ ID NO: 32844 - DNA, 18 bp, Artificial Sequence
  Synthetic: FXN 3 reverse 9:69040335-69040356; SpCas9
cttgtgtaaattgtctgc

SEQ ID NO: 32845 - DNA, 25 bp, Artificial Sequence
  Synthetic: FXN 3 forward 9:69040332-69040360; SpCas9
cagacaatttacacaagtttacaca

SEQ ID NO: 32846 - DNA, 24 bp, Artificial Sequence
  Synthetic: FXN 3 forward 9:69040333-69040360; SpCas9
agacaatttacacaagtttacaca

SEQ ID NO: 32847 - DNA, 23 bp, Artificial Sequence
  Synthetic: FXN 3 forward 9:69040334-69040360; SpCas9
gacaatttacacaagtttacaca

SEQ ID NO: 32848 - DNA, 22 bp, Artificial Sequence
  Synthetic: FXN 3 forward 9:69040335-69040360; SpCas9
acaatttacacaagtttacaca

SEQ ID NO: 32849 - DNA, 21 bp, Artificial Sequence
  Synthetic: FXN 3 forward 9:69040336-69040360; SpCas9
caatttacacaagtttacaca

SEQ ID NO: 32850 - DNA, 20 bp, Artificial Sequence
  Synthetic: FXN 3 forward 9:69040337-69040360; SpCas9
aatttacacaagtttacaca

SEQ ID NO: 32851 - DNA, 19 bp, Artificial Sequence
  Synthetic: FXN 3 forward 9:69040338-69040360; SpCas9
atttacacaagtttacaca

SEQ ID NO: 32852 - DNA, 18 bp, Artificial Sequence
  Synthetic: FXN 3 forward 9:69040339-69040360; SpCas9
tttacacaagtttacaca

SEQ ID NO: 32853 - DNA, 25 bp, Artificial Sequence
  Synthetic: FXN 3 forward 9:69040337-69040365; SpCas9
aatttacacaagtttacacatagaa

SEQ ID NO: 32854 - DNA, 24 bp, Artificial Sequence
  Synthetic: FXN 3 forward 9:69040338-69040365; SpCas9
atttacacaagtttacacatagaa

SEQ ID NO: 32855 - DNA, 23 bp, Artificial Sequence
  Synthetic: FXN 3 forward 9:69040339-69040365; SpCas9
tttacacaagtttacacatagaa

SEQ ID NO: 32856 - DNA, 22 bp, Artificial Sequence
  Synthetic: FXN 3 forward 9:69040340-69040365; SpCas9
ttacacaagtttacacatagaa

SEQ ID NO: 32857 - DNA, 21 bp, Artificial Sequence
  Synthetic: FXN 3 forward 9:69040341-69040365; SpCas9
tacacaagtttacacatagaa

SEQ ID NO: 32858 - DNA, 20 bp, Artificial Sequence
  Synthetic: FXN 3 forward 9:69040342-69040365; SpCas9
acacaagtttacacatagaa

SEQ ID NO: 32859 - DNA, 19 bp, Artificial Sequence
  Synthetic: FXN 3 forward 9:69040343-69040365; SpCas9
cacaagtttacacatagaa

SEQ ID NO: 32860 - DNA, 18 bp, Artificial Sequence
  Synthetic: FXN 3 forward 9:69040344-69040365; SpCas9
acaagtttacacatagaa

SEQ ID NO: 32861 - DNA, 25 bp, Artificial Sequence
  Synthetic: FXN 3 forward 9:69040338-69040366; SpCas9
atttacacaagtttacacatagaaa

SEQ ID NO: 32862 - DNA, 24 bp, Artificial Sequence
  Synthetic: FXN 3 forward 9:69040339-69040366; SpCas9
tttacacaagtttacacatagaaa

SEQ ID NO: 32863 - DNA, 23 bp, Artificial Sequence
  Synthetic: FXN 3 forward 9:69040340-69040366; SpCas9
ttacacaagtttacacatagaaa

SEQ ID NO: 32864 - DNA, 22 bp, Artificial Sequence
  Synthetic: FXN 3 forward 9:69040341-69040366; SpCas9
tacacaagtttacacatagaaa

SEQ ID NO: 32865 - DNA, 21 bp, Artificial Sequence
  Synthetic: FXN 3 forward 9:69040342-69040366; SpCas9
acacaagtttacacatagaaa

SEQ ID NO: 32866 - DNA, 20 bp, Artificial Sequence
  Synthetic: FXN 3 forward 9:69040343-69040366; SpCas9
cacaagtttacacatagaaa

SEQ ID NO: 32867 - DNA, 19 bp, Artificial Sequence
  Synthetic: FXN 3 forward 9:69040344-69040366; SpCas9
acaagtttacacatagaaa

SEQ ID NO: 32868 - DNA, 18 bp, Artificial Sequence
  Synthetic: FXN 3 forward 9:69040345-69040366; SpCas9
caagtttacacatagaaa

SEQ ID NO: 32869 - DNA, 25 bp, Artificial Sequence
  Synthetic: FXN 3 forward 9:69040364-69040392; SpCas9
ggatatgtaaatatttatacgctgc

SEQ ID NO: 32870 - DNA, 24 bp, Artificial Sequence
  Synthetic: FXN 3 forward 9:69040365-69040392; SpCas9
gatatgtaaatatttatacgctgc

SEQ ID NO: 32871 - DNA, 23 bp, Artificial Sequence
  Synthetic: FXN 3 forward 9:69040366-69040392; SpCas9
atatgtaaatatttatacgctgc

SEQ ID NO: 32872 - DNA, 22 bp, Artificial Sequence
  Synthetic: FXN 3 forward 9:69040367-69040392; SpCas9
tatgtaaatatttatacgctgc

SEQ ID NO: 32873 - DNA, 21 bp, Artificial Sequence
  Synthetic: FXN 3 forward 9:69040368-69040392; SpCas9
atgtaaatatttatacgctgc

SEQ ID NO: 32874 - DNA, 20 bp, Artificial Sequence
  Synthetic: FXN 3 forward 9:69040369-69040392; SpCas9
tgtaaatatttatacgctgc

SEQ ID NO: 32875 - DNA, 19 bp, Artificial Sequence
  Synthetic: FXN 3 forward 9:69040370-69040392; SpCas9
gtaaatatttatacgctgc

SEQ ID NO: 32876 - DNA, 18 bp, Artificial Sequence
  Synthetic: FXN 3 forward 9:69040371-69040392; SpCas9
taaatatttatacgctgc

SEQ ID NO: 32877 - DNA, 25 bp, Artificial Sequence
  Synthetic: FXN 3 forward 9:69040365-69040393; SpCas9
gatatgtaaatatttatacgctgcc

SEQ ID NO: 32878 - DNA, 24 bp, Artificial Sequence
  Synthetic: FXN 3 forward 9:69040366-69040393; SpCas9
atatgtaaatatttatacgctgcc

SEQ ID NO: 32879 - DNA, 23 bp, Artificial Sequence
  Synthetic: FXN 3 forward 9:69040367-69040393; SpCas9
tatgtaaatatttatacgctgcc

SEQ ID NO: 32880 - DNA, 22 bp, Artificial Sequence
  Synthetic: FXN 3 forward 9:69040368-69040393; SpCas9
atgtaaatatttatacgctgcc

SEQ ID NO: 32881 - DNA, 21 bp, Artificial Sequence
  Synthetic: FXN 3 forward 9:69040369-69040393; SpCas9
tgtaaatatttatacgctgcc

SEQ ID NO: 32882 - DNA, 20 bp, Artificial Sequence
  Synthetic: FXN 3 forward 9:69040370-69040393; SpCas9
gtaaatatttatacgctgcc

SEQ ID NO: 32883 - DNA, 19 bp, Artificial Sequence
  Synthetic: FXN 3 forward 9:69040371-69040393; SpCas9
taaatatttatacgctgcc

SEQ ID NO: 32884 - DNA, 18 bp, Artificial Sequence
  Synthetic: FXN 3 forward 9:69040372-69040393; SpCas9
aaatatttatacgctgcc

SEQ ID NO: 32885 - DNA, 25 bp, Artificial Sequence
  Synthetic: FXN 3 forward 9:69040370-69040398; SpCas9
gtaaatatttatacgctgccgggcg

SEQ ID NO: 32886 - DNA, 24 bp, Artificial Sequence
  Synthetic: FXN 3 forward 9:69040371-69040398; SpCas9
taaatatttatacgctgccgggcg

SEQ ID NO: 32887 - DNA, 23 bp, Artificial Sequence
  Synthetic: FXN 3 forward 9:69040372-69040398; SpCas9
aaatatttatacgctgccgggcg

SEQ ID NO: 32888 - DNA, 22 bp, Artificial Sequence
  Synthetic: FXN 3 forward 9:69040373-69040398; SpCas9
aatatttatacgctgccgggcg

SEQ ID NO: 32889 - DNA, 21 bp, Artificial Sequence
  Synthetic: FXN 3 forward 9:69040374-69040398; SpCas9
atatttatacgctgccgggcg

SEQ ID NO: 32890 - DNA, 20 bp, Artificial Sequence
  Synthetic: FXN 3 forward 9:69040375-69040398; SpCas9
tatttatacgctgccgggcg

SEQ ID NO: 32891 - DNA, 19 bp, Artificial Sequence
  Synthetic: FXN 3 forward 9:69040376-69040398; SpCas9
atttatacgctgccgggcg

SEQ ID NO: 32892 - DNA, 18 bp, Artificial Sequence
  Synthetic: FXN 3 forward 9:69040377-69040398; SpCas9
tttatacgctgccgggcg

SEQ ID NO: 32893 - DNA, 25 bp, Artificial Sequence
  Synthetic: FXN 3 forward 9:69040373-69040401; SpCas9
aatatttatacgctgccgggcgcgg

SEQ ID NO: 32894 - DNA, 24 bp, Artificial Sequence
  Synthetic: FXN 3 forward 9:69040374-69040401; SpCas9
atatttatacgctgccgggcgcgg

SEQ ID NO: 32895 - DNA, 23 bp, Artificial Sequence
  Synthetic: FXN 3 forward 9:69040375-69040401; SpCas9
tatttatacgctgccgggcgcgg

SEQ ID NO: 32896 - DNA, 22 bp, Artificial Sequence
  Synthetic: FXN 3 forward 9:69040376-69040401; SpCas9
atttatacgctgccgggcgcgg

SEQ ID NO: 32897 - DNA, 21 bp, Artificial Sequence
  Synthetic: FXN 3 forward 9:69040377-69040401; SpCas9
tttatacgctgccgggcgcgg

SEQ ID NO: 32898 - DNA, 20 bp, Artificial Sequence
  Synthetic: FXN 3 forward 9:69040378-69040401; SpCas9
ttatacgctgccgggcgcgg

SEQ ID NO: 32899 - DNA, 19 bp, Artificial Sequence
  Synthetic: FXN 3 forward 9:69040379-69040401; SpCas9
tatacgctgccgggcgcgg

SEQ ID NO: 32900 - DNA, 18 bp, Artificial Sequence
  Synthetic: FXN 3 forward 9:69040380-69040401; SpCas9
atacgctgccgggcgcgg

SEQ ID NO: 32901 - DNA, 25 bp, Artificial Sequence
  Synthetic: FXN 3 reverse 9:69040385-69040413; SpCas9
tacaggcgtgagccaccgcgcccgg

SEQ ID NO: 32902 - DNA, 24 bp, Artificial Sequence
  Synthetic: FXN 3 reverse 9:69040386-69040413; SpCas9
acaggcgtgagccaccgcgcccgg

SEQ ID NO: 32903 - DNA, 23 bp, Artificial Sequence
  Synthetic: FXN 3 reverse 9:69040387-69040413; SpCas9
caggcgtgagccaccgcgcccgg

SEQ ID NO: 32904 - DNA, 22 bp, Artificial Sequence
  Synthetic: FXN 3 reverse 9:69040388-69040413; SpCas9
aggcgtgagccaccgcgcccgg

SEQ ID NO: 32905 - DNA, 21 bp, Artificial Sequence
  Synthetic: FXN 3 reverse 9:69040389-69040413; SpCas9
ggcgtgagccaccgcgcccgg

SEQ ID NO: 32906 - DNA, 20 bp, Artificial Sequence
  Synthetic: FXN 3 reverse 9:69040390-69040413; SpCas9
gcgtgagccaccgcgcccgg

SEQ ID NO: 32907 - DNA, 19 bp, Artificial Sequence
  Synthetic: FXN 3 reverse 9:69040391-69040413; SpCas9
cgtgagccaccgcgcccgg

SEQ ID NO: 32908 - DNA, 18 bp, Artificial Sequence
  Synthetic: FXN 3 reverse 9:69040392-69040413; SpCas9
gtgagccaccgcgcccgg

SEQ ID NO: 32909 - DNA, 25 bp, Artificial Sequence
  Synthetic: FXN 3 reverse 9:69040388-69040416; SpCas9
gattacaggcgtgagccaccgcgcc

SEQ ID NO: 32910 - DNA, 24 bp, Artificial Sequence
  Synthetic: FXN 3 reverse 9:69040389-69040416; SpCas9
attacaggcgtgagccaccgcgcc

SEQ ID NO: 32911 - DNA, 23 bp, Artificial Sequence
  Synthetic: FXN 3 reverse 9:69040390-69040416; SpCas9
ttacaggcgtgagccaccgcgcc

SEQ ID NO: 32912 - DNA, 22 bp, Artificial Sequence
  Synthetic: FXN 3 reverse 9:69040391-69040416; SpCas9
tacaggcgtgagccaccgcgcc

SEQ ID NO: 32913 - DNA, 21 bp, Artificial Sequence
  Synthetic: FXN 3 reverse 9:69040392-69040416; SpCas9
acaggcgtgagccaccgcgcc

SEQ ID NO: 32914 - DNA, 20 bp, Artificial Sequence
  Synthetic: FXN 3 reverse 9:69040393-69040416; SpCas9
caggcgtgagccaccgcgcc

SEQ ID NO: 32915 - DNA, 19 bp, Artificial Sequence
  Synthetic: FXN 3 reverse 9:69040394-69040416; SpCas9
aggcgtgagccaccgcgcc

SEQ ID NO: 32916 - DNA, 18 bp, Artificial Sequence
  Synthetic: FXN 3 reverse 9:69040395-69040416; SpCas9
ggcgtgagccaccgcgcc

SEQ ID NO: 32917 - DNA, 25 bp, Artificial Sequence
  Synthetic: FXN 3 forward 9:69040392-69040420; SpCas9
gcgcggtggctcacgcctgtaatcc

SEQ ID NO: 32918 - DNA, 24 bp, Artificial Sequence
  Synthetic: FXN 3 forward 9:69040393-69040420; SpCas9
cgcggtggctcacgcctgtaatcc

SEQ ID NO: 32919 - DNA, 23 bp, Artificial Sequence
  Synthetic: FXN 3 forward 9:69040394-69040420; SpCas9
gcggtggctcacgcctgtaatcc

SEQ ID NO: 32920 - DNA, 22 bp, Artificial Sequence
  Synthetic: FXN 3 forward 9:69040395-69040420; SpCas9
cggtggctcacgcctgtaatcc

SEQ ID NO: 32921 - DNA, 21 bp, Artificial Sequence
  Synthetic: FXN 3 forward 9:69040396-69040420; SpCas9
ggtggctcacgcctgtaatcc

SEQ ID NO: 32922 - DNA, 20 bp, Artificial Sequence
  Synthetic: FXN 3 forward 9:69040397-69040420; SpCas9
gtggctcacgcctgtaatcc

SEQ ID NO: 32923 - DNA, 19 bp, Artificial Sequence
  Synthetic: FXN 3 forward 9:69040398-69040420; SpCas9
tggctcacgcctgtaatcc

SEQ ID NO: 32924 - DNA, 18 bp, Artificial Sequence
  Synthetic: FXN 3 forward 9:69040399-69040420; SpCas9
ggctcacgcctgtaatcc

SEQ ID NO: 32925 - DNA, 25 bp, Artificial Sequence
  Synthetic: FXN 3 forward 9:69040400-69040428; SpCas9
gctcacgcctgtaatcccagcactt

SEQ ID NO: 32926 - DNA, 24 bp, Artificial Sequence
  Synthetic: FXN 3 forward 9:69040401-69040428; SpCas9
ctcacgcctgtaatcccagcactt

SEQ ID NO: 32927 - DNA, 23 bp, Artificial Sequence
  Synthetic: FXN 3 forward 9:69040402-69040428; SpCas9
tcacgcctgtaatcccagcactt

SEQ ID NO: 32928 - DNA, 22 bp, Artificial Sequence
  Synthetic: FXN 3 forward 9:69040403-69040428; SpCas9
cacgcctgtaatcccagcactt

SEQ ID NO: 32929 - DNA, 21 bp, Artificial Sequence
  Synthetic: FXN 3 forward 9:69040404-69040428; SpCas9
acgcctgtaatcccagcactt

SEQ ID NO: 32930 - DNA, 20 bp, Artificial Sequence
  Synthetic: FXN 3 forward 9:69040405-69040428; SpCas9
cgcctgtaatcccagcactt

SEQ ID NO: 32931 - DNA, 19 bp, Artificial Sequence
  Synthetic: FXN 3 forward 9:69040406-69040428; SpCas9
gcctgtaatcccagcactt

SEQ ID NO: 32932 - DNA, 18 bp, Artificial Sequence
  Synthetic: FXN 3 forward 9:69040407-69040428; SpCas9
cctgtaatcccagcactt

SEQ ID NO: 32933 - DNA, 25 bp, Artificial Sequence
  Synthetic: FXN 3 forward 9:69040401-69040429; SpCas9
ctcacgcctgtaatcccagcacttt

SEQ ID NO: 32934 - DNA, 24 bp, Artificial Sequence
  Synthetic: FXN 3 forward 9:69040402-69040429; SpCas9
tcacgcctgtaatcccagcacttt

SEQ ID NO: 32935 - DNA, 23 bp, Artificial Sequence
  Synthetic: FXN 3 forward 9:69040403-69040429; SpCas9
cacgcctgtaatcccagcacttt

SEQ ID NO: 32936 - DNA, 22 bp, Artificial Sequence
  Synthetic: FXN 3 forward 9:69040404-69040429; SpCas9
acgcctgtaatcccagcacttt

SEQ ID NO: 32937 - DNA, 21 bp, Artificial Sequence
  Synthetic: FXN 3 forward 9:69040405-69040429; SpCas9
cgcctgtaatcccagcacttt

SEQ ID NO: 32938 - DNA, 20 bp, Artificial Sequence
  Synthetic: FXN 3 forward 9:69040406-69040429; SpCas9
gcctgtaatcccagcacttt

SEQ ID NO: 32939 - DNA, 19 bp, Artificial Sequence
  Synthetic: FXN 3 forward 9:69040407-69040429; SpCas9
cctgtaatcccagcacttt

SEQ ID NO: 32940 - DNA, 18 bp, Artificial Sequence
  Synthetic: FXN 3 forward 9:69040408-69040429; SpCas9
ctgtaatcccagcacttt

SEQ ID NO: 32941 - DNA, 25 bp, Artificial Sequence
  Synthetic: FXN 3 reverse 9:69040401-69040429; SpCas9
cccaaagtgctgggattacaggcgt

SEQ ID NO: 32942 - DNA, 24 bp, Artificial Sequence
  Synthetic: FXN 3 reverse 9:69040402-69040429; SpCas9
ccaaagtgctgggattacaggcgt

SEQ ID NO: 32943 - DNA, 23 bp, Artificial Sequence
  Synthetic: FXN 3 reverse 9:69040403-69040429; SpCas9
caaagtgctgggattacaggcgt

SEQ ID NO: 32944 - DNA, 22 bp, Artificial Sequence
  Synthetic: FXN 3 reverse 9:69040404-69040429; SpCas9
aaagtgctgggattacaggcgt

SEQ ID NO: 32945 - DNA, 21 bp, Artificial Sequence
  Synthetic: FXN 3 reverse 9:69040405-69040429; SpCas9
aagtgctgggattacaggcgt

SEQ ID NO: 32946 - DNA, 20 bp, Artificial Sequence
  Synthetic: FXN 3 reverse 9:69040406-69040429; SpCas9
agtgctgggattacaggcgt

SEQ ID NO: 32947 - DNA, 19 bp, Artificial Sequence
  Synthetic: FXN 3 reverse 9:69040407-69040429; SpCas9
gtgctgggattacaggcgt

SEQ ID NO: 32948 - DNA, 18 bp, Artificial Sequence
  Synthetic: FXN 3 reverse 9:69040408-69040429; SpCas9
tgctgggattacaggcgt

SEQ ID NO: 32949 - DNA, 25 bp, Artificial Sequence
  Synthetic: FXN 3 forward 9:69040403-69040431; SpCas9
cacgcctgtaatcccagcactttgg

SEQ ID NO: 32950 - DNA, 24 bp, Artificial Sequence
  Synthetic: FXN 3 forward 9:69040404-69040431; SpCas9
acgcctgtaatcccagcactttgg

SEQ ID NO: 32951 - DNA, 23 bp, Artificial Sequence
  Synthetic: FXN 3 forward 9:69040405-69040431; SpCas9
cgcctgtaatcccagcactttgg

SEQ ID NO: 32952 - DNA, 22 bp, Artificial Sequence
  Synthetic: FXN 3 forward 9:69040406-69040431; SpCas9
gcctgtaatcccagcactttgg

SEQ ID NO: 32953 - DNA, 21 bp, Artificial Sequence
  Synthetic: FXN 3 forward 9:69040407-69040431; SpCas9
cctgtaatcccagcactttgg

SEQ ID NO: 32954 - DNA, 20 bp, Artificial Sequence
  Synthetic: FXN 3 forward 9:69040408-69040431; SpCas9
ctgtaatcccagcactttgg

SEQ ID NO: 32955 - DNA, 19 bp, Artificial Sequence
  Synthetic: FXN 3 forward 9:69040409-69040431; SpCas9
tgtaatcccagcactttgg

SEQ ID NO: 32956 - DNA, 18 bp, Artificial Sequence
  Synthetic: FXN 3 forward 9:69040410-69040431; SpCas9
gtaatcccagcactttgg

SEQ ID NO: 32957 - DNA, 25 bp, Artificial Sequence
  Synthetic: FXN 3 forward 9:69040404-69040432; SpCas9
acgcctgtaatcccagcactttggg

SEQ ID NO: 32958 - DNA, 24 bp, Artificial Sequence
  Synthetic: FXN 3 forward 9:69040405-69040432; SpCas9
cgcctgtaatcccagcactttggg

SEQ ID NO: 32959 - DNA, 23 bp, Artificial Sequence
  Synthetic: FXN 3 forward 9:69040406-69040432; SpCas9
gcctgtaatcccagcactttggg

SEQ ID NO: 32960 - DNA, 22 bp, Artificial Sequence
  Synthetic: FXN 3 forward 9:69040407-69040432; SpCas9
cctgtaatcccagcactttggg

SEQ ID NO: 32961 - DNA, 21 bp, Artificial Sequence
  Synthetic: FXN 3 forward 9:69040408-69040432; SpCas9
ctgtaatcccagcactttggg

SEQ ID NO: 32962 - DNA, 20 bp, Artificial Sequence
  Synthetic: FXN 3 forward 9:69040409-69040432; SpCas9
tgtaatcccagcactttggg

SEQ ID NO: 32963 - DNA, 19 bp, Artificial Sequence
  Synthetic: FXN 3 forward 9:69040410-69040432; SpCas9
gtaatcccagcactttggg

SEQ ID NO: 32964 - DNA, 18 bp, Artificial Sequence
  Synthetic: FXN 3 forward 9:69040411-69040432; SpCas9
taatcccagcactttggg

SEQ ID NO: 32965 - DNA, 25 bp, Artificial Sequence
  Synthetic: FXN 3 reverse 9:69040407-69040435; SpCas9
cggcctcccaaagtgctgggattac

SEQ ID NO: 32966 - DNA, 24 bp, Artificial Sequence
  Synthetic: FXN 3 reverse 9:69040408-69040435; SpCas9
ggcctcccaaagtgctgggattac

SEQ ID NO: 32967 - DNA, 23 bp, Artificial Sequence
  Synthetic: FXN 3 reverse 9:69040409-69040435; SpCas9
gcctcccaaagtgctgggattac

SEQ ID NO: 32968 - DNA, 22 bp, Artificial Sequence
  Synthetic: FXN 3 reverse 9:69040410-69040435; SpCas9
cctcccaaagtgctgggattac

SEQ ID NO: 32969 - DNA, 21 bp, Artificial Sequence
  Synthetic: FXN 3 reverse 9:69040411-69040435; SpCas9
ctcccaaagtgctgggattac

SEQ ID NO: 32970 - DNA, 20 bp, Artificial Sequence
  Synthetic: FXN 3 reverse 9:69040412-69040435; SpCas9
tcccaaagtgctgggattac

SEQ ID NO: 32971 - DNA, 19 bp, Artificial Sequence
  Synthetic: FXN 3 reverse 9:69040413-69040435; SpCas9
cccaaagtgctgggattac

SEQ ID NO: 32972 - DNA, 18 bp, Artificial Sequence
  Synthetic: FXN 3 reverse 9:69040414-69040435; SpCas9
ccaaagtgctgggattac

SEQ ID NO: 32973 - DNA, 25 bp, Artificial Sequence
  Synthetic: FXN 3 reverse 9:69040408-69040436; SpCas9
tcggcctcccaaagtgctgggatta

SEQ ID NO: 32974 - DNA, 24 bp, Artificial Sequence
  Synthetic: FXN 3 reverse 9:69040409-69040436; SpCas9
cggcctcccaaagtgctgggatta

SEQ ID NO: 32975 - DNA, 23 bp, Artificial Sequence
  Synthetic: FXN 3 reverse 9:69040410-69040436; SpCas9
ggcctcccaaagtgctgggatta

SEQ ID NO: 32976 - DNA, 22 bp, Artificial Sequence
  Synthetic: FXN 3 reverse 9:69040411-69040436; SpCas9
gcctcccaaagtgctgggatta

SEQ ID NO: 32977 - DNA, 21 bp, Artificial Sequence
  Synthetic: FXN 3 reverse 9:69040412-69040436; SpCas9
cctcccaaagtgctgggatta

SEQ ID NO: 32978 - DNA, 20 bp, Artificial Sequence
  Synthetic: FXN 3 reverse 9:69040413-69040436; SpCas9
ctcccaaagtgctgggatta

SEQ ID NO: 32979 - DNA, 19 bp, Artificial Sequence
  Synthetic: FXN 3 reverse 9:69040414-69040436; SpCas9
tcccaaagtgctgggatta

SEQ ID NO: 32980 - DNA, 18 bp, Artificial Sequence
  Synthetic: FXN 3 reverse 9:69040415-69040436; SpCas9
cccaaagtgctgggatta

SEQ ID NO: 32981 - DNA, 25 bp, Artificial Sequence
  Synthetic: FXN 3 forward 9:69040409-69040437; SpCas9
tgtaatcccagcactttgggaggcc

SEQ ID NO: 32982 - DNA, 24 bp, Artificial Sequence
  Synthetic: FXN 3 forward 9:69040410-69040437; SpCas9
gtaatcccagcactttgggaggcc

SEQ ID NO: 32983 - DNA, 23 bp, Artificial Sequence
  Synthetic: FXN 3 forward 9:69040411-69040437; SpCas9
taatcccagcactttgggaggcc

SEQ ID NO: 32984 - DNA, 22 bp, Artificial Sequence
  Synthetic: FXN 3 forward 9:69040412-69040437; SpCas9
aatcccagcactttgggaggcc

SEQ ID NO: 32985 - DNA, 21 bp, Artificial Sequence
  Synthetic: FXN 3 forward 9:69040413-69040437; SpCas9
atcccagcactttgggaggcc

SEQ ID NO: 32986 - DNA, 20 bp, Artificial Sequence
  Synthetic: FXN 3 forward 9:69040414-69040437; SpCas9
tcccagcactttgggaggcc

SEQ ID NO: 32987 - DNA, 19 bp, Artificial Sequence
  Synthetic: FXN 3 forward 9:69040415-69040437; SpCas9
cccagcactttgggaggcc

SEQ ID NO: 32988 - DNA, 18 bp, Artificial Sequence
  Synthetic: FXN 3 forward 9:69040416-69040437; SpCas9
ccagcactttgggaggcc

SEQ ID NO: 32989 - DNA, 25 bp, Artificial Sequence
  Synthetic: FXN 3 forward 9:69040410-69040438; SpCas9
gtaatcccagcactttgggaggccg

SEQ ID NO: 32990 - DNA, 24 bp, Artificial Sequence
  Synthetic: FXN 3 forward 9:69040411-69040438; SpCas9
taatcccagcactttgggaggccg

SEQ ID NO: 32991 - DNA, 23 bp, Artificial Sequence
  Synthetic: FXN 3 forward 9:69040412-69040438; SpCas9
aatcccagcactttgggaggccg

SEQ ID NO: 32992 - DNA, 22 bp, Artificial Sequence
  Synthetic: FXN 3 forward 9:69040413-69040438; SpCas9
atcccagcactttgggaggccg

SEQ ID NO: 32993 - DNA, 21 bp, Artificial Sequence
  Synthetic: FXN 3 forward 9:69040414-69040438; SpCas9
tcccagcactttgggaggccg

SEQ ID NO: 32994 - DNA, 20 bp, Artificial Sequence
  Synthetic: FXN 3 forward 9:69040415-69040438; SpCas9
cccagcactttgggaggccg

SEQ ID NO: 32995 - DNA, 19 bp, Artificial Sequence
  Synthetic: FXN 3 forward 9:69040416-69040438; SpCas9
ccagcactttgggaggccg

SEQ ID NO: 32996 - DNA, 18 bp, Artificial Sequence
  Synthetic: FXN 3 forward 9:69040417-69040438; SpCas9
cagcactttgggaggccg

SEQ ID NO: 32997 - DNA, 25 bp, Artificial Sequence
  Synthetic: FXN 3 forward 9:69040413-69040441; SpCas9
atcccagcactttgggaggccgagg

SEQ ID NO: 32998 - DNA, 24 bp, Artificial Sequence
  Synthetic: FXN 3 forward 9:69040414-69040441; SpCas9
tcccagcactttgggaggccgagg

SEQ ID NO: 32999 - DNA, 23 bp, Artificial Sequence
  Synthetic: FXN 3 forward 9:69040415-69040441; SpCas9
cccagcactttgggaggccgagg

SEQ ID NO: 33000 - DNA, 22 bp, Artificial Sequence
  Synthetic: FXN 3 forward 9:69040416-69040441; SpCas9
ccagcactttgggaggccgagg

SEQ ID NO: 33001 - DNA, 21 bp, Artificial Sequence
  Synthetic: FXN 3 forward 9:69040417-69040441; SpCas9
cagcactttgggaggccgagg

SEQ ID NO: 33002 - DNA, 20 bp, Artificial Sequence
  Synthetic: FXN 3 forward 9:69040418-69040441; SpCas9
agcactttgggaggccgagg

SEQ ID NO: 33003 - DNA, 19 bp, Artificial Sequence
  Synthetic: FXN 3 forward 9:69040419-69040441; SpCas9
gcactttgggaggccgagg

SEQ ID NO: 33004 - DNA, 18 bp, Artificial Sequence
  Synthetic: FXN 3 forward 9:69040420-69040441; SpCas9
cactttgggaggccgagg

SEQ ID NO: 33005 - DNA, 25 bp, Artificial Sequence
  Synthetic: FXN 3 forward 9:69040414-69040442; SpCas9
tcccagcactttgggaggccgaggc

SEQ ID NO: 33006 - DNA, 24 bp, Artificial Sequence
  Synthetic: FXN 3 forward 9:69040415-69040442; SpCas9
cccagcactttgggaggccgaggc

SEQ ID NO: 33007 - DNA, 23 bp, Artificial Sequence
  Synthetic: FXN 3 forward 9:69040416-69040442; SpCas9
ccagcactttgggaggccgaggc

SEQ ID NO: 33008 - DNA, 22 bp, Artificial Sequence
  Synthetic: FXN 3 forward 9:69040417-69040442; SpCas9
cagcactttgggaggccgaggc

SEQ ID NO: 33009 - DNA, 21 bp, Artificial Sequence
  Synthetic: FXN 3 forward 9:69040418-69040442; SpCas9
agcactttgggaggccgaggc

SEQ ID NO: 33010 - DNA, 20 bp, Artificial Sequence
  Synthetic: FXN 3 forward 9:69040419-69040442; SpCas9
gcactttgggaggccgaggc

SEQ ID NO: 33011 - DNA, 19 bp, Artificial Sequence
  Synthetic: FXN 3 forward 9:69040420-69040442; SpCas9
cactttgggaggccgaggc

SEQ ID NO: 33012 - DNA, 18 bp, Artificial Sequence
  Synthetic: FXN 3 forward 9:69040421-69040442; SpCas9
actttgggaggccgaggc

SEQ ID NO: 33013 - DNA, 25 bp, Artificial Sequence
  Synthetic: FXN 3 reverse 9:69040415-69040443; SpCas9
acctgcctcggcctcccaaagtgct

SEQ ID NO: 33014 - DNA, 24 bp, Artificial Sequence
  Synthetic: FXN 3 reverse 9:69040416-69040443; SpCas9
cctgcctcggcctcccaaagtgct

SEQ ID NO: 33015 - DNA, 23 bp, Artificial Sequence
  Synthetic: FXN 3 reverse 9:69040417-69040443; SpCas9
ctgcctcggcctcccaaagtgct

SEQ ID NO: 33016 - DNA, 22 bp, Artificial Sequence
  Synthetic: FXN 3 reverse 9:69040418-69040443; SpCas9
tgcctcggcctcccaaagtgct

SEQ ID NO: 33017 - DNA, 21 bp, Artificial Sequence
  Synthetic: FXN 3 reverse 9:69040419-69040443; SpCas9
gcctcggcctcccaaagtgct

SEQ ID NO: 33018 - DNA, 20 bp, Artificial Sequence
  Synthetic: FXN 3 reverse 9:69040420-69040443; SpCas9
cctcggcctcccaaagtgct

SEQ ID NO: 33019 - DNA, 19 bp, Artificial Sequence
  Synthetic: FXN 3 reverse 9:69040421-69040443; SpCas9
ctcggcctcccaaagtgct

SEQ ID NO: 33020 - DNA, 18 bp, Artificial Sequence
  Synthetic: FXN 3 reverse 9:69040422-69040443; SpCas9
tcggcctcccaaagtgct

SEQ ID NO: 33021 - DNA, 25 bp, Artificial Sequence
  Synthetic: FXN 3 reverse 9:69040416-69040444; SpCas9
cacctgcctcggcctcccaaagtgc

SEQ ID NO: 33022 - DNA, 24 bp, Artificial Sequence
  Synthetic: FXN 3 reverse 9:69040417-69040444; SpCas9
acctgcctcggcctcccaaagtgc

SEQ ID NO: 33023 - DNA, 23 bp, Artificial Sequence
  Synthetic: FXN 3 reverse 9:69040418-69040444; SpCas9
cctgcctcggcctcccaaagtgc

SEQ ID NO: 33024 - DNA, 22 bp, Artificial Sequence
  Synthetic: FXN 3 reverse 9:69040419-69040444; SpCas9
ctgcctcggcctcccaaagtgc

SEQ ID NO: 33025 - DNA, 21 bp, Artificial Sequence
  Synthetic: FXN 3 reverse 9:69040420-69040444; SpCas9
tgcctcggcctcccaaagtgc

SEQ ID NO: 33026 - DNA, 20 bp, Artificial Sequence
  Synthetic: FXN 3 reverse 9:69040421-69040444; SpCas9
gcctcggcctcccaaagtgc

SEQ ID NO: 33027 - DNA, 19 bp, Artificial Sequence
  Synthetic: FXN 3 reverse 9:69040422-69040444; SpCas9
cctcggcctcccaaagtgc

SEQ ID NO: 33028 - DNA, 18 bp, Artificial Sequence
  Synthetic: FXN 3 reverse 9:69040423-69040444; SpCas9
ctcggcctcccaaagtgc

SEQ ID NO: 33029 - DNA, 25 bp, Artificial Sequence
  Synthetic: FXN 3 forward 9:69040417-69040445; SpCas9
cagcactttgggaggccgaggcagg

SEQ ID NO: 33030 - DNA, 24 bp, Artificial Sequence
  Synthetic: FXN 3 forward 9:69040418-69040445; SpCas9
agcactttgggaggccgaggcagg

SEQ ID NO: 33031 - DNA, 23 bp, Artificial Sequence
  Synthetic: FXN 3 forward 9:69040419-69040445; SpCas9
gcactttgggaggccgaggcagg

SEQ ID NO: 33032 - DNA, 22 bp, Artificial Sequence
  Synthetic: FXN 3 forward 9:69040420-69040445; SpCas9
cactttgggaggccgaggcagg

SEQ ID NO: 33033 - DNA, 21 bp, Artificial Sequence
  Synthetic: FXN 3 forward 9:69040421-69040445; SpCas9
actttgggaggccgaggcagg

SEQ ID NO: 33034 - DNA, 20 bp, Artificial Sequence
  Synthetic: FXN 3 forward 9:69040422-69040445; SpCas9
ctttgggaggccgaggcagg

SEQ ID NO: 33035 - DNA, 19 bp, Artificial Sequence
  Synthetic: FXN 3 forward 9:69040423-69040445; SpCas9
tttgggaggccgaggcagg

SEQ ID NO: 33036 - DNA, 18 bp, Artificial Sequence
  Synthetic: FXN 3 forward 9:69040424-69040445; SpCas9
ttgggaggccgaggcagg

SEQ ID NO: 33037 - DNA, 25 bp, Artificial Sequence
  Synthetic: FXN 3 reverse 9:69040422-69040450; SpCas9
gtgatccacctgcctcggcctccca

SEQ ID NO: 33038 - DNA, 24 bp, Artificial Sequence
  Synthetic: FXN 3 reverse 9:69040423-69040450; SpCas9
tgatccacctgcctcggcctccca

SEQ ID NO: 33039 - DNA, 23 bp, Artificial Sequence
  Synthetic: FXN 3 reverse 9:69040424-69040450; SpCas9
gatccacctgcctcggcctccca

SEQ ID NO: 33040 - DNA, 22 bp, Artificial Sequence
  Synthetic: FXN 3 reverse 9:69040425-69040450; SpCas9
atccacctgcctcggcctccca

SEQ ID NO: 33041 - DNA, 21 bp, Artificial Sequence
  Synthetic: FXN 3 reverse 9:69040426-69040450; SpCas9
tccacctgcctcggcctccca

SEQ ID NO: 33042 - DNA, 20 bp, Artificial Sequence
  Synthetic: FXN 3 reverse 9:69040427-69040450; SpCas9
ccacctgcctcggcctccca

SEQ ID NO: 33043 - DNA, 19 bp, Artificial Sequence
  Synthetic: FXN 3 reverse 9:69040428-69040450; SpCas9
cacctgcctcggcctccca

SEQ ID NO: 33044 - DNA, 18 bp, Artificial Sequence
  Synthetic: FXN 3 reverse 9:69040429-69040450; SpCas9
acctgcctcggcctccca

SEQ ID NO: 33045 - DNA, 25 bp, Artificial Sequence
  Synthetic: FXN 3 forward 9:69040425-69040453; SpCas9
tgggaggccgaggcaggtggatcac

SEQ ID NO: 33046 - DNA, 24 bp, Artificial Sequence
  Synthetic: FXN 3 forward 9:69040426-69040453; SpCas9
gggaggccgaggcaggtggatcac

SEQ ID NO: 33047 - DNA, 23 bp, Artificial Sequence
  Synthetic: FXN 3 forward 9:69040427-69040453; SpCas9
ggaggccgaggcaggtggatcac

SEQ ID NO: 33048 - DNA, 22 bp, Artificial Sequence
  Synthetic: FXN 3 forward 9:69040428-69040453; SpCas9
gaggccgaggcaggtggatcac

SEQ ID NO: 33049 - DNA, 21 bp, Artificial Sequence
  Synthetic: FXN 3 forward 9:69040429-69040453; SpCas9
aggccgaggcaggtggatcac

SEQ ID NO: 33050 - DNA, 20 bp, Artificial Sequence
  Synthetic: FXN 3 forward 9:69040430-69040453; SpCas9
ggccgaggcaggtggatcac

SEQ ID NO: 33051 - DNA, 19 bp, Artificial Sequence
  Synthetic: FXN 3 forward 9:69040431-69040453; SpCas9
gccgaggcaggtggatcac

SEQ ID NO: 33052 - DNA, 18 bp, Artificial Sequence
  Synthetic: FXN 3 forward 9:69040432-69040453; SpCas9
ccgaggcaggtggatcac

SEQ ID NO: 33053 - DNA, 25 bp, Artificial Sequence
  Synthetic: FXN 3 forward 9:69040430-69040458; SpCas9
ggccgaggcaggtggatcacgagtt

SEQ ID NO: 33054 - DNA, 24 bp, Artificial Sequence
  Synthetic: FXN 3 forward 9:69040431-69040458; SpCas9
gccgaggcaggtggatcacgagtt

SEQ ID NO: 33055 - DNA, 23 bp, Artificial Sequence
  Synthetic: FXN 3 forward 9:69040432-69040458; SpCas9
ccgaggcaggtggatcacgagtt

SEQ ID NO: 33056 - DNA, 22 bp, Artificial Sequence
  Synthetic: FXN 3 forward 9:69040433-69040458; SpCas9
cgaggcaggtggatcacgagtt

SEQ ID NO: 33057 - DNA, 21 bp, Artificial Sequence
  Synthetic: FXN 3 forward 9:69040434-69040458; SpCas9
gaggcaggtggatcacgagtt

SEQ ID NO: 33058 - DNA, 20 bp, Artificial Sequence
  Synthetic: FXN 3 forward 9:69040435-69040458; SpCas9
aggcaggtggatcacgagtt

SEQ ID NO: 33059 - DNA, 19 bp, Artificial Sequence
  Synthetic: FXN 3 forward 9:69040436-69040458; SpCas9
ggcaggtggatcacgagtt

SEQ ID NO: 33060 - DNA, 18 bp, Artificial Sequence
  Synthetic: FXN 3 forward 9:69040437-69040458; SpCas9
gcaggtggatcacgagtt

SEQ ID NO: 33061 - DNA, 25 bp, Artificial Sequence
  Synthetic: FXN 3 forward 9:69040431-69040459; SpCas9
gccgaggcaggtggatcacgagttc

SEQ ID NO: 33062 - DNA, 24 bp, Artificial Sequence
  Synthetic: FXN 3 forward 9:69040432-69040459; SpCas9
ccgaggcaggtggatcacgagttc

SEQ ID NO: 33063 - DNA, 23 bp, Artificial Sequence
  Synthetic: FXN 3 forward 9:69040433-69040459; SpCas9
cgaggcaggtggatcacgagttc

SEQ ID NO: 33064 - DNA, 22 bp, Artificial Sequence
  Synthetic: FXN 3 forward 9:69040434-69040459; SpCas9
gaggcaggtggatcacgagttc

SEQ ID NO: 33065 - DNA, 21 bp, Artificial Sequence
  Synthetic: FXN 3 forward 9:69040435-69040459; SpCas9
aggcaggtggatcacgagttc

SEQ ID NO: 33066 - DNA, 20 bp, Artificial Sequence
  Synthetic: FXN 3 forward 9:69040436-69040459; SpCas9
ggcaggtggatcacgagttc

SEQ ID NO: 33067 - DNA, 19 bp, Artificial Sequence
  Synthetic: FXN 3 forward 9:69040437-69040459; SpCas9
gcaggtggatcacgagttc

SEQ ID NO: 33068 - DNA, 18 bp, Artificial Sequence
  Synthetic: FXN 3 forward 9:69040438-69040459; SpCas9
caggtggatcacgagttc

SEQ ID NO: 33069 - DNA, 25 bp, Artificial Sequence
  Synthetic: FXN 3 reverse 9:69040432-69040460; SpCas9
tcctgaactcgtgatccacctgcct

SEQ ID NO: 33070 - DNA, 24 bp, Artificial Sequence
  Synthetic: FXN 3 reverse 9:69040433-69040460; SpCas9
cctgaactcgtgatccacctgcct

SEQ ID NO: 33071 - DNA, 23 bp, Artificial Sequence
  Synthetic: FXN 3 reverse 9:69040434-69040460; SpCas9
ctgaactcgtgatccacctgcct

SEQ ID NO: 33072 - DNA, 22 bp, Artificial Sequence
  Synthetic: FXN 3 reverse 9:69040435-69040460; SpCas9
tgaactcgtgatccacctgcct

SEQ ID NO: 33073 - DNA, 21 bp, Artificial Sequence
  Synthetic: FXN 3 reverse 9:69040436-69040460; SpCas9
gaactcgtgatccacctgcct

SEQ ID NO: 33074 - DNA, 20 bp, Artificial Sequence
  Synthetic: FXN 3 reverse 9:69040437-69040460; SpCas9
aactcgtgatccacctgcct

SEQ ID NO: 33075 - DNA, 19 bp, Artificial Sequence
  Synthetic: FXN 3 reverse 9:69040438-69040460; SpCas9
actcgtgatccacctgcct

SEQ ID NO: 33076 - DNA, 18 bp, Artificial Sequence
  Synthetic: FXN 3 reverse 9:69040439-69040460; SpCas9
ctcgtgatccacctgcct

SEQ ID NO: 33077 - DNA, 25 bp, Artificial Sequence
  Synthetic: FXN 3 forward 9:69040433-69040461; SpCas9
cgaggcaggtggatcacgagttcag

SEQ ID NO: 33078 - DNA, 24 bp, Artificial Sequence
  Synthetic: FXN 3 forward 9:69040434-69040461; SpCas9
gaggcaggtggatcacgagttcag

SEQ ID NO: 33079 - DNA, 23 bp, Artificial Sequence
  Synthetic: FXN 3 forward 9:69040435-69040461; SpCas9
aggcaggtggatcacgagttcag

SEQ ID NO: 33080 - DNA, 22 bp, Artificial Sequence
  Synthetic: FXN 3 forward 9:69040436-69040461; SpCas9
ggcaggtggatcacgagttcag

SEQ ID NO: 33081 - DNA, 21 bp, Artificial Sequence
  Synthetic: FXN 3 forward 9:69040437-69040461; SpCas9
gcaggtggatcacgagttcag

SEQ ID NO: 33082 - DNA, 20 bp, Artificial Sequence
  Synthetic: FXN 3 forward 9:69040438-69040461; SpCas9
caggtggatcacgagttcag

SEQ ID NO: 33083 - DNA, 19 bp, Artificial Sequence
  Synthetic: FXN 3 forward 9:69040439-69040461; SpCas9
aggtggatcacgagttcag

SEQ ID NO: 33084 - DNA, 18 bp, Artificial Sequence
  Synthetic: FXN 3 forward 9:69040440-69040461; SpCas9
ggtggatcacgagttcag

SEQ ID NO: 33085 - DNA, 25 bp, Artificial Sequence
  Synthetic: FXN 3 forward 9:69040437-69040465; SpCas9
gcaggtggatcacgagttcaggaga

SEQ ID NO: 33086 - DNA, 24 bp, Artificial Sequence
  Synthetic: FXN 3 forward 9:69040438-69040465; SpCas9
caggtggatcacgagttcaggaga

SEQ ID NO: 33087 - DNA, 23 bp, Artificial Sequence
  Synthetic: FXN 3 forward 9:69040439-69040465; SpCas9
aggtggatcacgagttcaggaga

SEQ ID NO: 33088 - DNA, 22 bp, Artificial Sequence
  Synthetic: FXN 3 forward 9:69040440-69040465; SpCas9
ggtggatcacgagttcaggaga

SEQ ID NO: 33089 - DNA, 21 bp, Artificial Sequence
  Synthetic: FXN 3 forward 9:69040441-69040465; SpCas9
gtggatcacgagttcaggaga

SEQ ID NO: 33090 - DNA, 20 bp, Artificial Sequence
  Synthetic: FXN 3 forward 9:69040442-69040465; SpCas9
tggatcacgagttcaggaga

SEQ ID NO: 33091 - DNA, 19 bp, Artificial Sequence
  Synthetic: FXN 3 forward 9:69040443-69040465; SpCas9
ggatcacgagttcaggaga

SEQ ID NO: 33092 - DNA, 18 bp, Artificial Sequence
  Synthetic: FXN 3 forward 9:69040444-69040465; SpCas9
gatcacgagttcaggaga

SEQ ID NO: 33093 - DNA, 25 bp, Artificial Sequence
  Synthetic: FXN 3 forward 9:69040439-69040467; SpCas9
aggtggatcacgagttcaggagatg

SEQ ID NO: 33094 - DNA, 24 bp, Artificial Sequence
  Synthetic: FXN 3 forward 9:69040440-69040467; SpCas9
ggtggatcacgagttcaggagatg

SEQ ID NO: 33095 - DNA, 23 bp, Artificial Sequence
  Synthetic: FXN 3 forward 9:69040441-69040467; SpCas9
gtggatcacgagttcaggagatg

SEQ ID NO: 33096 - DNA, 22 bp, Artificial Sequence
  Synthetic: FXN 3 forward 9:69040442-69040467; SpCas9
tggatcacgagttcaggagatg

SEQ ID NO: 33097 - DNA, 21 bp, Artificial Sequence
  Synthetic: FXN 3 forward 9:69040443-69040467; SpCas9
ggatcacgagttcaggagatg

SEQ ID NO: 33098 - DNA, 20 bp, Artificial Sequence
  Synthetic: FXN 3 forward 9:69040444-69040467; SpCas9
gatcacgagttcaggagatg

SEQ ID NO: 33099 - DNA, 19 bp, Artificial Sequence
  Synthetic: FXN 3 forward 9:69040445-69040467; SpCas9
atcacgagttcaggagatg

SEQ ID NO: 33100 - DNA, 18 bp, Artificial Sequence
  Synthetic: FXN 3 forward 9:69040446-69040467; SpCas9
tcacgagttcaggagatg

SEQ ID NO: 33101 - DNA, 25 bp, Artificial Sequence
  Synthetic: FXN 3 forward 9:69040449-69040477; SpCas9
cgagttcaggagatggagaccatcc

SEQ ID NO: 33102 - DNA, 24 bp, Artificial Sequence
  Synthetic: FXN 3 forward 9:69040450-69040477; SpCas9
gagttcaggagatggagaccatcc

SEQ ID NO: 33103 - DNA, 23 bp, Artificial Sequence
  Synthetic: FXN 3 forward 9:69040451-69040477; SpCas9
agttcaggagatggagaccatcc

SEQ ID NO: 33104 - DNA, 22 bp, Artificial Sequence
  Synthetic: FXN 3 forward 9:69040452-69040477; SpCas9
gttcaggagatggagaccatcc

SEQ ID NO: 33105 - DNA, 21 bp, Artificial Sequence
  Synthetic: FXN 3 forward 9:69040453-69040477; SpCas9
ttcaggagatggagaccatcc

SEQ ID NO: 33106 - DNA, 20 bp, Artificial Sequence
  Synthetic: FXN 3 forward 9:69040454-69040477; SpCas9
tcaggagatggagaccatcc

SEQ ID NO: 33107 - DNA, 19 bp, Artificial Sequence
  Synthetic: FXN 3 forward 9:69040455-69040477; SpCas9
caggagatggagaccatcc

SEQ ID NO: 33108 - DNA, 18 bp, Artificial Sequence
  Synthetic: FXN 3 forward 9:69040456-69040477; SpCas9
aggagatggagaccatcc

SEQ ID NO: 33109 - DNA, 25 bp, Artificial Sequence
  Synthetic: FXN 3 reverse 9:69040468-69040496; SpCas9
tggggtttcatcgtattagccagga

SEQ ID NO: 33110 - DNA, 24 bp, Artificial Sequence
  Synthetic: FXN 3 reverse 9:69040469-69040496; SpCas9
ggggtttcatcgtattagccagga

SEQ ID NO: 33111 - DNA, 23 bp, Artificial Sequence
  Synthetic: FXN 3 reverse 9:69040470-69040496; SpCas9
gggtttcatcgtattagccagga

SEQ ID NO: 33112 - DNA, 22 bp, Artificial Sequence
  Synthetic: FXN 3 reverse 9:69040471-69040496; SpCas9
ggtttcatcgtattagccagga

SEQ ID NO: 33113 - DNA, 21 bp, Artificial Sequence
  Synthetic: FXN 3 reverse 9:69040472-69040496; SpCas9
gtttcatcgtattagccagga

SEQ ID NO: 33114 - DNA, 20 bp, Artificial Sequence
  Synthetic: FXN 3 reverse 9:69040473-69040496; SpCas9
tttcatcgtattagccagga

SEQ ID NO: 33115 - DNA, 19 bp, Artificial Sequence
  Synthetic: FXN 3 reverse 9:69040474-69040496; SpCas9
ttcatcgtattagccagga

SEQ ID NO: 33116 - DNA, 18 bp, Artificial Sequence
  Synthetic: FXN 3 reverse 9:69040475-69040496; SpCas9
tcatcgtattagccagga

SEQ ID NO: 33117 - DNA, 25 bp, Artificial Sequence
  Synthetic: FXN 3 reverse 9:69040472-69040500; SpCas9
gagatggggtttcatcgtattagcc

SEQ ID NO: 33118 - DNA, 24 bp, Artificial Sequence
  Synthetic: FXN 3 reverse 9:69040473-69040500; SpCas9
agatggggtttcatcgtattagcc

SEQ ID NO: 33119 - DNA, 23 bp, Artificial Sequence
  Synthetic: FXN 3 reverse 9:69040474-69040500; SpCas9
gatggggtttcatcgtattagcc

SEQ ID NO: 33120 - DNA, 22 bp, Artificial Sequence
  Synthetic: FXN 3 reverse 9:69040475-69040500; SpCas9
atggggtttcatcgtattagcc

SEQ ID NO: 33121 - DNA, 21 bp, Artificial Sequence
  Synthetic: FXN 3 reverse 9:69040476-69040500; SpCas9
tggggtttcatcgtattagcc

SEQ ID NO: 33122 - DNA, 20 bp, Artificial Sequence
  Synthetic: FXN 3 reverse 9:69040477-69040500; SpCas9
ggggtttcatcgtattagcc

SEQ ID NO: 33123 - DNA, 19 bp, Artificial Sequence
  Synthetic: FXN 3 reverse 9:69040478-69040500; SpCas9
gggtttcatcgtattagcc

SEQ ID NO: 33124 - DNA, 18 bp, Artificial Sequence
  Synthetic: FXN 3 reverse 9:69040479-69040500; SpCas9
ggtttcatcgtattagcc

SEQ ID NO: 33125 - DNA, 25 bp, Artificial Sequence
  Synthetic: FXN 3 reverse 9:69040473-69040501; SpCas9
agagatggggtttcatcgtattagc

SEQ ID NO: 33126 - DNA, 24 bp, Artificial Sequence
  Synthetic: FXN 3 reverse 9:69040474-69040501; SpCas9
gagatggggtttcatcgtattagc

SEQ ID NO: 33127 - DNA, 23 bp, Artificial Sequence
  Synthetic: FXN 3 reverse 9:69040475-69040501; SpCas9
agatggggtttcatcgtattagc

SEQ ID NO: 33128 - DNA, 22 bp, Artificial Sequence
  Synthetic: FXN 3 reverse 9:69040476-69040501; SpCas9
gatggggtttcatcgtattagc

SEQ ID NO: 33129 - DNA, 21 bp, Artificial Sequence
  Synthetic: FXN 3 reverse 9:69040477-69040501; SpCas9
atggggtttcatcgtattagc

SEQ ID NO: 33130 - DNA, 20 bp, Artificial Sequence
  Synthetic: FXN 3 reverse 9:69040478-69040501; SpCas9
tggggtttcatcgtattagc

SEQ ID NO: 33131 - DNA, 19 bp, Artificial Sequence
  Synthetic: FXN 3 reverse 9:69040479-69040501; SpCas9
ggggtttcatcgtattagc

SEQ ID NO: 33132 - DNA, 18 bp, Artificial Sequence
  Synthetic: FXN 3 reverse 9:69040480-69040501; SpCas9
gggtttcatcgtattagc

SEQ ID NO: 33133 - DNA, 25 bp, Artificial Sequence
  Synthetic: FXN 3 reverse 9:69040477-69040505; SpCas9
tagtagagatggggtttcatcgtat

SEQ ID NO: 33134 - DNA, 24 bp, Artificial Sequence
  Synthetic: FXN 3 reverse 9:69040478-69040505; SpCas9
agtagagatggggtttcatcgtat

SEQ ID NO: 33135 - DNA, 23 bp, Artificial Sequence
  Synthetic: FXN 3 reverse 9:69040479-69040505; SpCas9
gtagagatggggtttcatcgtat

SEQ ID NO: 33136 - DNA, 22 bp, Artificial Sequence
  Synthetic: FXN 3 reverse 9:69040480-69040505; SpCas9
tagagatggggtttcatcgtat

SEQ ID NO: 33137 - DNA, 21 bp, Artificial Sequence
  Synthetic: FXN 3 reverse 9:69040481-69040505; SpCas9
agagatggggtttcatcgtat

SEQ ID NO: 33138 - DNA, 20 bp, Artificial Sequence
  Synthetic: FXN 3 reverse 9:69040482-69040505; SpCas9
gagatggggtttcatcgtat

SEQ ID NO: 33139 - DNA, 19 bp, Artificial Sequence
  Synthetic: FXN 3 reverse 9:69040483-69040505; SpCas9
agatggggtttcatcgtat

SEQ ID NO: 33140 - DNA, 18 bp, Artificial Sequence
  Synthetic: FXN 3 reverse 9:69040484-69040505; SpCas9
gatggggtttcatcgtat

SEQ ID NO: 33141 - DNA, 25 bp, Artificial Sequence
  Synthetic: FXN 3 reverse 9:69040491-69040519; SpCas9
attttttgtatttttagtagagatg

SEQ ID NO: 33142 - DNA, 24 bp, Artificial Sequence
  Synthetic: FXN 3 reverse 9:69040492-69040519; SpCas9
ttttttgtatttttagtagagatg

SEQ ID NO: 33143 - DNA, 23 bp, Artificial Sequence
  Synthetic: FXN 3 reverse 9:69040493-69040519; SpCas9
tttttgtatttttagtagagatg

SEQ ID NO: 33144 - DNA, 22 bp, Artificial Sequence
  Synthetic: FXN 3 reverse 9:69040494-69040519; SpCas9
ttttgtatttttagtagagatg

SEQ ID NO: 33145 - DNA, 21 bp, Artificial Sequence
  Synthetic: FXN 3 reverse 9:69040495-69040519; SpCas9
tttgtatttttagtagagatg

SEQ ID NO: 33146 - DNA, 20 bp, Artificial Sequence
  Synthetic: FXN 3 reverse 9:69040496-69040519; SpCas9
ttgtatttttagtagagatg

SEQ ID NO: 33147 - DNA, 19 bp, Artificial Sequence
  Synthetic: FXN 3 reverse 9:69040497-69040519; SpCas9
tgtatttttagtagagatg

SEQ ID NO: 33148 - DNA, 18 bp, Artificial Sequence
  Synthetic: FXN 3 reverse 9:69040498-69040519; SpCas9
gtatttttagtagagatg

SEQ ID NO: 33149 - DNA, 25 bp, Artificial Sequence
  Synthetic: FXN 3 reverse 9:69040492-69040520; SpCas9
aattttttgtatttttagtagagat

SEQ ID NO: 33150 - DNA, 24 bp, Artificial Sequence
  Synthetic: FXN 3 reverse 9:69040493-69040520; SpCas9
attttttgtatttttagtagagat

SEQ ID NO: 33151 - DNA, 23 bp, Artificial Sequence
  Synthetic: FXN 3 reverse 9:69040494-69040520; SpCas9
ttttttgtatttttagtagagat

SEQ ID NO: 33152 - DNA, 22 bp, Artificial Sequence
  Synthetic: FXN 3 reverse 9:69040495-69040520; SpCas9
tttttgtatttttagtagagat

SEQ ID NO: 33153 - DNA, 21 bp, Artificial Sequence
  Synthetic: FXN 3 reverse 9:69040496-69040520; SpCas9
ttttgtatttttagtagagat

SEQ ID NO: 33154 - DNA, 20 bp, Artificial Sequence
  Synthetic: FXN 3 reverse 9:69040497-69040520; SpCas9
tttgtatttttagtagagat

SEQ ID NO: 33155 - DNA, 19 bp, Artificial Sequence
  Synthetic: FXN 3 reverse 9:69040498-69040520; SpCas9
ttgtatttttagtagagat

SEQ ID NO: 33156 - DNA, 18 bp, Artificial Sequence
  Synthetic: FXN 3 reverse 9:69040499-69040520; SpCas9
tgtatttttagtagagat

SEQ ID NO: 33157 - DNA, 25 bp, Artificial Sequence
  Synthetic: FXN 3 reverse 9:69040493-69040521; SpCas9
taattttttgtatttttagtagaga

SEQ ID NO: 33158 - DNA, 24 bp, Artificial Sequence
  Synthetic: FXN 3 reverse 9:69040494-69040521; SpCas9
aattttttgtatttttagtagaga

SEQ ID NO: 33159 - DNA, 23 bp, Artificial Sequence
  Synthetic: FXN 3 reverse 9:69040495-69040521; SpCas9
attttttgtatttttagtagaga

SEQ ID NO: 33160 - DNA, 22 bp, Artificial Sequence
  Synthetic: FXN 3 reverse 9:69040496-69040521; SpCas9
ttttttgtatttttagtagaga

SEQ ID NO: 33161 - DNA, 21 bp, Artificial Sequence
  Synthetic: FXN 3 reverse 9:69040497-69040521; SpCas9
tttttgtatttttagtagaga

SEQ ID NO: 33162 - DNA, 20 bp, Artificial Sequence
  Synthetic: FXN 3 reverse 9:69040498-69040521; SpCas9
ttttgtatttttagtagaga

SEQ ID NO: 33163 - DNA, 19 bp, Artificial Sequence
  Synthetic: FXN 3 reverse 9:69040499-69040521; SpCas9
tttgtatttttagtagaga

SEQ ID NO: 33164 - DNA, 18 bp, Artificial Sequence
  Synthetic: FXN 3 reverse 9:69040500-69040521; SpCas9
ttgtatttttagtagaga

SEQ ID NO: 33165 - DNA, 25 bp, Artificial Sequence
  Synthetic: FXN 3 forward 9:69040494-69040522; SpCas9
catctctactaaaaatacaaaaaat

SEQ ID NO: 33166 - DNA, 24 bp, Artificial Sequence
  Synthetic: FXN 3 forward 9:69040495-69040522; SpCas9
atctctactaaaaatacaaaaaat

SEQ ID NO: 33167 - DNA, 23 bp, Artificial Sequence
  Synthetic: FXN 3 forward 9:69040496-69040522; SpCas9
tctctactaaaaatacaaaaaat

SEQ ID NO: 33168 - DNA, 22 bp, Artificial Sequence
  Synthetic: FXN 3 forward 9:69040497-69040522; SpCas9
ctctactaaaaatacaaaaaat

SEQ ID NO: 33169 - DNA, 21 bp, Artificial Sequence
  Synthetic: FXN 3 forward 9:69040498-69040522; SpCas9
tctactaaaaatacaaaaaat

SEQ ID NO: 33170 - DNA, 20 bp, Artificial Sequence
  Synthetic: FXN 3 forward 9:69040499-69040522; SpCas9
ctactaaaaatacaaaaaat

SEQ ID NO: 33171 - DNA, 19 bp, Artificial Sequence
  Synthetic: FXN 3 forward 9:69040500-69040522; SpCas9
tactaaaaatacaaaaaat

SEQ ID NO: 33172 - DNA, 18 bp, Artificial Sequence
  Synthetic: FXN 3 forward 9:69040501-69040522; SpCas9
actaaaaatacaaaaaat

SEQ ID NO: 33173 - DNA, 25 bp, Artificial Sequence
  Synthetic: FXN 3 reverse 9:69040497-69040525; SpCas9
cggctaattttttgtatttttagta

SEQ ID NO: 33174 - DNA, 24 bp, Artificial Sequence
  Synthetic: FXN 3 reverse 9:69040498-69040525; SpCas9
ggctaattttttgtatttttagta

SEQ ID NO: 33175 - DNA, 23 bp, Artificial Sequence
  Synthetic: FXN 3 reverse 9:69040499-69040525; SpCas9
gctaattttttgtatttttagta

SEQ ID NO: 33176 - DNA, 22 bp, Artificial Sequence
  Synthetic: FXN 3 reverse 9:69040500-69040525; SpCas9
ctaattttttgtatttttagta

SEQ ID NO: 33177 - DNA, 21 bp, Artificial Sequence
  Synthetic: FXN 3 reverse 9:69040501-69040525; SpCas9
taattttttgtatttttagta

SEQ ID NO: 33178 - DNA, 20 bp, Artificial Sequence
  Synthetic: FXN 3 reverse 9:69040502-69040525; SpCas9
aattttttgtatttttagta

SEQ ID NO: 33179 - DNA, 19 bp, Artificial Sequence
  Synthetic: FXN 3 reverse 9:69040503-69040525; SpCas9
attttttgtatttttagta

SEQ ID NO: 33180 - DNA, 18 bp, Artificial Sequence
  Synthetic: FXN 3 reverse 9:69040504-69040525; SpCas9
ttttttgtatttttagta

SEQ ID NO: 33181 - DNA, 25 bp, Artificial Sequence
  Synthetic: FXN 3 forward 9:69040498-69040526; SpCas9
tctactaaaaatacaaaaaattagc

SEQ ID NO: 33182 - DNA, 24 bp, Artificial Sequence
  Synthetic: FXN 3 forward 9:69040499-69040526; SpCas9
ctactaaaaatacaaaaaattagc

SEQ ID NO: 33183 - DNA, 23 bp, Artificial Sequence
  Synthetic: FXN 3 forward 9:69040500-69040526; SpCas9
tactaaaaatacaaaaaattagc

SEQ ID NO: 33184 - DNA, 22 bp, Artificial Sequence
  Synthetic: FXN 3 forward 9:69040501-69040526; SpCas9
actaaaaatacaaaaaattagc

SEQ ID NO: 33185 - DNA, 21 bp, Artificial Sequence
  Synthetic: FXN 3 forward 9:69040502-69040526; SpCas9
ctaaaaatacaaaaaattagc

SEQ ID NO: 33186 - DNA, 20 bp, Artificial Sequence
  Synthetic: FXN 3 forward 9:69040503-69040526; SpCas9
taaaaatacaaaaaattagc

SEQ ID NO: 33187 - DNA, 19 bp, Artificial Sequence
  Synthetic: FXN 3 forward 9:69040504-69040526; SpCas9
aaaaatacaaaaaattagc

SEQ ID NO: 33188 - DNA, 18 bp, Artificial Sequence
  Synthetic: FXN 3 forward 9:69040505-69040526; SpCas9
aaaatacaaaaaattagc

SEQ ID NO: 33189 - DNA, 25 bp, Artificial Sequence
  Synthetic: FXN 3 forward 9:69040499-69040527; SpCas9
ctactaaaaatacaaaaaattagcc

SEQ ID NO: 33190 - DNA, 24 bp, Artificial Sequence
  Synthetic: FXN 3 forward 9:69040500-69040527; SpCas9
tactaaaaatacaaaaaattagcc

SEQ ID NO: 33191 - DNA, 23 bp, Artificial Sequence
  Synthetic: FXN 3 forward 9:69040501-69040527; SpCas9
actaaaaatacaaaaaattagcc

SEQ ID NO: 33192 - DNA, 22 bp, Artificial Sequence
  Synthetic: FXN 3 forward 9:69040502-69040527; SpCas9
ctaaaaatacaaaaaattagcc

SEQ ID NO: 33193 - DNA, 21 bp, Artificial Sequence
  Synthetic: FXN 3 forward 9:69040503-69040527; SpCas9
taaaaatacaaaaaattagcc

SEQ ID NO: 33194 - DNA, 20 bp, Artificial Sequence
  Synthetic: FXN 3 forward 9:69040504-69040527; SpCas9
aaaaatacaaaaaattagcc

SEQ ID NO: 33195 - DNA, 19 bp, Artificial Sequence
  Synthetic: FXN 3 forward 9:69040505-69040527; SpCas9
aaaatacaaaaaattagcc

SEQ ID NO: 33196 - DNA, 18 bp, Artificial Sequence
  Synthetic: FXN 3 forward 9:69040506-69040527; SpCas9
aaatacaaaaaattagcc

SEQ ID NO: 33197 - DNA, 25 bp, Artificial Sequence
  Synthetic: FXN 3 reverse 9:69040499-69040527; SpCas9
cccggctaattttttgtatttttag

SEQ ID NO: 33198 - DNA, 24 bp, Artificial Sequence
  Synthetic: FXN 3 reverse 9:69040500-69040527; SpCas9
ccggctaattttttgtatttttag

SEQ ID NO: 33199 - DNA, 23 bp, Artificial Sequence
  Synthetic: FXN 3 reverse 9:69040501-69040527; SpCas9
cggctaattttttgtatttttag

SEQ ID NO: 33200 - DNA, 22 bp, Artificial Sequence
  Synthetic: FXN 3 reverse 9:69040502-69040527; SpCas9
ggctaattttttgtatttttag

SEQ ID NO: 33201 - DNA, 21 bp, Artificial Sequence
  Synthetic: FXN 3 reverse 9:69040503-69040527; SpCas9
gctaattttttgtatttttag

SEQ ID NO: 33202 - DNA, 20 bp, Artificial Sequence
  Synthetic: FXN 3 reverse 9:69040504-69040527; SpCas9
ctaattttttgtatttttag

SEQ ID NO: 33203 - DNA, 19 bp, Artificial Sequence
  Synthetic: FXN 3 reverse 9:69040505-69040527; SpCas9
taattttttgtatttttag

SEQ ID NO: 33204 - DNA, 18 bp, Artificial Sequence
  Synthetic: FXN 3 reverse 9:69040506-69040527; SpCas9
aattttttgtatttttag

SEQ ID NO: 33205 - DNA, 25 bp, Artificial Sequence
  Synthetic: FXN 3 reverse 9:69040502-69040530; SpCas9
acgcccggctaattttttgtatttt

SEQ ID NO: 33206 - DNA, 24 bp, Artificial Sequence
  Synthetic: FXN 3 reverse 9:69040503-69040530; SpCas9
cgcccggctaattttttgtatttt

SEQ ID NO: 33207 - DNA, 23 bp, Artificial Sequence
  Synthetic: FXN 3 reverse 9:69040504-69040530; SpCas9
gcccggctaattttttgtatttt

SEQ ID NO: 33208 - DNA, 22 bp, Artificial Sequence
  Synthetic: FXN 3 reverse 9:69040505-69040530; SpCas9
cccggctaattttttgtatttt

SEQ ID NO: 33209 - DNA, 21 bp, Artificial Sequence
  Synthetic: FXN 3 reverse 9:69040506-69040530; SpCas9
ccggctaattttttgtatttt

SEQ ID NO: 33210 - DNA, 20 bp, Artificial Sequence
  Synthetic: FXN 3 reverse 9:69040507-69040530; SpCas9
cggctaattttttgtatttt

SEQ ID NO: 33211 - DNA, 19 bp, Artificial Sequence
  Synthetic: FXN 3 reverse 9:69040508-69040530; SpCas9
ggctaattttttgtatttt

SEQ ID NO: 33212 - DNA, 18 bp, Artificial Sequence
  Synthetic: FXN 3 reverse 9:69040509-69040530; SpCas9
gctaattttttgtatttt

SEQ ID NO: 33213 - DNA, 25 bp, Artificial Sequence
  Synthetic: FXN 3 forward 9:69040504-69040532; SpCas9
aaaaatacaaaaaattagccgggcg

SEQ ID NO: 33214 - DNA, 24 bp, Artificial Sequence
  Synthetic: FXN 3 forward 9:69040505-69040532; SpCas9
aaaatacaaaaaattagccgggcg

SEQ ID NO: 33215 - DNA, 23 bp, Artificial Sequence
  Synthetic: FXN 3 forward 9:69040506-69040532; SpCas9
aaatacaaaaaattagccgggcg

SEQ ID NO: 33216 - DNA, 22 bp, Artificial Sequence
  Synthetic: FXN 3 forward 9:69040507-69040532; SpCas9
aatacaaaaaattagccgggcg

SEQ ID NO: 33217 - DNA, 21 bp, Artificial Sequence
  Synthetic: FXN 3 forward 9:69040508-69040532; SpCas9
atacaaaaaattagccgggcg

SEQ ID NO: 33218 - DNA, 20 bp, Artificial Sequence
  Synthetic: FXN 3 forward 9:69040509-69040532; SpCas9
tacaaaaaattagccgggcg

SEQ ID NO: 33219 - DNA, 19 bp, Artificial Sequence
  Synthetic: FXN 3 forward 9:69040510-69040532; SpCas9
acaaaaaattagccgggcg

SEQ ID NO: 33220 - DNA, 18 bp, Artificial Sequence
  Synthetic: FXN 3 forward 9:69040511-69040532; SpCas9
caaaaaattagccgggcg

SEQ ID NO: 33221 - DNA, 25 bp, Artificial Sequence
  Synthetic: FXN 3 forward 9:69040510-69040538; SpCas9
acaaaaaattagccgggcgtggtga

SEQ ID NO: 33222 - DNA, 24 bp, Artificial Sequence
  Synthetic: FXN 3 forward 9:69040511-69040538; SpCas9
caaaaaattagccgggcgtggtga

SEQ ID NO: 33223 - DNA, 23 bp, Artificial Sequence
  Synthetic: FXN 3 forward 9:69040512-69040538; SpCas9
aaaaaattagccgggcgtggtga

SEQ ID NO: 33224 - DNA, 22 bp, Artificial Sequence
  Synthetic: FXN 3 forward 9:69040513-69040538; SpCas9
aaaaattagccgggcgtggtga

SEQ ID NO: 33225 - DNA, 21 bp, Artificial Sequence
  Synthetic: FXN 3 forward 9:69040514-69040538; SpCas9
aaaattagccgggcgtggtga

SEQ ID NO: 33226 - DNA, 20 bp, Artificial Sequence
  Synthetic: FXN 3 forward 9:69040515-69040538; SpCas9
aaattagccgggcgtggtga

SEQ ID NO: 33227 - DNA, 19 bp, Artificial Sequence
  Synthetic: FXN 3 forward 9:69040516-69040538; SpCas9
aattagccgggcgtggtga

SEQ ID NO: 33228 - DNA, 18 bp, Artificial Sequence
  Synthetic: FXN 3 forward 9:69040517-69040538; SpCas9
attagccgggcgtggtga

SEQ ID NO: 33229 - DNA, 25 bp, Artificial Sequence
  Synthetic: FXN 3 forward 9:69040511-69040539; SpCas9
caaaaaattagccgggcgtggtgac

SEQ ID NO: 33230 - DNA, 24 bp, Artificial Sequence
  Synthetic: FXN 3 forward 9:69040512-69040539; SpCas9
aaaaaattagccgggcgtggtgac

SEQ ID NO: 33231 - DNA, 23 bp, Artificial Sequence
  Synthetic: FXN 3 forward 9:69040513-69040539; SpCas9
aaaaattagccgggcgtggtgac

SEQ ID NO: 33232 - DNA, 22 bp, Artificial Sequence
  Synthetic: FXN 3 forward 9:69040514-69040539; SpCas9
aaaattagccgggcgtggtgac

SEQ ID NO: 33233 - DNA, 21 bp, Artificial Sequence
  Synthetic: FXN 3 forward 9:69040515-69040539; SpCas9
aaattagccgggcgtggtgac

SEQ ID NO: 33234 - DNA, 20 bp, Artificial Sequence
  Synthetic: FXN 3 forward 9:69040516-69040539; SpCas9
aattagccgggcgtggtgac

SEQ ID NO: 33235 - DNA, 19 bp, Artificial Sequence
  Synthetic: FXN 3 forward 9:69040517-69040539; SpCas9
attagccgggcgtggtgac

SEQ ID NO: 33236 - DNA, 18 bp, Artificial Sequence
  Synthetic: FXN 3 forward 9:69040518-69040539; SpCas9
ttagccgggcgtggtgac

SEQ ID NO: 33237 - DNA, 25 bp, Artificial Sequence
  Synthetic: FXN 3 forward 9:69040520-69040548; SpCas9
agccgggcgtggtgacgggtgcctg

SEQ ID NO: 33238 - DNA, 24 bp, Artificial Sequence
  Synthetic: FXN 3 forward 9:69040521-69040548; SpCas9
gccgggcgtggtgacgggtgcctg

SEQ ID NO: 33239 - DNA, 23 bp, Artificial Sequence
  Synthetic: FXN 3 forward 9:69040522-69040548; SpCas9
ccgggcgtggtgacgggtgcctg

SEQ ID NO: 33240 - DNA, 22 bp, Artificial Sequence
  Synthetic: FXN 3 forward 9:69040523-69040548; SpCas9
cgggcgtggtgacgggtgcctg

SEQ ID NO: 33241 - DNA, 21 bp, Artificial Sequence
  Synthetic: FXN 3 forward 9:69040524-69040548; SpCas9
gggcgtggtgacgggtgcctg

SEQ ID NO: 33242 - DNA, 20 bp, Artificial Sequence
  Synthetic: FXN 3 forward 9:69040525-69040548; SpCas9
ggcgtggtgacgggtgcctg

SEQ ID NO: 33243 - DNA, 19 bp, Artificial Sequence
  Synthetic: FXN 3 forward 9:69040526-69040548; SpCas9
gcgtggtgacgggtgcctg

SEQ ID NO: 33244 - DNA, 18 bp, Artificial Sequence
  Synthetic: FXN 3 forward 9:69040527-69040548; SpCas9
cgtggtgacgggtgcctg

SEQ ID NO: 33245 - DNA, 25 bp, Artificial Sequence
  Synthetic: FXN 3 reverse 9:69040522-69040550; SpCas9
gactacaggcacccgtcaccacgcc

SEQ ID NO: 33246 - DNA, 24 bp, Artificial Sequence
  Synthetic: FXN 3 reverse 9:69040523-69040550; SpCas9
actacaggcacccgtcaccacgcc

SEQ ID NO: 33247 - DNA, 23 bp, Artificial Sequence
  Synthetic: FXN 3 reverse 9:69040524-69040550; SpCas9
ctacaggcacccgtcaccacgcc

SEQ ID NO: 33248 - DNA, 22 bp, Artificial Sequence
  Synthetic: FXN 3 reverse 9:69040525-69040550; SpCas9
tacaggcacccgtcaccacgcc

SEQ ID NO: 33249 - DNA, 21 bp, Artificial Sequence
  Synthetic: FXN 3 reverse 9:69040526-69040550; SpCas9
acaggcacccgtcaccacgcc

SEQ ID NO: 33250 - DNA, 20 bp, Artificial Sequence
  Synthetic: FXN 3 reverse 9:69040527-69040550; SpCas9
caggcacccgtcaccacgcc

SEQ ID NO: 33251 - DNA, 19 bp, Artificial Sequence
  Synthetic: FXN 3 reverse 9:69040528-69040550; SpCas9
aggcacccgtcaccacgcc

SEQ ID NO: 33252 - DNA, 18 bp, Artificial Sequence
  Synthetic: FXN 3 reverse 9:69040529-69040550; SpCas9
ggcacccgtcaccacgcc

SEQ ID NO: 33253 - DNA, 25 bp, Artificial Sequence
  Synthetic: FXN 3 forward 9:69040534-69040562; SpCas9
acgggtgcctgtagtccccactact

SEQ ID NO: 33254 - DNA, 24 bp, Artificial Sequence
  Synthetic: FXN 3 forward 9:69040535-69040562; SpCas9
cgggtgcctgtagtccccactact

SEQ ID NO: 33255 - DNA, 23 bp, Artificial Sequence
  Synthetic: FXN 3 forward 9:69040536-69040562; SpCas9
gggtgcctgtagtccccactact

SEQ ID NO: 33256 - DNA, 22 bp, Artificial Sequence
  Synthetic: FXN 3 forward 9:69040537-69040562; SpCas9
ggtgcctgtagtccccactact

SEQ ID NO: 33257 - DNA, 21 bp, Artificial Sequence
  Synthetic: FXN 3 forward 9:69040538-69040562; SpCas9
gtgcctgtagtccccactact

SEQ ID NO: 33258 - DNA, 20 bp, Artificial Sequence
  Synthetic: FXN 3 forward 9:69040539-69040562; SpCas9
tgcctgtagtccccactact

SEQ ID NO: 33259 - DNA, 19 bp, Artificial Sequence
  Synthetic: FXN 3 forward 9:69040540-69040562; SpCas9
gcctgtagtccccactact

SEQ ID NO: 33260 - DNA, 18 bp, Artificial Sequence
  Synthetic: FXN 3 forward 9:69040541-69040562; SpCas9
cctgtagtccccactact

SEQ ID NO: 33261 - DNA, 25 bp, Artificial Sequence
  Synthetic: FXN 3 forward 9:69040535-69040563; SpCas9
cgggtgcctgtagtccccactactc

SEQ ID NO: 33262 - DNA, 24 bp, Artificial Sequence
  Synthetic: FXN 3 forward 9:69040536-69040563; SpCas9
gggtgcctgtagtccccactactc

SEQ ID NO: 33263 - DNA, 23 bp, Artificial Sequence
  Synthetic: FXN 3 forward 9:69040537-69040563; SpCas9
ggtgcctgtagtccccactactc

SEQ ID NO: 33264 - DNA, 22 bp, Artificial Sequence
  Synthetic: FXN 3 forward 9:69040538-69040563; SpCas9
gtgcctgtagtccccactactc

SEQ ID NO: 33265 - DNA, 21 bp, Artificial Sequence
  Synthetic: FXN 3 forward 9:69040539-69040563; SpCas9
tgcctgtagtccccactactc

SEQ ID NO: 33266 - DNA, 20 bp, Artificial Sequence
  Synthetic: FXN 3 forward 9:69040540-69040563; SpCas9
gcctgtagtccccactactc

SEQ ID NO: 33267 - DNA, 19 bp, Artificial Sequence
  Synthetic: FXN 3 forward 9:69040541-69040563; SpCas9
cctgtagtccccactactc

SEQ ID NO: 33268 - DNA, 18 bp, Artificial Sequence
  Synthetic: FXN 3 forward 9:69040542-69040563; SpCas9
ctgtagtccccactactc

SEQ ID NO: 33269 - DNA, 25 bp, Artificial Sequence
  Synthetic: FXN 3 reverse 9:69040541-69040569; SpCas9
cagcgtcccgagtagtggggactac

SEQ ID NO: 33270 - DNA, 24 bp, Artificial Sequence
  Synthetic: FXN 3 reverse 9:69040542-69040569; SpCas9
agcgtcccgagtagtggggactac

SEQ ID NO: 33271 - DNA, 23 bp, Artificial Sequence
  Synthetic: FXN 3 reverse 9:69040543-69040569; SpCas9
gcgtcccgagtagtggggactac

SEQ ID NO: 33272 - DNA, 22 bp, Artificial Sequence
  Synthetic: FXN 3 reverse 9:69040544-69040569; SpCas9
cgtcccgagtagtggggactac

SEQ ID NO: 33273 - DNA, 21 bp, Artificial Sequence
  Synthetic: FXN 3 reverse 9:69040545-69040569; SpCas9
gtcccgagtagtggggactac

SEQ ID NO: 33274 - DNA, 20 bp, Artificial Sequence
  Synthetic: FXN 3 reverse 9:69040546-69040569; SpCas9
tcccgagtagtggggactac

SEQ ID NO: 33275 - DNA, 19 bp, Artificial Sequence
  Synthetic: FXN 3 reverse 9:69040547-69040569; SpCas9
cccgagtagtggggactac

SEQ ID NO: 33276 - DNA, 18 bp, Artificial Sequence
  Synthetic: FXN 3 reverse 9:69040548-69040569; SpCas9
ccgagtagtggggactac

SEQ ID NO: 33277 - DNA, 25 bp, Artificial Sequence
  Synthetic: FXN 3 reverse 9:69040542-69040570; SpCas9
tcagcgtcccgagtagtggggacta

SEQ ID NO: 33278 - DNA, 24 bp, Artificial Sequence
  Synthetic: FXN 3 reverse 9:69040543-69040570; SpCas9
cagcgtcccgagtagtggggacta

SEQ ID NO: 33279 - DNA, 23 bp, Artificial Sequence
  Synthetic: FXN 3 reverse 9:69040544-69040570; SpCas9
agcgtcccgagtagtggggacta

SEQ ID NO: 33280 - DNA, 22 bp, Artificial Sequence
  Synthetic: FXN 3 reverse 9:69040545-69040570; SpCas9
gcgtcccgagtagtggggacta

SEQ ID NO: 33281 - DNA, 21 bp, Artificial Sequence
  Synthetic: FXN 3 reverse 9:69040546-69040570; SpCas9
cgtcccgagtagtggggacta

SEQ ID NO: 33282 - DNA, 20 bp, Artificial Sequence
  Synthetic: FXN 3 reverse 9:69040547-69040570; SpCas9
gtcccgagtagtggggacta

SEQ ID NO: 33283 - DNA, 19 bp, Artificial Sequence
  Synthetic: FXN 3 reverse 9:69040548-69040570; SpCas9
tcccgagtagtggggacta

SEQ ID NO: 33284 - DNA, 18 bp, Artificial Sequence
  Synthetic: FXN 3 reverse 9:69040549-69040570; SpCas9
cccgagtagtggggacta

SEQ ID NO: 33285 - DNA, 25 bp, Artificial Sequence
  Synthetic: FXN 3 forward 9:69040543-69040571; SpCas9
tgtagtccccactactcgggacgct

SEQ ID NO: 33286 - DNA, 24 bp, Artificial Sequence
  Synthetic: FXN 3 forward 9:69040544-69040571; SpCas9
gtagtccccactactcgggacgct

SEQ ID NO: 33287 - DNA, 23 bp, Artificial Sequence
  Synthetic: FXN 3 forward 9:69040545-69040571; SpCas9
tagtccccactactcgggacgct

SEQ ID NO: 33288 - DNA, 22 bp, Artificial Sequence
  Synthetic: FXN 3 forward 9:69040546-69040571; SpCas9
agtccccactactcgggacgct

SEQ ID NO: 33289 - DNA, 21 bp, Artificial Sequence
  Synthetic: FXN 3 forward 9:69040547-69040571; SpCas9
gtccccactactcgggacgct

SEQ ID NO: 33290 - DNA, 20 bp, Artificial Sequence
  Synthetic: FXN 3 forward 9:69040548-69040571; SpCas9
tccccactactcgggacgct

SEQ ID NO: 33291 - DNA, 19 bp, Artificial Sequence
  Synthetic: FXN 3 forward 9:69040549-69040571; SpCas9
ccccactactcgggacgct

SEQ ID NO: 33292 - DNA, 18 bp, Artificial Sequence
  Synthetic: FXN 3 forward 9:69040550-69040571; SpCas9
cccactactcgggacgct

SEQ ID NO: 33293 - DNA, 25 bp, Artificial Sequence
  Synthetic: FXN 3 forward 9:69040544-69040572; SpCas9
gtagtccccactactcgggacgctg

SEQ ID NO: 33294 - DNA, 24 bp, Artificial Sequence
  Synthetic: FXN 3 forward 9:69040545-69040572; SpCas9
tagtccccactactcgggacgctg

SEQ ID NO: 33295 - DNA, 23 bp, Artificial Sequence
  Synthetic: FXN 3 forward 9:69040546-69040572; SpCas9
agtccccactactcgggacgctg

SEQ ID NO: 33296 - DNA, 22 bp, Artificial Sequence
  Synthetic: FXN 3 forward 9:69040547-69040572; SpCas9
gtccccactactcgggacgctg

SEQ ID NO: 33297 - DNA, 21 bp, Artificial Sequence
  Synthetic: FXN 3 forward 9:69040548-69040572; SpCas9
tccccactactcgggacgctg

SEQ ID NO: 33298 - DNA, 20 bp, Artificial Sequence
  Synthetic: FXN 3 forward 9:69040549-69040572; SpCas9
ccccactactcgggacgctg

SEQ ID NO: 33299 - DNA, 19 bp, Artificial Sequence
  Synthetic: FXN 3 forward 9:69040550-69040572; SpCas9
cccactactcgggacgctg

SEQ ID NO: 33300 - DNA, 18 bp, Artificial Sequence
  Synthetic: FXN 3 forward 9:69040551-69040572; SpCas9
ccactactcgggacgctg

SEQ ID NO: 33301 - DNA, 25 bp, Artificial Sequence
  Synthetic: FXN 3 forward 9:69040547-69040575; SpCas9
gtccccactactcgggacgctgagg

SEQ ID NO: 33302 - DNA, 24 bp, Artificial Sequence
  Synthetic: FXN 3 forward 9:69040548-69040575; SpCas9
tccccactactcgggacgctgagg

SEQ ID NO: 33303 - DNA, 23 bp, Artificial Sequence
  Synthetic: FXN 3 forward 9:69040549-69040575; SpCas9
ccccactactcgggacgctgagg

SEQ ID NO: 33304 - DNA, 22 bp, Artificial Sequence
  Synthetic: FXN 3 forward 9:69040550-69040575; SpCas9
cccactactcgggacgctgagg

SEQ ID NO: 33305 - DNA, 21 bp, Artificial Sequence
  Synthetic: FXN 3 forward 9:69040551-69040575; SpCas9
ccactactcgggacgctgagg

SEQ ID NO: 33306 - DNA, 20 bp, Artificial Sequence
  Synthetic: FXN 3 forward 9:69040552-69040575; SpCas9
cactactcgggacgctgagg

SEQ ID NO: 33307 - DNA, 19 bp, Artificial Sequence
  Synthetic: FXN 3 forward 9:69040553-69040575; SpCas9
actactcgggacgctgagg

SEQ ID NO: 33308 - DNA, 18 bp, Artificial Sequence
  Synthetic: FXN 3 forward 9:69040554-69040575; SpCas9
ctactcgggacgctgagg

SEQ ID NO: 33309 - DNA, 25 bp, Artificial Sequence
  Synthetic: FXN 3 forward 9:69040548-69040576; SpCas9
tccccactactcgggacgctgaggc

SEQ ID NO: 33310 - DNA, 24 bp, Artificial Sequence
  Synthetic: FXN 3 forward 9:69040549-69040576; SpCas9
ccccactactcgggacgctgaggc

SEQ ID NO: 33311 - DNA, 23 bp, Artificial Sequence
  Synthetic: FXN 3 forward 9:69040550-69040576; SpCas9
cccactactcgggacgctgaggc

SEQ ID NO: 33312 - DNA, 22 bp, Artificial Sequence
  Synthetic: FXN 3 forward 9:69040551-69040576; SpCas9
ccactactcgggacgctgaggc

SEQ ID NO: 33313 - DNA, 21 bp, Artificial Sequence
  Synthetic: FXN 3 forward 9:69040552-69040576; SpCas9
cactactcgggacgctgaggc

SEQ ID NO: 33314 - DNA, 20 bp, Artificial Sequence
  Synthetic: FXN 3 forward 9:69040553-69040576; SpCas9
actactcgggacgctgaggc

SEQ ID NO: 33315 - DNA, 19 bp, Artificial Sequence
  Synthetic: FXN 3 forward 9:69040554-69040576; SpCas9
ctactcgggacgctgaggc

SEQ ID NO: 33316 - DNA, 18 bp, Artificial Sequence
  Synthetic: FXN 3 forward 9:69040555-69040576; SpCas9
tactcgggacgctgaggc

SEQ ID NO: 33317 - DNA, 25 bp, Artificial Sequence
  Synthetic: FXN 3 reverse 9:69040549-69040577; SpCas9
tcctgcctcagcgtcccgagtagtg

SEQ ID NO: 33318 - DNA, 24 bp, Artificial Sequence
  Synthetic: FXN 3 reverse 9:69040550-69040577; SpCas9
cctgcctcagcgtcccgagtagtg

SEQ ID NO: 33319 - DNA, 23 bp, Artificial Sequence
  Synthetic: FXN 3 reverse 9:69040551-69040577; SpCas9
ctgcctcagcgtcccgagtagtg

SEQ ID NO: 33320 - DNA, 22 bp, Artificial Sequence
  Synthetic: FXN 3 reverse 9:69040552-69040577; SpCas9
tgcctcagcgtcccgagtagtg

SEQ ID NO: 33321 - DNA, 21 bp, Artificial Sequence
  Synthetic: FXN 3 reverse 9:69040553-69040577; SpCas9
gcctcagcgtcccgagtagtg

SEQ ID NO: 33322 - DNA, 20 bp, Artificial Sequence
  Synthetic: FXN 3 reverse 9:69040554-69040577; SpCas9
cctcagcgtcccgagtagtg

SEQ ID NO: 33323 - DNA, 19 bp, Artificial Sequence
  Synthetic: FXN 3 reverse 9:69040555-69040577; SpCas9
ctcagcgtcccgagtagtg

SEQ ID NO: 33324 - DNA, 18 bp, Artificial Sequence
  Synthetic: FXN 3 reverse 9:69040556-69040577; SpCas9
tcagcgtcccgagtagtg

SEQ ID NO: 33325 - DNA, 25 bp, Artificial Sequence
  Synthetic: FXN 3 forward 9:69040550-69040578; SpCas9
cccactactcgggacgctgaggcag

SEQ ID NO: 33326 - DNA, 24 bp, Artificial Sequence
  Synthetic: FXN 3 forward 9:69040551-69040578; SpCas9
ccactactcgggacgctgaggcag

SEQ ID NO: 33327 - DNA, 23 bp, Artificial Sequence
  Synthetic: FXN 3 forward 9:69040552-69040578; SpCas9
cactactcgggacgctgaggcag

SEQ ID NO: 33328 - DNA, 22 bp, Artificial Sequence
  Synthetic: FXN 3 forward 9:69040553-69040578; SpCas9
actactcgggacgctgaggcag

SEQ ID NO: 33329 - DNA, 21 bp, Artificial Sequence
  Synthetic: FXN 3 forward 9:69040554-69040578; SpCas9
ctactcgggacgctgaggcag

SEQ ID NO: 33330 - DNA, 20 bp, Artificial Sequence
  Synthetic: FXN 3 forward 9:69040555-69040578; SpCas9
tactcgggacgctgaggcag

SEQ ID NO: 33331 - DNA, 19 bp, Artificial Sequence
  Synthetic: FXN 3 forward 9:69040556-69040578; SpCas9
actcgggacgctgaggcag

SEQ ID NO: 33332 - DNA, 18 bp, Artificial Sequence
  Synthetic: FXN 3 forward 9:69040557-69040578; SpCas9
ctcgggacgctgaggcag

SEQ ID NO: 33333 - DNA, 25 bp, Artificial Sequence
  Synthetic: FXN 3 reverse 9:69040550-69040578; SpCas9
ctcctgcctcagcgtcccgagtagt

SEQ ID NO: 33334 - DNA, 24 bp, Artificial Sequence
  Synthetic: FXN 3 reverse 9:69040551-69040578; SpCas9
tcctgcctcagcgtcccgagtagt

SEQ ID NO: 33335 - DNA, 23 bp, Artificial Sequence
  Synthetic: FXN 3 reverse 9:69040552-69040578; SpCas9
cctgcctcagcgtcccgagtagt

SEQ ID NO: 33336 - DNA, 22 bp, Artificial Sequence
  Synthetic: FXN 3 reverse 9:69040553-69040578; SpCas9
ctgcctcagcgtcccgagtagt

SEQ ID NO: 33337 - DNA, 21 bp, Artificial Sequence
  Synthetic: FXN 3 reverse 9:69040554-69040578; SpCas9
tgcctcagcgtcccgagtagt

SEQ ID NO: 33338 - DNA, 20 bp, Artificial Sequence
  Synthetic: FXN 3 reverse 9:69040555-69040578; SpCas9
gcctcagcgtcccgagtagt

SEQ ID NO: 33339 - DNA, 19 bp, Artificial Sequence
  Synthetic: FXN 3 reverse 9:69040556-69040578; SpCas9
cctcagcgtcccgagtagt

SEQ ID NO: 33340 - DNA, 18 bp, Artificial Sequence
  Synthetic: FXN 3 reverse 9:69040557-69040578; SpCas9
ctcagcgtcccgagtagt

SEQ ID NO: 33341 - DNA, 25 bp, Artificial Sequence
  Synthetic: FXN 3 reverse 9:69040551-69040579; SpCas9
tctcctgcctcagcgtcccgagtag

SEQ ID NO: 33342 - DNA, 24 bp, Artificial Sequence
  Synthetic: FXN 3 reverse 9:69040552-69040579; SpCas9
ctcctgcctcagcgtcccgagtag

SEQ ID NO: 33343 - DNA, 23 bp, Artificial Sequence
  Synthetic: FXN 3 reverse 9:69040553-69040579; SpCas9
tcctgcctcagcgtcccgagtag

SEQ ID NO: 33344 - DNA, 22 bp, Artificial Sequence
  Synthetic: FXN 3 reverse 9:69040554-69040579; SpCas9
cctgcctcagcgtcccgagtag

SEQ ID NO: 33345 - DNA, 21 bp, Artificial Sequence
  Synthetic: FXN 3 reverse 9:69040555-69040579; SpCas9
ctgcctcagcgtcccgagtag

SEQ ID NO: 33346 - DNA, 20 bp, Artificial Sequence
  Synthetic: FXN 3 reverse 9:69040556-69040579; SpCas9
tgcctcagcgtcccgagtag

SEQ ID NO: 33347 - DNA, 19 bp, Artificial Sequence
  Synthetic: FXN 3 reverse 9:69040557-69040579; SpCas9
gcctcagcgtcccgagtag

SEQ ID NO: 33348 - DNA, 18 bp, Artificial Sequence
  Synthetic: FXN 3 reverse 9:69040558-69040579; SpCas9
cctcagcgtcccgagtag

SEQ ID NO: 33349 - DNA, 25 bp, Artificial Sequence
  Synthetic: FXN 3 reverse 9:69040554-69040582; SpCas9
cattctcctgcctcagcgtcccgag

SEQ ID NO: 33350 - DNA, 24 bp, Artificial Sequence
  Synthetic: FXN 3 reverse 9:69040555-69040582; SpCas9
attctcctgcctcagcgtcccgag

SEQ ID NO: 33351 - DNA, 23 bp, Artificial Sequence
  Synthetic: FXN 3 reverse 9:69040556-69040582; SpCas9
ttctcctgcctcagcgtcccgag

SEQ ID NO: 33352 - DNA, 22 bp, Artificial Sequence
  Synthetic: FXN 3 reverse 9:69040557-69040582; SpCas9
tctcctgcctcagcgtcccgag

SEQ ID NO: 33353 - DNA, 21 bp, Artificial Sequence
  Synthetic: FXN 3 reverse 9:69040558-69040582; SpCas9
ctcctgcctcagcgtcccgag

SEQ ID NO: 33354 - DNA, 20 bp, Artificial Sequence
  Synthetic: FXN 3 reverse 9:69040559-69040582; SpCas9
tcctgcctcagcgtcccgag

SEQ ID NO: 33355 - DNA, 19 bp, Artificial Sequence
  Synthetic: FXN 3 reverse 9:69040560-69040582; SpCas9
cctgcctcagcgtcccgag

SEQ ID NO: 33356 - DNA, 18 bp, Artificial Sequence
  Synthetic: FXN 3 reverse 9:69040561-69040582; SpCas9
ctgcctcagcgtcccgag

SEQ ID NO: 33357 - DNA, 25 bp, Artificial Sequence
  Synthetic: FXN 3 forward 9:69040555-69040583; SpCas9
tactcgggacgctgaggcaggagaa

SEQ ID NO: 33358 - DNA, 24 bp, Artificial Sequence
  Synthetic: FXN 3 forward 9:69040556-69040583; SpCas9
actcgggacgctgaggcaggagaa

SEQ ID NO: 33359 - DNA, 23 bp, Artificial Sequence
  Synthetic: FXN 3 forward 9:69040557-69040583; SpCas9
ctcgggacgctgaggcaggagaa

SEQ ID NO: 33360 - DNA, 22 bp, Artificial Sequence
  Synthetic: FXN 3 forward 9:69040558-69040583; SpCas9
tcgggacgctgaggcaggagaa

SEQ ID NO: 33361 - DNA, 21 bp, Artificial Sequence
  Synthetic: FXN 3 forward 9:69040559-69040583; SpCas9
cgggacgctgaggcaggagaa

SEQ ID NO: 33362 - DNA, 20 bp, Artificial Sequence
  Synthetic: FXN 3 forward 9:69040560-69040583; SpCas9
gggacgctgaggcaggagaa

SEQ ID NO: 33363 - DNA, 19 bp, Artificial Sequence
  Synthetic: FXN 3 forward 9:69040561-69040583; SpCas9
ggacgctgaggcaggagaa

SEQ ID NO: 33364 - DNA, 18 bp, Artificial Sequence
  Synthetic: FXN 3 forward 9:69040562-69040583; SpCas9
gacgctgaggcaggagaa

SEQ ID NO: 33365 - DNA, 25 bp, Artificial Sequence
  Synthetic: FXN 3 reverse 9:69040557-69040585; SpCas9
cgccattctcctgcctcagcgtccc

SEQ ID NO: 33366 - DNA, 24 bp, Artificial Sequence
  Synthetic: FXN 3 reverse 9:69040558-69040585; SpCas9
gccattctcctgcctcagcgtccc

SEQ ID NO: 33367 - DNA, 23 bp, Artificial Sequence
  Synthetic: FXN 3 reverse 9:69040559-69040585; SpCas9
ccattctcctgcctcagcgtccc

SEQ ID NO: 33368 - DNA, 22 bp, Artificial Sequence
  Synthetic: FXN 3 reverse 9:69040560-69040585; SpCas9
cattctcctgcctcagcgtccc

SEQ ID NO: 33369 - DNA, 21 bp, Artificial Sequence
  Synthetic: FXN 3 reverse 9:69040561-69040585; SpCas9
attctcctgcctcagcgtccc

SEQ ID NO: 33370 - DNA, 20 bp, Artificial Sequence
  Synthetic: FXN 3 reverse 9:69040562-69040585; SpCas9
ttctcctgcctcagcgtccc

SEQ ID NO: 33371 - DNA, 19 bp, Artificial Sequence
  Synthetic: FXN 3 reverse 9:69040563-69040585; SpCas9
tctcctgcctcagcgtccc

SEQ ID NO: 33372 - DNA, 18 bp, Artificial Sequence
  Synthetic: FXN 3 reverse 9:69040564-69040585; SpCas9
ctcctgcctcagcgtccc

SEQ ID NO: 33373 - DNA, 25 bp, Artificial Sequence
  Synthetic: FXN 3 forward 9:69040566-69040594; SpCas9
ctgaggcaggagaatggcgtgaacc

SEQ ID NO: 33374 - DNA, 24 bp, Artificial Sequence
  Synthetic: FXN 3 forward 9:69040567-69040594; SpCas9
tgaggcaggagaatggcgtgaacc

SEQ ID NO: 33375 - DNA, 23 bp, Artificial Sequence
  Synthetic: FXN 3 forward 9:69040568-69040594; SpCas9
gaggcaggagaatggcgtgaacc

SEQ ID NO: 33376 - DNA, 22 bp, Artificial Sequence
  Synthetic: FXN 3 forward 9:69040569-69040594; SpCas9
aggcaggagaatggcgtgaacc

SEQ ID NO: 33377 - DNA, 21 bp, Artificial Sequence
  Synthetic: FXN 3 forward 9:69040570-69040594; SpCas9
ggcaggagaatggcgtgaacc

SEQ ID NO: 33378 - DNA, 20 bp, Artificial Sequence
  Synthetic: FXN 3 forward 9:69040571-69040594; SpCas9
gcaggagaatggcgtgaacc

SEQ ID NO: 33379 - DNA, 19 bp, Artificial Sequence
  Synthetic: FXN 3 forward 9:69040572-69040594; SpCas9
caggagaatggcgtgaacc

SEQ ID NO: 33380 - DNA, 18 bp, Artificial Sequence
  Synthetic: FXN 3 forward 9:69040573-69040594; SpCas9
aggagaatggcgtgaacc

SEQ ID NO: 33381 - DNA, 25 bp, Artificial Sequence
  Synthetic: FXN 3 reverse 9:69040566-69040594; SpCas9
ccgggttcacgccattctcctgcct

SEQ ID NO: 33382 - DNA, 24 bp, Artificial Sequence
  Synthetic: FXN 3 reverse 9:69040567-69040594; SpCas9
cgggttcacgccattctcctgcct

SEQ ID NO: 33383 - DNA, 23 bp, Artificial Sequence
  Synthetic: FXN 3 reverse 9:69040568-69040594; SpCas9
gggttcacgccattctcctgcct

SEQ ID NO: 33384 - DNA, 22 bp, Artificial Sequence
  Synthetic: FXN 3 reverse 9:69040569-69040594; SpCas9
ggttcacgccattctcctgcct

SEQ ID NO: 33385 - DNA, 21 bp, Artificial Sequence
  Synthetic: FXN 3 reverse 9:69040570-69040594; SpCas9
gttcacgccattctcctgcct

SEQ ID NO: 33386 - DNA, 20 bp, Artificial Sequence
  Synthetic: FXN 3 reverse 9:69040571-69040594; SpCas9
ttcacgccattctcctgcct

SEQ ID NO: 33387 - DNA, 19 bp, Artificial Sequence
  Synthetic: FXN 3 reverse 9:69040572-69040594; SpCas9
tcacgccattctcctgcct

SEQ ID NO: 33388 - DNA, 18 bp, Artificial Sequence
  Synthetic: FXN 3 reverse 9:69040573-69040594; SpCas9
cacgccattctcctgcct

SEQ ID NO: 33389 - DNA, 25 bp, Artificial Sequence
  Synthetic: FXN 3 forward 9:69040567-69040595; SpCas9
tgaggcaggagaatggcgtgaaccc

SEQ ID NO: 33390 - DNA, 24 bp, Artificial Sequence
  Synthetic: FXN 3 forward 9:69040568-69040595; SpCas9
gaggcaggagaatggcgtgaaccc

SEQ ID NO: 33391 - DNA, 23 bp, Artificial Sequence
  Synthetic: FXN 3 forward 9:69040569-69040595; SpCas9
aggcaggagaatggcgtgaaccc

SEQ ID NO: 33392 - DNA, 22 bp, Artificial Sequence
  Synthetic: FXN 3 forward 9:69040570-69040595; SpCas9
ggcaggagaatggcgtgaaccc

SEQ ID NO: 33393 - DNA, 21 bp, Artificial Sequence
  Synthetic: FXN 3 forward 9:69040571-69040595; SpCas9
gcaggagaatggcgtgaaccc

SEQ ID NO: 33394 - DNA, 20 bp, Artificial Sequence
  Synthetic: FXN 3 forward 9:69040572-69040595; SpCas9
caggagaatggcgtgaaccc

SEQ ID NO: 33395 - DNA, 19 bp, Artificial Sequence
  Synthetic: FXN 3 forward 9:69040573-69040595; SpCas9
aggagaatggcgtgaaccc

SEQ ID NO: 33396 - DNA, 18 bp, Artificial Sequence
  Synthetic: FXN 3 forward 9:69040574-69040595; SpCas9
ggagaatggcgtgaaccc

SEQ ID NO: 33397 - DNA, 25 bp, Artificial Sequence
  Synthetic: FXN 3 forward 9:69040569-69040597; SpCas9
aggcaggagaatggcgtgaacccgg

SEQ ID NO: 33398 - DNA, 24 bp, Artificial Sequence
  Synthetic: FXN 3 forward 9:69040570-69040597; SpCas9
ggcaggagaatggcgtgaacccgg

SEQ ID NO: 33399 - DNA, 23 bp, Artificial Sequence
  Synthetic: FXN 3 forward 9:69040571-69040597; SpCas9
gcaggagaatggcgtgaacccgg

SEQ ID NO: 33400 - DNA, 22 bp, Artificial Sequence
  Synthetic: FXN 3 forward 9:69040572-69040597; SpCas9
caggagaatggcgtgaacccgg

SEQ ID NO: 33401 - DNA, 21 bp, Artificial Sequence
  Synthetic: FXN 3 forward 9:69040573-69040597; SpCas9
aggagaatggcgtgaacccgg

SEQ ID NO: 33402 - DNA, 20 bp, Artificial Sequence
  Synthetic: FXN 3 forward 9:69040574-69040597; SpCas9
ggagaatggcgtgaacccgg

SEQ ID NO: 33403 - DNA, 19 bp, Artificial Sequence
  Synthetic: FXN 3 forward 9:69040575-69040597; SpCas9
gagaatggcgtgaacccgg

SEQ ID NO: 33404 - DNA, 18 bp, Artificial Sequence
  Synthetic: FXN 3 forward 9:69040576-69040597; SpCas9
agaatggcgtgaacccgg

SEQ ID NO: 33405 - DNA, 25 bp, Artificial Sequence
  Synthetic: FXN 3 forward 9:69040570-69040598; SpCas9
ggcaggagaatggcgtgaacccggg

SEQ ID NO: 33406 - DNA, 24 bp, Artificial Sequence
  Synthetic: FXN 3 forward 9:69040571-69040598; SpCas9
gcaggagaatggcgtgaacccggg

SEQ ID NO: 33407 - DNA, 23 bp, Artificial Sequence
  Synthetic: FXN 3 forward 9:69040572-69040598; SpCas9
caggagaatggcgtgaacccggg

SEQ ID NO: 33408 - DNA, 22 bp, Artificial Sequence
  Synthetic: FXN 3 forward 9:69040573-69040598; SpCas9
aggagaatggcgtgaacccggg

SEQ ID NO: 33409 - DNA, 21 bp, Artificial Sequence
  Synthetic: FXN 3 forward 9:69040574-69040598; SpCas9
ggagaatggcgtgaacccggg

SEQ ID NO: 33410 - DNA, 20 bp, Artificial Sequence
  Synthetic: FXN 3 forward 9:69040575-69040598; SpCas9
gagaatggcgtgaacccggg

SEQ ID NO: 33411 - DNA, 19 bp, Artificial Sequence
  Synthetic: FXN 3 forward 9:69040576-69040598; SpCas9
agaatggcgtgaacccggg

SEQ ID NO: 33412 - DNA, 18 bp, Artificial Sequence
  Synthetic: FXN 3 forward 9:69040577-69040598; SpCas9
gaatggcgtgaacccggg

SEQ ID NO: 33413 - DNA, 25 bp, Artificial Sequence
  Synthetic: FXN 3 forward 9:69040573-69040601; SpCas9
aggagaatggcgtgaacccgggagg

SEQ ID NO: 33414 - DNA, 24 bp, Artificial Sequence
  Synthetic: FXN 3 forward 9:69040574-69040601; SpCas9
ggagaatggcgtgaacccgggagg

SEQ ID NO: 33415 - DNA, 23 bp, Artificial Sequence
  Synthetic: FXN 3 forward 9:69040575-69040601; SpCas9
gagaatggcgtgaacccgggagg

SEQ ID NO: 33416 - DNA, 22 bp, Artificial Sequence
  Synthetic: FXN 3 forward 9:69040576-69040601; SpCas9
agaatggcgtgaacccgggagg

SEQ ID NO: 33417 - DNA, 21 bp, Artificial Sequence
  Synthetic: FXN 3 forward 9:69040577-69040601; SpCas9
gaatggcgtgaacccgggagg

SEQ ID NO: 33418 - DNA, 20 bp, Artificial Sequence
  Synthetic: FXN 3 forward 9:69040578-69040601; SpCas9
aatggcgtgaacccgggagg

SEQ ID NO: 33419 - DNA, 19 bp, Artificial Sequence
  Synthetic: FXN 3 forward 9:69040579-69040601; SpCas9
atggcgtgaacccgggagg

SEQ ID NO: 33420 - DNA, 18 bp, Artificial Sequence
  Synthetic: FXN 3 forward 9:69040580-69040601; SpCas9
tggcgtgaacccgggagg

SEQ ID NO: 33421 - DNA, 25 bp, Artificial Sequence
  Synthetic: FXN 3 forward 9:69040575-69040603; SpCas9
gagaatggcgtgaacccgggaggca

SEQ ID NO: 33422 - DNA, 24 bp, Artificial Sequence
  Synthetic: FXN 3 forward 9:69040576-69040603; SpCas9
agaatggcgtgaacccgggaggca

SEQ ID NO: 33423 - DNA, 23 bp, Artificial Sequence
  Synthetic: FXN 3 forward 9:69040577-69040603; SpCas9
gaatggcgtgaacccgggaggca

SEQ ID NO: 33424 - DNA, 22 bp, Artificial Sequence
  Synthetic: FXN 3 forward 9:69040578-69040603; SpCas9
aatggcgtgaacccgggaggca

SEQ ID NO: 33425 - DNA, 21 bp, Artificial Sequence
  Synthetic: FXN 3 forward 9:69040579-69040603; SpCas9
atggcgtgaacccgggaggca

SEQ ID NO: 33426 - DNA, 20 bp, Artificial Sequence
  Synthetic: FXN 3 forward 9:69040580-69040603; SpCas9
tggcgtgaacccgggaggca

SEQ ID NO: 33427 - DNA, 19 bp, Artificial Sequence
  Synthetic: FXN 3 forward 9:69040581-69040603; SpCas9
ggcgtgaacccgggaggca

SEQ ID NO: 33428 - DNA, 18 bp, Artificial Sequence
  Synthetic: FXN 3 forward 9:69040582-69040603; SpCas9
gcgtgaacccgggaggca

SEQ ID NO: 33429 - DNA, 25 bp, Artificial Sequence
  Synthetic: FXN 3 forward 9:69040582-69040610; SpCas9
gcgtgaacccgggaggcagagcttg

SEQ ID NO: 33430 - DNA, 24 bp, Artificial Sequence
  Synthetic: FXN 3 forward 9:69040583-69040610; SpCas9
cgtgaacccgggaggcagagcttg

SEQ ID NO: 33431 - DNA, 23 bp, Artificial Sequence
  Synthetic: FXN 3 forward 9:69040584-69040610; SpCas9
gtgaacccgggaggcagagcttg

SEQ ID NO: 33432 - DNA, 22 bp, Artificial Sequence
  Synthetic: FXN 3 forward 9:69040585-69040610; SpCas9
tgaacccgggaggcagagcttg

SEQ ID NO: 33433 - DNA, 21 bp, Artificial Sequence
  Synthetic: FXN 3 forward 9:69040586-69040610; SpCas9
gaacccgggaggcagagcttg

SEQ ID NO: 33434 - DNA, 20 bp, Artificial Sequence
  Synthetic: FXN 3 forward 9:69040587-69040610; SpCas9
aacccgggaggcagagcttg

SEQ ID NO: 33435 - DNA, 19 bp, Artificial Sequence
  Synthetic: FXN 3 forward 9:69040588-69040610; SpCas9
acccgggaggcagagcttg

SEQ ID NO: 33436 - DNA, 18 bp, Artificial Sequence
  Synthetic: FXN 3 forward 9:69040589-69040610; SpCas9
cccgggaggcagagcttg

SEQ ID NO: 33437 - DNA, 25 bp, Artificial Sequence
  Synthetic: FXN 3 reverse 9:69040589-69040617; SpCas9
cggatcactgcaagctctgcctccc

SEQ ID NO: 33438 - DNA, 24 bp, Artificial Sequence
  Synthetic: FXN 3 reverse 9:69040590-69040617; SpCas9
ggatcactgcaagctctgcctccc

SEQ ID NO: 33439 - DNA, 23 bp, Artificial Sequence
  Synthetic: FXN 3 reverse 9:69040591-69040617; SpCas9
gatcactgcaagctctgcctccc

SEQ ID NO: 33440 - DNA, 22 bp, Artificial Sequence
  Synthetic: FXN 3 reverse 9:69040592-69040617; SpCas9
atcactgcaagctctgcctccc

SEQ ID NO: 33441 - DNA, 21 bp, Artificial Sequence
  Synthetic: FXN 3 reverse 9:69040593-69040617; SpCas9
tcactgcaagctctgcctccc

SEQ ID NO: 33442 - DNA, 20 bp, Artificial Sequence
  Synthetic: FXN 3 reverse 9:69040594-69040617; SpCas9
cactgcaagctctgcctccc

SEQ ID NO: 33443 - DNA, 19 bp, Artificial Sequence
  Synthetic: FXN 3 reverse 9:69040595-69040617; SpCas9
actgcaagctctgcctccc

SEQ ID NO: 33444 - DNA, 18 bp, Artificial Sequence
  Synthetic: FXN 3 reverse 9:69040596-69040617; SpCas9
ctgcaagctctgcctccc

SEQ ID NO: 33445 - DNA, 25 bp, Artificial Sequence
  Synthetic: FXN 3 reverse 9:69040590-69040618; SpCas9
tcggatcactgcaagctctgcctcc

SEQ ID NO: 33446 - DNA, 24 bp, Artificial Sequence
  Synthetic: FXN 3 reverse 9:69040591-69040618; SpCas9
cggatcactgcaagctctgcctcc

SEQ ID NO: 33447 - DNA, 23 bp, Artificial Sequence
  Synthetic: FXN 3 reverse 9:69040592-69040618; SpCas9
ggatcactgcaagctctgcctcc

SEQ ID NO: 33448 - DNA, 22 bp, Artificial Sequence
  Synthetic: FXN 3 reverse 9:69040593-69040618; SpCas9
gatcactgcaagctctgcctcc

SEQ ID NO: 33449 - DNA, 21 bp, Artificial Sequence
  Synthetic: FXN 3 reverse 9:69040594-69040618; SpCas9
atcactgcaagctctgcctcc

SEQ ID NO: 33450 - DNA, 20 bp, Artificial Sequence
  Synthetic: FXN 3 reverse 9:69040595-69040618; SpCas9
tcactgcaagctctgcctcc

SEQ ID NO: 33451 - DNA, 19 bp, Artificial Sequence
  Synthetic: FXN 3 reverse 9:69040596-69040618; SpCas9
cactgcaagctctgcctcc

SEQ ID NO: 33452 - DNA, 18 bp, Artificial Sequence
  Synthetic: FXN 3 reverse 9:69040597-69040618; SpCas9
actgcaagctctgcctcc

SEQ ID NO: 33453 - DNA, 25 bp, Artificial Sequence
  Synthetic: FXN 3 forward 9:69040591-69040619; SpCas9
cgggaggcagagcttgcagtgatcc

SEQ ID NO: 33454 - DNA, 24 bp, Artificial Sequence
  Synthetic: FXN 3 forward 9:69040592-69040619; SpCas9
gggaggcagagcttgcagtgatcc

SEQ ID NO: 33455 - DNA, 23 bp, Artificial Sequence
  Synthetic: FXN 3 forward 9:69040593-69040619; SpCas9
ggaggcagagcttgcagtgatcc

SEQ ID NO: 33456 - DNA, 22 bp, Artificial Sequence
  Synthetic: FXN 3 forward 9:69040594-69040619; SpCas9
gaggcagagcttgcagtgatcc

SEQ ID NO: 33457 - DNA, 21 bp, Artificial Sequence
  Synthetic: FXN 3 forward 9:69040595-69040619; SpCas9
aggcagagcttgcagtgatcc

SEQ ID NO: 33458 - DNA, 20 bp, Artificial Sequence
  Synthetic: FXN 3 forward 9:69040596-69040619; SpCas9
ggcagagcttgcagtgatcc

SEQ ID NO: 33459 - DNA, 19 bp, Artificial Sequence
  Synthetic: FXN 3 forward 9:69040597-69040619; SpCas9
gcagagcttgcagtgatcc

SEQ ID NO: 33460 - DNA, 18 bp, Artificial Sequence
  Synthetic: FXN 3 forward 9:69040598-69040619; SpCas9
cagagcttgcagtgatcc

SEQ ID NO: 33461 - DNA, 25 bp, Artificial Sequence
  Synthetic: FXN 3 reverse 9:69040603-69040631; SpCas9
cagtggcacgatctcggatcactgc

SEQ ID NO: 33462 - DNA, 24 bp, Artificial Sequence
  Synthetic: FXN 3 reverse 9:69040604-69040631; SpCas9
agtggcacgatctcggatcactgc

SEQ ID NO: 33463 - DNA, 23 bp, Artificial Sequence
  Synthetic: FXN 3 reverse 9:69040605-69040631; SpCas9
gtggcacgatctcggatcactgc

SEQ ID NO: 33464 - DNA, 22 bp, Artificial Sequence
  Synthetic: FXN 3 reverse 9:69040606-69040631; SpCas9
tggcacgatctcggatcactgc

SEQ ID NO: 33465 - DNA, 21 bp, Artificial Sequence
  Synthetic: FXN 3 reverse 9:69040607-69040631; SpCas9
ggcacgatctcggatcactgc

SEQ ID NO: 33466 - DNA, 20 bp, Artificial Sequence
  Synthetic: FXN 3 reverse 9:69040608-69040631; SpCas9
gcacgatctcggatcactgc

SEQ ID NO: 33467 - DNA, 19 bp, Artificial Sequence
  Synthetic: FXN 3 reverse 9:69040609-69040631; SpCas9
cacgatctcggatcactgc

SEQ ID NO: 33468 - DNA, 18 bp, Artificial Sequence
  Synthetic: FXN 3 reverse 9:69040610-69040631; SpCas9
acgatctcggatcactgc

SEQ ID NO: 33469 - DNA, 25 bp, Artificial Sequence
  Synthetic: FXN 3 forward 9:69040611-69040639; SpCas9
gatccgagatcgtgccactgcactc

SEQ ID NO: 33470 - DNA, 24 bp, Artificial Sequence
  Synthetic: FXN 3 forward 9:69040612-69040639; SpCas9
atccgagatcgtgccactgcactc

SEQ ID NO: 33471 - DNA, 23 bp, Artificial Sequence
  Synthetic: FXN 3 forward 9:69040613-69040639; SpCas9
tccgagatcgtgccactgcactc

SEQ ID NO: 33472 - DNA, 22 bp, Artificial Sequence
  Synthetic: FXN 3 forward 9:69040614-69040639; SpCas9
ccgagatcgtgccactgcactc

SEQ ID NO: 33473 - DNA, 21 bp, Artificial Sequence
  Synthetic: FXN 3 forward 9:69040615-69040639; SpCas9
cgagatcgtgccactgcactc

SEQ ID NO: 33474 - DNA, 20 bp, Artificial Sequence
  Synthetic: FXN 3 forward 9:69040616-69040639; SpCas9
gagatcgtgccactgcactc

SEQ ID NO: 33475 - DNA, 19 bp, Artificial Sequence
  Synthetic: FXN 3 forward 9:69040617-69040639; SpCas9
agatcgtgccactgcactc

SEQ ID NO: 33476 - DNA, 18 bp, Artificial Sequence
  Synthetic: FXN 3 forward 9:69040618-69040639; SpCas9
gatcgtgccactgcactc

SEQ ID NO: 33477 - DNA, 25 bp, Artificial Sequence
  Synthetic: FXN 3 reverse 9:69040614-69040642; SpCas9
aggctggagtgcagtggcacgatct

SEQ ID NO: 33478 - DNA, 24 bp, Artificial Sequence
  Synthetic: FXN 3 reverse 9:69040615-69040642; SpCas9
ggctggagtgcagtggcacgatct

SEQ ID NO: 33479 - DNA, 23 bp, Artificial Sequence
  Synthetic: FXN 3 reverse 9:69040616-69040642; SpCas9
gctggagtgcagtggcacgatct

SEQ ID NO: 33480 - DNA, 22 bp, Artificial Sequence
  Synthetic: FXN 3 reverse 9:69040617-69040642; SpCas9
ctggagtgcagtggcacgatct

SEQ ID NO: 33481 - DNA, 21 bp, Artificial Sequence
  Synthetic: FXN 3 reverse 9:69040618-69040642; SpCas9
tggagtgcagtggcacgatct

SEQ ID NO: 33482 - DNA, 20 bp, Artificial Sequence
  Synthetic: FXN 3 reverse 9:69040619-69040642; SpCas9
ggagtgcagtggcacgatct

SEQ ID NO: 33483 - DNA, 19 bp, Artificial Sequence
  Synthetic: FXN 3 reverse 9:69040620-69040642; SpCas9
gagtgcagtggcacgatct

SEQ ID NO: 33484 - DNA, 18 bp, Artificial Sequence
  Synthetic: FXN 3 reverse 9:69040621-69040642; SpCas9
agtgcagtggcacgatct

SEQ ID NO: 33485 - DNA, 25 bp, Artificial Sequence
  Synthetic: FXN 3 forward 9:69040616-69040644; SpCas9
gagatcgtgccactgcactccagcc

SEQ ID NO: 33486 - DNA, 24 bp, Artificial Sequence
  Synthetic: FXN 3 forward 9:69040617-69040644; SpCas9
agatcgtgccactgcactccagcc

SEQ ID NO: 33487 - DNA, 23 bp, Artificial Sequence
  Synthetic: FXN 3 forward 9:69040618-69040644; SpCas9
gatcgtgccactgcactccagcc

SEQ ID NO: 33488 - DNA, 22 bp, Artificial Sequence
  Synthetic: FXN 3 forward 9:69040619-69040644; SpCas9
atcgtgccactgcactccagcc

SEQ ID NO: 33489 - DNA, 21 bp, Artificial Sequence
  Synthetic: FXN 3 forward 9:69040620-69040644; SpCas9
tcgtgccactgcactccagcc

SEQ ID NO: 33490 - DNA, 20 bp, Artificial Sequence
  Synthetic: FXN 3 forward 9:69040621-69040644; SpCas9
cgtgccactgcactccagcc

SEQ ID NO: 33491 - DNA, 19 bp, Artificial Sequence
  Synthetic: FXN 3 forward 9:69040622-69040644; SpCas9
gtgccactgcactccagcc

SEQ ID NO: 33492 - DNA, 18 bp, Artificial Sequence
  Synthetic: FXN 3 forward 9:69040623-69040644; SpCas9
tgccactgcactccagcc

SEQ ID NO: 33493 - DNA, 25 bp, Artificial Sequence
  Synthetic: FXN 3 forward 9:69040617-69040645; SpCas9
agatcgtgccactgcactccagcct

SEQ ID NO: 33494 - DNA, 24 bp, Artificial Sequence
  Synthetic: FXN 3 forward 9:69040618-69040645; SpCas9
gatcgtgccactgcactccagcct

SEQ ID NO: 33495 - DNA, 23 bp, Artificial Sequence
  Synthetic: FXN 3 forward 9:69040619-69040645; SpCas9
atcgtgccactgcactccagcct

SEQ ID NO: 33496 - DNA, 22 bp, Artificial Sequence
  Synthetic: FXN 3 forward 9:69040620-69040645; SpCas9
tcgtgccactgcactccagcct

SEQ ID NO: 33497 - DNA, 21 bp, Artificial Sequence
  Synthetic: FXN 3 forward 9:69040621-69040645; SpCas9
cgtgccactgcactccagcct

SEQ ID NO: 33498 - DNA, 20 bp, Artificial Sequence
  Synthetic: FXN 3 forward 9:69040622-69040645; SpCas9
gtgccactgcactccagcct

SEQ ID NO: 33499 - DNA, 19 bp, Artificial Sequence
  Synthetic: FXN 3 forward 9:69040623-69040645; SpCas9
tgccactgcactccagcct

SEQ ID NO: 33500 - DNA, 18 bp, Artificial Sequence
  Synthetic: FXN 3 forward 9:69040624-69040645; SpCas9
gccactgcactccagcct

SEQ ID NO: 33501 - DNA, 25 bp, Artificial Sequence
  Synthetic: FXN 3 forward 9:69040623-69040651; SpCas9
tgccactgcactccagcctgggtga

SEQ ID NO: 33502 - DNA, 24 bp, Artificial Sequence
  Synthetic: FXN 3 forward 9:69040624-69040651; SpCas9
gccactgcactccagcctgggtga

SEQ ID NO: 33503 - DNA, 23 bp, Artificial Sequence
  Synthetic: FXN 3 forward 9:69040625-69040651; SpCas9
ccactgcactccagcctgggtga

SEQ ID NO: 33504 - DNA, 22 bp, Artificial Sequence
  Synthetic: FXN 3 forward 9:69040626-69040651; SpCas9
cactgcactccagcctgggtga

SEQ ID NO: 33505 - DNA, 21 bp, Artificial Sequence
  Synthetic: FXN 3 forward 9:69040627-69040651; SpCas9
actgcactccagcctgggtga

SEQ ID NO: 33506 - DNA, 20 bp, Artificial Sequence
  Synthetic: FXN 3 forward 9:69040628-69040651; SpCas9
ctgcactccagcctgggtga

SEQ ID NO: 33507 - DNA, 19 bp, Artificial Sequence
  Synthetic: FXN 3 forward 9:69040629-69040651; SpCas9
tgcactccagcctgggtga

SEQ ID NO: 33508 - DNA, 18 bp, Artificial Sequence
  Synthetic: FXN 3 forward 9:69040630-69040651; SpCas9
gcactccagcctgggtga

SEQ ID NO: 33509 - DNA, 25 bp, Artificial Sequence
  Synthetic: FXN 3 forward 9:69040625-69040653; SpCas9
ccactgcactccagcctgggtgaca

SEQ ID NO: 33510 - DNA, 24 bp, Artificial Sequence
  Synthetic: FXN 3 forward 9:69040626-69040653; SpCas9
cactgcactccagcctgggtgaca

SEQ ID NO: 33511 - DNA, 23 bp, Artificial Sequence
  Synthetic: FXN 3 forward 9:69040627-69040653; SpCas9
actgcactccagcctgggtgaca

SEQ ID NO: 33512 - DNA, 22 bp, Artificial Sequence
  Synthetic: FXN 3 forward 9:69040628-69040653; SpCas9
ctgcactccagcctgggtgaca

SEQ ID NO: 33513 - DNA, 21 bp, Artificial Sequence
  Synthetic: FXN 3 forward 9:69040629-69040653; SpCas9
tgcactccagcctgggtgaca

SEQ ID NO: 33514 - DNA, 20 bp, Artificial Sequence
  Synthetic: FXN 3 forward 9:69040630-69040653; SpCas9
gcactccagcctgggtgaca

SEQ ID NO: 33515 - DNA, 19 bp, Artificial Sequence
  Synthetic: FXN 3 forward 9:69040631-69040653; SpCas9
cactccagcctgggtgaca

SEQ ID NO: 33516 - DNA, 18 bp, Artificial Sequence
  Synthetic: FXN 3 forward 9:69040632-69040653; SpCas9
actccagcctgggtgaca

SEQ ID NO: 33517 - DNA, 25 bp, Artificial Sequence
  Synthetic: FXN 3 reverse 9:69040625-69040653; SpCas9
ctctgtcacccaggctggagtgcag

SEQ ID NO: 33518 - DNA, 24 bp, Artificial Sequence
  Synthetic: FXN 3 reverse 9:69040626-69040653; SpCas9
tctgtcacccaggctggagtgcag

SEQ ID NO: 33519 - DNA, 23 bp, Artificial Sequence
  Synthetic: FXN 3 reverse 9:69040627-69040653; SpCas9
ctgtcacccaggctggagtgcag

SEQ ID NO: 33520 - DNA, 22 bp, Artificial Sequence
  Synthetic: FXN 3 reverse 9:69040628-69040653; SpCas9
tgtcacccaggctggagtgcag

SEQ ID NO: 33521 - DNA, 21 bp, Artificial Sequence
  Synthetic: FXN 3 reverse 9:69040629-69040653; SpCas9
gtcacccaggctggagtgcag

SEQ ID NO: 33522 - DNA, 20 bp, Artificial Sequence
  Synthetic: FXN 3 reverse 9:69040630-69040653; SpCas9
tcacccaggctggagtgcag

SEQ ID NO: 33523 - DNA, 19 bp, Artificial Sequence
  Synthetic: FXN 3 reverse 9:69040631-69040653; SpCas9
cacccaggctggagtgcag

SEQ ID NO: 33524 - DNA, 18 bp, Artificial Sequence
  Synthetic: FXN 3 reverse 9:69040632-69040653; SpCas9
acccaggctggagtgcag

SEQ ID NO: 33525 - DNA, 25 bp, Artificial Sequence
  Synthetic: FXN 3 reverse 9:69040628-69040656; SpCas9
tcgctctgtcacccaggctggagtg

SEQ ID NO: 33526 - DNA, 24 bp, Artificial Sequence
  Synthetic: FXN 3 reverse 9:69040629-69040656; SpCas9
cgctctgtcacccaggctggagtg

SEQ ID NO: 33527 - DNA, 23 bp, Artificial Sequence
  Synthetic: FXN 3 reverse 9:69040630-69040656; SpCas9
gctctgtcacccaggctggagtg

SEQ ID NO: 33528 - DNA, 22 bp, Artificial Sequence
  Synthetic: FXN 3 reverse 9:69040631-69040656; SpCas9
ctctgtcacccaggctggagtg

SEQ ID NO: 33529 - DNA, 21 bp, Artificial Sequence
  Synthetic: FXN 3 reverse 9:69040632-69040656; SpCas9
tctgtcacccaggctggagtg

SEQ ID NO: 33530 - DNA, 20 bp, Artificial Sequence
  Synthetic: FXN 3 reverse 9:69040633-69040656; SpCas9
ctgtcacccaggctggagtg

SEQ ID NO: 33531 - DNA, 19 bp, Artificial Sequence
  Synthetic: FXN 3 reverse 9:69040634-69040656; SpCas9
tgtcacccaggctggagtg

SEQ ID NO: 33532 - DNA, 18 bp, Artificial Sequence
  Synthetic: FXN 3 reverse 9:69040635-69040656; SpCas9
gtcacccaggctggagtg

SEQ ID NO: 33533 - DNA, 25 bp, Artificial Sequence
  Synthetic: FXN 3 forward 9:69040629-69040657; SpCas9
tgcactccagcctgggtgacagagc

SEQ ID NO: 33534 - DNA, 24 bp, Artificial Sequence
  Synthetic: FXN 3 forward 9:69040630-69040657; SpCas9
gcactccagcctgggtgacagagc

SEQ ID NO: 33535 - DNA, 23 bp, Artificial Sequence
  Synthetic: FXN 3 forward 9:69040631-69040657; SpCas9
cactccagcctgggtgacagagc

SEQ ID NO: 33536 - DNA, 22 bp, Artificial Sequence
  Synthetic: FXN 3 forward 9:69040632-69040657; SpCas9
actccagcctgggtgacagagc

SEQ ID NO: 33537 - DNA, 21 bp, Artificial Sequence
  Synthetic: FXN 3 forward 9:69040633-69040657; SpCas9
ctccagcctgggtgacagagc

SEQ ID NO: 33538 - DNA, 20 bp, Artificial Sequence
  Synthetic: FXN 3 forward 9:69040634-69040657; SpCas9
tccagcctgggtgacagagc

SEQ ID NO: 33539 - DNA, 19 bp, Artificial Sequence
  Synthetic: FXN 3 forward 9:69040635-69040657; SpCas9
ccagcctgggtgacagagc

SEQ ID NO: 33540 - DNA, 18 bp, Artificial Sequence
  Synthetic: FXN 3 forward 9:69040636-69040657; SpCas9
cagcctgggtgacagagc

SEQ ID NO: 33541 - DNA, 25 bp, Artificial Sequence
  Synthetic: FXN 3 reverse 9:69040633-69040661; SpCas9
cagtctcgctctgtcacccaggctg

SEQ ID NO: 33542 - DNA, 24 bp, Artificial Sequence
  Synthetic: FXN 3 reverse 9:69040634-69040661; SpCas9
agtctcgctctgtcacccaggctg

SEQ ID NO: 33543 - DNA, 23 bp, Artificial Sequence
  Synthetic: FXN 3 reverse 9:69040635-69040661; SpCas9
gtctcgctctgtcacccaggctg

SEQ ID NO: 33544 - DNA, 22 bp, Artificial Sequence
  Synthetic: FXN 3 reverse 9:69040636-69040661; SpCas9
tctcgctctgtcacccaggctg

SEQ ID NO: 33545 - DNA, 21 bp, Artificial Sequence
  Synthetic: FXN 3 reverse 9:69040637-69040661; SpCas9
ctcgctctgtcacccaggctg

SEQ ID NO: 33546 - DNA, 20 bp, Artificial Sequence
  Synthetic: FXN 3 reverse 9:69040638-69040661; SpCas9
tcgctctgtcacccaggctg

SEQ ID NO: 33547 - DNA, 19 bp, Artificial Sequence
  Synthetic: FXN 3 reverse 9:69040639-69040661; SpCas9
cgctctgtcacccaggctg

SEQ ID NO: 33548 - DNA, 18 bp, Artificial Sequence
  Synthetic: FXN 3 reverse 9:69040640-69040661; SpCas9
gctctgtcacccaggctg

SEQ ID NO: 33549 - DNA, 25 bp, Artificial Sequence
  Synthetic: FXN 3 reverse 9:69040635-69040663; SpCas9
tgcagtctcgctctgtcacccaggc

SEQ ID NO: 33550 - DNA, 24 bp, Artificial Sequence
  Synthetic: FXN 3 reverse 9:69040636-69040663; SpCas9
gcagtctcgctctgtcacccaggc

SEQ ID NO: 33551 - DNA, 23 bp, Artificial Sequence
  Synthetic: FXN 3 reverse 9:69040637-69040663; SpCas9
cagtctcgctctgtcacccaggc

SEQ ID NO: 33552 - DNA, 22 bp, Artificial Sequence
  Synthetic: FXN 3 reverse 9:69040638-69040663; SpCas9
agtctcgctctgtcacccaggc

SEQ ID NO: 33553 - DNA, 21 bp, Artificial Sequence
  Synthetic: FXN 3 reverse 9:69040639-69040663; SpCas9
gtctcgctctgtcacccaggc

SEQ ID NO: 33554 - DNA, 20 bp, Artificial Sequence
  Synthetic: FXN 3 reverse 9:69040640-69040663; SpCas9
tctcgctctgtcacccaggc

SEQ ID NO: 33555 - DNA, 19 bp, Artificial Sequence
  Synthetic: FXN 3 reverse 9:69040641-69040663; SpCas9
ctcgctctgtcacccaggc

SEQ ID NO: 33556 - DNA, 18 bp, Artificial Sequence
  Synthetic: FXN 3 reverse 9:69040642-69040663; SpCas9
tcgctctgtcacccaggc

SEQ ID NO: 33557 - DNA, 25 bp, Artificial Sequence
  Synthetic: FXN 3 reverse 9:69040639-69040667; SpCas9
gagatgcagtctcgctctgtcaccc

SEQ ID NO: 33558 - DNA, 24 bp, Artificial Sequence
  Synthetic: FXN 3 reverse 9:69040640-69040667; SpCas9
agatgcagtctcgctctgtcaccc

SEQ ID NO: 33559 - DNA, 23 bp, Artificial Sequence
  Synthetic: FXN 3 reverse 9:69040641-69040667; SpCas9
gatgcagtctcgctctgtcaccc

SEQ ID NO: 33560 - DNA, 22 bp, Artificial Sequence
  Synthetic: FXN 3 reverse 9:69040642-69040667; SpCas9
atgcagtctcgctctgtcaccc

SEQ ID NO: 33561 - DNA, 21 bp, Artificial Sequence
  Synthetic: FXN 3 reverse 9:69040643-69040667; SpCas9
tgcagtctcgctctgtcaccc

SEQ ID NO: 33562 - DNA, 20 bp, Artificial Sequence
  Synthetic: FXN 3 reverse 9:69040644-69040667; SpCas9
gcagtctcgctctgtcaccc

SEQ ID NO: 33563 - DNA, 19 bp, Artificial Sequence
  Synthetic: FXN 3 reverse 9:69040645-69040667; SpCas9
cagtctcgctctgtcaccc

SEQ ID NO: 33564 - DNA, 18 bp, Artificial Sequence
  Synthetic: FXN 3 reverse 9:69040646-69040667; SpCas9
agtctcgctctgtcaccc

SEQ ID NO: 33565 - DNA, 25 bp, Artificial Sequence
  Synthetic: FXN 3 reverse 9:69040640-69040668; SpCas9
tgagatgcagtctcgctctgtcacc

SEQ ID NO: 33566 - DNA, 24 bp, Artificial Sequence
  Synthetic: FXN 3 reverse 9:69040641-69040668; SpCas9
gagatgcagtctcgctctgtcacc

SEQ ID NO: 33567 - DNA, 23 bp, Artificial Sequence
  Synthetic: FXN 3 reverse 9:69040642-69040668; SpCas9
agatgcagtctcgctctgtcacc

SEQ ID NO: 33568 - DNA, 22 bp, Artificial Sequence
  Synthetic: FXN 3 reverse 9:69040643-69040668; SpCas9
gatgcagtctcgctctgtcacc

SEQ ID NO: 33569 - DNA, 21 bp, Artificial Sequence
  Synthetic: FXN 3 reverse 9:69040644-69040668; SpCas9
atgcagtctcgctctgtcacc

SEQ ID NO: 33570 - DNA, 20 bp, Artificial Sequence
  Synthetic: FXN 3 reverse 9:69040645-69040668; SpCas9
tgcagtctcgctctgtcacc

SEQ ID NO: 33571 - DNA, 19 bp, Artificial Sequence
  Synthetic: FXN 3 reverse 9:69040646-69040668; SpCas9
gcagtctcgctctgtcacc

SEQ ID NO: 33572 - DNA, 18 bp, Artificial Sequence
  Synthetic: FXN 3 reverse 9:69040647-69040668; SpCas9
cagtctcgctctgtcacc

SEQ ID NO: 33573 - DNA, 25 bp, Artificial Sequence
  Synthetic: FXN 3 forward 9:69040643-69040671; SpCas9
ggtgacagagcgagactgcatctca

SEQ ID NO: 33574 - DNA, 24 bp, Artificial Sequence
  Synthetic: FXN 3 forward 9:69040644-69040671; SpCas9
gtgacagagcgagactgcatctca

SEQ ID NO: 33575 - DNA, 23 bp, Artificial Sequence
  Synthetic: FXN 3 forward 9:69040645-69040671; SpCas9
tgacagagcgagactgcatctca

SEQ ID NO: 33576 - DNA, 22 bp, Artificial Sequence
  Synthetic: FXN 3 forward 9:69040646-69040671; SpCas9
gacagagcgagactgcatctca

SEQ ID NO: 33577 - DNA, 21 bp, Artificial Sequence
  Synthetic: FXN 3 forward 9:69040647-69040671; SpCas9
acagagcgagactgcatctca

SEQ ID NO: 33578 - DNA, 20 bp, Artificial Sequence
  Synthetic: FXN 3 forward 9:69040648-69040671; SpCas9
cagagcgagactgcatctca

SEQ ID NO: 33579 - DNA, 19 bp, Artificial Sequence
  Synthetic: FXN 3 forward 9:69040649-69040671; SpCas9
agagcgagactgcatctca

SEQ ID NO: 33580 - DNA, 18 bp, Artificial Sequence
  Synthetic: FXN 3 forward 9:69040650-69040671; SpCas9
gagcgagactgcatctca

SEQ ID NO: 33581 - DNA, 25 bp, Artificial Sequence
  Synthetic: FXN 3 reverse 9:69040658-69040686; SpCas9
tttatttatttttttctttgagatg

SEQ ID NO: 33582 - DNA, 24 bp, Artificial Sequence
  Synthetic: FXN 3 reverse 9:69040659-69040686; SpCas9
ttatttatttttttctttgagatg

SEQ ID NO: 33583 - DNA, 23 bp, Artificial Sequence
  Synthetic: FXN 3 reverse 9:69040660-69040686; SpCas9
tatttatttttttctttgagatg

SEQ ID NO: 33584 - DNA, 22 bp, Artificial Sequence
  Synthetic: FXN 3 reverse 9:69040661-69040686; SpCas9
atttatttttttctttgagatg

SEQ ID NO: 33585 - DNA, 21 bp, Artificial Sequence
  Synthetic: FXN 3 reverse 9:69040662-69040686; SpCas9
tttatttttttctttgagatg

SEQ ID NO: 33586 - DNA, 20 bp, Artificial Sequence
  Synthetic: FXN 3 reverse 9:69040663-69040686; SpCas9
ttatttttttctttgagatg

SEQ ID NO: 33587 - DNA, 19 bp, Artificial Sequence
  Synthetic: FXN 3 reverse 9:69040664-69040686; SpCas9
tatttttttctttgagatg

SEQ ID NO: 33588 - DNA, 18 bp, Artificial Sequence
  Synthetic: FXN 3 reverse 9:69040665-69040686; SpCas9
atttttttctttgagatg

SEQ ID NO: 33589 - DNA, 25 bp, Artificial Sequence
  Synthetic: FXN 3 reverse 9:69040664-69040692; SpCas9
tatttatttatttatttttttcttt

SEQ ID NO: 33590 - DNA, 24 bp, Artificial Sequence
  Synthetic: FXN 3 reverse 9:69040665-69040692; SpCas9
atttatttatttatttttttcttt

SEQ ID NO: 33591 - DNA, 23 bp, Artificial Sequence
  Synthetic: FXN 3 reverse 9:69040666-69040692; SpCas9
tttatttatttatttttttcttt

SEQ ID NO: 33592 - DNA, 22 bp, Artificial Sequence
  Synthetic: FXN 3 reverse 9:69040667-69040692; SpCas9
ttatttatttatttttttcttt

SEQ ID NO: 33593 - DNA, 21 bp, Artificial Sequence
  Synthetic: FXN 3 reverse 9:69040668-69040692; SpCas9
tatttatttatttttttcttt

SEQ ID NO: 33594 - DNA, 20 bp, Artificial Sequence
  Synthetic: FXN 3 reverse 9:69040669-69040692; SpCas9
atttatttatttttttcttt

SEQ ID NO: 33595 - DNA, 19 bp, Artificial Sequence
  Synthetic: FXN 3 reverse 9:69040670-69040692; SpCas9
tttatttatttttttcttt

SEQ ID NO: 33596 - DNA, 18 bp, Artificial Sequence
  Synthetic: FXN 3 reverse 9:69040671-69040692; SpCas9
ttatttatttttttcttt

SEQ ID NO: 33597 - DNA, 25 bp, Artificial Sequence
  Synthetic: FXN 3 reverse 9:69040702-69040730; SpCas9
atagcatttattattagtttataag

SEQ ID NO: 33598 - DNA, 24 bp, Artificial Sequence
  Synthetic: FXN 3 reverse 9:69040703-69040730; SpCas9
tagcatttattattagtttataag

SEQ ID NO: 33599 - DNA, 23 bp, Artificial Sequence
  Synthetic: FXN 3 reverse 9:69040704-69040730; SpCas9
agcatttattattagtttataag

SEQ ID NO: 33600 - DNA, 22 bp, Artificial Sequence
  Synthetic: FXN 3 reverse 9:69040705-69040730; SpCas9
gcatttattattagtttataag

SEQ ID NO: 33601 - DNA, 21 bp, Artificial Sequence
  Synthetic: FXN 3 reverse 9:69040706-69040730; SpCas9
catttattattagtttataag

SEQ ID NO: 33602 - DNA, 20 bp, Artificial Sequence
  Synthetic: FXN 3 reverse 9:69040707-69040730; SpCas9
atttattattagtttataag

SEQ ID NO: 33603 - DNA, 19 bp, Artificial Sequence
  Synthetic: FXN 3 reverse 9:69040708-69040730; SpCas9
tttattattagtttataag

SEQ ID NO: 33604 - DNA, 18 bp, Artificial Sequence
  Synthetic: FXN 3 reverse 9:69040709-69040730; SpCas9
ttattattagtttataag

SEQ ID NO: 33605 - DNA, 25 bp, Artificial Sequence
  Synthetic: FXN 3 forward 9:69040704-69040732; SpCas9
gcttataaactaataataaatgcta

SEQ ID NO: 33606 - DNA, 24 bp, Artificial Sequence
  Synthetic: FXN 3 forward 9:69040705-69040732; SpCas9
cttataaactaataataaatgcta

SEQ ID NO: 33607 - DNA, 23 bp, Artificial Sequence
  Synthetic: FXN 3 forward 9:69040706-69040732; SpCas9
ttataaactaataataaatgcta

SEQ ID NO: 33608 - DNA, 22 bp, Artificial Sequence
  Synthetic: FXN 3 forward 9:69040707-69040732; SpCas9
tataaactaataataaatgcta

SEQ ID NO: 33609 - DNA, 21 bp, Artificial Sequence
  Synthetic: FXN 3 forward 9:69040708-69040732; SpCas9
ataaactaataataaatgcta

SEQ ID NO: 33610 - DNA, 20 bp, Artificial Sequence
  Synthetic: FXN 3 forward 9:69040709-69040732; SpCas9
taaactaataataaatgcta

SEQ ID NO: 33611 - DNA, 19 bp, Artificial Sequence
  Synthetic: FXN 3 forward 9:69040710-69040732; SpCas9
aaactaataataaatgcta

SEQ ID NO: 33612 - DNA, 18 bp, Artificial Sequence
  Synthetic: FXN 3 forward 9:69040711-69040732; SpCas9
aactaataataaatgcta

SEQ ID NO: 33613 - DNA, 25 bp, Artificial Sequence
  Synthetic: FXN 3 reverse 9:69040705-69040733; SpCas9
accatagcatttattattagtttat

SEQ ID NO: 33614 - DNA, 24 bp, Artificial Sequence
  Synthetic: FXN 3 reverse 9:69040706-69040733; SpCas9
ccatagcatttattattagtttat

SEQ ID NO: 33615 - DNA, 23 bp, Artificial Sequence
  Synthetic: FXN 3 reverse 9:69040707-69040733; SpCas9
catagcatttattattagtttat

SEQ ID NO: 33616 - DNA, 22 bp, Artificial Sequence
  Synthetic: FXN 3 reverse 9:69040708-69040733; SpCas9
atagcatttattattagtttat

SEQ ID NO: 33617 - DNA, 21 bp, Artificial Sequence
  Synthetic: FXN 3 reverse 9:69040709-69040733; SpCas9
tagcatttattattagtttat

SEQ ID NO: 33618 - DNA, 20 bp, Artificial Sequence
  Synthetic: FXN 3 reverse 9:69040710-69040733; SpCas9
agcatttattattagtttat

SEQ ID NO: 33619 - DNA, 19 bp, Artificial Sequence
  Synthetic: FXN 3 reverse 9:69040711-69040733; SpCas9
gcatttattattagtttat

SEQ ID NO: 33620 - DNA, 18 bp, Artificial Sequence
  Synthetic: FXN 3 reverse 9:69040712-69040733; SpCas9
catttattattagtttat

SEQ ID NO: 33621 - DNA, 25 bp, Artificial Sequence
  Synthetic: FXN 3 reverse 9:69040713-69040741; SpCas9
acatgcagaccatagcatttattat

SEQ ID NO: 33622 - DNA, 24 bp, Artificial Sequence
  Synthetic: FXN 3 reverse 9:69040714-69040741; SpCas9
catgcagaccatagcatttattat

SEQ ID NO: 33623 - DNA, 23 bp, Artificial Sequence
  Synthetic: FXN 3 reverse 9:69040715-69040741; SpCas9
atgcagaccatagcatttattat

SEQ ID NO: 33624 - DNA, 22 bp, Artificial Sequence
  Synthetic: FXN 3 reverse 9:69040716-69040741; SpCas9
tgcagaccatagcatttattat

SEQ ID NO: 33625 - DNA, 21 bp, Artificial Sequence
  Synthetic: FXN 3 reverse 9:69040717-69040741; SpCas9
gcagaccatagcatttattat

SEQ ID NO: 33626 - DNA, 20 bp, Artificial Sequence
  Synthetic: FXN 3 reverse 9:69040718-69040741; SpCas9
cagaccatagcatttattat

SEQ ID NO: 33627 - DNA, 19 bp, Artificial Sequence
  Synthetic: FXN 3 reverse 9:69040719-69040741; SpCas9
agaccatagcatttattat

SEQ ID NO: 33628 - DNA, 18 bp, Artificial Sequence
  Synthetic: FXN 3 reverse 9:69040720-69040741; SpCas9
gaccatagcatttattat

SEQ ID NO: 33629 - DNA, 25 bp, Artificial Sequence
  Synthetic: FXN 3 reverse 9:69040726-69040754; SpCas9
tggggtgacacaaacatgcagacca

SEQ ID NO: 33630 - DNA, 24 bp, Artificial Sequence
  Synthetic: FXN 3 reverse 9:69040727-69040754; SpCas9
ggggtgacacaaacatgcagacca

SEQ ID NO: 33631 - DNA, 23 bp, Artificial Sequence
  Synthetic: FXN 3 reverse 9:69040728-69040754; SpCas9
gggtgacacaaacatgcagacca

SEQ ID NO: 33632 - DNA, 22 bp, Artificial Sequence
  Synthetic: FXN 3 reverse 9:69040729-69040754; SpCas9
ggtgacacaaacatgcagacca

SEQ ID NO: 33633 - DNA, 21 bp, Artificial Sequence
  Synthetic: FXN 3 reverse 9:69040730-69040754; SpCas9
gtgacacaaacatgcagacca

SEQ ID NO: 33634 - DNA, 20 bp, Artificial Sequence
  Synthetic: FXN 3 reverse 9:69040731-69040754; SpCas9
tgacacaaacatgcagacca

SEQ ID NO: 33635 - DNA, 19 bp, Artificial Sequence
  Synthetic: FXN 3 reverse 9:69040732-69040754; SpCas9
gacacaaacatgcagacca

SEQ ID NO: 33636 - DNA, 18 bp, Artificial Sequence
  Synthetic: FXN 3 reverse 9:69040733-69040754; SpCas9
acacaaacatgcagacca

SEQ ID NO: 33637 - DNA, 25 bp, Artificial Sequence
  Synthetic: FXN 3 reverse 9:69040733-69040761; SpCas9
tgaatggtggggtgacacaaacatg

SEQ ID NO: 33638 - DNA, 24 bp, Artificial Sequence
  Synthetic: FXN 3 reverse 9:69040734-69040761; SpCas9
gaatggtggggtgacacaaacatg

SEQ ID NO: 33639 - DNA, 23 bp, Artificial Sequence
  Synthetic: FXN 3 reverse 9:69040735-69040761; SpCas9
aatggtggggtgacacaaacatg

SEQ ID NO: 33640 - DNA, 22 bp, Artificial Sequence
  Synthetic: FXN 3 reverse 9:69040736-69040761; SpCas9
atggtggggtgacacaaacatg

SEQ ID NO: 33641 - DNA, 21 bp, Artificial Sequence
  Synthetic: FXN 3 reverse 9:69040737-69040761; SpCas9
tggtggggtgacacaaacatg

SEQ ID NO: 33642 - DNA, 20 bp, Artificial Sequence
  Synthetic: FXN 3 reverse 9:69040738-69040761; SpCas9
ggtggggtgacacaaacatg

SEQ ID NO: 33643 - DNA, 19 bp, Artificial Sequence
  Synthetic: FXN 3 reverse 9:69040739-69040761; SpCas9
gtggggtgacacaaacatg

SEQ ID NO: 33644 - DNA, 18 bp, Artificial Sequence
  Synthetic: FXN 3 reverse 9:69040740-69040761; SpCas9
tggggtgacacaaacatg

SEQ ID NO: 33645 - DNA, 25 bp, Artificial Sequence
  Synthetic: FXN 3 reverse 9:69040749-69040777; SpCas9
attaggttttaacatatgaatggtg

SEQ ID NO: 33646 - DNA, 24 bp, Artificial Sequence
  Synthetic: FXN 3 reverse 9:69040750-69040777; SpCas9
ttaggttttaacatatgaatggtg

SEQ ID NO: 33647 - DNA, 23 bp, Artificial Sequence
  Synthetic: FXN 3 reverse 9:69040751-69040777; SpCas9
taggttttaacatatgaatggtg

SEQ ID NO: 33648 - DNA, 22 bp, Artificial Sequence
  Synthetic: FXN 3 reverse 9:69040752-69040777; SpCas9
aggttttaacatatgaatggtg

SEQ ID NO: 33649 - DNA, 21 bp, Artificial Sequence
  Synthetic: FXN 3 reverse 9:69040753-69040777; SpCas9
ggttttaacatatgaatggtg

SEQ ID NO: 33650 - DNA, 20 bp, Artificial Sequence
  Synthetic: FXN 3 reverse 9:69040754-69040777; SpCas9
gttttaacatatgaatggtg

SEQ ID NO: 33651 - DNA, 19 bp, Artificial Sequence
  Synthetic: FXN 3 reverse 9:69040755-69040777; SpCas9
ttttaacatatgaatggtg

SEQ ID NO: 33652 - DNA, 18 bp, Artificial Sequence
  Synthetic: FXN 3 reverse 9:69040756-69040777; SpCas9
tttaacatatgaatggtg

SEQ ID NO: 33653 - DNA, 25 bp, Artificial Sequence
  Synthetic: FXN 3 reverse 9:69040750-69040778; SpCas9
gattaggttttaacatatgaatggt

SEQ ID NO: 33654 - DNA, 24 bp, Artificial Sequence
  Synthetic: FXN 3 reverse 9:69040751-69040778; SpCas9
attaggttttaacatatgaatggt

SEQ ID NO: 33655 - DNA, 23 bp, Artificial Sequence
  Synthetic: FXN 3 reverse 9:69040752-69040778; SpCas9
ttaggttttaacatatgaatggt

SEQ ID NO: 33656 - DNA, 22 bp, Artificial Sequence
  Synthetic: FXN 3 reverse 9:69040753-69040778; SpCas9
taggttttaacatatgaatggt

SEQ ID NO: 33657 - DNA, 21 bp, Artificial Sequence
  Synthetic: FXN 3 reverse 9:69040754-69040778; SpCas9
aggttttaacatatgaatggt

SEQ ID NO: 33658 - DNA, 20 bp, Artificial Sequence
  Synthetic: FXN 3 reverse 9:69040755-69040778; SpCas9
ggttttaacatatgaatggt

SEQ ID NO: 33659 - DNA, 19 bp, Artificial Sequence
  Synthetic: FXN 3 reverse 9:69040756-69040778; SpCas9
gttttaacatatgaatggt

SEQ ID NO: 33660 - DNA, 18 bp, Artificial Sequence
  Synthetic: FXN 3 reverse 9:69040757-69040778; SpCas9
ttttaacatatgaatggt

SEQ ID NO: 33661 - DNA, 25 bp, Artificial Sequence
  Synthetic: FXN 3 reverse 9:69040751-69040779; SpCas9
tgattaggttttaacatatgaatgg

SEQ ID NO: 33662 - DNA, 24 bp, Artificial Sequence
  Synthetic: FXN 3 reverse 9:69040752-69040779; SpCas9
gattaggttttaacatatgaatgg

SEQ ID NO: 33663 - DNA, 23 bp, Artificial Sequence
  Synthetic: FXN 3 reverse 9:69040753-69040779; SpCas9
attaggttttaacatatgaatgg

SEQ ID NO: 33664 - DNA, 22 bp, Artificial Sequence
  Synthetic: FXN 3 reverse 9:69040754-69040779; SpCas9
ttaggttttaacatatgaatgg

SEQ ID NO: 33665 - DNA, 21 bp, Artificial Sequence
  Synthetic: FXN 3 reverse 9:69040755-69040779; SpCas9
taggttttaacatatgaatgg

SEQ ID NO: 33666 - DNA, 20 bp, Artificial Sequence
  Synthetic: FXN 3 reverse 9:69040756-69040779; SpCas9
aggttttaacatatgaatgg

SEQ ID NO: 33667 - DNA, 19 bp, Artificial Sequence
  Synthetic: FXN 3 reverse 9:69040757-69040779; SpCas9
ggttttaacatatgaatgg

SEQ ID NO: 33668 - DNA, 18 bp, Artificial Sequence
  Synthetic: FXN 3 reverse 9:69040758-69040779; SpCas9
gttttaacatatgaatgg

SEQ ID NO: 33669 - DNA, 25 bp, Artificial Sequence
  Synthetic: FXN 3 reverse 9:69040754-69040782; SpCas9
tggtgattaggttttaacatatgaa

SEQ ID NO: 33670 - DNA, 24 bp, Artificial Sequence
  Synthetic: FXN 3 reverse 9:69040755-69040782; SpCas9
ggtgattaggttttaacatatgaa

SEQ ID NO: 33671 - DNA, 23 bp, Artificial Sequence
  Synthetic: FXN 3 reverse 9:69040756-69040782; SpCas9
gtgattaggttttaacatatgaa

SEQ ID NO: 33672 - DNA, 22 bp, Artificial Sequence
  Synthetic: FXN 3 reverse 9:69040757-69040782; SpCas9
tgattaggttttaacatatgaa

SEQ ID NO: 33673 - DNA, 21 bp, Artificial Sequence
  Synthetic: FXN 3 reverse 9:69040758-69040782; SpCas9
gattaggttttaacatatgaa

SEQ ID NO: 33674 - DNA, 20 bp, Artificial Sequence
  Synthetic: FXN 3 reverse 9:69040759-69040782; SpCas9
attaggttttaacatatgaa

SEQ ID NO: 33675 - DNA, 19 bp, Artificial Sequence
  Synthetic: FXN 3 reverse 9:69040760-69040782; SpCas9
ttaggttttaacatatgaa

SEQ ID NO: 33676 - DNA, 18 bp, Artificial Sequence
  Synthetic: FXN 3 reverse 9:69040761-69040782; SpCas9
taggttttaacatatgaa

SEQ ID NO: 33677 - DNA, 25 bp, Artificial Sequence
  Synthetic: FXN 3 forward 9:69040757-69040785; SpCas9
ttcatatgttaaaacctaatcacca

SEQ ID NO: 33678 - DNA, 24 bp, Artificial Sequence
  Synthetic: FXN 3 forward 9:69040758-69040785; SpCas9
tcatatgttaaaacctaatcacca

SEQ ID NO: 33679 - DNA, 23 bp, Artificial Sequence
  Synthetic: FXN 3 forward 9:69040759-69040785; SpCas9
catatgttaaaacctaatcacca

SEQ ID NO: 33680 - DNA, 22 bp, Artificial Sequence
  Synthetic: FXN 3 forward 9:69040760-69040785; SpCas9
atatgttaaaacctaatcacca

SEQ ID NO: 33681 - DNA, 21 bp, Artificial Sequence
  Synthetic: FXN 3 forward 9:69040761-69040785; SpCas9
tatgttaaaacctaatcacca

SEQ ID NO: 33682 - DNA, 20 bp, Artificial Sequence
  Synthetic: FXN 3 forward 9:69040762-69040785; SpCas9
atgttaaaacctaatcacca

SEQ ID NO: 33683 - DNA, 19 bp, Artificial Sequence
  Synthetic: FXN 3 forward 9:69040763-69040785; SpCas9
tgttaaaacctaatcacca

SEQ ID NO: 33684 - DNA, 18 bp, Artificial Sequence
  Synthetic: FXN 3 forward 9:69040764-69040785; SpCas9
gttaaaacctaatcacca

SEQ ID NO: 33685 - DNA, 25 bp, Artificial Sequence
  Synthetic: FXN 3 forward 9:69040766-69040794; SpCas9
taaaacctaatcaccaaagtgatat

SEQ ID NO: 33686 - DNA, 24 bp, Artificial Sequence
  Synthetic: FXN 3 forward 9:69040767-69040794; SpCas9
aaaacctaatcaccaaagtgatat

SEQ ID NO: 33687 - DNA, 23 bp, Artificial Sequence
  Synthetic: FXN 3 forward 9:69040768-69040794; SpCas9
aaacctaatcaccaaagtgatat

SEQ ID NO: 33688 - DNA, 22 bp, Artificial Sequence
  Synthetic: FXN 3 forward 9:69040769-69040794; SpCas9
aacctaatcaccaaagtgatat

SEQ ID NO: 33689 - DNA, 21 bp, Artificial Sequence
  Synthetic: FXN 3 forward 9:69040770-69040794; SpCas9
acctaatcaccaaagtgatat

SEQ ID NO: 33690 - DNA, 20 bp, Artificial Sequence
  Synthetic: FXN 3 forward 9:69040771-69040794; SpCas9
cctaatcaccaaagtgatat

SEQ ID NO: 33691 - DNA, 19 bp, Artificial Sequence
  Synthetic: FXN 3 forward 9:69040772-69040794; SpCas9
ctaatcaccaaagtgatat

SEQ ID NO: 33692 - DNA, 18 bp, Artificial Sequence
  Synthetic: FXN 3 forward 9:69040773-69040794; SpCas9
taatcaccaaagtgatat

SEQ ID NO: 33693 - DNA, 25 bp, Artificial Sequence
  Synthetic: FXN 3 forward 9:69040767-69040795; SpCas9
aaaacctaatcaccaaagtgatatt

SEQ ID NO: 33694 - DNA, 24 bp, Artificial Sequence
  Synthetic: FXN 3 forward 9:69040768-69040795; SpCas9
aaacctaatcaccaaagtgatatt

SEQ ID NO: 33695 - DNA, 23 bp, Artificial Sequence
  Synthetic: FXN 3 forward 9:69040769-69040795; SpCas9
aacctaatcaccaaagtgatatt

SEQ ID NO: 33696 - DNA, 22 bp, Artificial Sequence
  Synthetic: FXN 3 forward 9:69040770-69040795; SpCas9
acctaatcaccaaagtgatatt

SEQ ID NO: 33697 - DNA, 21 bp, Artificial Sequence
  Synthetic: FXN 3 forward 9:69040771-69040795; SpCas9
cctaatcaccaaagtgatatt

SEQ ID NO: 33698 - DNA, 20 bp, Artificial Sequence
  Synthetic: FXN 3 forward 9:69040772-69040795; SpCas9
ctaatcaccaaagtgatatt

SEQ ID NO: 33699 - DNA, 19 bp, Artificial Sequence
  Synthetic: FXN 3 forward 9:69040773-69040795; SpCas9
taatcaccaaagtgatatt

SEQ ID NO: 33700 - DNA, 18 bp, Artificial Sequence
  Synthetic: FXN 3 forward 9:69040774-69040795; SpCas9
aatcaccaaagtgatatt

SEQ ID NO: 33701 - DNA, 25 bp, Artificial Sequence
  Synthetic: FXN 3 forward 9:69040769-69040797; SpCas9
aacctaatcaccaaagtgatattag

SEQ ID NO: 33702 - DNA, 24 bp, Artificial Sequence
  Synthetic: FXN 3 forward 9:69040770-69040797; SpCas9
acctaatcaccaaagtgatattag

SEQ ID NO: 33703 - DNA, 23 bp, Artificial Sequence
  Synthetic: FXN 3 forward 9:69040771-69040797; SpCas9
cctaatcaccaaagtgatattag

SEQ ID NO: 33704 - DNA, 22 bp, Artificial Sequence
  Synthetic: FXN 3 forward 9:69040772-69040797; SpCas9
ctaatcaccaaagtgatattag

SEQ ID NO: 33705 - DNA, 21 bp, Artificial Sequence
  Synthetic: FXN 3 forward 9:69040773-69040797; SpCas9
taatcaccaaagtgatattag

SEQ ID NO: 33706 - DNA, 20 bp, Artificial Sequence
  Synthetic: FXN 3 forward 9:69040774-69040797; SpCas9
aatcaccaaagtgatattag

SEQ ID NO: 33707 - DNA, 19 bp, Artificial Sequence
  Synthetic: FXN 3 forward 9:69040775-69040797; SpCas9
atcaccaaagtgatattag

SEQ ID NO: 33708 - DNA, 18 bp, Artificial Sequence
  Synthetic: FXN 3 forward 9:69040776-69040797; SpCas9
tcaccaaagtgatattag

SEQ ID NO: 33709 - DNA, 25 bp, Artificial Sequence
  Synthetic: FXN 3 forward 9:69040770-69040798; SpCas9
acctaatcaccaaagtgatattagg

SEQ ID NO: 33710 - DNA, 24 bp, Artificial Sequence
  Synthetic: FXN 3 forward 9:69040771-69040798; SpCas9
cctaatcaccaaagtgatattagg

SEQ ID NO: 33711 - DNA, 23 bp, Artificial Sequence
  Synthetic: FXN 3 forward 9:69040772-69040798; SpCas9
ctaatcaccaaagtgatattagg

SEQ ID NO: 33712 - DNA, 22 bp, Artificial Sequence
  Synthetic: FXN 3 forward 9:69040773-69040798; SpCas9
taatcaccaaagtgatattagg

SEQ ID NO: 33713 - DNA, 21 bp, Artificial Sequence
  Synthetic: FXN 3 forward 9:69040774-69040798; SpCas9
aatcaccaaagtgatattagg

SEQ ID NO: 33714 - DNA, 20 bp, Artificial Sequence
  Synthetic: FXN 3 forward 9:69040775-69040798; SpCas9
atcaccaaagtgatattagg

SEQ ID NO: 33715 - DNA, 19 bp, Artificial Sequence
  Synthetic: FXN 3 forward 9:69040776-69040798; SpCas9
tcaccaaagtgatattagg

SEQ ID NO: 33716 - DNA, 18 bp, Artificial Sequence
  Synthetic: FXN 3 forward 9:69040777-69040798; SpCas9
caccaaagtgatattagg

SEQ ID NO: 33717 - DNA, 25 bp, Artificial Sequence
  Synthetic: FXN 3 reverse 9:69040771-69040799; SpCas9
acctcctaatatcactttggtgatt

SEQ ID NO: 33718 - DNA, 24 bp, Artificial Sequence
  Synthetic: FXN 3 reverse 9:69040772-69040799; SpCas9
cctcctaatatcactttggtgatt

SEQ ID NO: 33719 - DNA, 23 bp, Artificial Sequence
  Synthetic: FXN 3 reverse 9:69040773-69040799; SpCas9
ctcctaatatcactttggtgatt

SEQ ID NO: 33720 - DNA, 22 bp, Artificial Sequence
  Synthetic: FXN 3 reverse 9:69040774-69040799; SpCas9
tcctaatatcactttggtgatt

SEQ ID NO: 33721 - DNA, 21 bp, Artificial Sequence
  Synthetic: FXN 3 reverse 9:69040775-69040799; SpCas9
cctaatatcactttggtgatt

SEQ ID NO: 33722 - DNA, 20 bp, Artificial Sequence
  Synthetic: FXN 3 reverse 9:69040776-69040799; SpCas9
ctaatatcactttggtgatt

SEQ ID NO: 33723 - DNA, 19 bp, Artificial Sequence
  Synthetic: FXN 3 reverse 9:69040777-69040799; SpCas9
taatatcactttggtgatt

SEQ ID NO: 33724 - DNA, 18 bp, Artificial Sequence
  Synthetic: FXN 3 reverse 9:69040778-69040799; SpCas9
aatatcactttggtgatt

SEQ ID NO: 33725 - DNA, 25 bp, Artificial Sequence
  Synthetic: FXN 3 reverse 9:69040772-69040800; SpCas9
cacctcctaatatcactttggtgat

SEQ ID NO: 33726 - DNA, 24 bp, Artificial Sequence
  Synthetic: FXN 3 reverse 9:69040773-69040800; SpCas9
acctcctaatatcactttggtgat

SEQ ID NO: 33727 - DNA, 23 bp, Artificial Sequence
  Synthetic: FXN 3 reverse 9:69040774-69040800; SpCas9
cctcctaatatcactttggtgat

SEQ ID NO: 33728 - DNA, 22 bp, Artificial Sequence
  Synthetic: FXN 3 reverse 9:69040775-69040800; SpCas9
ctcctaatatcactttggtgat

SEQ ID NO: 33729 - DNA, 21 bp, Artificial Sequence
  Synthetic: FXN 3 reverse 9:69040776-69040800; SpCas9
tcctaatatcactttggtgat

SEQ ID NO: 33730 - DNA, 20 bp, Artificial Sequence
  Synthetic: FXN 3 reverse 9:69040777-69040800; SpCas9
cctaatatcactttggtgat

SEQ ID NO: 33731 - DNA, 19 bp, Artificial Sequence
  Synthetic: FXN 3 reverse 9:69040778-69040800; SpCas9
ctaatatcactttggtgat

SEQ ID NO: 33732 - DNA, 18 bp, Artificial Sequence
  Synthetic: FXN 3 reverse 9:69040779-69040800; SpCas9
taatatcactttggtgat

SEQ ID NO: 33733 - DNA, 25 bp, Artificial Sequence
  Synthetic: FXN 3 forward 9:69040773-69040801; SpCas9
taatcaccaaagtgatattaggagg

SEQ ID NO: 33734 - DNA, 24 bp, Artificial Sequence
  Synthetic: FXN 3 forward 9:69040774-69040801; SpCas9
aatcaccaaagtgatattaggagg

SEQ ID NO: 33735 - DNA, 23 bp, Artificial Sequence
  Synthetic: FXN 3 forward 9:69040775-69040801; SpCas9
atcaccaaagtgatattaggagg

SEQ ID NO: 33736 - DNA, 22 bp, Artificial Sequence
  Synthetic: FXN 3 forward 9:69040776-69040801; SpCas9
tcaccaaagtgatattaggagg

SEQ ID NO: 33737 - DNA, 21 bp, Artificial Sequence
  Synthetic: FXN 3 forward 9:69040777-69040801; SpCas9
caccaaagtgatattaggagg

SEQ ID NO: 33738 - DNA, 20 bp, Artificial Sequence
  Synthetic: FXN 3 forward 9:69040778-69040801; SpCas9
accaaagtgatattaggagg

SEQ ID NO: 33739 - DNA, 19 bp, Artificial Sequence
  Synthetic: FXN 3 forward 9:69040779-69040801; SpCas9
ccaaagtgatattaggagg

SEQ ID NO: 33740 - DNA, 18 bp, Artificial Sequence
  Synthetic: FXN 3 forward 9:69040780-69040801; SpCas9
caaagtgatattaggagg

SEQ ID NO: 33741 - DNA, 25 bp, Artificial Sequence
  Synthetic: FXN 3 forward 9:69040774-69040802; SpCas9
aatcaccaaagtgatattaggaggt

SEQ ID NO: 33742 - DNA, 24 bp, Artificial Sequence
  Synthetic: FXN 3 forward 9:69040775-69040802; SpCas9
atcaccaaagtgatattaggaggt

SEQ ID NO: 33743 - DNA, 23 bp, Artificial Sequence
  Synthetic: FXN 3 forward 9:69040776-69040802; SpCas9
tcaccaaagtgatattaggaggt

SEQ ID NO: 33744 - DNA, 22 bp, Artificial Sequence
  Synthetic: FXN 3 forward 9:69040777-69040802; SpCas9
caccaaagtgatattaggaggt

SEQ ID NO: 33745 - DNA, 21 bp, Artificial Sequence
  Synthetic: FXN 3 forward 9:69040778-69040802; SpCas9
accaaagtgatattaggaggt

SEQ ID NO: 33746 - DNA, 20 bp, Artificial Sequence
  Synthetic: FXN 3 forward 9:69040779-69040802; SpCas9
ccaaagtgatattaggaggt

SEQ ID NO: 33747 - DNA, 19 bp, Artificial Sequence
  Synthetic: FXN 3 forward 9:69040780-69040802; SpCas9
caaagtgatattaggaggt

SEQ ID NO: 33748 - DNA, 18 bp, Artificial Sequence
  Synthetic: FXN 3 forward 9:69040781-69040802; SpCas9
aaagtgatattaggaggt

SEQ ID NO: 33749 - DNA, 25 bp, Artificial Sequence
  Synthetic: FXN 3 forward 9:69040775-69040803; SpCas9
atcaccaaagtgatattaggaggtg

SEQ ID NO: 33750 - DNA, 24 bp, Artificial Sequence
  Synthetic: FXN 3 forward 9:69040776-69040803; SpCas9
tcaccaaagtgatattaggaggtg

SEQ ID NO: 33751 - DNA, 23 bp, Artificial Sequence
  Synthetic: FXN 3 forward 9:69040777-69040803; SpCas9
caccaaagtgatattaggaggtg

SEQ ID NO: 33752 - DNA, 22 bp, Artificial Sequence
  Synthetic: FXN 3 forward 9:69040778-69040803; SpCas9
accaaagtgatattaggaggtg

SEQ ID NO: 33753 - DNA, 21 bp, Artificial Sequence
  Synthetic: FXN 3 forward 9:69040779-69040803; SpCas9
ccaaagtgatattaggaggtg

SEQ ID NO: 33754 - DNA, 20 bp, Artificial Sequence
  Synthetic: FXN 3 forward 9:69040780-69040803; SpCas9
caaagtgatattaggaggtg

SEQ ID NO: 33755 - DNA, 19 bp, Artificial Sequence
  Synthetic: FXN 3 forward 9:69040781-69040803; SpCas9
aaagtgatattaggaggtg

SEQ ID NO: 33756 - DNA, 18 bp, Artificial Sequence
  Synthetic: FXN 3 forward 9:69040782-69040803; SpCas9
aagtgatattaggaggtg

SEQ ID NO: 33757 - DNA, 25 bp, Artificial Sequence
  Synthetic: FXN 3 reverse 9:69040779-69040807; SpCas9
agggccccacctcctaatatcactt

SEQ ID NO: 33758 - DNA, 24 bp, Artificial Sequence
  Synthetic: FXN 3 reverse 9:69040780-69040807; SpCas9
gggccccacctcctaatatcactt

SEQ ID NO: 33759 - DNA, 23 bp, Artificial Sequence
  Synthetic: FXN 3 reverse 9:69040781-69040807; SpCas9
ggccccacctcctaatatcactt

SEQ ID NO: 33760 - DNA, 22 bp, Artificial Sequence
  Synthetic: FXN 3 reverse 9:69040782-69040807; SpCas9
gccccacctcctaatatcactt

SEQ ID NO: 33761 - DNA, 21 bp, Artificial Sequence
  Synthetic: FXN 3 reverse 9:69040783-69040807; SpCas9
ccccacctcctaatatcactt

SEQ ID NO: 33762 - DNA, 20 bp, Artificial Sequence
  Synthetic: FXN 3 reverse 9:69040784-69040807; SpCas9
cccacctcctaatatcactt

SEQ ID NO: 33763 - DNA, 19 bp, Artificial Sequence
  Synthetic: FXN 3 reverse 9:69040785-69040807; SpCas9
ccacctcctaatatcactt

SEQ ID NO: 33764 - DNA, 18 bp, Artificial Sequence
  Synthetic: FXN 3 reverse 9:69040786-69040807; SpCas9
cacctcctaatatcactt

SEQ ID NO: 33765 - DNA, 25 bp, Artificial Sequence
  Synthetic: FXN 3 forward 9:69040782-69040810; SpCas9
aagtgatattaggaggtggggccct

SEQ ID NO: 33766 - DNA, 24 bp, Artificial Sequence
  Synthetic: FXN 3 forward 9:69040783-69040810; SpCas9
agtgatattaggaggtggggccct

SEQ ID NO: 33767 - DNA, 23 bp, Artificial Sequence
  Synthetic: FXN 3 forward 9:69040784-69040810; SpCas9
gtgatattaggaggtggggccct

SEQ ID NO: 33768 - DNA, 22 bp, Artificial Sequence
  Synthetic: FXN 3 forward 9:69040785-69040810; SpCas9
tgatattaggaggtggggccct

SEQ ID NO: 33769 - DNA, 21 bp, Artificial Sequence
  Synthetic: FXN 3 forward 9:69040786-69040810; SpCas9
gatattaggaggtggggccct

SEQ ID NO: 33770 - DNA, 20 bp, Artificial Sequence
  Synthetic: FXN 3 forward 9:69040787-69040810; SpCas9
atattaggaggtggggccct

SEQ ID NO: 33771 - DNA, 19 bp, Artificial Sequence
  Synthetic: FXN 3 forward 9:69040788-69040810; SpCas9
tattaggaggtggggccct

SEQ ID NO: 33772 - DNA, 18 bp, Artificial Sequence
  Synthetic: FXN 3 forward 9:69040789-69040810; SpCas9
attaggaggtggggccct

SEQ ID NO: 33773 - DNA, 25 bp, Artificial Sequence
  Synthetic: FXN 3 forward 9:69040783-69040811; SpCas9
agtgatattaggaggtggggccctt

SEQ ID NO: 33774 - DNA, 24 bp, Artificial Sequence
  Synthetic: FXN 3 forward 9:69040784-69040811; SpCas9
gtgatattaggaggtggggccctt

SEQ ID NO: 33775 - DNA, 23 bp, Artificial Sequence
  Synthetic: FXN 3 forward 9:69040785-69040811; SpCas9
tgatattaggaggtggggccctt

SEQ ID NO: 33776 - DNA, 22 bp, Artificial Sequence
  Synthetic: FXN 3 forward 9:69040786-69040811; SpCas9
gatattaggaggtggggccctt

SEQ ID NO: 33777 - DNA, 21 bp, Artificial Sequence
  Synthetic: FXN 3 forward 9:69040787-69040811; SpCas9
atattaggaggtggggccctt

SEQ ID NO: 33778 - DNA, 20 bp, Artificial Sequence
  Synthetic: FXN 3 forward 9:69040788-69040811; SpCas9
tattaggaggtggggccctt

SEQ ID NO: 33779 - DNA, 19 bp, Artificial Sequence
  Synthetic: FXN 3 forward 9:69040789-69040811; SpCas9
attaggaggtggggccctt

SEQ ID NO: 33780 - DNA, 18 bp, Artificial Sequence
  Synthetic: FXN 3 forward 9:69040790-69040811; SpCas9
ttaggaggtggggccctt

SEQ ID NO: 33781 - DNA, 25 bp, Artificial Sequence
  Synthetic: FXN 3 forward 9:69040785-69040813; SpCas9
tgatattaggaggtggggcccttgg

SEQ ID NO: 33782 - DNA, 24 bp, Artificial Sequence
  Synthetic: FXN 3 forward 9:69040786-69040813; SpCas9
gatattaggaggtggggcccttgg

SEQ ID NO: 33783 - DNA, 23 bp, Artificial Sequence
  Synthetic: FXN 3 forward 9:69040787-69040813; SpCas9
atattaggaggtggggcccttgg

SEQ ID NO: 33784 - DNA, 22 bp, Artificial Sequence
  Synthetic: FXN 3 forward 9:69040788-69040813; SpCas9
tattaggaggtggggcccttgg

SEQ ID NO: 33785 - DNA, 21 bp, Artificial Sequence
  Synthetic: FXN 3 forward 9:69040789-69040813; SpCas9
attaggaggtggggcccttgg

SEQ ID NO: 33786 - DNA, 20 bp, Artificial Sequence
  Synthetic: FXN 3 forward 9:69040790-69040813; SpCas9
ttaggaggtggggcccttgg

SEQ ID NO: 33787 - DNA, 19 bp, Artificial Sequence
  Synthetic: FXN 3 forward 9:69040791-69040813; SpCas9
taggaggtggggcccttgg

SEQ ID NO: 33788 - DNA, 18 bp, Artificial Sequence
  Synthetic: FXN 3 forward 9:69040792-69040813; SpCas9
aggaggtggggcccttgg

SEQ ID NO: 33789 - DNA, 25 bp, Artificial Sequence
  Synthetic: FXN 3 forward 9:69040786-69040814; SpCas9
gatattaggaggtggggcccttggg

SEQ ID NO: 33790 - DNA, 24 bp, Artificial Sequence
  Synthetic: FXN 3 forward 9:69040787-69040814; SpCas9
atattaggaggtggggcccttggg

SEQ ID NO: 33791 - DNA, 23 bp, Artificial Sequence
  Synthetic: FXN 3 forward 9:69040788-69040814; SpCas9
tattaggaggtggggcccttggg

SEQ ID NO: 33792 - DNA, 22 bp, Artificial Sequence
  Synthetic: FXN 3 forward 9:69040789-69040814; SpCas9
attaggaggtggggcccttggg

SEQ ID NO: 33793 - DNA, 21 bp, Artificial Sequence
  Synthetic: FXN 3 forward 9:69040790-69040814; SpCas9
ttaggaggtggggcccttggg

SEQ ID NO: 33794 - DNA, 20 bp, Artificial Sequence
  Synthetic: FXN 3 forward 9:69040791-69040814; SpCas9
taggaggtggggcccttggg

SEQ ID NO: 33795 - DNA, 19 bp, Artificial Sequence
  Synthetic: FXN 3 forward 9:69040792-69040814; SpCas9
aggaggtggggcccttggg

SEQ ID NO: 33796 - DNA, 18 bp, Artificial Sequence
  Synthetic: FXN 3 forward 9:69040793-69040814; SpCas9
ggaggtggggcccttggg

SEQ ID NO: 33797 - DNA, 25 bp, Artificial Sequence
  Synthetic: FXN 3 forward 9:69040793-69040821; SpCas9
ggaggtggggcccttgggaggtgat

SEQ ID NO: 33798 - DNA, 24 bp, Artificial Sequence
  Synthetic: FXN 3 forward 9:69040794-69040821; SpCas9
gaggtggggcccttgggaggtgat

SEQ ID NO: 33799 - DNA, 23 bp, Artificial Sequence
  Synthetic: FXN 3 forward 9:69040795-69040821; SpCas9
aggtggggcccttgggaggtgat

SEQ ID NO: 33800 - DNA, 22 bp, Artificial Sequence
  Synthetic: FXN 3 forward 9:69040796-69040821; SpCas9
ggtggggcccttgggaggtgat

SEQ ID NO: 33801 - DNA, 21 bp, Artificial Sequence
  Synthetic: FXN 3 forward 9:69040797-69040821; SpCas9
gtggggcccttgggaggtgat

SEQ ID NO: 33802 - DNA, 20 bp, Artificial Sequence
  Synthetic: FXN 3 forward 9:69040798-69040821; SpCas9
tggggcccttgggaggtgat

SEQ ID NO: 33803 - DNA, 19 bp, Artificial Sequence
  Synthetic: FXN 3 forward 9:69040799-69040821; SpCas9
ggggcccttgggaggtgat

SEQ ID NO: 33804 - DNA, 18 bp, Artificial Sequence
  Synthetic: FXN 3 forward 9:69040800-69040821; SpCas9
gggcccttgggaggtgat

SEQ ID NO: 33805 - DNA, 25 bp, Artificial Sequence
  Synthetic: FXN 3 forward 9:69040794-69040822; SpCas9
gaggtggggcccttgggaggtgatg

SEQ ID NO: 33806 - DNA, 24 bp, Artificial Sequence
  Synthetic: FXN 3 forward 9:69040795-69040822; SpCas9
aggtggggcccttgggaggtgatg

SEQ ID NO: 33807 - DNA, 23 bp, Artificial Sequence
  Synthetic: FXN 3 forward 9:69040796-69040822; SpCas9
ggtggggcccttgggaggtgatg

SEQ ID NO: 33808 - DNA, 22 bp, Artificial Sequence
  Synthetic: FXN 3 forward 9:69040797-69040822; SpCas9
gtggggcccttgggaggtgatg

SEQ ID NO: 33809 - DNA, 21 bp, Artificial Sequence
  Synthetic: FXN 3 forward 9:69040798-69040822; SpCas9
tggggcccttgggaggtgatg

SEQ ID NO: 33810 - DNA, 20 bp, Artificial Sequence
  Synthetic: FXN 3 forward 9:69040799-69040822; SpCas9
ggggcccttgggaggtgatg

SEQ ID NO: 33811 - DNA, 19 bp, Artificial Sequence
  Synthetic: FXN 3 forward 9:69040800-69040822; SpCas9
gggcccttgggaggtgatg

SEQ ID NO: 33812 - DNA, 18 bp, Artificial Sequence
  Synthetic: FXN 3 forward 9:69040801-69040822; SpCas9
ggcccttgggaggtgatg

SEQ ID NO: 33813 - DNA, 25 bp, Artificial Sequence
  Synthetic: FXN 3 forward 9:69040800-69040828; SpCas9
gggcccttgggaggtgatgaggtat

SEQ ID NO: 33814 - DNA, 24 bp, Artificial Sequence
  Synthetic: FXN 3 forward 9:69040801-69040828; SpCas9
ggcccttgggaggtgatgaggtat

SEQ ID NO: 33815 - DNA, 23 bp, Artificial Sequence
  Synthetic: FXN 3 forward 9:69040802-69040828; SpCas9
gcccttgggaggtgatgaggtat

SEQ ID NO: 33816 - DNA, 22 bp, Artificial Sequence
  Synthetic: FXN 3 forward 9:69040803-69040828; SpCas9
cccttgggaggtgatgaggtat

SEQ ID NO: 33817 - DNA, 21 bp, Artificial Sequence
  Synthetic: FXN 3 forward 9:69040804-69040828; SpCas9
ccttgggaggtgatgaggtat

SEQ ID NO: 33818 - DNA, 20 bp, Artificial Sequence
  Synthetic: FXN 3 forward 9:69040805-69040828; SpCas9
cttgggaggtgatgaggtat

SEQ ID NO: 33819 - DNA, 19 bp, Artificial Sequence
  Synthetic: FXN 3 forward 9:69040806-69040828; SpCas9
ttgggaggtgatgaggtat

SEQ ID NO: 33820 - DNA, 18 bp, Artificial Sequence
  Synthetic: FXN 3 forward 9:69040807-69040828; SpCas9
tgggaggtgatgaggtat

SEQ ID NO: 33821 - DNA, 25 bp, Artificial Sequence
  Synthetic: FXN 3 forward 9:69040801-69040829; SpCas9
ggcccttgggaggtgatgaggtatg

SEQ ID NO: 33822 - DNA, 24 bp, Artificial Sequence
  Synthetic: FXN 3 forward 9:69040802-69040829; SpCas9
gcccttgggaggtgatgaggtatg

SEQ ID NO: 33823 - DNA, 23 bp, Artificial Sequence
  Synthetic: FXN 3 forward 9:69040803-69040829; SpCas9
cccttgggaggtgatgaggtatg

SEQ ID NO: 33824 - DNA, 22 bp, Artificial Sequence
  Synthetic: FXN 3 forward 9:69040804-69040829; SpCas9
ccttgggaggtgatgaggtatg

SEQ ID NO: 33825 - DNA, 21 bp, Artificial Sequence
  Synthetic: FXN 3 forward 9:69040805-69040829; SpCas9
cttgggaggtgatgaggtatg

SEQ ID NO: 33826 - DNA, 20 bp, Artificial Sequence
  Synthetic: FXN 3 forward 9:69040806-69040829; SpCas9
ttgggaggtgatgaggtatg

SEQ ID NO: 33827 - DNA, 19 bp, Artificial Sequence
  Synthetic: FXN 3 forward 9:69040807-69040829; SpCas9
tgggaggtgatgaggtatg

SEQ ID NO: 33828 - DNA, 18 bp, Artificial Sequence
  Synthetic: FXN 3 forward 9:69040808-69040829; SpCas9
gggaggtgatgaggtatg

SEQ ID NO: 33829 - DNA, 25 bp, Artificial Sequence
  Synthetic: FXN 3 forward 9:69040802-69040830; SpCas9
gcccttgggaggtgatgaggtatga

SEQ ID NO: 33830 - DNA, 24 bp, Artificial Sequence
  Synthetic: FXN 3 forward 9:69040803-69040830; SpCas9
cccttgggaggtgatgaggtatga

SEQ ID NO: 33831 - DNA, 23 bp, Artificial Sequence
  Synthetic: FXN 3 forward 9:69040804-69040830; SpCas9
ccttgggaggtgatgaggtatga

SEQ ID NO: 33832 - DNA, 22 bp, Artificial Sequence
  Synthetic: FXN 3 forward 9:69040805-69040830; SpCas9
cttgggaggtgatgaggtatga

SEQ ID NO: 33833 - DNA, 21 bp, Artificial Sequence
  Synthetic: FXN 3 forward 9:69040806-69040830; SpCas9
ttgggaggtgatgaggtatga

SEQ ID NO: 33834 - DNA, 20 bp, Artificial Sequence
  Synthetic: FXN 3 forward 9:69040807-69040830; SpCas9
tgggaggtgatgaggtatga

SEQ ID NO: 33835 - DNA, 19 bp, Artificial Sequence
  Synthetic: FXN 3 forward 9:69040808-69040830; SpCas9
gggaggtgatgaggtatga

SEQ ID NO: 33836 - DNA, 18 bp, Artificial Sequence
  Synthetic: FXN 3 forward 9:69040809-69040830; SpCas9
ggaggtgatgaggtatga

SEQ ID NO: 33837 - DNA, 25 bp, Artificial Sequence
  Synthetic: FXN 3 reverse 9:69040803-69040831; SpCas9
accctcatacctcatcacctcccaa

SEQ ID NO: 33838 - DNA, 24 bp, Artificial Sequence
  Synthetic: FXN 3 reverse 9:69040804-69040831; SpCas9
ccctcatacctcatcacctcccaa

SEQ ID NO: 33839 - DNA, 23 bp, Artificial Sequence
  Synthetic: FXN 3 reverse 9:69040805-69040831; SpCas9
cctcatacctcatcacctcccaa

SEQ ID NO: 33840 - DNA, 22 bp, Artificial Sequence
  Synthetic: FXN 3 reverse 9:69040806-69040831; SpCas9
ctcatacctcatcacctcccaa

SEQ ID NO: 33841 - DNA, 21 bp, Artificial Sequence
  Synthetic: FXN 3 reverse 9:69040807-69040831; SpCas9
tcatacctcatcacctcccaa

SEQ ID NO: 33842 - DNA, 20 bp, Artificial Sequence
  Synthetic: FXN 3 reverse 9:69040808-69040831; SpCas9
catacctcatcacctcccaa

SEQ ID NO: 33843 - DNA, 19 bp, Artificial Sequence
  Synthetic: FXN 3 reverse 9:69040809-69040831; SpCas9
atacctcatcacctcccaa

SEQ ID NO: 33844 - DNA, 18 bp, Artificial Sequence
  Synthetic: FXN 3 reverse 9:69040810-69040831; SpCas9
tacctcatcacctcccaa

SEQ ID NO: 33845 - DNA, 25 bp, Artificial Sequence
  Synthetic: FXN 3 reverse 9:69040804-69040832; SpCas9
caccctcatacctcatcacctccca

SEQ ID NO: 33846 - DNA, 24 bp, Artificial Sequence
  Synthetic: FXN 3 reverse 9:69040805-69040832; SpCas9
accctcatacctcatcacctccca

SEQ ID NO: 33847 - DNA, 23 bp, Artificial Sequence
  Synthetic: FXN 3 reverse 9:69040806-69040832; SpCas9
ccctcatacctcatcacctccca

SEQ ID NO: 33848 - DNA, 22 bp, Artificial Sequence
  Synthetic: FXN 3 reverse 9:69040807-69040832; SpCas9
cctcatacctcatcacctccca

SEQ ID NO: 33849 - DNA, 21 bp, Artificial Sequence
  Synthetic: FXN 3 reverse 9:69040808-69040832; SpCas9
ctcatacctcatcacctccca

SEQ ID NO: 33850 - DNA, 20 bp, Artificial Sequence
  Synthetic: FXN 3 reverse 9:69040809-69040832; SpCas9
tcatacctcatcacctccca

SEQ ID NO: 33851 - DNA, 19 bp, Artificial Sequence
  Synthetic: FXN 3 reverse 9:69040810-69040832; SpCas9
catacctcatcacctccca

SEQ ID NO: 33852 - DNA, 18 bp, Artificial Sequence
  Synthetic: FXN 3 reverse 9:69040811-69040832; SpCas9
atacctcatcacctccca

SEQ ID NO: 33853 - DNA, 25 bp, Artificial Sequence
  Synthetic: FXN 3 forward 9:69040805-69040833; SpCas9
cttgggaggtgatgaggtatgaggg

SEQ ID NO: 33854 - DNA, 24 bp, Artificial Sequence
  Synthetic: FXN 3 forward 9:69040806-69040833; SpCas9
ttgggaggtgatgaggtatgaggg

SEQ ID NO: 33855 - DNA, 23 bp, Artificial Sequence
  Synthetic: FXN 3 forward 9:69040807-69040833; SpCas9
tgggaggtgatgaggtatgaggg

SEQ ID NO: 33856 - DNA, 22 bp, Artificial Sequence
  Synthetic: FXN 3 forward 9:69040808-69040833; SpCas9
gggaggtgatgaggtatgaggg

SEQ ID NO: 33857 - DNA, 21 bp, Artificial Sequence
  Synthetic: FXN 3 forward 9:69040809-69040833; SpCas9
ggaggtgatgaggtatgaggg

SEQ ID NO: 33858 - DNA, 20 bp, Artificial Sequence
  Synthetic: FXN 3 forward 9:69040810-69040833; SpCas9
gaggtgatgaggtatgaggg

SEQ ID NO: 33859 - DNA, 19 bp, Artificial Sequence
  Synthetic: FXN 3 forward 9:69040811-69040833; SpCas9
aggtgatgaggtatgaggg

SEQ ID NO: 33860 - DNA, 18 bp, Artificial Sequence
  Synthetic: FXN 3 forward 9:69040812-69040833; SpCas9
ggtgatgaggtatgaggg

SEQ ID NO: 33861 - DNA, 25 bp, Artificial Sequence
  Synthetic: FXN 3 reverse 9:69040805-69040833; SpCas9
ccaccctcatacctcatcacctccc

SEQ ID NO: 33862 - DNA, 24 bp, Artificial Sequence
  Synthetic: FXN 3 reverse 9:69040806-69040833; SpCas9
caccctcatacctcatcacctccc

SEQ ID NO: 33863 - DNA, 23 bp, Artificial Sequence
  Synthetic: FXN 3 reverse 9:69040807-69040833; SpCas9
accctcatacctcatcacctccc

SEQ ID NO: 33864 - DNA, 22 bp, Artificial Sequence
  Synthetic: FXN 3 reverse 9:69040808-69040833; SpCas9
ccctcatacctcatcacctccc

SEQ ID NO: 33865 - DNA, 21 bp, Artificial Sequence
  Synthetic: FXN 3 reverse 9:69040809-69040833; SpCas9
cctcatacctcatcacctccc

SEQ ID NO: 33866 - DNA, 20 bp, Artificial Sequence
  Synthetic: FXN 3 reverse 9:69040810-69040833; SpCas9
ctcatacctcatcacctccc

SEQ ID NO: 33867 - DNA, 19 bp, Artificial Sequence
  Synthetic: FXN 3 reverse 9:69040811-69040833; SpCas9
tcatacctcatcacctccc

SEQ ID NO: 33868 - DNA, 18 bp, Artificial Sequence
  Synthetic: FXN 3 reverse 9:69040812-69040833; SpCas9
catacctcatcacctccc

SEQ ID NO: 33869 - DNA, 25 bp, Artificial Sequence
  Synthetic: FXN 3 forward 9:69040807-69040835; SpCas9
tgggaggtgatgaggtatgagggtg

SEQ ID NO: 33870 - DNA, 24 bp, Artificial Sequence
  Synthetic: FXN 3 forward 9:69040808-69040835; SpCas9
gggaggtgatgaggtatgagggtg

SEQ ID NO: 33871 - DNA, 23 bp, Artificial Sequence
  Synthetic: FXN 3 forward 9:69040809-69040835; SpCas9
ggaggtgatgaggtatgagggtg

SEQ ID NO: 33872 - DNA, 22 bp, Artificial Sequence
  Synthetic: FXN 3 forward 9:69040810-69040835; SpCas9
gaggtgatgaggtatgagggtg

SEQ ID NO: 33873 - DNA, 21 bp, Artificial Sequence
  Synthetic: FXN 3 forward 9:69040811-69040835; SpCas9
aggtgatgaggtatgagggtg

SEQ ID NO: 33874 - DNA, 20 bp, Artificial Sequence
  Synthetic: FXN 3 forward 9:69040812-69040835; SpCas9
ggtgatgaggtatgagggtg

SEQ ID NO: 33875 - DNA, 19 bp, Artificial Sequence
  Synthetic: FXN 3 forward 9:69040813-69040835; SpCas9
gtgatgaggtatgagggtg

SEQ ID NO: 33876 - DNA, 18 bp, Artificial Sequence
  Synthetic: FXN 3 forward 9:69040814-69040835; SpCas9
tgatgaggtatgagggtg

SEQ ID NO: 33877 - DNA, 25 bp, Artificial Sequence
  Synthetic: FXN 3 forward 9:69040820-69040848; SpCas9
ggtatgagggtggagcccatatgat

SEQ ID NO: 33878 - DNA, 24 bp, Artificial Sequence
  Synthetic: FXN 3 forward 9:69040821-69040848; SpCas9
gtatgagggtggagcccatatgat

SEQ ID NO: 33879 - DNA, 23 bp, Artificial Sequence
  Synthetic: FXN 3 forward 9:69040822-69040848; SpCas9
tatgagggtggagcccatatgat

SEQ ID NO: 33880 - DNA, 22 bp, Artificial Sequence
  Synthetic: FXN 3 forward 9:69040823-69040848; SpCas9
atgagggtggagcccatatgat

SEQ ID NO: 33881 - DNA, 21 bp, Artificial Sequence
  Synthetic: FXN 3 forward 9:69040824-69040848; SpCas9
tgagggtggagcccatatgat

SEQ ID NO: 33882 - DNA, 20 bp, Artificial Sequence
  Synthetic: FXN 3 forward 9:69040825-69040848; SpCas9
gagggtggagcccatatgat

SEQ ID NO: 33883 - DNA, 19 bp, Artificial Sequence
  Synthetic: FXN 3 forward 9:69040826-69040848; SpCas9
agggtggagcccatatgat

SEQ ID NO: 33884 - DNA, 18 bp, Artificial Sequence
  Synthetic: FXN 3 forward 9:69040827-69040848; SpCas9
gggtggagcccatatgat

SEQ ID NO: 33885 - DNA, 25 bp, Artificial Sequence
  Synthetic: FXN 3 forward 9:69040821-69040849; SpCas9
gtatgagggtggagcccatatgatt

SEQ ID NO: 33886 - DNA, 24 bp, Artificial Sequence
  Synthetic: FXN 3 forward 9:69040822-69040849; SpCas9
tatgagggtggagcccatatgatt

SEQ ID NO: 33887 - DNA, 23 bp, Artificial Sequence
  Synthetic: FXN 3 forward 9:69040823-69040849; SpCas9
atgagggtggagcccatatgatt

SEQ ID NO: 33888 - DNA, 22 bp, Artificial Sequence
  Synthetic: FXN 3 forward 9:69040824-69040849; SpCas9
tgagggtggagcccatatgatt

SEQ ID NO: 33889 - DNA, 21 bp, Artificial Sequence
  Synthetic: FXN 3 forward 9:69040825-69040849; SpCas9
gagggtggagcccatatgatt

SEQ ID NO: 33890 - DNA, 20 bp, Artificial Sequence
  Synthetic: FXN 3 forward 9:69040826-69040849; SpCas9
agggtggagcccatatgatt

SEQ ID NO: 33891 - DNA, 19 bp, Artificial Sequence
  Synthetic: FXN 3 forward 9:69040827-69040849; SpCas9
gggtggagcccatatgatt

SEQ ID NO: 33892 - DNA, 18 bp, Artificial Sequence
  Synthetic: FXN 3 forward 9:69040828-69040849; SpCas9
ggtggagcccatatgatt

SEQ ID NO: 33893 - DNA, 25 bp, Artificial Sequence
  Synthetic: FXN 3 forward 9:69040826-69040854; SpCas9
agggtggagcccatatgattgggat

SEQ ID NO: 33894 - DNA, 24 bp, Artificial Sequence
  Synthetic: FXN 3 forward 9:69040827-69040854; SpCas9
gggtggagcccatatgattgggat

SEQ ID NO: 33895 - DNA, 23 bp, Artificial Sequence
  Synthetic: FXN 3 forward 9:69040828-69040854; SpCas9
ggtggagcccatatgattgggat

SEQ ID NO: 33896 - DNA, 22 bp, Artificial Sequence
  Synthetic: FXN 3 forward 9:69040829-69040854; SpCas9
gtggagcccatatgattgggat

SEQ ID NO: 33897 - DNA, 21 bp, Artificial Sequence
  Synthetic: FXN 3 forward 9:69040830-69040854; SpCas9
tggagcccatatgattgggat

SEQ ID NO: 33898 - DNA, 20 bp, Artificial Sequence
  Synthetic: FXN 3 forward 9:69040831-69040854; SpCas9
ggagcccatatgattgggat

SEQ ID NO: 33899 - DNA, 19 bp, Artificial Sequence
  Synthetic: FXN 3 forward 9:69040832-69040854; SpCas9
gagcccatatgattgggat

SEQ ID NO: 33900 - DNA, 18 bp, Artificial Sequence
  Synthetic: FXN 3 forward 9:69040833-69040854; SpCas9
agcccatatgattgggat

SEQ ID NO: 33901 - DNA, 25 bp, Artificial Sequence
  Synthetic: FXN 3 reverse 9:69040835-69040863; SpCas9
agaagggcactaatcccaatcatat

SEQ ID NO: 33902 - DNA, 24 bp, Artificial Sequence
  Synthetic: FXN 3 reverse 9:69040836-69040863; SpCas9
gaagggcactaatcccaatcatat

SEQ ID NO: 33903 - DNA, 23 bp, Artificial Sequence
  Synthetic: FXN 3 reverse 9:69040837-69040863; SpCas9
aagggcactaatcccaatcatat

SEQ ID NO: 33904 - DNA, 22 bp, Artificial Sequence
  Synthetic: FXN 3 reverse 9:69040838-69040863; SpCas9
agggcactaatcccaatcatat

SEQ ID NO: 33905 - DNA, 21 bp, Artificial Sequence
  Synthetic: FXN 3 reverse 9:69040839-69040863; SpCas9
gggcactaatcccaatcatat

SEQ ID NO: 33906 - DNA, 20 bp, Artificial Sequence
  Synthetic: FXN 3 reverse 9:69040840-69040863; SpCas9
ggcactaatcccaatcatat

SEQ ID NO: 33907 - DNA, 19 bp, Artificial Sequence
  Synthetic: FXN 3 reverse 9:69040841-69040863; SpCas9
gcactaatcccaatcatat

SEQ ID NO: 33908 - DNA, 18 bp, Artificial Sequence
  Synthetic: FXN 3 reverse 9:69040842-69040863; SpCas9
cactaatcccaatcatat

SEQ ID NO: 33909 - DNA, 25 bp, Artificial Sequence
  Synthetic: FXN 3 reverse 9:69040836-69040864; SpCas9
tagaagggcactaatcccaatcata

SEQ ID NO: 33910 - DNA, 24 bp, Artificial Sequence
  Synthetic: FXN 3 reverse 9:69040837-69040864; SpCas9
agaagggcactaatcccaatcata

SEQ ID NO: 33911 - DNA, 23 bp, Artificial Sequence
  Synthetic: FXN 3 reverse 9:69040838-69040864; SpCas9
gaagggcactaatcccaatcata

SEQ ID NO: 33912 - DNA, 22 bp, Artificial Sequence
  Synthetic: FXN 3 reverse 9:69040839-69040864; SpCas9
aagggcactaatcccaatcata

SEQ ID NO: 33913 - DNA, 21 bp, Artificial Sequence
  Synthetic: FXN 3 reverse 9:69040840-69040864; SpCas9
agggcactaatcccaatcata

SEQ ID NO: 33914 - DNA, 20 bp, Artificial Sequence
  Synthetic: FXN 3 reverse 9:69040841-69040864; SpCas9
gggcactaatcccaatcata

SEQ ID NO: 33915 - DNA, 19 bp, Artificial Sequence
  Synthetic: FXN 3 reverse 9:69040842-69040864; SpCas9
ggcactaatcccaatcata

SEQ ID NO: 33916 - DNA, 18 bp, Artificial Sequence
  Synthetic: FXN 3 reverse 9:69040843-69040864; SpCas9
gcactaatcccaatcata

SEQ ID NO: 33917 - DNA, 25 bp, Artificial Sequence
  Synthetic: FXN 3 forward 9:69040842-69040870; SpCas9
gattgggattagtgcccttctaaaa

SEQ ID NO: 33918 - DNA, 24 bp, Artificial Sequence
  Synthetic: FXN 3 forward 9:69040843-69040870; SpCas9
attgggattagtgcccttctaaaa

SEQ ID NO: 33919 - DNA, 23 bp, Artificial Sequence
  Synthetic: FXN 3 forward 9:69040844-69040870; SpCas9
ttgggattagtgcccttctaaaa

SEQ ID NO: 33920 - DNA, 22 bp, Artificial Sequence
  Synthetic: FXN 3 forward 9:69040845-69040870; SpCas9
tgggattagtgcccttctaaaa

SEQ ID NO: 33921 - DNA, 21 bp, Artificial Sequence
  Synthetic: FXN 3 forward 9:69040846-69040870; SpCas9
gggattagtgcccttctaaaa

SEQ ID NO: 33922 - DNA, 20 bp, Artificial Sequence
  Synthetic: FXN 3 forward 9:69040847-69040870; SpCas9
ggattagtgcccttctaaaa

SEQ ID NO: 33923 - DNA, 19 bp, Artificial Sequence
  Synthetic: FXN 3 forward 9:69040848-69040870; SpCas9
gattagtgcccttctaaaa

SEQ ID NO: 33924 - DNA, 18 bp, Artificial Sequence
  Synthetic: FXN 3 forward 9:69040849-69040870; SpCas9
attagtgcccttctaaaa

SEQ ID NO: 33925 - DNA, 25 bp, Artificial Sequence
  Synthetic: FXN 3 forward 9:69040850-69040878; SpCas9
ttagtgcccttctaaaatagcccaa

SEQ ID NO: 33926 - DNA, 24 bp, Artificial Sequence
  Synthetic: FXN 3 forward 9:69040851-69040878; SpCas9
tagtgcccttctaaaatagcccaa

SEQ ID NO: 33927 - DNA, 23 bp, Artificial Sequence
  Synthetic: FXN 3 forward 9:69040852-69040878; SpCas9
agtgcccttctaaaatagcccaa

SEQ ID NO: 33928 - DNA, 22 bp, Artificial Sequence
  Synthetic: FXN 3 forward 9:69040853-69040878; SpCas9
gtgcccttctaaaatagcccaa

SEQ ID NO: 33929 - DNA, 21 bp, Artificial Sequence
  Synthetic: FXN 3 forward 9:69040854-69040878; SpCas9
tgcccttctaaaatagcccaa

SEQ ID NO: 33930 - DNA, 20 bp, Artificial Sequence
  Synthetic: FXN 3 forward 9:69040855-69040878; SpCas9
gcccttctaaaatagcccaa

SEQ ID NO: 33931 - DNA, 19 bp, Artificial Sequence
  Synthetic: FXN 3 forward 9:69040856-69040878; SpCas9
cccttctaaaatagcccaa

SEQ ID NO: 33932 - DNA, 18 bp, Artificial Sequence
  Synthetic: FXN 3 forward 9:69040857-69040878; SpCas9
ccttctaaaatagcccaa

SEQ ID NO: 33933 - DNA, 25 bp, Artificial Sequence
  Synthetic: FXN 3 forward 9:69040852-69040880; SpCas9
agtgcccttctaaaatagcccaacg

SEQ ID NO: 33934 - DNA, 24 bp, Artificial Sequence
  Synthetic: FXN 3 forward 9:69040853-69040880; SpCas9
gtgcccttctaaaatagcccaacg

SEQ ID NO: 33935 - DNA, 23 bp, Artificial Sequence
  Synthetic: FXN 3 forward 9:69040854-69040880; SpCas9
tgcccttctaaaatagcccaacg

SEQ ID NO: 33936 - DNA, 22 bp, Artificial Sequence
  Synthetic: FXN 3 forward 9:69040855-69040880; SpCas9
gcccttctaaaatagcccaacg

SEQ ID NO: 33937 - DNA, 21 bp, Artificial Sequence
  Synthetic: FXN 3 forward 9:69040856-69040880; SpCas9
cccttctaaaatagcccaacg

SEQ ID NO: 33938 - DNA, 20 bp, Artificial Sequence
  Synthetic: FXN 3 forward 9:69040857-69040880; SpCas9
ccttctaaaatagcccaacg

SEQ ID NO: 33939 - DNA, 19 bp, Artificial Sequence
  Synthetic: FXN 3 forward 9:69040858-69040880; SpCas9
cttctaaaatagcccaacg

SEQ ID NO: 33940 - DNA, 18 bp, Artificial Sequence
  Synthetic: FXN 3 forward 9:69040859-69040880; SpCas9
ttctaaaatagcccaacg

SEQ ID NO: 33941 - DNA, 25 bp, Artificial Sequence
  Synthetic: FXN 3 reverse 9:69040856-69040884; SpCas9
tgggctccgttgggctattttagaa

SEQ ID NO: 33942 - DNA, 24 bp, Artificial Sequence
  Synthetic: FXN 3 reverse 9:69040857-69040884; SpCas9
gggctccgttgggctattttagaa

SEQ ID NO: 33943 - DNA, 23 bp, Artificial Sequence
  Synthetic: FXN 3 reverse 9:69040858-69040884; SpCas9
ggctccgttgggctattttagaa

SEQ ID NO: 33944 - DNA, 22 bp, Artificial Sequence
  Synthetic: FXN 3 reverse 9:69040859-69040884; SpCas9
gctccgttgggctattttagaa

SEQ ID NO: 33945 - DNA, 21 bp, Artificial Sequence
  Synthetic: FXN 3 reverse 9:69040860-69040884; SpCas9
ctccgttgggctattttagaa

SEQ ID NO: 33946 - DNA, 20 bp, Artificial Sequence
  Synthetic: FXN 3 reverse 9:69040861-69040884; SpCas9
tccgttgggctattttagaa

SEQ ID NO: 33947 - DNA, 19 bp, Artificial Sequence
  Synthetic: FXN 3 reverse 9:69040862-69040884; SpCas9
ccgttgggctattttagaa

SEQ ID NO: 33948 - DNA, 18 bp, Artificial Sequence
  Synthetic: FXN 3 reverse 9:69040863-69040884; SpCas9
cgttgggctattttagaa

SEQ ID NO: 33949 - DNA, 25 bp, Artificial Sequence
  Synthetic: FXN 3 forward 9:69040857-69040885; SpCas9
ccttctaaaatagcccaacggagcc

SEQ ID NO: 33950 - DNA, 24 bp, Artificial Sequence
  Synthetic: FXN 3 forward 9:69040858-69040885; SpCas9
cttctaaaatagcccaacggagcc

SEQ ID NO: 33951 - DNA, 23 bp, Artificial Sequence
  Synthetic: FXN 3 forward 9:69040859-69040885; SpCas9
ttctaaaatagcccaacggagcc

SEQ ID NO: 33952 - DNA, 22 bp, Artificial Sequence
  Synthetic: FXN 3 forward 9:69040860-69040885; SpCas9
tctaaaatagcccaacggagcc

SEQ ID NO: 33953 - DNA, 21 bp, Artificial Sequence
  Synthetic: FXN 3 forward 9:69040861-69040885; SpCas9
ctaaaatagcccaacggagcc

SEQ ID NO: 33954 - DNA, 20 bp, Artificial Sequence
  Synthetic: FXN 3 forward 9:69040862-69040885; SpCas9
taaaatagcccaacggagcc

SEQ ID NO: 33955 - DNA, 19 bp, Artificial Sequence
  Synthetic: FXN 3 forward 9:69040863-69040885; SpCas9
aaaatagcccaacggagcc

SEQ ID NO: 33956 - DNA, 18 bp, Artificial Sequence
  Synthetic: FXN 3 forward 9:69040864-69040885; SpCas9
aaatagcccaacggagcc

SEQ ID NO: 33957 - DNA, 25 bp, Artificial Sequence
  Synthetic: FXN 3 reverse 9:69040857-69040885; SpCas9
ctgggctccgttgggctattttaga

SEQ ID NO: 33958 - DNA, 24 bp, Artificial Sequence
  Synthetic: FXN 3 reverse 9:69040858-69040885; SpCas9
tgggctccgttgggctattttaga

SEQ ID NO: 33959 - DNA, 23 bp, Artificial Sequence
  Synthetic: FXN 3 reverse 9:69040859-69040885; SpCas9
gggctccgttgggctattttaga

SEQ ID NO: 33960 - DNA, 22 bp, Artificial Sequence
  Synthetic: FXN 3 reverse 9:69040860-69040885; SpCas9
ggctccgttgggctattttaga

SEQ ID NO: 33961 - DNA, 21 bp, Artificial Sequence
  Synthetic: FXN 3 reverse 9:69040861-69040885; SpCas9
gctccgttgggctattttaga

SEQ ID NO: 33962 - DNA, 20 bp, Artificial Sequence
  Synthetic: FXN 3 reverse 9:69040862-69040885; SpCas9
ctccgttgggctattttaga

SEQ ID NO: 33963 - DNA, 19 bp, Artificial Sequence
  Synthetic: FXN 3 reverse 9:69040863-69040885; SpCas9
tccgttgggctattttaga

SEQ ID NO: 33964 - DNA, 18 bp, Artificial Sequence
  Synthetic: FXN 3 reverse 9:69040864-69040885; SpCas9
ccgttgggctattttaga

SEQ ID NO: 33965 - DNA, 25 bp, Artificial Sequence
  Synthetic: FXN 3 reverse 9:69040858-69040886; SpCas9
actgggctccgttgggctattttag

SEQ ID NO: 33966 - DNA, 24 bp, Artificial Sequence
  Synthetic: FXN 3 reverse 9:69040859-69040886; SpCas9
ctgggctccgttgggctattttag

SEQ ID NO: 33967 - DNA, 23 bp, Artificial Sequence
  Synthetic: FXN 3 reverse 9:69040860-69040886; SpCas9
tgggctccgttgggctattttag

SEQ ID NO: 33968 - DNA, 22 bp, Artificial Sequence
  Synthetic: FXN 3 reverse 9:69040861-69040886; SpCas9
gggctccgttgggctattttag

SEQ ID NO: 33969 - DNA, 21 bp, Artificial Sequence
  Synthetic: FXN 3 reverse 9:69040862-69040886; SpCas9
ggctccgttgggctattttag

SEQ ID NO: 33970 - DNA, 20 bp, Artificial Sequence
  Synthetic: FXN 3 reverse 9:69040863-69040886; SpCas9
gctccgttgggctattttag

SEQ ID NO: 33971 - DNA, 19 bp, Artificial Sequence
  Synthetic: FXN 3 reverse 9:69040864-69040886; SpCas9
ctccgttgggctattttag

SEQ ID NO: 33972 - DNA, 18 bp, Artificial Sequence
  Synthetic: FXN 3 reverse 9:69040865-69040886; SpCas9
tccgttgggctattttag

SEQ ID NO: 33973 - DNA, 25 bp, Artificial Sequence
  Synthetic: FXN 3 reverse 9:69040861-69040889; SpCas9
gtcactgggctccgttgggctattt

SEQ ID NO: 33974 - DNA, 24 bp, Artificial Sequence
  Synthetic: FXN 3 reverse 9:69040862-69040889; SpCas9
tcactgggctccgttgggctattt

SEQ ID NO: 33975 - DNA, 23 bp, Artificial Sequence
  Synthetic: FXN 3 reverse 9:69040863-69040889; SpCas9
cactgggctccgttgggctattt

SEQ ID NO: 33976 - DNA, 22 bp, Artificial Sequence
  Synthetic: FXN 3 reverse 9:69040864-69040889; SpCas9
actgggctccgttgggctattt

SEQ ID NO: 33977 - DNA, 21 bp, Artificial Sequence
  Synthetic: FXN 3 reverse 9:69040865-69040889; SpCas9
ctgggctccgttgggctattt

SEQ ID NO: 33978 - DNA, 20 bp, Artificial Sequence
  Synthetic: FXN 3 reverse 9:69040866-69040889; SpCas9
tgggctccgttgggctattt

SEQ ID NO: 33979 - DNA, 19 bp, Artificial Sequence
  Synthetic: FXN 3 reverse 9:69040867-69040889; SpCas9
gggctccgttgggctattt

SEQ ID NO: 33980 - DNA, 18 bp, Artificial Sequence
  Synthetic: FXN 3 reverse 9:69040868-69040889; SpCas9
ggctccgttgggctattt

SEQ ID NO: 33981 - DNA, 25 bp, Artificial Sequence
  Synthetic: FXN 3 forward 9:69040864-69040892; SpCas9
aaatagcccaacggagcccagtgac

SEQ ID NO: 33982 - DNA, 24 bp, Artificial Sequence
  Synthetic: FXN 3 forward 9:69040865-69040892; SpCas9
aatagcccaacggagcccagtgac

SEQ ID NO: 33983 - DNA, 23 bp, Artificial Sequence
  Synthetic: FXN 3 forward 9:69040866-69040892; SpCas9
atagcccaacggagcccagtgac

SEQ ID NO: 33984 - DNA, 22 bp, Artificial Sequence
  Synthetic: FXN 3 forward 9:69040867-69040892; SpCas9
tagcccaacggagcccagtgac

SEQ ID NO: 33985 - DNA, 21 bp, Artificial Sequence
  Synthetic: FXN 3 forward 9:69040868-69040892; SpCas9
agcccaacggagcccagtgac

SEQ ID NO: 33986 - DNA, 20 bp, Artificial Sequence
  Synthetic: FXN 3 forward 9:69040869-69040892; SpCas9
gcccaacggagcccagtgac

SEQ ID NO: 33987 - DNA, 19 bp, Artificial Sequence
  Synthetic: FXN 3 forward 9:69040870-69040892; SpCas9
cccaacggagcccagtgac

SEQ ID NO: 33988 - DNA, 18 bp, Artificial Sequence
  Synthetic: FXN 3 forward 9:69040871-69040892; SpCas9
ccaacggagcccagtgac

SEQ ID NO: 33989 - DNA, 25 bp, Artificial Sequence
  Synthetic: FXN 3 forward 9:69040865-69040893; SpCas9
aatagcccaacggagcccagtgaca

SEQ ID NO: 33990 - DNA, 24 bp, Artificial Sequence
  Synthetic: FXN 3 forward 9:69040866-69040893; SpCas9
atagcccaacggagcccagtgaca

SEQ ID NO: 33991 - DNA, 23 bp, Artificial Sequence
  Synthetic: FXN 3 forward 9:69040867-69040893; SpCas9
tagcccaacggagcccagtgaca

SEQ ID NO: 33992 - DNA, 22 bp, Artificial Sequence
  Synthetic: FXN 3 forward 9:69040868-69040893; SpCas9
agcccaacggagcccagtgaca

SEQ ID NO: 33993 - DNA, 21 bp, Artificial Sequence
  Synthetic: FXN 3 forward 9:69040869-69040893; SpCas9
gcccaacggagcccagtgaca

SEQ ID NO: 33994 - DNA, 20 bp, Artificial Sequence
  Synthetic: FXN 3 forward 9:69040870-69040893; SpCas9
cccaacggagcccagtgaca

SEQ ID NO: 33995 - DNA, 19 bp, Artificial Sequence
  Synthetic: FXN 3 forward 9:69040871-69040893; SpCas9
ccaacggagcccagtgaca

SEQ ID NO: 33996 - DNA, 18 bp, Artificial Sequence
  Synthetic: FXN 3 forward 9:69040872-69040893; SpCas9
caacggagcccagtgaca

SEQ ID NO: 33997 - DNA, 25 bp, Artificial Sequence
  Synthetic: FXN 3 reverse 9:69040870-69040898; SpCas9
tgatgccttgtcactgggctccgtt

SEQ ID NO: 33998 - DNA, 24 bp, Artificial Sequence
  Synthetic: FXN 3 reverse 9:69040871-69040898; SpCas9
gatgccttgtcactgggctccgtt

SEQ ID NO: 33999 - DNA, 23 bp, Artificial Sequence
  Synthetic: FXN 3 reverse 9:69040872-69040898; SpCas9
atgccttgtcactgggctccgtt

SEQ ID NO: 34000 - DNA, 22 bp, Artificial Sequence
  Synthetic: FXN 3 reverse 9:69040873-69040898; SpCas9
tgccttgtcactgggctccgtt

SEQ ID NO: 34001 - DNA, 21 bp, Artificial Sequence
  Synthetic: FXN 3 reverse 9:69040874-69040898; SpCas9
gccttgtcactgggctccgtt

SEQ ID NO: 34002 - DNA, 20 bp, Artificial Sequence
  Synthetic: FXN 3 reverse 9:69040875-69040898; SpCas9
ccttgtcactgggctccgtt

SEQ ID NO: 34003 - DNA, 19 bp, Artificial Sequence
  Synthetic: FXN 3 reverse 9:69040876-69040898; SpCas9
cttgtcactgggctccgtt

SEQ ID NO: 34004 - DNA, 18 bp, Artificial Sequence
  Synthetic: FXN 3 reverse 9:69040877-69040898; SpCas9
ttgtcactgggctccgtt

SEQ ID NO: 34005 - DNA, 25 bp, Artificial Sequence
  Synthetic: FXN 3 reverse 9:69040871-69040899; SpCas9
atgatgccttgtcactgggctccgt

SEQ ID NO: 34006 - DNA, 24 bp, Artificial Sequence
  Synthetic: FXN 3 reverse 9:69040872-69040899; SpCas9
tgatgccttgtcactgggctccgt

SEQ ID NO: 34007 - DNA, 23 bp, Artificial Sequence
  Synthetic: FXN 3 reverse 9:69040873-69040899; SpCas9
gatgccttgtcactgggctccgt

SEQ ID NO: 34008 - DNA, 22 bp, Artificial Sequence
  Synthetic: FXN 3 reverse 9:69040874-69040899; SpCas9
atgccttgtcactgggctccgt

SEQ ID NO: 34009 - DNA, 21 bp, Artificial Sequence
  Synthetic: FXN 3 reverse 9:69040875-69040899; SpCas9
tgccttgtcactgggctccgt

SEQ ID NO: 34010 - DNA, 20 bp, Artificial Sequence
  Synthetic: FXN 3 reverse 9:69040876-69040899; SpCas9
gccttgtcactgggctccgt

SEQ ID NO: 34011 - DNA, 19 bp, Artificial Sequence
  Synthetic: FXN 3 reverse 9:69040877-69040899; SpCas9
ccttgtcactgggctccgt

SEQ ID NO: 34012 - DNA, 18 bp, Artificial Sequence
  Synthetic: FXN 3 reverse 9:69040878-69040899; SpCas9
cttgtcactgggctccgt

SEQ ID NO: 34013 - DNA, 25 bp, Artificial Sequence
  Synthetic: FXN 3 reverse 9:69040880-69040908; SpCas9
ggttcatagatgatgccttgtcact

SEQ ID NO: 34014 - DNA, 24 bp, Artificial Sequence
  Synthetic: FXN 3 reverse 9:69040881-69040908; SpCas9
gttcatagatgatgccttgtcact

SEQ ID NO: 34015 - DNA, 23 bp, Artificial Sequence
  Synthetic: FXN 3 reverse 9:69040882-69040908; SpCas9
ttcatagatgatgccttgtcact

SEQ ID NO: 34016 - DNA, 22 bp, Artificial Sequence
  Synthetic: FXN 3 reverse 9:69040883-69040908; SpCas9
tcatagatgatgccttgtcact

SEQ ID NO: 34017 - DNA, 21 bp, Artificial Sequence
  Synthetic: FXN 3 reverse 9:69040884-69040908; SpCas9
catagatgatgccttgtcact

SEQ ID NO: 34018 - DNA, 20 bp, Artificial Sequence
  Synthetic: FXN 3 reverse 9:69040885-69040908; SpCas9
atagatgatgccttgtcact

SEQ ID NO: 34019 - DNA, 19 bp, Artificial Sequence
  Synthetic: FXN 3 reverse 9:69040886-69040908; SpCas9
tagatgatgccttgtcact

SEQ ID NO: 34020 - DNA, 18 bp, Artificial Sequence
  Synthetic: FXN 3 reverse 9:69040887-69040908; SpCas9
agatgatgccttgtcact

SEQ ID NO: 34021 - DNA, 25 bp, Artificial Sequence
  Synthetic: FXN 3 reverse 9:69040881-69040909; SpCas9
tggttcatagatgatgccttgtcac

SEQ ID NO: 34022 - DNA, 24 bp, Artificial Sequence
  Synthetic: FXN 3 reverse 9:69040882-69040909; SpCas9
ggttcatagatgatgccttgtcac

SEQ ID NO: 34023 - DNA, 23 bp, Artificial Sequence
  Synthetic: FXN 3 reverse 9:69040883-69040909; SpCas9
gttcatagatgatgccttgtcac

SEQ ID NO: 34024 - DNA, 22 bp, Artificial Sequence
  Synthetic: FXN 3 reverse 9:69040884-69040909; SpCas9
ttcatagatgatgccttgtcac

SEQ ID NO: 34025 - DNA, 21 bp, Artificial Sequence
  Synthetic: FXN 3 reverse 9:69040885-69040909; SpCas9
tcatagatgatgccttgtcac

SEQ ID NO: 34026 - DNA, 20 bp, Artificial Sequence
  Synthetic: FXN 3 reverse 9:69040886-69040909; SpCas9
catagatgatgccttgtcac

SEQ ID NO: 34027 - DNA, 19 bp, Artificial Sequence
  Synthetic: FXN 3 reverse 9:69040887-69040909; SpCas9
atagatgatgccttgtcac

SEQ ID NO: 34028 - DNA, 18 bp, Artificial Sequence
  Synthetic: FXN 3 reverse 9:69040888-69040909; SpCas9
tagatgatgccttgtcac

SEQ ID NO: 34029 - DNA, 25 bp, Artificial Sequence
  Synthetic: FXN 3 forward 9:69040882-69040910; SpCas9
cagtgacaaggcatcatctatgaac

SEQ ID NO: 34030 - DNA, 24 bp, Artificial Sequence
  Synthetic: FXN 3 forward 9:69040883-69040910; SpCas9
agtgacaaggcatcatctatgaac

SEQ ID NO: 34031 - DNA, 23 bp, Artificial Sequence
  Synthetic: FXN 3 forward 9:69040884-69040910; SpCas9
gtgacaaggcatcatctatgaac

SEQ ID NO: 34032 - DNA, 22 bp, Artificial Sequence
  Synthetic: FXN 3 forward 9:69040885-69040910; SpCas9
tgacaaggcatcatctatgaac

SEQ ID NO: 34033 - DNA, 21 bp, Artificial Sequence
  Synthetic: FXN 3 forward 9:69040886-69040910; SpCas9
gacaaggcatcatctatgaac

SEQ ID NO: 34034 - DNA, 20 bp, Artificial Sequence
  Synthetic: FXN 3 forward 9:69040887-69040910; SpCas9
acaaggcatcatctatgaac

SEQ ID NO: 34035 - DNA, 19 bp, Artificial Sequence
  Synthetic: FXN 3 forward 9:69040888-69040910; SpCas9
caaggcatcatctatgaac

SEQ ID NO: 34036 - DNA, 18 bp, Artificial Sequence
  Synthetic: FXN 3 forward 9:69040889-69040910; SpCas9
aaggcatcatctatgaac

SEQ ID NO: 34037 - DNA, 25 bp, Artificial Sequence
  Synthetic: FXN 3 forward 9:69040883-69040911; SpCas9
agtgacaaggcatcatctatgaacc

SEQ ID NO: 34038 - DNA, 24 bp, Artificial Sequence
  Synthetic: FXN 3 forward 9:69040884-69040911; SpCas9
gtgacaaggcatcatctatgaacc

SEQ ID NO: 34039 - DNA, 23 bp, Artificial Sequence
  Synthetic: FXN 3 forward 9:69040885-69040911; SpCas9
tgacaaggcatcatctatgaacc

SEQ ID NO: 34040 - DNA, 22 bp, Artificial Sequence
  Synthetic: FXN 3 forward 9:69040886-69040911; SpCas9
gacaaggcatcatctatgaacc

SEQ ID NO: 34041 - DNA, 21 bp, Artificial Sequence
  Synthetic: FXN 3 forward 9:69040887-69040911; SpCas9
acaaggcatcatctatgaacc

SEQ ID NO: 34042 - DNA, 20 bp, Artificial Sequence
  Synthetic: FXN 3 forward 9:69040888-69040911; SpCas9
caaggcatcatctatgaacc

SEQ ID NO: 34043 - DNA, 19 bp, Artificial Sequence
  Synthetic: FXN 3 forward 9:69040889-69040911; SpCas9
aaggcatcatctatgaacc

SEQ ID NO: 34044 - DNA, 18 bp, Artificial Sequence
  Synthetic: FXN 3 forward 9:69040890-69040911; SpCas9
aggcatcatctatgaacc

SEQ ID NO: 34045 - DNA, 25 bp, Artificial Sequence
  Synthetic: FXN 3 forward 9:69040890-69040918; SpCas9
aggcatcatctatgaaccaggaaac

SEQ ID NO: 34046 - DNA, 24 bp, Artificial Sequence
  Synthetic: FXN 3 forward 9:69040891-69040918; SpCas9
ggcatcatctatgaaccaggaaac

SEQ ID NO: 34047 - DNA, 23 bp, Artificial Sequence
  Synthetic: FXN 3 forward 9:69040892-69040918; SpCas9
gcatcatctatgaaccaggaaac

SEQ ID NO: 34048 - DNA, 22 bp, Artificial Sequence
  Synthetic: FXN 3 forward 9:69040893-69040918; SpCas9
catcatctatgaaccaggaaac

SEQ ID NO: 34049 - DNA, 21 bp, Artificial Sequence
  Synthetic: FXN 3 forward 9:69040894-69040918; SpCas9
atcatctatgaaccaggaaac

SEQ ID NO: 34050 - DNA, 20 bp, Artificial Sequence
  Synthetic: FXN 3 forward 9:69040895-69040918; SpCas9
tcatctatgaaccaggaaac

SEQ ID NO: 34051 - DNA, 19 bp, Artificial Sequence
  Synthetic: FXN 3 forward 9:69040896-69040918; SpCas9
catctatgaaccaggaaac

SEQ ID NO: 34052 - DNA, 18 bp, Artificial Sequence
  Synthetic: FXN 3 forward 9:69040897-69040918; SpCas9
atctatgaaccaggaaac

SEQ ID NO: 34053 - DNA, 25 bp, Artificial Sequence
  Synthetic: FXN 3 reverse 9:69040899-69040927; SpCas9
tggtgagggccagtttcctggttca

SEQ ID NO: 34054 - DNA, 24 bp, Artificial Sequence
  Synthetic: FXN 3 reverse 9:69040900-69040927; SpCas9
ggtgagggccagtttcctggttca

SEQ ID NO: 34055 - DNA, 23 bp, Artificial Sequence
  Synthetic: FXN 3 reverse 9:69040901-69040927; SpCas9
gtgagggccagtttcctggttca

SEQ ID NO: 34056 - DNA, 22 bp, Artificial Sequence
  Synthetic: FXN 3 reverse 9:69040902-69040927; SpCas9
tgagggccagtttcctggttca

SEQ ID NO: 34057 - DNA, 21 bp, Artificial Sequence
  Synthetic: FXN 3 reverse 9:69040903-69040927; SpCas9
gagggccagtttcctggttca

SEQ ID NO: 34058 - DNA, 20 bp, Artificial Sequence
  Synthetic: FXN 3 reverse 9:69040904-69040927; SpCas9
agggccagtttcctggttca

SEQ ID NO: 34059 - DNA, 19 bp, Artificial Sequence
  Synthetic: FXN 3 reverse 9:69040905-69040927; SpCas9
gggccagtttcctggttca

SEQ ID NO: 34060 - DNA, 18 bp, Artificial Sequence
  Synthetic: FXN 3 reverse 9:69040906-69040927; SpCas9
ggccagtttcctggttca

SEQ ID NO: 34061 - DNA, 25 bp, Artificial Sequence
  Synthetic: FXN 3 forward 9:69040900-69040928; SpCas9
tatgaaccaggaaactggccctcac

SEQ ID NO: 34062 - DNA, 24 bp, Artificial Sequence
  Synthetic: FXN 3 forward 9:69040901-69040928; SpCas9
atgaaccaggaaactggccctcac

SEQ ID NO: 34063 - DNA, 23 bp, Artificial Sequence
  Synthetic: FXN 3 forward 9:69040902-69040928; SpCas9
tgaaccaggaaactggccctcac

SEQ ID NO: 34064 - DNA, 22 bp, Artificial Sequence
  Synthetic: FXN 3 forward 9:69040903-69040928; SpCas9
gaaccaggaaactggccctcac

SEQ ID NO: 34065 - DNA, 21 bp, Artificial Sequence
  Synthetic: FXN 3 forward 9:69040904-69040928; SpCas9
aaccaggaaactggccctcac

SEQ ID NO: 34066 - DNA, 20 bp, Artificial Sequence
  Synthetic: FXN 3 forward 9:69040905-69040928; SpCas9
accaggaaactggccctcac

SEQ ID NO: 34067 - DNA, 19 bp, Artificial Sequence
  Synthetic: FXN 3 forward 9:69040906-69040928; SpCas9
ccaggaaactggccctcac

SEQ ID NO: 34068 - DNA, 18 bp, Artificial Sequence
  Synthetic: FXN 3 forward 9:69040907-69040928; SpCas9
caggaaactggccctcac

SEQ ID NO: 34069 - DNA, 25 bp, Artificial Sequence
  Synthetic: FXN 3 reverse 9:69040906-69040934; SpCas9
tggtgtctggtgagggccagtttcc

SEQ ID NO: 34070 - DNA, 24 bp, Artificial Sequence
  Synthetic: FXN 3 reverse 9:69040907-69040934; SpCas9
ggtgtctggtgagggccagtttcc

SEQ ID NO: 34071 - DNA, 23 bp, Artificial Sequence
  Synthetic: FXN 3 reverse 9:69040908-69040934; SpCas9
gtgtctggtgagggccagtttcc

SEQ ID NO: 34072 - DNA, 22 bp, Artificial Sequence
  Synthetic: FXN 3 reverse 9:69040909-69040934; SpCas9
tgtctggtgagggccagtttcc

SEQ ID NO: 34073 - DNA, 21 bp, Artificial Sequence
  Synthetic: FXN 3 reverse 9:69040910-69040934; SpCas9
gtctggtgagggccagtttcc

SEQ ID NO: 34074 - DNA, 20 bp, Artificial Sequence
  Synthetic: FXN 3 reverse 9:69040911-69040934; SpCas9
tctggtgagggccagtttcc

SEQ ID NO: 34075 - DNA, 19 bp, Artificial Sequence
  Synthetic: FXN 3 reverse 9:69040912-69040934; SpCas9
ctggtgagggccagtttcc

SEQ ID NO: 34076 - DNA, 18 bp, Artificial Sequence
  Synthetic: FXN 3 reverse 9:69040913-69040934; SpCas9
tggtgagggccagtttcc

SEQ ID NO: 34077 - DNA, 25 bp, Artificial Sequence
  Synthetic: FXN 3 forward 9:69040909-69040937; SpCas9
ggaaactggccctcaccagacacca

SEQ ID NO: 34078 - DNA, 24 bp, Artificial Sequence
  Synthetic: FXN 3 forward 9:69040910-69040937; SpCas9
gaaactggccctcaccagacacca

SEQ ID NO: 34079 - DNA, 23 bp, Artificial Sequence
  Synthetic: FXN 3 forward 9:69040911-69040937; SpCas9
aaactggccctcaccagacacca

SEQ ID NO: 34080 - DNA, 22 bp, Artificial Sequence
  Synthetic: FXN 3 forward 9:69040912-69040937; SpCas9
aactggccctcaccagacacca

SEQ ID NO: 34081 - DNA, 21 bp, Artificial Sequence
  Synthetic: FXN 3 forward 9:69040913-69040937; SpCas9
actggccctcaccagacacca

SEQ ID NO: 34082 - DNA, 20 bp, Artificial Sequence
  Synthetic: FXN 3 forward 9:69040914-69040937; SpCas9
ctggccctcaccagacacca

SEQ ID NO: 34083 - DNA, 19 bp, Artificial Sequence
  Synthetic: FXN 3 forward 9:69040915-69040937; SpCas9
tggccctcaccagacacca

SEQ ID NO: 34084 - DNA, 18 bp, Artificial Sequence
  Synthetic: FXN 3 forward 9:69040916-69040937; SpCas9
ggccctcaccagacacca

SEQ ID NO: 34085 - DNA, 25 bp, Artificial Sequence
  Synthetic: FXN 3 reverse 9:69040914-69040942; SpCas9
aacagctttggtgtctggtgagggc

SEQ ID NO: 34086 - DNA, 24 bp, Artificial Sequence
  Synthetic: FXN 3 reverse 9:69040915-69040942; SpCas9
acagctttggtgtctggtgagggc

SEQ ID NO: 34087 - DNA, 23 bp, Artificial Sequence
  Synthetic: FXN 3 reverse 9:69040916-69040942; SpCas9
cagctttggtgtctggtgagggc

SEQ ID NO: 34088 - DNA, 22 bp, Artificial Sequence
  Synthetic: FXN 3 reverse 9:69040917-69040942; SpCas9
agctttggtgtctggtgagggc

SEQ ID NO: 34089 - DNA, 21 bp, Artificial Sequence
  Synthetic: FXN 3 reverse 9:69040918-69040942; SpCas9
gctttggtgtctggtgagggc

SEQ ID NO: 34090 - DNA, 20 bp, Artificial Sequence
  Synthetic: FXN 3 reverse 9:69040919-69040942; SpCas9
ctttggtgtctggtgagggc

SEQ ID NO: 34091 - DNA, 19 bp, Artificial Sequence
  Synthetic: FXN 3 reverse 9:69040920-69040942; SpCas9
tttggtgtctggtgagggc

SEQ ID NO: 34092 - DNA, 18 bp, Artificial Sequence
  Synthetic: FXN 3 reverse 9:69040921-69040942; SpCas9
ttggtgtctggtgagggc

SEQ ID NO: 34093 - DNA, 25 bp, Artificial Sequence
  Synthetic: FXN 3 forward 9:69040916-69040944; SpCas9
ggccctcaccagacaccaaagctgt

SEQ ID NO: 34094 - DNA, 24 bp, Artificial Sequence
  Synthetic: FXN 3 forward 9:69040917-69040944; SpCas9
gccctcaccagacaccaaagctgt

SEQ ID NO: 34095 - DNA, 23 bp, Artificial Sequence
  Synthetic: FXN 3 forward 9:69040918-69040944; SpCas9
ccctcaccagacaccaaagctgt

SEQ ID NO: 34096 - DNA, 22 bp, Artificial Sequence
  Synthetic: FXN 3 forward 9:69040919-69040944; SpCas9
cctcaccagacaccaaagctgt

SEQ ID NO: 34097 - DNA, 21 bp, Artificial Sequence
  Synthetic: FXN 3 forward 9:69040920-69040944; SpCas9
ctcaccagacaccaaagctgt

SEQ ID NO: 34098 - DNA, 20 bp, Artificial Sequence
  Synthetic: FXN 3 forward 9:69040921-69040944; SpCas9
tcaccagacaccaaagctgt

SEQ ID NO: 34099 - DNA, 19 bp, Artificial Sequence
  Synthetic: FXN 3 forward 9:69040922-69040944; SpCas9
caccagacaccaaagctgt

SEQ ID NO: 34100 - DNA, 18 bp, Artificial Sequence
  Synthetic: FXN 3 forward 9:69040923-69040944; SpCas9
accagacaccaaagctgt

SEQ ID NO: 34101 - DNA, 25 bp, Artificial Sequence
  Synthetic: FXN 3 reverse 9:69040918-69040946; SpCas9
caccaacagctttggtgtctggtga

SEQ ID NO: 34102 - DNA, 24 bp, Artificial Sequence
  Synthetic: FXN 3 reverse 9:69040919-69040946; SpCas9
accaacagctttggtgtctggtga

SEQ ID NO: 34103 - DNA, 23 bp, Artificial Sequence
  Synthetic: FXN 3 reverse 9:69040920-69040946; SpCas9
ccaacagctttggtgtctggtga

SEQ ID NO: 34104 - DNA, 22 bp, Artificial Sequence
  Synthetic: FXN 3 reverse 9:69040921-69040946; SpCas9
caacagctttggtgtctggtga

SEQ ID NO: 34105 - DNA, 21 bp, Artificial Sequence
  Synthetic: FXN 3 reverse 9:69040922-69040946; SpCas9
aacagctttggtgtctggtga

SEQ ID NO: 34106 - DNA, 20 bp, Artificial Sequence
  Synthetic: FXN 3 reverse 9:69040923-69040946; SpCas9
acagctttggtgtctggtga

SEQ ID NO: 34107 - DNA, 19 bp, Artificial Sequence
  Synthetic: FXN 3 reverse 9:69040924-69040946; SpCas9
cagctttggtgtctggtga

SEQ ID NO: 34108 - DNA, 18 bp, Artificial Sequence
  Synthetic: FXN 3 reverse 9:69040925-69040946; SpCas9
agctttggtgtctggtga

SEQ ID NO: 34109 - DNA, 25 bp, Artificial Sequence
  Synthetic: FXN 3 reverse 9:69040919-69040947; SpCas9
gcaccaacagctttggtgtctggtg

SEQ ID NO: 34110 - DNA, 24 bp, Artificial Sequence
  Synthetic: FXN 3 reverse 9:69040920-69040947; SpCas9
caccaacagctttggtgtctggtg

SEQ ID NO: 34111 - DNA, 23 bp, Artificial Sequence
  Synthetic: FXN 3 reverse 9:69040921-69040947; SpCas9
accaacagctttggtgtctggtg

SEQ ID NO: 34112 - DNA, 22 bp, Artificial Sequence
  Synthetic: FXN 3 reverse 9:69040922-69040947; SpCas9
ccaacagctttggtgtctggtg

SEQ ID NO: 34113 - DNA, 21 bp, Artificial Sequence
  Synthetic: FXN 3 reverse 9:69040923-69040947; SpCas9
caacagctttggtgtctggtg

SEQ ID NO: 34114 - DNA, 20 bp, Artificial Sequence
  Synthetic: FXN 3 reverse 9:69040924-69040947; SpCas9
aacagctttggtgtctggtg

SEQ ID NO: 34115 - DNA, 19 bp, Artificial Sequence
  Synthetic: FXN 3 reverse 9:69040925-69040947; SpCas9
acagctttggtgtctggtg

SEQ ID NO: 34116 - DNA, 18 bp, Artificial Sequence
  Synthetic: FXN 3 reverse 9:69040926-69040947; SpCas9
cagctttggtgtctggtg

SEQ ID NO: 34117 - DNA, 25 bp, Artificial Sequence
  Synthetic: FXN 3 reverse 9:69040920-69040948; SpCas9
tgcaccaacagctttggtgtctggt

SEQ ID NO: 34118 - DNA, 24 bp, Artificial Sequence
  Synthetic: FXN 3 reverse 9:69040921-69040948; SpCas9
gcaccaacagctttggtgtctggt

SEQ ID NO: 34119 - DNA, 23 bp, Artificial Sequence
  Synthetic: FXN 3 reverse 9:69040922-69040948; SpCas9
caccaacagctttggtgtctggt

SEQ ID NO: 34120 - DNA, 22 bp, Artificial Sequence
  Synthetic: FXN 3 reverse 9:69040923-69040948; SpCas9
accaacagctttggtgtctggt

SEQ ID NO: 34121 - DNA, 21 bp, Artificial Sequence
  Synthetic: FXN 3 reverse 9:69040924-69040948; SpCas9
ccaacagctttggtgtctggt

SEQ ID NO: 34122 - DNA, 20 bp, Artificial Sequence
  Synthetic: FXN 3 reverse 9:69040925-69040948; SpCas9
caacagctttggtgtctggt

SEQ ID NO: 34123 - DNA, 19 bp, Artificial Sequence
  Synthetic: FXN 3 reverse 9:69040926-69040948; SpCas9
aacagctttggtgtctggt

SEQ ID NO: 34124 - DNA, 18 bp, Artificial Sequence
  Synthetic: FXN 3 reverse 9:69040927-69040948; SpCas9
acagctttggtgtctggt

SEQ ID NO: 34125 - DNA, 25 bp, Artificial Sequence
  Synthetic: FXN 3 reverse 9:69040924-69040952; SpCas9
tcaatgcaccaacagctttggtgtc

SEQ ID NO: 34126 - DNA, 24 bp, Artificial Sequence
  Synthetic: FXN 3 reverse 9:69040925-69040952; SpCas9
caatgcaccaacagctttggtgtc

SEQ ID NO: 34127 - DNA, 23 bp, Artificial Sequence
  Synthetic: FXN 3 reverse 9:69040926-69040952; SpCas9
aatgcaccaacagctttggtgtc

SEQ ID NO: 34128 - DNA, 22 bp, Artificial Sequence
  Synthetic: FXN 3 reverse 9:69040927-69040952; SpCas9
atgcaccaacagctttggtgtc

SEQ ID NO: 34129 - DNA, 21 bp, Artificial Sequence
  Synthetic: FXN 3 reverse 9:69040928-69040952; SpCas9
tgcaccaacagctttggtgtc

SEQ ID NO: 34130 - DNA, 20 bp, Artificial Sequence
  Synthetic: FXN 3 reverse 9:69040929-69040952; SpCas9
gcaccaacagctttggtgtc

SEQ ID NO: 34131 - DNA, 19 bp, Artificial Sequence
  Synthetic: FXN 3 reverse 9:69040930-69040952; SpCas9
caccaacagctttggtgtc

SEQ ID NO: 34132 - DNA, 18 bp, Artificial Sequence
  Synthetic: FXN 3 reverse 9:69040931-69040952; SpCas9
accaacagctttggtgtc

SEQ ID NO: 34133 - DNA, 25 bp, Artificial Sequence
  Synthetic: FXN 3 forward 9:69040930-69040958; SpCas9
accaaagctgttggtgcattgatct

SEQ ID NO: 34134 - DNA, 24 bp, Artificial Sequence
  Synthetic: FXN 3 forward 9:69040931-69040958; SpCas9
ccaaagctgttggtgcattgatct

SEQ ID NO: 34135 - DNA, 23 bp, Artificial Sequence
  Synthetic: FXN 3 forward 9:69040932-69040958; SpCas9
caaagctgttggtgcattgatct

SEQ ID NO: 34136 - DNA, 22 bp, Artificial Sequence
  Synthetic: FXN 3 forward 9:69040933-69040958; SpCas9
aaagctgttggtgcattgatct

SEQ ID NO: 34137 - DNA, 21 bp, Artificial Sequence
  Synthetic: FXN 3 forward 9:69040934-69040958; SpCas9
aagctgttggtgcattgatct

SEQ ID NO: 34138 - DNA, 20 bp, Artificial Sequence
  Synthetic: FXN 3 forward 9:69040935-69040958; SpCas9
agctgttggtgcattgatct

SEQ ID NO: 34139 - DNA, 19 bp, Artificial Sequence
  Synthetic: FXN 3 forward 9:69040936-69040958; SpCas9
gctgttggtgcattgatct

SEQ ID NO: 34140 - DNA, 18 bp, Artificial Sequence
  Synthetic: FXN 3 forward 9:69040937-69040958; SpCas9
ctgttggtgcattgatct

SEQ ID NO: 34141 - DNA, 25 bp, Artificial Sequence
  Synthetic: FXN 3 reverse 9:69040931-69040959; SpCas9
tccaagatcaatgcaccaacagctt

SEQ ID NO: 34142 - DNA, 24 bp, Artificial Sequence
  Synthetic: FXN 3 reverse 9:69040932-69040959; SpCas9
ccaagatcaatgcaccaacagctt

SEQ ID NO: 34143 - DNA, 23 bp, Artificial Sequence
  Synthetic: FXN 3 reverse 9:69040933-69040959; SpCas9
caagatcaatgcaccaacagctt

SEQ ID NO: 34144 - DNA, 22 bp, Artificial Sequence
  Synthetic: FXN 3 reverse 9:69040934-69040959; SpCas9
aagatcaatgcaccaacagctt

SEQ ID NO: 34145 - DNA, 21 bp, Artificial Sequence
  Synthetic: FXN 3 reverse 9:69040935-69040959; SpCas9
agatcaatgcaccaacagctt

SEQ ID NO: 34146 - DNA, 20 bp, Artificial Sequence
  Synthetic: FXN 3 reverse 9:69040936-69040959; SpCas9
gatcaatgcaccaacagctt

SEQ ID NO: 34147 - DNA, 19 bp, Artificial Sequence
  Synthetic: FXN 3 reverse 9:69040937-69040959; SpCas9
atcaatgcaccaacagctt

SEQ ID NO: 34148 - DNA, 18 bp, Artificial Sequence
  Synthetic: FXN 3 reverse 9:69040938-69040959; SpCas9
tcaatgcaccaacagctt

SEQ ID NO: 34149 - DNA, 25 bp, Artificial Sequence
  Synthetic: FXN 3 reverse 9:69040937-69040965; SpCas9
gggaaatccaagatcaatgcaccaa

SEQ ID NO: 34150 - DNA, 24 bp, Artificial Sequence
  Synthetic: FXN 3 reverse 9:69040938-69040965; SpCas9
ggaaatccaagatcaatgcaccaa

SEQ ID NO: 34151 - DNA, 23 bp, Artificial Sequence
  Synthetic: FXN 3 reverse 9:69040939-69040965; SpCas9
gaaatccaagatcaatgcaccaa

SEQ ID NO: 34152 - DNA, 22 bp, Artificial Sequence
  Synthetic: FXN 3 reverse 9:69040940-69040965; SpCas9
aaatccaagatcaatgcaccaa

SEQ ID NO: 34153 - DNA, 21 bp, Artificial Sequence
  Synthetic: FXN 3 reverse 9:69040941-69040965; SpCas9
aatccaagatcaatgcaccaa

SEQ ID NO: 34154 - DNA, 20 bp, Artificial Sequence
  Synthetic: FXN 3 reverse 9:69040942-69040965; SpCas9
atccaagatcaatgcaccaa

SEQ ID NO: 34155 - DNA, 19 bp, Artificial Sequence
  Synthetic: FXN 3 reverse 9:69040943-69040965; SpCas9
tccaagatcaatgcaccaa

SEQ ID NO: 34156 - DNA, 18 bp, Artificial Sequence
  Synthetic: FXN 3 reverse 9:69040944-69040965; SpCas9
ccaagatcaatgcaccaa

SEQ ID NO: 34157 - DNA, 25 bp, Artificial Sequence
  Synthetic: FXN 3 forward 9:69040946-69040974; SpCas9
cattgatcttggatttcccaccctc

SEQ ID NO: 34158 - DNA, 24 bp, Artificial Sequence
  Synthetic: FXN 3 forward 9:69040947-69040974; SpCas9
attgatcttggatttcccaccctc

SEQ ID NO: 34159 - DNA, 23 bp, Artificial Sequence
  Synthetic: FXN 3 forward 9:69040948-69040974; SpCas9
ttgatcttggatttcccaccctc

SEQ ID NO: 34160 - DNA, 22 bp, Artificial Sequence
  Synthetic: FXN 3 forward 9:69040949-69040974; SpCas9
tgatcttggatttcccaccctc

SEQ ID NO: 34161 - DNA, 21 bp, Artificial Sequence
  Synthetic: FXN 3 forward 9:69040950-69040974; SpCas9
gatcttggatttcccaccctc

SEQ ID NO: 34162 - DNA, 20 bp, Artificial Sequence
  Synthetic: FXN 3 forward 9:69040951-69040974; SpCas9
atcttggatttcccaccctc

SEQ ID NO: 34163 - DNA, 19 bp, Artificial Sequence
  Synthetic: FXN 3 forward 9:69040952-69040974; SpCas9
tcttggatttcccaccctc

SEQ ID NO: 34164 - DNA, 18 bp, Artificial Sequence
  Synthetic: FXN 3 forward 9:69040953-69040974; SpCas9
cttggatttcccaccctc

SEQ ID NO: 34165 - DNA, 25 bp, Artificial Sequence
  Synthetic: FXN 3 forward 9:69040947-69040975; SpCas9
attgatcttggatttcccaccctcc

SEQ ID NO: 34166 - DNA, 24 bp, Artificial Sequence
  Synthetic: FXN 3 forward 9:69040948-69040975; SpCas9
ttgatcttggatttcccaccctcc

SEQ ID NO: 34167 - DNA, 23 bp, Artificial Sequence
  Synthetic: FXN 3 forward 9:69040949-69040975; SpCas9
tgatcttggatttcccaccctcc

SEQ ID NO: 34168 - DNA, 22 bp, Artificial Sequence
  Synthetic: FXN 3 forward 9:69040950-69040975; SpCas9
gatcttggatttcccaccctcc

SEQ ID NO: 34169 - DNA, 21 bp, Artificial Sequence
  Synthetic: FXN 3 forward 9:69040951-69040975; SpCas9
atcttggatttcccaccctcc

SEQ ID NO: 34170 - DNA, 20 bp, Artificial Sequence
  Synthetic: FXN 3 forward 9:69040952-69040975; SpCas9
tcttggatttcccaccctcc

SEQ ID NO: 34171 - DNA, 19 bp, Artificial Sequence
  Synthetic: FXN 3 forward 9:69040953-69040975; SpCas9
cttggatttcccaccctcc

SEQ ID NO: 34172 - DNA, 18 bp, Artificial Sequence
  Synthetic: FXN 3 forward 9:69040954-69040975; SpCas9
ttggatttcccaccctcc

SEQ ID NO: 34173 - DNA, 25 bp, Artificial Sequence
  Synthetic: FXN 3 reverse 9:69040953-69040981; SpCas9
tagagtcctggagggtgggaaatcc

SEQ ID NO: 34174 - DNA, 24 bp, Artificial Sequence
  Synthetic: FXN 3 reverse 9:69040954-69040981; SpCas9
agagtcctggagggtgggaaatcc

SEQ ID NO: 34175 - DNA, 23 bp, Artificial Sequence
  Synthetic: FXN 3 reverse 9:69040955-69040981; SpCas9
gagtcctggagggtgggaaatcc

SEQ ID NO: 34176 - DNA, 22 bp, Artificial Sequence
  Synthetic: FXN 3 reverse 9:69040956-69040981; SpCas9
agtcctggagggtgggaaatcc

SEQ ID NO: 34177 - DNA, 21 bp, Artificial Sequence
  Synthetic: FXN 3 reverse 9:69040957-69040981; SpCas9
gtcctggagggtgggaaatcc

SEQ ID NO: 34178 - DNA, 20 bp, Artificial Sequence
  Synthetic: FXN 3 reverse 9:69040958-69040981; SpCas9
tcctggagggtgggaaatcc

SEQ ID NO: 34179 - DNA, 19 bp, Artificial Sequence
  Synthetic: FXN 3 reverse 9:69040959-69040981; SpCas9
cctggagggtgggaaatcc

SEQ ID NO: 34180 - DNA, 18 bp, Artificial Sequence
  Synthetic: FXN 3 reverse 9:69040960-69040981; SpCas9
ctggagggtgggaaatcc

SEQ ID NO: 34181 - DNA, 25 bp, Artificial Sequence
  Synthetic: FXN 3 forward 9:69040955-69040983; SpCas9
tggatttcccaccctccaggactct

SEQ ID NO: 34182 - DNA, 24 bp, Artificial Sequence
  Synthetic: FXN 3 forward 9:69040956-69040983; SpCas9
ggatttcccaccctccaggactct

SEQ ID NO: 34183 - DNA, 23 bp, Artificial Sequence
  Synthetic: FXN 3 forward 9:69040957-69040983; SpCas9
gatttcccaccctccaggactct

SEQ ID NO: 34184 - DNA, 22 bp, Artificial Sequence
  Synthetic: FXN 3 forward 9:69040958-69040983; SpCas9
atttcccaccctccaggactct

SEQ ID NO: 34185 - DNA, 21 bp, Artificial Sequence
  Synthetic: FXN 3 forward 9:69040959-69040983; SpCas9
tttcccaccctccaggactct

SEQ ID NO: 34186 - DNA, 20 bp, Artificial Sequence
  Synthetic: FXN 3 forward 9:69040960-69040983; SpCas9
ttcccaccctccaggactct

SEQ ID NO: 34187 - DNA, 19 bp, Artificial Sequence
  Synthetic: FXN 3 forward 9:69040961-69040983; SpCas9
tcccaccctccaggactct

SEQ ID NO: 34188 - DNA, 18 bp, Artificial Sequence
  Synthetic: FXN 3 forward 9:69040962-69040983; SpCas9
cccaccctccaggactct

SEQ ID NO: 34189 - DNA, 25 bp, Artificial Sequence
  Synthetic: FXN 3 reverse 9:69040962-69040990; SpCas9
tgtgtttcttagagtcctggagggt

SEQ ID NO: 34190 - DNA, 24 bp, Artificial Sequence
  Synthetic: FXN 3 reverse 9:69040963-69040990; SpCas9
gtgtttcttagagtcctggagggt

SEQ ID NO: 34191 - DNA, 23 bp, Artificial Sequence
  Synthetic: FXN 3 reverse 9:69040964-69040990; SpCas9
tgtttcttagagtcctggagggt

SEQ ID NO: 34192 - DNA, 22 bp, Artificial Sequence
  Synthetic: FXN 3 reverse 9:69040965-69040990; SpCas9
gtttcttagagtcctggagggt

SEQ ID NO: 34193 - DNA, 21 bp, Artificial Sequence
  Synthetic: FXN 3 reverse 9:69040966-69040990; SpCas9
tttcttagagtcctggagggt

SEQ ID NO: 34194 - DNA, 20 bp, Artificial Sequence
  Synthetic: FXN 3 reverse 9:69040967-69040990; SpCas9
ttcttagagtcctggagggt

SEQ ID NO: 34195 - DNA, 19 bp, Artificial Sequence
  Synthetic: FXN 3 reverse 9:69040968-69040990; SpCas9
tcttagagtcctggagggt

SEQ ID NO: 34196 - DNA, 18 bp, Artificial Sequence
  Synthetic: FXN 3 reverse 9:69040969-69040990; SpCas9
cttagagtcctggagggt

SEQ ID NO: 34197 - DNA, 25 bp, Artificial Sequence
  Synthetic: FXN 3 reverse 9:69040963-69040991; SpCas9
atgtgtttcttagagtcctggaggg

SEQ ID NO: 34198 - DNA, 24 bp, Artificial Sequence
  Synthetic: FXN 3 reverse 9:69040964-69040991; SpCas9
tgtgtttcttagagtcctggaggg

SEQ ID NO: 34199 - DNA, 23 bp, Artificial Sequence
  Synthetic: FXN 3 reverse 9:69040965-69040991; SpCas9
gtgtttcttagagtcctggaggg

SEQ ID NO: 34200 - DNA, 22 bp, Artificial Sequence
  Synthetic: FXN 3 reverse 9:69040966-69040991; SpCas9
tgtttcttagagtcctggaggg

SEQ ID NO: 34201 - DNA, 21 bp, Artificial Sequence
  Synthetic: FXN 3 reverse 9:69040967-69040991; SpCas9
gtttcttagagtcctggaggg

SEQ ID NO: 34202 - DNA, 20 bp, Artificial Sequence
  Synthetic: FXN 3 reverse 9:69040968-69040991; SpCas9
tttcttagagtcctggaggg

SEQ ID NO: 34203 - DNA, 19 bp, Artificial Sequence
  Synthetic: FXN 3 reverse 9:69040969-69040991; SpCas9
ttcttagagtcctggaggg

SEQ ID NO: 34204 - DNA, 18 bp, Artificial Sequence
  Synthetic: FXN 3 reverse 9:69040970-69040991; SpCas9
tcttagagtcctggaggg

SEQ ID NO: 34205 - DNA, 25 bp, Artificial Sequence
  Synthetic: FXN 3 reverse 9:69040966-69040994; SpCas9
gaaatgtgtttcttagagtcctgga

SEQ ID NO: 34206 - DNA, 24 bp, Artificial Sequence
  Synthetic: FXN 3 reverse 9:69040967-69040994; SpCas9
aaatgtgtttcttagagtcctgga

SEQ ID NO: 34207 - DNA, 23 bp, Artificial Sequence
  Synthetic: FXN 3 reverse 9:69040968-69040994; SpCas9
aatgtgtttcttagagtcctgga

SEQ ID NO: 34208 - DNA, 22 bp, Artificial Sequence
  Synthetic: FXN 3 reverse 9:69040969-69040994; SpCas9
atgtgtttcttagagtcctgga

SEQ ID NO: 34209 - DNA, 21 bp, Artificial Sequence
  Synthetic: FXN 3 reverse 9:69040970-69040994; SpCas9
tgtgtttcttagagtcctgga

SEQ ID NO: 34210 - DNA, 20 bp, Artificial Sequence
  Synthetic: FXN 3 reverse 9:69040971-69040994; SpCas9
gtgtttcttagagtcctgga

SEQ ID NO: 34211 - DNA, 19 bp, Artificial Sequence
  Synthetic: FXN 3 reverse 9:69040972-69040994; SpCas9
tgtttcttagagtcctgga

SEQ ID NO: 34212 - DNA, 18 bp, Artificial Sequence
  Synthetic: FXN 3 reverse 9:69040973-69040994; SpCas9
gtttcttagagtcctgga

SEQ ID NO: 34213 - DNA, 25 bp, Artificial Sequence
  Synthetic: FXN 3 reverse 9:69040967-69040995; SpCas9
agaaatgtgtttcttagagtcctgg

SEQ ID NO: 34214 - DNA, 24 bp, Artificial Sequence
  Synthetic: FXN 3 reverse 9:69040968-69040995; SpCas9
gaaatgtgtttcttagagtcctgg

SEQ ID NO: 34215 - DNA, 23 bp, Artificial Sequence
  Synthetic: FXN 3 reverse 9:69040969-69040995; SpCas9
aaatgtgtttcttagagtcctgg

SEQ ID NO: 34216 - DNA, 22 bp, Artificial Sequence
  Synthetic: FXN 3 reverse 9:69040970-69040995; SpCas9
aatgtgtttcttagagtcctgg

SEQ ID NO: 34217 - DNA, 21 bp, Artificial Sequence
  Synthetic: FXN 3 reverse 9:69040971-69040995; SpCas9
atgtgtttcttagagtcctgg

SEQ ID NO: 34218 - DNA, 20 bp, Artificial Sequence
  Synthetic: FXN 3 reverse 9:69040972-69040995; SpCas9
tgtgtttcttagagtcctgg

SEQ ID NO: 34219 - DNA, 19 bp, Artificial Sequence
  Synthetic: FXN 3 reverse 9:69040973-69040995; SpCas9
gtgtttcttagagtcctgg

SEQ ID NO: 34220 - DNA, 18 bp, Artificial Sequence
  Synthetic: FXN 3 reverse 9:69040974-69040995; SpCas9
tgtttcttagagtcctgg

SEQ ID NO: 34221 - DNA, 25 bp, Artificial Sequence
  Synthetic: FXN 3 reverse 9:69040968-69040996; SpCas9
tagaaatgtgtttcttagagtcctg

SEQ ID NO: 34222 - DNA, 24 bp, Artificial Sequence
  Synthetic: FXN 3 reverse 9:69040969-69040996; SpCas9
agaaatgtgtttcttagagtcctg

SEQ ID NO: 34223 - DNA, 23 bp, Artificial Sequence
  Synthetic: FXN 3 reverse 9:69040970-69040996; SpCas9
gaaatgtgtttcttagagtcctg

SEQ ID NO: 34224 - DNA, 22 bp, Artificial Sequence
  Synthetic: FXN 3 reverse 9:69040971-69040996; SpCas9
aaatgtgtttcttagagtcctg

SEQ ID NO: 34225 - DNA, 21 bp, Artificial Sequence
  Synthetic: FXN 3 reverse 9:69040972-69040996; SpCas9
aatgtgtttcttagagtcctg

SEQ ID NO: 34226 - DNA, 20 bp, Artificial Sequence
  Synthetic: FXN 3 reverse 9:69040973-69040996; SpCas9
atgtgtttcttagagtcctg

SEQ ID NO: 34227 - DNA, 19 bp, Artificial Sequence
  Synthetic: FXN 3 reverse 9:69040974-69040996; SpCas9
tgtgtttcttagagtcctg

SEQ ID NO: 34228 - DNA, 18 bp, Artificial Sequence
  Synthetic: FXN 3 reverse 9:69040975-69040996; SpCas9
gtgtttcttagagtcctg

SEQ ID NO: 34229 - DNA, 25 bp, Artificial Sequence
  Synthetic: FXN 3 reverse 9:69040970-69040998; SpCas9
aatagaaatgtgtttcttagagtcc

SEQ ID NO: 34230 - DNA, 24 bp, Artificial Sequence
  Synthetic: FXN 3 reverse 9:69040971-69040998; SpCas9
atagaaatgtgtttcttagagtcc

SEQ ID NO: 34231 - DNA, 23 bp, Artificial Sequence
  Synthetic: FXN 3 reverse 9:69040972-69040998; SpCas9
tagaaatgtgtttcttagagtcc

SEQ ID NO: 34232 - DNA, 22 bp, Artificial Sequence
  Synthetic: FXN 3 reverse 9:69040973-69040998; SpCas9
agaaatgtgtttcttagagtcc

SEQ ID NO: 34233 - DNA, 21 bp, Artificial Sequence
  Synthetic: FXN 3 reverse 9:69040974-69040998; SpCas9
gaaatgtgtttcttagagtcc

SEQ ID NO: 34234 - DNA, 20 bp, Artificial Sequence
  Synthetic: FXN 3 reverse 9:69040975-69040998; SpCas9
aaatgtgtttcttagagtcc

SEQ ID NO: 34235 - DNA, 19 bp, Artificial Sequence
  Synthetic: FXN 3 reverse 9:69040976-69040998; SpCas9
aatgtgtttcttagagtcc

SEQ ID NO: 34236 - DNA, 18 bp, Artificial Sequence
  Synthetic: FXN 3 reverse 9:69040977-69040998; SpCas9
atgtgtttcttagagtcc

SEQ ID NO: 34237 - DNA, 25 bp, Artificial Sequence
  Synthetic: FXN 3 reverse 9:69040976-69041004; SpCas9
ataaacaatagaaatgtgtttctta

SEQ ID NO: 34238 - DNA, 24 bp, Artificial Sequence
  Synthetic: FXN 3 reverse 9:69040977-69041004; SpCas9
taaacaatagaaatgtgtttctta

SEQ ID NO: 34239 - DNA, 23 bp, Artificial Sequence
  Synthetic: FXN 3 reverse 9:69040978-69041004; SpCas9
aaacaatagaaatgtgtttctta

SEQ ID NO: 34240 - DNA, 22 bp, Artificial Sequence
  Synthetic: FXN 3 reverse 9:69040979-69041004; SpCas9
aacaatagaaatgtgtttctta

SEQ ID NO: 34241 - DNA, 21 bp, Artificial Sequence
  Synthetic: FXN 3 reverse 9:69040980-69041004; SpCas9
acaatagaaatgtgtttctta

SEQ ID NO: 34242 - DNA, 20 bp, Artificial Sequence
  Synthetic: FXN 3 reverse 9:69040981-69041004; SpCas9
caatagaaatgtgtttctta

SEQ ID NO: 34243 - DNA, 19 bp, Artificial Sequence
  Synthetic: FXN 3 reverse 9:69040982-69041004; SpCas9
aatagaaatgtgtttctta

SEQ ID NO: 34244 - DNA, 18 bp, Artificial Sequence
  Synthetic: FXN 3 reverse 9:69040983-69041004; SpCas9
atagaaatgtgtttctta

SEQ ID NO: 34245 - DNA, 25 bp, Artificial Sequence
  Synthetic: FXN 3 reverse 9:69040978-69041006; SpCas9
ttataaacaatagaaatgtgtttct

SEQ ID NO: 34246 - DNA, 24 bp, Artificial Sequence
  Synthetic: FXN 3 reverse 9:69040979-69041006; SpCas9
tataaacaatagaaatgtgtttct

SEQ ID NO: 34247 - DNA, 23 bp, Artificial Sequence
  Synthetic: FXN 3 reverse 9:69040980-69041006; SpCas9
ataaacaatagaaatgtgtttct

SEQ ID NO: 34248 - DNA, 22 bp, Artificial Sequence
  Synthetic: FXN 3 reverse 9:69040981-69041006; SpCas9
taaacaatagaaatgtgtttct

SEQ ID NO: 34249 - DNA, 21 bp, Artificial Sequence
  Synthetic: FXN 3 reverse 9:69040982-69041006; SpCas9
aaacaatagaaatgtgtttct

SEQ ID NO: 34250 - DNA, 20 bp, Artificial Sequence
  Synthetic: FXN 3 reverse 9:69040983-69041006; SpCas9
aacaatagaaatgtgtttct

SEQ ID NO: 34251 - DNA, 19 bp, Artificial Sequence
  Synthetic: FXN 3 reverse 9:69040984-69041006; SpCas9
acaatagaaatgtgtttct

SEQ ID NO: 34252 - DNA, 18 bp, Artificial Sequence
  Synthetic: FXN 3 reverse 9:69040985-69041006; SpCas9
caatagaaatgtgtttct

SEQ ID NO: 34253 - DNA, 25 bp, Artificial Sequence
  Synthetic: FXN 3 forward 9:69040979-69041007; SpCas9
taagaaacacatttctattgtttat

SEQ ID NO: 34254 - DNA, 24 bp, Artificial Sequence
  Synthetic: FXN 3 forward 9:69040980-69041007; SpCas9
aagaaacacatttctattgtttat

SEQ ID NO: 34255 - DNA, 23 bp, Artificial Sequence
  Synthetic: FXN 3 forward 9:69040981-69041007; SpCas9
agaaacacatttctattgtttat

SEQ ID NO: 34256 - DNA, 22 bp, Artificial Sequence
  Synthetic: FXN 3 forward 9:69040982-69041007; SpCas9
gaaacacatttctattgtttat

SEQ ID NO: 34257 - DNA, 21 bp, Artificial Sequence
  Synthetic: FXN 3 forward 9:69040983-69041007; SpCas9
aaacacatttctattgtttat

SEQ ID NO: 34258 - DNA, 20 bp, Artificial Sequence
  Synthetic: FXN 3 forward 9:69040984-69041007; SpCas9
aacacatttctattgtttat

SEQ ID NO: 34259 - DNA, 19 bp, Artificial Sequence
  Synthetic: FXN 3 forward 9:69040985-69041007; SpCas9
acacatttctattgtttat

SEQ ID NO: 34260 - DNA, 18 bp, Artificial Sequence
  Synthetic: FXN 3 forward 9:69040986-69041007; SpCas9
cacatttctattgtttat

SEQ ID NO: 34261 - DNA, 25 bp, Artificial Sequence
  Synthetic: FXN 3 forward 9:69040987-69041015; SpCas9
acatttctattgtttataagccacc

SEQ ID NO: 34262 - DNA, 24 bp, Artificial Sequence
  Synthetic: FXN 3 forward 9:69040988-69041015; SpCas9
catttctattgtttataagccacc

SEQ ID NO: 34263 - DNA, 23 bp, Artificial Sequence
  Synthetic: FXN 3 forward 9:69040989-69041015; SpCas9
atttctattgtttataagccacc

SEQ ID NO: 34264 - DNA, 22 bp, Artificial Sequence
  Synthetic: FXN 3 forward 9:69040990-69041015; SpCas9
tttctattgtttataagccacc

SEQ ID NO: 34265 - DNA, 21 bp, Artificial Sequence
  Synthetic: FXN 3 forward 9:69040991-69041015; SpCas9
ttctattgtttataagccacc

SEQ ID NO: 34266 - DNA, 20 bp, Artificial Sequence
  Synthetic: FXN 3 forward 9:69040992-69041015; SpCas9
tctattgtttataagccacc

SEQ ID NO: 34267 - DNA, 19 bp, Artificial Sequence
  Synthetic: FXN 3 forward 9:69040993-69041015; SpCas9
ctattgtttataagccacc

SEQ ID NO: 34268 - DNA, 18 bp, Artificial Sequence
  Synthetic: FXN 3 forward 9:69040994-69041015; SpCas9
tattgtttataagccacc

SEQ ID NO: 34269 - DNA, 25 bp, Artificial Sequence
  Synthetic: FXN 3 forward 9:69040990-69041018; SpCas9
tttctattgtttataagccacccag

SEQ ID NO: 34270 - DNA, 24 bp, Artificial Sequence
  Synthetic: FXN 3 forward 9:69040991-69041018; SpCas9
ttctattgtttataagccacccag

SEQ ID NO: 34271 - DNA, 23 bp, Artificial Sequence
  Synthetic: FXN 3 forward 9:69040992-69041018; SpCas9
tctattgtttataagccacccag

SEQ ID NO: 34272 - DNA, 22 bp, Artificial Sequence
  Synthetic: FXN 3 forward 9:69040993-69041018; SpCas9
ctattgtttataagccacccag

SEQ ID NO: 34273 - DNA, 21 bp, Artificial Sequence
  Synthetic: FXN 3 forward 9:69040994-69041018; SpCas9
tattgtttataagccacccag

SEQ ID NO: 34274 - DNA, 20 bp, Artificial Sequence
  Synthetic: FXN 3 forward 9:69040995-69041018; SpCas9
attgtttataagccacccag

SEQ ID NO: 34275 - DNA, 19 bp, Artificial Sequence
  Synthetic: FXN 3 forward 9:69040996-69041018; SpCas9
ttgtttataagccacccag

SEQ ID NO: 34276 - DNA, 18 bp, Artificial Sequence
  Synthetic: FXN 3 forward 9:69040997-69041018; SpCas9
tgtttataagccacccag

SEQ ID NO: 34277 - DNA, 25 bp, Artificial Sequence
  Synthetic: FXN 3 reverse 9:69040993-69041021; SpCas9
cagccactgggtggcttataaacaa

SEQ ID NO: 34278 - DNA, 24 bp, Artificial Sequence
  Synthetic: FXN 3 reverse 9:69040994-69041021; SpCas9
agccactgggtggcttataaacaa

SEQ ID NO: 34279 - DNA, 23 bp, Artificial Sequence
  Synthetic: FXN 3 reverse 9:69040995-69041021; SpCas9
gccactgggtggcttataaacaa

SEQ ID NO: 34280 - DNA, 22 bp, Artificial Sequence
  Synthetic: FXN 3 reverse 9:69040996-69041021; SpCas9
ccactgggtggcttataaacaa

SEQ ID NO: 34281 - DNA, 21 bp, Artificial Sequence
  Synthetic: FXN 3 reverse 9:69040997-69041021; SpCas9
cactgggtggcttataaacaa

SEQ ID NO: 34282 - DNA, 20 bp, Artificial Sequence
  Synthetic: FXN 3 reverse 9:69040998-69041021; SpCas9
actgggtggcttataaacaa

SEQ ID NO: 34283 - DNA, 19 bp, Artificial Sequence
  Synthetic: FXN 3 reverse 9:69040999-69041021; SpCas9
ctgggtggcttataaacaa

SEQ ID NO: 34284 - DNA, 18 bp, Artificial Sequence
  Synthetic: FXN 3 reverse 9:69041000-69041021; SpCas9
tgggtggcttataaacaa

SEQ ID NO: 34285 - DNA, 25 bp, Artificial Sequence
  Synthetic: FXN 3 forward 9:69040994-69041022; SpCas9
tattgtttataagccacccagtggc

SEQ ID NO: 34286 - DNA, 24 bp, Artificial Sequence
  Synthetic: FXN 3 forward 9:69040995-69041022; SpCas9
attgtttataagccacccagtggc

SEQ ID NO: 34287 - DNA, 23 bp, Artificial Sequence
  Synthetic: FXN 3 forward 9:69040996-69041022; SpCas9
ttgtttataagccacccagtggc

SEQ ID NO: 34288 - DNA, 22 bp, Artificial Sequence
  Synthetic: FXN 3 forward 9:69040997-69041022; SpCas9
tgtttataagccacccagtggc

SEQ ID NO: 34289 - DNA, 21 bp, Artificial Sequence
  Synthetic: FXN 3 forward 9:69040998-69041022; SpCas9
gtttataagccacccagtggc

SEQ ID NO: 34290 - DNA, 20 bp, Artificial Sequence
  Synthetic: FXN 3 forward 9:69040999-69041022; SpCas9
tttataagccacccagtggc

SEQ ID NO: 34291 - DNA, 19 bp, Artificial Sequence
  Synthetic: FXN 3 forward 9:69041000-69041022; SpCas9
ttataagccacccagtggc

SEQ ID NO: 34292 - DNA, 18 bp, Artificial Sequence
  Synthetic: FXN 3 forward 9:69041001-69041022; SpCas9
tataagccacccagtggc

SEQ ID NO: 34293 - DNA, 25 bp, Artificial Sequence
  Synthetic: FXN 3 reverse 9:69041007-69041035; SpCas9
ttataacaaaataccagccactggg

SEQ ID NO: 34294 - DNA, 24 bp, Artificial Sequence
  Synthetic: FXN 3 reverse 9:69041008-69041035; SpCas9
tataacaaaataccagccactggg

SEQ ID NO: 34295 - DNA, 23 bp, Artificial Sequence
  Synthetic: FXN 3 reverse 9:69041009-69041035; SpCas9
ataacaaaataccagccactggg

SEQ ID NO: 34296 - DNA, 22 bp, Artificial Sequence
  Synthetic: FXN 3 reverse 9:69041010-69041035; SpCas9
taacaaaataccagccactggg

SEQ ID NO: 34297 - DNA, 21 bp, Artificial Sequence
  Synthetic: FXN 3 reverse 9:69041011-69041035; SpCas9
aacaaaataccagccactggg

SEQ ID NO: 34298 - DNA, 20 bp, Artificial Sequence
  Synthetic: FXN 3 reverse 9:69041012-69041035; SpCas9
acaaaataccagccactggg

SEQ ID NO: 34299 - DNA, 19 bp, Artificial Sequence
  Synthetic: FXN 3 reverse 9:69041013-69041035; SpCas9
caaaataccagccactggg

SEQ ID NO: 34300 - DNA, 18 bp, Artificial Sequence
  Synthetic: FXN 3 reverse 9:69041014-69041035; SpCas9
aaaataccagccactggg

SEQ ID NO: 34301 - DNA, 25 bp, Artificial Sequence
  Synthetic: FXN 3 reverse 9:69041010-69041038; SpCas9
atgttataacaaaataccagccact

SEQ ID NO: 34302 - DNA, 24 bp, Artificial Sequence
  Synthetic: FXN 3 reverse 9:69041011-69041038; SpCas9
tgttataacaaaataccagccact

SEQ ID NO: 34303 - DNA, 23 bp, Artificial Sequence
  Synthetic: FXN 3 reverse 9:69041012-69041038; SpCas9
gttataacaaaataccagccact

SEQ ID NO: 34304 - DNA, 22 bp, Artificial Sequence
  Synthetic: FXN 3 reverse 9:69041013-69041038; SpCas9
ttataacaaaataccagccact

SEQ ID NO: 34305 - DNA, 21 bp, Artificial Sequence
  Synthetic: FXN 3 reverse 9:69041014-69041038; SpCas9
tataacaaaataccagccact

SEQ ID NO: 34306 - DNA, 20 bp, Artificial Sequence
  Synthetic: FXN 3 reverse 9:69041015-69041038; SpCas9
ataacaaaataccagccact

SEQ ID NO: 34307 - DNA, 19 bp, Artificial Sequence
  Synthetic: FXN 3 reverse 9:69041016-69041038; SpCas9
taacaaaataccagccact

SEQ ID NO: 34308 - DNA, 18 bp, Artificial Sequence
  Synthetic: FXN 3 reverse 9:69041017-69041038; SpCas9
aacaaaataccagccact

SEQ ID NO: 34309 - DNA, 25 bp, Artificial Sequence
  Synthetic: FXN 3 reverse 9:69041011-69041039; SpCas9
gatgttataacaaaataccagccac

SEQ ID NO: 34310 - DNA, 24 bp, Artificial Sequence
  Synthetic: FXN 3 reverse 9:69041012-69041039; SpCas9
atgttataacaaaataccagccac

SEQ ID NO: 34311 - DNA, 23 bp, Artificial Sequence
  Synthetic: FXN 3 reverse 9:69041013-69041039; SpCas9
tgttataacaaaataccagccac

SEQ ID NO: 34312 - DNA, 22 bp, Artificial Sequence
  Synthetic: FXN 3 reverse 9:69041014-69041039; SpCas9
gttataacaaaataccagccac

SEQ ID NO: 34313 - DNA, 21 bp, Artificial Sequence
  Synthetic: FXN 3 reverse 9:69041015-69041039; SpCas9
ttataacaaaataccagccac

SEQ ID NO: 34314 - DNA, 20 bp, Artificial Sequence
  Synthetic: FXN 3 reverse 9:69041016-69041039; SpCas9
tataacaaaataccagccac

SEQ ID NO: 34315 - DNA, 19 bp, Artificial Sequence
  Synthetic: FXN 3 reverse 9:69041017-69041039; SpCas9
ataacaaaataccagccac

SEQ ID NO: 34316 - DNA, 18 bp, Artificial Sequence
  Synthetic: FXN 3 reverse 9:69041018-69041039; SpCas9
taacaaaataccagccac

SEQ ID NO: 34317 - DNA, 25 bp, Artificial Sequence
  Synthetic: FXN 3 forward 9:69041015-69041043; SpCas9
tggctggtattttgttataacatcc

SEQ ID NO: 34318 - DNA, 24 bp, Artificial Sequence
  Synthetic: FXN 3 forward 9:69041016-69041043; SpCas9
ggctggtattttgttataacatcc

SEQ ID NO: 34319 - DNA, 23 bp, Artificial Sequence
  Synthetic: FXN 3 forward 9:69041017-69041043; SpCas9
gctggtattttgttataacatcc

SEQ ID NO: 34320 - DNA, 22 bp, Artificial Sequence
  Synthetic: FXN 3 forward 9:69041018-69041043; SpCas9
ctggtattttgttataacatcc

SEQ ID NO: 34321 - DNA, 21 bp, Artificial Sequence
  Synthetic: FXN 3 forward 9:69041019-69041043; SpCas9
tggtattttgttataacatcc

SEQ ID NO: 34322 - DNA, 20 bp, Artificial Sequence
  Synthetic: FXN 3 forward 9:69041020-69041043; SpCas9
ggtattttgttataacatcc

SEQ ID NO: 34323 - DNA, 19 bp, Artificial Sequence
  Synthetic: FXN 3 forward 9:69041021-69041043; SpCas9
gtattttgttataacatcc

SEQ ID NO: 34324 - DNA, 18 bp, Artificial Sequence
  Synthetic: FXN 3 forward 9:69041022-69041043; SpCas9
tattttgttataacatcc

SEQ ID NO: 34325 - DNA, 25 bp, Artificial Sequence
  Synthetic: FXN 3 reverse 9:69041018-69041046; SpCas9
agtctgggatgttataacaaaatac

SEQ ID NO: 34326 - DNA, 24 bp, Artificial Sequence
  Synthetic: FXN 3 reverse 9:69041019-69041046; SpCas9
gtctgggatgttataacaaaatac

SEQ ID NO: 34327 - DNA, 23 bp, Artificial Sequence
  Synthetic: FXN 3 reverse 9:69041020-69041046; SpCas9
tctgggatgttataacaaaatac

SEQ ID NO: 34328 - DNA, 22 bp, Artificial Sequence
  Synthetic: FXN 3 reverse 9:69041021-69041046; SpCas9
ctgggatgttataacaaaatac

SEQ ID NO: 34329 - DNA, 21 bp, Artificial Sequence
  Synthetic: FXN 3 reverse 9:69041022-69041046; SpCas9
tgggatgttataacaaaatac

SEQ ID NO: 34330 - DNA, 20 bp, Artificial Sequence
  Synthetic: FXN 3 reverse 9:69041023-69041046; SpCas9
gggatgttataacaaaatac

SEQ ID NO: 34331 - DNA, 19 bp, Artificial Sequence
  Synthetic: FXN 3 reverse 9:69041024-69041046; SpCas9
ggatgttataacaaaatac

SEQ ID NO: 34332 - DNA, 18 bp, Artificial Sequence
  Synthetic: FXN 3 reverse 9:69041025-69041046; SpCas9
gatgttataacaaaatac

SEQ ID NO: 34333 - DNA, 25 bp, Artificial Sequence
  Synthetic: FXN 3 forward 9:69041021-69041049; SpCas9
gtattttgttataacatcccagact

SEQ ID NO: 34334 - DNA, 24 bp, Artificial Sequence
  Synthetic: FXN 3 forward 9:69041022-69041049; SpCas9
tattttgttataacatcccagact

SEQ ID NO: 34335 - DNA, 23 bp, Artificial Sequence
  Synthetic: FXN 3 forward 9:69041023-69041049; SpCas9
attttgttataacatcccagact

SEQ ID NO: 34336 - DNA, 22 bp, Artificial Sequence
  Synthetic: FXN 3 forward 9:69041024-69041049; SpCas9
ttttgttataacatcccagact

SEQ ID NO: 34337 - DNA, 21 bp, Artificial Sequence
  Synthetic: FXN 3 forward 9:69041025-69041049; SpCas9
tttgttataacatcccagact

SEQ ID NO: 34338 - DNA, 20 bp, Artificial Sequence
  Synthetic: FXN 3 forward 9:69041026-69041049; SpCas9
ttgttataacatcccagact

SEQ ID NO: 34339 - DNA, 19 bp, Artificial Sequence
  Synthetic: FXN 3 forward 9:69041027-69041049; SpCas9
tgttataacatcccagact

SEQ ID NO: 34340 - DNA, 18 bp, Artificial Sequence
  Synthetic: FXN 3 forward 9:69041028-69041049; SpCas9
gttataacatcccagact

SEQ ID NO: 34341 - DNA, 25 bp, Artificial Sequence
  Synthetic: FXN 3 reverse 9:69041038-69041066; SpCas9
aagtatttgttatttgtcttagtct

SEQ ID NO: 34342 - DNA, 24 bp, Artificial Sequence
  Synthetic: FXN 3 reverse 9:69041039-69041066; SpCas9
agtatttgttatttgtcttagtct

SEQ ID NO: 34343 - DNA, 23 bp, Artificial Sequence
  Synthetic: FXN 3 reverse 9:69041040-69041066; SpCas9
gtatttgttatttgtcttagtct

SEQ ID NO: 34344 - DNA, 22 bp, Artificial Sequence
  Synthetic: FXN 3 reverse 9:69041041-69041066; SpCas9
tatttgttatttgtcttagtct

SEQ ID NO: 34345 - DNA, 21 bp, Artificial Sequence
  Synthetic: FXN 3 reverse 9:69041042-69041066; SpCas9
atttgttatttgtcttagtct

SEQ ID NO: 34346 - DNA, 20 bp, Artificial Sequence
  Synthetic: FXN 3 reverse 9:69041043-69041066; SpCas9
tttgttatttgtcttagtct

SEQ ID NO: 34347 - DNA, 19 bp, Artificial Sequence
  Synthetic: FXN 3 reverse 9:69041044-69041066; SpCas9
ttgttatttgtcttagtct

SEQ ID NO: 34348 - DNA, 18 bp, Artificial Sequence
  Synthetic: FXN 3 reverse 9:69041045-69041066; SpCas9
tgttatttgtcttagtct

SEQ ID NO: 34349 - DNA, 25 bp, Artificial Sequence
  Synthetic: FXN 3 reverse 9:69041039-69041067; SpCas9
caagtatttgttatttgtcttagtc

SEQ ID NO: 34350 - DNA, 24 bp, Artificial Sequence
  Synthetic: FXN 3 reverse 9:69041040-69041067; SpCas9
aagtatttgttatttgtcttagtc

SEQ ID NO: 34351 - DNA, 23 bp, Artificial Sequence
  Synthetic: FXN 3 reverse 9:69041041-69041067; SpCas9
agtatttgttatttgtcttagtc

SEQ ID NO: 34352 - DNA, 22 bp, Artificial Sequence
  Synthetic: FXN 3 reverse 9:69041042-69041067; SpCas9
gtatttgttatttgtcttagtc

SEQ ID NO: 34353 - DNA, 21 bp, Artificial Sequence
  Synthetic: FXN 3 reverse 9:69041043-69041067; SpCas9
tatttgttatttgtcttagtc

SEQ ID NO: 34354 - DNA, 20 bp, Artificial Sequence
  Synthetic: FXN 3 reverse 9:69041044-69041067; SpCas9
atttgttatttgtcttagtc

SEQ ID NO: 34355 - DNA, 19 bp, Artificial Sequence
  Synthetic: FXN 3 reverse 9:69041045-69041067; SpCas9
tttgttatttgtcttagtc

SEQ ID NO: 34356 - DNA, 18 bp, Artificial Sequence
  Synthetic: FXN 3 reverse 9:69041046-69041067; SpCas9
ttgttatttgtcttagtc

SEQ ID NO: 34357 - DNA, 25 bp, Artificial Sequence
  Synthetic: FXN 3 reverse 9:69041044-69041072; SpCas9
ggatacaagtatttgttatttgtct

SEQ ID NO: 34358 - DNA, 24 bp, Artificial Sequence
  Synthetic: FXN 3 reverse 9:69041045-69041072; SpCas9
gatacaagtatttgttatttgtct

SEQ ID NO: 34359 - DNA, 23 bp, Artificial Sequence
  Synthetic: FXN 3 reverse 9:69041046-69041072; SpCas9
atacaagtatttgttatttgtct

SEQ ID NO: 34360 - DNA, 22 bp, Artificial Sequence
  Synthetic: FXN 3 reverse 9:69041047-69041072; SpCas9
tacaagtatttgttatttgtct

SEQ ID NO: 34361 - DNA, 21 bp, Artificial Sequence
  Synthetic: FXN 3 reverse 9:69041048-69041072; SpCas9
acaagtatttgttatttgtct

SEQ ID NO: 34362 - DNA, 20 bp, Artificial Sequence
  Synthetic: FXN 3 reverse 9:69041049-69041072; SpCas9
caagtatttgttatttgtct

SEQ ID NO: 34363 - DNA, 19 bp, Artificial Sequence
  Synthetic: FXN 3 reverse 9:69041050-69041072; SpCas9
aagtatttgttatttgtct

SEQ ID NO: 34364 - DNA, 18 bp, Artificial Sequence
  Synthetic: FXN 3 reverse 9:69041051-69041072; SpCas9
agtatttgttatttgtct

SEQ ID NO: 34365 - DNA, 25 bp, Artificial Sequence
  Synthetic: FXN 3 forward 9:69041054-69041082; SpCas9
taacaaatacttgtatccctgacac

SEQ ID NO: 34366 - DNA, 24 bp, Artificial Sequence
  Synthetic: FXN 3 forward 9:69041055-69041082; SpCas9
aacaaatacttgtatccctgacac

SEQ ID NO: 34367 - DNA, 23 bp, Artificial Sequence
  Synthetic: FXN 3 forward 9:69041056-69041082; SpCas9
acaaatacttgtatccctgacac

SEQ ID NO: 34368 - DNA, 22 bp, Artificial Sequence
  Synthetic: FXN 3 forward 9:69041057-69041082; SpCas9
caaatacttgtatccctgacac

SEQ ID NO: 34369 - DNA, 21 bp, Artificial Sequence
  Synthetic: FXN 3 forward 9:69041058-69041082; SpCas9
aaatacttgtatccctgacac

SEQ ID NO: 34370 - DNA, 20 bp, Artificial Sequence
  Synthetic: FXN 3 forward 9:69041059-69041082; SpCas9
aatacttgtatccctgacac

SEQ ID NO: 34371 - DNA, 19 bp, Artificial Sequence
  Synthetic: FXN 3 forward 9:69041060-69041082; SpCas9
atacttgtatccctgacac

SEQ ID NO: 34372 - DNA, 18 bp, Artificial Sequence
  Synthetic: FXN 3 forward 9:69041061-69041082; SpCas9
tacttgtatccctgacac

SEQ ID NO: 34373 - DNA, 25 bp, Artificial Sequence
  Synthetic: FXN 3 forward 9:69041055-69041083; SpCas9
aacaaatacttgtatccctgacacc

SEQ ID NO: 34374 - DNA, 24 bp, Artificial Sequence
  Synthetic: FXN 3 forward 9:69041056-69041083; SpCas9
acaaatacttgtatccctgacacc

SEQ ID NO: 34375 - DNA, 23 bp, Artificial Sequence
  Synthetic: FXN 3 forward 9:69041057-69041083; SpCas9
caaatacttgtatccctgacacc

SEQ ID NO: 34376 - DNA, 22 bp, Artificial Sequence
  Synthetic: FXN 3 forward 9:69041058-69041083; SpCas9
aaatacttgtatccctgacacc

SEQ ID NO: 34377 - DNA, 21 bp, Artificial Sequence
  Synthetic: FXN 3 forward 9:69041059-69041083; SpCas9
aatacttgtatccctgacacc

SEQ ID NO: 34378 - DNA, 20 bp, Artificial Sequence
  Synthetic: FXN 3 forward 9:69041060-69041083; SpCas9
atacttgtatccctgacacc

SEQ ID NO: 34379 - DNA, 19 bp, Artificial Sequence
  Synthetic: FXN 3 forward 9:69041061-69041083; SpCas9
tacttgtatccctgacacc

SEQ ID NO: 34380 - DNA, 18 bp, Artificial Sequence
  Synthetic: FXN 3 forward 9:69041062-69041083; SpCas9
acttgtatccctgacacc

SEQ ID NO: 34381 - DNA, 25 bp, Artificial Sequence
  Synthetic: FXN 3 forward 9:69041060-69041088; SpCas9
atacttgtatccctgacaccaggtt

SEQ ID NO: 34382 - DNA, 24 bp, Artificial Sequence
  Synthetic: FXN 3 forward 9:69041061-69041088; SpCas9
tacttgtatccctgacaccaggtt

SEQ ID NO: 34383 - DNA, 23 bp, Artificial Sequence
  Synthetic: FXN 3 forward 9:69041062-69041088; SpCas9
acttgtatccctgacaccaggtt

SEQ ID NO: 34384 - DNA, 22 bp, Artificial Sequence
  Synthetic: FXN 3 forward 9:69041063-69041088; SpCas9
cttgtatccctgacaccaggtt

SEQ ID NO: 34385 - DNA, 21 bp, Artificial Sequence
  Synthetic: FXN 3 forward 9:69041064-69041088; SpCas9
ttgtatccctgacaccaggtt

SEQ ID NO: 34386 - DNA, 20 bp, Artificial Sequence
  Synthetic: FXN 3 forward 9:69041065-69041088; SpCas9
tgtatccctgacaccaggtt

SEQ ID NO: 34387 - DNA, 19 bp, Artificial Sequence
  Synthetic: FXN 3 forward 9:69041066-69041088; SpCas9
gtatccctgacaccaggtt

SEQ ID NO: 34388 - DNA, 18 bp, Artificial Sequence
  Synthetic: FXN 3 forward 9:69041067-69041088; SpCas9
tatccctgacaccaggtt

SEQ ID NO: 34389 - DNA, 25 bp, Artificial Sequence
  Synthetic: FXN 3 forward 9:69041062-69041090; SpCas9
acttgtatccctgacaccaggttaa

SEQ ID NO: 34390 - DNA, 24 bp, Artificial Sequence
  Synthetic: FXN 3 forward 9:69041063-69041090; SpCas9
cttgtatccctgacaccaggttaa

SEQ ID NO: 34391 - DNA, 23 bp, Artificial Sequence
  Synthetic: FXN 3 forward 9:69041064-69041090; SpCas9
ttgtatccctgacaccaggttaa

SEQ ID NO: 34392 - DNA, 22 bp, Artificial Sequence
  Synthetic: FXN 3 forward 9:69041065-69041090; SpCas9
tgtatccctgacaccaggttaa

SEQ ID NO: 34393 - DNA, 21 bp, Artificial Sequence
  Synthetic: FXN 3 forward 9:69041066-69041090; SpCas9
gtatccctgacaccaggttaa

SEQ ID NO: 34394 - DNA, 20 bp, Artificial Sequence
  Synthetic: FXN 3 forward 9:69041067-69041090; SpCas9
tatccctgacaccaggttaa

SEQ ID NO: 34395 - DNA, 19 bp, Artificial Sequence
  Synthetic: FXN 3 forward 9:69041068-69041090; SpCas9
atccctgacaccaggttaa

SEQ ID NO: 34396 - DNA, 18 bp, Artificial Sequence
  Synthetic: FXN 3 forward 9:69041069-69041090; SpCas9
tccctgacaccaggttaa

SEQ ID NO: 34397 - DNA, 25 bp, Artificial Sequence
  Synthetic: FXN 3 reverse 9:69041063-69041091; SpCas9
tctcttaacctggtgtcagggatac

SEQ ID NO: 34398 - DNA, 24 bp, Artificial Sequence
  Synthetic: FXN 3 reverse 9:69041064-69041091; SpCas9
ctcttaacctggtgtcagggatac

SEQ ID NO: 34399 - DNA, 23 bp, Artificial Sequence
  Synthetic: FXN 3 reverse 9:69041065-69041091; SpCas9
tcttaacctggtgtcagggatac

SEQ ID NO: 34400 - DNA, 22 bp, Artificial Sequence
  Synthetic: FXN 3 reverse 9:69041066-69041091; SpCas9
cttaacctggtgtcagggatac

SEQ ID NO: 34401 - DNA, 21 bp, Artificial Sequence
  Synthetic: FXN 3 reverse 9:69041067-69041091; SpCas9
ttaacctggtgtcagggatac

SEQ ID NO: 34402 - DNA, 20 bp, Artificial Sequence
  Synthetic: FXN 3 reverse 9:69041068-69041091; SpCas9
taacctggtgtcagggatac

SEQ ID NO: 34403 - DNA, 19 bp, Artificial Sequence
  Synthetic: FXN 3 reverse 9:69041069-69041091; SpCas9
aacctggtgtcagggatac

SEQ ID NO: 34404 - DNA, 18 bp, Artificial Sequence
  Synthetic: FXN 3 reverse 9:69041070-69041091; SpCas9
acctggtgtcagggatac

SEQ ID NO: 34405 - DNA, 25 bp, Artificial Sequence
  Synthetic: FXN 3 forward 9:69041066-69041094; SpCas9
gtatccctgacaccaggttaagaga

SEQ ID NO: 34406 - DNA, 24 bp, Artificial Sequence
  Synthetic: FXN 3 forward 9:69041067-69041094; SpCas9
tatccctgacaccaggttaagaga

SEQ ID NO: 34407 - DNA, 23 bp, Artificial Sequence
  Synthetic: FXN 3 forward 9:69041068-69041094; SpCas9
atccctgacaccaggttaagaga

SEQ ID NO: 34408 - DNA, 22 bp, Artificial Sequence
  Synthetic: FXN 3 forward 9:69041069-69041094; SpCas9
tccctgacaccaggttaagaga

SEQ ID NO: 34409 - DNA, 21 bp, Artificial Sequence
  Synthetic: FXN 3 forward 9:69041070-69041094; SpCas9
ccctgacaccaggttaagaga

SEQ ID NO: 34410 - DNA, 20 bp, Artificial Sequence
  Synthetic: FXN 3 forward 9:69041071-69041094; SpCas9
cctgacaccaggttaagaga

SEQ ID NO: 34411 - DNA, 19 bp, Artificial Sequence
  Synthetic: FXN 3 forward 9:69041072-69041094; SpCas9
ctgacaccaggttaagaga

SEQ ID NO: 34412 - DNA, 18 bp, Artificial Sequence
  Synthetic: FXN 3 forward 9:69041073-69041094; SpCas9
tgacaccaggttaagaga

SEQ ID NO: 34413 - DNA, 25 bp, Artificial Sequence
  Synthetic: FXN 3 reverse 9:69041070-69041098; SpCas9
aattctatctcttaacctggtgtca

SEQ ID NO: 34414 - DNA, 24 bp, Artificial Sequence
  Synthetic: FXN 3 reverse 9:69041071-69041098; SpCas9
attctatctcttaacctggtgtca

SEQ ID NO: 34415 - DNA, 23 bp, Artificial Sequence
  Synthetic: FXN 3 reverse 9:69041072-69041098; SpCas9
ttctatctcttaacctggtgtca

SEQ ID NO: 34416 - DNA, 22 bp, Artificial Sequence
  Synthetic: FXN 3 reverse 9:69041073-69041098; SpCas9
tctatctcttaacctggtgtca

SEQ ID NO: 34417 - DNA, 21 bp, Artificial Sequence
  Synthetic: FXN 3 reverse 9:69041074-69041098; SpCas9
ctatctcttaacctggtgtca

SEQ ID NO: 34418 - DNA, 20 bp, Artificial Sequence
  Synthetic: FXN 3 reverse 9:69041075-69041098; SpCas9
tatctcttaacctggtgtca

SEQ ID NO: 34419 - DNA, 19 bp, Artificial Sequence
  Synthetic: FXN 3 reverse 9:69041076-69041098; SpCas9
atctcttaacctggtgtca

SEQ ID NO: 34420 - DNA, 18 bp, Artificial Sequence
  Synthetic: FXN 3 reverse 9:69041077-69041098; SpCas9
tctcttaacctggtgtca

SEQ ID NO: 34421 - DNA, 25 bp, Artificial Sequence
  Synthetic: FXN 3 reverse 9:69041071-69041099; SpCas9
aaattctatctcttaacctggtgtc

SEQ ID NO: 34422 - DNA, 24 bp, Artificial Sequence
  Synthetic: FXN 3 reverse 9:69041072-69041099; SpCas9
aattctatctcttaacctggtgtc

SEQ ID NO: 34423 - DNA, 23 bp, Artificial Sequence
  Synthetic: FXN 3 reverse 9:69041073-69041099; SpCas9
attctatctcttaacctggtgtc

SEQ ID NO: 34424 - DNA, 22 bp, Artificial Sequence
  Synthetic: FXN 3 reverse 9:69041074-69041099; SpCas9
ttctatctcttaacctggtgtc

SEQ ID NO: 34425 - DNA, 21 bp, Artificial Sequence
  Synthetic: FXN 3 reverse 9:69041075-69041099; SpCas9
tctatctcttaacctggtgtc

SEQ ID NO: 34426 - DNA, 20 bp, Artificial Sequence
  Synthetic: FXN 3 reverse 9:69041076-69041099; SpCas9
ctatctcttaacctggtgtc

SEQ ID NO: 34427 - DNA, 19 bp, Artificial Sequence
  Synthetic: FXN 3 reverse 9:69041077-69041099; SpCas9
tatctcttaacctggtgtc

SEQ ID NO: 34428 - DNA, 18 bp, Artificial Sequence
  Synthetic: FXN 3 reverse 9:69041078-69041099; SpCas9
atctcttaacctggtgtc

SEQ ID NO: 34429 - DNA, 25 bp, Artificial Sequence
  Synthetic: FXN 3 reverse 9:69041072-69041100; SpCas9
caaattctatctcttaacctggtgt

SEQ ID NO: 34430 - DNA, 24 bp, Artificial Sequence
  Synthetic: FXN 3 reverse 9:69041073-69041100; SpCas9
aaattctatctcttaacctggtgt

SEQ ID NO: 34431 - DNA, 23 bp, Artificial Sequence
  Synthetic: FXN 3 reverse 9:69041074-69041100; SpCas9
aattctatctcttaacctggtgt

SEQ ID NO: 34432 - DNA, 22 bp, Artificial Sequence
  Synthetic: FXN 3 reverse 9:69041075-69041100; SpCas9
attctatctcttaacctggtgt

SEQ ID NO: 34433 - DNA, 21 bp, Artificial Sequence
  Synthetic: FXN 3 reverse 9:69041076-69041100; SpCas9
ttctatctcttaacctggtgt

SEQ ID NO: 34434 - DNA, 20 bp, Artificial Sequence
  Synthetic: FXN 3 reverse 9:69041077-69041100; SpCas9
tctatctcttaacctggtgt

SEQ ID NO: 34435 - DNA, 19 bp, Artificial Sequence
  Synthetic: FXN 3 reverse 9:69041078-69041100; SpCas9
ctatctcttaacctggtgt

SEQ ID NO: 34436 - DNA, 18 bp, Artificial Sequence
  Synthetic: FXN 3 reverse 9:69041079-69041100; SpCas9
tatctcttaacctggtgt

SEQ ID NO: 34437 - DNA, 25 bp, Artificial Sequence
  Synthetic: FXN 3 reverse 9:69041078-69041106; SpCas9
aacaaacaaattctatctcttaacc

SEQ ID NO: 34438 - DNA, 24 bp, Artificial Sequence
  Synthetic: FXN 3 reverse 9:69041079-69041106; SpCas9
acaaacaaattctatctcttaacc

SEQ ID NO: 34439 - DNA, 23 bp, Artificial Sequence
  Synthetic: FXN 3 reverse 9:69041080-69041106; SpCas9
caaacaaattctatctcttaacc

SEQ ID NO: 34440 - DNA, 22 bp, Artificial Sequence
  Synthetic: FXN 3 reverse 9:69041081-69041106; SpCas9
aaacaaattctatctcttaacc

SEQ ID NO: 34441 - DNA, 21 bp, Artificial Sequence
  Synthetic: FXN 3 reverse 9:69041082-69041106; SpCas9
aacaaattctatctcttaacc

SEQ ID NO: 34442 - DNA, 20 bp, Artificial Sequence
  Synthetic: FXN 3 reverse 9:69041083-69041106; SpCas9
acaaattctatctcttaacc

SEQ ID NO: 34443 - DNA, 19 bp, Artificial Sequence
  Synthetic: FXN 3 reverse 9:69041084-69041106; SpCas9
caaattctatctcttaacc

SEQ ID NO: 34444 - DNA, 18 bp, Artificial Sequence
  Synthetic: FXN 3 reverse 9:69041085-69041106; SpCas9
aaattctatctcttaacc

SEQ ID NO: 34445 - DNA, 25 bp, Artificial Sequence
  Synthetic: FXN 3 forward 9:69041085-69041113; SpCas9
aagagatagaatttgtttgttcctc

SEQ ID NO: 34446 - DNA, 24 bp, Artificial Sequence
  Synthetic: FXN 3 forward 9:69041086-69041113; SpCas9
agagatagaatttgtttgttcctc

SEQ ID NO: 34447 - DNA, 23 bp, Artificial Sequence
  Synthetic: FXN 3 forward 9:69041087-69041113; SpCas9
gagatagaatttgtttgttcctc

SEQ ID NO: 34448 - DNA, 22 bp, Artificial Sequence
  Synthetic: FXN 3 forward 9:69041088-69041113; SpCas9
agatagaatttgtttgttcctc

SEQ ID NO: 34449 - DNA, 21 bp, Artificial Sequence
  Synthetic: FXN 3 forward 9:69041089-69041113; SpCas9
gatagaatttgtttgttcctc

SEQ ID NO: 34450 - DNA, 20 bp, Artificial Sequence
  Synthetic: FXN 3 forward 9:69041090-69041113; SpCas9
atagaatttgtttgttcctc

SEQ ID NO: 34451 - DNA, 19 bp, Artificial Sequence
  Synthetic: FXN 3 forward 9:69041091-69041113; SpCas9
tagaatttgtttgttcctc

SEQ ID NO: 34452 - DNA, 18 bp, Artificial Sequence
  Synthetic: FXN 3 forward 9:69041092-69041113; SpCas9
agaatttgtttgttcctc

SEQ ID NO: 34453 - DNA, 25 bp, Artificial Sequence
  Synthetic: FXN 3 forward 9:69041087-69041115; SpCas9
gagatagaatttgtttgttcctctg

SEQ ID NO: 34454 - DNA, 24 bp, Artificial Sequence
  Synthetic: FXN 3 forward 9:69041088-69041115; SpCas9
agatagaatttgtttgttcctctg

SEQ ID NO: 34455 - DNA, 23 bp, Artificial Sequence
  Synthetic: FXN 3 forward 9:69041089-69041115; SpCas9
gatagaatttgtttgttcctctg

SEQ ID NO: 34456 - DNA, 22 bp, Artificial Sequence
  Synthetic: FXN 3 forward 9:69041090-69041115; SpCas9
atagaatttgtttgttcctctg

SEQ ID NO: 34457 - DNA, 21 bp, Artificial Sequence
  Synthetic: FXN 3 forward 9:69041091-69041115; SpCas9
tagaatttgtttgttcctctg

SEQ ID NO: 34458 - DNA, 20 bp, Artificial Sequence
  Synthetic: FXN 3 forward 9:69041092-69041115; SpCas9
agaatttgtttgttcctctg

SEQ ID NO: 34459 - DNA, 19 bp, Artificial Sequence
  Synthetic: FXN 3 forward 9:69041093-69041115; SpCas9
gaatttgtttgttcctctg

SEQ ID NO: 34460 - DNA, 18 bp, Artificial Sequence
  Synthetic: FXN 3 forward 9:69041094-69041115; SpCas9
aatttgtttgttcctctg

SEQ ID NO: 34461 - DNA, 25 bp, Artificial Sequence
  Synthetic: FXN 3 forward 9:69041088-69041116; SpCas9
agatagaatttgtttgttcctctgg

SEQ ID NO: 34462 - DNA, 24 bp, Artificial Sequence
  Synthetic: FXN 3 forward 9:69041089-69041116; SpCas9
gatagaatttgtttgttcctctgg

SEQ ID NO: 34463 - DNA, 23 bp, Artificial Sequence
  Synthetic: FXN 3 forward 9:69041090-69041116; SpCas9
atagaatttgtttgttcctctgg

SEQ ID NO: 34464 - DNA, 22 bp, Artificial Sequence
  Synthetic: FXN 3 forward 9:69041091-69041116; SpCas9
tagaatttgtttgttcctctgg

SEQ ID NO: 34465 - DNA, 21 bp, Artificial Sequence
  Synthetic: FXN 3 forward 9:69041092-69041116; SpCas9
agaatttgtttgttcctctgg

SEQ ID NO: 34466 - DNA, 20 bp, Artificial Sequence
  Synthetic: FXN 3 forward 9:69041093-69041116; SpCas9
gaatttgtttgttcctctgg

SEQ ID NO: 34467 - DNA, 19 bp, Artificial Sequence
  Synthetic: FXN 3 forward 9:69041094-69041116; SpCas9
aatttgtttgttcctctgg

SEQ ID NO: 34468 - DNA, 18 bp, Artificial Sequence
  Synthetic: FXN 3 forward 9:69041095-69041116; SpCas9
atttgtttgttcctctgg

SEQ ID NO: 34469 - DNA, 25 bp, Artificial Sequence
  Synthetic: FXN 3 reverse 9:69041106-69041134; SpCas9
atggggtgaagacaagggcctccag

SEQ ID NO: 34470 - DNA, 24 bp, Artificial Sequence
  Synthetic: FXN 3 reverse 9:69041107-69041134; SpCas9
tggggtgaagacaagggcctccag

SEQ ID NO: 34471 - DNA, 23 bp, Artificial Sequence
  Synthetic: FXN 3 reverse 9:69041108-69041134; SpCas9
ggggtgaagacaagggcctccag

SEQ ID NO: 34472 - DNA, 22 bp, Artificial Sequence
  Synthetic: FXN 3 reverse 9:69041109-69041134; SpCas9
gggtgaagacaagggcctccag

SEQ ID NO: 34473 - DNA, 21 bp, Artificial Sequence
  Synthetic: FXN 3 reverse 9:69041110-69041134; SpCas9
ggtgaagacaagggcctccag

SEQ ID NO: 34474 - DNA, 20 bp, Artificial Sequence
  Synthetic: FXN 3 reverse 9:69041111-69041134; SpCas9
gtgaagacaagggcctccag

SEQ ID NO: 34475 - DNA, 19 bp, Artificial Sequence
  Synthetic: FXN 3 reverse 9:69041112-69041134; SpCas9
tgaagacaagggcctccag

SEQ ID NO: 34476 - DNA, 18 bp, Artificial Sequence
  Synthetic: FXN 3 reverse 9:69041113-69041134; SpCas9
gaagacaagggcctccag

SEQ ID NO: 34477 - DNA, 25 bp, Artificial Sequence
  Synthetic: FXN 3 reverse 9:69041107-69041135; SpCas9
gatggggtgaagacaagggcctcca

SEQ ID NO: 34478 - DNA, 24 bp, Artificial Sequence
  Synthetic: FXN 3 reverse 9:69041108-69041135; SpCas9
atggggtgaagacaagggcctcca

SEQ ID NO: 34479 - DNA, 23 bp, Artificial Sequence
  Synthetic: FXN 3 reverse 9:69041109-69041135; SpCas9
tggggtgaagacaagggcctcca

SEQ ID NO: 34480 - DNA, 22 bp, Artificial Sequence
  Synthetic: FXN 3 reverse 9:69041110-69041135; SpCas9
ggggtgaagacaagggcctcca

SEQ ID NO: 34481 - DNA, 21 bp, Artificial Sequence
  Synthetic: FXN 3 reverse 9:69041111-69041135; SpCas9
gggtgaagacaagggcctcca

SEQ ID NO: 34482 - DNA, 20 bp, Artificial Sequence
  Synthetic: FXN 3 reverse 9:69041112-69041135; SpCas9
ggtgaagacaagggcctcca

SEQ ID NO: 34483 - DNA, 19 bp, Artificial Sequence
  Synthetic: FXN 3 reverse 9:69041113-69041135; SpCas9
gtgaagacaagggcctcca

SEQ ID NO: 34484 - DNA, 18 bp, Artificial Sequence
  Synthetic: FXN 3 reverse 9:69041114-69041135; SpCas9
tgaagacaagggcctcca

SEQ ID NO: 34485 - DNA, 25 bp, Artificial Sequence
  Synthetic: FXN 3 reverse 9:69041109-69041137; SpCas9
gtgatggggtgaagacaagggcctc

SEQ ID NO: 34486 - DNA, 24 bp, Artificial Sequence
  Synthetic: FXN 3 reverse 9:69041110-69041137; SpCas9
tgatggggtgaagacaagggcctc

SEQ ID NO: 34487 - DNA, 23 bp, Artificial Sequence
  Synthetic: FXN 3 reverse 9:69041111-69041137; SpCas9
gatggggtgaagacaagggcctc

SEQ ID NO: 34488 - DNA, 22 bp, Artificial Sequence
  Synthetic: FXN 3 reverse 9:69041112-69041137; SpCas9
atggggtgaagacaagggcctc

SEQ ID NO: 34489 - DNA, 21 bp, Artificial Sequence
  Synthetic: FXN 3 reverse 9:69041113-69041137; SpCas9
tggggtgaagacaagggcctc

SEQ ID NO: 34490 - DNA, 20 bp, Artificial Sequence
  Synthetic: FXN 3 reverse 9:69041114-69041137; SpCas9
ggggtgaagacaagggcctc

SEQ ID NO: 34491 - DNA, 19 bp, Artificial Sequence
  Synthetic: FXN 3 reverse 9:69041115-69041137; SpCas9
gggtgaagacaagggcctc

SEQ ID NO: 34492 - DNA, 18 bp, Artificial Sequence
  Synthetic: FXN 3 reverse 9:69041116-69041137; SpCas9
ggtgaagacaagggcctc

SEQ ID NO: 34493 - DNA, 25 bp, Artificial Sequence
  Synthetic: FXN 3 reverse 9:69041116-69041144; SpCas9
cagggcagtgatggggtgaagacaa

SEQ ID NO: 34494 - DNA, 24 bp, Artificial Sequence
  Synthetic: FXN 3 reverse 9:69041117-69041144; SpCas9
agggcagtgatggggtgaagacaa

SEQ ID NO: 34495 - DNA, 23 bp, Artificial Sequence
  Synthetic: FXN 3 reverse 9:69041118-69041144; SpCas9
gggcagtgatggggtgaagacaa

SEQ ID NO: 34496 - DNA, 22 bp, Artificial Sequence
  Synthetic: FXN 3 reverse 9:69041119-69041144; SpCas9
ggcagtgatggggtgaagacaa

SEQ ID NO: 34497 - DNA, 21 bp, Artificial Sequence
  Synthetic: FXN 3 reverse 9:69041120-69041144; SpCas9
gcagtgatggggtgaagacaa

SEQ ID NO: 34498 - DNA, 20 bp, Artificial Sequence
  Synthetic: FXN 3 reverse 9:69041121-69041144; SpCas9
cagtgatggggtgaagacaa

SEQ ID NO: 34499 - DNA, 19 bp, Artificial Sequence
  Synthetic: FXN 3 reverse 9:69041122-69041144; SpCas9
agtgatggggtgaagacaa

SEQ ID NO: 34500 - DNA, 18 bp, Artificial Sequence
  Synthetic: FXN 3 reverse 9:69041123-69041144; SpCas9
gtgatggggtgaagacaa

SEQ ID NO: 34501 - DNA, 25 bp, Artificial Sequence
  Synthetic: FXN 3 reverse 9:69041117-69041145; SpCas9
acagggcagtgatggggtgaagaca

SEQ ID NO: 34502 - DNA, 24 bp, Artificial Sequence
  Synthetic: FXN 3 reverse 9:69041118-69041145; SpCas9
cagggcagtgatggggtgaagaca

SEQ ID NO: 34503 - DNA, 23 bp, Artificial Sequence
  Synthetic: FXN 3 reverse 9:69041119-69041145; SpCas9
agggcagtgatggggtgaagaca

SEQ ID NO: 34504 - DNA, 22 bp, Artificial Sequence
  Synthetic: FXN 3 reverse 9:69041120-69041145; SpCas9
gggcagtgatggggtgaagaca

SEQ ID NO: 34505 - DNA, 21 bp, Artificial Sequence
  Synthetic: FXN 3 reverse 9:69041121-69041145; SpCas9
ggcagtgatggggtgaagaca

SEQ ID NO: 34506 - DNA, 20 bp, Artificial Sequence
  Synthetic: FXN 3 reverse 9:69041122-69041145; SpCas9
gcagtgatggggtgaagaca

SEQ ID NO: 34507 - DNA, 19 bp, Artificial Sequence
  Synthetic: FXN 3 reverse 9:69041123-69041145; SpCas9
cagtgatggggtgaagaca

SEQ ID NO: 34508 - DNA, 18 bp, Artificial Sequence
  Synthetic: FXN 3 reverse 9:69041124-69041145; SpCas9
agtgatggggtgaagaca

SEQ ID NO: 34509 - DNA, 25 bp, Artificial Sequence
  Synthetic: FXN 3 reverse 9:69041118-69041146; SpCas9
gacagggcagtgatggggtgaagac

SEQ ID NO: 34510 - DNA, 24 bp, Artificial Sequence
  Synthetic: FXN 3 reverse 9:69041119-69041146; SpCas9
acagggcagtgatggggtgaagac

SEQ ID NO: 34511 - DNA, 23 bp, Artificial Sequence
  Synthetic: FXN 3 reverse 9:69041120-69041146; SpCas9
cagggcagtgatggggtgaagac

SEQ ID NO: 34512 - DNA, 22 bp, Artificial Sequence
  Synthetic: FXN 3 reverse 9:69041121-69041146; SpCas9
agggcagtgatggggtgaagac

SEQ ID NO: 34513 - DNA, 21 bp, Artificial Sequence
  Synthetic: FXN 3 reverse 9:69041122-69041146; SpCas9
gggcagtgatggggtgaagac

SEQ ID NO: 34514 - DNA, 20 bp, Artificial Sequence
  Synthetic: FXN 3 reverse 9:69041123-69041146; SpCas9
ggcagtgatggggtgaagac

SEQ ID NO: 34515 - DNA, 19 bp, Artificial Sequence
  Synthetic: FXN 3 reverse 9:69041124-69041146; SpCas9
gcagtgatggggtgaagac

SEQ ID NO: 34516 - DNA, 18 bp, Artificial Sequence
  Synthetic: FXN 3 reverse 9:69041125-69041146; SpCas9
cagtgatggggtgaagac

SEQ ID NO: 34517 - DNA, 25 bp, Artificial Sequence
  Synthetic: FXN 3 reverse 9:69041123-69041151; SpCas9
gggaggacagggcagtgatggggtg

SEQ ID NO: 34518 - DNA, 24 bp, Artificial Sequence
  Synthetic: FXN 3 reverse 9:69041124-69041151; SpCas9
ggaggacagggcagtgatggggtg

SEQ ID NO: 34519 - DNA, 23 bp, Artificial Sequence
  Synthetic: FXN 3 reverse 9:69041125-69041151; SpCas9
gaggacagggcagtgatggggtg

SEQ ID NO: 34520 - DNA, 22 bp, Artificial Sequence
  Synthetic: FXN 3 reverse 9:69041126-69041151; SpCas9
aggacagggcagtgatggggtg

SEQ ID NO: 34521 - DNA, 21 bp, Artificial Sequence
  Synthetic: FXN 3 reverse 9:69041127-69041151; SpCas9
ggacagggcagtgatggggtg

SEQ ID NO: 34522 - DNA, 20 bp, Artificial Sequence
  Synthetic: FXN 3 reverse 9:69041128-69041151; SpCas9
gacagggcagtgatggggtg

SEQ ID NO: 34523 - DNA, 19 bp, Artificial Sequence
  Synthetic: FXN 3 reverse 9:69041129-69041151; SpCas9
acagggcagtgatggggtg

SEQ ID NO: 34524 - DNA, 18 bp, Artificial Sequence
  Synthetic: FXN 3 reverse 9:69041130-69041151; SpCas9
cagggcagtgatggggtg

SEQ ID NO: 34525 - DNA, 25 bp, Artificial Sequence
  Synthetic: FXN 3 forward 9:69041126-69041154; SpCas9
caccccatcactgccctgtcctccc

SEQ ID NO: 34526 - DNA, 24 bp, Artificial Sequence
  Synthetic: FXN 3 forward 9:69041127-69041154; SpCas9
accccatcactgccctgtcctccc

SEQ ID NO: 34527 - DNA, 23 bp, Artificial Sequence
  Synthetic: FXN 3 forward 9:69041128-69041154; SpCas9
ccccatcactgccctgtcctccc

SEQ ID NO: 34528 - DNA, 22 bp, Artificial Sequence
  Synthetic: FXN 3 forward 9:69041129-69041154; SpCas9
cccatcactgccctgtcctccc

SEQ ID NO: 34529 - DNA, 21 bp, Artificial Sequence
  Synthetic: FXN 3 forward 9:69041130-69041154; SpCas9
ccatcactgccctgtcctccc

SEQ ID NO: 34530 - DNA, 20 bp, Artificial Sequence
  Synthetic: FXN 3 forward 9:69041131-69041154; SpCas9
catcactgccctgtcctccc

SEQ ID NO: 34531 - DNA, 19 bp, Artificial Sequence
  Synthetic: FXN 3 forward 9:69041132-69041154; SpCas9
atcactgccctgtcctccc

SEQ ID NO: 34532 - DNA, 18 bp, Artificial Sequence
  Synthetic: FXN 3 forward 9:69041133-69041154; SpCas9
tcactgccctgtcctccc

SEQ ID NO: 34533 - DNA, 25 bp, Artificial Sequence
  Synthetic: FXN 3 forward 9:69041128-69041156; SpCas9
ccccatcactgccctgtcctccctg

SEQ ID NO: 34534 - DNA, 24 bp, Artificial Sequence
  Synthetic: FXN 3 forward 9:69041129-69041156; SpCas9
cccatcactgccctgtcctccctg

SEQ ID NO: 34535 - DNA, 23 bp, Artificial Sequence
  Synthetic: FXN 3 forward 9:69041130-69041156; SpCas9
ccatcactgccctgtcctccctg

SEQ ID NO: 34536 - DNA, 22 bp, Artificial Sequence
  Synthetic: FXN 3 forward 9:69041131-69041156; SpCas9
catcactgccctgtcctccctg

SEQ ID NO: 34537 - DNA, 21 bp, Artificial Sequence
  Synthetic: FXN 3 forward 9:69041132-69041156; SpCas9
atcactgccctgtcctccctg

SEQ ID NO: 34538 - DNA, 20 bp, Artificial Sequence
  Synthetic: FXN 3 forward 9:69041133-69041156; SpCas9
tcactgccctgtcctccctg

SEQ ID NO: 34539 - DNA, 19 bp, Artificial Sequence
  Synthetic: FXN 3 forward 9:69041134-69041156; SpCas9
cactgccctgtcctccctg

SEQ ID NO: 34540 - DNA, 18 bp, Artificial Sequence
  Synthetic: FXN 3 forward 9:69041135-69041156; SpCas9
actgccctgtcctccctg

SEQ ID NO: 34541 - DNA, 25 bp, Artificial Sequence
  Synthetic: FXN 3 reverse 9:69041128-69041156; SpCas9
ctccagggaggacagggcagtgatg

SEQ ID NO: 34542 - DNA, 24 bp, Artificial Sequence
  Synthetic: FXN 3 reverse 9:69041129-69041156; SpCas9
tccagggaggacagggcagtgatg

SEQ ID NO: 34543 - DNA, 23 bp, Artificial Sequence
  Synthetic: FXN 3 reverse 9:69041130-69041156; SpCas9
ccagggaggacagggcagtgatg

SEQ ID NO: 34544 - DNA, 22 bp, Artificial Sequence
  Synthetic: FXN 3 reverse 9:69041131-69041156; SpCas9
cagggaggacagggcagtgatg

SEQ ID NO: 34545 - DNA, 21 bp, Artificial Sequence
  Synthetic: FXN 3 reverse 9:69041132-69041156; SpCas9
agggaggacagggcagtgatg

SEQ ID NO: 34546 - DNA, 20 bp, Artificial Sequence
  Synthetic: FXN 3 reverse 9:69041133-69041156; SpCas9
gggaggacagggcagtgatg

SEQ ID NO: 34547 - DNA, 19 bp, Artificial Sequence
  Synthetic: FXN 3 reverse 9:69041134-69041156; SpCas9
ggaggacagggcagtgatg

SEQ ID NO: 34548 - DNA, 18 bp, Artificial Sequence
  Synthetic: FXN 3 reverse 9:69041135-69041156; SpCas9
gaggacagggcagtgatg

SEQ ID NO: 34549 - DNA, 25 bp, Artificial Sequence
  Synthetic: FXN 3 forward 9:69041129-69041157; SpCas9
cccatcactgccctgtcctccctgg

SEQ ID NO: 34550 - DNA, 24 bp, Artificial Sequence
  Synthetic: FXN 3 forward 9:69041130-69041157; SpCas9
ccatcactgccctgtcctccctgg

SEQ ID NO: 34551 - DNA, 23 bp, Artificial Sequence
  Synthetic: FXN 3 forward 9:69041131-69041157; SpCas9
catcactgccctgtcctccctgg

SEQ ID NO: 34552 - DNA, 22 bp, Artificial Sequence
  Synthetic: FXN 3 forward 9:69041132-69041157; SpCas9
atcactgccctgtcctccctgg

SEQ ID NO: 34553 - DNA, 21 bp, Artificial Sequence
  Synthetic: FXN 3 forward 9:69041133-69041157; SpCas9
tcactgccctgtcctccctgg

SEQ ID NO: 34554 - DNA, 20 bp, Artificial Sequence
  Synthetic: FXN 3 forward 9:69041134-69041157; SpCas9
cactgccctgtcctccctgg

SEQ ID NO: 34555 - DNA, 19 bp, Artificial Sequence
  Synthetic: FXN 3 forward 9:69041135-69041157; SpCas9
actgccctgtcctccctgg

SEQ ID NO: 34556 - DNA, 18 bp, Artificial Sequence
  Synthetic: FXN 3 forward 9:69041136-69041157; SpCas9
ctgccctgtcctccctgg

SEQ ID NO: 34557 - DNA, 25 bp, Artificial Sequence
  Synthetic: FXN 3 reverse 9:69041129-69041157; SpCas9
cctccagggaggacagggcagtgat

SEQ ID NO: 34558 - DNA, 24 bp, Artificial Sequence
  Synthetic: FXN 3 reverse 9:69041130-69041157; SpCas9
ctccagggaggacagggcagtgat

SEQ ID NO: 34559 - DNA, 23 bp, Artificial Sequence
  Synthetic: FXN 3 reverse 9:69041131-69041157; SpCas9
tccagggaggacagggcagtgat

SEQ ID NO: 34560 - DNA, 22 bp, Artificial Sequence
  Synthetic: FXN 3 reverse 9:69041132-69041157; SpCas9
ccagggaggacagggcagtgat

SEQ ID NO: 34561 - DNA, 21 bp, Artificial Sequence
  Synthetic: FXN 3 reverse 9:69041133-69041157; SpCas9
cagggaggacagggcagtgat

SEQ ID NO: 34562 - DNA, 20 bp, Artificial Sequence
  Synthetic: FXN 3 reverse 9:69041134-69041157; SpCas9
agggaggacagggcagtgat

SEQ ID NO: 34563 - DNA, 19 bp, Artificial Sequence
  Synthetic: FXN 3 reverse 9:69041135-69041157; SpCas9
gggaggacagggcagtgat

SEQ ID NO: 34564 - DNA, 18 bp, Artificial Sequence
  Synthetic: FXN 3 reverse 9:69041136-69041157; SpCas9
ggaggacagggcagtgat

SEQ ID NO: 34565 - DNA, 25 bp, Artificial Sequence
  Synthetic: FXN 3 reverse 9:69041130-69041158; SpCas9
tcctccagggaggacagggcagtga

SEQ ID NO: 34566 - DNA, 24 bp, Artificial Sequence
  Synthetic: FXN 3 reverse 9:69041131-69041158; SpCas9
cctccagggaggacagggcagtga

SEQ ID NO: 34567 - DNA, 23 bp, Artificial Sequence
  Synthetic: FXN 3 reverse 9:69041132-69041158; SpCas9
ctccagggaggacagggcagtga

SEQ ID NO: 34568 - DNA, 22 bp, Artificial Sequence
  Synthetic: FXN 3 reverse 9:69041133-69041158; SpCas9
tccagggaggacagggcagtga

SEQ ID NO: 34569 - DNA, 21 bp, Artificial Sequence
  Synthetic: FXN 3 reverse 9:69041134-69041158; SpCas9
ccagggaggacagggcagtga

SEQ ID NO: 34570 - DNA, 20 bp, Artificial Sequence
  Synthetic: FXN 3 reverse 9:69041135-69041158; SpCas9
cagggaggacagggcagtga

SEQ ID NO: 34571 - DNA, 19 bp, Artificial Sequence
  Synthetic: FXN 3 reverse 9:69041136-69041158; SpCas9
agggaggacagggcagtga

SEQ ID NO: 34572 - DNA, 18 bp, Artificial Sequence
  Synthetic: FXN 3 reverse 9:69041137-69041158; SpCas9
gggaggacagggcagtga

SEQ ID NO: 34573 - DNA, 25 bp, Artificial Sequence
  Synthetic: FXN 3 reverse 9:69041136-69041164; SpCas9
gcagattcctccagggaggacaggg

SEQ ID NO: 34574 - DNA, 24 bp, Artificial Sequence
  Synthetic: FXN 3 reverse 9:69041137-69041164; SpCas9
cagattcctccagggaggacaggg

SEQ ID NO: 34575 - DNA, 23 bp, Artificial Sequence
  Synthetic: FXN 3 reverse 9:69041138-69041164; SpCas9
agattcctccagggaggacaggg

SEQ ID NO: 34576 - DNA, 22 bp, Artificial Sequence
  Synthetic: FXN 3 reverse 9:69041139-69041164; SpCas9
gattcctccagggaggacaggg

SEQ ID NO: 34577 - DNA, 21 bp, Artificial Sequence
  Synthetic: FXN 3 reverse 9:69041140-69041164; SpCas9
attcctccagggaggacaggg

SEQ ID NO: 34578 - DNA, 20 bp, Artificial Sequence
  Synthetic: FXN 3 reverse 9:69041141-69041164; SpCas9
ttcctccagggaggacaggg

SEQ ID NO: 34579 - DNA, 19 bp, Artificial Sequence
  Synthetic: FXN 3 reverse 9:69041142-69041164; SpCas9
tcctccagggaggacaggg

SEQ ID NO: 34580 - DNA, 18 bp, Artificial Sequence
  Synthetic: FXN 3 reverse 9:69041143-69041164; SpCas9
cctccagggaggacaggg

SEQ ID NO: 34581 - DNA, 25 bp, Artificial Sequence
  Synthetic: FXN 3 forward 9:69041139-69041167; SpCas9
ccctgtcctccctggaggaatctgc

SEQ ID NO: 34582 - DNA, 24 bp, Artificial Sequence
  Synthetic: FXN 3 forward 9:69041140-69041167; SpCas9
cctgtcctccctggaggaatctgc

SEQ ID NO: 34583 - DNA, 23 bp, Artificial Sequence
  Synthetic: FXN 3 forward 9:69041141-69041167; SpCas9
ctgtcctccctggaggaatctgc

SEQ ID NO: 34584 - DNA, 22 bp, Artificial Sequence
  Synthetic: FXN 3 forward 9:69041142-69041167; SpCas9
tgtcctccctggaggaatctgc

SEQ ID NO: 34585 - DNA, 21 bp, Artificial Sequence
  Synthetic: FXN 3 forward 9:69041143-69041167; SpCas9
gtcctccctggaggaatctgc

SEQ ID NO: 34586 - DNA, 20 bp, Artificial Sequence
  Synthetic: FXN 3 forward 9:69041144-69041167; SpCas9
tcctccctggaggaatctgc

SEQ ID NO: 34587 - DNA, 19 bp, Artificial Sequence
  Synthetic: FXN 3 forward 9:69041145-69041167; SpCas9
cctccctggaggaatctgc

SEQ ID NO: 34588 - DNA, 18 bp, Artificial Sequence
  Synthetic: FXN 3 forward 9:69041146-69041167; SpCas9
ctccctggaggaatctgc

SEQ ID NO: 34589 - DNA, 25 bp, Artificial Sequence
  Synthetic: FXN 3 reverse 9:69041139-69041167; SpCas9
ctggcagattcctccagggaggaca

SEQ ID NO: 34590 - DNA, 24 bp, Artificial Sequence
  Synthetic: FXN 3 reverse 9:69041140-69041167; SpCas9
tggcagattcctccagggaggaca

SEQ ID NO: 34591 - DNA, 23 bp, Artificial Sequence
  Synthetic: FXN 3 reverse 9:69041141-69041167; SpCas9
ggcagattcctccagggaggaca

SEQ ID NO: 34592 - DNA, 22 bp, Artificial Sequence
  Synthetic: FXN 3 reverse 9:69041142-69041167; SpCas9
gcagattcctccagggaggaca

SEQ ID NO: 34593 - DNA, 21 bp, Artificial Sequence
  Synthetic: FXN 3 reverse 9:69041143-69041167; SpCas9
cagattcctccagggaggaca

SEQ ID NO: 34594 - DNA, 20 bp, Artificial Sequence
  Synthetic: FXN 3 reverse 9:69041144-69041167; SpCas9
agattcctccagggaggaca

SEQ ID NO: 34595 - DNA, 19 bp, Artificial Sequence
  Synthetic: FXN 3 reverse 9:69041145-69041167; SpCas9
gattcctccagggaggaca

SEQ ID NO: 34596 - DNA, 18 bp, Artificial Sequence
  Synthetic: FXN 3 reverse 9:69041146-69041167; SpCas9
attcctccagggaggaca

SEQ ID NO: 34597 - DNA, 25 bp, Artificial Sequence
  Synthetic: FXN 3 reverse 9:69041140-69041168; SpCas9
gctggcagattcctccagggaggac

SEQ ID NO: 34598 - DNA, 24 bp, Artificial Sequence
  Synthetic: FXN 3 reverse 9:69041141-69041168; SpCas9
ctggcagattcctccagggaggac

SEQ ID NO: 34599 - DNA, 23 bp, Artificial Sequence
  Synthetic: FXN 3 reverse 9:69041142-69041168; SpCas9
tggcagattcctccagggaggac

SEQ ID NO: 34600 - DNA, 22 bp, Artificial Sequence
  Synthetic: FXN 3 reverse 9:69041143-69041168; SpCas9
ggcagattcctccagggaggac

SEQ ID NO: 34601 - DNA, 21 bp, Artificial Sequence
  Synthetic: FXN 3 reverse 9:69041144-69041168; SpCas9
gcagattcctccagggaggac

SEQ ID NO: 34602 - DNA, 20 bp, Artificial Sequence
  Synthetic: FXN 3 reverse 9:69041145-69041168; SpCas9
cagattcctccagggaggac

SEQ ID NO: 34603 - DNA, 19 bp, Artificial Sequence
  Synthetic: FXN 3 reverse 9:69041146-69041168; SpCas9
agattcctccagggaggac

SEQ ID NO: 34604 - DNA, 18 bp, Artificial Sequence
  Synthetic: FXN 3 reverse 9:69041147-69041168; SpCas9
gattcctccagggaggac

SEQ ID NO: 34605 - DNA, 25 bp, Artificial Sequence
  Synthetic: FXN 3 reverse 9:69041141-69041169; SpCas9
ggctggcagattcctccagggagga

SEQ ID NO: 34606 - DNA, 24 bp, Artificial Sequence
  Synthetic: FXN 3 reverse 9:69041142-69041169; SpCas9
gctggcagattcctccagggagga

SEQ ID NO: 34607 - DNA, 23 bp, Artificial Sequence
  Synthetic: FXN 3 reverse 9:69041143-69041169; SpCas9
ctggcagattcctccagggagga

SEQ ID NO: 34608 - DNA, 22 bp, Artificial Sequence
  Synthetic: FXN 3 reverse 9:69041144-69041169; SpCas9
tggcagattcctccagggagga

SEQ ID NO: 34609 - DNA, 21 bp, Artificial Sequence
  Synthetic: FXN 3 reverse 9:69041145-69041169; SpCas9
ggcagattcctccagggagga

SEQ ID NO: 34610 - DNA, 20 bp, Artificial Sequence
  Synthetic: FXN 3 reverse 9:69041146-69041169; SpCas9
gcagattcctccagggagga

SEQ ID NO: 34611 - DNA, 19 bp, Artificial Sequence
  Synthetic: FXN 3 reverse 9:69041147-69041169; SpCas9
cagattcctccagggagga

SEQ ID NO: 34612 - DNA, 18 bp, Artificial Sequence
  Synthetic: FXN 3 reverse 9:69041148-69041169; SpCas9
agattcctccagggagga

SEQ ID NO: 34613 - DNA, 25 bp, Artificial Sequence
  Synthetic: FXN 3 reverse 9:69041145-69041173; SpCas9
ttcgggctggcagattcctccaggg

SEQ ID NO: 34614 - DNA, 24 bp, Artificial Sequence
  Synthetic: FXN 3 reverse 9:69041146-69041173; SpCas9
tcgggctggcagattcctccaggg

SEQ ID NO: 34615 - DNA, 23 bp, Artificial Sequence
  Synthetic: FXN 3 reverse 9:69041147-69041173; SpCas9
cgggctggcagattcctccaggg

SEQ ID NO: 34616 - DNA, 22 bp, Artificial Sequence
  Synthetic: FXN 3 reverse 9:69041148-69041173; SpCas9
gggctggcagattcctccaggg

SEQ ID NO: 34617 - DNA, 21 bp, Artificial Sequence
  Synthetic: FXN 3 reverse 9:69041149-69041173; SpCas9
ggctggcagattcctccaggg

SEQ ID NO: 34618 - DNA, 20 bp, Artificial Sequence
  Synthetic: FXN 3 reverse 9:69041150-69041173; SpCas9
gctggcagattcctccaggg

SEQ ID NO: 34619 - DNA, 19 bp, Artificial Sequence
  Synthetic: FXN 3 reverse 9:69041151-69041173; SpCas9
ctggcagattcctccaggg

SEQ ID NO: 34620 - DNA, 18 bp, Artificial Sequence
  Synthetic: FXN 3 reverse 9:69041152-69041173; SpCas9
tggcagattcctccaggg

SEQ ID NO: 34621 - DNA, 25 bp, Artificial Sequence
  Synthetic: FXN 3 reverse 9:69041146-69041174; SpCas9
attcgggctggcagattcctccagg

SEQ ID NO: 34622 - DNA, 24 bp, Artificial Sequence
  Synthetic: FXN 3 reverse 9:69041147-69041174; SpCas9
ttcgggctggcagattcctccagg

SEQ ID NO: 34623 - DNA, 23 bp, Artificial Sequence
  Synthetic: FXN 3 reverse 9:69041148-69041174; SpCas9
tcgggctggcagattcctccagg

SEQ ID NO: 34624 - DNA, 22 bp, Artificial Sequence
  Synthetic: FXN 3 reverse 9:69041149-69041174; SpCas9
cgggctggcagattcctccagg

SEQ ID NO: 34625 - DNA, 21 bp, Artificial Sequence
  Synthetic: FXN 3 reverse 9:69041150-69041174; SpCas9
gggctggcagattcctccagg

SEQ ID NO: 34626 - DNA, 20 bp, Artificial Sequence
  Synthetic: FXN 3 reverse 9:69041151-69041174; SpCas9
ggctggcagattcctccagg

SEQ ID NO: 34627 - DNA, 19 bp, Artificial Sequence
  Synthetic: FXN 3 reverse 9:69041152-69041174; SpCas9
gctggcagattcctccagg

SEQ ID NO: 34628 - DNA, 18 bp, Artificial Sequence
  Synthetic: FXN 3 reverse 9:69041153-69041174; SpCas9
ctggcagattcctccagg

SEQ ID NO: 34629 - DNA, 25 bp, Artificial Sequence
  Synthetic: FXN 3 reverse 9:69041148-69041176; SpCas9
gaattcgggctggcagattcctcca

SEQ ID NO: 34630 - DNA, 24 bp, Artificial Sequence
  Synthetic: FXN 3 reverse 9:69041149-69041176; SpCas9
aattcgggctggcagattcctcca

SEQ ID NO: 34631 - DNA, 23 bp, Artificial Sequence
  Synthetic: FXN 3 reverse 9:69041150-69041176; SpCas9
attcgggctggcagattcctcca

SEQ ID NO: 34632 - DNA, 22 bp, Artificial Sequence
  Synthetic: FXN 3 reverse 9:69041151-69041176; SpCas9
ttcgggctggcagattcctcca

SEQ ID NO: 34633 - DNA, 21 bp, Artificial Sequence
  Synthetic: FXN 3 reverse 9:69041152-69041176; SpCas9
tcgggctggcagattcctcca

SEQ ID NO: 34634 - DNA, 20 bp, Artificial Sequence
  Synthetic: FXN 3 reverse 9:69041153-69041176; SpCas9
cgggctggcagattcctcca

SEQ ID NO: 34635 - DNA, 19 bp, Artificial Sequence
  Synthetic: FXN 3 reverse 9:69041154-69041176; SpCas9
gggctggcagattcctcca

SEQ ID NO: 34636 - DNA, 18 bp, Artificial Sequence
  Synthetic: FXN 3 reverse 9:69041155-69041176; SpCas9
ggctggcagattcctcca

SEQ ID NO: 34637 - DNA, 25 bp, Artificial Sequence
  Synthetic: FXN 3 reverse 9:69041149-69041177; SpCas9
agaattcgggctggcagattcctcc

SEQ ID NO: 34638 - DNA, 24 bp, Artificial Sequence
  Synthetic: FXN 3 reverse 9:69041150-69041177; SpCas9
gaattcgggctggcagattcctcc

SEQ ID NO: 34639 - DNA, 23 bp, Artificial Sequence
  Synthetic: FXN 3 reverse 9:69041151-69041177; SpCas9
aattcgggctggcagattcctcc

SEQ ID NO: 34640 - DNA, 22 bp, Artificial Sequence
  Synthetic: FXN 3 reverse 9:69041152-69041177; SpCas9
attcgggctggcagattcctcc

SEQ ID NO: 34641 - DNA, 21 bp, Artificial Sequence
  Synthetic: FXN 3 reverse 9:69041153-69041177; SpCas9
ttcgggctggcagattcctcc

SEQ ID NO: 34642 - DNA, 20 bp, Artificial Sequence
  Synthetic: FXN 3 reverse 9:69041154-69041177; SpCas9
tcgggctggcagattcctcc

SEQ ID NO: 34643 - DNA, 19 bp, Artificial Sequence
  Synthetic: FXN 3 reverse 9:69041155-69041177; SpCas9
cgggctggcagattcctcc

SEQ ID NO: 34644 - DNA, 18 bp, Artificial Sequence
  Synthetic: FXN 3 reverse 9:69041156-69041177; SpCas9
gggctggcagattcctcc

SEQ ID NO: 34645 - DNA, 25 bp, Artificial Sequence
  Synthetic: FXN 3 reverse 9:69041150-69041178; SpCas9
cagaattcgggctggcagattcctc

SEQ ID NO: 34646 - DNA, 24 bp, Artificial Sequence
  Synthetic: FXN 3 reverse 9:69041151-69041178; SpCas9
agaattcgggctggcagattcctc

SEQ ID NO: 34647 - DNA, 23 bp, Artificial Sequence
  Synthetic: FXN 3 reverse 9:69041152-69041178; SpCas9
gaattcgggctggcagattcctc

SEQ ID NO: 34648 - DNA, 22 bp, Artificial Sequence
  Synthetic: FXN 3 reverse 9:69041153-69041178; SpCas9
aattcgggctggcagattcctc

SEQ ID NO: 34649 - DNA, 21 bp, Artificial Sequence
  Synthetic: FXN 3 reverse 9:69041154-69041178; SpCas9
attcgggctggcagattcctc

SEQ ID NO: 34650 - DNA, 20 bp, Artificial Sequence
  Synthetic: FXN 3 reverse 9:69041155-69041178; SpCas9
ttcgggctggcagattcctc

SEQ ID NO: 34651 - DNA, 19 bp, Artificial Sequence
  Synthetic: FXN 3 reverse 9:69041156-69041178; SpCas9
tcgggctggcagattcctc

SEQ ID NO: 34652 - DNA, 18 bp, Artificial Sequence
  Synthetic: FXN 3 reverse 9:69041157-69041178; SpCas9
cgggctggcagattcctc

SEQ ID NO: 34653 - DNA, 25 bp, Artificial Sequence
  Synthetic: FXN 3 reverse 9:69041160-69041188; SpCas9
gtacgatgaacagaattcgggctgg

SEQ ID NO: 34654 - DNA, 24 bp, Artificial Sequence
  Synthetic: FXN 3 reverse 9:69041161-69041188; SpCas9
tacgatgaacagaattcgggctgg

SEQ ID NO: 34655 - DNA, 23 bp, Artificial Sequence
  Synthetic: FXN 3 reverse 9:69041162-69041188; SpCas9
acgatgaacagaattcgggctgg

SEQ ID NO: 34656 - DNA, 22 bp, Artificial Sequence
  Synthetic: FXN 3 reverse 9:69041163-69041188; SpCas9
cgatgaacagaattcgggctgg

SEQ ID NO: 34657 - DNA, 21 bp, Artificial Sequence
  Synthetic: FXN 3 reverse 9:69041164-69041188; SpCas9
gatgaacagaattcgggctgg

SEQ ID NO: 34658 - DNA, 20 bp, Artificial Sequence
  Synthetic: FXN 3 reverse 9:69041165-69041188; SpCas9
atgaacagaattcgggctgg

SEQ ID NO: 34659 - DNA, 19 bp, Artificial Sequence
  Synthetic: FXN 3 reverse 9:69041166-69041188; SpCas9
tgaacagaattcgggctgg

SEQ ID NO: 34660 - DNA, 18 bp, Artificial Sequence
  Synthetic: FXN 3 reverse 9:69041167-69041188; SpCas9
gaacagaattcgggctgg

SEQ ID NO: 34661 - DNA, 25 bp, Artificial Sequence
  Synthetic: FXN 3 reverse 9:69041163-69041191; SpCas9
agggtacgatgaacagaattcgggc

SEQ ID NO: 34662 - DNA, 24 bp, Artificial Sequence
  Synthetic: FXN 3 reverse 9:69041164-69041191; SpCas9
gggtacgatgaacagaattcgggc

SEQ ID NO: 34663 - DNA, 23 bp, Artificial Sequence
  Synthetic: FXN 3 reverse 9:69041165-69041191; SpCas9
ggtacgatgaacagaattcgggc

SEQ ID NO: 34664 - DNA, 22 bp, Artificial Sequence
  Synthetic: FXN 3 reverse 9:69041166-69041191; SpCas9
gtacgatgaacagaattcgggc

SEQ ID NO: 34665 - DNA, 21 bp, Artificial Sequence
  Synthetic: FXN 3 reverse 9:69041167-69041191; SpCas9
tacgatgaacagaattcgggc

SEQ ID NO: 34666 - DNA, 20 bp, Artificial Sequence
  Synthetic: FXN 3 reverse 9:69041168-69041191; SpCas9
acgatgaacagaattcgggc

SEQ ID NO: 34667 - DNA, 19 bp, Artificial Sequence
  Synthetic: FXN 3 reverse 9:69041169-69041191; SpCas9
cgatgaacagaattcgggc

SEQ ID NO: 34668 - DNA, 18 bp, Artificial Sequence
  Synthetic: FXN 3 reverse 9:69041170-69041191; SpCas9
gatgaacagaattcgggc

SEQ ID NO: 34669 - DNA, 25 bp, Artificial Sequence
  Synthetic: FXN 3 reverse 9:69041167-69041195; SpCas9
aaggagggtacgatgaacagaattc

SEQ ID NO: 34670 - DNA, 24 bp, Artificial Sequence
  Synthetic: FXN 3 reverse 9:69041168-69041195; SpCas9
aggagggtacgatgaacagaattc

SEQ ID NO: 34671 - DNA, 23 bp, Artificial Sequence
  Synthetic: FXN 3 reverse 9:69041169-69041195; SpCas9
ggagggtacgatgaacagaattc

SEQ ID NO: 34672 - DNA, 22 bp, Artificial Sequence
  Synthetic: FXN 3 reverse 9:69041170-69041195; SpCas9
gagggtacgatgaacagaattc

SEQ ID NO: 34673 - DNA, 21 bp, Artificial Sequence
  Synthetic: FXN 3 reverse 9:69041171-69041195; SpCas9
agggtacgatgaacagaattc

SEQ ID NO: 34674 - DNA, 20 bp, Artificial Sequence
  Synthetic: FXN 3 reverse 9:69041172-69041195; SpCas9
gggtacgatgaacagaattc

SEQ ID NO: 34675 - DNA, 19 bp, Artificial Sequence
  Synthetic: FXN 3 reverse 9:69041173-69041195; SpCas9
ggtacgatgaacagaattc

SEQ ID NO: 34676 - DNA, 18 bp, Artificial Sequence
  Synthetic: FXN 3 reverse 9:69041174-69041195; SpCas9
gtacgatgaacagaattc

SEQ ID NO: 34677 - DNA, 25 bp, Artificial Sequence
  Synthetic: FXN 3 reverse 9:69041168-69041196; SpCas9
aaaggagggtacgatgaacagaatt

SEQ ID NO: 34678 - DNA, 24 bp, Artificial Sequence
  Synthetic: FXN 3 reverse 9:69041169-69041196; SpCas9
aaggagggtacgatgaacagaatt

SEQ ID NO: 34679 - DNA, 23 bp, Artificial Sequence
  Synthetic: FXN 3 reverse 9:69041170-69041196; SpCas9
aggagggtacgatgaacagaatt

SEQ ID NO: 34680 - DNA, 22 bp, Artificial Sequence
  Synthetic: FXN 3 reverse 9:69041171-69041196; SpCas9
ggagggtacgatgaacagaatt

SEQ ID NO: 34681 - DNA, 21 bp, Artificial Sequence
  Synthetic: FXN 3 reverse 9:69041172-69041196; SpCas9
gagggtacgatgaacagaatt

SEQ ID NO: 34682 - DNA, 20 bp, Artificial Sequence
  Synthetic: FXN 3 reverse 9:69041173-69041196; SpCas9
agggtacgatgaacagaatt

SEQ ID NO: 34683 - DNA, 19 bp, Artificial Sequence
  Synthetic: FXN 3 reverse 9:69041174-69041196; SpCas9
gggtacgatgaacagaatt

SEQ ID NO: 34684 - DNA, 18 bp, Artificial Sequence
  Synthetic: FXN 3 reverse 9:69041175-69041196; SpCas9
ggtacgatgaacagaatt

SEQ ID NO: 34685 - DNA, 25 bp, Artificial Sequence
  Synthetic: FXN 3 forward 9:69041174-69041202; SpCas9
tctgttcatcgtaccctccttttct

SEQ ID NO: 34686 - DNA, 24 bp, Artificial Sequence
  Synthetic: FXN 3 forward 9:69041175-69041202; SpCas9
ctgttcatcgtaccctccttttct

SEQ ID NO: 34687 - DNA, 23 bp, Artificial Sequence
  Synthetic: FXN 3 forward 9:69041176-69041202; SpCas9
tgttcatcgtaccctccttttct

SEQ ID NO: 34688 - DNA, 22 bp, Artificial Sequence
  Synthetic: FXN 3 forward 9:69041177-69041202; SpCas9
gttcatcgtaccctccttttct

SEQ ID NO: 34689 - DNA, 21 bp, Artificial Sequence
  Synthetic: FXN 3 forward 9:69041178-69041202; SpCas9
ttcatcgtaccctccttttct

SEQ ID NO: 34690 - DNA, 20 bp, Artificial Sequence
  Synthetic: FXN 3 forward 9:69041179-69041202; SpCas9
tcatcgtaccctccttttct

SEQ ID NO: 34691 - DNA, 19 bp, Artificial Sequence
  Synthetic: FXN 3 forward 9:69041180-69041202; SpCas9
catcgtaccctccttttct

SEQ ID NO: 34692 - DNA, 18 bp, Artificial Sequence
  Synthetic: FXN 3 forward 9:69041181-69041202; SpCas9
atcgtaccctccttttct

SEQ ID NO: 34693 - DNA, 25 bp, Artificial Sequence
  Synthetic: FXN 3 reverse 9:69041175-69041203; SpCas9
tctaagaaaaggagggtacgatgaa

SEQ ID NO: 34694 - DNA, 24 bp, Artificial Sequence
  Synthetic: FXN 3 reverse 9:69041176-69041203; SpCas9
ctaagaaaaggagggtacgatgaa

SEQ ID NO: 34695 - DNA, 23 bp, Artificial Sequence
  Synthetic: FXN 3 reverse 9:69041177-69041203; SpCas9
taagaaaaggagggtacgatgaa

SEQ ID NO: 34696 - DNA, 22 bp, Artificial Sequence
  Synthetic: FXN 3 reverse 9:69041178-69041203; SpCas9
aagaaaaggagggtacgatgaa

SEQ ID NO: 34697 - DNA, 21 bp, Artificial Sequence
  Synthetic: FXN 3 reverse 9:69041179-69041203; SpCas9
agaaaaggagggtacgatgaa

SEQ ID NO: 34698 - DNA, 20 bp, Artificial Sequence
  Synthetic: FXN 3 reverse 9:69041180-69041203; SpCas9
gaaaaggagggtacgatgaa

SEQ ID NO: 34699 - DNA, 19 bp, Artificial Sequence
  Synthetic: FXN 3 reverse 9:69041181-69041203; SpCas9
aaaaggagggtacgatgaa

SEQ ID NO: 34700 - DNA, 18 bp, Artificial Sequence
  Synthetic: FXN 3 reverse 9:69041182-69041203; SpCas9
aaaggagggtacgatgaa

SEQ ID NO: 34701 - DNA, 25 bp, Artificial Sequence
  Synthetic: FXN 3 forward 9:69041176-69041204; SpCas9
tgttcatcgtaccctccttttctta

SEQ ID NO: 34702 - DNA, 24 bp, Artificial Sequence
  Synthetic: FXN 3 forward 9:69041177-69041204; SpCas9
gttcatcgtaccctccttttctta

SEQ ID NO: 34703 - DNA, 23 bp, Artificial Sequence
  Synthetic: FXN 3 forward 9:69041178-69041204; SpCas9
ttcatcgtaccctccttttctta

SEQ ID NO: 34704 - DNA, 22 bp, Artificial Sequence
  Synthetic: FXN 3 forward 9:69041179-69041204; SpCas9
tcatcgtaccctccttttctta

SEQ ID NO: 34705 - DNA, 21 bp, Artificial Sequence
  Synthetic: FXN 3 forward 9:69041180-69041204; SpCas9
catcgtaccctccttttctta

SEQ ID NO: 34706 - DNA, 20 bp, Artificial Sequence
  Synthetic: FXN 3 forward 9:69041181-69041204; SpCas9
atcgtaccctccttttctta

SEQ ID NO: 34707 - DNA, 19 bp, Artificial Sequence
  Synthetic: FXN 3 forward 9:69041182-69041204; SpCas9
tcgtaccctccttttctta

SEQ ID NO: 34708 - DNA, 18 bp, Artificial Sequence
  Synthetic: FXN 3 forward 9:69041183-69041204; SpCas9
cgtaccctccttttctta

SEQ ID NO: 34709 - DNA, 25 bp, Artificial Sequence
  Synthetic: FXN 3 reverse 9:69041187-69041215; SpCas9
aggaggtcaaactctaagaaaagga

SEQ ID NO: 34710 - DNA, 24 bp, Artificial Sequence
  Synthetic: FXN 3 reverse 9:69041188-69041215; SpCas9
ggaggtcaaactctaagaaaagga

SEQ ID NO: 34711 - DNA, 23 bp, Artificial Sequence
  Synthetic: FXN 3 reverse 9:69041189-69041215; SpCas9
gaggtcaaactctaagaaaagga

SEQ ID NO: 34712 - DNA, 22 bp, Artificial Sequence
  Synthetic: FXN 3 reverse 9:69041190-69041215; SpCas9
aggtcaaactctaagaaaagga

SEQ ID NO: 34713 - DNA, 21 bp, Artificial Sequence
  Synthetic: FXN 3 reverse 9:69041191-69041215; SpCas9
ggtcaaactctaagaaaagga

SEQ ID NO: 34714 - DNA, 20 bp, Artificial Sequence
  Synthetic: FXN 3 reverse 9:69041192-69041215; SpCas9
gtcaaactctaagaaaagga

SEQ ID NO: 34715 - DNA, 19 bp, Artificial Sequence
  Synthetic: FXN 3 reverse 9:69041193-69041215; SpCas9
tcaaactctaagaaaagga

SEQ ID NO: 34716 - DNA, 18 bp, Artificial Sequence
  Synthetic: FXN 3 reverse 9:69041194-69041215; SpCas9
caaactctaagaaaagga

SEQ ID NO: 34717 - DNA, 25 bp, Artificial Sequence
  Synthetic: FXN 3 reverse 9:69041188-69041216; SpCas9
gaggaggtcaaactctaagaaaagg

SEQ ID NO: 34718 - DNA, 24 bp, Artificial Sequence
  Synthetic: FXN 3 reverse 9:69041189-69041216; SpCas9
aggaggtcaaactctaagaaaagg

SEQ ID NO: 34719 - DNA, 23 bp, Artificial Sequence
  Synthetic: FXN 3 reverse 9:69041190-69041216; SpCas9
ggaggtcaaactctaagaaaagg

SEQ ID NO: 34720 - DNA, 22 bp, Artificial Sequence
  Synthetic: FXN 3 reverse 9:69041191-69041216; SpCas9
gaggtcaaactctaagaaaagg

SEQ ID NO: 34721 - DNA, 21 bp, Artificial Sequence
  Synthetic: FXN 3 reverse 9:69041192-69041216; SpCas9
aggtcaaactctaagaaaagg

SEQ ID NO: 34722 - DNA, 20 bp, Artificial Sequence
  Synthetic: FXN 3 reverse 9:69041193-69041216; SpCas9
ggtcaaactctaagaaaagg

SEQ ID NO: 34723 - DNA, 19 bp, Artificial Sequence
  Synthetic: FXN 3 reverse 9:69041194-69041216; SpCas9
gtcaaactctaagaaaagg

SEQ ID NO: 34724 - DNA, 18 bp, Artificial Sequence
  Synthetic: FXN 3 reverse 9:69041195-69041216; SpCas9
tcaaactctaagaaaagg

SEQ ID NO: 34725 - DNA, 25 bp, Artificial Sequence
  Synthetic: FXN 3 reverse 9:69041189-69041217; SpCas9
agaggaggtcaaactctaagaaaag

SEQ ID NO: 34726 - DNA, 24 bp, Artificial Sequence
  Synthetic: FXN 3 reverse 9:69041190-69041217; SpCas9
gaggaggtcaaactctaagaaaag

SEQ ID NO: 34727 - DNA, 23 bp, Artificial Sequence
  Synthetic: FXN 3 reverse 9:69041191-69041217; SpCas9
aggaggtcaaactctaagaaaag

SEQ ID NO: 34728 - DNA, 22 bp, Artificial Sequence
  Synthetic: FXN 3 reverse 9:69041192-69041217; SpCas9
ggaggtcaaactctaagaaaag

SEQ ID NO: 34729 - DNA, 21 bp, Artificial Sequence
  Synthetic: FXN 3 reverse 9:69041193-69041217; SpCas9
gaggtcaaactctaagaaaag

SEQ ID NO: 34730 - DNA, 20 bp, Artificial Sequence
  Synthetic: FXN 3 reverse 9:69041194-69041217; SpCas9
aggtcaaactctaagaaaag

SEQ ID NO: 34731 - DNA, 19 bp, Artificial Sequence
  Synthetic: FXN 3 reverse 9:69041195-69041217; SpCas9
ggtcaaactctaagaaaag

SEQ ID NO: 34732 - DNA, 18 bp, Artificial Sequence
  Synthetic: FXN 3 reverse 9:69041196-69041217; SpCas9
gtcaaactctaagaaaag

SEQ ID NO: 34733 - DNA, 25 bp, Artificial Sequence
  Synthetic: FXN 3 reverse 9:69041191-69041219; SpCas9
acagaggaggtcaaactctaagaaa

SEQ ID NO: 34734 - DNA, 24 bp, Artificial Sequence
  Synthetic: FXN 3 reverse 9:69041192-69041219; SpCas9
cagaggaggtcaaactctaagaaa

SEQ ID NO: 34735 - DNA, 23 bp, Artificial Sequence
  Synthetic: FXN 3 reverse 9:69041193-69041219; SpCas9
agaggaggtcaaactctaagaaa

SEQ ID NO: 34736 - DNA, 22 bp, Artificial Sequence
  Synthetic: FXN 3 reverse 9:69041194-69041219; SpCas9
gaggaggtcaaactctaagaaa

SEQ ID NO: 34737 - DNA, 21 bp, Artificial Sequence
  Synthetic: FXN 3 reverse 9:69041195-69041219; SpCas9
aggaggtcaaactctaagaaa

SEQ ID NO: 34738 - DNA, 20 bp, Artificial Sequence
  Synthetic: FXN 3 reverse 9:69041196-69041219; SpCas9
ggaggtcaaactctaagaaa

SEQ ID NO: 34739 - DNA, 19 bp, Artificial Sequence
  Synthetic: FXN 3 reverse 9:69041197-69041219; SpCas9
gaggtcaaactctaagaaa

SEQ ID NO: 34740 - DNA, 18 bp, Artificial Sequence
  Synthetic: FXN 3 reverse 9:69041198-69041219; SpCas9
aggtcaaactctaagaaa

SEQ ID NO: 34741 - DNA, 25 bp, Artificial Sequence
  Synthetic: FXN 3 reverse 9:69041192-69041220; SpCas9
tacagaggaggtcaaactctaagaa

SEQ ID NO: 34742 - DNA, 24 bp, Artificial Sequence
  Synthetic: FXN 3 reverse 9:69041193-69041220; SpCas9
acagaggaggtcaaactctaagaa

SEQ ID NO: 34743 - DNA, 23 bp, Artificial Sequence
  Synthetic: FXN 3 reverse 9:69041194-69041220; SpCas9
cagaggaggtcaaactctaagaa

SEQ ID NO: 34744 - DNA, 22 bp, Artificial Sequence
  Synthetic: FXN 3 reverse 9:69041195-69041220; SpCas9
agaggaggtcaaactctaagaa

SEQ ID NO: 34745 - DNA, 21 bp, Artificial Sequence
  Synthetic: FXN 3 reverse 9:69041196-69041220; SpCas9
gaggaggtcaaactctaagaa

SEQ ID NO: 34746 - DNA, 20 bp, Artificial Sequence
  Synthetic: FXN 3 reverse 9:69041197-69041220; SpCas9
aggaggtcaaactctaagaa

SEQ ID NO: 34747 - DNA, 19 bp, Artificial Sequence
  Synthetic: FXN 3 reverse 9:69041198-69041220; SpCas9
ggaggtcaaactctaagaa

SEQ ID NO: 34748 - DNA, 18 bp, Artificial Sequence
  Synthetic: FXN 3 reverse 9:69041199-69041220; SpCas9
gaggtcaaactctaagaa

SEQ ID NO: 34749 - DNA, 25 bp, Artificial Sequence
  Synthetic: FXN 3 reverse 9:69041197-69041225; SpCas9
ggagatacagaggaggtcaaactct

SEQ ID NO: 34750 - DNA, 24 bp, Artificial Sequence
  Synthetic: FXN 3 reverse 9:69041198-69041225; SpCas9
gagatacagaggaggtcaaactct

SEQ ID NO: 34751 - DNA, 23 bp, Artificial Sequence
  Synthetic: FXN 3 reverse 9:69041199-69041225; SpCas9
agatacagaggaggtcaaactct

SEQ ID NO: 34752 - DNA, 22 bp, Artificial Sequence
  Synthetic: FXN 3 reverse 9:69041200-69041225; SpCas9
gatacagaggaggtcaaactct

SEQ ID NO: 34753 - DNA, 21 bp, Artificial Sequence
  Synthetic: FXN 3 reverse 9:69041201-69041225; SpCas9
atacagaggaggtcaaactct

SEQ ID NO: 34754 - DNA, 20 bp, Artificial Sequence
  Synthetic: FXN 3 reverse 9:69041202-69041225; SpCas9
tacagaggaggtcaaactct

SEQ ID NO: 34755 - DNA, 19 bp, Artificial Sequence
  Synthetic: FXN 3 reverse 9:69041203-69041225; SpCas9
acagaggaggtcaaactct

SEQ ID NO: 34756 - DNA, 18 bp, Artificial Sequence
  Synthetic: FXN 3 reverse 9:69041204-69041225; SpCas9
cagaggaggtcaaactct

SEQ ID NO: 34757 - DNA, 25 bp, Artificial Sequence
  Synthetic: FXN 3 reverse 9:69041209-69041237; SpCas9
acatggattgggggagatacagagg

SEQ ID NO: 34758 - DNA, 24 bp, Artificial Sequence
  Synthetic: FXN 3 reverse 9:69041210-69041237; SpCas9
catggattgggggagatacagagg

SEQ ID NO: 34759 - DNA, 23 bp, Artificial Sequence
  Synthetic: FXN 3 reverse 9:69041211-69041237; SpCas9
atggattgggggagatacagagg

SEQ ID NO: 34760 - DNA, 22 bp, Artificial Sequence
  Synthetic: FXN 3 reverse 9:69041212-69041237; SpCas9
tggattgggggagatacagagg

SEQ ID NO: 34761 - DNA, 21 bp, Artificial Sequence
  Synthetic: FXN 3 reverse 9:69041213-69041237; SpCas9
ggattgggggagatacagagg

SEQ ID NO: 34762 - DNA, 20 bp, Artificial Sequence
  Synthetic: FXN 3 reverse 9:69041214-69041237; SpCas9
gattgggggagatacagagg

SEQ ID NO: 34763 - DNA, 19 bp, Artificial Sequence
  Synthetic: FXN 3 reverse 9:69041215-69041237; SpCas9
attgggggagatacagagg

SEQ ID NO: 34764 - DNA, 18 bp, Artificial Sequence
  Synthetic: FXN 3 reverse 9:69041216-69041237; SpCas9
ttgggggagatacagagg

SEQ ID NO: 34765 - DNA, 25 bp, Artificial Sequence
  Synthetic: FXN 3 reverse 9:69041210-69041238; SpCas9
tacatggattgggggagatacagag

SEQ ID NO: 34766 - DNA, 24 bp, Artificial Sequence
  Synthetic: FXN 3 reverse 9:69041211-69041238; SpCas9
acatggattgggggagatacagag

SEQ ID NO: 34767 - DNA, 23 bp, Artificial Sequence
  Synthetic: FXN 3 reverse 9:69041212-69041238; SpCas9
catggattgggggagatacagag

SEQ ID NO: 34768 - DNA, 22 bp, Artificial Sequence
  Synthetic: FXN 3 reverse 9:69041213-69041238; SpCas9
atggattgggggagatacagag

SEQ ID NO: 34769 - DNA, 21 bp, Artificial Sequence
  Synthetic: FXN 3 reverse 9:69041214-69041238; SpCas9
tggattgggggagatacagag

SEQ ID NO: 34770 - DNA, 20 bp, Artificial Sequence
  Synthetic: FXN 3 reverse 9:69041215-69041238; SpCas9
ggattgggggagatacagag

SEQ ID NO: 34771 - DNA, 19 bp, Artificial Sequence
  Synthetic: FXN 3 reverse 9:69041216-69041238; SpCas9
gattgggggagatacagag

SEQ ID NO: 34772 - DNA, 18 bp, Artificial Sequence
  Synthetic: FXN 3 reverse 9:69041217-69041238; SpCas9
attgggggagatacagag

SEQ ID NO: 34773 - DNA, 25 bp, Artificial Sequence
  Synthetic: FXN 3 reverse 9:69041212-69041240; SpCas9
aatacatggattgggggagatacag

SEQ ID NO: 34774 - DNA, 24 bp, Artificial Sequence
  Synthetic: FXN 3 reverse 9:69041213-69041240; SpCas9
atacatggattgggggagatacag

SEQ ID NO: 34775 - DNA, 23 bp, Artificial Sequence
  Synthetic: FXN 3 reverse 9:69041214-69041240; SpCas9
tacatggattgggggagatacag

SEQ ID NO: 34776 - DNA, 22 bp, Artificial Sequence
  Synthetic: FXN 3 reverse 9:69041215-69041240; SpCas9
acatggattgggggagatacag

SEQ ID NO: 34777 - DNA, 21 bp, Artificial Sequence
  Synthetic: FXN 3 reverse 9:69041216-69041240; SpCas9
catggattgggggagatacag

SEQ ID NO: 34778 - DNA, 20 bp, Artificial Sequence
  Synthetic: FXN 3 reverse 9:69041217-69041240; SpCas9
atggattgggggagatacag

SEQ ID NO: 34779 - DNA, 19 bp, Artificial Sequence
  Synthetic: FXN 3 reverse 9:69041218-69041240; SpCas9
tggattgggggagatacag

SEQ ID NO: 34780 - DNA, 18 bp, Artificial Sequence
  Synthetic: FXN 3 reverse 9:69041219-69041240; SpCas9
ggattgggggagatacag

SEQ ID NO: 34781 - DNA, 25 bp, Artificial Sequence
  Synthetic: FXN 3 reverse 9:69041213-69041241; SpCas9
caatacatggattgggggagataca

SEQ ID NO: 34782 - DNA, 24 bp, Artificial Sequence
  Synthetic: FXN 3 reverse 9:69041214-69041241; SpCas9
aatacatggattgggggagataca

SEQ ID NO: 34783 - DNA, 23 bp, Artificial Sequence
  Synthetic: FXN 3 reverse 9:69041215-69041241; SpCas9
atacatggattgggggagataca

SEQ ID NO: 34784 - DNA, 22 bp, Artificial Sequence
  Synthetic: FXN 3 reverse 9:69041216-69041241; SpCas9
tacatggattgggggagataca

SEQ ID NO: 34785 - DNA, 21 bp, Artificial Sequence
  Synthetic: FXN 3 reverse 9:69041217-69041241; SpCas9
acatggattgggggagataca

SEQ ID NO: 34786 - DNA, 20 bp, Artificial Sequence
  Synthetic: FXN 3 reverse 9:69041218-69041241; SpCas9
catggattgggggagataca

SEQ ID NO: 34787 - DNA, 19 bp, Artificial Sequence
  Synthetic: FXN 3 reverse 9:69041219-69041241; SpCas9
atggattgggggagataca

SEQ ID NO: 34788 - DNA, 18 bp, Artificial Sequence
  Synthetic: FXN 3 reverse 9:69041220-69041241; SpCas9
tggattgggggagataca

SEQ ID NO: 34789 - DNA, 25 bp, Artificial Sequence
  Synthetic: FXN 3 reverse 9:69041215-69041243; SpCas9
agcaatacatggattgggggagata

SEQ ID NO: 34790 - DNA, 24 bp, Artificial Sequence
  Synthetic: FXN 3 reverse 9:69041216-69041243; SpCas9
gcaatacatggattgggggagata

SEQ ID NO: 34791 - DNA, 23 bp, Artificial Sequence
  Synthetic: FXN 3 reverse 9:69041217-69041243; SpCas9
caatacatggattgggggagata

SEQ ID NO: 34792 - DNA, 22 bp, Artificial Sequence
  Synthetic: FXN 3 reverse 9:69041218-69041243; SpCas9
aatacatggattgggggagata

SEQ ID NO: 34793 - DNA, 21 bp, Artificial Sequence
  Synthetic: FXN 3 reverse 9:69041219-69041243; SpCas9
atacatggattgggggagata

SEQ ID NO: 34794 - DNA, 20 bp, Artificial Sequence
  Synthetic: FXN 3 reverse 9:69041220-69041243; SpCas9
tacatggattgggggagata

SEQ ID NO: 34795 - DNA, 19 bp, Artificial Sequence
  Synthetic: FXN 3 reverse 9:69041221-69041243; SpCas9
acatggattgggggagata

SEQ ID NO: 34796 - DNA, 18 bp, Artificial Sequence
  Synthetic: FXN 3 reverse 9:69041222-69041243; SpCas9
catggattgggggagata

SEQ ID NO: 34797 - DNA, 25 bp, Artificial Sequence
  Synthetic: FXN 3 reverse 9:69041221-69041249; SpCas9
tatataagcaatacatggattgggg

SEQ ID NO: 34798 - DNA, 24 bp, Artificial Sequence
  Synthetic: FXN 3 reverse 9:69041222-69041249; SpCas9
atataagcaatacatggattgggg

SEQ ID NO: 34799 - DNA, 23 bp, Artificial Sequence
  Synthetic: FXN 3 reverse 9:69041223-69041249; SpCas9
tataagcaatacatggattgggg

SEQ ID NO: 34800 - DNA, 22 bp, Artificial Sequence
  Synthetic: FXN 3 reverse 9:69041224-69041249; SpCas9
ataagcaatacatggattgggg

SEQ ID NO: 34801 - DNA, 21 bp, Artificial Sequence
  Synthetic: FXN 3 reverse 9:69041225-69041249; SpCas9
taagcaatacatggattgggg

SEQ ID NO: 34802 - DNA, 20 bp, Artificial Sequence
  Synthetic: FXN 3 reverse 9:69041226-69041249; SpCas9
aagcaatacatggattgggg

SEQ ID NO: 34803 - DNA, 19 bp, Artificial Sequence
  Synthetic: FXN 3 reverse 9:69041227-69041249; SpCas9
agcaatacatggattgggg

SEQ ID NO: 34804 - DNA, 18 bp, Artificial Sequence
  Synthetic: FXN 3 reverse 9:69041228-69041249; SpCas9
gcaatacatggattgggg

SEQ ID NO: 34805 - DNA, 25 bp, Artificial Sequence
  Synthetic: FXN 3 reverse 9:69041223-69041251; SpCas9
tgtatataagcaatacatggattgg

SEQ ID NO: 34806 - DNA, 24 bp, Artificial Sequence
  Synthetic: FXN 3 reverse 9:69041224-69041251; SpCas9
gtatataagcaatacatggattgg

SEQ ID NO: 34807 - DNA, 23 bp, Artificial Sequence
  Synthetic: FXN 3 reverse 9:69041225-69041251; SpCas9
tatataagcaatacatggattgg

SEQ ID NO: 34808 - DNA, 22 bp, Artificial Sequence
  Synthetic: FXN 3 reverse 9:69041226-69041251; SpCas9
atataagcaatacatggattgg

SEQ ID NO: 34809 - DNA, 21 bp, Artificial Sequence
  Synthetic: FXN 3 reverse 9:69041227-69041251; SpCas9
tataagcaatacatggattgg

SEQ ID NO: 34810 - DNA, 20 bp, Artificial Sequence
  Synthetic: FXN 3 reverse 9:69041228-69041251; SpCas9
ataagcaatacatggattgg

SEQ ID NO: 34811 - DNA, 19 bp, Artificial Sequence
  Synthetic: FXN 3 reverse 9:69041229-69041251; SpCas9
taagcaatacatggattgg

SEQ ID NO: 34812 - DNA, 18 bp, Artificial Sequence
  Synthetic: FXN 3 reverse 9:69041230-69041251; SpCas9
aagcaatacatggattgg

SEQ ID NO: 34813 - DNA, 25 bp, Artificial Sequence
  Synthetic: FXN 3 reverse 9:69041224-69041252; SpCas9
ttgtatataagcaatacatggattg

SEQ ID NO: 34814 - DNA, 24 bp, Artificial Sequence
  Synthetic: FXN 3 reverse 9:69041225-69041252; SpCas9
tgtatataagcaatacatggattg

SEQ ID NO: 34815 - DNA, 23 bp, Artificial Sequence
  Synthetic: FXN 3 reverse 9:69041226-69041252; SpCas9
gtatataagcaatacatggattg

SEQ ID NO: 34816 - DNA, 22 bp, Artificial Sequence
  Synthetic: FXN 3 reverse 9:69041227-69041252; SpCas9
tatataagcaatacatggattg

SEQ ID NO: 34817 - DNA, 21 bp, Artificial Sequence
  Synthetic: FXN 3 reverse 9:69041228-69041252; SpCas9
atataagcaatacatggattg

SEQ ID NO: 34818 - DNA, 20 bp, Artificial Sequence
  Synthetic: FXN 3 reverse 9:69041229-69041252; SpCas9
tataagcaatacatggattg

SEQ ID NO: 34819 - DNA, 19 bp, Artificial Sequence
  Synthetic: FXN 3 reverse 9:69041230-69041252; SpCas9
ataagcaatacatggattg

SEQ ID NO: 34820 - DNA, 18 bp, Artificial Sequence
  Synthetic: FXN 3 reverse 9:69041231-69041252; SpCas9
taagcaatacatggattg

SEQ ID NO: 34821 - DNA, 25 bp, Artificial Sequence
  Synthetic: FXN 3 forward 9:69041225-69041253; SpCas9
cccaatccatgtattgcttatatac

SEQ ID NO: 34822 - DNA, 24 bp, Artificial Sequence
  Synthetic: FXN 3 forward 9:69041226-69041253; SpCas9
ccaatccatgtattgcttatatac

SEQ ID NO: 34823 - DNA, 23 bp, Artificial Sequence
  Synthetic: FXN 3 forward 9:69041227-69041253; SpCas9
caatccatgtattgcttatatac

SEQ ID NO: 34824 - DNA, 22 bp, Artificial Sequence
  Synthetic: FXN 3 forward 9:69041228-69041253; SpCas9
aatccatgtattgcttatatac

SEQ ID NO: 34825 - DNA, 21 bp, Artificial Sequence
  Synthetic: FXN 3 forward 9:69041229-69041253; SpCas9
atccatgtattgcttatatac

SEQ ID NO: 34826 - DNA, 20 bp, Artificial Sequence
  Synthetic: FXN 3 forward 9:69041230-69041253; SpCas9
tccatgtattgcttatatac

SEQ ID NO: 34827 - DNA, 19 bp, Artificial Sequence
  Synthetic: FXN 3 forward 9:69041231-69041253; SpCas9
ccatgtattgcttatatac

SEQ ID NO: 34828 - DNA, 18 bp, Artificial Sequence
  Synthetic: FXN 3 forward 9:69041232-69041253; SpCas9
catgtattgcttatatac

SEQ ID NO: 34829 - DNA, 25 bp, Artificial Sequence
  Synthetic: FXN 3 reverse 9:69041225-69041253; SpCas9
cttgtatataagcaatacatggatt

SEQ ID NO: 34830 - DNA, 24 bp, Artificial Sequence
  Synthetic: FXN 3 reverse 9:69041226-69041253; SpCas9
ttgtatataagcaatacatggatt

SEQ ID NO: 34831 - DNA, 23 bp, Artificial Sequence
  Synthetic: FXN 3 reverse 9:69041227-69041253; SpCas9
tgtatataagcaatacatggatt

SEQ ID NO: 34832 - DNA, 22 bp, Artificial Sequence
  Synthetic: FXN 3 reverse 9:69041228-69041253; SpCas9
gtatataagcaatacatggatt

SEQ ID NO: 34833 - DNA, 21 bp, Artificial Sequence
  Synthetic: FXN 3 reverse 9:69041229-69041253; SpCas9
tatataagcaatacatggatt

SEQ ID NO: 34834 - DNA, 20 bp, Artificial Sequence
  Synthetic: FXN 3 reverse 9:69041230-69041253; SpCas9
atataagcaatacatggatt

SEQ ID NO: 34835 - DNA, 19 bp, Artificial Sequence
  Synthetic: FXN 3 reverse 9:69041231-69041253; SpCas9
tataagcaatacatggatt

SEQ ID NO: 34836 - DNA, 18 bp, Artificial Sequence
  Synthetic: FXN 3 reverse 9:69041232-69041253; SpCas9
ataagcaatacatggatt

SEQ ID NO: 34837 - DNA, 25 bp, Artificial Sequence
  Synthetic: FXN 3 forward 9:69041226-69041254; SpCas9
ccaatccatgtattgcttatataca

SEQ ID NO: 34838 - DNA, 24 bp, Artificial Sequence
  Synthetic: FXN 3 forward 9:69041227-69041254; SpCas9
caatccatgtattgcttatataca

SEQ ID NO: 34839 - DNA, 23 bp, Artificial Sequence
  Synthetic: FXN 3 forward 9:69041228-69041254; SpCas9
aatccatgtattgcttatataca

SEQ ID NO: 34840 - DNA, 22 bp, Artificial Sequence
  Synthetic: FXN 3 forward 9:69041229-69041254; SpCas9
atccatgtattgcttatataca

SEQ ID NO: 34841 - DNA, 21 bp, Artificial Sequence
  Synthetic: FXN 3 forward 9:69041230-69041254; SpCas9
tccatgtattgcttatataca

SEQ ID NO: 34842 - DNA, 20 bp, Artificial Sequence
  Synthetic: FXN 3 forward 9:69041231-69041254; SpCas9
ccatgtattgcttatataca

SEQ ID NO: 34843 - DNA, 19 bp, Artificial Sequence
  Synthetic: FXN 3 forward 9:69041232-69041254; SpCas9
catgtattgcttatataca

SEQ ID NO: 34844 - DNA, 18 bp, Artificial Sequence
  Synthetic: FXN 3 forward 9:69041233-69041254; SpCas9
atgtattgcttatataca

SEQ ID NO: 34845 - DNA, 25 bp, Artificial Sequence
  Synthetic: FXN 3 reverse 9:69041226-69041254; SpCas9
ccttgtatataagcaatacatggat

SEQ ID NO: 34846 - DNA, 24 bp, Artificial Sequence
  Synthetic: FXN 3 reverse 9:69041227-69041254; SpCas9
cttgtatataagcaatacatggat

SEQ ID NO: 34847 - DNA, 23 bp, Artificial Sequence
  Synthetic: FXN 3 reverse 9:69041228-69041254; SpCas9
ttgtatataagcaatacatggat

SEQ ID NO: 34848 - DNA, 22 bp, Artificial Sequence
  Synthetic: FXN 3 reverse 9:69041229-69041254; SpCas9
tgtatataagcaatacatggat

SEQ ID NO: 34849 - DNA, 21 bp, Artificial Sequence
  Synthetic: FXN 3 reverse 9:69041230-69041254; SpCas9
gtatataagcaatacatggat

SEQ ID NO: 34850 - DNA, 20 bp, Artificial Sequence
  Synthetic: FXN 3 reverse 9:69041231-69041254; SpCas9
tatataagcaatacatggat

SEQ ID NO: 34851 - DNA, 19 bp, Artificial Sequence
  Synthetic: FXN 3 reverse 9:69041232-69041254; SpCas9
atataagcaatacatggat

SEQ ID NO: 34852 - DNA, 18 bp, Artificial Sequence
  Synthetic: FXN 3 reverse 9:69041233-69041254; SpCas9
tataagcaatacatggat

SEQ ID NO: 34853 - DNA, 25 bp, Artificial Sequence
  Synthetic: FXN 3 reverse 9:69041231-69041259; SpCas9
gaataccttgtatataagcaataca

SEQ ID NO: 34854 - DNA, 24 bp, Artificial Sequence
  Synthetic: FXN 3 reverse 9:69041232-69041259; SpCas9
aataccttgtatataagcaataca

SEQ ID NO: 34855 - DNA, 23 bp, Artificial Sequence
  Synthetic: FXN 3 reverse 9:69041233-69041259; SpCas9
ataccttgtatataagcaataca

SEQ ID NO: 34856 - DNA, 22 bp, Artificial Sequence
  Synthetic: FXN 3 reverse 9:69041234-69041259; SpCas9
taccttgtatataagcaataca

SEQ ID NO: 34857 - DNA, 21 bp, Artificial Sequence
  Synthetic: FXN 3 reverse 9:69041235-69041259; SpCas9
accttgtatataagcaataca

SEQ ID NO: 34858 - DNA, 20 bp, Artificial Sequence
  Synthetic: FXN 3 reverse 9:69041236-69041259; SpCas9
ccttgtatataagcaataca

SEQ ID NO: 34859 - DNA, 19 bp, Artificial Sequence
  Synthetic: FXN 3 reverse 9:69041237-69041259; SpCas9
cttgtatataagcaataca

SEQ ID NO: 34860 - DNA, 18 bp, Artificial Sequence
  Synthetic: FXN 3 reverse 9:69041238-69041259; SpCas9
ttgtatataagcaataca

SEQ ID NO: 34861 - DNA, 25 bp, Artificial Sequence
  Synthetic: FXN 3 reverse 9:69041241-69041269; SpCas9
agatacagcagaataccttgtatat

SEQ ID NO: 34862 - DNA, 24 bp, Artificial Sequence
  Synthetic: FXN 3 reverse 9:69041242-69041269; SpCas9
gatacagcagaataccttgtatat

SEQ ID NO: 34863 - DNA, 23 bp, Artificial Sequence
  Synthetic: FXN 3 reverse 9:69041243-69041269; SpCas9
atacagcagaataccttgtatat

SEQ ID NO: 34864 - DNA, 22 bp, Artificial Sequence
  Synthetic: FXN 3 reverse 9:69041244-69041269; SpCas9
tacagcagaataccttgtatat

SEQ ID NO: 34865 - DNA, 21 bp, Artificial Sequence
  Synthetic: FXN 3 reverse 9:69041245-69041269; SpCas9
acagcagaataccttgtatat

SEQ ID NO: 34866 - DNA, 20 bp, Artificial Sequence
  Synthetic: FXN 3 reverse 9:69041246-69041269; SpCas9
cagcagaataccttgtatat

SEQ ID NO: 34867 - DNA, 19 bp, Artificial Sequence
  Synthetic: FXN 3 reverse 9:69041247-69041269; SpCas9
agcagaataccttgtatat

SEQ ID NO: 34868 - DNA, 18 bp, Artificial Sequence
  Synthetic: FXN 3 reverse 9:69041248-69041269; SpCas9
gcagaataccttgtatat

SEQ ID NO: 34869 - DNA, 25 bp, Artificial Sequence
  Synthetic: FXN 3 forward 9:69041253-69041281; SpCas9
gtattctgctgtatctgttctgcta

SEQ ID NO: 34870 - DNA, 24 bp, Artificial Sequence
  Synthetic: FXN 3 forward 9:69041254-69041281; SpCas9
tattctgctgtatctgttctgcta

SEQ ID NO: 34871 - DNA, 23 bp, Artificial Sequence
  Synthetic: FXN 3 forward 9:69041255-69041281; SpCas9
attctgctgtatctgttctgcta

SEQ ID NO: 34872 - DNA, 22 bp, Artificial Sequence
  Synthetic: FXN 3 forward 9:69041256-69041281; SpCas9
ttctgctgtatctgttctgcta

SEQ ID NO: 34873 - DNA, 21 bp, Artificial Sequence
  Synthetic: FXN 3 forward 9:69041257-69041281; SpCas9
tctgctgtatctgttctgcta

SEQ ID NO: 34874 - DNA, 20 bp, Artificial Sequence
  Synthetic: FXN 3 forward 9:69041258-69041281; SpCas9
ctgctgtatctgttctgcta

SEQ ID NO: 34875 - DNA, 19 bp, Artificial Sequence
  Synthetic: FXN 3 forward 9:69041259-69041281; SpCas9
tgctgtatctgttctgcta

SEQ ID NO: 34876 - DNA, 18 bp, Artificial Sequence
  Synthetic: FXN 3 forward 9:69041260-69041281; SpCas9
gctgtatctgttctgcta

SEQ ID NO: 34877 - DNA, 25 bp, Artificial Sequence
  Synthetic: FXN 3 reverse 9:69041258-69041286; SpCas9
gcaagccatagcagaacagatacag

SEQ ID NO: 34878 - DNA, 24 bp, Artificial Sequence
  Synthetic: FXN 3 reverse 9:69041259-69041286; SpCas9
caagccatagcagaacagatacag

SEQ ID NO: 34879 - DNA, 23 bp, Artificial Sequence
  Synthetic: FXN 3 reverse 9:69041260-69041286; SpCas9
aagccatagcagaacagatacag

SEQ ID NO: 34880 - DNA, 22 bp, Artificial Sequence
  Synthetic: FXN 3 reverse 9:69041261-69041286; SpCas9
agccatagcagaacagatacag

SEQ ID NO: 34881 - DNA, 21 bp, Artificial Sequence
  Synthetic: FXN 3 reverse 9:69041262-69041286; SpCas9
gccatagcagaacagatacag

SEQ ID NO: 34882 - DNA, 20 bp, Artificial Sequence
  Synthetic: FXN 3 reverse 9:69041263-69041286; SpCas9
ccatagcagaacagatacag

SEQ ID NO: 34883 - DNA, 19 bp, Artificial Sequence
  Synthetic: FXN 3 reverse 9:69041264-69041286; SpCas9
catagcagaacagatacag

SEQ ID NO: 34884 - DNA, 18 bp, Artificial Sequence
  Synthetic: FXN 3 reverse 9:69041265-69041286; SpCas9
atagcagaacagatacag

SEQ ID NO: 34885 - DNA, 25 bp, Artificial Sequence
  Synthetic: FXN 3 reverse 9:69041261-69041289; SpCas9
ggggcaagccatagcagaacagata

SEQ ID NO: 34886 - DNA, 24 bp, Artificial Sequence
  Synthetic: FXN 3 reverse 9:69041262-69041289; SpCas9
gggcaagccatagcagaacagata

SEQ ID NO: 34887 - DNA, 23 bp, Artificial Sequence
  Synthetic: FXN 3 reverse 9:69041263-69041289; SpCas9
ggcaagccatagcagaacagata

SEQ ID NO: 34888 - DNA, 22 bp, Artificial Sequence
  Synthetic: FXN 3 reverse 9:69041264-69041289; SpCas9
gcaagccatagcagaacagata

SEQ ID NO: 34889 - DNA, 21 bp, Artificial Sequence
  Synthetic: FXN 3 reverse 9:69041265-69041289; SpCas9
caagccatagcagaacagata

SEQ ID NO: 34890 - DNA, 20 bp, Artificial Sequence
  Synthetic: FXN 3 reverse 9:69041266-69041289; SpCas9
aagccatagcagaacagata

SEQ ID NO: 34891 - DNA, 19 bp, Artificial Sequence
  Synthetic: FXN 3 reverse 9:69041267-69041289; SpCas9
agccatagcagaacagata

SEQ ID NO: 34892 - DNA, 18 bp, Artificial Sequence
  Synthetic: FXN 3 reverse 9:69041268-69041289; SpCas9
gccatagcagaacagata

SEQ ID NO: 34893 - DNA, 25 bp, Artificial Sequence
  Synthetic: FXN 3 reverse 9:69041267-69041295; SpCas9
acaaaaggggcaagccatagcagaa

SEQ ID NO: 34894 - DNA, 24 bp, Artificial Sequence
  Synthetic: FXN 3 reverse 9:69041268-69041295; SpCas9
caaaaggggcaagccatagcagaa

SEQ ID NO: 34895 - DNA, 23 bp, Artificial Sequence
  Synthetic: FXN 3 reverse 9:69041269-69041295; SpCas9
aaaaggggcaagccatagcagaa

SEQ ID NO: 34896 - DNA, 22 bp, Artificial Sequence
  Synthetic: FXN 3 reverse 9:69041270-69041295; SpCas9
aaaggggcaagccatagcagaa

SEQ ID NO: 34897 - DNA, 21 bp, Artificial Sequence
  Synthetic: FXN 3 reverse 9:69041271-69041295; SpCas9
aaggggcaagccatagcagaa

SEQ ID NO: 34898 - DNA, 20 bp, Artificial Sequence
  Synthetic: FXN 3 reverse 9:69041272-69041295; SpCas9
aggggcaagccatagcagaa

SEQ ID NO: 34899 - DNA, 19 bp, Artificial Sequence
  Synthetic: FXN 3 reverse 9:69041273-69041295; SpCas9
ggggcaagccatagcagaa

SEQ ID NO: 34900 - DNA, 18 bp, Artificial Sequence
  Synthetic: FXN 3 reverse 9:69041274-69041295; SpCas9
gggcaagccatagcagaa

SEQ ID NO: 34901 - DNA, 25 bp, Artificial Sequence
  Synthetic: FXN 3 reverse 9:69041272-69041300; SpCas9
gttgaacaaaaggggcaagccatag

SEQ ID NO: 34902 - DNA, 24 bp, Artificial Sequence
  Synthetic: FXN 3 reverse 9:69041273-69041300; SpCas9
ttgaacaaaaggggcaagccatag

SEQ ID NO: 34903 - DNA, 23 bp, Artificial Sequence
  Synthetic: FXN 3 reverse 9:69041274-69041300; SpCas9
tgaacaaaaggggcaagccatag

SEQ ID NO: 34904 - DNA, 22 bp, Artificial Sequence
  Synthetic: FXN 3 reverse 9:69041275-69041300; SpCas9
gaacaaaaggggcaagccatag

SEQ ID NO: 34905 - DNA, 21 bp, Artificial Sequence
  Synthetic: FXN 3 reverse 9:69041276-69041300; SpCas9
aacaaaaggggcaagccatag

SEQ ID NO: 34906 - DNA, 20 bp, Artificial Sequence
  Synthetic: FXN 3 reverse 9:69041277-69041300; SpCas9
acaaaaggggcaagccatag

SEQ ID NO: 34907 - DNA, 19 bp, Artificial Sequence
  Synthetic: FXN 3 reverse 9:69041278-69041300; SpCas9
caaaaggggcaagccatag

SEQ ID NO: 34908 - DNA, 18 bp, Artificial Sequence
  Synthetic: FXN 3 reverse 9:69041279-69041300; SpCas9
aaaaggggcaagccatag

SEQ ID NO: 34909 - DNA, 25 bp, Artificial Sequence
  Synthetic: FXN 3 reverse 9:69041275-69041303; SpCas9
agtgttgaacaaaaggggcaagcca

SEQ ID NO: 34910 - DNA, 24 bp, Artificial Sequence
  Synthetic: FXN 3 reverse 9:69041276-69041303; SpCas9
gtgttgaacaaaaggggcaagcca

SEQ ID NO: 34911 - DNA, 23 bp, Artificial Sequence
  Synthetic: FXN 3 reverse 9:69041277-69041303; SpCas9
tgttgaacaaaaggggcaagcca

SEQ ID NO: 34912 - DNA, 22 bp, Artificial Sequence
  Synthetic: FXN 3 reverse 9:69041278-69041303; SpCas9
gttgaacaaaaggggcaagcca

SEQ ID NO: 34913 - DNA, 21 bp, Artificial Sequence
  Synthetic: FXN 3 reverse 9:69041279-69041303; SpCas9
ttgaacaaaaggggcaagcca

SEQ ID NO: 34914 - DNA, 20 bp, Artificial Sequence
  Synthetic: FXN 3 reverse 9:69041280-69041303; SpCas9
tgaacaaaaggggcaagcca

SEQ ID NO: 34915 - DNA, 19 bp, Artificial Sequence
  Synthetic: FXN 3 reverse 9:69041281-69041303; SpCas9
gaacaaaaggggcaagcca

SEQ ID NO: 34916 - DNA, 18 bp, Artificial Sequence
  Synthetic: FXN 3 reverse 9:69041282-69041303; SpCas9
aacaaaaggggcaagcca

SEQ ID NO: 34917 - DNA, 25 bp, Artificial Sequence
  Synthetic: FXN 3 reverse 9:69041281-69041309; SpCas9
aaaaacagtgttgaacaaaaggggc

SEQ ID NO: 34918 - DNA, 24 bp, Artificial Sequence
  Synthetic: FXN 3 reverse 9:69041282-69041309; SpCas9
aaaacagtgttgaacaaaaggggc

SEQ ID NO: 34919 - DNA, 23 bp, Artificial Sequence
  Synthetic: FXN 3 reverse 9:69041283-69041309; SpCas9
aaacagtgttgaacaaaaggggc

SEQ ID NO: 34920 - DNA, 22 bp, Artificial Sequence
  Synthetic: FXN 3 reverse 9:69041284-69041309; SpCas9
aacagtgttgaacaaaaggggc

SEQ ID NO: 34921 - DNA, 21 bp, Artificial Sequence
  Synthetic: FXN 3 reverse 9:69041285-69041309; SpCas9
acagtgttgaacaaaaggggc

SEQ ID NO: 34922 - DNA, 20 bp, Artificial Sequence
  Synthetic: FXN 3 reverse 9:69041286-69041309; SpCas9
cagtgttgaacaaaaggggc

SEQ ID NO: 34923 - DNA, 19 bp, Artificial Sequence
  Synthetic: FXN 3 reverse 9:69041287-69041309; SpCas9
agtgttgaacaaaaggggc

SEQ ID NO: 34924 - DNA, 18 bp, Artificial Sequence
  Synthetic: FXN 3 reverse 9:69041288-69041309; SpCas9
gtgttgaacaaaaggggc

SEQ ID NO: 34925 - DNA, 25 bp, Artificial Sequence
  Synthetic: FXN 3 reverse 9:69041285-69041313; SpCas9
gcacaaaaacagtgttgaacaaaag

SEQ ID NO: 34926 - DNA, 24 bp, Artificial Sequence
  Synthetic: FXN 3 reverse 9:69041286-69041313; SpCas9
cacaaaaacagtgttgaacaaaag

SEQ ID NO: 34927 - DNA, 23 bp, Artificial Sequence
  Synthetic: FXN 3 reverse 9:69041287-69041313; SpCas9
acaaaaacagtgttgaacaaaag

SEQ ID NO: 34928 - DNA, 22 bp, Artificial Sequence
  Synthetic: FXN 3 reverse 9:69041288-69041313; SpCas9
caaaaacagtgttgaacaaaag

SEQ ID NO: 34929 - DNA, 21 bp, Artificial Sequence
  Synthetic: FXN 3 reverse 9:69041289-69041313; SpCas9
aaaaacagtgttgaacaaaag

SEQ ID NO: 34930 - DNA, 20 bp, Artificial Sequence
  Synthetic: FXN 3 reverse 9:69041290-69041313; SpCas9
aaaacagtgttgaacaaaag

SEQ ID NO: 34931 - DNA, 19 bp, Artificial Sequence
  Synthetic: FXN 3 reverse 9:69041291-69041313; SpCas9
aaacagtgttgaacaaaag

SEQ ID NO: 34932 - DNA, 18 bp, Artificial Sequence
  Synthetic: FXN 3 reverse 9:69041292-69041313; SpCas9
aacagtgttgaacaaaag

SEQ ID NO: 34933 - DNA, 25 bp, Artificial Sequence
  Synthetic: FXN 3 reverse 9:69041286-69041314; SpCas9
cgcacaaaaacagtgttgaacaaaa

SEQ ID NO: 34934 - DNA, 24 bp, Artificial Sequence
  Synthetic: FXN 3 reverse 9:69041287-69041314; SpCas9
gcacaaaaacagtgttgaacaaaa

SEQ ID NO: 34935 - DNA, 23 bp, Artificial Sequence
  Synthetic: FXN 3 reverse 9:69041288-69041314; SpCas9
cacaaaaacagtgttgaacaaaa

SEQ ID NO: 34936 - DNA, 22 bp, Artificial Sequence
  Synthetic: FXN 3 reverse 9:69041289-69041314; SpCas9
acaaaaacagtgttgaacaaaa

SEQ ID NO: 34937 - DNA, 21 bp, Artificial Sequence
  Synthetic: FXN 3 reverse 9:69041290-69041314; SpCas9
caaaaacagtgttgaacaaaa

SEQ ID NO: 34938 - DNA, 20 bp, Artificial Sequence
  Synthetic: FXN 3 reverse 9:69041291-69041314; SpCas9
aaaaacagtgttgaacaaaa

SEQ ID NO: 34939 - DNA, 19 bp, Artificial Sequence
  Synthetic: FXN 3 reverse 9:69041292-69041314; SpCas9
aaaacagtgttgaacaaaa

SEQ ID NO: 34940 - DNA, 18 bp, Artificial Sequence
  Synthetic: FXN 3 reverse 9:69041293-69041314; SpCas9
aaacagtgttgaacaaaa

SEQ ID NO: 34941 - DNA, 25 bp, Artificial Sequence
  Synthetic: FXN 3 reverse 9:69041287-69041315; SpCas9
acgcacaaaaacagtgttgaacaaa

SEQ ID NO: 34942 - DNA, 24 bp, Artificial Sequence
  Synthetic: FXN 3 reverse 9:69041288-69041315; SpCas9
cgcacaaaaacagtgttgaacaaa

SEQ ID NO: 34943 - DNA, 23 bp, Artificial Sequence
  Synthetic: FXN 3 reverse 9:69041289-69041315; SpCas9
gcacaaaaacagtgttgaacaaa

SEQ ID NO: 34944 - DNA, 22 bp, Artificial Sequence
  Synthetic: FXN 3 reverse 9:69041290-69041315; SpCas9
cacaaaaacagtgttgaacaaa

SEQ ID NO: 34945 - DNA, 21 bp, Artificial Sequence
  Synthetic: FXN 3 reverse 9:69041291-69041315; SpCas9
acaaaaacagtgttgaacaaa

SEQ ID NO: 34946 - DNA, 20 bp, Artificial Sequence
  Synthetic: FXN 3 reverse 9:69041292-69041315; SpCas9
caaaaacagtgttgaacaaa

SEQ ID NO: 34947 - DNA, 19 bp, Artificial Sequence
  Synthetic: FXN 3 reverse 9:69041293-69041315; SpCas9
aaaaacagtgttgaacaaa

SEQ ID NO: 34948 - DNA, 18 bp, Artificial Sequence
  Synthetic: FXN 3 reverse 9:69041294-69041315; SpCas9
aaaacagtgttgaacaaa

SEQ ID NO: 34949 - DNA, 25 bp, Artificial Sequence
  Synthetic: FXN 3 reverse 9:69041288-69041316; SpCas9
gacgcacaaaaacagtgttgaacaa

SEQ ID NO: 34950 - DNA, 24 bp, Artificial Sequence
  Synthetic: FXN 3 reverse 9:69041289-69041316; SpCas9
acgcacaaaaacagtgttgaacaa

SEQ ID NO: 34951 - DNA, 23 bp, Artificial Sequence
  Synthetic: FXN 3 reverse 9:69041290-69041316; SpCas9
cgcacaaaaacagtgttgaacaa

SEQ ID NO: 34952 - DNA, 22 bp, Artificial Sequence
  Synthetic: FXN 3 reverse 9:69041291-69041316; SpCas9
gcacaaaaacagtgttgaacaa

SEQ ID NO: 34953 - DNA, 21 bp, Artificial Sequence
  Synthetic: FXN 3 reverse 9:69041292-69041316; SpCas9
cacaaaaacagtgttgaacaa

SEQ ID NO: 34954 - DNA, 20 bp, Artificial Sequence
  Synthetic: FXN 3 reverse 9:69041293-69041316; SpCas9
acaaaaacagtgttgaacaa

SEQ ID NO: 34955 - DNA, 19 bp, Artificial Sequence
  Synthetic: FXN 3 reverse 9:69041294-69041316; SpCas9
caaaaacagtgttgaacaa

SEQ ID NO: 34956 - DNA, 18 bp, Artificial Sequence
  Synthetic: FXN 3 reverse 9:69041295-69041316; SpCas9
aaaaacagtgttgaacaa

SEQ ID NO: 34957 - DNA, 25 bp, Artificial Sequence
  Synthetic: FXN 3 reverse 9:69041301-69041329; SpCas9
catcaatgcagatgacgcacaaaaa

SEQ ID NO: 34958 - DNA, 24 bp, Artificial Sequence
  Synthetic: FXN 3 reverse 9:69041302-69041329; SpCas9
atcaatgcagatgacgcacaaaaa

SEQ ID NO: 34959 - DNA, 23 bp, Artificial Sequence
  Synthetic: FXN 3 reverse 9:69041303-69041329; SpCas9
tcaatgcagatgacgcacaaaaa

SEQ ID NO: 34960 - DNA, 22 bp, Artificial Sequence
  Synthetic: FXN 3 reverse 9:69041304-69041329; SpCas9
caatgcagatgacgcacaaaaa

SEQ ID NO: 34961 - DNA, 21 bp, Artificial Sequence
  Synthetic: FXN 3 reverse 9:69041305-69041329; SpCas9
aatgcagatgacgcacaaaaa

SEQ ID NO: 34962 - DNA, 20 bp, Artificial Sequence
  Synthetic: FXN 3 reverse 9:69041306-69041329; SpCas9
atgcagatgacgcacaaaaa

SEQ ID NO: 34963 - DNA, 19 bp, Artificial Sequence
  Synthetic: FXN 3 reverse 9:69041307-69041329; SpCas9
tgcagatgacgcacaaaaa

SEQ ID NO: 34964 - DNA, 18 bp, Artificial Sequence
  Synthetic: FXN 3 reverse 9:69041308-69041329; SpCas9
gcagatgacgcacaaaaa

SEQ ID NO: 34965 - DNA, 25 bp, Artificial Sequence
  Synthetic: FXN 3 forward 9:69041308-69041336; SpCas9
tgtgcgtcatctgcattgatgcatg

SEQ ID NO: 34966 - DNA, 24 bp, Artificial Sequence
  Synthetic: FXN 3 forward 9:69041309-69041336; SpCas9
gtgcgtcatctgcattgatgcatg

SEQ ID NO: 34967 - DNA, 23 bp, Artificial Sequence
  Synthetic: FXN 3 forward 9:69041310-69041336; SpCas9
tgcgtcatctgcattgatgcatg

SEQ ID NO: 34968 - DNA, 22 bp, Artificial Sequence
  Synthetic: FXN 3 forward 9:69041311-69041336; SpCas9
gcgtcatctgcattgatgcatg

SEQ ID NO: 34969 - DNA, 21 bp, Artificial Sequence
  Synthetic: FXN 3 forward 9:69041312-69041336; SpCas9
cgtcatctgcattgatgcatg

SEQ ID NO: 34970 - DNA, 20 bp, Artificial Sequence
  Synthetic: FXN 3 forward 9:69041313-69041336; SpCas9
gtcatctgcattgatgcatg

SEQ ID NO: 34971 - DNA, 19 bp, Artificial Sequence
  Synthetic: FXN 3 forward 9:69041314-69041336; SpCas9
tcatctgcattgatgcatg

SEQ ID NO: 34972 - DNA, 18 bp, Artificial Sequence
  Synthetic: FXN 3 forward 9:69041315-69041336; SpCas9
catctgcattgatgcatg

SEQ ID NO: 34973 - DNA, 25 bp, Artificial Sequence
  Synthetic: FXN 3 reverse 9:69041318-69041346; SpCas9
taaaggacaactgcatgcatcaatg

SEQ ID NO: 34974 - DNA, 24 bp, Artificial Sequence
  Synthetic: FXN 3 reverse 9:69041319-69041346; SpCas9
aaaggacaactgcatgcatcaatg

SEQ ID NO: 34975 - DNA, 23 bp, Artificial Sequence
  Synthetic: FXN 3 reverse 9:69041320-69041346; SpCas9
aaggacaactgcatgcatcaatg

SEQ ID NO: 34976 - DNA, 22 bp, Artificial Sequence
  Synthetic: FXN 3 reverse 9:69041321-69041346; SpCas9
aggacaactgcatgcatcaatg

SEQ ID NO: 34977 - DNA, 21 bp, Artificial Sequence
  Synthetic: FXN 3 reverse 9:69041322-69041346; SpCas9
ggacaactgcatgcatcaatg

SEQ ID NO: 34978 - DNA, 20 bp, Artificial Sequence
  Synthetic: FXN 3 reverse 9:69041323-69041346; SpCas9
gacaactgcatgcatcaatg

SEQ ID NO: 34979 - DNA, 19 bp, Artificial Sequence
  Synthetic: FXN 3 reverse 9:69041324-69041346; SpCas9
acaactgcatgcatcaatg

SEQ ID NO: 34980 - DNA, 18 bp, Artificial Sequence
  Synthetic: FXN 3 reverse 9:69041325-69041346; SpCas9
caactgcatgcatcaatg

SEQ ID NO: 34981 - DNA, 25 bp, Artificial Sequence
  Synthetic: FXN 3 forward 9:69041335-69041363; SpCas9
gttgtcctttatttgttctcactgc

SEQ ID NO: 34982 - DNA, 24 bp, Artificial Sequence
  Synthetic: FXN 3 forward 9:69041336-69041363; SpCas9
ttgtcctttatttgttctcactgc

SEQ ID NO: 34983 - DNA, 23 bp, Artificial Sequence
  Synthetic: FXN 3 forward 9:69041337-69041363; SpCas9
tgtcctttatttgttctcactgc

SEQ ID NO: 34984 - DNA, 22 bp, Artificial Sequence
  Synthetic: FXN 3 forward 9:69041338-69041363; SpCas9
gtcctttatttgttctcactgc

SEQ ID NO: 34985 - DNA, 21 bp, Artificial Sequence
  Synthetic: FXN 3 forward 9:69041339-69041363; SpCas9
tcctttatttgttctcactgc

SEQ ID NO: 34986 - DNA, 20 bp, Artificial Sequence
  Synthetic: FXN 3 forward 9:69041340-69041363; SpCas9
cctttatttgttctcactgc

SEQ ID NO: 34987 - DNA, 19 bp, Artificial Sequence
  Synthetic: FXN 3 forward 9:69041341-69041363; SpCas9
ctttatttgttctcactgc

SEQ ID NO: 34988 - DNA, 18 bp, Artificial Sequence
  Synthetic: FXN 3 forward 9:69041342-69041363; SpCas9
tttatttgttctcactgc

SEQ ID NO: 34989 - DNA, 25 bp, Artificial Sequence
  Synthetic: FXN 3 forward 9:69041339-69041367; SpCas9
tcctttatttgttctcactgctgga

SEQ ID NO: 34990 - DNA, 24 bp, Artificial Sequence
  Synthetic: FXN 3 forward 9:69041340-69041367; SpCas9
cctttatttgttctcactgctgga

SEQ ID NO: 34991 - DNA, 23 bp, Artificial Sequence
  Synthetic: FXN 3 forward 9:69041341-69041367; SpCas9
ctttatttgttctcactgctgga

SEQ ID NO: 34992 - DNA, 22 bp, Artificial Sequence
  Synthetic: FXN 3 forward 9:69041342-69041367; SpCas9
tttatttgttctcactgctgga

SEQ ID NO: 34993 - DNA, 21 bp, Artificial Sequence
  Synthetic: FXN 3 forward 9:69041343-69041367; SpCas9
ttatttgttctcactgctgga

SEQ ID NO: 34994 - DNA, 20 bp, Artificial Sequence
  Synthetic: FXN 3 forward 9:69041344-69041367; SpCas9
tatttgttctcactgctgga

SEQ ID NO: 34995 - DNA, 19 bp, Artificial Sequence
  Synthetic: FXN 3 forward 9:69041345-69041367; SpCas9
atttgttctcactgctgga

SEQ ID NO: 34996 - DNA, 18 bp, Artificial Sequence
  Synthetic: FXN 3 forward 9:69041346-69041367; SpCas9
tttgttctcactgctgga

SEQ ID NO: 34997 - DNA, 25 bp, Artificial Sequence
  Synthetic: FXN 3 reverse 9:69041340-69041368; SpCas9
actatccagcagtgagaacaaataa

SEQ ID NO: 34998 - DNA, 24 bp, Artificial Sequence
  Synthetic: FXN 3 reverse 9:69041341-69041368; SpCas9
ctatccagcagtgagaacaaataa

SEQ ID NO: 34999 - DNA, 23 bp, Artificial Sequence
  Synthetic: FXN 3 reverse 9:69041342-69041368; SpCas9
tatccagcagtgagaacaaataa

SEQ ID NO: 35000 - DNA, 22 bp, Artificial Sequence
  Synthetic: FXN 3 reverse 9:69041343-69041368; SpCas9
atccagcagtgagaacaaataa

SEQ ID NO: 35001 - DNA, 21 bp, Artificial Sequence
  Synthetic: FXN 3 reverse 9:69041344-69041368; SpCas9
tccagcagtgagaacaaataa

SEQ ID NO: 35002 - DNA, 20 bp, Artificial Sequence
  Synthetic: FXN 3 reverse 9:69041345-69041368; SpCas9
ccagcagtgagaacaaataa

SEQ ID NO: 35003 - DNA, 19 bp, Artificial Sequence
  Synthetic: FXN 3 reverse 9:69041346-69041368; SpCas9
cagcagtgagaacaaataa

SEQ ID NO: 35004 - DNA, 18 bp, Artificial Sequence
  Synthetic: FXN 3 reverse 9:69041347-69041368; SpCas9
agcagtgagaacaaataa

SEQ ID NO: 35005 - DNA, 25 bp, Artificial Sequence
  Synthetic: FXN 3 reverse 9:69041341-69041369; SpCas9
tactatccagcagtgagaacaaata

SEQ ID NO: 35006 - DNA, 24 bp, Artificial Sequence
  Synthetic: FXN 3 reverse 9:69041342-69041369; SpCas9
actatccagcagtgagaacaaata

SEQ ID NO: 35007 - DNA, 23 bp, Artificial Sequence
  Synthetic: FXN 3 reverse 9:69041343-69041369; SpCas9
ctatccagcagtgagaacaaata

SEQ ID NO: 35008 - DNA, 22 bp, Artificial Sequence
  Synthetic: FXN 3 reverse 9:69041344-69041369; SpCas9
tatccagcagtgagaacaaata

SEQ ID NO: 35009 - DNA, 21 bp, Artificial Sequence
  Synthetic: FXN 3 reverse 9:69041345-69041369; SpCas9
atccagcagtgagaacaaata

SEQ ID NO: 35010 - DNA, 20 bp, Artificial Sequence
  Synthetic: FXN 3 reverse 9:69041346-69041369; SpCas9
tccagcagtgagaacaaata

SEQ ID NO: 35011 - DNA, 19 bp, Artificial Sequence
  Synthetic: FXN 3 reverse 9:69041347-69041369; SpCas9
ccagcagtgagaacaaata

SEQ ID NO: 35012 - DNA, 18 bp, Artificial Sequence
  Synthetic: FXN 3 reverse 9:69041348-69041369; SpCas9
cagcagtgagaacaaata

SEQ ID NO: 35013 - DNA, 25 bp, Artificial Sequence
  Synthetic: FXN 3 forward 9:69041346-69041374; SpCas9
tttgttctcactgctggatagtatc

SEQ ID NO: 35014 - DNA, 24 bp, Artificial Sequence
  Synthetic: FXN 3 forward 9:69041347-69041374; SpCas9
ttgttctcactgctggatagtatc

SEQ ID NO: 35015 - DNA, 23 bp, Artificial Sequence
  Synthetic: FXN 3 forward 9:69041348-69041374; SpCas9
tgttctcactgctggatagtatc

SEQ ID NO: 35016 - DNA, 22 bp, Artificial Sequence
  Synthetic: FXN 3 forward 9:69041349-69041374; SpCas9
gttctcactgctggatagtatc

SEQ ID NO: 35017 - DNA, 21 bp, Artificial Sequence
  Synthetic: FXN 3 forward 9:69041350-69041374; SpCas9
ttctcactgctggatagtatc

SEQ ID NO: 35018 - DNA, 20 bp, Artificial Sequence
  Synthetic: FXN 3 forward 9:69041351-69041374; SpCas9
tctcactgctggatagtatc

SEQ ID NO: 35019 - DNA, 19 bp, Artificial Sequence
  Synthetic: FXN 3 forward 9:69041352-69041374; SpCas9
ctcactgctggatagtatc

SEQ ID NO: 35020 - DNA, 18 bp, Artificial Sequence
  Synthetic: FXN 3 forward 9:69041353-69041374; SpCas9
tcactgctggatagtatc

SEQ ID NO: 35021 - DNA, 25 bp, Artificial Sequence
  Synthetic: FXN 3 forward 9:69041350-69041378; SpCas9
ttctcactgctggatagtatctggt

SEQ ID NO: 35022 - DNA, 24 bp, Artificial Sequence
  Synthetic: FXN 3 forward 9:69041351-69041378; SpCas9
tctcactgctggatagtatctggt

SEQ ID NO: 35023 - DNA, 23 bp, Artificial Sequence
  Synthetic: FXN 3 forward 9:69041352-69041378; SpCas9
ctcactgctggatagtatctggt

SEQ ID NO: 35024 - DNA, 22 bp, Artificial Sequence
  Synthetic: FXN 3 forward 9:69041353-69041378; SpCas9
tcactgctggatagtatctggt

SEQ ID NO: 35025 - DNA, 21 bp, Artificial Sequence
  Synthetic: FXN 3 forward 9:69041354-69041378; SpCas9
cactgctggatagtatctggt

SEQ ID NO: 35026 - DNA, 20 bp, Artificial Sequence
  Synthetic: FXN 3 forward 9:69041355-69041378; SpCas9
actgctggatagtatctggt

SEQ ID NO: 35027 - DNA, 19 bp, Artificial Sequence
  Synthetic: FXN 3 forward 9:69041356-69041378; SpCas9
ctgctggatagtatctggt

SEQ ID NO: 35028 - DNA, 18 bp, Artificial Sequence
  Synthetic: FXN 3 forward 9:69041357-69041378; SpCas9
tgctggatagtatctggt

SEQ ID NO: 35029 - DNA, 25 bp, Artificial Sequence
  Synthetic: FXN 3 forward 9:69041351-69041379; SpCas9
tctcactgctggatagtatctggtt

SEQ ID NO: 35030 - DNA, 24 bp, Artificial Sequence
  Synthetic: FXN 3 forward 9:69041352-69041379; SpCas9
ctcactgctggatagtatctggtt

SEQ ID NO: 35031 - DNA, 23 bp, Artificial Sequence
  Synthetic: FXN 3 forward 9:69041353-69041379; SpCas9
tcactgctggatagtatctggtt

SEQ ID NO: 35032 - DNA, 22 bp, Artificial Sequence
  Synthetic: FXN 3 forward 9:69041354-69041379; SpCas9
cactgctggatagtatctggtt

SEQ ID NO: 35033 - DNA, 21 bp, Artificial Sequence
  Synthetic: FXN 3 forward 9:69041355-69041379; SpCas9
actgctggatagtatctggtt

SEQ ID NO: 35034 - DNA, 20 bp, Artificial Sequence
  Synthetic: FXN 3 forward 9:69041356-69041379; SpCas9
ctgctggatagtatctggtt

SEQ ID NO: 35035 - DNA, 19 bp, Artificial Sequence
  Synthetic: FXN 3 forward 9:69041357-69041379; SpCas9
tgctggatagtatctggtt

SEQ ID NO: 35036 - DNA, 18 bp, Artificial Sequence
  Synthetic: FXN 3 forward 9:69041358-69041379; SpCas9
gctggatagtatctggtt

SEQ ID NO: 35037 - DNA, 25 bp, Artificial Sequence
  Synthetic: FXN 3 reverse 9:69041352-69041380; SpCas9
acccaaccagatactatccagcagt

SEQ ID NO: 35038 - DNA, 24 bp, Artificial Sequence
  Synthetic: FXN 3 reverse 9:69041353-69041380; SpCas9
cccaaccagatactatccagcagt

SEQ ID NO: 35039 - DNA, 23 bp, Artificial Sequence
  Synthetic: FXN 3 reverse 9:69041354-69041380; SpCas9
ccaaccagatactatccagcagt

SEQ ID NO: 35040 - DNA, 22 bp, Artificial Sequence
  Synthetic: FXN 3 reverse 9:69041355-69041380; SpCas9
caaccagatactatccagcagt

SEQ ID NO: 35041 - DNA, 21 bp, Artificial Sequence
  Synthetic: FXN 3 reverse 9:69041356-69041380; SpCas9
aaccagatactatccagcagt

SEQ ID NO: 35042 - DNA, 20 bp, Artificial Sequence
  Synthetic: FXN 3 reverse 9:69041357-69041380; SpCas9
accagatactatccagcagt

SEQ ID NO: 35043 - DNA, 19 bp, Artificial Sequence
  Synthetic: FXN 3 reverse 9:69041358-69041380; SpCas9
ccagatactatccagcagt

SEQ ID NO: 35044 - DNA, 18 bp, Artificial Sequence
  Synthetic: FXN 3 reverse 9:69041359-69041380; SpCas9
cagatactatccagcagt

SEQ ID NO: 35045 - DNA, 25 bp, Artificial Sequence
  Synthetic: FXN 3 reverse 9:69041356-69041384; SpCas9
atttacccaaccagatactatccag

SEQ ID NO: 35046 - DNA, 24 bp, Artificial Sequence
  Synthetic: FXN 3 reverse 9:69041357-69041384; SpCas9
tttacccaaccagatactatccag

SEQ ID NO: 35047 - DNA, 23 bp, Artificial Sequence
  Synthetic: FXN 3 reverse 9:69041358-69041384; SpCas9
ttacccaaccagatactatccag

SEQ ID NO: 35048 - DNA, 22 bp, Artificial Sequence
  Synthetic: FXN 3 reverse 9:69041359-69041384; SpCas9
tacccaaccagatactatccag

SEQ ID NO: 35049 - DNA, 21 bp, Artificial Sequence
  Synthetic: FXN 3 reverse 9:69041360-69041384; SpCas9
acccaaccagatactatccag

SEQ ID NO: 35050 - DNA, 20 bp, Artificial Sequence
  Synthetic: FXN 3 reverse 9:69041361-69041384; SpCas9
cccaaccagatactatccag

SEQ ID NO: 35051 - DNA, 19 bp, Artificial Sequence
  Synthetic: FXN 3 reverse 9:69041362-69041384; SpCas9
ccaaccagatactatccag

SEQ ID NO: 35052 - DNA, 18 bp, Artificial Sequence
  Synthetic: FXN 3 reverse 9:69041363-69041384; SpCas9
caaccagatactatccag

SEQ ID NO: 35053 - DNA, 25 bp, Artificial Sequence
  Synthetic: FXN 3 reverse 9:69041359-69041387; SpCas9
tatatttacccaaccagatactatc

SEQ ID NO: 35054 - DNA, 24 bp, Artificial Sequence
  Synthetic: FXN 3 reverse 9:69041360-69041387; SpCas9
atatttacccaaccagatactatc

SEQ ID NO: 35055 - DNA, 23 bp, Artificial Sequence
  Synthetic: FXN 3 reverse 9:69041361-69041387; SpCas9
tatttacccaaccagatactatc

SEQ ID NO: 35056 - DNA, 22 bp, Artificial Sequence
  Synthetic: FXN 3 reverse 9:69041362-69041387; SpCas9
atttacccaaccagatactatc

SEQ ID NO: 35057 - DNA, 21 bp, Artificial Sequence
  Synthetic: FXN 3 reverse 9:69041363-69041387; SpCas9
tttacccaaccagatactatc

SEQ ID NO: 35058 - DNA, 20 bp, Artificial Sequence
  Synthetic: FXN 3 reverse 9:69041364-69041387; SpCas9
ttacccaaccagatactatc

SEQ ID NO: 35059 - DNA, 19 bp, Artificial Sequence
  Synthetic: FXN 3 reverse 9:69041365-69041387; SpCas9
tacccaaccagatactatc

SEQ ID NO: 35060 - DNA, 18 bp, Artificial Sequence
  Synthetic: FXN 3 reverse 9:69041366-69041387; SpCas9
acccaaccagatactatc

SEQ ID NO: 35061 - DNA, 25 bp, Artificial Sequence
  Synthetic: FXN 3 reverse 9:69041370-69041398; SpCas9
ttacagtgtgatatatttacccaac

SEQ ID NO: 35062 - DNA, 24 bp, Artificial Sequence
  Synthetic: FXN 3 reverse 9:69041371-69041398; SpCas9
tacagtgtgatatatttacccaac

SEQ ID NO: 35063 - DNA, 23 bp, Artificial Sequence
  Synthetic: FXN 3 reverse 9:69041372-69041398; SpCas9
acagtgtgatatatttacccaac

SEQ ID NO: 35064 - DNA, 22 bp, Artificial Sequence
  Synthetic: FXN 3 reverse 9:69041373-69041398; SpCas9
cagtgtgatatatttacccaac

SEQ ID NO: 35065 - DNA, 21 bp, Artificial Sequence
  Synthetic: FXN 3 reverse 9:69041374-69041398; SpCas9
agtgtgatatatttacccaac

SEQ ID NO: 35066 - DNA, 20 bp, Artificial Sequence
  Synthetic: FXN 3 reverse 9:69041375-69041398; SpCas9
gtgtgatatatttacccaac

SEQ ID NO: 35067 - DNA, 19 bp, Artificial Sequence
  Synthetic: FXN 3 reverse 9:69041376-69041398; SpCas9
tgtgatatatttacccaac

SEQ ID NO: 35068 - DNA, 18 bp, Artificial Sequence
  Synthetic: FXN 3 reverse 9:69041377-69041398; SpCas9
gtgatatatttacccaac

SEQ ID NO: 35069 - DNA, 25 bp, Artificial Sequence
  Synthetic: FXN 3 forward 9:69041384-69041412; SpCas9
atatcacactgtaaatcacactatc

SEQ ID NO: 35070 - DNA, 24 bp, Artificial Sequence
  Synthetic: FXN 3 forward 9:69041385-69041412; SpCas9
tatcacactgtaaatcacactatc

SEQ ID NO: 35071 - DNA, 23 bp, Artificial Sequence
  Synthetic: FXN 3 forward 9:69041386-69041412; SpCas9
atcacactgtaaatcacactatc

SEQ ID NO: 35072 - DNA, 22 bp, Artificial Sequence
  Synthetic: FXN 3 forward 9:69041387-69041412; SpCas9
tcacactgtaaatcacactatc

SEQ ID NO: 35073 - DNA, 21 bp, Artificial Sequence
  Synthetic: FXN 3 forward 9:69041388-69041412; SpCas9
cacactgtaaatcacactatc

SEQ ID NO: 35074 - DNA, 20 bp, Artificial Sequence
  Synthetic: FXN 3 forward 9:69041389-69041412; SpCas9
acactgtaaatcacactatc

SEQ ID NO: 35075 - DNA, 19 bp, Artificial Sequence
  Synthetic: FXN 3 forward 9:69041390-69041412; SpCas9
cactgtaaatcacactatc

SEQ ID NO: 35076 - DNA, 18 bp, Artificial Sequence
  Synthetic: FXN 3 forward 9:69041391-69041412; SpCas9
actgtaaatcacactatc

SEQ ID NO: 35077 - DNA, 25 bp, Artificial Sequence
  Synthetic: FXN 3 forward 9:69041385-69041413; SpCas9
tatcacactgtaaatcacactatcc

SEQ ID NO: 35078 - DNA, 24 bp, Artificial Sequence
  Synthetic: FXN 3 forward 9:69041386-69041413; SpCas9
atcacactgtaaatcacactatcc

SEQ ID NO: 35079 - DNA, 23 bp, Artificial Sequence
  Synthetic: FXN 3 forward 9:69041387-69041413; SpCas9
tcacactgtaaatcacactatcc

SEQ ID NO: 35080 - DNA, 22 bp, Artificial Sequence
  Synthetic: FXN 3 forward 9:69041388-69041413; SpCas9
cacactgtaaatcacactatcc

SEQ ID NO: 35081 - DNA, 21 bp, Artificial Sequence
  Synthetic: FXN 3 forward 9:69041389-69041413; SpCas9
acactgtaaatcacactatcc

SEQ ID NO: 35082 - DNA, 20 bp, Artificial Sequence
  Synthetic: FXN 3 forward 9:69041390-69041413; SpCas9
cactgtaaatcacactatcc

SEQ ID NO: 35083 - DNA, 19 bp, Artificial Sequence
  Synthetic: FXN 3 forward 9:69041391-69041413; SpCas9
actgtaaatcacactatcc

SEQ ID NO: 35084 - DNA, 18 bp, Artificial Sequence
  Synthetic: FXN 3 forward 9:69041392-69041413; SpCas9
ctgtaaatcacactatcc

SEQ ID NO: 35085 - DNA, 25 bp, Artificial Sequence
  Synthetic: FXN 3 reverse 9:69041392-69041420; SpCas9
aaaggaacctggatagtgtgattta

SEQ ID NO: 35086 - DNA, 24 bp, Artificial Sequence
  Synthetic: FXN 3 reverse 9:69041393-69041420; SpCas9
aaggaacctggatagtgtgattta

SEQ ID NO: 35087 - DNA, 23 bp, Artificial Sequence
  Synthetic: FXN 3 reverse 9:69041394-69041420; SpCas9
aggaacctggatagtgtgattta

SEQ ID NO: 35088 - DNA, 22 bp, Artificial Sequence
  Synthetic: FXN 3 reverse 9:69041395-69041420; SpCas9
ggaacctggatagtgtgattta

SEQ ID NO: 35089 - DNA, 21 bp, Artificial Sequence
  Synthetic: FXN 3 reverse 9:69041396-69041420; SpCas9
gaacctggatagtgtgattta

SEQ ID NO: 35090 - DNA, 20 bp, Artificial Sequence
  Synthetic: FXN 3 reverse 9:69041397-69041420; SpCas9
aacctggatagtgtgattta

SEQ ID NO: 35091 - DNA, 19 bp, Artificial Sequence
  Synthetic: FXN 3 reverse 9:69041398-69041420; SpCas9
acctggatagtgtgattta

SEQ ID NO: 35092 - DNA, 18 bp, Artificial Sequence
  Synthetic: FXN 3 reverse 9:69041399-69041420; SpCas9
cctggatagtgtgattta

SEQ ID NO: 35093 - DNA, 25 bp, Artificial Sequence
  Synthetic: FXN 3 forward 9:69041394-69041422; SpCas9
gtaaatcacactatccaggttcctt

SEQ ID NO: 35094 - DNA, 24 bp, Artificial Sequence
  Synthetic: FXN 3 forward 9:69041395-69041422; SpCas9
taaatcacactatccaggttcctt

SEQ ID NO: 35095 - DNA, 23 bp, Artificial Sequence
  Synthetic: FXN 3 forward 9:69041396-69041422; SpCas9
aaatcacactatccaggttcctt

SEQ ID NO: 35096 - DNA, 22 bp, Artificial Sequence
  Synthetic: FXN 3 forward 9:69041397-69041422; SpCas9
aatcacactatccaggttcctt

SEQ ID NO: 35097 - DNA, 21 bp, Artificial Sequence
  Synthetic: FXN 3 forward 9:69041398-69041422; SpCas9
atcacactatccaggttcctt

SEQ ID NO: 35098 - DNA, 20 bp, Artificial Sequence
  Synthetic: FXN 3 forward 9:69041399-69041422; SpCas9
tcacactatccaggttcctt

SEQ ID NO: 35099 - DNA, 19 bp, Artificial Sequence
  Synthetic: FXN 3 forward 9:69041400-69041422; SpCas9
cacactatccaggttcctt

SEQ ID NO: 35100 - DNA, 18 bp, Artificial Sequence
  Synthetic: FXN 3 forward 9:69041401-69041422; SpCas9
acactatccaggttcctt

SEQ ID NO: 35101 - DNA, 25 bp, Artificial Sequence
  Synthetic: FXN 3 forward 9:69041395-69041423; SpCas9
taaatcacactatccaggttccttt

SEQ ID NO: 35102 - DNA, 24 bp, Artificial Sequence
  Synthetic: FXN 3 forward 9:69041396-69041423; SpCas9
aaatcacactatccaggttccttt

SEQ ID NO: 35103 - DNA, 23 bp, Artificial Sequence
  Synthetic: FXN 3 forward 9:69041397-69041423; SpCas9
aatcacactatccaggttccttt

SEQ ID NO: 35104 - DNA, 22 bp, Artificial Sequence
  Synthetic: FXN 3 forward 9:69041398-69041423; SpCas9
atcacactatccaggttccttt

SEQ ID NO: 35105 - DNA, 21 bp, Artificial Sequence
  Synthetic: FXN 3 forward 9:69041399-69041423; SpCas9
tcacactatccaggttccttt

SEQ ID NO: 35106 - DNA, 20 bp, Artificial Sequence
  Synthetic: FXN 3 forward 9:69041400-69041423; SpCas9
cacactatccaggttccttt

SEQ ID NO: 35107 - DNA, 19 bp, Artificial Sequence
  Synthetic: FXN 3 forward 9:69041401-69041423; SpCas9
acactatccaggttccttt

SEQ ID NO: 35108 - DNA, 18 bp, Artificial Sequence
  Synthetic: FXN 3 forward 9:69041402-69041423; SpCas9
cactatccaggttccttt

SEQ ID NO: 35109 - DNA, 25 bp, Artificial Sequence
  Synthetic: FXN 3 reverse 9:69041404-69041432; SpCas9
caaatgtcacctaaaggaacctgga

SEQ ID NO: 35110 - DNA, 24 bp, Artificial Sequence
  Synthetic: FXN 3 reverse 9:69041405-69041432; SpCas9
aaatgtcacctaaaggaacctgga

SEQ ID NO: 35111 - DNA, 23 bp, Artificial Sequence
  Synthetic: FXN 3 reverse 9:69041406-69041432; SpCas9
aatgtcacctaaaggaacctgga

SEQ ID NO: 35112 - DNA, 22 bp, Artificial Sequence
  Synthetic: FXN 3 reverse 9:69041407-69041432; SpCas9
atgtcacctaaaggaacctgga

SEQ ID NO: 35113 - DNA, 21 bp, Artificial Sequence
  Synthetic: FXN 3 reverse 9:69041408-69041432; SpCas9
tgtcacctaaaggaacctgga

SEQ ID NO: 35114 - DNA, 20 bp, Artificial Sequence
  Synthetic: FXN 3 reverse 9:69041409-69041432; SpCas9
gtcacctaaaggaacctgga

SEQ ID NO: 35115 - DNA, 19 bp, Artificial Sequence
  Synthetic: FXN 3 reverse 9:69041410-69041432; SpCas9
tcacctaaaggaacctgga

SEQ ID NO: 35116 - DNA, 18 bp, Artificial Sequence
  Synthetic: FXN 3 reverse 9:69041411-69041432; SpCas9
cacctaaaggaacctgga

SEQ ID NO: 35117 - DNA, 25 bp, Artificial Sequence
  Synthetic: FXN 3 forward 9:69041405-69041433; SpCas9
tatccaggttcctttaggtgacatt

SEQ ID NO: 35118 - DNA, 24 bp, Artificial Sequence
  Synthetic: FXN 3 forward 9:69041406-69041433; SpCas9
atccaggttcctttaggtgacatt

SEQ ID NO: 35119 - DNA, 23 bp, Artificial Sequence
  Synthetic: FXN 3 forward 9:69041407-69041433; SpCas9
tccaggttcctttaggtgacatt

SEQ ID NO: 35120 - DNA, 22 bp, Artificial Sequence
  Synthetic: FXN 3 forward 9:69041408-69041433; SpCas9
ccaggttcctttaggtgacatt

SEQ ID NO: 35121 - DNA, 21 bp, Artificial Sequence
  Synthetic: FXN 3 forward 9:69041409-69041433; SpCas9
caggttcctttaggtgacatt

SEQ ID NO: 35122 - DNA, 20 bp, Artificial Sequence
  Synthetic: FXN 3 forward 9:69041410-69041433; SpCas9
aggttcctttaggtgacatt

SEQ ID NO: 35123 - DNA, 19 bp, Artificial Sequence
  Synthetic: FXN 3 forward 9:69041411-69041433; SpCas9
ggttcctttaggtgacatt

SEQ ID NO: 35124 - DNA, 18 bp, Artificial Sequence
  Synthetic: FXN 3 forward 9:69041412-69041433; SpCas9
gttcctttaggtgacatt

SEQ ID NO: 35125 - DNA, 25 bp, Artificial Sequence
  Synthetic: FXN 3 reverse 9:69041408-69041436; SpCas9
caaccaaatgtcacctaaaggaacc

SEQ ID NO: 35126 - DNA, 24 bp, Artificial Sequence
  Synthetic: FXN 3 reverse 9:69041409-69041436; SpCas9
aaccaaatgtcacctaaaggaacc

SEQ ID NO: 35127 - DNA, 23 bp, Artificial Sequence
  Synthetic: FXN 3 reverse 9:69041410-69041436; SpCas9
accaaatgtcacctaaaggaacc

SEQ ID NO: 35128 - DNA, 22 bp, Artificial Sequence
  Synthetic: FXN 3 reverse 9:69041411-69041436; SpCas9
ccaaatgtcacctaaaggaacc

SEQ ID NO: 35129 - DNA, 21 bp, Artificial Sequence
  Synthetic: FXN 3 reverse 9:69041412-69041436; SpCas9
caaatgtcacctaaaggaacc

SEQ ID NO: 35130 - DNA, 20 bp, Artificial Sequence
  Synthetic: FXN 3 reverse 9:69041413-69041436; SpCas9
aaatgtcacctaaaggaacc

SEQ ID NO: 35131 - DNA, 19 bp, Artificial Sequence
  Synthetic: FXN 3 reverse 9:69041414-69041436; SpCas9
aatgtcacctaaaggaacc

SEQ ID NO: 35132 - DNA, 18 bp, Artificial Sequence
  Synthetic: FXN 3 reverse 9:69041415-69041436; SpCas9
atgtcacctaaaggaacc

SEQ ID NO: 35133 - DNA, 25 bp, Artificial Sequence
  Synthetic: FXN 3 forward 9:69041415-69041443; SpCas9
cctttaggtgacatttggttgattg

SEQ ID NO: 35134 - DNA, 24 bp, Artificial Sequence
  Synthetic: FXN 3 forward 9:69041416-69041443; SpCas9
ctttaggtgacatttggttgattg

SEQ ID NO: 35135 - DNA, 23 bp, Artificial Sequence
  Synthetic: FXN 3 forward 9:69041417-69041443; SpCas9
tttaggtgacatttggttgattg

SEQ ID NO: 35136 - DNA, 22 bp, Artificial Sequence
  Synthetic: FXN 3 forward 9:69041418-69041443; SpCas9
ttaggtgacatttggttgattg

SEQ ID NO: 35137 - DNA, 21 bp, Artificial Sequence
  Synthetic: FXN 3 forward 9:69041419-69041443; SpCas9
taggtgacatttggttgattg

SEQ ID NO: 35138 - DNA, 20 bp, Artificial Sequence
  Synthetic: FXN 3 forward 9:69041420-69041443; SpCas9
aggtgacatttggttgattg

SEQ ID NO: 35139 - DNA, 19 bp, Artificial Sequence
  Synthetic: FXN 3 forward 9:69041421-69041443; SpCas9
ggtgacatttggttgattg

SEQ ID NO: 35140 - DNA, 18 bp, Artificial Sequence
  Synthetic: FXN 3 forward 9:69041422-69041443; SpCas9
gtgacatttggttgattg

SEQ ID NO: 35141 - DNA, 25 bp, Artificial Sequence
  Synthetic: FXN 3 reverse 9:69041415-69041443; SpCas9
ctgcaatcaaccaaatgtcacctaa

SEQ ID NO: 35142 - DNA, 24 bp, Artificial Sequence
  Synthetic: FXN 3 reverse 9:69041416-69041443; SpCas9
tgcaatcaaccaaatgtcacctaa

SEQ ID NO: 35143 - DNA, 23 bp, Artificial Sequence
  Synthetic: FXN 3 reverse 9:69041417-69041443; SpCas9
gcaatcaaccaaatgtcacctaa

SEQ ID NO: 35144 - DNA, 22 bp, Artificial Sequence
  Synthetic: FXN 3 reverse 9:69041418-69041443; SpCas9
caatcaaccaaatgtcacctaa

SEQ ID NO: 35145 - DNA, 21 bp, Artificial Sequence
  Synthetic: FXN 3 reverse 9:69041419-69041443; SpCas9
aatcaaccaaatgtcacctaa

SEQ ID NO: 35146 - DNA, 20 bp, Artificial Sequence
  Synthetic: FXN 3 reverse 9:69041420-69041443; SpCas9
atcaaccaaatgtcacctaa

SEQ ID NO: 35147 - DNA, 19 bp, Artificial Sequence
  Synthetic: FXN 3 reverse 9:69041421-69041443; SpCas9
tcaaccaaatgtcacctaa

SEQ ID NO: 35148 - DNA, 18 bp, Artificial Sequence
  Synthetic: FXN 3 reverse 9:69041422-69041443; SpCas9
caaccaaatgtcacctaa

SEQ ID NO: 35149 - DNA, 25 bp, Artificial Sequence
  Synthetic: FXN 3 reverse 9:69041416-69041444; SpCas9
actgcaatcaaccaaatgtcaccta

SEQ ID NO: 35150 - DNA, 24 bp, Artificial Sequence
  Synthetic: FXN 3 reverse 9:69041417-69041444; SpCas9
ctgcaatcaaccaaatgtcaccta

SEQ ID NO: 35151 - DNA, 23 bp, Artificial Sequence
  Synthetic: FXN 3 reverse 9:69041418-69041444; SpCas9
tgcaatcaaccaaatgtcaccta

SEQ ID NO: 35152 - DNA, 22 bp, Artificial Sequence
  Synthetic: FXN 3 reverse 9:69041419-69041444; SpCas9
gcaatcaaccaaatgtcaccta

SEQ ID NO: 35153 - DNA, 21 bp, Artificial Sequence
  Synthetic: FXN 3 reverse 9:69041420-69041444; SpCas9
caatcaaccaaatgtcaccta

SEQ ID NO: 35154 - DNA, 20 bp, Artificial Sequence
  Synthetic: FXN 3 reverse 9:69041421-69041444; SpCas9
aatcaaccaaatgtcaccta

SEQ ID NO: 35155 - DNA, 19 bp, Artificial Sequence
  Synthetic: FXN 3 reverse 9:69041422-69041444; SpCas9
atcaaccaaatgtcaccta

SEQ ID NO: 35156 - DNA, 18 bp, Artificial Sequence
  Synthetic: FXN 3 reverse 9:69041423-69041444; SpCas9
tcaaccaaatgtcaccta

SEQ ID NO: 35157 - DNA, 25 bp, Artificial Sequence
  Synthetic: FXN 3 forward 9:69041434-69041462; SpCas9
tgattgcagtgttctgttgttacga

SEQ ID NO: 35158 - DNA, 24 bp, Artificial Sequence
  Synthetic: FXN 3 forward 9:69041435-69041462; SpCas9
gattgcagtgttctgttgttacga

SEQ ID NO: 35159 - DNA, 23 bp, Artificial Sequence
  Synthetic: FXN 3 forward 9:69041436-69041462; SpCas9
attgcagtgttctgttgttacga

SEQ ID NO: 35160 - DNA, 22 bp, Artificial Sequence
  Synthetic: FXN 3 forward 9:69041437-69041462; SpCas9
ttgcagtgttctgttgttacga

SEQ ID NO: 35161 - DNA, 21 bp, Artificial Sequence
  Synthetic: FXN 3 forward 9:69041438-69041462; SpCas9
tgcagtgttctgttgttacga

SEQ ID NO: 35162 - DNA, 20 bp, Artificial Sequence
  Synthetic: FXN 3 forward 9:69041439-69041462; SpCas9
gcagtgttctgttgttacga

SEQ ID NO: 35163 - DNA, 19 bp, Artificial Sequence
  Synthetic: FXN 3 forward 9:69041440-69041462; SpCas9
cagtgttctgttgttacga

SEQ ID NO: 35164 - DNA, 18 bp, Artificial Sequence
  Synthetic: FXN 3 forward 9:69041441-69041462; SpCas9
agtgttctgttgttacga

SEQ ID NO: 35165 - DNA, 25 bp, Artificial Sequence
  Synthetic: FXN 3 reverse 9:69041447-69041475; SpCas9
agtcacagcagcaccatcgtaacaa

SEQ ID NO: 35166 - DNA, 24 bp, Artificial Sequence
  Synthetic: FXN 3 reverse 9:69041448-69041475; SpCas9
gtcacagcagcaccatcgtaacaa

SEQ ID NO: 35167 - DNA, 23 bp, Artificial Sequence
  Synthetic: FXN 3 reverse 9:69041449-69041475; SpCas9
tcacagcagcaccatcgtaacaa

SEQ ID NO: 35168 - DNA, 22 bp, Artificial Sequence
  Synthetic: FXN 3 reverse 9:69041450-69041475; SpCas9
cacagcagcaccatcgtaacaa

SEQ ID NO: 35169 - DNA, 21 bp, Artificial Sequence
  Synthetic: FXN 3 reverse 9:69041451-69041475; SpCas9
acagcagcaccatcgtaacaa

SEQ ID NO: 35170 - DNA, 20 bp, Artificial Sequence
  Synthetic: FXN 3 reverse 9:69041452-69041475; SpCas9
cagcagcaccatcgtaacaa

SEQ ID NO: 35171 - DNA, 19 bp, Artificial Sequence
  Synthetic: FXN 3 reverse 9:69041453-69041475; SpCas9
agcagcaccatcgtaacaa

SEQ ID NO: 35172 - DNA, 18 bp, Artificial Sequence
  Synthetic: FXN 3 reverse 9:69041454-69041475; SpCas9
gcagcaccatcgtaacaa

SEQ ID NO: 35173 - DNA, 25 bp, Artificial Sequence
  Synthetic: FXN 3 forward 9:69041461-69041489; SpCas9
gtgctgctgtgactgttcttgtgca

SEQ ID NO: 35174 - DNA, 24 bp, Artificial Sequence
  Synthetic: FXN 3 forward 9:69041462-69041489; SpCas9
tgctgctgtgactgttcttgtgca

SEQ ID NO: 35175 - DNA, 23 bp, Artificial Sequence
  Synthetic: FXN 3 forward 9:69041463-69041489; SpCas9
gctgctgtgactgttcttgtgca

SEQ ID NO: 35176 - DNA, 22 bp, Artificial Sequence
  Synthetic: FXN 3 forward 9:69041464-69041489; SpCas9
ctgctgtgactgttcttgtgca

SEQ ID NO: 35177 - DNA, 21 bp, Artificial Sequence
  Synthetic: FXN 3 forward 9:69041465-69041489; SpCas9
tgctgtgactgttcttgtgca

SEQ ID NO: 35178 - DNA, 20 bp, Artificial Sequence
  Synthetic: FXN 3 forward 9:69041466-69041489; SpCas9
gctgtgactgttcttgtgca

SEQ ID NO: 35179 - DNA, 19 bp, Artificial Sequence
  Synthetic: FXN 3 forward 9:69041467-69041489; SpCas9
ctgtgactgttcttgtgca

SEQ ID NO: 35180 - DNA, 18 bp, Artificial Sequence
  Synthetic: FXN 3 forward 9:69041468-69041489; SpCas9
tgtgactgttcttgtgca

SEQ ID NO: 35181 - DNA, 25 bp, Artificial Sequence
  Synthetic: FXN 3 reverse 9:69041464-69041492; SpCas9
tgtccatgcacaagaacagtcacag

SEQ ID NO: 35182 - DNA, 24 bp, Artificial Sequence
  Synthetic: FXN 3 reverse 9:69041465-69041492; SpCas9
gtccatgcacaagaacagtcacag

SEQ ID NO: 35183 - DNA, 23 bp, Artificial Sequence
  Synthetic: FXN 3 reverse 9:69041466-69041492; SpCas9
tccatgcacaagaacagtcacag

SEQ ID NO: 35184 - DNA, 22 bp, Artificial Sequence
  Synthetic: FXN 3 reverse 9:69041467-69041492; SpCas9
ccatgcacaagaacagtcacag

SEQ ID NO: 35185 - DNA, 21 bp, Artificial Sequence
  Synthetic: FXN 3 reverse 9:69041468-69041492; SpCas9
catgcacaagaacagtcacag

SEQ ID NO: 35186 - DNA, 20 bp, Artificial Sequence
  Synthetic: FXN 3 reverse 9:69041469-69041492; SpCas9
atgcacaagaacagtcacag

SEQ ID NO: 35187 - DNA, 19 bp, Artificial Sequence
  Synthetic: FXN 3 reverse 9:69041470-69041492; SpCas9
tgcacaagaacagtcacag

SEQ ID NO: 35188 - DNA, 18 bp, Artificial Sequence
  Synthetic: FXN 3 reverse 9:69041471-69041492; SpCas9
gcacaagaacagtcacag

SEQ ID NO: 35189 - DNA, 25 bp, Artificial Sequence
  Synthetic: FXN 3 forward 9:69041465-69041493; SpCas9
tgctgtgactgttcttgtgcatgga

SEQ ID NO: 35190 - DNA, 24 bp, Artificial Sequence
  Synthetic: FXN 3 forward 9:69041466-69041493; SpCas9
gctgtgactgttcttgtgcatgga

SEQ ID NO: 35191 - DNA, 23 bp, Artificial Sequence
  Synthetic: FXN 3 forward 9:69041467-69041493; SpCas9
ctgtgactgttcttgtgcatgga

SEQ ID NO: 35192 - DNA, 22 bp, Artificial Sequence
  Synthetic: FXN 3 forward 9:69041468-69041493; SpCas9
tgtgactgttcttgtgcatgga

SEQ ID NO: 35193 - DNA, 21 bp, Artificial Sequence
  Synthetic: FXN 3 forward 9:69041469-69041493; SpCas9
gtgactgttcttgtgcatgga

SEQ ID NO: 35194 - DNA, 20 bp, Artificial Sequence
  Synthetic: FXN 3 forward 9:69041470-69041493; SpCas9
tgactgttcttgtgcatgga

SEQ ID NO: 35195 - DNA, 19 bp, Artificial Sequence
  Synthetic: FXN 3 forward 9:69041471-69041493; SpCas9
gactgttcttgtgcatgga

SEQ ID NO: 35196 - DNA, 18 bp, Artificial Sequence
  Synthetic: FXN 3 forward 9:69041472-69041493; SpCas9
actgttcttgtgcatgga

SEQ ID NO: 35197 - DNA, 25 bp, Artificial Sequence
  Synthetic: FXN 3 reverse 9:69041467-69041495; SpCas9
ttctgtccatgcacaagaacagtca

SEQ ID NO: 35198 - DNA, 24 bp, Artificial Sequence
  Synthetic: FXN 3 reverse 9:69041468-69041495; SpCas9
tctgtccatgcacaagaacagtca

SEQ ID NO: 35199 - DNA, 23 bp, Artificial Sequence
  Synthetic: FXN 3 reverse 9:69041469-69041495; SpCas9
ctgtccatgcacaagaacagtca

SEQ ID NO: 35200 - DNA, 22 bp, Artificial Sequence
  Synthetic: FXN 3 reverse 9:69041470-69041495; SpCas9
tgtccatgcacaagaacagtca

SEQ ID NO: 35201 - DNA, 21 bp, Artificial Sequence
  Synthetic: FXN 3 reverse 9:69041471-69041495; SpCas9
gtccatgcacaagaacagtca

SEQ ID NO: 35202 - DNA, 20 bp, Artificial Sequence
  Synthetic: FXN 3 reverse 9:69041472-69041495; SpCas9
tccatgcacaagaacagtca

SEQ ID NO: 35203 - DNA, 19 bp, Artificial Sequence
  Synthetic: FXN 3 reverse 9:69041473-69041495; SpCas9
ccatgcacaagaacagtca

SEQ ID NO: 35204 - DNA, 18 bp, Artificial Sequence
  Synthetic: FXN 3 reverse 9:69041474-69041495; SpCas9
catgcacaagaacagtca

SEQ ID NO: 35205 - DNA, 25 bp, Artificial Sequence
  Synthetic: FXN 3 forward 9:69041468-69041496; SpCas9
tgtgactgttcttgtgcatggacag

SEQ ID NO: 35206 - DNA, 24 bp, Artificial Sequence
  Synthetic: FXN 3 forward 9:69041469-69041496; SpCas9
gtgactgttcttgtgcatggacag

SEQ ID NO: 35207 - DNA, 23 bp, Artificial Sequence
  Synthetic: FXN 3 forward 9:69041470-69041496; SpCas9
tgactgttcttgtgcatggacag

SEQ ID NO: 35208 - DNA, 22 bp, Artificial Sequence
  Synthetic: FXN 3 forward 9:69041471-69041496; SpCas9
gactgttcttgtgcatggacag

SEQ ID NO: 35209 - DNA, 21 bp, Artificial Sequence
  Synthetic: FXN 3 forward 9:69041472-69041496; SpCas9
actgttcttgtgcatggacag

SEQ ID NO: 35210 - DNA, 20 bp, Artificial Sequence
  Synthetic: FXN 3 forward 9:69041473-69041496; SpCas9
ctgttcttgtgcatggacag

SEQ ID NO: 35211 - DNA, 19 bp, Artificial Sequence
  Synthetic: FXN 3 forward 9:69041474-69041496; SpCas9
tgttcttgtgcatggacag

SEQ ID NO: 35212 - DNA, 18 bp, Artificial Sequence
  Synthetic: FXN 3 forward 9:69041475-69041496; SpCas9
gttcttgtgcatggacag

SEQ ID NO: 35213 - DNA, 25 bp, Artificial Sequence
  Synthetic: FXN 3 reverse 9:69041473-69041501; SpCas9
aggaacttctgtccatgcacaagaa

SEQ ID NO: 35214 - DNA, 24 bp, Artificial Sequence
  Synthetic: FXN 3 reverse 9:69041474-69041501; SpCas9
ggaacttctgtccatgcacaagaa

SEQ ID NO: 35215 - DNA, 23 bp, Artificial Sequence
  Synthetic: FXN 3 reverse 9:69041475-69041501; SpCas9
gaacttctgtccatgcacaagaa

SEQ ID NO: 35216 - DNA, 22 bp, Artificial Sequence
  Synthetic: FXN 3 reverse 9:69041476-69041501; SpCas9
aacttctgtccatgcacaagaa

SEQ ID NO: 35217 - DNA, 21 bp, Artificial Sequence
  Synthetic: FXN 3 reverse 9:69041477-69041501; SpCas9
acttctgtccatgcacaagaa

SEQ ID NO: 35218 - DNA, 20 bp, Artificial Sequence
  Synthetic: FXN 3 reverse 9:69041478-69041501; SpCas9
cttctgtccatgcacaagaa

SEQ ID NO: 35219 - DNA, 19 bp, Artificial Sequence
  Synthetic: FXN 3 reverse 9:69041479-69041501; SpCas9
ttctgtccatgcacaagaa

SEQ ID NO: 35220 - DNA, 18 bp, Artificial Sequence
  Synthetic: FXN 3 reverse 9:69041480-69041501; SpCas9
tctgtccatgcacaagaa

SEQ ID NO: 35221 - DNA, 25 bp, Artificial Sequence
  Synthetic: FXN 3 forward 9:69041478-69041506; SpCas9
cttgtgcatggacagaagttccttt

SEQ ID NO: 35222 - DNA, 24 bp, Artificial Sequence
  Synthetic: FXN 3 forward 9:69041479-69041506; SpCas9
ttgtgcatggacagaagttccttt

SEQ ID NO: 35223 - DNA, 23 bp, Artificial Sequence
  Synthetic: FXN 3 forward 9:69041480-69041506; SpCas9
tgtgcatggacagaagttccttt

SEQ ID NO: 35224 - DNA, 22 bp, Artificial Sequence
  Synthetic: FXN 3 forward 9:69041481-69041506; SpCas9
gtgcatggacagaagttccttt

SEQ ID NO: 35225 - DNA, 21 bp, Artificial Sequence
  Synthetic: FXN 3 forward 9:69041482-69041506; SpCas9
tgcatggacagaagttccttt

SEQ ID NO: 35226 - DNA, 20 bp, Artificial Sequence
  Synthetic: FXN 3 forward 9:69041483-69041506; SpCas9
gcatggacagaagttccttt

SEQ ID NO: 35227 - DNA, 19 bp, Artificial Sequence
  Synthetic: FXN 3 forward 9:69041484-69041506; SpCas9
catggacagaagttccttt

SEQ ID NO: 35228 - DNA, 18 bp, Artificial Sequence
  Synthetic: FXN 3 forward 9:69041485-69041506; SpCas9
atggacagaagttccttt

SEQ ID NO: 35229 - DNA, 25 bp, Artificial Sequence
  Synthetic: FXN 3 reverse 9:69041478-69041506; SpCas9
ctgaaaggaacttctgtccatgcac

SEQ ID NO: 35230 - DNA, 24 bp, Artificial Sequence
  Synthetic: FXN 3 reverse 9:69041479-69041506; SpCas9
tgaaaggaacttctgtccatgcac

SEQ ID NO: 35231 - DNA, 23 bp, Artificial Sequence
  Synthetic: FXN 3 reverse 9:69041480-69041506; SpCas9
gaaaggaacttctgtccatgcac

SEQ ID NO: 35232 - DNA, 22 bp, Artificial Sequence
  Synthetic: FXN 3 reverse 9:69041481-69041506; SpCas9
aaaggaacttctgtccatgcac

SEQ ID NO: 35233 - DNA, 21 bp, Artificial Sequence
  Synthetic: FXN 3 reverse 9:69041482-69041506; SpCas9
aaggaacttctgtccatgcac

SEQ ID NO: 35234 - DNA, 20 bp, Artificial Sequence
  Synthetic: FXN 3 reverse 9:69041483-69041506; SpCas9
aggaacttctgtccatgcac

SEQ ID NO: 35235 - DNA, 19 bp, Artificial Sequence
  Synthetic: FXN 3 reverse 9:69041484-69041506; SpCas9
ggaacttctgtccatgcac

SEQ ID NO: 35236 - DNA, 18 bp, Artificial Sequence
  Synthetic: FXN 3 reverse 9:69041485-69041506; SpCas9
gaacttctgtccatgcac

SEQ ID NO: 35237 - DNA, 25 bp, Artificial Sequence
  Synthetic: FXN 3 forward 9:69041479-69041507; SpCas9
ttgtgcatggacagaagttcctttc

SEQ ID NO: 35238 - DNA, 24 bp, Artificial Sequence
  Synthetic: FXN 3 forward 9:69041480-69041507; SpCas9
tgtgcatggacagaagttcctttc

SEQ ID NO: 35239 - DNA, 23 bp, Artificial Sequence
  Synthetic: FXN 3 forward 9:69041481-69041507; SpCas9
gtgcatggacagaagttcctttc

SEQ ID NO: 35240 - DNA, 22 bp, Artificial Sequence
  Synthetic: FXN 3 forward 9:69041482-69041507; SpCas9
tgcatggacagaagttcctttc

SEQ ID NO: 35241 - DNA, 21 bp, Artificial Sequence
  Synthetic: FXN 3 forward 9:69041483-69041507; SpCas9
gcatggacagaagttcctttc

SEQ ID NO: 35242 - DNA, 20 bp, Artificial Sequence
  Synthetic: FXN 3 forward 9:69041484-69041507; SpCas9
catggacagaagttcctttc

SEQ ID NO: 35243 - DNA, 19 bp, Artificial Sequence
  Synthetic: FXN 3 forward 9:69041485-69041507; SpCas9
atggacagaagttcctttc

SEQ ID NO: 35244 - DNA, 18 bp, Artificial Sequence
  Synthetic: FXN 3 forward 9:69041486-69041507; SpCas9
tggacagaagttcctttc

SEQ ID NO: 35245 - DNA, 25 bp, Artificial Sequence
  Synthetic: FXN 3 forward 9:69041491-69041519; SpCas9
agaagttcctttcaggtgaatttct

SEQ ID NO: 35246 - DNA, 24 bp, Artificial Sequence
  Synthetic: FXN 3 forward 9:69041492-69041519; SpCas9
gaagttcctttcaggtgaatttct

SEQ ID NO: 35247 - DNA, 23 bp, Artificial Sequence
  Synthetic: FXN 3 forward 9:69041493-69041519; SpCas9
aagttcctttcaggtgaatttct

SEQ ID NO: 35248 - DNA, 22 bp, Artificial Sequence
  Synthetic: FXN 3 forward 9:69041494-69041519; SpCas9
agttcctttcaggtgaatttct

SEQ ID NO: 35249 - DNA, 21 bp, Artificial Sequence
  Synthetic: FXN 3 forward 9:69041495-69041519; SpCas9
gttcctttcaggtgaatttct

SEQ ID NO: 35250 - DNA, 20 bp, Artificial Sequence
  Synthetic: FXN 3 forward 9:69041496-69041519; SpCas9
ttcctttcaggtgaatttct

SEQ ID NO: 35251 - DNA, 19 bp, Artificial Sequence
  Synthetic: FXN 3 forward 9:69041497-69041519; SpCas9
tcctttcaggtgaatttct

SEQ ID NO: 35252 - DNA, 18 bp, Artificial Sequence
  Synthetic: FXN 3 forward 9:69041498-69041519; SpCas9
cctttcaggtgaatttct

SEQ ID NO: 35253 - DNA, 25 bp, Artificial Sequence
  Synthetic: FXN 3 forward 9:69041496-69041524; SpCas9
ttcctttcaggtgaatttctcagaa

SEQ ID NO: 35254 - DNA, 24 bp, Artificial Sequence
  Synthetic: FXN 3 forward 9:69041497-69041524; SpCas9
tcctttcaggtgaatttctcagaa

SEQ ID NO: 35255 - DNA, 23 bp, Artificial Sequence
  Synthetic: FXN 3 forward 9:69041498-69041524; SpCas9
cctttcaggtgaatttctcagaa

SEQ ID NO: 35256 - DNA, 22 bp, Artificial Sequence
  Synthetic: FXN 3 forward 9:69041499-69041524; SpCas9
ctttcaggtgaatttctcagaa

SEQ ID NO: 35257 - DNA, 21 bp, Artificial Sequence
  Synthetic: FXN 3 forward 9:69041500-69041524; SpCas9
tttcaggtgaatttctcagaa

SEQ ID NO: 35258 - DNA, 20 bp, Artificial Sequence
  Synthetic: FXN 3 forward 9:69041501-69041524; SpCas9
ttcaggtgaatttctcagaa

SEQ ID NO: 35259 - DNA, 19 bp, Artificial Sequence
  Synthetic: FXN 3 forward 9:69041502-69041524; SpCas9
tcaggtgaatttctcagaa

SEQ ID NO: 35260 - DNA, 18 bp, Artificial Sequence
  Synthetic: FXN 3 forward 9:69041503-69041524; SpCas9
caggtgaatttctcagaa

SEQ ID NO: 35261 - DNA, 25 bp, Artificial Sequence
  Synthetic: FXN 3 reverse 9:69041498-69041526; SpCas9
ttccattctgagaaattcacctgaa

SEQ ID NO: 35262 - DNA, 24 bp, Artificial Sequence
  Synthetic: FXN 3 reverse 9:69041499-69041526; SpCas9
tccattctgagaaattcacctgaa

SEQ ID NO: 35263 - DNA, 23 bp, Artificial Sequence
  Synthetic: FXN 3 reverse 9:69041500-69041526; SpCas9
ccattctgagaaattcacctgaa

SEQ ID NO: 35264 - DNA, 22 bp, Artificial Sequence
  Synthetic: FXN 3 reverse 9:69041501-69041526; SpCas9
cattctgagaaattcacctgaa

SEQ ID NO: 35265 - DNA, 21 bp, Artificial Sequence
  Synthetic: FXN 3 reverse 9:69041502-69041526; SpCas9
attctgagaaattcacctgaa

SEQ ID NO: 35266 - DNA, 20 bp, Artificial Sequence
  Synthetic: FXN 3 reverse 9:69041503-69041526; SpCas9
ttctgagaaattcacctgaa

SEQ ID NO: 35267 - DNA, 19 bp, Artificial Sequence
  Synthetic: FXN 3 reverse 9:69041504-69041526; SpCas9
tctgagaaattcacctgaa

SEQ ID NO: 35268 - DNA, 18 bp, Artificial Sequence
  Synthetic: FXN 3 reverse 9:69041505-69041526; SpCas9
ctgagaaattcacctgaa

SEQ ID NO: 35269 - DNA, 25 bp, Artificial Sequence
  Synthetic: FXN 3 reverse 9:69041499-69041527; SpCas9
attccattctgagaaattcacctga

SEQ ID NO: 35270 - DNA, 24 bp, Artificial Sequence
  Synthetic: FXN 3 reverse 9:69041500-69041527; SpCas9
ttccattctgagaaattcacctga

SEQ ID NO: 35271 - DNA, 23 bp, Artificial Sequence
  Synthetic: FXN 3 reverse 9:69041501-69041527; SpCas9
tccattctgagaaattcacctga

SEQ ID NO: 35272 - DNA, 22 bp, Artificial Sequence
  Synthetic: FXN 3 reverse 9:69041502-69041527; SpCas9
ccattctgagaaattcacctga

SEQ ID NO: 35273 - DNA, 21 bp, Artificial Sequence
  Synthetic: FXN 3 reverse 9:69041503-69041527; SpCas9
cattctgagaaattcacctga

SEQ ID NO: 35274 - DNA, 20 bp, Artificial Sequence
  Synthetic: FXN 3 reverse 9:69041504-69041527; SpCas9
attctgagaaattcacctga

SEQ ID NO: 35275 - DNA, 19 bp, Artificial Sequence
  Synthetic: FXN 3 reverse 9:69041505-69041527; SpCas9
ttctgagaaattcacctga

SEQ ID NO: 35276 - DNA, 18 bp, Artificial Sequence
  Synthetic: FXN 3 reverse 9:69041506-69041527; SpCas9
tctgagaaattcacctga

SEQ ID NO: 35277 - DNA, 25 bp, Artificial Sequence
  Synthetic: FXN 3 forward 9:69041505-69041533; SpCas9
ggtgaatttctcagaatggaattgc

SEQ ID NO: 35278 - DNA, 24 bp, Artificial Sequence
  Synthetic: FXN 3 forward 9:69041506-69041533; SpCas9
gtgaatttctcagaatggaattgc

SEQ ID NO: 35279 - DNA, 23 bp, Artificial Sequence
  Synthetic: FXN 3 forward 9:69041507-69041533; SpCas9
tgaatttctcagaatggaattgc

SEQ ID NO: 35280 - DNA, 22 bp, Artificial Sequence
  Synthetic: FXN 3 forward 9:69041508-69041533; SpCas9
gaatttctcagaatggaattgc

SEQ ID NO: 35281 - DNA, 21 bp, Artificial Sequence
  Synthetic: FXN 3 forward 9:69041509-69041533; SpCas9
aatttctcagaatggaattgc

SEQ ID NO: 35282 - DNA, 20 bp, Artificial Sequence
  Synthetic: FXN 3 forward 9:69041510-69041533; SpCas9
atttctcagaatggaattgc

SEQ ID NO: 35283 - DNA, 19 bp, Artificial Sequence
  Synthetic: FXN 3 forward 9:69041511-69041533; SpCas9
tttctcagaatggaattgc

SEQ ID NO: 35284 - DNA, 18 bp, Artificial Sequence
  Synthetic: FXN 3 forward 9:69041512-69041533; SpCas9
ttctcagaatggaattgc

SEQ ID NO: 35285 - DNA, 25 bp, Artificial Sequence
  Synthetic: FXN 3 forward 9:69041506-69041534; SpCas9
gtgaatttctcagaatggaattgct

SEQ ID NO: 35286 - DNA, 24 bp, Artificial Sequence
  Synthetic: FXN 3 forward 9:69041507-69041534; SpCas9
tgaatttctcagaatggaattgct

SEQ ID NO: 35287 - DNA, 23 bp, Artificial Sequence
  Synthetic: FXN 3 forward 9:69041508-69041534; SpCas9
gaatttctcagaatggaattgct

SEQ ID NO: 35288 - DNA, 22 bp, Artificial Sequence
  Synthetic: FXN 3 forward 9:69041509-69041534; SpCas9
aatttctcagaatggaattgct

SEQ ID NO: 35289 - DNA, 21 bp, Artificial Sequence
  Synthetic: FXN 3 forward 9:69041510-69041534; SpCas9
atttctcagaatggaattgct

SEQ ID NO: 35290 - DNA, 20 bp, Artificial Sequence
  Synthetic: FXN 3 forward 9:69041511-69041534; SpCas9
tttctcagaatggaattgct

SEQ ID NO: 35291 - DNA, 19 bp, Artificial Sequence
  Synthetic: FXN 3 forward 9:69041512-69041534; SpCas9
ttctcagaatggaattgct

SEQ ID NO: 35292 - DNA, 18 bp, Artificial Sequence
  Synthetic: FXN 3 forward 9:69041513-69041534; SpCas9
tctcagaatggaattgct

SEQ ID NO: 35293 - DNA, 25 bp, Artificial Sequence
  Synthetic: FXN 3 forward 9:69041511-69041539; SpCas9
tttctcagaatggaattgctgggca

SEQ ID NO: 35294 - DNA, 24 bp, Artificial Sequence
  Synthetic: FXN 3 forward 9:69041512-69041539; SpCas9
ttctcagaatggaattgctgggca

SEQ ID NO: 35295 - DNA, 23 bp, Artificial Sequence
  Synthetic: FXN 3 forward 9:69041513-69041539; SpCas9
tctcagaatggaattgctgggca

SEQ ID NO: 35296 - DNA, 22 bp, Artificial Sequence
  Synthetic: FXN 3 forward 9:69041514-69041539; SpCas9
ctcagaatggaattgctgggca

SEQ ID NO: 35297 - DNA, 21 bp, Artificial Sequence
  Synthetic: FXN 3 forward 9:69041515-69041539; SpCas9
tcagaatggaattgctgggca

SEQ ID NO: 35298 - DNA, 20 bp, Artificial Sequence
  Synthetic: FXN 3 forward 9:69041516-69041539; SpCas9
cagaatggaattgctgggca

SEQ ID NO: 35299 - DNA, 19 bp, Artificial Sequence
  Synthetic: FXN 3 forward 9:69041517-69041539; SpCas9
agaatggaattgctgggca

SEQ ID NO: 35300 - DNA, 18 bp, Artificial Sequence
  Synthetic: FXN 3 forward 9:69041518-69041539; SpCas9
gaatggaattgctgggca

SEQ ID NO: 35301 - DNA, 25 bp, Artificial Sequence
  Synthetic: FXN 3 forward 9:69041512-69041540; SpCas9
ttctcagaatggaattgctgggcaa

SEQ ID NO: 35302 - DNA, 24 bp, Artificial Sequence
  Synthetic: FXN 3 forward 9:69041513-69041540; SpCas9
tctcagaatggaattgctgggcaa

SEQ ID NO: 35303 - DNA, 23 bp, Artificial Sequence
  Synthetic: FXN 3 forward 9:69041514-69041540; SpCas9
ctcagaatggaattgctgggcaa

SEQ ID NO: 35304 - DNA, 22 bp, Artificial Sequence
  Synthetic: FXN 3 forward 9:69041515-69041540; SpCas9
tcagaatggaattgctgggcaa

SEQ ID NO: 35305 - DNA, 21 bp, Artificial Sequence
  Synthetic: FXN 3 forward 9:69041516-69041540; SpCas9
cagaatggaattgctgggcaa

SEQ ID NO: 35306 - DNA, 20 bp, Artificial Sequence
  Synthetic: FXN 3 forward 9:69041517-69041540; SpCas9
agaatggaattgctgggcaa

SEQ ID NO: 35307 - DNA, 19 bp, Artificial Sequence
  Synthetic: FXN 3 forward 9:69041518-69041540; SpCas9
gaatggaattgctgggcaa

SEQ ID NO: 35308 - DNA, 18 bp, Artificial Sequence
  Synthetic: FXN 3 forward 9:69041519-69041540; SpCas9
aatggaattgctgggcaa

SEQ ID NO: 35309 - DNA, 25 bp, Artificial Sequence
  Synthetic: FXN 3 forward 9:69041513-69041541; SpCas9
tctcagaatggaattgctgggcaaa

SEQ ID NO: 35310 - DNA, 24 bp, Artificial Sequence
  Synthetic: FXN 3 forward 9:69041514-69041541; SpCas9
ctcagaatggaattgctgggcaaa

SEQ ID NO: 35311 - DNA, 23 bp, Artificial Sequence
  Synthetic: FXN 3 forward 9:69041515-69041541; SpCas9
tcagaatggaattgctgggcaaa

SEQ ID NO: 35312 - DNA, 22 bp, Artificial Sequence
  Synthetic: FXN 3 forward 9:69041516-69041541; SpCas9
cagaatggaattgctgggcaaa

SEQ ID NO: 35313 - DNA, 21 bp, Artificial Sequence
  Synthetic: FXN 3 forward 9:69041517-69041541; SpCas9
agaatggaattgctgggcaaa

SEQ ID NO: 35314 - DNA, 20 bp, Artificial Sequence
  Synthetic: FXN 3 forward 9:69041518-69041541; SpCas9
gaatggaattgctgggcaaa

SEQ ID NO: 35315 - DNA, 19 bp, Artificial Sequence
  Synthetic: FXN 3 forward 9:69041519-69041541; SpCas9
aatggaattgctgggcaaa

SEQ ID NO: 35316 - DNA, 18 bp, Artificial Sequence
  Synthetic: FXN 3 forward 9:69041520-69041541; SpCas9
atggaattgctgggcaaa

SEQ ID NO: 35317 - DNA, 25 bp, Artificial Sequence
  Synthetic: FXN 3 forward 9:69041514-69041542; SpCas9
ctcagaatggaattgctgggcaaag

SEQ ID NO: 35318 - DNA, 24 bp, Artificial Sequence
  Synthetic: FXN 3 forward 9:69041515-69041542; SpCas9
tcagaatggaattgctgggcaaag

SEQ ID NO: 35319 - DNA, 23 bp, Artificial Sequence
  Synthetic: FXN 3 forward 9:69041516-69041542; SpCas9
cagaatggaattgctgggcaaag

SEQ ID NO: 35320 - DNA, 22 bp, Artificial Sequence
  Synthetic: FXN 3 forward 9:69041517-69041542; SpCas9
agaatggaattgctgggcaaag

SEQ ID NO: 35321 - DNA, 21 bp, Artificial Sequence
  Synthetic: FXN 3 forward 9:69041518-69041542; SpCas9
gaatggaattgctgggcaaag

SEQ ID NO: 35322 - DNA, 20 bp, Artificial Sequence
  Synthetic: FXN 3 forward 9:69041519-69041542; SpCas9
aatggaattgctgggcaaag

SEQ ID NO: 35323 - DNA, 19 bp, Artificial Sequence
  Synthetic: FXN 3 forward 9:69041520-69041542; SpCas9
atggaattgctgggcaaag

SEQ ID NO: 35324 - DNA, 18 bp, Artificial Sequence
  Synthetic: FXN 3 forward 9:69041521-69041542; SpCas9
tggaattgctgggcaaag

SEQ ID NO: 35325 - DNA, 25 bp, Artificial Sequence
  Synthetic: FXN 3 reverse 9:69041514-69041542; SpCas9
cccctttgcccagcaattccattct

SEQ ID NO: 35326 - DNA, 24 bp, Artificial Sequence
  Synthetic: FXN 3 reverse 9:69041515-69041542; SpCas9
ccctttgcccagcaattccattct

SEQ ID NO: 35327 - DNA, 23 bp, Artificial Sequence
  Synthetic: FXN 3 reverse 9:69041516-69041542; SpCas9
cctttgcccagcaattccattct

SEQ ID NO: 35328 - DNA, 22 bp, Artificial Sequence
  Synthetic: FXN 3 reverse 9:69041517-69041542; SpCas9
ctttgcccagcaattccattct

SEQ ID NO: 35329 - DNA, 21 bp, Artificial Sequence
  Synthetic: FXN 3 reverse 9:69041518-69041542; SpCas9
tttgcccagcaattccattct

SEQ ID NO: 35330 - DNA, 20 bp, Artificial Sequence
  Synthetic: FXN 3 reverse 9:69041519-69041542; SpCas9
ttgcccagcaattccattct

SEQ ID NO: 35331 - DNA, 19 bp, Artificial Sequence
  Synthetic: FXN 3 reverse 9:69041520-69041542; SpCas9
tgcccagcaattccattct

SEQ ID NO: 35332 - DNA, 18 bp, Artificial Sequence
  Synthetic: FXN 3 reverse 9:69041521-69041542; SpCas9
gcccagcaattccattct

SEQ ID NO: 35333 - DNA, 25 bp, Artificial Sequence
  Synthetic: FXN 3 forward 9:69041517-69041545; SpCas9
agaatggaattgctgggcaaagggg

SEQ ID NO: 35334 - DNA, 24 bp, Artificial Sequence
  Synthetic: FXN 3 forward 9:69041518-69041545; SpCas9
gaatggaattgctgggcaaagggg

SEQ ID NO: 35335 - DNA, 23 bp, Artificial Sequence
  Synthetic: FXN 3 forward 9:69041519-69041545; SpCas9
aatggaattgctgggcaaagggg

SEQ ID NO: 35336 - DNA, 22 bp, Artificial Sequence
  Synthetic: FXN 3 forward 9:69041520-69041545; SpCas9
atggaattgctgggcaaagggg

SEQ ID NO: 35337 - DNA, 21 bp, Artificial Sequence
  Synthetic: FXN 3 forward 9:69041521-69041545; SpCas9
tggaattgctgggcaaagggg

SEQ ID NO: 35338 - DNA, 20 bp, Artificial Sequence
  Synthetic: FXN 3 forward 9:69041522-69041545; SpCas9
ggaattgctgggcaaagggg

SEQ ID NO: 35339 - DNA, 19 bp, Artificial Sequence
  Synthetic: FXN 3 forward 9:69041523-69041545; SpCas9
gaattgctgggcaaagggg

SEQ ID NO: 35340 - DNA, 18 bp, Artificial Sequence
  Synthetic: FXN 3 forward 9:69041524-69041545; SpCas9
aattgctgggcaaagggg

SEQ ID NO: 35341 - DNA, 25 bp, Artificial Sequence
  Synthetic: FXN 3 reverse 9:69041529-69041557; SpCas9
gttgattattggctgcccctttgcc

SEQ ID NO: 35342 - DNA, 24 bp, Artificial Sequence
  Synthetic: FXN 3 reverse 9:69041530-69041557; SpCas9
ttgattattggctgcccctttgcc

SEQ ID NO: 35343 - DNA, 23 bp, Artificial Sequence
  Synthetic: FXN 3 reverse 9:69041531-69041557; SpCas9
tgattattggctgcccctttgcc

SEQ ID NO: 35344 - DNA, 22 bp, Artificial Sequence
  Synthetic: FXN 3 reverse 9:69041532-69041557; SpCas9
gattattggctgcccctttgcc

SEQ ID NO: 35345 - DNA, 21 bp, Artificial Sequence
  Synthetic: FXN 3 reverse 9:69041533-69041557; SpCas9
attattggctgcccctttgcc

SEQ ID NO: 35346 - DNA, 20 bp, Artificial Sequence
  Synthetic: FXN 3 reverse 9:69041534-69041557; SpCas9
ttattggctgcccctttgcc

SEQ ID NO: 35347 - DNA, 19 bp, Artificial Sequence
  Synthetic: FXN 3 reverse 9:69041535-69041557; SpCas9
tattggctgcccctttgcc

SEQ ID NO: 35348 - DNA, 18 bp, Artificial Sequence
  Synthetic: FXN 3 reverse 9:69041536-69041557; SpCas9
attggctgcccctttgcc

SEQ ID NO: 35349 - DNA, 25 bp, Artificial Sequence
  Synthetic: FXN 3 reverse 9:69041545-69041573; SpCas9
ttttggcatcaaatgagttgattat

SEQ ID NO: 35350 - DNA, 24 bp, Artificial Sequence
  Synthetic: FXN 3 reverse 9:69041546-69041573; SpCas9
tttggcatcaaatgagttgattat

SEQ ID NO: 35351 - DNA, 23 bp, Artificial Sequence
  Synthetic: FXN 3 reverse 9:69041547-69041573; SpCas9
ttggcatcaaatgagttgattat

SEQ ID NO: 35352 - DNA, 22 bp, Artificial Sequence
  Synthetic: FXN 3 reverse 9:69041548-69041573; SpCas9
tggcatcaaatgagttgattat

SEQ ID NO: 35353 - DNA, 21 bp, Artificial Sequence
  Synthetic: FXN 3 reverse 9:69041549-69041573; SpCas9
ggcatcaaatgagttgattat

SEQ ID NO: 35354 - DNA, 20 bp, Artificial Sequence
  Synthetic: FXN 3 reverse 9:69041550-69041573; SpCas9
gcatcaaatgagttgattat

SEQ ID NO: 35355 - DNA, 19 bp, Artificial Sequence
  Synthetic: FXN 3 reverse 9:69041551-69041573; SpCas9
catcaaatgagttgattat

SEQ ID NO: 35356 - DNA, 18 bp, Artificial Sequence
  Synthetic: FXN 3 reverse 9:69041552-69041573; SpCas9
atcaaatgagttgattat

SEQ ID NO: 35357 - DNA, 25 bp, Artificial Sequence
  Synthetic: FXN 3 forward 9:69041546-69041574; SpCas9
caataatcaactcatttgatgccaa

SEQ ID NO: 35358 - DNA, 24 bp, Artificial Sequence
  Synthetic: FXN 3 forward 9:69041547-69041574; SpCas9
aataatcaactcatttgatgccaa

SEQ ID NO: 35359 - DNA, 23 bp, Artificial Sequence
  Synthetic: FXN 3 forward 9:69041548-69041574; SpCas9
ataatcaactcatttgatgccaa

SEQ ID NO: 35360 - DNA, 22 bp, Artificial Sequence
  Synthetic: FXN 3 forward 9:69041549-69041574; SpCas9
taatcaactcatttgatgccaa

SEQ ID NO: 35361 - DNA, 21 bp, Artificial Sequence
  Synthetic: FXN 3 forward 9:69041550-69041574; SpCas9
aatcaactcatttgatgccaa

SEQ ID NO: 35362 - DNA, 20 bp, Artificial Sequence
  Synthetic: FXN 3 forward 9:69041551-69041574; SpCas9
atcaactcatttgatgccaa

SEQ ID NO: 35363 - DNA, 19 bp, Artificial Sequence
  Synthetic: FXN 3 forward 9:69041552-69041574; SpCas9
tcaactcatttgatgccaa

SEQ ID NO: 35364 - DNA, 18 bp, Artificial Sequence
  Synthetic: FXN 3 forward 9:69041553-69041574; SpCas9
caactcatttgatgccaa

SEQ ID NO: 35365 - DNA, 25 bp, Artificial Sequence
  Synthetic: FXN 3 forward 9:69041549-69041577; SpCas9
taatcaactcatttgatgccaaaag

SEQ ID NO: 35366 - DNA, 24 bp, Artificial Sequence
  Synthetic: FXN 3 forward 9:69041550-69041577; SpCas9
aatcaactcatttgatgccaaaag

SEQ ID NO: 35367 - DNA, 23 bp, Artificial Sequence
  Synthetic: FXN 3 forward 9:69041551-69041577; SpCas9
atcaactcatttgatgccaaaag

SEQ ID NO: 35368 - DNA, 22 bp, Artificial Sequence
  Synthetic: FXN 3 forward 9:69041552-69041577; SpCas9
tcaactcatttgatgccaaaag

SEQ ID NO: 35369 - DNA, 21 bp, Artificial Sequence
  Synthetic: FXN 3 forward 9:69041553-69041577; SpCas9
caactcatttgatgccaaaag

SEQ ID NO: 35370 - DNA, 20 bp, Artificial Sequence
  Synthetic: FXN 3 forward 9:69041554-69041577; SpCas9
aactcatttgatgccaaaag

SEQ ID NO: 35371 - DNA, 19 bp, Artificial Sequence
  Synthetic: FXN 3 forward 9:69041555-69041577; SpCas9
actcatttgatgccaaaag

SEQ ID NO: 35372 - DNA, 18 bp, Artificial Sequence
  Synthetic: FXN 3 forward 9:69041556-69041577; SpCas9
ctcatttgatgccaaaag

SEQ ID NO: 35373 - DNA, 25 bp, Artificial Sequence
  Synthetic: FXN 3 forward 9:69041552-69041580; SpCas9
tcaactcatttgatgccaaaagtgg

SEQ ID NO: 35374 - DNA, 24 bp, Artificial Sequence
  Synthetic: FXN 3 forward 9:69041553-69041580; SpCas9
caactcatttgatgccaaaagtgg

SEQ ID NO: 35375 - DNA, 23 bp, Artificial Sequence
  Synthetic: FXN 3 forward 9:69041554-69041580; SpCas9
aactcatttgatgccaaaagtgg

SEQ ID NO: 35376 - DNA, 22 bp, Artificial Sequence
  Synthetic: FXN 3 forward 9:69041555-69041580; SpCas9
actcatttgatgccaaaagtgg

SEQ ID NO: 35377 - DNA, 21 bp, Artificial Sequence
  Synthetic: FXN 3 forward 9:69041556-69041580; SpCas9
ctcatttgatgccaaaagtgg

SEQ ID NO: 35378 - DNA, 20 bp, Artificial Sequence
  Synthetic: FXN 3 forward 9:69041557-69041580; SpCas9
tcatttgatgccaaaagtgg

SEQ ID NO: 35379 - DNA, 19 bp, Artificial Sequence
  Synthetic: FXN 3 forward 9:69041558-69041580; SpCas9
catttgatgccaaaagtgg

SEQ ID NO: 35380 - DNA, 18 bp, Artificial Sequence
  Synthetic: FXN 3 forward 9:69041559-69041580; SpCas9
atttgatgccaaaagtgg

SEQ ID NO: 35381 - DNA, 25 bp, Artificial Sequence
  Synthetic: FXN 3 reverse 9:69041556-69041584; SpCas9
ggcaccaccacttttggcatcaaat

SEQ ID NO: 35382 - DNA, 24 bp, Artificial Sequence
  Synthetic: FXN 3 reverse 9:69041557-69041584; SpCas9
gcaccaccacttttggcatcaaat

SEQ ID NO: 35383 - DNA, 23 bp, Artificial Sequence
  Synthetic: FXN 3 reverse 9:69041558-69041584; SpCas9
caccaccacttttggcatcaaat

SEQ ID NO: 35384 - DNA, 22 bp, Artificial Sequence
  Synthetic: FXN 3 reverse 9:69041559-69041584; SpCas9
accaccacttttggcatcaaat

SEQ ID NO: 35385 - DNA, 21 bp, Artificial Sequence
  Synthetic: FXN 3 reverse 9:69041560-69041584; SpCas9
ccaccacttttggcatcaaat

SEQ ID NO: 35386 - DNA, 20 bp, Artificial Sequence
  Synthetic: FXN 3 reverse 9:69041561-69041584; SpCas9
caccacttttggcatcaaat

SEQ ID NO: 35387 - DNA, 19 bp, Artificial Sequence
  Synthetic: FXN 3 reverse 9:69041562-69041584; SpCas9
accacttttggcatcaaat

SEQ ID NO: 35388 - DNA, 18 bp, Artificial Sequence
  Synthetic: FXN 3 reverse 9:69041563-69041584; SpCas9
ccacttttggcatcaaat

SEQ ID NO: 35389 - DNA, 25 bp, Artificial Sequence
  Synthetic: FXN 3 forward 9:69041558-69041586; SpCas9
catttgatgccaaaagtggtggtgc

SEQ ID NO: 35390 - DNA, 24 bp, Artificial Sequence
  Synthetic: FXN 3 forward 9:69041559-69041586; SpCas9
atttgatgccaaaagtggtggtgc

SEQ ID NO: 35391 - DNA, 23 bp, Artificial Sequence
  Synthetic: FXN 3 forward 9:69041560-69041586; SpCas9
tttgatgccaaaagtggtggtgc

SEQ ID NO: 35392 - DNA, 22 bp, Artificial Sequence
  Synthetic: FXN 3 forward 9:69041561-69041586; SpCas9
ttgatgccaaaagtggtggtgc

SEQ ID NO: 35393 - DNA, 21 bp, Artificial Sequence
  Synthetic: FXN 3 forward 9:69041562-69041586; SpCas9
tgatgccaaaagtggtggtgc

SEQ ID NO: 35394 - DNA, 20 bp, Artificial Sequence
  Synthetic: FXN 3 forward 9:69041563-69041586; SpCas9
gatgccaaaagtggtggtgc

SEQ ID NO: 35395 - DNA, 19 bp, Artificial Sequence
  Synthetic: FXN 3 forward 9:69041564-69041586; SpCas9
atgccaaaagtggtggtgc

SEQ ID NO: 35396 - DNA, 18 bp, Artificial Sequence
  Synthetic: FXN 3 forward 9:69041565-69041586; SpCas9
tgccaaaagtggtggtgc

SEQ ID NO: 35397 - DNA, 25 bp, Artificial Sequence
  Synthetic: FXN 3 reverse 9:69041567-69041595; SpCas9
gaggatgaactggcaccaccacttt

SEQ ID NO: 35398 - DNA, 24 bp, Artificial Sequence
  Synthetic: FXN 3 reverse 9:69041568-69041595; SpCas9
aggatgaactggcaccaccacttt

SEQ ID NO: 35399 - DNA, 23 bp, Artificial Sequence
  Synthetic: FXN 3 reverse 9:69041569-69041595; SpCas9
ggatgaactggcaccaccacttt

SEQ ID NO: 35400 - DNA, 22 bp, Artificial Sequence
  Synthetic: FXN 3 reverse 9:69041570-69041595; SpCas9
gatgaactggcaccaccacttt

SEQ ID NO: 35401 - DNA, 21 bp, Artificial Sequence
  Synthetic: FXN 3 reverse 9:69041571-69041595; SpCas9
atgaactggcaccaccacttt

SEQ ID NO: 35402 - DNA, 20 bp, Artificial Sequence
  Synthetic: FXN 3 reverse 9:69041572-69041595; SpCas9
tgaactggcaccaccacttt

SEQ ID NO: 35403 - DNA, 19 bp, Artificial Sequence
  Synthetic: FXN 3 reverse 9:69041573-69041595; SpCas9
gaactggcaccaccacttt

SEQ ID NO: 35404 - DNA, 18 bp, Artificial Sequence
  Synthetic: FXN 3 reverse 9:69041574-69041595; SpCas9
aactggcaccaccacttt

SEQ ID NO: 35405 - DNA, 25 bp, Artificial Sequence
  Synthetic: FXN 3 forward 9:69041576-69041604; SpCas9
gtggtgccagttcatcctcccctgc

SEQ ID NO: 35406 - DNA, 24 bp, Artificial Sequence
  Synthetic: FXN 3 forward 9:69041577-69041604; SpCas9
tggtgccagttcatcctcccctgc

SEQ ID NO: 35407 - DNA, 23 bp, Artificial Sequence
  Synthetic: FXN 3 forward 9:69041578-69041604; SpCas9
ggtgccagttcatcctcccctgc

SEQ ID NO: 35408 - DNA, 22 bp, Artificial Sequence
  Synthetic: FXN 3 forward 9:69041579-69041604; SpCas9
gtgccagttcatcctcccctgc

SEQ ID NO: 35409 - DNA, 21 bp, Artificial Sequence
  Synthetic: FXN 3 forward 9:69041580-69041604; SpCas9
tgccagttcatcctcccctgc

SEQ ID NO: 35410 - DNA, 20 bp, Artificial Sequence
  Synthetic: FXN 3 forward 9:69041581-69041604; SpCas9
gccagttcatcctcccctgc

SEQ ID NO: 35411 - DNA, 19 bp, Artificial Sequence
  Synthetic: FXN 3 forward 9:69041582-69041604; SpCas9
ccagttcatcctcccctgc

SEQ ID NO: 35412 - DNA, 18 bp, Artificial Sequence
  Synthetic: FXN 3 forward 9:69041583-69041604; SpCas9
cagttcatcctcccctgc

SEQ ID NO: 35413 - DNA, 25 bp, Artificial Sequence
  Synthetic: FXN 3 forward 9:69041577-69041605; SpCas9
tggtgccagttcatcctcccctgcg

SEQ ID NO: 35414 - DNA, 24 bp, Artificial Sequence
  Synthetic: FXN 3 forward 9:69041578-69041605; SpCas9
ggtgccagttcatcctcccctgcg

SEQ ID NO: 35415 - DNA, 23 bp, Artificial Sequence
  Synthetic: FXN 3 forward 9:69041579-69041605; SpCas9
gtgccagttcatcctcccctgcg

SEQ ID NO: 35416 - DNA, 22 bp, Artificial Sequence
  Synthetic: FXN 3 forward 9:69041580-69041605; SpCas9
tgccagttcatcctcccctgcg

SEQ ID NO: 35417 - DNA, 21 bp, Artificial Sequence
  Synthetic: FXN 3 forward 9:69041581-69041605; SpCas9
gccagttcatcctcccctgcg

SEQ ID NO: 35418 - DNA, 20 bp, Artificial Sequence
  Synthetic: FXN 3 forward 9:69041582-69041605; SpCas9
ccagttcatcctcccctgcg

SEQ ID NO: 35419 - DNA, 19 bp, Artificial Sequence
  Synthetic: FXN 3 forward 9:69041583-69041605; SpCas9
cagttcatcctcccctgcg

SEQ ID NO: 35420 - DNA, 18 bp, Artificial Sequence
  Synthetic: FXN 3 forward 9:69041584-69041605; SpCas9
agttcatcctcccctgcg

SEQ ID NO: 35421 - DNA, 25 bp, Artificial Sequence
  Synthetic: FXN 3 forward 9:69041582-69041610; SpCas9
ccagttcatcctcccctgcgaggta

SEQ ID NO: 35422 - DNA, 24 bp, Artificial Sequence
  Synthetic: FXN 3 forward 9:69041583-69041610; SpCas9
cagttcatcctcccctgcgaggta

SEQ ID NO: 35423 - DNA, 23 bp, Artificial Sequence
  Synthetic: FXN 3 forward 9:69041584-69041610; SpCas9
agttcatcctcccctgcgaggta

SEQ ID NO: 35424 - DNA, 22 bp, Artificial Sequence
  Synthetic: FXN 3 forward 9:69041585-69041610; SpCas9
gttcatcctcccctgcgaggta

SEQ ID NO: 35425 - DNA, 21 bp, Artificial Sequence
  Synthetic: FXN 3 forward 9:69041586-69041610; SpCas9
ttcatcctcccctgcgaggta

SEQ ID NO: 35426 - DNA, 20 bp, Artificial Sequence
  Synthetic: FXN 3 forward 9:69041587-69041610; SpCas9
tcatcctcccctgcgaggta

SEQ ID NO: 35427 - DNA, 19 bp, Artificial Sequence
  Synthetic: FXN 3 forward 9:69041588-69041610; SpCas9
catcctcccctgcgaggta

SEQ ID NO: 35428 - DNA, 18 bp, Artificial Sequence
  Synthetic: FXN 3 forward 9:69041589-69041610; SpCas9
atcctcccctgcgaggta

SEQ ID NO: 35429 - DNA, 25 bp, Artificial Sequence
  Synthetic: FXN 3 reverse 9:69041582-69041610; SpCas9
ccatacctcgcaggggaggatgaac

SEQ ID NO: 35430 - DNA, 24 bp, Artificial Sequence
  Synthetic: FXN 3 reverse 9:69041583-69041610; SpCas9
catacctcgcaggggaggatgaac

SEQ ID NO: 35431 - DNA, 23 bp, Artificial Sequence
  Synthetic: FXN 3 reverse 9:69041584-69041610; SpCas9
atacctcgcaggggaggatgaac

SEQ ID NO: 35432 - DNA, 22 bp, Artificial Sequence
  Synthetic: FXN 3 reverse 9:69041585-69041610; SpCas9
tacctcgcaggggaggatgaac

SEQ ID NO: 35433 - DNA, 21 bp, Artificial Sequence
  Synthetic: FXN 3 reverse 9:69041586-69041610; SpCas9
acctcgcaggggaggatgaac

SEQ ID NO: 35434 - DNA, 20 bp, Artificial Sequence
  Synthetic: FXN 3 reverse 9:69041587-69041610; SpCas9
cctcgcaggggaggatgaac

SEQ ID NO: 35435 - DNA, 19 bp, Artificial Sequence
  Synthetic: FXN 3 reverse 9:69041588-69041610; SpCas9
ctcgcaggggaggatgaac

SEQ ID NO: 35436 - DNA, 18 bp, Artificial Sequence
  Synthetic: FXN 3 reverse 9:69041589-69041610; SpCas9
tcgcaggggaggatgaac

SEQ ID NO: 35437 - DNA, 25 bp, Artificial Sequence
  Synthetic: FXN 3 forward 9:69041583-69041611; SpCas9
cagttcatcctcccctgcgaggtat

SEQ ID NO: 35438 - DNA, 24 bp, Artificial Sequence
  Synthetic: FXN 3 forward 9:69041584-69041611; SpCas9
agttcatcctcccctgcgaggtat

SEQ ID NO: 35439 - DNA, 23 bp, Artificial Sequence
  Synthetic: FXN 3 forward 9:69041585-69041611; SpCas9
gttcatcctcccctgcgaggtat

SEQ ID NO: 35440 - DNA, 22 bp, Artificial Sequence
  Synthetic: FXN 3 forward 9:69041586-69041611; SpCas9
ttcatcctcccctgcgaggtat

SEQ ID NO: 35441 - DNA, 21 bp, Artificial Sequence
  Synthetic: FXN 3 forward 9:69041587-69041611; SpCas9
tcatcctcccctgcgaggtat

SEQ ID NO: 35442 - DNA, 20 bp, Artificial Sequence
  Synthetic: FXN 3 forward 9:69041588-69041611; SpCas9
catcctcccctgcgaggtat

SEQ ID NO: 35443 - DNA, 19 bp, Artificial Sequence
  Synthetic: FXN 3 forward 9:69041589-69041611; SpCas9
atcctcccctgcgaggtat

SEQ ID NO: 35444 - DNA, 18 bp, Artificial Sequence
  Synthetic: FXN 3 forward 9:69041590-69041611; SpCas9
tcctcccctgcgaggtat

SEQ ID NO: 35445 - DNA, 25 bp, Artificial Sequence
  Synthetic: FXN 3 reverse 9:69041591-69041619; SpCas9
aatcaggacccatacctcgcagggg

SEQ ID NO: 35446 - DNA, 24 bp, Artificial Sequence
  Synthetic: FXN 3 reverse 9:69041592-69041619; SpCas9
atcaggacccatacctcgcagggg

SEQ ID NO: 35447 - DNA, 23 bp, Artificial Sequence
  Synthetic: FXN 3 reverse 9:69041593-69041619; SpCas9
tcaggacccatacctcgcagggg

SEQ ID NO: 35448 - DNA, 22 bp, Artificial Sequence
  Synthetic: FXN 3 reverse 9:69041594-69041619; SpCas9
caggacccatacctcgcagggg

SEQ ID NO: 35449 - DNA, 21 bp, Artificial Sequence
  Synthetic: FXN 3 reverse 9:69041595-69041619; SpCas9
aggacccatacctcgcagggg

SEQ ID NO: 35450 - DNA, 20 bp, Artificial Sequence
  Synthetic: FXN 3 reverse 9:69041596-69041619; SpCas9
ggacccatacctcgcagggg

SEQ ID NO: 35451 - DNA, 19 bp, Artificial Sequence
  Synthetic: FXN 3 reverse 9:69041597-69041619; SpCas9
gacccatacctcgcagggg

SEQ ID NO: 35452 - DNA, 18 bp, Artificial Sequence
  Synthetic: FXN 3 reverse 9:69041598-69041619; SpCas9
acccatacctcgcagggg

SEQ ID NO: 35453 - DNA, 25 bp, Artificial Sequence
  Synthetic: FXN 3 reverse 9:69041592-69041620; SpCas9
gaatcaggacccatacctcgcaggg

SEQ ID NO: 35454 - DNA, 24 bp, Artificial Sequence
  Synthetic: FXN 3 reverse 9:69041593-69041620; SpCas9
aatcaggacccatacctcgcaggg

SEQ ID NO: 35455 - DNA, 23 bp, Artificial Sequence
  Synthetic: FXN 3 reverse 9:69041594-69041620; SpCas9
atcaggacccatacctcgcaggg

SEQ ID NO: 35456 - DNA, 22 bp, Artificial Sequence
  Synthetic: FXN 3 reverse 9:69041595-69041620; SpCas9
tcaggacccatacctcgcaggg

SEQ ID NO: 35457 - DNA, 21 bp, Artificial Sequence
  Synthetic: FXN 3 reverse 9:69041596-69041620; SpCas9
caggacccatacctcgcaggg

SEQ ID NO: 35458 - DNA, 20 bp, Artificial Sequence
  Synthetic: FXN 3 reverse 9:69041597-69041620; SpCas9
aggacccatacctcgcaggg

SEQ ID NO: 35459 - DNA, 19 bp, Artificial Sequence
  Synthetic: FXN 3 reverse 9:69041598-69041620; SpCas9
ggacccatacctcgcaggg

SEQ ID NO: 35460 - DNA, 18 bp, Artificial Sequence
  Synthetic: FXN 3 reverse 9:69041599-69041620; SpCas9
gacccatacctcgcaggg

SEQ ID NO: 35461 - DNA, 25 bp, Artificial Sequence
  Synthetic: FXN 3 reverse 9:69041594-69041622; SpCas9
gtgaatcaggacccatacctcgcag

SEQ ID NO: 35462 - DNA, 24 bp, Artificial Sequence
  Synthetic: FXN 3 reverse 9:69041595-69041622; SpCas9
tgaatcaggacccatacctcgcag

SEQ ID NO: 35463 - DNA, 23 bp, Artificial Sequence
  Synthetic: FXN 3 reverse 9:69041596-69041622; SpCas9
gaatcaggacccatacctcgcag

SEQ ID NO: 35464 - DNA, 22 bp, Artificial Sequence
  Synthetic: FXN 3 reverse 9:69041597-69041622; SpCas9
aatcaggacccatacctcgcag

SEQ ID NO: 35465 - DNA, 21 bp, Artificial Sequence
  Synthetic: FXN 3 reverse 9:69041598-69041622; SpCas9
atcaggacccatacctcgcag

SEQ ID NO: 35466 - DNA, 20 bp, Artificial Sequence
  Synthetic: FXN 3 reverse 9:69041599-69041622; SpCas9
tcaggacccatacctcgcag

SEQ ID NO: 35467 - DNA, 19 bp, Artificial Sequence
  Synthetic: FXN 3 reverse 9:69041600-69041622; SpCas9
caggacccatacctcgcag

SEQ ID NO: 35468 - DNA, 18 bp, Artificial Sequence
  Synthetic: FXN 3 reverse 9:69041601-69041622; SpCas9
aggacccatacctcgcag

SEQ ID NO: 35469 - DNA, 25 bp, Artificial Sequence
  Synthetic: FXN 3 reverse 9:69041595-69041623; SpCas9
agtgaatcaggacccatacctcgca

SEQ ID NO: 35470 - DNA, 24 bp, Artificial Sequence
  Synthetic: FXN 3 reverse 9:69041596-69041623; SpCas9
gtgaatcaggacccatacctcgca

SEQ ID NO: 35471 - DNA, 23 bp, Artificial Sequence
  Synthetic: FXN 3 reverse 9:69041597-69041623; SpCas9
tgaatcaggacccatacctcgca

SEQ ID NO: 35472 - DNA, 22 bp, Artificial Sequence
  Synthetic: FXN 3 reverse 9:69041598-69041623; SpCas9
gaatcaggacccatacctcgca

SEQ ID NO: 35473 - DNA, 21 bp, Artificial Sequence
  Synthetic: FXN 3 reverse 9:69041599-69041623; SpCas9
aatcaggacccatacctcgca

SEQ ID NO: 35474 - DNA, 20 bp, Artificial Sequence
  Synthetic: FXN 3 reverse 9:69041600-69041623; SpCas9
atcaggacccatacctcgca

SEQ ID NO: 35475 - DNA, 19 bp, Artificial Sequence
  Synthetic: FXN 3 reverse 9:69041601-69041623; SpCas9
tcaggacccatacctcgca

SEQ ID NO: 35476 - DNA, 18 bp, Artificial Sequence
  Synthetic: FXN 3 reverse 9:69041602-69041623; SpCas9
caggacccatacctcgca

SEQ ID NO: 35477 - DNA, 25 bp, Artificial Sequence
  Synthetic: FXN 3 reverse 9:69041596-69041624; SpCas9
gagtgaatcaggacccatacctcgc

SEQ ID NO: 35478 - DNA, 24 bp, Artificial Sequence
  Synthetic: FXN 3 reverse 9:69041597-69041624; SpCas9
agtgaatcaggacccatacctcgc

SEQ ID NO: 35479 - DNA, 23 bp, Artificial Sequence
  Synthetic: FXN 3 reverse 9:69041598-69041624; SpCas9
gtgaatcaggacccatacctcgc

SEQ ID NO: 35480 - DNA, 22 bp, Artificial Sequence
  Synthetic: FXN 3 reverse 9:69041599-69041624; SpCas9
tgaatcaggacccatacctcgc

SEQ ID NO: 35481 - DNA, 21 bp, Artificial Sequence
  Synthetic: FXN 3 reverse 9:69041600-69041624; SpCas9
gaatcaggacccatacctcgc

SEQ ID NO: 35482 - DNA, 20 bp, Artificial Sequence
  Synthetic: FXN 3 reverse 9:69041601-69041624; SpCas9
aatcaggacccatacctcgc

SEQ ID NO: 35483 - DNA, 19 bp, Artificial Sequence
  Synthetic: FXN 3 reverse 9:69041602-69041624; SpCas9
atcaggacccatacctcgc

SEQ ID NO: 35484 - DNA, 18 bp, Artificial Sequence
  Synthetic: FXN 3 reverse 9:69041603-69041624; SpCas9
tcaggacccatacctcgc

SEQ ID NO: 35485 - DNA, 25 bp, Artificial Sequence
  Synthetic: FXN 3 reverse 9:69041597-69041625; SpCas9
agagtgaatcaggacccatacctcg

SEQ ID NO: 35486 - DNA, 24 bp, Artificial Sequence
  Synthetic: FXN 3 reverse 9:69041598-69041625; SpCas9
gagtgaatcaggacccatacctcg

SEQ ID NO: 35487 - DNA, 23 bp, Artificial Sequence
  Synthetic: FXN 3 reverse 9:69041599-69041625; SpCas9
agtgaatcaggacccatacctcg

SEQ ID NO: 35488 - DNA, 22 bp, Artificial Sequence
  Synthetic: FXN 3 reverse 9:69041600-69041625; SpCas9
gtgaatcaggacccatacctcg

SEQ ID NO: 35489 - DNA, 21 bp, Artificial Sequence
  Synthetic: FXN 3 reverse 9:69041601-69041625; SpCas9
tgaatcaggacccatacctcg

SEQ ID NO: 35490 - DNA, 20 bp, Artificial Sequence
  Synthetic: FXN 3 reverse 9:69041602-69041625; SpCas9
gaatcaggacccatacctcg

SEQ ID NO: 35491 - DNA, 19 bp, Artificial Sequence
  Synthetic: FXN 3 reverse 9:69041603-69041625; SpCas9
aatcaggacccatacctcg

SEQ ID NO: 35492 - DNA, 18 bp, Artificial Sequence
  Synthetic: FXN 3 reverse 9:69041604-69041625; SpCas9
atcaggacccatacctcg

SEQ ID NO: 35493 - DNA, 25 bp, Artificial Sequence
  Synthetic: FXN 3 forward 9:69041602-69041630; SpCas9
aggtatgggtcctgattcactcttc

SEQ ID NO: 35494 - DNA, 24 bp, Artificial Sequence
  Synthetic: FXN 3 forward 9:69041603-69041630; SpCas9
ggtatgggtcctgattcactcttc

SEQ ID NO: 35495 - DNA, 23 bp, Artificial Sequence
  Synthetic: FXN 3 forward 9:69041604-69041630; SpCas9
gtatgggtcctgattcactcttc

SEQ ID NO: 35496 - DNA, 22 bp, Artificial Sequence
  Synthetic: FXN 3 forward 9:69041605-69041630; SpCas9
tatgggtcctgattcactcttc

SEQ ID NO: 35497 - DNA, 21 bp, Artificial Sequence
  Synthetic: FXN 3 forward 9:69041606-69041630; SpCas9
atgggtcctgattcactcttc

SEQ ID NO: 35498 - DNA, 20 bp, Artificial Sequence
  Synthetic: FXN 3 forward 9:69041607-69041630; SpCas9
tgggtcctgattcactcttc

SEQ ID NO: 35499 - DNA, 19 bp, Artificial Sequence
  Synthetic: FXN 3 forward 9:69041608-69041630; SpCas9
gggtcctgattcactcttc

SEQ ID NO: 35500 - DNA, 18 bp, Artificial Sequence
  Synthetic: FXN 3 forward 9:69041609-69041630; SpCas9
ggtcctgattcactcttc

SEQ ID NO: 35501 - DNA, 25 bp, Artificial Sequence
  Synthetic: FXN 3 forward 9:69041610-69041638; SpCas9
gtcctgattcactcttcaagtgctg

SEQ ID NO: 35502 - DNA, 24 bp, Artificial Sequence
  Synthetic: FXN 3 forward 9:69041611-69041638; SpCas9
tcctgattcactcttcaagtgctg

SEQ ID NO: 35503 - DNA, 23 bp, Artificial Sequence
  Synthetic: FXN 3 forward 9:69041612-69041638; SpCas9
cctgattcactcttcaagtgctg

SEQ ID NO: 35504 - DNA, 22 bp, Artificial Sequence
  Synthetic: FXN 3 forward 9:69041613-69041638; SpCas9
ctgattcactcttcaagtgctg

SEQ ID NO: 35505 - DNA, 21 bp, Artificial Sequence
  Synthetic: FXN 3 forward 9:69041614-69041638; SpCas9
tgattcactcttcaagtgctg

SEQ ID NO: 35506 - DNA, 20 bp, Artificial Sequence
  Synthetic: FXN 3 forward 9:69041615-69041638; SpCas9
gattcactcttcaagtgctg

SEQ ID NO: 35507 - DNA, 19 bp, Artificial Sequence
  Synthetic: FXN 3 forward 9:69041616-69041638; SpCas9
attcactcttcaagtgctg

SEQ ID NO: 35508 - DNA, 18 bp, Artificial Sequence
  Synthetic: FXN 3 forward 9:69041617-69041638; SpCas9
ttcactcttcaagtgctg

SEQ ID NO: 35509 - DNA, 25 bp, Artificial Sequence
  Synthetic: FXN 3 reverse 9:69041612-69041640; SpCas9
aaccacagcacttgaagagtgaatc

SEQ ID NO: 35510 - DNA, 24 bp, Artificial Sequence
  Synthetic: FXN 3 reverse 9:69041613-69041640; SpCas9
accacagcacttgaagagtgaatc

SEQ ID NO: 35511 - DNA, 23 bp, Artificial Sequence
  Synthetic: FXN 3 reverse 9:69041614-69041640; SpCas9
ccacagcacttgaagagtgaatc

SEQ ID NO: 35512 - DNA, 22 bp, Artificial Sequence
  Synthetic: FXN 3 reverse 9:69041615-69041640; SpCas9
cacagcacttgaagagtgaatc

SEQ ID NO: 35513 - DNA, 21 bp, Artificial Sequence
  Synthetic: FXN 3 reverse 9:69041616-69041640; SpCas9
acagcacttgaagagtgaatc

SEQ ID NO: 35514 - DNA, 20 bp, Artificial Sequence
  Synthetic: FXN 3 reverse 9:69041617-69041640; SpCas9
cagcacttgaagagtgaatc

SEQ ID NO: 35515 - DNA, 19 bp, Artificial Sequence
  Synthetic: FXN 3 reverse 9:69041618-69041640; SpCas9
agcacttgaagagtgaatc

SEQ ID NO: 35516 - DNA, 18 bp, Artificial Sequence
  Synthetic: FXN 3 reverse 9:69041619-69041640; SpCas9
gcacttgaagagtgaatc

SEQ ID NO: 35517 - DNA, 25 bp, Artificial Sequence
  Synthetic: FXN 3 reverse 9:69041613-69041641; SpCas9
aaaccacagcacttgaagagtgaat

SEQ ID NO: 35518 - DNA, 24 bp, Artificial Sequence
  Synthetic: FXN 3 reverse 9:69041614-69041641; SpCas9
aaccacagcacttgaagagtgaat

SEQ ID NO: 35519 - DNA, 23 bp, Artificial Sequence
  Synthetic: FXN 3 reverse 9:69041615-69041641; SpCas9
accacagcacttgaagagtgaat

SEQ ID NO: 35520 - DNA, 22 bp, Artificial Sequence
  Synthetic: FXN 3 reverse 9:69041616-69041641; SpCas9
ccacagcacttgaagagtgaat

SEQ ID NO: 35521 - DNA, 21 bp, Artificial Sequence
  Synthetic: FXN 3 reverse 9:69041617-69041641; SpCas9
cacagcacttgaagagtgaat

SEQ ID NO: 35522 - DNA, 20 bp, Artificial Sequence
  Synthetic: FXN 3 reverse 9:69041618-69041641; SpCas9
acagcacttgaagagtgaat

SEQ ID NO: 35523 - DNA, 19 bp, Artificial Sequence
  Synthetic: FXN 3 reverse 9:69041619-69041641; SpCas9
cagcacttgaagagtgaat

SEQ ID NO: 35524 - DNA, 18 bp, Artificial Sequence
  Synthetic: FXN 3 reverse 9:69041620-69041641; SpCas9
agcacttgaagagtgaat

SEQ ID NO: 35525 - DNA, 25 bp, Artificial Sequence
  Synthetic: FXN 3 forward 9:69041618-69041646; SpCas9
tcactcttcaagtgctgtggtttga

SEQ ID NO: 35526 - DNA, 24 bp, Artificial Sequence
  Synthetic: FXN 3 forward 9:69041619-69041646; SpCas9
cactcttcaagtgctgtggtttga

SEQ ID NO: 35527 - DNA, 23 bp, Artificial Sequence
  Synthetic: FXN 3 forward 9:69041620-69041646; SpCas9
actcttcaagtgctgtggtttga

SEQ ID NO: 35528 - DNA, 22 bp, Artificial Sequence
  Synthetic: FXN 3 forward 9:69041621-69041646; SpCas9
ctcttcaagtgctgtggtttga

SEQ ID NO: 35529 - DNA, 21 bp, Artificial Sequence
  Synthetic: FXN 3 forward 9:69041622-69041646; SpCas9
tcttcaagtgctgtggtttga

SEQ ID NO: 35530 - DNA, 20 bp, Artificial Sequence
  Synthetic: FXN 3 forward 9:69041623-69041646; SpCas9
cttcaagtgctgtggtttga

SEQ ID NO: 35531 - DNA, 19 bp, Artificial Sequence
  Synthetic: FXN 3 forward 9:69041624-69041646; SpCas9
ttcaagtgctgtggtttga

SEQ ID NO: 35532 - DNA, 18 bp, Artificial Sequence
  Synthetic: FXN 3 forward 9:69041625-69041646; SpCas9
tcaagtgctgtggtttga

SEQ ID NO: 35533 - DNA, 25 bp, Artificial Sequence
  Synthetic: FXN 3 forward 9:69041619-69041647; SpCas9
cactcttcaagtgctgtggtttgac

SEQ ID NO: 35534 - DNA, 24 bp, Artificial Sequence
  Synthetic: FXN 3 forward 9:69041620-69041647; SpCas9
actcttcaagtgctgtggtttgac

SEQ ID NO: 35535 - DNA, 23 bp, Artificial Sequence
  Synthetic: FXN 3 forward 9:69041621-69041647; SpCas9
ctcttcaagtgctgtggtttgac

SEQ ID NO: 35536 - DNA, 22 bp, Artificial Sequence
  Synthetic: FXN 3 forward 9:69041622-69041647; SpCas9
tcttcaagtgctgtggtttgac

SEQ ID NO: 35537 - DNA, 21 bp, Artificial Sequence
  Synthetic: FXN 3 forward 9:69041623-69041647; SpCas9
cttcaagtgctgtggtttgac

SEQ ID NO: 35538 - DNA, 20 bp, Artificial Sequence
  Synthetic: FXN 3 forward 9:69041624-69041647; SpCas9
ttcaagtgctgtggtttgac

SEQ ID NO: 35539 - DNA, 19 bp, Artificial Sequence
  Synthetic: FXN 3 forward 9:69041625-69041647; SpCas9
tcaagtgctgtggtttgac

SEQ ID NO: 35540 - DNA, 18 bp, Artificial Sequence
  Synthetic: FXN 3 forward 9:69041626-69041647; SpCas9
caagtgctgtggtttgac

SEQ ID NO: 35541 - DNA, 25 bp, Artificial Sequence
  Synthetic: FXN 3 forward 9:69041620-69041648; SpCas9
actcttcaagtgctgtggtttgaca

SEQ ID NO: 35542 - DNA, 24 bp, Artificial Sequence
  Synthetic: FXN 3 forward 9:69041621-69041648; SpCas9
ctcttcaagtgctgtggtttgaca

SEQ ID NO: 35543 - DNA, 23 bp, Artificial Sequence
  Synthetic: FXN 3 forward 9:69041622-69041648; SpCas9
tcttcaagtgctgtggtttgaca

SEQ ID NO: 35544 - DNA, 22 bp, Artificial Sequence
  Synthetic: FXN 3 forward 9:69041623-69041648; SpCas9
cttcaagtgctgtggtttgaca

SEQ ID NO: 35545 - DNA, 21 bp, Artificial Sequence
  Synthetic: FXN 3 forward 9:69041624-69041648; SpCas9
ttcaagtgctgtggtttgaca

SEQ ID NO: 35546 - DNA, 20 bp, Artificial Sequence
  Synthetic: FXN 3 forward 9:69041625-69041648; SpCas9
tcaagtgctgtggtttgaca

SEQ ID NO: 35547 - DNA, 19 bp, Artificial Sequence
  Synthetic: FXN 3 forward 9:69041626-69041648; SpCas9
caagtgctgtggtttgaca

SEQ ID NO: 35548 - DNA, 18 bp, Artificial Sequence
  Synthetic: FXN 3 forward 9:69041627-69041648; SpCas9
aagtgctgtggtttgaca

SEQ ID NO: 35549 - DNA, 25 bp, Artificial Sequence
  Synthetic: FXN 3 reverse 9:69041621-69041649; SpCas9
gccctgtcaaaccacagcacttgaa

SEQ ID NO: 35550 - DNA, 24 bp, Artificial Sequence
  Synthetic: FXN 3 reverse 9:69041622-69041649; SpCas9
ccctgtcaaaccacagcacttgaa

SEQ ID NO: 35551 - DNA, 23 bp, Artificial Sequence
  Synthetic: FXN 3 reverse 9:69041623-69041649; SpCas9
cctgtcaaaccacagcacttgaa

SEQ ID NO: 35552 - DNA, 22 bp, Artificial Sequence
  Synthetic: FXN 3 reverse 9:69041624-69041649; SpCas9
ctgtcaaaccacagcacttgaa

SEQ ID NO: 35553 - DNA, 21 bp, Artificial Sequence
  Synthetic: FXN 3 reverse 9:69041625-69041649; SpCas9
tgtcaaaccacagcacttgaa

SEQ ID NO: 35554 - DNA, 20 bp, Artificial Sequence
  Synthetic: FXN 3 reverse 9:69041626-69041649; SpCas9
gtcaaaccacagcacttgaa

SEQ ID NO: 35555 - DNA, 19 bp, Artificial Sequence
  Synthetic: FXN 3 reverse 9:69041627-69041649; SpCas9
tcaaaccacagcacttgaa

SEQ ID NO: 35556 - DNA, 18 bp, Artificial Sequence
  Synthetic: FXN 3 reverse 9:69041628-69041649; SpCas9
caaaccacagcacttgaa

SEQ ID NO: 35557 - DNA, 25 bp, Artificial Sequence
  Synthetic: FXN 3 reverse 9:69041623-69041651; SpCas9
cggccctgtcaaaccacagcacttg

SEQ ID NO: 35558 - DNA, 24 bp, Artificial Sequence
  Synthetic: FXN 3 reverse 9:69041624-69041651; SpCas9
ggccctgtcaaaccacagcacttg

SEQ ID NO: 35559 - DNA, 23 bp, Artificial Sequence
  Synthetic: FXN 3 reverse 9:69041625-69041651; SpCas9
gccctgtcaaaccacagcacttg

SEQ ID NO: 35560 - DNA, 22 bp, Artificial Sequence
  Synthetic: FXN 3 reverse 9:69041626-69041651; SpCas9
ccctgtcaaaccacagcacttg

SEQ ID NO: 35561 - DNA, 21 bp, Artificial Sequence
  Synthetic: FXN 3 reverse 9:69041627-69041651; SpCas9
cctgtcaaaccacagcacttg

SEQ ID NO: 35562 - DNA, 20 bp, Artificial Sequence
  Synthetic: FXN 3 reverse 9:69041628-69041651; SpCas9
ctgtcaaaccacagcacttg

SEQ ID NO: 35563 - DNA, 19 bp, Artificial Sequence
  Synthetic: FXN 3 reverse 9:69041629-69041651; SpCas9
tgtcaaaccacagcacttg

SEQ ID NO: 35564 - DNA, 18 bp, Artificial Sequence
  Synthetic: FXN 3 reverse 9:69041630-69041651; SpCas9
gtcaaaccacagcacttg

SEQ ID NO: 35565 - DNA, 25 bp, Artificial Sequence
  Synthetic: FXN 3 forward 9:69041624-69041652; SpCas9
ttcaagtgctgtggtttgacagggc

SEQ ID NO: 35566 - DNA, 24 bp, Artificial Sequence
  Synthetic: FXN 3 forward 9:69041625-69041652; SpCas9
tcaagtgctgtggtttgacagggc

SEQ ID NO: 35567 - DNA, 23 bp, Artificial Sequence
  Synthetic: FXN 3 forward 9:69041626-69041652; SpCas9
caagtgctgtggtttgacagggc

SEQ ID NO: 35568 - DNA, 22 bp, Artificial Sequence
  Synthetic: FXN 3 forward 9:69041627-69041652; SpCas9
aagtgctgtggtttgacagggc

SEQ ID NO: 35569 - DNA, 21 bp, Artificial Sequence
  Synthetic: FXN 3 forward 9:69041628-69041652; SpCas9
agtgctgtggtttgacagggc

SEQ ID NO: 35570 - DNA, 20 bp, Artificial Sequence
  Synthetic: FXN 3 forward 9:69041629-69041652; SpCas9
gtgctgtggtttgacagggc

SEQ ID NO: 35571 - DNA, 19 bp, Artificial Sequence
  Synthetic: FXN 3 forward 9:69041630-69041652; SpCas9
tgctgtggtttgacagggc

SEQ ID NO: 35572 - DNA, 18 bp, Artificial Sequence
  Synthetic: FXN 3 forward 9:69041631-69041652; SpCas9
gctgtggtttgacagggc

SEQ ID NO: 35573 - DNA, 25 bp, Artificial Sequence
  Synthetic: FXN 3 forward 9:69041625-69041653; SpCas9
tcaagtgctgtggtttgacagggcc

SEQ ID NO: 35574 - DNA, 24 bp, Artificial Sequence
  Synthetic: FXN 3 forward 9:69041626-69041653; SpCas9
caagtgctgtggtttgacagggcc

SEQ ID NO: 35575 - DNA, 23 bp, Artificial Sequence
  Synthetic: FXN 3 forward 9:69041627-69041653; SpCas9
aagtgctgtggtttgacagggcc

SEQ ID NO: 35576 - DNA, 22 bp, Artificial Sequence
  Synthetic: FXN 3 forward 9:69041628-69041653; SpCas9
agtgctgtggtttgacagggcc

SEQ ID NO: 35577 - DNA, 21 bp, Artificial Sequence
  Synthetic: FXN 3 forward 9:69041629-69041653; SpCas9
gtgctgtggtttgacagggcc

SEQ ID NO: 35578 - DNA, 20 bp, Artificial Sequence
  Synthetic: FXN 3 forward 9:69041630-69041653; SpCas9
tgctgtggtttgacagggcc

SEQ ID NO: 35579 - DNA, 19 bp, Artificial Sequence
  Synthetic: FXN 3 forward 9:69041631-69041653; SpCas9
gctgtggtttgacagggcc

SEQ ID NO: 35580 - DNA, 18 bp, Artificial Sequence
  Synthetic: FXN 3 forward 9:69041632-69041653; SpCas9
ctgtggtttgacagggcc

SEQ ID NO: 35581 - DNA, 25 bp, Artificial Sequence
  Synthetic: FXN 3 forward 9:69041626-69041654; SpCas9
caagtgctgtggtttgacagggccg

SEQ ID NO: 35582 - DNA, 24 bp, Artificial Sequence
  Synthetic: FXN 3 forward 9:69041627-69041654; SpCas9
aagtgctgtggtttgacagggccg

SEQ ID NO: 35583 - DNA, 23 bp, Artificial Sequence
  Synthetic: FXN 3 forward 9:69041628-69041654; SpCas9
agtgctgtggtttgacagggccg

SEQ ID NO: 35584 - DNA, 22 bp, Artificial Sequence
  Synthetic: FXN 3 forward 9:69041629-69041654; SpCas9
gtgctgtggtttgacagggccg

SEQ ID NO: 35585 - DNA, 21 bp, Artificial Sequence
  Synthetic: FXN 3 forward 9:69041630-69041654; SpCas9
tgctgtggtttgacagggccg

SEQ ID NO: 35586 - DNA, 20 bp, Artificial Sequence
  Synthetic: FXN 3 forward 9:69041631-69041654; SpCas9
gctgtggtttgacagggccg

SEQ ID NO: 35587 - DNA, 19 bp, Artificial Sequence
  Synthetic: FXN 3 forward 9:69041632-69041654; SpCas9
ctgtggtttgacagggccg

SEQ ID NO: 35588 - DNA, 18 bp, Artificial Sequence
  Synthetic: FXN 3 forward 9:69041633-69041654; SpCas9
tgtggtttgacagggccg

SEQ ID NO: 35589 - DNA, 25 bp, Artificial Sequence
  Synthetic: FXN 3 forward 9:69041627-69041655; SpCas9
aagtgctgtggtttgacagggccgg

SEQ ID NO: 35590 - DNA, 24 bp, Artificial Sequence
  Synthetic: FXN 3 forward 9:69041628-69041655; SpCas9
agtgctgtggtttgacagggccgg

SEQ ID NO: 35591 - DNA, 23 bp, Artificial Sequence
  Synthetic: FXN 3 forward 9:69041629-69041655; SpCas9
gtgctgtggtttgacagggccgg

SEQ ID NO: 35592 - DNA, 22 bp, Artificial Sequence
  Synthetic: FXN 3 forward 9:69041630-69041655; SpCas9
tgctgtggtttgacagggccgg

SEQ ID NO: 35593 - DNA, 21 bp, Artificial Sequence
  Synthetic: FXN 3 forward 9:69041631-69041655; SpCas9
gctgtggtttgacagggccgg

SEQ ID NO: 35594 - DNA, 20 bp, Artificial Sequence
  Synthetic: FXN 3 forward 9:69041632-69041655; SpCas9
ctgtggtttgacagggccgg

SEQ ID NO: 35595 - DNA, 19 bp, Artificial Sequence
  Synthetic: FXN 3 forward 9:69041633-69041655; SpCas9
tgtggtttgacagggccgg

SEQ ID NO: 35596 - DNA, 18 bp, Artificial Sequence
  Synthetic: FXN 3 forward 9:69041634-69041655; SpCas9
gtggtttgacagggccgg

SEQ ID NO: 35597 - DNA, 25 bp, Artificial Sequence
  Synthetic: FXN 3 reverse 9:69041632-69041660; SpCas9
tgtcacccccggccctgtcaaacca

SEQ ID NO: 35598 - DNA, 24 bp, Artificial Sequence
  Synthetic: FXN 3 reverse 9:69041633-69041660; SpCas9
gtcacccccggccctgtcaaacca

SEQ ID NO: 35599 - DNA, 23 bp, Artificial Sequence
  Synthetic: FXN 3 reverse 9:69041634-69041660; SpCas9
tcacccccggccctgtcaaacca

SEQ ID NO: 35600 - DNA, 22 bp, Artificial Sequence
  Synthetic: FXN 3 reverse 9:69041635-69041660; SpCas9
cacccccggccctgtcaaacca

SEQ ID NO: 35601 - DNA, 21 bp, Artificial Sequence
  Synthetic: FXN 3 reverse 9:69041636-69041660; SpCas9
acccccggccctgtcaaacca

SEQ ID NO: 35602 - DNA, 20 bp, Artificial Sequence
  Synthetic: FXN 3 reverse 9:69041637-69041660; SpCas9
cccccggccctgtcaaacca

SEQ ID NO: 35603 - DNA, 19 bp, Artificial Sequence
  Synthetic: FXN 3 reverse 9:69041638-69041660; SpCas9
ccccggccctgtcaaacca

SEQ ID NO: 35604 - DNA, 18 bp, Artificial Sequence
  Synthetic: FXN 3 reverse 9:69041639-69041660; SpCas9
cccggccctgtcaaacca

SEQ ID NO: 35605 - DNA, 25 bp, Artificial Sequence
  Synthetic: FXN 3 forward 9:69041634-69041662; SpCas9
gtggtttgacagggccgggggtgac

SEQ ID NO: 35606 - DNA, 24 bp, Artificial Sequence
  Synthetic: FXN 3 forward 9:69041635-69041662; SpCas9
tggtttgacagggccgggggtgac

SEQ ID NO: 35607 - DNA, 23 bp, Artificial Sequence
  Synthetic: FXN 3 forward 9:69041636-69041662; SpCas9
ggtttgacagggccgggggtgac

SEQ ID NO: 35608 - DNA, 22 bp, Artificial Sequence
  Synthetic: FXN 3 forward 9:69041637-69041662; SpCas9
gtttgacagggccgggggtgac

SEQ ID NO: 35609 - DNA, 21 bp, Artificial Sequence
  Synthetic: FXN 3 forward 9:69041638-69041662; SpCas9
tttgacagggccgggggtgac

SEQ ID NO: 35610 - DNA, 20 bp, Artificial Sequence
  Synthetic: FXN 3 forward 9:69041639-69041662; SpCas9
ttgacagggccgggggtgac

SEQ ID NO: 35611 - DNA, 19 bp, Artificial Sequence
  Synthetic: FXN 3 forward 9:69041640-69041662; SpCas9
tgacagggccgggggtgac

SEQ ID NO: 35612 - DNA, 18 bp, Artificial Sequence
  Synthetic: FXN 3 forward 9:69041641-69041662; SpCas9
gacagggccgggggtgac

SEQ ID NO: 35613 - DNA, 25 bp, Artificial Sequence
  Synthetic: FXN 3 forward 9:69041635-69041663; SpCas9
tggtttgacagggccgggggtgaca

SEQ ID NO: 35614 - DNA, 24 bp, Artificial Sequence
  Synthetic: FXN 3 forward 9:69041636-69041663; SpCas9
ggtttgacagggccgggggtgaca

SEQ ID NO: 35615 - DNA, 23 bp, Artificial Sequence
  Synthetic: FXN 3 forward 9:69041637-69041663; SpCas9
gtttgacagggccgggggtgaca

SEQ ID NO: 35616 - DNA, 22 bp, Artificial Sequence
  Synthetic: FXN 3 forward 9:69041638-69041663; SpCas9
tttgacagggccgggggtgaca

SEQ ID NO: 35617 - DNA, 21 bp, Artificial Sequence
  Synthetic: FXN 3 forward 9:69041639-69041663; SpCas9
ttgacagggccgggggtgaca

SEQ ID NO: 35618 - DNA, 20 bp, Artificial Sequence
  Synthetic: FXN 3 forward 9:69041640-69041663; SpCas9
tgacagggccgggggtgaca

SEQ ID NO: 35619 - DNA, 19 bp, Artificial Sequence
  Synthetic: FXN 3 forward 9:69041641-69041663; SpCas9
gacagggccgggggtgaca

SEQ ID NO: 35620 - DNA, 18 bp, Artificial Sequence
  Synthetic: FXN 3 forward 9:69041642-69041663; SpCas9
acagggccgggggtgaca

SEQ ID NO: 35621 - DNA, 25 bp, Artificial Sequence
  Synthetic: FXN 3 forward 9:69041636-69041664; SpCas9
ggtttgacagggccgggggtgacaa

SEQ ID NO: 35622 - DNA, 24 bp, Artificial Sequence
  Synthetic: FXN 3 forward 9:69041637-69041664; SpCas9
gtttgacagggccgggggtgacaa

SEQ ID NO: 35623 - DNA, 23 bp, Artificial Sequence
  Synthetic: FXN 3 forward 9:69041638-69041664; SpCas9
tttgacagggccgggggtgacaa

SEQ ID NO: 35624 - DNA, 22 bp, Artificial Sequence
  Synthetic: FXN 3 forward 9:69041639-69041664; SpCas9
ttgacagggccgggggtgacaa

SEQ ID NO: 35625 - DNA, 21 bp, Artificial Sequence
  Synthetic: FXN 3 forward 9:69041640-69041664; SpCas9
tgacagggccgggggtgacaa

SEQ ID NO: 35626 - DNA, 20 bp, Artificial Sequence
  Synthetic: FXN 3 forward 9:69041641-69041664; SpCas9
gacagggccgggggtgacaa

SEQ ID NO: 35627 - DNA, 19 bp, Artificial Sequence
  Synthetic: FXN 3 forward 9:69041642-69041664; SpCas9
acagggccgggggtgacaa

SEQ ID NO: 35628 - DNA, 18 bp, Artificial Sequence
  Synthetic: FXN 3 forward 9:69041643-69041664; SpCas9
cagggccgggggtgacaa

SEQ ID NO: 35629 - DNA, 25 bp, Artificial Sequence
  Synthetic: FXN 3 forward 9:69041637-69041665; SpCas9
gtttgacagggccgggggtgacaag

SEQ ID NO: 35630 - DNA, 24 bp, Artificial Sequence
  Synthetic: FXN 3 forward 9:69041638-69041665; SpCas9
tttgacagggccgggggtgacaag

SEQ ID NO: 35631 - DNA, 23 bp, Artificial Sequence
  Synthetic: FXN 3 forward 9:69041639-69041665; SpCas9
ttgacagggccgggggtgacaag

SEQ ID NO: 35632 - DNA, 22 bp, Artificial Sequence
  Synthetic: FXN 3 forward 9:69041640-69041665; SpCas9
tgacagggccgggggtgacaag

SEQ ID NO: 35633 - DNA, 21 bp, Artificial Sequence
  Synthetic: FXN 3 forward 9:69041641-69041665; SpCas9
gacagggccgggggtgacaag

SEQ ID NO: 35634 - DNA, 20 bp, Artificial Sequence
  Synthetic: FXN 3 forward 9:69041642-69041665; SpCas9
acagggccgggggtgacaag

SEQ ID NO: 35635 - DNA, 19 bp, Artificial Sequence
  Synthetic: FXN 3 forward 9:69041643-69041665; SpCas9
cagggccgggggtgacaag

SEQ ID NO: 35636 - DNA, 18 bp, Artificial Sequence
  Synthetic: FXN 3 forward 9:69041644-69041665; SpCas9
agggccgggggtgacaag

SEQ ID NO: 35637 - DNA, 25 bp, Artificial Sequence
  Synthetic: FXN 3 forward 9:69041645-69041673; SpCas9
gggccgggggtgacaaggggacacc

SEQ ID NO: 35638 - DNA, 24 bp, Artificial Sequence
  Synthetic: FXN 3 forward 9:69041646-69041673; SpCas9
ggccgggggtgacaaggggacacc

SEQ ID NO: 35639 - DNA, 23 bp, Artificial Sequence
  Synthetic: FXN 3 forward 9:69041647-69041673; SpCas9
gccgggggtgacaaggggacacc

SEQ ID NO: 35640 - DNA, 22 bp, Artificial Sequence
  Synthetic: FXN 3 forward 9:69041648-69041673; SpCas9
ccgggggtgacaaggggacacc

SEQ ID NO: 35641 - DNA, 21 bp, Artificial Sequence
  Synthetic: FXN 3 forward 9:69041649-69041673; SpCas9
cgggggtgacaaggggacacc

SEQ ID NO: 35642 - DNA, 20 bp, Artificial Sequence
  Synthetic: FXN 3 forward 9:69041650-69041673; SpCas9
gggggtgacaaggggacacc

SEQ ID NO: 35643 - DNA, 19 bp, Artificial Sequence
  Synthetic: FXN 3 forward 9:69041651-69041673; SpCas9
ggggtgacaaggggacacc

SEQ ID NO: 35644 - DNA, 18 bp, Artificial Sequence
  Synthetic: FXN 3 forward 9:69041652-69041673; SpCas9
gggtgacaaggggacacc

SEQ ID NO: 35645 - DNA, 25 bp, Artificial Sequence
  Synthetic: FXN 3 forward 9:69041646-69041674; SpCas9
ggccgggggtgacaaggggacacct

SEQ ID NO: 35646 - DNA, 24 bp, Artificial Sequence
  Synthetic: FXN 3 forward 9:69041647-69041674; SpCas9
gccgggggtgacaaggggacacct

SEQ ID NO: 35647 - DNA, 23 bp, Artificial Sequence
  Synthetic: FXN 3 forward 9:69041648-69041674; SpCas9
ccgggggtgacaaggggacacct

SEQ ID NO: 35648 - DNA, 22 bp, Artificial Sequence
  Synthetic: FXN 3 forward 9:69041649-69041674; SpCas9
cgggggtgacaaggggacacct

SEQ ID NO: 35649 - DNA, 21 bp, Artificial Sequence
  Synthetic: FXN 3 forward 9:69041650-69041674; SpCas9
gggggtgacaaggggacacct

SEQ ID NO: 35650 - DNA, 20 bp, Artificial Sequence
  Synthetic: FXN 3 forward 9:69041651-69041674; SpCas9
ggggtgacaaggggacacct

SEQ ID NO: 35651 - DNA, 19 bp, Artificial Sequence
  Synthetic: FXN 3 forward 9:69041652-69041674; SpCas9
gggtgacaaggggacacct

SEQ ID NO: 35652 - DNA, 18 bp, Artificial Sequence
  Synthetic: FXN 3 forward 9:69041653-69041674; SpCas9
ggtgacaaggggacacct

SEQ ID NO: 35653 - DNA, 25 bp, Artificial Sequence
  Synthetic: FXN 3 reverse 9:69041648-69041676; SpCas9
ttcccaggtgtccccttgtcacccc

SEQ ID NO: 35654 - DNA, 24 bp, Artificial Sequence
  Synthetic: FXN 3 reverse 9:69041649-69041676; SpCas9
tcccaggtgtccccttgtcacccc

SEQ ID NO: 35655 - DNA, 23 bp, Artificial Sequence
  Synthetic: FXN 3 reverse 9:69041650-69041676; SpCas9
cccaggtgtccccttgtcacccc

SEQ ID NO: 35656 - DNA, 22 bp, Artificial Sequence
  Synthetic: FXN 3 reverse 9:69041651-69041676; SpCas9
ccaggtgtccccttgtcacccc

SEQ ID NO: 35657 - DNA, 21 bp, Artificial Sequence
  Synthetic: FXN 3 reverse 9:69041652-69041676; SpCas9
caggtgtccccttgtcacccc

SEQ ID NO: 35658 - DNA, 20 bp, Artificial Sequence
  Synthetic: FXN 3 reverse 9:69041653-69041676; SpCas9
aggtgtccccttgtcacccc

SEQ ID NO: 35659 - DNA, 19 bp, Artificial Sequence
  Synthetic: FXN 3 reverse 9:69041654-69041676; SpCas9
ggtgtccccttgtcacccc

SEQ ID NO: 35660 - DNA, 18 bp, Artificial Sequence
  Synthetic: FXN 3 reverse 9:69041655-69041676; SpCas9
gtgtccccttgtcacccc

SEQ ID NO: 35661 - DNA, 25 bp, Artificial Sequence
  Synthetic: FXN 3 forward 9:69041649-69041677; SpCas9
cgggggtgacaaggggacacctggg

SEQ ID NO: 35662 - DNA, 24 bp, Artificial Sequence
  Synthetic: FXN 3 forward 9:69041650-69041677; SpCas9
gggggtgacaaggggacacctggg

SEQ ID NO: 35663 - DNA, 23 bp, Artificial Sequence
  Synthetic: FXN 3 forward 9:69041651-69041677; SpCas9
ggggtgacaaggggacacctggg

SEQ ID NO: 35664 - DNA, 22 bp, Artificial Sequence
  Synthetic: FXN 3 forward 9:69041652-69041677; SpCas9
gggtgacaaggggacacctggg

SEQ ID NO: 35665 - DNA, 21 bp, Artificial Sequence
  Synthetic: FXN 3 forward 9:69041653-69041677; SpCas9
ggtgacaaggggacacctggg

SEQ ID NO: 35666 - DNA, 20 bp, Artificial Sequence
  Synthetic: FXN 3 forward 9:69041654-69041677; SpCas9
gtgacaaggggacacctggg

SEQ ID NO: 35667 - DNA, 19 bp, Artificial Sequence
  Synthetic: FXN 3 forward 9:69041655-69041677; SpCas9
tgacaaggggacacctggg

SEQ ID NO: 35668 - DNA, 18 bp, Artificial Sequence
  Synthetic: FXN 3 forward 9:69041656-69041677; SpCas9
gacaaggggacacctggg

SEQ ID NO: 35669 - DNA, 25 bp, Artificial Sequence
  Synthetic: FXN 3 forward 9:69041650-69041678; SpCas9
gggggtgacaaggggacacctggga

SEQ ID NO: 35670 - DNA, 24 bp, Artificial Sequence
  Synthetic: FXN 3 forward 9:69041651-69041678; SpCas9
ggggtgacaaggggacacctggga

SEQ ID NO: 35671 - DNA, 23 bp, Artificial Sequence
  Synthetic: FXN 3 forward 9:69041652-69041678; SpCas9
gggtgacaaggggacacctggga

SEQ ID NO: 35672 - DNA, 22 bp, Artificial Sequence
  Synthetic: FXN 3 forward 9:69041653-69041678; SpCas9
ggtgacaaggggacacctggga

SEQ ID NO: 35673 - DNA, 21 bp, Artificial Sequence
  Synthetic: FXN 3 forward 9:69041654-69041678; SpCas9
gtgacaaggggacacctggga

SEQ ID NO: 35674 - DNA, 20 bp, Artificial Sequence
  Synthetic: FXN 3 forward 9:69041655-69041678; SpCas9
tgacaaggggacacctggga

SEQ ID NO: 35675 - DNA, 19 bp, Artificial Sequence
  Synthetic: FXN 3 forward 9:69041656-69041678; SpCas9
gacaaggggacacctggga

SEQ ID NO: 35676 - DNA, 18 bp, Artificial Sequence
  Synthetic: FXN 3 forward 9:69041657-69041678; SpCas9
acaaggggacacctggga

SEQ ID NO: 35677 - DNA, 25 bp, Artificial Sequence
  Synthetic: FXN 3 forward 9:69041654-69041682; SpCas9
gtgacaaggggacacctgggaagga

SEQ ID NO: 35678 - DNA, 24 bp, Artificial Sequence
  Synthetic: FXN 3 forward 9:69041655-69041682; SpCas9
tgacaaggggacacctgggaagga

SEQ ID NO: 35679 - DNA, 23 bp, Artificial Sequence
  Synthetic: FXN 3 forward 9:69041656-69041682; SpCas9
gacaaggggacacctgggaagga

SEQ ID NO: 35680 - DNA, 22 bp, Artificial Sequence
  Synthetic: FXN 3 forward 9:69041657-69041682; SpCas9
acaaggggacacctgggaagga

SEQ ID NO: 35681 - DNA, 21 bp, Artificial Sequence
  Synthetic: FXN 3 forward 9:69041658-69041682; SpCas9
caaggggacacctgggaagga

SEQ ID NO: 35682 - DNA, 20 bp, Artificial Sequence
  Synthetic: FXN 3 forward 9:69041659-69041682; SpCas9
aaggggacacctgggaagga

SEQ ID NO: 35683 - DNA, 19 bp, Artificial Sequence
  Synthetic: FXN 3 forward 9:69041660-69041682; SpCas9
aggggacacctgggaagga

SEQ ID NO: 35684 - DNA, 18 bp, Artificial Sequence
  Synthetic: FXN 3 forward 9:69041661-69041682; SpCas9
ggggacacctgggaagga

SEQ ID NO: 35685 - DNA, 25 bp, Artificial Sequence
  Synthetic: FXN 3 forward 9:69041658-69041686; SpCas9
caaggggacacctgggaaggaaagc

SEQ ID NO: 35686 - DNA, 24 bp, Artificial Sequence
  Synthetic: FXN 3 forward 9:69041659-69041686; SpCas9
aaggggacacctgggaaggaaagc

SEQ ID NO: 35687 - DNA, 23 bp, Artificial Sequence
  Synthetic: FXN 3 forward 9:69041660-69041686; SpCas9
aggggacacctgggaaggaaagc

SEQ ID NO: 35688 - DNA, 22 bp, Artificial Sequence
  Synthetic: FXN 3 forward 9:69041661-69041686; SpCas9
ggggacacctgggaaggaaagc

SEQ ID NO: 35689 - DNA, 21 bp, Artificial Sequence
  Synthetic: FXN 3 forward 9:69041662-69041686; SpCas9
gggacacctgggaaggaaagc

SEQ ID NO: 35690 - DNA, 20 bp, Artificial Sequence
  Synthetic: FXN 3 forward 9:69041663-69041686; SpCas9
ggacacctgggaaggaaagc

SEQ ID NO: 35691 - DNA, 19 bp, Artificial Sequence
  Synthetic: FXN 3 forward 9:69041664-69041686; SpCas9
gacacctgggaaggaaagc

SEQ ID NO: 35692 - DNA, 18 bp, Artificial Sequence
  Synthetic: FXN 3 forward 9:69041665-69041686; SpCas9
acacctgggaaggaaagc

SEQ ID NO: 35693 - DNA, 25 bp, Artificial Sequence
  Synthetic: FXN 3 forward 9:69041659-69041687; SpCas9
aaggggacacctgggaaggaaagct

SEQ ID NO: 35694 - DNA, 24 bp, Artificial Sequence
  Synthetic: FXN 3 forward 9:69041660-69041687; SpCas9
aggggacacctgggaaggaaagct

SEQ ID NO: 35695 - DNA, 23 bp, Artificial Sequence
  Synthetic: FXN 3 forward 9:69041661-69041687; SpCas9
ggggacacctgggaaggaaagct

SEQ ID NO: 35696 - DNA, 22 bp, Artificial Sequence
  Synthetic: FXN 3 forward 9:69041662-69041687; SpCas9
gggacacctgggaaggaaagct

SEQ ID NO: 35697 - DNA, 21 bp, Artificial Sequence
  Synthetic: FXN 3 forward 9:69041663-69041687; SpCas9
ggacacctgggaaggaaagct

SEQ ID NO: 35698 - DNA, 20 bp, Artificial Sequence
  Synthetic: FXN 3 forward 9:69041664-69041687; SpCas9
gacacctgggaaggaaagct

SEQ ID NO: 35699 - DNA, 19 bp, Artificial Sequence
  Synthetic: FXN 3 forward 9:69041665-69041687; SpCas9
acacctgggaaggaaagct

SEQ ID NO: 35700 - DNA, 18 bp, Artificial Sequence
  Synthetic: FXN 3 forward 9:69041666-69041687; SpCas9
cacctgggaaggaaagct

SEQ ID NO: 35701 - DNA, 25 bp, Artificial Sequence
  Synthetic: FXN 3 reverse 9:69041668-69041696; SpCas9
agcagggagcccagctttccttccc

SEQ ID NO: 35702 - DNA, 24 bp, Artificial Sequence
  Synthetic: FXN 3 reverse 9:69041669-69041696; SpCas9
gcagggagcccagctttccttccc

SEQ ID NO: 35703 - DNA, 23 bp, Artificial Sequence
  Synthetic: FXN 3 reverse 9:69041670-69041696; SpCas9
cagggagcccagctttccttccc

SEQ ID NO: 35704 - DNA, 22 bp, Artificial Sequence
  Synthetic: FXN 3 reverse 9:69041671-69041696; SpCas9
agggagcccagctttccttccc

SEQ ID NO: 35705 - DNA, 21 bp, Artificial Sequence
  Synthetic: FXN 3 reverse 9:69041672-69041696; SpCas9
gggagcccagctttccttccc

SEQ ID NO: 35706 - DNA, 20 bp, Artificial Sequence
  Synthetic: FXN 3 reverse 9:69041673-69041696; SpCas9
ggagcccagctttccttccc

SEQ ID NO: 35707 - DNA, 19 bp, Artificial Sequence
  Synthetic: FXN 3 reverse 9:69041674-69041696; SpCas9
gagcccagctttccttccc

SEQ ID NO: 35708 - DNA, 18 bp, Artificial Sequence
  Synthetic: FXN 3 reverse 9:69041675-69041696; SpCas9
agcccagctttccttccc

SEQ ID NO: 35709 - DNA, 25 bp, Artificial Sequence
  Synthetic: FXN 3 reverse 9:69041669-69041697; SpCas9
cagcagggagcccagctttccttcc

SEQ ID NO: 35710 - DNA, 24 bp, Artificial Sequence
  Synthetic: FXN 3 reverse 9:69041670-69041697; SpCas9
agcagggagcccagctttccttcc

SEQ ID NO: 35711 - DNA, 23 bp, Artificial Sequence
  Synthetic: FXN 3 reverse 9:69041671-69041697; SpCas9
gcagggagcccagctttccttcc

SEQ ID NO: 35712 - DNA, 22 bp, Artificial Sequence
  Synthetic: FXN 3 reverse 9:69041672-69041697; SpCas9
cagggagcccagctttccttcc

SEQ ID NO: 35713 - DNA, 21 bp, Artificial Sequence
  Synthetic: FXN 3 reverse 9:69041673-69041697; SpCas9
agggagcccagctttccttcc

SEQ ID NO: 35714 - DNA, 20 bp, Artificial Sequence
  Synthetic: FXN 3 reverse 9:69041674-69041697; SpCas9
gggagcccagctttccttcc

SEQ ID NO: 35715 - DNA, 19 bp, Artificial Sequence
  Synthetic: FXN 3 reverse 9:69041675-69041697; SpCas9
ggagcccagctttccttcc

SEQ ID NO: 35716 - DNA, 18 bp, Artificial Sequence
  Synthetic: FXN 3 reverse 9:69041676-69041697; SpCas9
gagcccagctttccttcc

SEQ ID NO: 35717 - DNA, 25 bp, Artificial Sequence
  Synthetic: FXN 3 forward 9:69041670-69041698; SpCas9
tgggaaggaaagctgggctccctgc

SEQ ID NO: 35718 - DNA, 24 bp, Artificial Sequence
  Synthetic: FXN 3 forward 9:69041671-69041698; SpCas9
gggaaggaaagctgggctccctgc

SEQ ID NO: 35719 - DNA, 23 bp, Artificial Sequence
  Synthetic: FXN 3 forward 9:69041672-69041698; SpCas9
ggaaggaaagctgggctccctgc

SEQ ID NO: 35720 - DNA, 22 bp, Artificial Sequence
  Synthetic: FXN 3 forward 9:69041673-69041698; SpCas9
gaaggaaagctgggctccctgc

SEQ ID NO: 35721 - DNA, 21 bp, Artificial Sequence
  Synthetic: FXN 3 forward 9:69041674-69041698; SpCas9
aaggaaagctgggctccctgc

SEQ ID NO: 35722 - DNA, 20 bp, Artificial Sequence
  Synthetic: FXN 3 forward 9:69041675-69041698; SpCas9
aggaaagctgggctccctgc

SEQ ID NO: 35723 - DNA, 19 bp, Artificial Sequence
  Synthetic: FXN 3 forward 9:69041676-69041698; SpCas9
ggaaagctgggctccctgc

SEQ ID NO: 35724 - DNA, 18 bp, Artificial Sequence
  Synthetic: FXN 3 forward 9:69041677-69041698; SpCas9
gaaagctgggctccctgc

SEQ ID NO: 35725 - DNA, 25 bp, Artificial Sequence
  Synthetic: FXN 3 forward 9:69041678-69041706; SpCas9
aaagctgggctccctgctggccatc

SEQ ID NO: 35726 - DNA, 24 bp, Artificial Sequence
  Synthetic: FXN 3 forward 9:69041679-69041706; SpCas9
aagctgggctccctgctggccatc

SEQ ID NO: 35727 - DNA, 23 bp, Artificial Sequence
  Synthetic: FXN 3 forward 9:69041680-69041706; SpCas9
agctgggctccctgctggccatc

SEQ ID NO: 35728 - DNA, 22 bp, Artificial Sequence
  Synthetic: FXN 3 forward 9:69041681-69041706; SpCas9
gctgggctccctgctggccatc

SEQ ID NO: 35729 - DNA, 21 bp, Artificial Sequence
  Synthetic: FXN 3 forward 9:69041682-69041706; SpCas9
ctgggctccctgctggccatc

SEQ ID NO: 35730 - DNA, 20 bp, Artificial Sequence
  Synthetic: FXN 3 forward 9:69041683-69041706; SpCas9
tgggctccctgctggccatc

SEQ ID NO: 35731 - DNA, 19 bp, Artificial Sequence
  Synthetic: FXN 3 forward 9:69041684-69041706; SpCas9
gggctccctgctggccatc

SEQ ID NO: 35732 - DNA, 18 bp, Artificial Sequence
  Synthetic: FXN 3 forward 9:69041685-69041706; SpCas9
ggctccctgctggccatc

SEQ ID NO: 35733 - DNA, 25 bp, Artificial Sequence
  Synthetic: FXN 3 forward 9:69041679-69041707; SpCas9
aagctgggctccctgctggccatcc

SEQ ID NO: 35734 - DNA, 24 bp, Artificial Sequence
  Synthetic: FXN 3 forward 9:69041680-69041707; SpCas9
agctgggctccctgctggccatcc

SEQ ID NO: 35735 - DNA, 23 bp, Artificial Sequence
  Synthetic: FXN 3 forward 9:69041681-69041707; SpCas9
gctgggctccctgctggccatcc

SEQ ID NO: 35736 - DNA, 22 bp, Artificial Sequence
  Synthetic: FXN 3 forward 9:69041682-69041707; SpCas9
ctgggctccctgctggccatcc

SEQ ID NO: 35737 - DNA, 21 bp, Artificial Sequence
  Synthetic: FXN 3 forward 9:69041683-69041707; SpCas9
tgggctccctgctggccatcc

SEQ ID NO: 35738 - DNA, 20 bp, Artificial Sequence
  Synthetic: FXN 3 forward 9:69041684-69041707; SpCas9
gggctccctgctggccatcc

SEQ ID NO: 35739 - DNA, 19 bp, Artificial Sequence
  Synthetic: FXN 3 forward 9:69041685-69041707; SpCas9
ggctccctgctggccatcc

SEQ ID NO: 35740 - DNA, 18 bp, Artificial Sequence
  Synthetic: FXN 3 forward 9:69041686-69041707; SpCas9
gctccctgctggccatcc

SEQ ID NO: 35741 - DNA, 25 bp, Artificial Sequence
  Synthetic: FXN 3 reverse 9:69041682-69041710; SpCas9
tggcctggatggccagcagggagcc

SEQ ID NO: 35742 - DNA, 24 bp, Artificial Sequence
  Synthetic: FXN 3 reverse 9:69041683-69041710; SpCas9
ggcctggatggccagcagggagcc

SEQ ID NO: 35743 - DNA, 23 bp, Artificial Sequence
  Synthetic: FXN 3 reverse 9:69041684-69041710; SpCas9
gcctggatggccagcagggagcc

SEQ ID NO: 35744 - DNA, 22 bp, Artificial Sequence
  Synthetic: FXN 3 reverse 9:69041685-69041710; SpCas9
cctggatggccagcagggagcc

SEQ ID NO: 35745 - DNA, 21 bp, Artificial Sequence
  Synthetic: FXN 3 reverse 9:69041686-69041710; SpCas9
ctggatggccagcagggagcc

SEQ ID NO: 35746 - DNA, 20 bp, Artificial Sequence
  Synthetic: FXN 3 reverse 9:69041687-69041710; SpCas9
tggatggccagcagggagcc

SEQ ID NO: 35747 - DNA, 19 bp, Artificial Sequence
  Synthetic: FXN 3 reverse 9:69041688-69041710; SpCas9
ggatggccagcagggagcc

SEQ ID NO: 35748 - DNA, 18 bp, Artificial Sequence
  Synthetic: FXN 3 reverse 9:69041689-69041710; SpCas9
gatggccagcagggagcc

SEQ ID NO: 35749 - DNA, 25 bp, Artificial Sequence
  Synthetic: FXN 3 forward 9:69041683-69041711; SpCas9
tgggctccctgctggccatccaggc

SEQ ID NO: 35750 - DNA, 24 bp, Artificial Sequence
  Synthetic: FXN 3 forward 9:69041684-69041711; SpCas9
gggctccctgctggccatccaggc

SEQ ID NO: 35751 - DNA, 23 bp, Artificial Sequence
  Synthetic: FXN 3 forward 9:69041685-69041711; SpCas9
ggctccctgctggccatccaggc

SEQ ID NO: 35752 - DNA, 22 bp, Artificial Sequence
  Synthetic: FXN 3 forward 9:69041686-69041711; SpCas9
gctccctgctggccatccaggc

SEQ ID NO: 35753 - DNA, 21 bp, Artificial Sequence
  Synthetic: FXN 3 forward 9:69041687-69041711; SpCas9
ctccctgctggccatccaggc

SEQ ID NO: 35754 - DNA, 20 bp, Artificial Sequence
  Synthetic: FXN 3 forward 9:69041688-69041711; SpCas9
tccctgctggccatccaggc

SEQ ID NO: 35755 - DNA, 19 bp, Artificial Sequence
  Synthetic: FXN 3 forward 9:69041689-69041711; SpCas9
ccctgctggccatccaggc

SEQ ID NO: 35756 - DNA, 18 bp, Artificial Sequence
  Synthetic: FXN 3 forward 9:69041690-69041711; SpCas9
cctgctggccatccaggc

SEQ ID NO: 35757 - DNA, 25 bp, Artificial Sequence
  Synthetic: FXN 3 reverse 9:69041687-69041715; SpCas9
aggactggcctggatggccagcagg

SEQ ID NO: 35758 - DNA, 24 bp, Artificial Sequence
  Synthetic: FXN 3 reverse 9:69041688-69041715; SpCas9
ggactggcctggatggccagcagg

SEQ ID NO: 35759 - DNA, 23 bp, Artificial Sequence
  Synthetic: FXN 3 reverse 9:69041689-69041715; SpCas9
gactggcctggatggccagcagg

SEQ ID NO: 35760 - DNA, 22 bp, Artificial Sequence
  Synthetic: FXN 3 reverse 9:69041690-69041715; SpCas9
actggcctggatggccagcagg

SEQ ID NO: 35761 - DNA, 21 bp, Artificial Sequence
  Synthetic: FXN 3 reverse 9:69041691-69041715; SpCas9
ctggcctggatggccagcagg

SEQ ID NO: 35762 - DNA, 20 bp, Artificial Sequence
  Synthetic: FXN 3 reverse 9:69041692-69041715; SpCas9
tggcctggatggccagcagg

SEQ ID NO: 35763 - DNA, 19 bp, Artificial Sequence
  Synthetic: FXN 3 reverse 9:69041693-69041715; SpCas9
ggcctggatggccagcagg

SEQ ID NO: 35764 - DNA, 18 bp, Artificial Sequence
  Synthetic: FXN 3 reverse 9:69041694-69041715; SpCas9
gcctggatggccagcagg

SEQ ID NO: 35765 - DNA, 25 bp, Artificial Sequence
  Synthetic: FXN 3 reverse 9:69041689-69041717; SpCas9
taaggactggcctggatggccagca

SEQ ID NO: 35766 - DNA, 24 bp, Artificial Sequence
  Synthetic: FXN 3 reverse 9:69041690-69041717; SpCas9
aaggactggcctggatggccagca

SEQ ID NO: 35767 - DNA, 23 bp, Artificial Sequence
  Synthetic: FXN 3 reverse 9:69041691-69041717; SpCas9
aggactggcctggatggccagca

SEQ ID NO: 35768 - DNA, 22 bp, Artificial Sequence
  Synthetic: FXN 3 reverse 9:69041692-69041717; SpCas9
ggactggcctggatggccagca

SEQ ID NO: 35769 - DNA, 21 bp, Artificial Sequence
  Synthetic: FXN 3 reverse 9:69041693-69041717; SpCas9
gactggcctggatggccagca

SEQ ID NO: 35770 - DNA, 20 bp, Artificial Sequence
  Synthetic: FXN 3 reverse 9:69041694-69041717; SpCas9
actggcctggatggccagca

SEQ ID NO: 35771 - DNA, 19 bp, Artificial Sequence
  Synthetic: FXN 3 reverse 9:69041695-69041717; SpCas9
ctggcctggatggccagca

SEQ ID NO: 35772 - DNA, 18 bp, Artificial Sequence
  Synthetic: FXN 3 reverse 9:69041696-69041717; SpCas9
tggcctggatggccagca

SEQ ID NO: 35773 - DNA, 25 bp, Artificial Sequence
  Synthetic: FXN 3 reverse 9:69041690-69041718; SpCas9
gtaaggactggcctggatggccagc

SEQ ID NO: 35774 - DNA, 24 bp, Artificial Sequence
  Synthetic: FXN 3 reverse 9:69041691-69041718; SpCas9
taaggactggcctggatggccagc

SEQ ID NO: 35775 - DNA, 23 bp, Artificial Sequence
  Synthetic: FXN 3 reverse 9:69041692-69041718; SpCas9
aaggactggcctggatggccagc

SEQ ID NO: 35776 - DNA, 22 bp, Artificial Sequence
  Synthetic: FXN 3 reverse 9:69041693-69041718; SpCas9
aggactggcctggatggccagc

SEQ ID NO: 35777 - DNA, 21 bp, Artificial Sequence
  Synthetic: FXN 3 reverse 9:69041694-69041718; SpCas9
ggactggcctggatggccagc

SEQ ID NO: 35778 - DNA, 20 bp, Artificial Sequence
  Synthetic: FXN 3 reverse 9:69041695-69041718; SpCas9
gactggcctggatggccagc

SEQ ID NO: 35779 - DNA, 19 bp, Artificial Sequence
  Synthetic: FXN 3 reverse 9:69041696-69041718; SpCas9
actggcctggatggccagc

SEQ ID NO: 35780 - DNA, 18 bp, Artificial Sequence
  Synthetic: FXN 3 reverse 9:69041697-69041718; SpCas9
ctggcctggatggccagc

SEQ ID NO: 35781 - DNA, 25 bp, Artificial Sequence
  Synthetic: FXN 3 reverse 9:69041691-69041719; SpCas9
ggtaaggactggcctggatggccag

SEQ ID NO: 35782 - DNA, 24 bp, Artificial Sequence
  Synthetic: FXN 3 reverse 9:69041692-69041719; SpCas9
gtaaggactggcctggatggccag

SEQ ID NO: 35783 - DNA, 23 bp, Artificial Sequence
  Synthetic: FXN 3 reverse 9:69041693-69041719; SpCas9
taaggactggcctggatggccag

SEQ ID NO: 35784 - DNA, 22 bp, Artificial Sequence
  Synthetic: FXN 3 reverse 9:69041694-69041719; SpCas9
aaggactggcctggatggccag

SEQ ID NO: 35785 - DNA, 21 bp, Artificial Sequence
  Synthetic: FXN 3 reverse 9:69041695-69041719; SpCas9
aggactggcctggatggccag

SEQ ID NO: 35786 - DNA, 20 bp, Artificial Sequence
  Synthetic: FXN 3 reverse 9:69041696-69041719; SpCas9
ggactggcctggatggccag

SEQ ID NO: 35787 - DNA, 19 bp, Artificial Sequence
  Synthetic: FXN 3 reverse 9:69041697-69041719; SpCas9
gactggcctggatggccag

SEQ ID NO: 35788 - DNA, 18 bp, Artificial Sequence
  Synthetic: FXN 3 reverse 9:69041698-69041719; SpCas9
actggcctggatggccag

SEQ ID NO: 35789 - DNA, 25 bp, Artificial Sequence
  Synthetic: FXN 3 forward 9:69041693-69041721; SpCas9
gctggccatccaggccagtccttac

SEQ ID NO: 35790 - DNA, 24 bp, Artificial Sequence
  Synthetic: FXN 3 forward 9:69041694-69041721; SpCas9
ctggccatccaggccagtccttac

SEQ ID NO: 35791 - DNA, 23 bp, Artificial Sequence
  Synthetic: FXN 3 forward 9:69041695-69041721; SpCas9
tggccatccaggccagtccttac

SEQ ID NO: 35792 - DNA, 22 bp, Artificial Sequence
  Synthetic: FXN 3 forward 9:69041696-69041721; SpCas9
ggccatccaggccagtccttac

SEQ ID NO: 35793 - DNA, 21 bp, Artificial Sequence
  Synthetic: FXN 3 forward 9:69041697-69041721; SpCas9
gccatccaggccagtccttac

SEQ ID NO: 35794 - DNA, 20 bp, Artificial Sequence
  Synthetic: FXN 3 forward 9:69041698-69041721; SpCas9
ccatccaggccagtccttac

SEQ ID NO: 35795 - DNA, 19 bp, Artificial Sequence
  Synthetic: FXN 3 forward 9:69041699-69041721; SpCas9
catccaggccagtccttac

SEQ ID NO: 35796 - DNA, 18 bp, Artificial Sequence
  Synthetic: FXN 3 forward 9:69041700-69041721; SpCas9
atccaggccagtccttac

SEQ ID NO: 35797 - DNA, 25 bp, Artificial Sequence
  Synthetic: FXN 3 forward 9:69041694-69041722; SpCas9
ctggccatccaggccagtccttacc

SEQ ID NO: 35798 - DNA, 24 bp, Artificial Sequence
  Synthetic: FXN 3 forward 9:69041695-69041722; SpCas9
tggccatccaggccagtccttacc

SEQ ID NO: 35799 - DNA, 23 bp, Artificial Sequence
  Synthetic: FXN 3 forward 9:69041696-69041722; SpCas9
ggccatccaggccagtccttacc

SEQ ID NO: 35800 - DNA, 22 bp, Artificial Sequence
  Synthetic: FXN 3 forward 9:69041697-69041722; SpCas9
gccatccaggccagtccttacc

SEQ ID NO: 35801 - DNA, 21 bp, Artificial Sequence
  Synthetic: FXN 3 forward 9:69041698-69041722; SpCas9
ccatccaggccagtccttacc

SEQ ID NO: 35802 - DNA, 20 bp, Artificial Sequence
  Synthetic: FXN 3 forward 9:69041699-69041722; SpCas9
catccaggccagtccttacc

SEQ ID NO: 35803 - DNA, 19 bp, Artificial Sequence
  Synthetic: FXN 3 forward 9:69041700-69041722; SpCas9
atccaggccagtccttacc

SEQ ID NO: 35804 - DNA, 18 bp, Artificial Sequence
  Synthetic: FXN 3 forward 9:69041701-69041722; SpCas9
tccaggccagtccttacc

SEQ ID NO: 35805 - DNA, 25 bp, Artificial Sequence
  Synthetic: FXN 3 reverse 9:69041694-69041722; SpCas9
cctggtaaggactggcctggatggc

SEQ ID NO: 35806 - DNA, 24 bp, Artificial Sequence
  Synthetic: FXN 3 reverse 9:69041695-69041722; SpCas9
ctggtaaggactggcctggatggc

SEQ ID NO: 35807 - DNA, 23 bp, Artificial Sequence
  Synthetic: FXN 3 reverse 9:69041696-69041722; SpCas9
tggtaaggactggcctggatggc

SEQ ID NO: 35808 - DNA, 22 bp, Artificial Sequence
  Synthetic: FXN 3 reverse 9:69041697-69041722; SpCas9
ggtaaggactggcctggatggc

SEQ ID NO: 35809 - DNA, 21 bp, Artificial Sequence
  Synthetic: FXN 3 reverse 9:69041698-69041722; SpCas9
gtaaggactggcctggatggc

SEQ ID NO: 35810 - DNA, 20 bp, Artificial Sequence
  Synthetic: FXN 3 reverse 9:69041699-69041722; SpCas9
taaggactggcctggatggc

SEQ ID NO: 35811 - DNA, 19 bp, Artificial Sequence
  Synthetic: FXN 3 reverse 9:69041700-69041722; SpCas9
aaggactggcctggatggc

SEQ ID NO: 35812 - DNA, 18 bp, Artificial Sequence
  Synthetic: FXN 3 reverse 9:69041701-69041722; SpCas9
aggactggcctggatggc

SEQ ID NO: 35813 - DNA, 25 bp, Artificial Sequence
  Synthetic: FXN 3 forward 9:69041695-69041723; SpCas9
tggccatccaggccagtccttacca

SEQ ID NO: 35814 - DNA, 24 bp, Artificial Sequence
  Synthetic: FXN 3 forward 9:69041696-69041723; SpCas9
ggccatccaggccagtccttacca

SEQ ID NO: 35815 - DNA, 23 bp, Artificial Sequence
  Synthetic: FXN 3 forward 9:69041697-69041723; SpCas9
gccatccaggccagtccttacca

SEQ ID NO: 35816 - DNA, 22 bp, Artificial Sequence
  Synthetic: FXN 3 forward 9:69041698-69041723; SpCas9
ccatccaggccagtccttacca

SEQ ID NO: 35817 - DNA, 21 bp, Artificial Sequence
  Synthetic: FXN 3 forward 9:69041699-69041723; SpCas9
catccaggccagtccttacca

SEQ ID NO: 35818 - DNA, 20 bp, Artificial Sequence
  Synthetic: FXN 3 forward 9:69041700-69041723; SpCas9
atccaggccagtccttacca

SEQ ID NO: 35819 - DNA, 19 bp, Artificial Sequence
  Synthetic: FXN 3 forward 9:69041701-69041723; SpCas9
tccaggccagtccttacca

SEQ ID NO: 35820 - DNA, 18 bp, Artificial Sequence
  Synthetic: FXN 3 forward 9:69041702-69041723; SpCas9
ccaggccagtccttacca

SEQ ID NO: 35821 - DNA, 25 bp, Artificial Sequence
  Synthetic: FXN 3 forward 9:69041696-69041724; SpCas9
ggccatccaggccagtccttaccag

SEQ ID NO: 35822 - DNA, 24 bp, Artificial Sequence
  Synthetic: FXN 3 forward 9:69041697-69041724; SpCas9
gccatccaggccagtccttaccag

SEQ ID NO: 35823 - DNA, 23 bp, Artificial Sequence
  Synthetic: FXN 3 forward 9:69041698-69041724; SpCas9
ccatccaggccagtccttaccag

SEQ ID NO: 35824 - DNA, 22 bp, Artificial Sequence
  Synthetic: FXN 3 forward 9:69041699-69041724; SpCas9
catccaggccagtccttaccag

SEQ ID NO: 35825 - DNA, 21 bp, Artificial Sequence
  Synthetic: FXN 3 forward 9:69041700-69041724; SpCas9
atccaggccagtccttaccag

SEQ ID NO: 35826 - DNA, 20 bp, Artificial Sequence
  Synthetic: FXN 3 forward 9:69041701-69041724; SpCas9
tccaggccagtccttaccag

SEQ ID NO: 35827 - DNA, 19 bp, Artificial Sequence
  Synthetic: FXN 3 forward 9:69041702-69041724; SpCas9
ccaggccagtccttaccag

SEQ ID NO: 35828 - DNA, 18 bp, Artificial Sequence
  Synthetic: FXN 3 forward 9:69041703-69041724; SpCas9
caggccagtccttaccag

SEQ ID NO: 35829 - DNA, 25 bp, Artificial Sequence
  Synthetic: FXN 3 forward 9:69041697-69041725; SpCas9
gccatccaggccagtccttaccagg

SEQ ID NO: 35830 - DNA, 24 bp, Artificial Sequence
  Synthetic: FXN 3 forward 9:69041698-69041725; SpCas9
ccatccaggccagtccttaccagg

SEQ ID NO: 35831 - DNA, 23 bp, Artificial Sequence
  Synthetic: FXN 3 forward 9:69041699-69041725; SpCas9
catccaggccagtccttaccagg

SEQ ID NO: 35832 - DNA, 22 bp, Artificial Sequence
  Synthetic: FXN 3 forward 9:69041700-69041725; SpCas9
atccaggccagtccttaccagg

SEQ ID NO: 35833 - DNA, 21 bp, Artificial Sequence
  Synthetic: FXN 3 forward 9:69041701-69041725; SpCas9
tccaggccagtccttaccagg

SEQ ID NO: 35834 - DNA, 20 bp, Artificial Sequence
  Synthetic: FXN 3 forward 9:69041702-69041725; SpCas9
ccaggccagtccttaccagg

SEQ ID NO: 35835 - DNA, 19 bp, Artificial Sequence
  Synthetic: FXN 3 forward 9:69041703-69041725; SpCas9
caggccagtccttaccagg

SEQ ID NO: 35836 - DNA, 18 bp, Artificial Sequence
  Synthetic: FXN 3 forward 9:69041704-69041725; SpCas9
aggccagtccttaccagg

SEQ ID NO: 35837 - DNA, 25 bp, Artificial Sequence
  Synthetic: FXN 3 reverse 9:69041698-69041726; SpCas9
accccctggtaaggactggcctgga

SEQ ID NO: 35838 - DNA, 24 bp, Artificial Sequence
  Synthetic: FXN 3 reverse 9:69041699-69041726; SpCas9
ccccctggtaaggactggcctgga

SEQ ID NO: 35839 - DNA, 23 bp, Artificial Sequence
  Synthetic: FXN 3 reverse 9:69041700-69041726; SpCas9
cccctggtaaggactggcctgga

SEQ ID NO: 35840 - DNA, 22 bp, Artificial Sequence
  Synthetic: FXN 3 reverse 9:69041701-69041726; SpCas9
ccctggtaaggactggcctgga

SEQ ID NO: 35841 - DNA, 21 bp, Artificial Sequence
  Synthetic: FXN 3 reverse 9:69041702-69041726; SpCas9
cctggtaaggactggcctgga

SEQ ID NO: 35842 - DNA, 20 bp, Artificial Sequence
  Synthetic: FXN 3 reverse 9:69041703-69041726; SpCas9
ctggtaaggactggcctgga

SEQ ID NO: 35843 - DNA, 19 bp, Artificial Sequence
  Synthetic: FXN 3 reverse 9:69041704-69041726; SpCas9
tggtaaggactggcctgga

SEQ ID NO: 35844 - DNA, 18 bp, Artificial Sequence
  Synthetic: FXN 3 reverse 9:69041705-69041726; SpCas9
ggtaaggactggcctgga

SEQ ID NO: 35845 - DNA, 25 bp, Artificial Sequence
  Synthetic: FXN 3 forward 9:69041700-69041728; SpCas9
atccaggccagtccttaccaggggg

SEQ ID NO: 35846 - DNA, 24 bp, Artificial Sequence
  Synthetic: FXN 3 forward 9:69041701-69041728; SpCas9
tccaggccagtccttaccaggggg

SEQ ID NO: 35847 - DNA, 23 bp, Artificial Sequence
  Synthetic: FXN 3 forward 9:69041702-69041728; SpCas9
ccaggccagtccttaccaggggg

SEQ ID NO: 35848 - DNA, 22 bp, Artificial Sequence
  Synthetic: FXN 3 forward 9:69041703-69041728; SpCas9
caggccagtccttaccaggggg

SEQ ID NO: 35849 - DNA, 21 bp, Artificial Sequence
  Synthetic: FXN 3 forward 9:69041704-69041728; SpCas9
aggccagtccttaccaggggg

SEQ ID NO: 35850 - DNA, 20 bp, Artificial Sequence
  Synthetic: FXN 3 forward 9:69041705-69041728; SpCas9
ggccagtccttaccaggggg

SEQ ID NO: 35851 - DNA, 19 bp, Artificial Sequence
  Synthetic: FXN 3 forward 9:69041706-69041728; SpCas9
gccagtccttaccaggggg

SEQ ID NO: 35852 - DNA, 18 bp, Artificial Sequence
  Synthetic: FXN 3 forward 9:69041707-69041728; SpCas9
ccagtccttaccaggggg

SEQ ID NO: 35853 - DNA, 25 bp, Artificial Sequence
  Synthetic: FXN 3 forward 9:69041701-69041729; SpCas9
tccaggccagtccttaccagggggt

SEQ ID NO: 35854 - DNA, 24 bp, Artificial Sequence
  Synthetic: FXN 3 forward 9:69041702-69041729; SpCas9
ccaggccagtccttaccagggggt

SEQ ID NO: 35855 - DNA, 23 bp, Artificial Sequence
  Synthetic: FXN 3 forward 9:69041703-69041729; SpCas9
caggccagtccttaccagggggt

SEQ ID NO: 35856 - DNA, 22 bp, Artificial Sequence
  Synthetic: FXN 3 forward 9:69041704-69041729; SpCas9
aggccagtccttaccagggggt

SEQ ID NO: 35857 - DNA, 21 bp, Artificial Sequence
  Synthetic: FXN 3 forward 9:69041705-69041729; SpCas9
ggccagtccttaccagggggt

SEQ ID NO: 35858 - DNA, 20 bp, Artificial Sequence
  Synthetic: FXN 3 forward 9:69041706-69041729; SpCas9
gccagtccttaccagggggt

SEQ ID NO: 35859 - DNA, 19 bp, Artificial Sequence
  Synthetic: FXN 3 forward 9:69041707-69041729; SpCas9
ccagtccttaccagggggt

SEQ ID NO: 35860 - DNA, 18 bp, Artificial Sequence
  Synthetic: FXN 3 forward 9:69041708-69041729; SpCas9
cagtccttaccagggggt

SEQ ID NO: 35861 - DNA, 25 bp, Artificial Sequence
  Synthetic: FXN 3 reverse 9:69041702-69041730; SpCas9
gcctaccccctggtaaggactggcc

SEQ ID NO: 35862 - DNA, 24 bp, Artificial Sequence
  Synthetic: FXN 3 reverse 9:69041703-69041730; SpCas9
cctaccccctggtaaggactggcc

SEQ ID NO: 35863 - DNA, 23 bp, Artificial Sequence
  Synthetic: FXN 3 reverse 9:69041704-69041730; SpCas9
ctaccccctggtaaggactggcc

SEQ ID NO: 35864 - DNA, 22 bp, Artificial Sequence
  Synthetic: FXN 3 reverse 9:69041705-69041730; SpCas9
taccccctggtaaggactggcc

SEQ ID NO: 35865 - DNA, 21 bp, Artificial Sequence
  Synthetic: FXN 3 reverse 9:69041706-69041730; SpCas9
accccctggtaaggactggcc

SEQ ID NO: 35866 - DNA, 20 bp, Artificial Sequence
  Synthetic: FXN 3 reverse 9:69041707-69041730; SpCas9
ccccctggtaaggactggcc

SEQ ID NO: 35867 - DNA, 19 bp, Artificial Sequence
  Synthetic: FXN 3 reverse 9:69041708-69041730; SpCas9
cccctggtaaggactggcc

SEQ ID NO: 35868 - DNA, 18 bp, Artificial Sequence
  Synthetic: FXN 3 reverse 9:69041709-69041730; SpCas9
ccctggtaaggactggcc

SEQ ID NO: 35869 - DNA, 25 bp, Artificial Sequence
  Synthetic: FXN 3 reverse 9:69041707-69041735; SpCas9
tcattgcctaccccctggtaaggac

SEQ ID NO: 35870 - DNA, 24 bp, Artificial Sequence
  Synthetic: FXN 3 reverse 9:69041708-69041735; SpCas9
cattgcctaccccctggtaaggac

SEQ ID NO: 35871 - DNA, 23 bp, Artificial Sequence
  Synthetic: FXN 3 reverse 9:69041709-69041735; SpCas9
attgcctaccccctggtaaggac

SEQ ID NO: 35872 - DNA, 22 bp, Artificial Sequence
  Synthetic: FXN 3 reverse 9:69041710-69041735; SpCas9
ttgcctaccccctggtaaggac

SEQ ID NO: 35873 - DNA, 21 bp, Artificial Sequence
  Synthetic: FXN 3 reverse 9:69041711-69041735; SpCas9
tgcctaccccctggtaaggac

SEQ ID NO: 35874 - DNA, 20 bp, Artificial Sequence
  Synthetic: FXN 3 reverse 9:69041712-69041735; SpCas9
gcctaccccctggtaaggac

SEQ ID NO: 35875 - DNA, 19 bp, Artificial Sequence
  Synthetic: FXN 3 reverse 9:69041713-69041735; SpCas9
cctaccccctggtaaggac

SEQ ID NO: 35876 - DNA, 18 bp, Artificial Sequence
  Synthetic: FXN 3 reverse 9:69041714-69041735; SpCas9
ctaccccctggtaaggac

SEQ ID NO: 35877 - DNA, 25 bp, Artificial Sequence
  Synthetic: FXN 3 forward 9:69041711-69041739; SpCas9
tccttaccagggggtaggcaatgat

SEQ ID NO: 35878 - DNA, 24 bp, Artificial Sequence
  Synthetic: FXN 3 forward 9:69041712-69041739; SpCas9
ccttaccagggggtaggcaatgat

SEQ ID NO: 35879 - DNA, 23 bp, Artificial Sequence
  Synthetic: FXN 3 forward 9:69041713-69041739; SpCas9
cttaccagggggtaggcaatgat

SEQ ID NO: 35880 - DNA, 22 bp, Artificial Sequence
  Synthetic: FXN 3 forward 9:69041714-69041739; SpCas9
ttaccagggggtaggcaatgat

SEQ ID NO: 35881 - DNA, 21 bp, Artificial Sequence
  Synthetic: FXN 3 forward 9:69041715-69041739; SpCas9
taccagggggtaggcaatgat

SEQ ID NO: 35882 - DNA, 20 bp, Artificial Sequence
  Synthetic: FXN 3 forward 9:69041716-69041739; SpCas9
accagggggtaggcaatgat

SEQ ID NO: 35883 - DNA, 19 bp, Artificial Sequence
  Synthetic: FXN 3 forward 9:69041717-69041739; SpCas9
ccagggggtaggcaatgat

SEQ ID NO: 35884 - DNA, 18 bp, Artificial Sequence
  Synthetic: FXN 3 forward 9:69041718-69041739; SpCas9
cagggggtaggcaatgat

SEQ ID NO: 35885 - DNA, 25 bp, Artificial Sequence
  Synthetic: FXN 3 forward 9:69041712-69041740; SpCas9
ccttaccagggggtaggcaatgatt

SEQ ID NO: 35886 - DNA, 24 bp, Artificial Sequence
  Synthetic: FXN 3 forward 9:69041713-69041740; SpCas9
cttaccagggggtaggcaatgatt

SEQ ID NO: 35887 - DNA, 23 bp, Artificial Sequence
  Synthetic: FXN 3 forward 9:69041714-69041740; SpCas9
ttaccagggggtaggcaatgatt

SEQ ID NO: 35888 - DNA, 22 bp, Artificial Sequence
  Synthetic: FXN 3 forward 9:69041715-69041740; SpCas9
taccagggggtaggcaatgatt

SEQ ID NO: 35889 - DNA, 21 bp, Artificial Sequence
  Synthetic: FXN 3 forward 9:69041716-69041740; SpCas9
accagggggtaggcaatgatt

SEQ ID NO: 35890 - DNA, 20 bp, Artificial Sequence
  Synthetic: FXN 3 forward 9:69041717-69041740; SpCas9
ccagggggtaggcaatgatt

SEQ ID NO: 35891 - DNA, 19 bp, Artificial Sequence
  Synthetic: FXN 3 forward 9:69041718-69041740; SpCas9
cagggggtaggcaatgatt

SEQ ID NO: 35892 - DNA, 18 bp, Artificial Sequence
  Synthetic: FXN 3 forward 9:69041719-69041740; SpCas9
agggggtaggcaatgatt

SEQ ID NO: 35893 - DNA, 25 bp, Artificial Sequence
  Synthetic: FXN 3 reverse 9:69041712-69041740; SpCas9
cccaatcattgcctaccccctggta

SEQ ID NO: 35894 - DNA, 24 bp, Artificial Sequence
  Synthetic: FXN 3 reverse 9:69041713-69041740; SpCas9
ccaatcattgcctaccccctggta

SEQ ID NO: 35895 - DNA, 23 bp, Artificial Sequence
  Synthetic: FXN 3 reverse 9:69041714-69041740; SpCas9
caatcattgcctaccccctggta

SEQ ID NO: 35896 - DNA, 22 bp, Artificial Sequence
  Synthetic: FXN 3 reverse 9:69041715-69041740; SpCas9
aatcattgcctaccccctggta

SEQ ID NO: 35897 - DNA, 21 bp, Artificial Sequence
  Synthetic: FXN 3 reverse 9:69041716-69041740; SpCas9
atcattgcctaccccctggta

SEQ ID NO: 35898 - DNA, 20 bp, Artificial Sequence
  Synthetic: FXN 3 reverse 9:69041717-69041740; SpCas9
tcattgcctaccccctggta

SEQ ID NO: 35899 - DNA, 19 bp, Artificial Sequence
  Synthetic: FXN 3 reverse 9:69041718-69041740; SpCas9
cattgcctaccccctggta

SEQ ID NO: 35900 - DNA, 18 bp, Artificial Sequence
  Synthetic: FXN 3 reverse 9:69041719-69041740; SpCas9
attgcctaccccctggta

SEQ ID NO: 35901 - DNA, 25 bp, Artificial Sequence
  Synthetic: FXN 3 reverse 9:69041713-69041741; SpCas9
acccaatcattgcctaccccctggt

SEQ ID NO: 35902 - DNA, 24 bp, Artificial Sequence
  Synthetic: FXN 3 reverse 9:69041714-69041741; SpCas9
cccaatcattgcctaccccctggt

SEQ ID NO: 35903 - DNA, 23 bp, Artificial Sequence
  Synthetic: FXN 3 reverse 9:69041715-69041741; SpCas9
ccaatcattgcctaccccctggt

SEQ ID NO: 35904 - DNA, 22 bp, Artificial Sequence
  Synthetic: FXN 3 reverse 9:69041716-69041741; SpCas9
caatcattgcctaccccctggt

SEQ ID NO: 35905 - DNA, 21 bp, Artificial Sequence
  Synthetic: FXN 3 reverse 9:69041717-69041741; SpCas9
aatcattgcctaccccctggt

SEQ ID NO: 35906 - DNA, 20 bp, Artificial Sequence
  Synthetic: FXN 3 reverse 9:69041718-69041741; SpCas9
atcattgcctaccccctggt

SEQ ID NO: 35907 - DNA, 19 bp, Artificial Sequence
  Synthetic: FXN 3 reverse 9:69041719-69041741; SpCas9
tcattgcctaccccctggt

SEQ ID NO: 35908 - DNA, 18 bp, Artificial Sequence
  Synthetic: FXN 3 reverse 9:69041720-69041741; SpCas9
cattgcctaccccctggt

SEQ ID NO: 35909 - DNA, 25 bp, Artificial Sequence
  Synthetic: FXN 3 forward 9:69041717-69041745; SpCas9
ccagggggtaggcaatgattgggtc

SEQ ID NO: 35910 - DNA, 24 bp, Artificial Sequence
  Synthetic: FXN 3 forward 9:69041718-69041745; SpCas9
cagggggtaggcaatgattgggtc

SEQ ID NO: 35911 - DNA, 23 bp, Artificial Sequence
  Synthetic: FXN 3 forward 9:69041719-69041745; SpCas9
agggggtaggcaatgattgggtc

SEQ ID NO: 35912 - DNA, 22 bp, Artificial Sequence
  Synthetic: FXN 3 forward 9:69041720-69041745; SpCas9
gggggtaggcaatgattgggtc

SEQ ID NO: 35913 - DNA, 21 bp, Artificial Sequence
  Synthetic: FXN 3 forward 9:69041721-69041745; SpCas9
ggggtaggcaatgattgggtc

SEQ ID NO: 35914 - DNA, 20 bp, Artificial Sequence
  Synthetic: FXN 3 forward 9:69041722-69041745; SpCas9
gggtaggcaatgattgggtc

SEQ ID NO: 35915 - DNA, 19 bp, Artificial Sequence
  Synthetic: FXN 3 forward 9:69041723-69041745; SpCas9
ggtaggcaatgattgggtc

SEQ ID NO: 35916 - DNA, 18 bp, Artificial Sequence
  Synthetic: FXN 3 forward 9:69041724-69041745; SpCas9
gtaggcaatgattgggtc

SEQ ID NO: 35917 - DNA, 25 bp, Artificial Sequence
  Synthetic: FXN 3 reverse 9:69041717-69041745; SpCas9
cttgacccaatcattgcctaccccc

SEQ ID NO: 35918 - DNA, 24 bp, Artificial Sequence
  Synthetic: FXN 3 reverse 9:69041718-69041745; SpCas9
ttgacccaatcattgcctaccccc

SEQ ID NO: 35919 - DNA, 23 bp, Artificial Sequence
  Synthetic: FXN 3 reverse 9:69041719-69041745; SpCas9
tgacccaatcattgcctaccccc

SEQ ID NO: 35920 - DNA, 22 bp, Artificial Sequence
  Synthetic: FXN 3 reverse 9:69041720-69041745; SpCas9
gacccaatcattgcctaccccc

SEQ ID NO: 35921 - DNA, 21 bp, Artificial Sequence
  Synthetic: FXN 3 reverse 9:69041721-69041745; SpCas9
acccaatcattgcctaccccc

SEQ ID NO: 35922 - DNA, 20 bp, Artificial Sequence
  Synthetic: FXN 3 reverse 9:69041722-69041745; SpCas9
cccaatcattgcctaccccc

SEQ ID NO: 35923 - DNA, 19 bp, Artificial Sequence
  Synthetic: FXN 3 reverse 9:69041723-69041745; SpCas9
ccaatcattgcctaccccc

SEQ ID NO: 35924 - DNA, 18 bp, Artificial Sequence
  Synthetic: FXN 3 reverse 9:69041724-69041745; SpCas9
caatcattgcctaccccc

SEQ ID NO: 35925 - DNA, 25 bp, Artificial Sequence
  Synthetic: FXN 3 forward 9:69041720-69041748; SpCas9
gggggtaggcaatgattgggtcaag

SEQ ID NO: 35926 - DNA, 24 bp, Artificial Sequence
  Synthetic: FXN 3 forward 9:69041721-69041748; SpCas9
ggggtaggcaatgattgggtcaag

SEQ ID NO: 35927 - DNA, 23 bp, Artificial Sequence
  Synthetic: FXN 3 forward 9:69041722-69041748; SpCas9
gggtaggcaatgattgggtcaag

SEQ ID NO: 35928 - DNA, 22 bp, Artificial Sequence
  Synthetic: FXN 3 forward 9:69041723-69041748; SpCas9
ggtaggcaatgattgggtcaag

SEQ ID NO: 35929 - DNA, 21 bp, Artificial Sequence
  Synthetic: FXN 3 forward 9:69041724-69041748; SpCas9
gtaggcaatgattgggtcaag

SEQ ID NO: 35930 - DNA, 20 bp, Artificial Sequence
  Synthetic: FXN 3 forward 9:69041725-69041748; SpCas9
taggcaatgattgggtcaag

SEQ ID NO: 35931 - DNA, 19 bp, Artificial Sequence
  Synthetic: FXN 3 forward 9:69041726-69041748; SpCas9
aggcaatgattgggtcaag

SEQ ID NO: 35932 - DNA, 18 bp, Artificial Sequence
  Synthetic: FXN 3 forward 9:69041727-69041748; SpCas9
ggcaatgattgggtcaag

SEQ ID NO: 35933 - DNA, 25 bp, Artificial Sequence
  Synthetic: FXN 3 forward 9:69041734-69041762; SpCas9
attgggtcaagtggttcctgaccac

SEQ ID NO: 35934 - DNA, 24 bp, Artificial Sequence
  Synthetic: FXN 3 forward 9:69041735-69041762; SpCas9
ttgggtcaagtggttcctgaccac

SEQ ID NO: 35935 - DNA, 23 bp, Artificial Sequence
  Synthetic: FXN 3 forward 9:69041736-69041762; SpCas9
tgggtcaagtggttcctgaccac

SEQ ID NO: 35936 - DNA, 22 bp, Artificial Sequence
  Synthetic: FXN 3 forward 9:69041737-69041762; SpCas9
gggtcaagtggttcctgaccac

SEQ ID NO: 35937 - DNA, 21 bp, Artificial Sequence
  Synthetic: FXN 3 forward 9:69041738-69041762; SpCas9
ggtcaagtggttcctgaccac

SEQ ID NO: 35938 - DNA, 20 bp, Artificial Sequence
  Synthetic: FXN 3 forward 9:69041739-69041762; SpCas9
gtcaagtggttcctgaccac

SEQ ID NO: 35939 - DNA, 19 bp, Artificial Sequence
  Synthetic: FXN 3 forward 9:69041740-69041762; SpCas9
tcaagtggttcctgaccac

SEQ ID NO: 35940 - DNA, 18 bp, Artificial Sequence
  Synthetic: FXN 3 forward 9:69041741-69041762; SpCas9
caagtggttcctgaccac

SEQ ID NO: 35941 - DNA, 25 bp, Artificial Sequence
  Synthetic: FXN 3 forward 9:69041735-69041763; SpCas9
ttgggtcaagtggttcctgaccact

SEQ ID NO: 35942 - DNA, 24 bp, Artificial Sequence
  Synthetic: FXN 3 forward 9:69041736-69041763; SpCas9
tgggtcaagtggttcctgaccact

SEQ ID NO: 35943 - DNA, 23 bp, Artificial Sequence
  Synthetic: FXN 3 forward 9:69041737-69041763; SpCas9
gggtcaagtggttcctgaccact

SEQ ID NO: 35944 - DNA, 22 bp, Artificial Sequence
  Synthetic: FXN 3 forward 9:69041738-69041763; SpCas9
ggtcaagtggttcctgaccact

SEQ ID NO: 35945 - DNA, 21 bp, Artificial Sequence
  Synthetic: FXN 3 forward 9:69041739-69041763; SpCas9
gtcaagtggttcctgaccact

SEQ ID NO: 35946 - DNA, 20 bp, Artificial Sequence
  Synthetic: FXN 3 forward 9:69041740-69041763; SpCas9
tcaagtggttcctgaccact

SEQ ID NO: 35947 - DNA, 19 bp, Artificial Sequence
  Synthetic: FXN 3 forward 9:69041741-69041763; SpCas9
caagtggttcctgaccact

SEQ ID NO: 35948 - DNA, 18 bp, Artificial Sequence
  Synthetic: FXN 3 forward 9:69041742-69041763; SpCas9
aagtggttcctgaccact

SEQ ID NO: 35949 - DNA, 25 bp, Artificial Sequence
  Synthetic: FXN 3 forward 9:69041741-69041769; SpCas9
caagtggttcctgaccactgggcct

SEQ ID NO: 35950 - DNA, 24 bp, Artificial Sequence
  Synthetic: FXN 3 forward 9:69041742-69041769; SpCas9
aagtggttcctgaccactgggcct

SEQ ID NO: 35951 - DNA, 23 bp, Artificial Sequence
  Synthetic: FXN 3 forward 9:69041743-69041769; SpCas9
agtggttcctgaccactgggcct

SEQ ID NO: 35952 - DNA, 22 bp, Artificial Sequence
  Synthetic: FXN 3 forward 9:69041744-69041769; SpCas9
gtggttcctgaccactgggcct

SEQ ID NO: 35953 - DNA, 21 bp, Artificial Sequence
  Synthetic: FXN 3 forward 9:69041745-69041769; SpCas9
tggttcctgaccactgggcct

SEQ ID NO: 35954 - DNA, 20 bp, Artificial Sequence
  Synthetic: FXN 3 forward 9:69041746-69041769; SpCas9
ggttcctgaccactgggcct

SEQ ID NO: 35955 - DNA, 19 bp, Artificial Sequence
  Synthetic: FXN 3 forward 9:69041747-69041769; SpCas9
gttcctgaccactgggcct

SEQ ID NO: 35956 - DNA, 18 bp, Artificial Sequence
  Synthetic: FXN 3 forward 9:69041748-69041769; SpCas9
ttcctgaccactgggcct

SEQ ID NO: 35957 - DNA, 25 bp, Artificial Sequence
  Synthetic: FXN 3 forward 9:69041748-69041776; SpCas9
ttcctgaccactgggcctgagactt

SEQ ID NO: 35958 - DNA, 24 bp, Artificial Sequence
  Synthetic: FXN 3 forward 9:69041749-69041776; SpCas9
tcctgaccactgggcctgagactt

SEQ ID NO: 35959 - DNA, 23 bp, Artificial Sequence
  Synthetic: FXN 3 forward 9:69041750-69041776; SpCas9
cctgaccactgggcctgagactt

SEQ ID NO: 35960 - DNA, 22 bp, Artificial Sequence
  Synthetic: FXN 3 forward 9:69041751-69041776; SpCas9
ctgaccactgggcctgagactt

SEQ ID NO: 35961 - DNA, 21 bp, Artificial Sequence
  Synthetic: FXN 3 forward 9:69041752-69041776; SpCas9
tgaccactgggcctgagactt

SEQ ID NO: 35962 - DNA, 20 bp, Artificial Sequence
  Synthetic: FXN 3 forward 9:69041753-69041776; SpCas9
gaccactgggcctgagactt

SEQ ID NO: 35963 - DNA, 19 bp, Artificial Sequence
  Synthetic: FXN 3 forward 9:69041754-69041776; SpCas9
accactgggcctgagactt

SEQ ID NO: 35964 - DNA, 18 bp, Artificial Sequence
  Synthetic: FXN 3 forward 9:69041755-69041776; SpCas9
ccactgggcctgagactt

SEQ ID NO: 35965 - DNA, 25 bp, Artificial Sequence
  Synthetic: FXN 3 forward 9:69041749-69041777; SpCas9
tcctgaccactgggcctgagacttc

SEQ ID NO: 35966 - DNA, 24 bp, Artificial Sequence
  Synthetic: FXN 3 forward 9:69041750-69041777; SpCas9
cctgaccactgggcctgagacttc

SEQ ID NO: 35967 - DNA, 23 bp, Artificial Sequence
  Synthetic: FXN 3 forward 9:69041751-69041777; SpCas9
ctgaccactgggcctgagacttc

SEQ ID NO: 35968 - DNA, 22 bp, Artificial Sequence
  Synthetic: FXN 3 forward 9:69041752-69041777; SpCas9
tgaccactgggcctgagacttc

SEQ ID NO: 35969 - DNA, 21 bp, Artificial Sequence
  Synthetic: FXN 3 forward 9:69041753-69041777; SpCas9
gaccactgggcctgagacttc

SEQ ID NO: 35970 - DNA, 20 bp, Artificial Sequence
  Synthetic: FXN 3 forward 9:69041754-69041777; SpCas9
accactgggcctgagacttc

SEQ ID NO: 35971 - DNA, 19 bp, Artificial Sequence
  Synthetic: FXN 3 forward 9:69041755-69041777; SpCas9
ccactgggcctgagacttc

SEQ ID NO: 35972 - DNA, 18 bp, Artificial Sequence
  Synthetic: FXN 3 forward 9:69041756-69041777; SpCas9
cactgggcctgagacttc

SEQ ID NO: 35973 - DNA, 25 bp, Artificial Sequence
  Synthetic: FXN 3 reverse 9:69041750-69041778; SpCas9
gcctgaagtctcaggcccagtggtc

SEQ ID NO: 35974 - DNA, 24 bp, Artificial Sequence
  Synthetic: FXN 3 reverse 9:69041751-69041778; SpCas9
cctgaagtctcaggcccagtggtc

SEQ ID NO: 35975 - DNA, 23 bp, Artificial Sequence
  Synthetic: FXN 3 reverse 9:69041752-69041778; SpCas9
ctgaagtctcaggcccagtggtc

SEQ ID NO: 35976 - DNA, 22 bp, Artificial Sequence
  Synthetic: FXN 3 reverse 9:69041753-69041778; SpCas9
tgaagtctcaggcccagtggtc

SEQ ID NO: 35977 - DNA, 21 bp, Artificial Sequence
  Synthetic: FXN 3 reverse 9:69041754-69041778; SpCas9
gaagtctcaggcccagtggtc

SEQ ID NO: 35978 - DNA, 20 bp, Artificial Sequence
  Synthetic: FXN 3 reverse 9:69041755-69041778; SpCas9
aagtctcaggcccagtggtc

SEQ ID NO: 35979 - DNA, 19 bp, Artificial Sequence
  Synthetic: FXN 3 reverse 9:69041756-69041778; SpCas9
agtctcaggcccagtggtc

SEQ ID NO: 35980 - DNA, 18 bp, Artificial Sequence
  Synthetic: FXN 3 reverse 9:69041757-69041778; SpCas9
gtctcaggcccagtggtc

SEQ ID NO: 35981 - DNA, 25 bp, Artificial Sequence
  Synthetic: FXN 3 reverse 9:69041751-69041779; SpCas9
ggcctgaagtctcaggcccagtggt

SEQ ID NO: 35982 - DNA, 24 bp, Artificial Sequence
  Synthetic: FXN 3 reverse 9:69041752-69041779; SpCas9
gcctgaagtctcaggcccagtggt

SEQ ID NO: 35983 - DNA, 23 bp, Artificial Sequence
  Synthetic: FXN 3 reverse 9:69041753-69041779; SpCas9
cctgaagtctcaggcccagtggt

SEQ ID NO: 35984 - DNA, 22 bp, Artificial Sequence
  Synthetic: FXN 3 reverse 9:69041754-69041779; SpCas9
ctgaagtctcaggcccagtggt

SEQ ID NO: 35985 - DNA, 21 bp, Artificial Sequence
  Synthetic: FXN 3 reverse 9:69041755-69041779; SpCas9
tgaagtctcaggcccagtggt

SEQ ID NO: 35986 - DNA, 20 bp, Artificial Sequence
  Synthetic: FXN 3 reverse 9:69041756-69041779; SpCas9
gaagtctcaggcccagtggt

SEQ ID NO: 35987 - DNA, 19 bp, Artificial Sequence
  Synthetic: FXN 3 reverse 9:69041757-69041779; SpCas9
aagtctcaggcccagtggt

SEQ ID NO: 35988 - DNA, 18 bp, Artificial Sequence
  Synthetic: FXN 3 reverse 9:69041758-69041779; SpCas9
agtctcaggcccagtggt

SEQ ID NO: 35989 - DNA, 25 bp, Artificial Sequence
  Synthetic: FXN 3 forward 9:69041754-69041782; SpCas9
accactgggcctgagacttcaggcc

SEQ ID NO: 35990 - DNA, 24 bp, Artificial Sequence
  Synthetic: FXN 3 forward 9:69041755-69041782; SpCas9
ccactgggcctgagacttcaggcc

SEQ ID NO: 35991 - DNA, 23 bp, Artificial Sequence
  Synthetic: FXN 3 forward 9:69041756-69041782; SpCas9
cactgggcctgagacttcaggcc

SEQ ID NO: 35992 - DNA, 22 bp, Artificial Sequence
  Synthetic: FXN 3 forward 9:69041757-69041782; SpCas9
actgggcctgagacttcaggcc

SEQ ID NO: 35993 - DNA, 21 bp, Artificial Sequence
  Synthetic: FXN 3 forward 9:69041758-69041782; SpCas9
ctgggcctgagacttcaggcc

SEQ ID NO: 35994 - DNA, 20 bp, Artificial Sequence
  Synthetic: FXN 3 forward 9:69041759-69041782; SpCas9
tgggcctgagacttcaggcc

SEQ ID NO: 35995 - DNA, 19 bp, Artificial Sequence
  Synthetic: FXN 3 forward 9:69041760-69041782; SpCas9
gggcctgagacttcaggcc

SEQ ID NO: 35996 - DNA, 18 bp, Artificial Sequence
  Synthetic: FXN 3 forward 9:69041761-69041782; SpCas9
ggcctgagacttcaggcc

SEQ ID NO: 35997 - DNA, 25 bp, Artificial Sequence
  Synthetic: FXN 3 reverse 9:69041755-69041783; SpCas9
tctgggcctgaagtctcaggcccag

SEQ ID NO: 35998 - DNA, 24 bp, Artificial Sequence
  Synthetic: FXN 3 reverse 9:69041756-69041783; SpCas9
ctgggcctgaagtctcaggcccag

SEQ ID NO: 35999 - DNA, 23 bp, Artificial Sequence
  Synthetic: FXN 3 reverse 9:69041757-69041783; SpCas9
tgggcctgaagtctcaggcccag

SEQ ID NO: 36000 - DNA, 22 bp, Artificial Sequence
  Synthetic: FXN 3 reverse 9:69041758-69041783; SpCas9
gggcctgaagtctcaggcccag

SEQ ID NO: 36001 - DNA, 21 bp, Artificial Sequence
  Synthetic: FXN 3 reverse 9:69041759-69041783; SpCas9
ggcctgaagtctcaggcccag

SEQ ID NO: 36002 - DNA, 20 bp, Artificial Sequence
  Synthetic: FXN 3 reverse 9:69041760-69041783; SpCas9
gcctgaagtctcaggcccag

SEQ ID NO: 36003 - DNA, 19 bp, Artificial Sequence
  Synthetic: FXN 3 reverse 9:69041761-69041783; SpCas9
cctgaagtctcaggcccag

SEQ ID NO: 36004 - DNA, 18 bp, Artificial Sequence
  Synthetic: FXN 3 reverse 9:69041762-69041783; SpCas9
ctgaagtctcaggcccag

SEQ ID NO: 36005 - DNA, 25 bp, Artificial Sequence
  Synthetic: FXN 3 reverse 9:69041758-69041786; SpCas9
gtttctgggcctgaagtctcaggcc

SEQ ID NO: 36006 - DNA, 24 bp, Artificial Sequence
  Synthetic: FXN 3 reverse 9:69041759-69041786; SpCas9
tttctgggcctgaagtctcaggcc

SEQ ID NO: 36007 - DNA, 23 bp, Artificial Sequence
  Synthetic: FXN 3 reverse 9:69041760-69041786; SpCas9
ttctgggcctgaagtctcaggcc

SEQ ID NO: 36008 - DNA, 22 bp, Artificial Sequence
  Synthetic: FXN 3 reverse 9:69041761-69041786; SpCas9
tctgggcctgaagtctcaggcc

SEQ ID NO: 36009 - DNA, 21 bp, Artificial Sequence
  Synthetic: FXN 3 reverse 9:69041762-69041786; SpCas9
ctgggcctgaagtctcaggcc

SEQ ID NO: 36010 - DNA, 20 bp, Artificial Sequence
  Synthetic: FXN 3 reverse 9:69041763-69041786; SpCas9
tgggcctgaagtctcaggcc

SEQ ID NO: 36011 - DNA, 19 bp, Artificial Sequence
  Synthetic: FXN 3 reverse 9:69041764-69041786; SpCas9
gggcctgaagtctcaggcc

SEQ ID NO: 36012 - DNA, 18 bp, Artificial Sequence
  Synthetic: FXN 3 reverse 9:69041765-69041786; SpCas9
ggcctgaagtctcaggcc

SEQ ID NO: 36013 - DNA, 25 bp, Artificial Sequence
  Synthetic: FXN 3 reverse 9:69041763-69041791; SpCas9
agatagtttctgggcctgaagtctc

SEQ ID NO: 36014 - DNA, 24 bp, Artificial Sequence
  Synthetic: FXN 3 reverse 9:69041764-69041791; SpCas9
gatagtttctgggcctgaagtctc

SEQ ID NO: 36015 - DNA, 23 bp, Artificial Sequence
  Synthetic: FXN 3 reverse 9:69041765-69041791; SpCas9
atagtttctgggcctgaagtctc

SEQ ID NO: 36016 - DNA, 22 bp, Artificial Sequence
  Synthetic: FXN 3 reverse 9:69041766-69041791; SpCas9
tagtttctgggcctgaagtctc

SEQ ID NO: 36017 - DNA, 21 bp, Artificial Sequence
  Synthetic: FXN 3 reverse 9:69041767-69041791; SpCas9
agtttctgggcctgaagtctc

SEQ ID NO: 36018 - DNA, 20 bp, Artificial Sequence
  Synthetic: FXN 3 reverse 9:69041768-69041791; SpCas9
gtttctgggcctgaagtctc

SEQ ID NO: 36019 - DNA, 19 bp, Artificial Sequence
  Synthetic: FXN 3 reverse 9:69041769-69041791; SpCas9
tttctgggcctgaagtctc

SEQ ID NO: 36020 - DNA, 18 bp, Artificial Sequence
  Synthetic: FXN 3 reverse 9:69041770-69041791; SpCas9
ttctgggcctgaagtctc

SEQ ID NO: 36021 - DNA, 25 bp, Artificial Sequence
  Synthetic: FXN 3 reverse 9:69041764-69041792; SpCas9
tagatagtttctgggcctgaagtct

SEQ ID NO: 36022 - DNA, 24 bp, Artificial Sequence
  Synthetic: FXN 3 reverse 9:69041765-69041792; SpCas9
agatagtttctgggcctgaagtct

SEQ ID NO: 36023 - DNA, 23 bp, Artificial Sequence
  Synthetic: FXN 3 reverse 9:69041766-69041792; SpCas9
gatagtttctgggcctgaagtct

SEQ ID NO: 36024 - DNA, 22 bp, Artificial Sequence
  Synthetic: FXN 3 reverse 9:69041767-69041792; SpCas9
atagtttctgggcctgaagtct

SEQ ID NO: 36025 - DNA, 21 bp, Artificial Sequence
  Synthetic: FXN 3 reverse 9:69041768-69041792; SpCas9
tagtttctgggcctgaagtct

SEQ ID NO: 36026 - DNA, 20 bp, Artificial Sequence
  Synthetic: FXN 3 reverse 9:69041769-69041792; SpCas9
agtttctgggcctgaagtct

SEQ ID NO: 36027 - DNA, 19 bp, Artificial Sequence
  Synthetic: FXN 3 reverse 9:69041770-69041792; SpCas9
gtttctgggcctgaagtct

SEQ ID NO: 36028 - DNA, 18 bp, Artificial Sequence
  Synthetic: FXN 3 reverse 9:69041771-69041792; SpCas9
tttctgggcctgaagtct

SEQ ID NO: 36029 - DNA, 25 bp, Artificial Sequence
  Synthetic: FXN 3 reverse 9:69041770-69041798; SpCas9
aaatattagatagtttctgggcctg

SEQ ID NO: 36030 - DNA, 24 bp, Artificial Sequence
  Synthetic: FXN 3 reverse 9:69041771-69041798; SpCas9
aatattagatagtttctgggcctg

SEQ ID NO: 36031 - DNA, 23 bp, Artificial Sequence
  Synthetic: FXN 3 reverse 9:69041772-69041798; SpCas9
atattagatagtttctgggcctg

SEQ ID NO: 36032 - DNA, 22 bp, Artificial Sequence
  Synthetic: FXN 3 reverse 9:69041773-69041798; SpCas9
tattagatagtttctgggcctg

SEQ ID NO: 36033 - DNA, 21 bp, Artificial Sequence
  Synthetic: FXN 3 reverse 9:69041774-69041798; SpCas9
attagatagtttctgggcctg

SEQ ID NO: 36034 - DNA, 20 bp, Artificial Sequence
  Synthetic: FXN 3 reverse 9:69041775-69041798; SpCas9
ttagatagtttctgggcctg

SEQ ID NO: 36035 - DNA, 19 bp, Artificial Sequence
  Synthetic: FXN 3 reverse 9:69041776-69041798; SpCas9
tagatagtttctgggcctg

SEQ ID NO: 36036 - DNA, 18 bp, Artificial Sequence
  Synthetic: FXN 3 reverse 9:69041777-69041798; SpCas9
agatagtttctgggcctg

SEQ ID NO: 36037 - DNA, 25 bp, Artificial Sequence
  Synthetic: FXN 3 reverse 9:69041777-69041805; SpCas9
tttgaggaaatattagatagtttct

SEQ ID NO: 36038 - DNA, 24 bp, Artificial Sequence
  Synthetic: FXN 3 reverse 9:69041778-69041805; SpCas9
ttgaggaaatattagatagtttct

SEQ ID NO: 36039 - DNA, 23 bp, Artificial Sequence
  Synthetic: FXN 3 reverse 9:69041779-69041805; SpCas9
tgaggaaatattagatagtttct

SEQ ID NO: 36040 - DNA, 22 bp, Artificial Sequence
  Synthetic: FXN 3 reverse 9:69041780-69041805; SpCas9
gaggaaatattagatagtttct

SEQ ID NO: 36041 - DNA, 21 bp, Artificial Sequence
  Synthetic: FXN 3 reverse 9:69041781-69041805; SpCas9
aggaaatattagatagtttct

SEQ ID NO: 36042 - DNA, 20 bp, Artificial Sequence
  Synthetic: FXN 3 reverse 9:69041782-69041805; SpCas9
ggaaatattagatagtttct

SEQ ID NO: 36043 - DNA, 19 bp, Artificial Sequence
  Synthetic: FXN 3 reverse 9:69041783-69041805; SpCas9
gaaatattagatagtttct

SEQ ID NO: 36044 - DNA, 18 bp, Artificial Sequence
  Synthetic: FXN 3 reverse 9:69041784-69041805; SpCas9
aaatattagatagtttct

SEQ ID NO: 36045 - DNA, 25 bp, Artificial Sequence
  Synthetic: FXN 3 reverse 9:69041778-69041806; SpCas9
atttgaggaaatattagatagtttc

SEQ ID NO: 36046 - DNA, 24 bp, Artificial Sequence
  Synthetic: FXN 3 reverse 9:69041779-69041806; SpCas9
tttgaggaaatattagatagtttc

SEQ ID NO: 36047 - DNA, 23 bp, Artificial Sequence
  Synthetic: FXN 3 reverse 9:69041780-69041806; SpCas9
ttgaggaaatattagatagtttc

SEQ ID NO: 36048 - DNA, 22 bp, Artificial Sequence
  Synthetic: FXN 3 reverse 9:69041781-69041806; SpCas9
tgaggaaatattagatagtttc

SEQ ID NO: 36049 - DNA, 21 bp, Artificial Sequence
  Synthetic: FXN 3 reverse 9:69041782-69041806; SpCas9
gaggaaatattagatagtttc

SEQ ID NO: 36050 - DNA, 20 bp, Artificial Sequence
  Synthetic: FXN 3 reverse 9:69041783-69041806; SpCas9
aggaaatattagatagtttc

SEQ ID NO: 36051 - DNA, 19 bp, Artificial Sequence
  Synthetic: FXN 3 reverse 9:69041784-69041806; SpCas9
ggaaatattagatagtttc

SEQ ID NO: 36052 - DNA, 18 bp, Artificial Sequence
  Synthetic: FXN 3 reverse 9:69041785-69041806; SpCas9
gaaatattagatagtttc

SEQ ID NO: 36053 - DNA, 25 bp, Artificial Sequence
  Synthetic: FXN 3 reverse 9:69041785-69041813; SpCas9
gggatgcatttgaggaaatattaga

SEQ ID NO: 36054 - DNA, 24 bp, Artificial Sequence
  Synthetic: FXN 3 reverse 9:69041786-69041813; SpCas9
ggatgcatttgaggaaatattaga

SEQ ID NO: 36055 - DNA, 23 bp, Artificial Sequence
  Synthetic: FXN 3 reverse 9:69041787-69041813; SpCas9
gatgcatttgaggaaatattaga

SEQ ID NO: 36056 - DNA, 22 bp, Artificial Sequence
  Synthetic: FXN 3 reverse 9:69041788-69041813; SpCas9
atgcatttgaggaaatattaga

SEQ ID NO: 36057 - DNA, 21 bp, Artificial Sequence
  Synthetic: FXN 3 reverse 9:69041789-69041813; SpCas9
tgcatttgaggaaatattaga

SEQ ID NO: 36058 - DNA, 20 bp, Artificial Sequence
  Synthetic: FXN 3 reverse 9:69041790-69041813; SpCas9
gcatttgaggaaatattaga

SEQ ID NO: 36059 - DNA, 19 bp, Artificial Sequence
  Synthetic: FXN 3 reverse 9:69041791-69041813; SpCas9
catttgaggaaatattaga

SEQ ID NO: 36060 - DNA, 18 bp, Artificial Sequence
  Synthetic: FXN 3 reverse 9:69041792-69041813; SpCas9
atttgaggaaatattaga

SEQ ID NO: 36061 - DNA, 25 bp, Artificial Sequence
  Synthetic: FXN 3 reverse 9:69041789-69041817; SpCas9
tcatgggatgcatttgaggaaatat

SEQ ID NO: 36062 - DNA, 24 bp, Artificial Sequence
  Synthetic: FXN 3 reverse 9:69041790-69041817; SpCas9
catgggatgcatttgaggaaatat

SEQ ID NO: 36063 - DNA, 23 bp, Artificial Sequence
  Synthetic: FXN 3 reverse 9:69041791-69041817; SpCas9
atgggatgcatttgaggaaatat

SEQ ID NO: 36064 - DNA, 22 bp, Artificial Sequence
  Synthetic: FXN 3 reverse 9:69041792-69041817; SpCas9
tgggatgcatttgaggaaatat

SEQ ID NO: 36065 - DNA, 21 bp, Artificial Sequence
  Synthetic: FXN 3 reverse 9:69041793-69041817; SpCas9
gggatgcatttgaggaaatat

SEQ ID NO: 36066 - DNA, 20 bp, Artificial Sequence
  Synthetic: FXN 3 reverse 9:69041794-69041817; SpCas9
ggatgcatttgaggaaatat

SEQ ID NO: 36067 - DNA, 19 bp, Artificial Sequence
  Synthetic: FXN 3 reverse 9:69041795-69041817; SpCas9
gatgcatttgaggaaatat

SEQ ID NO: 36068 - DNA, 18 bp, Artificial Sequence
  Synthetic: FXN 3 reverse 9:69041796-69041817; SpCas9
atgcatttgaggaaatat

SEQ ID NO: 36069 - DNA, 25 bp, Artificial Sequence
  Synthetic: FXN 3 forward 9:69041790-69041818; SpCas9
taatatttcctcaaatgcatcccat

SEQ ID NO: 36070 - DNA, 24 bp, Artificial Sequence
  Synthetic: FXN 3 forward 9:69041791-69041818; SpCas9
aatatttcctcaaatgcatcccat

SEQ ID NO: 36071 - DNA, 23 bp, Artificial Sequence
  Synthetic: FXN 3 forward 9:69041792-69041818; SpCas9
atatttcctcaaatgcatcccat

SEQ ID NO: 36072 - DNA, 22 bp, Artificial Sequence
  Synthetic: FXN 3 forward 9:69041793-69041818; SpCas9
tatttcctcaaatgcatcccat

SEQ ID NO: 36073 - DNA, 21 bp, Artificial Sequence
  Synthetic: FXN 3 forward 9:69041794-69041818; SpCas9
atttcctcaaatgcatcccat

SEQ ID NO: 36074 - DNA, 20 bp, Artificial Sequence
  Synthetic: FXN 3 forward 9:69041795-69041818; SpCas9
tttcctcaaatgcatcccat

SEQ ID NO: 36075 - DNA, 19 bp, Artificial Sequence
  Synthetic: FXN 3 forward 9:69041796-69041818; SpCas9
ttcctcaaatgcatcccat

SEQ ID NO: 36076 - DNA, 18 bp, Artificial Sequence
  Synthetic: FXN 3 forward 9:69041797-69041818; SpCas9
tcctcaaatgcatcccat

SEQ ID NO: 36077 - DNA, 25 bp, Artificial Sequence
  Synthetic: FXN 3 forward 9:69041793-69041821; SpCas9
tatttcctcaaatgcatcccatgag

SEQ ID NO: 36078 - DNA, 24 bp, Artificial Sequence
  Synthetic: FXN 3 forward 9:69041794-69041821; SpCas9
atttcctcaaatgcatcccatgag

SEQ ID NO: 36079 - DNA, 23 bp, Artificial Sequence
  Synthetic: FXN 3 forward 9:69041795-69041821; SpCas9
tttcctcaaatgcatcccatgag

SEQ ID NO: 36080 - DNA, 22 bp, Artificial Sequence
  Synthetic: FXN 3 forward 9:69041796-69041821; SpCas9
ttcctcaaatgcatcccatgag

SEQ ID NO: 36081 - DNA, 21 bp, Artificial Sequence
  Synthetic: FXN 3 forward 9:69041797-69041821; SpCas9
tcctcaaatgcatcccatgag

SEQ ID NO: 36082 - DNA, 20 bp, Artificial Sequence
  Synthetic: FXN 3 forward 9:69041798-69041821; SpCas9
cctcaaatgcatcccatgag

SEQ ID NO: 36083 - DNA, 19 bp, Artificial Sequence
  Synthetic: FXN 3 forward 9:69041799-69041821; SpCas9
ctcaaatgcatcccatgag

SEQ ID NO: 36084 - DNA, 18 bp, Artificial Sequence
  Synthetic: FXN 3 forward 9:69041800-69041821; SpCas9
tcaaatgcatcccatgag

SEQ ID NO: 36085 - DNA, 25 bp, Artificial Sequence
  Synthetic: FXN 3 forward 9:69041794-69041822; SpCas9
atttcctcaaatgcatcccatgagc

SEQ ID NO: 36086 - DNA, 24 bp, Artificial Sequence
  Synthetic: FXN 3 forward 9:69041795-69041822; SpCas9
tttcctcaaatgcatcccatgagc

SEQ ID NO: 36087 - DNA, 23 bp, Artificial Sequence
  Synthetic: FXN 3 forward 9:69041796-69041822; SpCas9
ttcctcaaatgcatcccatgagc

SEQ ID NO: 36088 - DNA, 22 bp, Artificial Sequence
  Synthetic: FXN 3 forward 9:69041797-69041822; SpCas9
tcctcaaatgcatcccatgagc

SEQ ID NO: 36089 - DNA, 21 bp, Artificial Sequence
  Synthetic: FXN 3 forward 9:69041798-69041822; SpCas9
cctcaaatgcatcccatgagc

SEQ ID NO: 36090 - DNA, 20 bp, Artificial Sequence
  Synthetic: FXN 3 forward 9:69041799-69041822; SpCas9
ctcaaatgcatcccatgagc

SEQ ID NO: 36091 - DNA, 19 bp, Artificial Sequence
  Synthetic: FXN 3 forward 9:69041800-69041822; SpCas9
tcaaatgcatcccatgagc

SEQ ID NO: 36092 - DNA, 18 bp, Artificial Sequence
  Synthetic: FXN 3 forward 9:69041801-69041822; SpCas9
caaatgcatcccatgagc

SEQ ID NO: 36093 - DNA, 25 bp, Artificial Sequence
  Synthetic: FXN 3 reverse 9:69041798-69041826; SpCas9
agtgcctgctcatgggatgcatttg

SEQ ID NO: 36094 - DNA, 24 bp, Artificial Sequence
  Synthetic: FXN 3 reverse 9:69041799-69041826; SpCas9
gtgcctgctcatgggatgcatttg

SEQ ID NO: 36095 - DNA, 23 bp, Artificial Sequence
  Synthetic: FXN 3 reverse 9:69041800-69041826; SpCas9
tgcctgctcatgggatgcatttg

SEQ ID NO: 36096 - DNA, 22 bp, Artificial Sequence
  Synthetic: FXN 3 reverse 9:69041801-69041826; SpCas9
gcctgctcatgggatgcatttg

SEQ ID NO: 36097 - DNA, 21 bp, Artificial Sequence
  Synthetic: FXN 3 reverse 9:69041802-69041826; SpCas9
cctgctcatgggatgcatttg

SEQ ID NO: 36098 - DNA, 20 bp, Artificial Sequence
  Synthetic: FXN 3 reverse 9:69041803-69041826; SpCas9
ctgctcatgggatgcatttg

SEQ ID NO: 36099 - DNA, 19 bp, Artificial Sequence
  Synthetic: FXN 3 reverse 9:69041804-69041826; SpCas9
tgctcatgggatgcatttg

SEQ ID NO: 36100 - DNA, 18 bp, Artificial Sequence
  Synthetic: FXN 3 reverse 9:69041805-69041826; SpCas9
gctcatgggatgcatttg

SEQ ID NO: 36101 - DNA, 25 bp, Artificial Sequence
  Synthetic: FXN 3 reverse 9:69041799-69041827; SpCas9
cagtgcctgctcatgggatgcattt

SEQ ID NO: 36102 - DNA, 24 bp, Artificial Sequence
  Synthetic: FXN 3 reverse 9:69041800-69041827; SpCas9
agtgcctgctcatgggatgcattt

SEQ ID NO: 36103 - DNA, 23 bp, Artificial Sequence
  Synthetic: FXN 3 reverse 9:69041801-69041827; SpCas9
gtgcctgctcatgggatgcattt

SEQ ID NO: 36104 - DNA, 22 bp, Artificial Sequence
  Synthetic: FXN 3 reverse 9:69041802-69041827; SpCas9
tgcctgctcatgggatgcattt

SEQ ID NO: 36105 - DNA, 21 bp, Artificial Sequence
  Synthetic: FXN 3 reverse 9:69041803-69041827; SpCas9
gcctgctcatgggatgcattt

SEQ ID NO: 36106 - DNA, 20 bp, Artificial Sequence
  Synthetic: FXN 3 reverse 9:69041804-69041827; SpCas9
cctgctcatgggatgcattt

SEQ ID NO: 36107 - DNA, 19 bp, Artificial Sequence
  Synthetic: FXN 3 reverse 9:69041805-69041827; SpCas9
ctgctcatgggatgcattt

SEQ ID NO: 36108 - DNA, 18 bp, Artificial Sequence
  Synthetic: FXN 3 reverse 9:69041806-69041827; SpCas9
tgctcatgggatgcattt

SEQ ID NO: 36109 - DNA, 25 bp, Artificial Sequence
  Synthetic: FXN 3 forward 9:69041805-69041833; SpCas9
tgcatcccatgagcaggcactgtgt

SEQ ID NO: 36110 - DNA, 24 bp, Artificial Sequence
  Synthetic: FXN 3 forward 9:69041806-69041833; SpCas9
gcatcccatgagcaggcactgtgt

SEQ ID NO: 36111 - DNA, 23 bp, Artificial Sequence
  Synthetic: FXN 3 forward 9:69041807-69041833; SpCas9
catcccatgagcaggcactgtgt

SEQ ID NO: 36112 - DNA, 22 bp, Artificial Sequence
  Synthetic: FXN 3 forward 9:69041808-69041833; SpCas9
atcccatgagcaggcactgtgt

SEQ ID NO: 36113 - DNA, 21 bp, Artificial Sequence
  Synthetic: FXN 3 forward 9:69041809-69041833; SpCas9
tcccatgagcaggcactgtgt

SEQ ID NO: 36114 - DNA, 20 bp, Artificial Sequence
  Synthetic: FXN 3 forward 9:69041810-69041833; SpCas9
cccatgagcaggcactgtgt

SEQ ID NO: 36115 - DNA, 19 bp, Artificial Sequence
  Synthetic: FXN 3 forward 9:69041811-69041833; SpCas9
ccatgagcaggcactgtgt

SEQ ID NO: 36116 - DNA, 18 bp, Artificial Sequence
  Synthetic: FXN 3 forward 9:69041812-69041833; SpCas9
catgagcaggcactgtgt

SEQ ID NO: 36117 - DNA, 25 bp, Artificial Sequence
  Synthetic: FXN 3 forward 9:69041809-69041837; SpCas9
tcccatgagcaggcactgtgtgagt

SEQ ID NO: 36118 - DNA, 24 bp, Artificial Sequence
  Synthetic: FXN 3 forward 9:69041810-69041837; SpCas9
cccatgagcaggcactgtgtgagt

SEQ ID NO: 36119 - DNA, 23 bp, Artificial Sequence
  Synthetic: FXN 3 forward 9:69041811-69041837; SpCas9
ccatgagcaggcactgtgtgagt

SEQ ID NO: 36120 - DNA, 22 bp, Artificial Sequence
  Synthetic: FXN 3 forward 9:69041812-69041837; SpCas9
catgagcaggcactgtgtgagt

SEQ ID NO: 36121 - DNA, 21 bp, Artificial Sequence
  Synthetic: FXN 3 forward 9:69041813-69041837; SpCas9
atgagcaggcactgtgtgagt

SEQ ID NO: 36122 - DNA, 20 bp, Artificial Sequence
  Synthetic: FXN 3 forward 9:69041814-69041837; SpCas9
tgagcaggcactgtgtgagt

SEQ ID NO: 36123 - DNA, 19 bp, Artificial Sequence
  Synthetic: FXN 3 forward 9:69041815-69041837; SpCas9
gagcaggcactgtgtgagt

SEQ ID NO: 36124 - DNA, 18 bp, Artificial Sequence
  Synthetic: FXN 3 forward 9:69041816-69041837; SpCas9
agcaggcactgtgtgagt

SEQ ID NO: 36125 - DNA, 25 bp, Artificial Sequence
  Synthetic: FXN 3 reverse 9:69041810-69041838; SpCas9
gctcactcacacagtgcctgctcat

SEQ ID NO: 36126 - DNA, 24 bp, Artificial Sequence
  Synthetic: FXN 3 reverse 9:69041811-69041838; SpCas9
ctcactcacacagtgcctgctcat

SEQ ID NO: 36127 - DNA, 23 bp, Artificial Sequence
  Synthetic: FXN 3 reverse 9:69041812-69041838; SpCas9
tcactcacacagtgcctgctcat

SEQ ID NO: 36128 - DNA, 22 bp, Artificial Sequence
  Synthetic: FXN 3 reverse 9:69041813-69041838; SpCas9
cactcacacagtgcctgctcat

SEQ ID NO: 36129 - DNA, 21 bp, Artificial Sequence
  Synthetic: FXN 3 reverse 9:69041814-69041838; SpCas9
actcacacagtgcctgctcat

SEQ ID NO: 36130 - DNA, 20 bp, Artificial Sequence
  Synthetic: FXN 3 reverse 9:69041815-69041838; SpCas9
ctcacacagtgcctgctcat

SEQ ID NO: 36131 - DNA, 19 bp, Artificial Sequence
  Synthetic: FXN 3 reverse 9:69041816-69041838; SpCas9
tcacacagtgcctgctcat

SEQ ID NO: 36132 - DNA, 18 bp, Artificial Sequence
  Synthetic: FXN 3 reverse 9:69041817-69041838; SpCas9
cacacagtgcctgctcat

SEQ ID NO: 36133 - DNA, 25 bp, Artificial Sequence
  Synthetic: FXN 3 reverse 9:69041811-69041839; SpCas9
tgctcactcacacagtgcctgctca

SEQ ID NO: 36134 - DNA, 24 bp, Artificial Sequence
  Synthetic: FXN 3 reverse 9:69041812-69041839; SpCas9
gctcactcacacagtgcctgctca

SEQ ID NO: 36135 - DNA, 23 bp, Artificial Sequence
  Synthetic: FXN 3 reverse 9:69041813-69041839; SpCas9
ctcactcacacagtgcctgctca

SEQ ID NO: 36136 - DNA, 22 bp, Artificial Sequence
  Synthetic: FXN 3 reverse 9:69041814-69041839; SpCas9
tcactcacacagtgcctgctca

SEQ ID NO: 36137 - DNA, 21 bp, Artificial Sequence
  Synthetic: FXN 3 reverse 9:69041815-69041839; SpCas9
cactcacacagtgcctgctca

SEQ ID NO: 36138 - DNA, 20 bp, Artificial Sequence
  Synthetic: FXN 3 reverse 9:69041816-69041839; SpCas9
actcacacagtgcctgctca

SEQ ID NO: 36139 - DNA, 19 bp, Artificial Sequence
  Synthetic: FXN 3 reverse 9:69041817-69041839; SpCas9
ctcacacagtgcctgctca

SEQ ID NO: 36140 - DNA, 18 bp, Artificial Sequence
  Synthetic: FXN 3 reverse 9:69041818-69041839; SpCas9
tcacacagtgcctgctca

SEQ ID NO: 36141 - DNA, 25 bp, Artificial Sequence
  Synthetic: FXN 3 forward 9:69041824-69041852; SpCas9
ctgtgtgagtgagcacacacatctg

SEQ ID NO: 36142 - DNA, 24 bp, Artificial Sequence
  Synthetic: FXN 3 forward 9:69041825-69041852; SpCas9
tgtgtgagtgagcacacacatctg

SEQ ID NO: 36143 - DNA, 23 bp, Artificial Sequence
  Synthetic: FXN 3 forward 9:69041826-69041852; SpCas9
gtgtgagtgagcacacacatctg

SEQ ID NO: 36144 - DNA, 22 bp, Artificial Sequence
  Synthetic: FXN 3 forward 9:69041827-69041852; SpCas9
tgtgagtgagcacacacatctg

SEQ ID NO: 36145 - DNA, 21 bp, Artificial Sequence
  Synthetic: FXN 3 forward 9:69041828-69041852; SpCas9
gtgagtgagcacacacatctg

SEQ ID NO: 36146 - DNA, 20 bp, Artificial Sequence
  Synthetic: FXN 3 forward 9:69041829-69041852; SpCas9
tgagtgagcacacacatctg

SEQ ID NO: 36147 - DNA, 19 bp, Artificial Sequence
  Synthetic: FXN 3 forward 9:69041830-69041852; SpCas9
gagtgagcacacacatctg

SEQ ID NO: 36148 - DNA, 18 bp, Artificial Sequence
  Synthetic: FXN 3 forward 9:69041831-69041852; SpCas9
agtgagcacacacatctg

SEQ ID NO: 36149 - DNA, 25 bp, Artificial Sequence
  Synthetic: FXN 3 reverse 9:69041824-69041852; SpCas9
cttcagatgtgtgtgctcactcaca

SEQ ID NO: 36150 - DNA, 24 bp, Artificial Sequence
  Synthetic: FXN 3 reverse 9:69041825-69041852; SpCas9
ttcagatgtgtgtgctcactcaca

SEQ ID NO: 36151 - DNA, 23 bp, Artificial Sequence
  Synthetic: FXN 3 reverse 9:69041826-69041852; SpCas9
tcagatgtgtgtgctcactcaca

SEQ ID NO: 36152 - DNA, 22 bp, Artificial Sequence
  Synthetic: FXN 3 reverse 9:69041827-69041852; SpCas9
cagatgtgtgtgctcactcaca

SEQ ID NO: 36153 - DNA, 21 bp, Artificial Sequence
  Synthetic: FXN 3 reverse 9:69041828-69041852; SpCas9
agatgtgtgtgctcactcaca

SEQ ID NO: 36154 - DNA, 20 bp, Artificial Sequence
  Synthetic: FXN 3 reverse 9:69041829-69041852; SpCas9
gatgtgtgtgctcactcaca

SEQ ID NO: 36155 - DNA, 19 bp, Artificial Sequence
  Synthetic: FXN 3 reverse 9:69041830-69041852; SpCas9
atgtgtgtgctcactcaca

SEQ ID NO: 36156 - DNA, 18 bp, Artificial Sequence
  Synthetic: FXN 3 reverse 9:69041831-69041852; SpCas9
tgtgtgtgctcactcaca

SEQ ID NO: 36157 - DNA, 25 bp, Artificial Sequence
  Synthetic: FXN 3 forward 9:69041831-69041859; SpCas9
agtgagcacacacatctgaagcctc

SEQ ID NO: 36158 - DNA, 24 bp, Artificial Sequence
  Synthetic: FXN 3 forward 9:69041832-69041859; SpCas9
gtgagcacacacatctgaagcctc

SEQ ID NO: 36159 - DNA, 23 bp, Artificial Sequence
  Synthetic: FXN 3 forward 9:69041833-69041859; SpCas9
tgagcacacacatctgaagcctc

SEQ ID NO: 36160 - DNA, 22 bp, Artificial Sequence
  Synthetic: FXN 3 forward 9:69041834-69041859; SpCas9
gagcacacacatctgaagcctc

SEQ ID NO: 36161 - DNA, 21 bp, Artificial Sequence
  Synthetic: FXN 3 forward 9:69041835-69041859; SpCas9
agcacacacatctgaagcctc

SEQ ID NO: 36162 - DNA, 20 bp, Artificial Sequence
  Synthetic: FXN 3 forward 9:69041836-69041859; SpCas9
gcacacacatctgaagcctc

SEQ ID NO: 36163 - DNA, 19 bp, Artificial Sequence
  Synthetic: FXN 3 forward 9:69041837-69041859; SpCas9
cacacacatctgaagcctc

SEQ ID NO: 36164 - DNA, 18 bp, Artificial Sequence
  Synthetic: FXN 3 forward 9:69041838-69041859; SpCas9
acacacatctgaagcctc

SEQ ID NO: 36165 - DNA, 25 bp, Artificial Sequence
  Synthetic: FXN 3 forward 9:69041835-69041863; SpCas9
agcacacacatctgaagcctcaagc

SEQ ID NO: 36166 - DNA, 24 bp, Artificial Sequence
  Synthetic: FXN 3 forward 9:69041836-69041863; SpCas9
gcacacacatctgaagcctcaagc

SEQ ID NO: 36167 - DNA, 23 bp, Artificial Sequence
  Synthetic: FXN 3 forward 9:69041837-69041863; SpCas9
cacacacatctgaagcctcaagc

SEQ ID NO: 36168 - DNA, 22 bp, Artificial Sequence
  Synthetic: FXN 3 forward 9:69041838-69041863; SpCas9
acacacatctgaagcctcaagc

SEQ ID NO: 36169 - DNA, 21 bp, Artificial Sequence
  Synthetic: FXN 3 forward 9:69041839-69041863; SpCas9
cacacatctgaagcctcaagc

SEQ ID NO: 36170 - DNA, 20 bp, Artificial Sequence
  Synthetic: FXN 3 forward 9:69041840-69041863; SpCas9
acacatctgaagcctcaagc

SEQ ID NO: 36171 - DNA, 19 bp, Artificial Sequence
  Synthetic: FXN 3 forward 9:69041841-69041863; SpCas9
cacatctgaagcctcaagc

SEQ ID NO: 36172 - DNA, 18 bp, Artificial Sequence
  Synthetic: FXN 3 forward 9:69041842-69041863; SpCas9
acatctgaagcctcaagc

SEQ ID NO: 36173 - DNA, 25 bp, Artificial Sequence
  Synthetic: FXN 3 forward 9:69041836-69041864; SpCas9
gcacacacatctgaagcctcaagct

SEQ ID NO: 36174 - DNA, 24 bp, Artificial Sequence
  Synthetic: FXN 3 forward 9:69041837-69041864; SpCas9
cacacacatctgaagcctcaagct

SEQ ID NO: 36175 - DNA, 23 bp, Artificial Sequence
  Synthetic: FXN 3 forward 9:69041838-69041864; SpCas9
acacacatctgaagcctcaagct

SEQ ID NO: 36176 - DNA, 22 bp, Artificial Sequence
  Synthetic: FXN 3 forward 9:69041839-69041864; SpCas9
cacacatctgaagcctcaagct

SEQ ID NO: 36177 - DNA, 21 bp, Artificial Sequence
  Synthetic: FXN 3 forward 9:69041840-69041864; SpCas9
acacatctgaagcctcaagct

SEQ ID NO: 36178 - DNA, 20 bp, Artificial Sequence
  Synthetic: FXN 3 forward 9:69041841-69041864; SpCas9
cacatctgaagcctcaagct

SEQ ID NO: 36179 - DNA, 19 bp, Artificial Sequence
  Synthetic: FXN 3 forward 9:69041842-69041864; SpCas9
acatctgaagcctcaagct

SEQ ID NO: 36180 - DNA, 18 bp, Artificial Sequence
  Synthetic: FXN 3 forward 9:69041843-69041864; SpCas9
catctgaagcctcaagct

SEQ ID NO: 36181 - DNA, 25 bp, Artificial Sequence
  Synthetic: FXN 3 forward 9:69041840-69041868; SpCas9
acacatctgaagcctcaagctaggc

SEQ ID NO: 36182 - DNA, 24 bp, Artificial Sequence
  Synthetic: FXN 3 forward 9:69041841-69041868; SpCas9
cacatctgaagcctcaagctaggc

SEQ ID NO: 36183 - DNA, 23 bp, Artificial Sequence
  Synthetic: FXN 3 forward 9:69041842-69041868; SpCas9
acatctgaagcctcaagctaggc

SEQ ID NO: 36184 - DNA, 22 bp, Artificial Sequence
  Synthetic: FXN 3 forward 9:69041843-69041868; SpCas9
catctgaagcctcaagctaggc

SEQ ID NO: 36185 - DNA, 21 bp, Artificial Sequence
  Synthetic: FXN 3 forward 9:69041844-69041868; SpCas9
atctgaagcctcaagctaggc

SEQ ID NO: 36186 - DNA, 20 bp, Artificial Sequence
  Synthetic: FXN 3 forward 9:69041845-69041868; SpCas9
tctgaagcctcaagctaggc

SEQ ID NO: 36187 - DNA, 19 bp, Artificial Sequence
  Synthetic: FXN 3 forward 9:69041846-69041868; SpCas9
ctgaagcctcaagctaggc

SEQ ID NO: 36188 - DNA, 18 bp, Artificial Sequence
  Synthetic: FXN 3 forward 9:69041847-69041868; SpCas9
tgaagcctcaagctaggc

SEQ ID NO: 36189 - DNA, 25 bp, Artificial Sequence
  Synthetic: FXN 3 reverse 9:69041846-69041874; SpCas9
ggtaggcttgcctagcttgaggctt

SEQ ID NO: 36190 - DNA, 24 bp, Artificial Sequence
  Synthetic: FXN 3 reverse 9:69041847-69041874; SpCas9
gtaggcttgcctagcttgaggctt

SEQ ID NO: 36191 - DNA, 23 bp, Artificial Sequence
  Synthetic: FXN 3 reverse 9:69041848-69041874; SpCas9
taggcttgcctagcttgaggctt

SEQ ID NO: 36192 - DNA, 22 bp, Artificial Sequence
  Synthetic: FXN 3 reverse 9:69041849-69041874; SpCas9
aggcttgcctagcttgaggctt

SEQ ID NO: 36193 - DNA, 21 bp, Artificial Sequence
  Synthetic: FXN 3 reverse 9:69041850-69041874; SpCas9
ggcttgcctagcttgaggctt

SEQ ID NO: 36194 - DNA, 20 bp, Artificial Sequence
  Synthetic: FXN 3 reverse 9:69041851-69041874; SpCas9
gcttgcctagcttgaggctt

SEQ ID NO: 36195 - DNA, 19 bp, Artificial Sequence
  Synthetic: FXN 3 reverse 9:69041852-69041874; SpCas9
cttgcctagcttgaggctt

SEQ ID NO: 36196 - DNA, 18 bp, Artificial Sequence
  Synthetic: FXN 3 reverse 9:69041853-69041874; SpCas9
ttgcctagcttgaggctt

SEQ ID NO: 36197 - DNA, 25 bp, Artificial Sequence
  Synthetic: FXN 3 reverse 9:69041852-69041880; SpCas9
agtcatggtaggcttgcctagcttg

SEQ ID NO: 36198 - DNA, 24 bp, Artificial Sequence
  Synthetic: FXN 3 reverse 9:69041853-69041880; SpCas9
gtcatggtaggcttgcctagcttg

SEQ ID NO: 36199 - DNA, 23 bp, Artificial Sequence
  Synthetic: FXN 3 reverse 9:69041854-69041880; SpCas9
tcatggtaggcttgcctagcttg

SEQ ID NO: 36200 - DNA, 22 bp, Artificial Sequence
  Synthetic: FXN 3 reverse 9:69041855-69041880; SpCas9
catggtaggcttgcctagcttg

SEQ ID NO: 36201 - DNA, 21 bp, Artificial Sequence
  Synthetic: FXN 3 reverse 9:69041856-69041880; SpCas9
atggtaggcttgcctagcttg

SEQ ID NO: 36202 - DNA, 20 bp, Artificial Sequence
  Synthetic: FXN 3 reverse 9:69041857-69041880; SpCas9
tggtaggcttgcctagcttg

SEQ ID NO: 36203 - DNA, 19 bp, Artificial Sequence
  Synthetic: FXN 3 reverse 9:69041858-69041880; SpCas9
ggtaggcttgcctagcttg

SEQ ID NO: 36204 - DNA, 18 bp, Artificial Sequence
  Synthetic: FXN 3 reverse 9:69041859-69041880; SpCas9
gtaggcttgcctagcttg

SEQ ID NO: 36205 - DNA, 25 bp, Artificial Sequence
  Synthetic: FXN 3 reverse 9:69041853-69041881; SpCas9
aagtcatggtaggcttgcctagctt

SEQ ID NO: 36206 - DNA, 24 bp, Artificial Sequence
  Synthetic: FXN 3 reverse 9:69041854-69041881; SpCas9
agtcatggtaggcttgcctagctt

SEQ ID NO: 36207 - DNA, 23 bp, Artificial Sequence
  Synthetic: FXN 3 reverse 9:69041855-69041881; SpCas9
gtcatggtaggcttgcctagctt

SEQ ID NO: 36208 - DNA, 22 bp, Artificial Sequence
  Synthetic: FXN 3 reverse 9:69041856-69041881; SpCas9
tcatggtaggcttgcctagctt

SEQ ID NO: 36209 - DNA, 21 bp, Artificial Sequence
  Synthetic: FXN 3 reverse 9:69041857-69041881; SpCas9
catggtaggcttgcctagctt

SEQ ID NO: 36210 - DNA, 20 bp, Artificial Sequence
  Synthetic: FXN 3 reverse 9:69041858-69041881; SpCas9
atggtaggcttgcctagctt

SEQ ID NO: 36211 - DNA, 19 bp, Artificial Sequence
  Synthetic: FXN 3 reverse 9:69041859-69041881; SpCas9
tggtaggcttgcctagctt

SEQ ID NO: 36212 - DNA, 18 bp, Artificial Sequence
  Synthetic: FXN 3 reverse 9:69041860-69041881; SpCas9
ggtaggcttgcctagctt

SEQ ID NO: 36213 - DNA, 25 bp, Artificial Sequence
  Synthetic: FXN 3 forward 9:69041857-69041885; SpCas9
agctaggcaagcctaccatgacttg

SEQ ID NO: 36214 - DNA, 24 bp, Artificial Sequence
  Synthetic: FXN 3 forward 9:69041858-69041885; SpCas9
gctaggcaagcctaccatgacttg

SEQ ID NO: 36215 - DNA, 23 bp, Artificial Sequence
  Synthetic: FXN 3 forward 9:69041859-69041885; SpCas9
ctaggcaagcctaccatgacttg

SEQ ID NO: 36216 - DNA, 22 bp, Artificial Sequence
  Synthetic: FXN 3 forward 9:69041860-69041885; SpCas9
taggcaagcctaccatgacttg

SEQ ID NO: 36217 - DNA, 21 bp, Artificial Sequence
  Synthetic: FXN 3 forward 9:69041861-69041885; SpCas9
aggcaagcctaccatgacttg

SEQ ID NO: 36218 - DNA, 20 bp, Artificial Sequence
  Synthetic: FXN 3 forward 9:69041862-69041885; SpCas9
ggcaagcctaccatgacttg

SEQ ID NO: 36219 - DNA, 19 bp, Artificial Sequence
  Synthetic: FXN 3 forward 9:69041863-69041885; SpCas9
gcaagcctaccatgacttg

SEQ ID NO: 36220 - DNA, 18 bp, Artificial Sequence
  Synthetic: FXN 3 forward 9:69041864-69041885; SpCas9
caagcctaccatgacttg

SEQ ID NO: 36221 - DNA, 25 bp, Artificial Sequence
  Synthetic: FXN 3 reverse 9:69041859-69041887; SpCas9
gaccacaagtcatggtaggcttgcc

SEQ ID NO: 36222 - DNA, 24 bp, Artificial Sequence
  Synthetic: FXN 3 reverse 9:69041860-69041887; SpCas9
accacaagtcatggtaggcttgcc

SEQ ID NO: 36223 - DNA, 23 bp, Artificial Sequence
  Synthetic: FXN 3 reverse 9:69041861-69041887; SpCas9
ccacaagtcatggtaggcttgcc

SEQ ID NO: 36224 - DNA, 22 bp, Artificial Sequence
  Synthetic: FXN 3 reverse 9:69041862-69041887; SpCas9
cacaagtcatggtaggcttgcc

SEQ ID NO: 36225 - DNA, 21 bp, Artificial Sequence
  Synthetic: FXN 3 reverse 9:69041863-69041887; SpCas9
acaagtcatggtaggcttgcc

SEQ ID NO: 36226 - DNA, 20 bp, Artificial Sequence
  Synthetic: FXN 3 reverse 9:69041864-69041887; SpCas9
caagtcatggtaggcttgcc

SEQ ID NO: 36227 - DNA, 19 bp, Artificial Sequence
  Synthetic: FXN 3 reverse 9:69041865-69041887; SpCas9
aagtcatggtaggcttgcc

SEQ ID NO: 36228 - DNA, 18 bp, Artificial Sequence
  Synthetic: FXN 3 reverse 9:69041866-69041887; SpCas9
agtcatggtaggcttgcc

SEQ ID NO: 36229 - DNA, 25 bp, Artificial Sequence
  Synthetic: FXN 3 forward 9:69041863-69041891; SpCas9
gcaagcctaccatgacttgtggtcc

SEQ ID NO: 36230 - DNA, 24 bp, Artificial Sequence
  Synthetic: FXN 3 forward 9:69041864-69041891; SpCas9
caagcctaccatgacttgtggtcc

SEQ ID NO: 36231 - DNA, 23 bp, Artificial Sequence
  Synthetic: FXN 3 forward 9:69041865-69041891; SpCas9
aagcctaccatgacttgtggtcc

SEQ ID NO: 36232 - DNA, 22 bp, Artificial Sequence
  Synthetic: FXN 3 forward 9:69041866-69041891; SpCas9
agcctaccatgacttgtggtcc

SEQ ID NO: 36233 - DNA, 21 bp, Artificial Sequence
  Synthetic: FXN 3 forward 9:69041867-69041891; SpCas9
gcctaccatgacttgtggtcc

SEQ ID NO: 36234 - DNA, 20 bp, Artificial Sequence
  Synthetic: FXN 3 forward 9:69041868-69041891; SpCas9
cctaccatgacttgtggtcc

SEQ ID NO: 36235 - DNA, 19 bp, Artificial Sequence
  Synthetic: FXN 3 forward 9:69041869-69041891; SpCas9
ctaccatgacttgtggtcc

SEQ ID NO: 36236 - DNA, 18 bp, Artificial Sequence
  Synthetic: FXN 3 forward 9:69041870-69041891; SpCas9
taccatgacttgtggtcc

SEQ ID NO: 36237 - DNA, 25 bp, Artificial Sequence
  Synthetic: FXN 3 forward 9:69041864-69041892; SpCas9
caagcctaccatgacttgtggtcca

SEQ ID NO: 36238 - DNA, 24 bp, Artificial Sequence
  Synthetic: FXN 3 forward 9:69041865-69041892; SpCas9
aagcctaccatgacttgtggtcca

SEQ ID NO: 36239 - DNA, 23 bp, Artificial Sequence
  Synthetic: FXN 3 forward 9:69041866-69041892; SpCas9
agcctaccatgacttgtggtcca

SEQ ID NO: 36240 - DNA, 22 bp, Artificial Sequence
  Synthetic: FXN 3 forward 9:69041867-69041892; SpCas9
gcctaccatgacttgtggtcca

SEQ ID NO: 36241 - DNA, 21 bp, Artificial Sequence
  Synthetic: FXN 3 forward 9:69041868-69041892; SpCas9
cctaccatgacttgtggtcca

SEQ ID NO: 36242 - DNA, 20 bp, Artificial Sequence
  Synthetic: FXN 3 forward 9:69041869-69041892; SpCas9
ctaccatgacttgtggtcca

SEQ ID NO: 36243 - DNA, 19 bp, Artificial Sequence
  Synthetic: FXN 3 forward 9:69041870-69041892; SpCas9
taccatgacttgtggtcca

SEQ ID NO: 36244 - DNA, 18 bp, Artificial Sequence
  Synthetic: FXN 3 forward 9:69041871-69041892; SpCas9
accatgacttgtggtcca

SEQ ID NO: 36245 - DNA, 25 bp, Artificial Sequence
  Synthetic: FXN 3 forward 9:69041865-69041893; SpCas9
aagcctaccatgacttgtggtccaa

SEQ ID NO: 36246 - DNA, 24 bp, Artificial Sequence
  Synthetic: FXN 3 forward 9:69041866-69041893; SpCas9
agcctaccatgacttgtggtccaa

SEQ ID NO: 36247 - DNA, 23 bp, Artificial Sequence
  Synthetic: FXN 3 forward 9:69041867-69041893; SpCas9
gcctaccatgacttgtggtccaa

SEQ ID NO: 36248 - DNA, 22 bp, Artificial Sequence
  Synthetic: FXN 3 forward 9:69041868-69041893; SpCas9
cctaccatgacttgtggtccaa

SEQ ID NO: 36249 - DNA, 21 bp, Artificial Sequence
  Synthetic: FXN 3 forward 9:69041869-69041893; SpCas9
ctaccatgacttgtggtccaa

SEQ ID NO: 36250 - DNA, 20 bp, Artificial Sequence
  Synthetic: FXN 3 forward 9:69041870-69041893; SpCas9
taccatgacttgtggtccaa

SEQ ID NO: 36251 - DNA, 19 bp, Artificial Sequence
  Synthetic: FXN 3 forward 9:69041871-69041893; SpCas9
accatgacttgtggtccaa

SEQ ID NO: 36252 - DNA, 18 bp, Artificial Sequence
  Synthetic: FXN 3 forward 9:69041872-69041893; SpCas9
ccatgacttgtggtccaa

SEQ ID NO: 36253 - DNA, 25 bp, Artificial Sequence
  Synthetic: FXN 3 reverse 9:69041868-69041896; SpCas9
gagcccttggaccacaagtcatggt

SEQ ID NO: 36254 - DNA, 24 bp, Artificial Sequence
  Synthetic: FXN 3 reverse 9:69041869-69041896; SpCas9
agcccttggaccacaagtcatggt

SEQ ID NO: 36255 - DNA, 23 bp, Artificial Sequence
  Synthetic: FXN 3 reverse 9:69041870-69041896; SpCas9
gcccttggaccacaagtcatggt

SEQ ID NO: 36256 - DNA, 22 bp, Artificial Sequence
  Synthetic: FXN 3 reverse 9:69041871-69041896; SpCas9
cccttggaccacaagtcatggt

SEQ ID NO: 36257 - DNA, 21 bp, Artificial Sequence
  Synthetic: FXN 3 reverse 9:69041872-69041896; SpCas9
ccttggaccacaagtcatggt

SEQ ID NO: 36258 - DNA, 20 bp, Artificial Sequence
  Synthetic: FXN 3 reverse 9:69041873-69041896; SpCas9
cttggaccacaagtcatggt

SEQ ID NO: 36259 - DNA, 19 bp, Artificial Sequence
  Synthetic: FXN 3 reverse 9:69041874-69041896; SpCas9
ttggaccacaagtcatggt

SEQ ID NO: 36260 - DNA, 18 bp, Artificial Sequence
  Synthetic: FXN 3 reverse 9:69041875-69041896; SpCas9
tggaccacaagtcatggt

SEQ ID NO: 36261 - DNA, 25 bp, Artificial Sequence
  Synthetic: FXN 3 reverse 9:69041869-69041897; SpCas9
tgagcccttggaccacaagtcatgg

SEQ ID NO: 36262 - DNA, 24 bp, Artificial Sequence
  Synthetic: FXN 3 reverse 9:69041870-69041897; SpCas9
gagcccttggaccacaagtcatgg

SEQ ID NO: 36263 - DNA, 23 bp, Artificial Sequence
  Synthetic: FXN 3 reverse 9:69041871-69041897; SpCas9
agcccttggaccacaagtcatgg

SEQ ID NO: 36264 - DNA, 22 bp, Artificial Sequence
  Synthetic: FXN 3 reverse 9:69041872-69041897; SpCas9
gcccttggaccacaagtcatgg

SEQ ID NO: 36265 - DNA, 21 bp, Artificial Sequence
  Synthetic: FXN 3 reverse 9:69041873-69041897; SpCas9
cccttggaccacaagtcatgg

SEQ ID NO: 36266 - DNA, 20 bp, Artificial Sequence
  Synthetic: FXN 3 reverse 9:69041874-69041897; SpCas9
ccttggaccacaagtcatgg

SEQ ID NO: 36267 - DNA, 19 bp, Artificial Sequence
  Synthetic: FXN 3 reverse 9:69041875-69041897; SpCas9
cttggaccacaagtcatgg

SEQ ID NO: 36268 - DNA, 18 bp, Artificial Sequence
  Synthetic: FXN 3 reverse 9:69041876-69041897; SpCas9
ttggaccacaagtcatgg

SEQ ID NO: 36269 - DNA, 25 bp, Artificial Sequence
  Synthetic: FXN 3 forward 9:69041872-69041900; SpCas9
ccatgacttgtggtccaagggctca

SEQ ID NO: 36270 - DNA, 24 bp, Artificial Sequence
  Synthetic: FXN 3 forward 9:69041873-69041900; SpCas9
catgacttgtggtccaagggctca

SEQ ID NO: 36271 - DNA, 23 bp, Artificial Sequence
  Synthetic: FXN 3 forward 9:69041874-69041900; SpCas9
atgacttgtggtccaagggctca

SEQ ID NO: 36272 - DNA, 22 bp, Artificial Sequence
  Synthetic: FXN 3 forward 9:69041875-69041900; SpCas9
tgacttgtggtccaagggctca

SEQ ID NO: 36273 - DNA, 21 bp, Artificial Sequence
  Synthetic: FXN 3 forward 9:69041876-69041900; SpCas9
gacttgtggtccaagggctca

SEQ ID NO: 36274 - DNA, 20 bp, Artificial Sequence
  Synthetic: FXN 3 forward 9:69041877-69041900; SpCas9
acttgtggtccaagggctca

SEQ ID NO: 36275 - DNA, 19 bp, Artificial Sequence
  Synthetic: FXN 3 forward 9:69041878-69041900; SpCas9
cttgtggtccaagggctca

SEQ ID NO: 36276 - DNA, 18 bp, Artificial Sequence
  Synthetic: FXN 3 forward 9:69041879-69041900; SpCas9
ttgtggtccaagggctca

SEQ ID NO: 36277 - DNA, 25 bp, Artificial Sequence
  Synthetic: FXN 3 reverse 9:69041872-69041900; SpCas9
ccgtgagcccttggaccacaagtca

SEQ ID NO: 36278 - DNA, 24 bp, Artificial Sequence
  Synthetic: FXN 3 reverse 9:69041873-69041900; SpCas9
cgtgagcccttggaccacaagtca

SEQ ID NO: 36279 - DNA, 23 bp, Artificial Sequence
  Synthetic: FXN 3 reverse 9:69041874-69041900; SpCas9
gtgagcccttggaccacaagtca

SEQ ID NO: 36280 - DNA, 22 bp, Artificial Sequence
  Synthetic: FXN 3 reverse 9:69041875-69041900; SpCas9
tgagcccttggaccacaagtca

SEQ ID NO: 36281 - DNA, 21 bp, Artificial Sequence
  Synthetic: FXN 3 reverse 9:69041876-69041900; SpCas9
gagcccttggaccacaagtca

SEQ ID NO: 36282 - DNA, 20 bp, Artificial Sequence
  Synthetic: FXN 3 reverse 9:69041877-69041900; SpCas9
agcccttggaccacaagtca

SEQ ID NO: 36283 - DNA, 19 bp, Artificial Sequence
  Synthetic: FXN 3 reverse 9:69041878-69041900; SpCas9
gcccttggaccacaagtca

SEQ ID NO: 36284 - DNA, 18 bp, Artificial Sequence
  Synthetic: FXN 3 reverse 9:69041879-69041900; SpCas9
cccttggaccacaagtca

SEQ ID NO: 36285 - DNA, 25 bp, Artificial Sequence
  Synthetic: FXN 3 forward 9:69041873-69041901; SpCas9
catgacttgtggtccaagggctcac

SEQ ID NO: 36286 - DNA, 24 bp, Artificial Sequence
  Synthetic: FXN 3 forward 9:69041874-69041901; SpCas9
atgacttgtggtccaagggctcac

SEQ ID NO: 36287 - DNA, 23 bp, Artificial Sequence
  Synthetic: FXN 3 forward 9:69041875-69041901; SpCas9
tgacttgtggtccaagggctcac

SEQ ID NO: 36288 - DNA, 22 bp, Artificial Sequence
  Synthetic: FXN 3 forward 9:69041876-69041901; SpCas9
gacttgtggtccaagggctcac

SEQ ID NO: 36289 - DNA, 21 bp, Artificial Sequence
  Synthetic: FXN 3 forward 9:69041877-69041901; SpCas9
acttgtggtccaagggctcac

SEQ ID NO: 36290 - DNA, 20 bp, Artificial Sequence
  Synthetic: FXN 3 forward 9:69041878-69041901; SpCas9
cttgtggtccaagggctcac

SEQ ID NO: 36291 - DNA, 19 bp, Artificial Sequence
  Synthetic: FXN 3 forward 9:69041879-69041901; SpCas9
ttgtggtccaagggctcac

SEQ ID NO: 36292 - DNA, 18 bp, Artificial Sequence
  Synthetic: FXN 3 forward 9:69041880-69041901; SpCas9
tgtggtccaagggctcac

SEQ ID NO: 36293 - DNA, 25 bp, Artificial Sequence
  Synthetic: FXN 3 reverse 9:69041878-69041906; SpCas9
ggtcacccgtgagcccttggaccac

SEQ ID NO: 36294 - DNA, 24 bp, Artificial Sequence
  Synthetic: FXN 3 reverse 9:69041879-69041906; SpCas9
gtcacccgtgagcccttggaccac

SEQ ID NO: 36295 - DNA, 23 bp, Artificial Sequence
  Synthetic: FXN 3 reverse 9:69041880-69041906; SpCas9
tcacccgtgagcccttggaccac

SEQ ID NO: 36296 - DNA, 22 bp, Artificial Sequence
  Synthetic: FXN 3 reverse 9:69041881-69041906; SpCas9
cacccgtgagcccttggaccac

SEQ ID NO: 36297 - DNA, 21 bp, Artificial Sequence
  Synthetic: FXN 3 reverse 9:69041882-69041906; SpCas9
acccgtgagcccttggaccac

SEQ ID NO: 36298 - DNA, 20 bp, Artificial Sequence
  Synthetic: FXN 3 reverse 9:69041883-69041906; SpCas9
cccgtgagcccttggaccac

SEQ ID NO: 36299 - DNA, 19 bp, Artificial Sequence
  Synthetic: FXN 3 reverse 9:69041884-69041906; SpCas9
ccgtgagcccttggaccac

SEQ ID NO: 36300 - DNA, 18 bp, Artificial Sequence
  Synthetic: FXN 3 reverse 9:69041885-69041906; SpCas9
cgtgagcccttggaccac

SEQ ID NO: 36301 - DNA, 25 bp, Artificial Sequence
  Synthetic: FXN 3 forward 9:69041881-69041909; SpCas9
gtggtccaagggctcacgggtgacc

SEQ ID NO: 36302 - DNA, 24 bp, Artificial Sequence
  Synthetic: FXN 3 forward 9:69041882-69041909; SpCas9
tggtccaagggctcacgggtgacc

SEQ ID NO: 36303 - DNA, 23 bp, Artificial Sequence
  Synthetic: FXN 3 forward 9:69041883-69041909; SpCas9
ggtccaagggctcacgggtgacc

SEQ ID NO: 36304 - DNA, 22 bp, Artificial Sequence
  Synthetic: FXN 3 forward 9:69041884-69041909; SpCas9
gtccaagggctcacgggtgacc

SEQ ID NO: 36305 - DNA, 21 bp, Artificial Sequence
  Synthetic: FXN 3 forward 9:69041885-69041909; SpCas9
tccaagggctcacgggtgacc

SEQ ID NO: 36306 - DNA, 20 bp, Artificial Sequence
  Synthetic: FXN 3 forward 9:69041886-69041909; SpCas9
ccaagggctcacgggtgacc

SEQ ID NO: 36307 - DNA, 19 bp, Artificial Sequence
  Synthetic: FXN 3 forward 9:69041887-69041909; SpCas9
caagggctcacgggtgacc

SEQ ID NO: 36308 - DNA, 18 bp, Artificial Sequence
  Synthetic: FXN 3 forward 9:69041888-69041909; SpCas9
aagggctcacgggtgacc

SEQ ID NO: 36309 - DNA, 25 bp, Artificial Sequence
  Synthetic: FXN 3 forward 9:69041883-69041911; SpCas9
ggtccaagggctcacgggtgacctg

SEQ ID NO: 36310 - DNA, 24 bp, Artificial Sequence
  Synthetic: FXN 3 forward 9:69041884-69041911; SpCas9
gtccaagggctcacgggtgacctg

SEQ ID NO: 36311 - DNA, 23 bp, Artificial Sequence
  Synthetic: FXN 3 forward 9:69041885-69041911; SpCas9
tccaagggctcacgggtgacctg

SEQ ID NO: 36312 - DNA, 22 bp, Artificial Sequence
  Synthetic: FXN 3 forward 9:69041886-69041911; SpCas9
ccaagggctcacgggtgacctg

SEQ ID NO: 36313 - DNA, 21 bp, Artificial Sequence
  Synthetic: FXN 3 forward 9:69041887-69041911; SpCas9
caagggctcacgggtgacctg

SEQ ID NO: 36314 - DNA, 20 bp, Artificial Sequence
  Synthetic: FXN 3 forward 9:69041888-69041911; SpCas9
aagggctcacgggtgacctg

SEQ ID NO: 36315 - DNA, 19 bp, Artificial Sequence
  Synthetic: FXN 3 forward 9:69041889-69041911; SpCas9
agggctcacgggtgacctg

SEQ ID NO: 36316 - DNA, 18 bp, Artificial Sequence
  Synthetic: FXN 3 forward 9:69041890-69041911; SpCas9
gggctcacgggtgacctg

SEQ ID NO: 36317 - DNA, 25 bp, Artificial Sequence
  Synthetic: FXN 3 reverse 9:69041886-69041914; SpCas9
taactccaggtcacccgtgagccct

SEQ ID NO: 36318 - DNA, 24 bp, Artificial Sequence
  Synthetic: FXN 3 reverse 9:69041887-69041914; SpCas9
aactccaggtcacccgtgagccct

SEQ ID NO: 36319 - DNA, 23 bp, Artificial Sequence
  Synthetic: FXN 3 reverse 9:69041888-69041914; SpCas9
actccaggtcacccgtgagccct

SEQ ID NO: 36320 - DNA, 22 bp, Artificial Sequence
  Synthetic: FXN 3 reverse 9:69041889-69041914; SpCas9
ctccaggtcacccgtgagccct

SEQ ID NO: 36321 - DNA, 21 bp, Artificial Sequence
  Synthetic: FXN 3 reverse 9:69041890-69041914; SpCas9
tccaggtcacccgtgagccct

SEQ ID NO: 36322 - DNA, 20 bp, Artificial Sequence
  Synthetic: FXN 3 reverse 9:69041891-69041914; SpCas9
ccaggtcacccgtgagccct

SEQ ID NO: 36323 - DNA, 19 bp, Artificial Sequence
  Synthetic: FXN 3 reverse 9:69041892-69041914; SpCas9
caggtcacccgtgagccct

SEQ ID NO: 36324 - DNA, 18 bp, Artificial Sequence
  Synthetic: FXN 3 reverse 9:69041893-69041914; SpCas9
aggtcacccgtgagccct

SEQ ID NO: 36325 - DNA, 25 bp, Artificial Sequence
  Synthetic: FXN 3 forward 9:69041887-69041915; SpCas9
caagggctcacgggtgacctggagt

SEQ ID NO: 36326 - DNA, 24 bp, Artificial Sequence
  Synthetic: FXN 3 forward 9:69041888-69041915; SpCas9
aagggctcacgggtgacctggagt

SEQ ID NO: 36327 - DNA, 23 bp, Artificial Sequence
  Synthetic: FXN 3 forward 9:69041889-69041915; SpCas9
agggctcacgggtgacctggagt

SEQ ID NO: 36328 - DNA, 22 bp, Artificial Sequence
  Synthetic: FXN 3 forward 9:69041890-69041915; SpCas9
gggctcacgggtgacctggagt

SEQ ID NO: 36329 - DNA, 21 bp, Artificial Sequence
  Synthetic: FXN 3 forward 9:69041891-69041915; SpCas9
ggctcacgggtgacctggagt

SEQ ID NO: 36330 - DNA, 20 bp, Artificial Sequence
  Synthetic: FXN 3 forward 9:69041892-69041915; SpCas9
gctcacgggtgacctggagt

SEQ ID NO: 36331 - DNA, 19 bp, Artificial Sequence
  Synthetic: FXN 3 forward 9:69041893-69041915; SpCas9
ctcacgggtgacctggagt

SEQ ID NO: 36332 - DNA, 18 bp, Artificial Sequence
  Synthetic: FXN 3 forward 9:69041894-69041915; SpCas9
tcacgggtgacctggagt

SEQ ID NO: 36333 - DNA, 25 bp, Artificial Sequence
  Synthetic: FXN 3 forward 9:69041889-69041917; SpCas9
agggctcacgggtgacctggagtta

SEQ ID NO: 36334 - DNA, 24 bp, Artificial Sequence
  Synthetic: FXN 3 forward 9:69041890-69041917; SpCas9
gggctcacgggtgacctggagtta

SEQ ID NO: 36335 - DNA, 23 bp, Artificial Sequence
  Synthetic: FXN 3 forward 9:69041891-69041917; SpCas9
ggctcacgggtgacctggagtta

SEQ ID NO: 36336 - DNA, 22 bp, Artificial Sequence
  Synthetic: FXN 3 forward 9:69041892-69041917; SpCas9
gctcacgggtgacctggagtta

SEQ ID NO: 36337 - DNA, 21 bp, Artificial Sequence
  Synthetic: FXN 3 forward 9:69041893-69041917; SpCas9
ctcacgggtgacctggagtta

SEQ ID NO: 36338 - DNA, 20 bp, Artificial Sequence
  Synthetic: FXN 3 forward 9:69041894-69041917; SpCas9
tcacgggtgacctggagtta

SEQ ID NO: 36339 - DNA, 19 bp, Artificial Sequence
  Synthetic: FXN 3 forward 9:69041895-69041917; SpCas9
cacgggtgacctggagtta

SEQ ID NO: 36340 - DNA, 18 bp, Artificial Sequence
  Synthetic: FXN 3 forward 9:69041896-69041917; SpCas9
acgggtgacctggagtta

SEQ ID NO: 36341 - DNA, 25 bp, Artificial Sequence
  Synthetic: FXN 3 forward 9:69041890-69041918; SpCas9
gggctcacgggtgacctggagttag

SEQ ID NO: 36342 - DNA, 24 bp, Artificial Sequence
  Synthetic: FXN 3 forward 9:69041891-69041918; SpCas9
ggctcacgggtgacctggagttag

SEQ ID NO: 36343 - DNA, 23 bp, Artificial Sequence
  Synthetic: FXN 3 forward 9:69041892-69041918; SpCas9
gctcacgggtgacctggagttag

SEQ ID NO: 36344 - DNA, 22 bp, Artificial Sequence
  Synthetic: FXN 3 forward 9:69041893-69041918; SpCas9
ctcacgggtgacctggagttag

SEQ ID NO: 36345 - DNA, 21 bp, Artificial Sequence
  Synthetic: FXN 3 forward 9:69041894-69041918; SpCas9
tcacgggtgacctggagttag

SEQ ID NO: 36346 - DNA, 20 bp, Artificial Sequence
  Synthetic: FXN 3 forward 9:69041895-69041918; SpCas9
cacgggtgacctggagttag

SEQ ID NO: 36347 - DNA, 19 bp, Artificial Sequence
  Synthetic: FXN 3 forward 9:69041896-69041918; SpCas9
acgggtgacctggagttag

SEQ ID NO: 36348 - DNA, 18 bp, Artificial Sequence
  Synthetic: FXN 3 forward 9:69041897-69041918; SpCas9
cgggtgacctggagttag

SEQ ID NO: 36349 - DNA, 25 bp, Artificial Sequence
  Synthetic: FXN 3 forward 9:69041891-69041919; SpCas9
ggctcacgggtgacctggagttaga

SEQ ID NO: 36350 - DNA, 24 bp, Artificial Sequence
  Synthetic: FXN 3 forward 9:69041892-69041919; SpCas9
gctcacgggtgacctggagttaga

SEQ ID NO: 36351 - DNA, 23 bp, Artificial Sequence
  Synthetic: FXN 3 forward 9:69041893-69041919; SpCas9
ctcacgggtgacctggagttaga

SEQ ID NO: 36352 - DNA, 22 bp, Artificial Sequence
  Synthetic: FXN 3 forward 9:69041894-69041919; SpCas9
tcacgggtgacctggagttaga

SEQ ID NO: 36353 - DNA, 21 bp, Artificial Sequence
  Synthetic: FXN 3 forward 9:69041895-69041919; SpCas9
cacgggtgacctggagttaga

SEQ ID NO: 36354 - DNA, 20 bp, Artificial Sequence
  Synthetic: FXN 3 forward 9:69041896-69041919; SpCas9
acgggtgacctggagttaga

SEQ ID NO: 36355 - DNA, 19 bp, Artificial Sequence
  Synthetic: FXN 3 forward 9:69041897-69041919; SpCas9
cgggtgacctggagttaga

SEQ ID NO: 36356 - DNA, 18 bp, Artificial Sequence
  Synthetic: FXN 3 forward 9:69041898-69041919; SpCas9
gggtgacctggagttaga

SEQ ID NO: 36357 - DNA, 25 bp, Artificial Sequence
  Synthetic: FXN 3 forward 9:69041893-69041921; SpCas9
ctcacgggtgacctggagttagagg

SEQ ID NO: 36358 - DNA, 24 bp, Artificial Sequence
  Synthetic: FXN 3 forward 9:69041894-69041921; SpCas9
tcacgggtgacctggagttagagg

SEQ ID NO: 36359 - DNA, 23 bp, Artificial Sequence
  Synthetic: FXN 3 forward 9:69041895-69041921; SpCas9
cacgggtgacctggagttagagg

SEQ ID NO: 36360 - DNA, 22 bp, Artificial Sequence
  Synthetic: FXN 3 forward 9:69041896-69041921; SpCas9
acgggtgacctggagttagagg

SEQ ID NO: 36361 - DNA, 21 bp, Artificial Sequence
  Synthetic: FXN 3 forward 9:69041897-69041921; SpCas9
cgggtgacctggagttagagg

SEQ ID NO: 36362 - DNA, 20 bp, Artificial Sequence
  Synthetic: FXN 3 forward 9:69041898-69041921; SpCas9
gggtgacctggagttagagg

SEQ ID NO: 36363 - DNA, 19 bp, Artificial Sequence
  Synthetic: FXN 3 forward 9:69041899-69041921; SpCas9
ggtgacctggagttagagg

SEQ ID NO: 36364 - DNA, 18 bp, Artificial Sequence
  Synthetic: FXN 3 forward 9:69041900-69041921; SpCas9
gtgacctggagttagagg

SEQ ID NO: 36365 - DNA, 25 bp, Artificial Sequence
  Synthetic: FXN 3 reverse 9:69041893-69041921; SpCas9
ctccctctaactccaggtcacccgt

SEQ ID NO: 36366 - DNA, 24 bp, Artificial Sequence
  Synthetic: FXN 3 reverse 9:69041894-69041921; SpCas9
tccctctaactccaggtcacccgt

SEQ ID NO: 36367 - DNA, 23 bp, Artificial Sequence
  Synthetic: FXN 3 reverse 9:69041895-69041921; SpCas9
ccctctaactccaggtcacccgt

SEQ ID NO: 36368 - DNA, 22 bp, Artificial Sequence
  Synthetic: FXN 3 reverse 9:69041896-69041921; SpCas9
cctctaactccaggtcacccgt

SEQ ID NO: 36369 - DNA, 21 bp, Artificial Sequence
  Synthetic: FXN 3 reverse 9:69041897-69041921; SpCas9
ctctaactccaggtcacccgt

SEQ ID NO: 36370 - DNA, 20 bp, Artificial Sequence
  Synthetic: FXN 3 reverse 9:69041898-69041921; SpCas9
tctaactccaggtcacccgt

SEQ ID NO: 36371 - DNA, 19 bp, Artificial Sequence
  Synthetic: FXN 3 reverse 9:69041899-69041921; SpCas9
ctaactccaggtcacccgt

SEQ ID NO: 36372 - DNA, 18 bp, Artificial Sequence
  Synthetic: FXN 3 reverse 9:69041900-69041921; SpCas9
taactccaggtcacccgt

SEQ ID NO: 36373 - DNA, 25 bp, Artificial Sequence
  Synthetic: FXN 3 forward 9:69041899-69041927; SpCas9
ggtgacctggagttagagggagaca

SEQ ID NO: 36374 - DNA, 24 bp, Artificial Sequence
  Synthetic: FXN 3 forward 9:69041900-69041927; SpCas9
gtgacctggagttagagggagaca

SEQ ID NO: 36375 - DNA, 23 bp, Artificial Sequence
  Synthetic: FXN 3 forward 9:69041901-69041927; SpCas9
tgacctggagttagagggagaca

SEQ ID NO: 36376 - DNA, 22 bp, Artificial Sequence
  Synthetic: FXN 3 forward 9:69041902-69041927; SpCas9
gacctggagttagagggagaca

SEQ ID NO: 36377 - DNA, 21 bp, Artificial Sequence
  Synthetic: FXN 3 forward 9:69041903-69041927; SpCas9
acctggagttagagggagaca

SEQ ID NO: 36378 - DNA, 20 bp, Artificial Sequence
  Synthetic: FXN 3 forward 9:69041904-69041927; SpCas9
cctggagttagagggagaca

SEQ ID NO: 36379 - DNA, 19 bp, Artificial Sequence
  Synthetic: FXN 3 forward 9:69041905-69041927; SpCas9
ctggagttagagggagaca

SEQ ID NO: 36380 - DNA, 18 bp, Artificial Sequence
  Synthetic: FXN 3 forward 9:69041906-69041927; SpCas9
tggagttagagggagaca

SEQ ID NO: 36381 - DNA, 25 bp, Artificial Sequence
  Synthetic: FXN 3 reverse 9:69041904-69041932; SpCas9
ggcagccatgtctccctctaactcc

SEQ ID NO: 36382 - DNA, 24 bp, Artificial Sequence
  Synthetic: FXN 3 reverse 9:69041905-69041932; SpCas9
gcagccatgtctccctctaactcc

SEQ ID NO: 36383 - DNA, 23 bp, Artificial Sequence
  Synthetic: FXN 3 reverse 9:69041906-69041932; SpCas9
cagccatgtctccctctaactcc

SEQ ID NO: 36384 - DNA, 22 bp, Artificial Sequence
  Synthetic: FXN 3 reverse 9:69041907-69041932; SpCas9
agccatgtctccctctaactcc

SEQ ID NO: 36385 - DNA, 21 bp, Artificial Sequence
  Synthetic: FXN 3 reverse 9:69041908-69041932; SpCas9
gccatgtctccctctaactcc

SEQ ID NO: 36386 - DNA, 20 bp, Artificial Sequence
  Synthetic: FXN 3 reverse 9:69041909-69041932; SpCas9
ccatgtctccctctaactcc

SEQ ID NO: 36387 - DNA, 19 bp, Artificial Sequence
  Synthetic: FXN 3 reverse 9:69041910-69041932; SpCas9
catgtctccctctaactcc

SEQ ID NO: 36388 - DNA, 18 bp, Artificial Sequence
  Synthetic: FXN 3 reverse 9:69041911-69041932; SpCas9
atgtctccctctaactcc

SEQ ID NO: 36389 - DNA, 25 bp, Artificial Sequence
  Synthetic: FXN 3 reverse 9:69041905-69041933; SpCas9
tggcagccatgtctccctctaactc

SEQ ID NO: 36390 - DNA, 24 bp, Artificial Sequence
  Synthetic: FXN 3 reverse 9:69041906-69041933; SpCas9
ggcagccatgtctccctctaactc

SEQ ID NO: 36391 - DNA, 23 bp, Artificial Sequence
  Synthetic: FXN 3 reverse 9:69041907-69041933; SpCas9
gcagccatgtctccctctaactc

SEQ ID NO: 36392 - DNA, 22 bp, Artificial Sequence
  Synthetic: FXN 3 reverse 9:69041908-69041933; SpCas9
cagccatgtctccctctaactc

SEQ ID NO: 36393 - DNA, 21 bp, Artificial Sequence
  Synthetic: FXN 3 reverse 9:69041909-69041933; SpCas9
agccatgtctccctctaactc

SEQ ID NO: 36394 - DNA, 20 bp, Artificial Sequence
  Synthetic: FXN 3 reverse 9:69041910-69041933; SpCas9
gccatgtctccctctaactc

SEQ ID NO: 36395 - DNA, 19 bp, Artificial Sequence
  Synthetic: FXN 3 reverse 9:69041911-69041933; SpCas9
ccatgtctccctctaactc

SEQ ID NO: 36396 - DNA, 18 bp, Artificial Sequence
  Synthetic: FXN 3 reverse 9:69041912-69041933; SpCas9
catgtctccctctaactc

SEQ ID NO: 36397 - DNA, 25 bp, Artificial Sequence
  Synthetic: FXN 3 forward 9:69041906-69041934; SpCas9
tggagttagagggagacatggctgc

SEQ ID NO: 36398 - DNA, 24 bp, Artificial Sequence
  Synthetic: FXN 3 forward 9:69041907-69041934; SpCas9
ggagttagagggagacatggctgc

SEQ ID NO: 36399 - DNA, 23 bp, Artificial Sequence
  Synthetic: FXN 3 forward 9:69041908-69041934; SpCas9
gagttagagggagacatggctgc

SEQ ID NO: 36400 - DNA, 22 bp, Artificial Sequence
  Synthetic: FXN 3 forward 9:69041909-69041934; SpCas9
agttagagggagacatggctgc

SEQ ID NO: 36401 - DNA, 21 bp, Artificial Sequence
  Synthetic: FXN 3 forward 9:69041910-69041934; SpCas9
gttagagggagacatggctgc

SEQ ID NO: 36402 - DNA, 20 bp, Artificial Sequence
  Synthetic: FXN 3 forward 9:69041911-69041934; SpCas9
ttagagggagacatggctgc

SEQ ID NO: 36403 - DNA, 19 bp, Artificial Sequence
  Synthetic: FXN 3 forward 9:69041912-69041934; SpCas9
tagagggagacatggctgc

SEQ ID NO: 36404 - DNA, 18 bp, Artificial Sequence
  Synthetic: FXN 3 forward 9:69041913-69041934; SpCas9
agagggagacatggctgc

SEQ ID NO: 36405 - DNA, 25 bp, Artificial Sequence
  Synthetic: FXN 3 forward 9:69041907-69041935; SpCas9
ggagttagagggagacatggctgcc

SEQ ID NO: 36406 - DNA, 24 bp, Artificial Sequence
  Synthetic: FXN 3 forward 9:69041908-69041935; SpCas9
gagttagagggagacatggctgcc

SEQ ID NO: 36407 - DNA, 23 bp, Artificial Sequence
  Synthetic: FXN 3 forward 9:69041909-69041935; SpCas9
agttagagggagacatggctgcc

SEQ ID NO: 36408 - DNA, 22 bp, Artificial Sequence
  Synthetic: FXN 3 forward 9:69041910-69041935; SpCas9
gttagagggagacatggctgcc

SEQ ID NO: 36409 - DNA, 21 bp, Artificial Sequence
  Synthetic: FXN 3 forward 9:69041911-69041935; SpCas9
ttagagggagacatggctgcc

SEQ ID NO: 36410 - DNA, 20 bp, Artificial Sequence
  Synthetic: FXN 3 forward 9:69041912-69041935; SpCas9
tagagggagacatggctgcc

SEQ ID NO: 36411 - DNA, 19 bp, Artificial Sequence
  Synthetic: FXN 3 forward 9:69041913-69041935; SpCas9
agagggagacatggctgcc

SEQ ID NO: 36412 - DNA, 18 bp, Artificial Sequence
  Synthetic: FXN 3 forward 9:69041914-69041935; SpCas9
gagggagacatggctgcc

SEQ ID NO: 36413 - DNA, 25 bp, Artificial Sequence
  Synthetic: FXN 3 forward 9:69041910-69041938; SpCas9
gttagagggagacatggctgccagg

SEQ ID NO: 36414 - DNA, 24 bp, Artificial Sequence
  Synthetic: FXN 3 forward 9:69041911-69041938; SpCas9
ttagagggagacatggctgccagg

SEQ ID NO: 36415 - DNA, 23 bp, Artificial Sequence
  Synthetic: FXN 3 forward 9:69041912-69041938; SpCas9
tagagggagacatggctgccagg

SEQ ID NO: 36416 - DNA, 22 bp, Artificial Sequence
  Synthetic: FXN 3 forward 9:69041913-69041938; SpCas9
agagggagacatggctgccagg

SEQ ID NO: 36417 - DNA, 21 bp, Artificial Sequence
  Synthetic: FXN 3 forward 9:69041914-69041938; SpCas9
gagggagacatggctgccagg

SEQ ID NO: 36418 - DNA, 20 bp, Artificial Sequence
  Synthetic: FXN 3 forward 9:69041915-69041938; SpCas9
agggagacatggctgccagg

SEQ ID NO: 36419 - DNA, 19 bp, Artificial Sequence
  Synthetic: FXN 3 forward 9:69041916-69041938; SpCas9
gggagacatggctgccagg

SEQ ID NO: 36420 - DNA, 18 bp, Artificial Sequence
  Synthetic: FXN 3 forward 9:69041917-69041938; SpCas9
ggagacatggctgccagg

SEQ ID NO: 36421 - DNA, 25 bp, Artificial Sequence
  Synthetic: FXN 3 forward 9:69041916-69041944; SpCas9
gggagacatggctgccaggtggctt

SEQ ID NO: 36422 - DNA, 24 bp, Artificial Sequence
  Synthetic: FXN 3 forward 9:69041917-69041944; SpCas9
ggagacatggctgccaggtggctt

SEQ ID NO: 36423 - DNA, 23 bp, Artificial Sequence
  Synthetic: FXN 3 forward 9:69041918-69041944; SpCas9
gagacatggctgccaggtggctt

SEQ ID NO: 36424 - DNA, 22 bp, Artificial Sequence
  Synthetic: FXN 3 forward 9:69041919-69041944; SpCas9
agacatggctgccaggtggctt

SEQ ID NO: 36425 - DNA, 21 bp, Artificial Sequence
  Synthetic: FXN 3 forward 9:69041920-69041944; SpCas9
gacatggctgccaggtggctt

SEQ ID NO: 36426 - DNA, 20 bp, Artificial Sequence
  Synthetic: FXN 3 forward 9:69041921-69041944; SpCas9
acatggctgccaggtggctt

SEQ ID NO: 36427 - DNA, 19 bp, Artificial Sequence
  Synthetic: FXN 3 forward 9:69041922-69041944; SpCas9
catggctgccaggtggctt

SEQ ID NO: 36428 - DNA, 18 bp, Artificial Sequence
  Synthetic: FXN 3 forward 9:69041923-69041944; SpCas9
atggctgccaggtggctt

SEQ ID NO: 36429 - DNA, 25 bp, Artificial Sequence
  Synthetic: FXN 3 forward 9:69041920-69041948; SpCas9
gacatggctgccaggtggctttaga

SEQ ID NO: 36430 - DNA, 24 bp, Artificial Sequence
  Synthetic: FXN 3 forward 9:69041921-69041948; SpCas9
acatggctgccaggtggctttaga

SEQ ID NO: 36431 - DNA, 23 bp, Artificial Sequence
  Synthetic: FXN 3 forward 9:69041922-69041948; SpCas9
catggctgccaggtggctttaga

SEQ ID NO: 36432 - DNA, 22 bp, Artificial Sequence
  Synthetic: FXN 3 forward 9:69041923-69041948; SpCas9
atggctgccaggtggctttaga

SEQ ID NO: 36433 - DNA, 21 bp, Artificial Sequence
  Synthetic: FXN 3 forward 9:69041924-69041948; SpCas9
tggctgccaggtggctttaga

SEQ ID NO: 36434 - DNA, 20 bp, Artificial Sequence
  Synthetic: FXN 3 forward 9:69041925-69041948; SpCas9
ggctgccaggtggctttaga

SEQ ID NO: 36435 - DNA, 19 bp, Artificial Sequence
  Synthetic: FXN 3 forward 9:69041926-69041948; SpCas9
gctgccaggtggctttaga

SEQ ID NO: 36436 - DNA, 18 bp, Artificial Sequence
  Synthetic: FXN 3 forward 9:69041927-69041948; SpCas9
ctgccaggtggctttaga

SEQ ID NO: 36437 - DNA, 25 bp, Artificial Sequence
  Synthetic: FXN 3 reverse 9:69041927-69041955; SpCas9
gagtgttctttctaaagccacctgg

SEQ ID NO: 36438 - DNA, 24 bp, Artificial Sequence
  Synthetic: FXN 3 reverse 9:69041928-69041955; SpCas9
agtgttctttctaaagccacctgg

SEQ ID NO: 36439 - DNA, 23 bp, Artificial Sequence
  Synthetic: FXN 3 reverse 9:69041929-69041955; SpCas9
gtgttctttctaaagccacctgg

SEQ ID NO: 36440 - DNA, 22 bp, Artificial Sequence
  Synthetic: FXN 3 reverse 9:69041930-69041955; SpCas9
tgttctttctaaagccacctgg

SEQ ID NO: 36441 - DNA, 21 bp, Artificial Sequence
  Synthetic: FXN 3 reverse 9:69041931-69041955; SpCas9
gttctttctaaagccacctgg

SEQ ID NO: 36442 - DNA, 20 bp, Artificial Sequence
  Synthetic: FXN 3 reverse 9:69041932-69041955; SpCas9
ttctttctaaagccacctgg

SEQ ID NO: 36443 - DNA, 19 bp, Artificial Sequence
  Synthetic: FXN 3 reverse 9:69041933-69041955; SpCas9
tctttctaaagccacctgg

SEQ ID NO: 36444 - DNA, 18 bp, Artificial Sequence
  Synthetic: FXN 3 reverse 9:69041934-69041955; SpCas9
ctttctaaagccacctgg

SEQ ID NO: 36445 - DNA, 25 bp, Artificial Sequence
  Synthetic: FXN 3 reverse 9:69041930-69041958; SpCas9
gatgagtgttctttctaaagccacc

SEQ ID NO: 36446 - DNA, 24 bp, Artificial Sequence
  Synthetic: FXN 3 reverse 9:69041931-69041958; SpCas9
atgagtgttctttctaaagccacc

SEQ ID NO: 36447 - DNA, 23 bp, Artificial Sequence
  Synthetic: FXN 3 reverse 9:69041932-69041958; SpCas9
tgagtgttctttctaaagccacc

SEQ ID NO: 36448 - DNA, 22 bp, Artificial Sequence
  Synthetic: FXN 3 reverse 9:69041933-69041958; SpCas9
gagtgttctttctaaagccacc

SEQ ID NO: 36449 - DNA, 21 bp, Artificial Sequence
  Synthetic: FXN 3 reverse 9:69041934-69041958; SpCas9
agtgttctttctaaagccacc

SEQ ID NO: 36450 - DNA, 20 bp, Artificial Sequence
  Synthetic: FXN 3 reverse 9:69041935-69041958; SpCas9
gtgttctttctaaagccacc

SEQ ID NO: 36451 - DNA, 19 bp, Artificial Sequence
  Synthetic: FXN 3 reverse 9:69041936-69041958; SpCas9
tgttctttctaaagccacc

SEQ ID NO: 36452 - DNA, 18 bp, Artificial Sequence
  Synthetic: FXN 3 reverse 9:69041937-69041958; SpCas9
gttctttctaaagccacc

SEQ ID NO: 36453 - DNA, 25 bp, Artificial Sequence
  Synthetic: FXN 3 forward 9:69041934-69041962; SpCas9
gtggctttagaaagaacactcatca

SEQ ID NO: 36454 - DNA, 24 bp, Artificial Sequence
  Synthetic: FXN 3 forward 9:69041935-69041962; SpCas9
tggctttagaaagaacactcatca

SEQ ID NO: 36455 - DNA, 23 bp, Artificial Sequence
  Synthetic: FXN 3 forward 9:69041936-69041962; SpCas9
ggctttagaaagaacactcatca

SEQ ID NO: 36456 - DNA, 22 bp, Artificial Sequence
  Synthetic: FXN 3 forward 9:69041937-69041962; SpCas9
gctttagaaagaacactcatca

SEQ ID NO: 36457 - DNA, 21 bp, Artificial Sequence
  Synthetic: FXN 3 forward 9:69041938-69041962; SpCas9
ctttagaaagaacactcatca

SEQ ID NO: 36458 - DNA, 20 bp, Artificial Sequence
  Synthetic: FXN 3 forward 9:69041939-69041962; SpCas9
tttagaaagaacactcatca

SEQ ID NO: 36459 - DNA, 19 bp, Artificial Sequence
  Synthetic: FXN 3 forward 9:69041940-69041962; SpCas9
ttagaaagaacactcatca

SEQ ID NO: 36460 - DNA, 18 bp, Artificial Sequence
  Synthetic: FXN 3 forward 9:69041941-69041962; SpCas9
tagaaagaacactcatca

SEQ ID NO: 36461 - DNA, 25 bp, Artificial Sequence
  Synthetic: FXN 3 forward 9:69041938-69041966; SpCas9
ctttagaaagaacactcatcatggc

SEQ ID NO: 36462 - DNA, 24 bp, Artificial Sequence
  Synthetic: FXN 3 forward 9:69041939-69041966; SpCas9
tttagaaagaacactcatcatggc

SEQ ID NO: 36463 - DNA, 23 bp, Artificial Sequence
  Synthetic: FXN 3 forward 9:69041940-69041966; SpCas9
ttagaaagaacactcatcatggc

SEQ ID NO: 36464 - DNA, 22 bp, Artificial Sequence
  Synthetic: FXN 3 forward 9:69041941-69041966; SpCas9
tagaaagaacactcatcatggc

SEQ ID NO: 36465 - DNA, 21 bp, Artificial Sequence
  Synthetic: FXN 3 forward 9:69041942-69041966; SpCas9
agaaagaacactcatcatggc

SEQ ID NO: 36466 - DNA, 20 bp, Artificial Sequence
  Synthetic: FXN 3 forward 9:69041943-69041966; SpCas9
gaaagaacactcatcatggc

SEQ ID NO: 36467 - DNA, 19 bp, Artificial Sequence
  Synthetic: FXN 3 forward 9:69041944-69041966; SpCas9
aaagaacactcatcatggc

SEQ ID NO: 36468 - DNA, 18 bp, Artificial Sequence
  Synthetic: FXN 3 forward 9:69041945-69041966; SpCas9
aagaacactcatcatggc

SEQ ID NO: 36469 - DNA, 25 bp, Artificial Sequence
  Synthetic: FXN 3 reverse 9:69041938-69041966; SpCas9
ctggccatgatgagtgttctttcta

SEQ ID NO: 36470 - DNA, 24 bp, Artificial Sequence
  Synthetic: FXN 3 reverse 9:69041939-69041966; SpCas9
tggccatgatgagtgttctttcta

SEQ ID NO: 36471 - DNA, 23 bp, Artificial Sequence
  Synthetic: FXN 3 reverse 9:69041940-69041966; SpCas9
ggccatgatgagtgttctttcta

SEQ ID NO: 36472 - DNA, 22 bp, Artificial Sequence
  Synthetic: FXN 3 reverse 9:69041941-69041966; SpCas9
gccatgatgagtgttctttcta

SEQ ID NO: 36473 - DNA, 21 bp, Artificial Sequence
  Synthetic: FXN 3 reverse 9:69041942-69041966; SpCas9
ccatgatgagtgttctttcta

SEQ ID NO: 36474 - DNA, 20 bp, Artificial Sequence
  Synthetic: FXN 3 reverse 9:69041943-69041966; SpCas9
catgatgagtgttctttcta

SEQ ID NO: 36475 - DNA, 19 bp, Artificial Sequence
  Synthetic: FXN 3 reverse 9:69041944-69041966; SpCas9
atgatgagtgttctttcta

SEQ ID NO: 36476 - DNA, 18 bp, Artificial Sequence
  Synthetic: FXN 3 reverse 9:69041945-69041966; SpCas9
tgatgagtgttctttcta

SEQ ID NO: 36477 - DNA, 25 bp, Artificial Sequence
  Synthetic: FXN 3 forward 9:69041939-69041967; SpCas9
tttagaaagaacactcatcatggcc

SEQ ID NO: 36478 - DNA, 24 bp, Artificial Sequence
  Synthetic: FXN 3 forward 9:69041940-69041967; SpCas9
ttagaaagaacactcatcatggcc

SEQ ID NO: 36479 - DNA, 23 bp, Artificial Sequence
  Synthetic: FXN 3 forward 9:69041941-69041967; SpCas9
tagaaagaacactcatcatggcc

SEQ ID NO: 36480 - DNA, 22 bp, Artificial Sequence
  Synthetic: FXN 3 forward 9:69041942-69041967; SpCas9
agaaagaacactcatcatggcc

SEQ ID NO: 36481 - DNA, 21 bp, Artificial Sequence
  Synthetic: FXN 3 forward 9:69041943-69041967; SpCas9
gaaagaacactcatcatggcc

SEQ ID NO: 36482 - DNA, 20 bp, Artificial Sequence
  Synthetic: FXN 3 forward 9:69041944-69041967; SpCas9
aaagaacactcatcatggcc

SEQ ID NO: 36483 - DNA, 19 bp, Artificial Sequence
  Synthetic: FXN 3 forward 9:69041945-69041967; SpCas9
aagaacactcatcatggcc

SEQ ID NO: 36484 - DNA, 18 bp, Artificial Sequence
  Synthetic: FXN 3 forward 9:69041946-69041967; SpCas9
agaacactcatcatggcc

SEQ ID NO: 36485 - DNA, 25 bp, Artificial Sequence
  Synthetic: FXN 3 forward 9:69041944-69041972; SpCas9
aaagaacactcatcatggccaggtg

SEQ ID NO: 36486 - DNA, 24 bp, Artificial Sequence
  Synthetic: FXN 3 forward 9:69041945-69041972; SpCas9
aagaacactcatcatggccaggtg

SEQ ID NO: 36487 - DNA, 23 bp, Artificial Sequence
  Synthetic: FXN 3 forward 9:69041946-69041972; SpCas9
agaacactcatcatggccaggtg

SEQ ID NO: 36488 - DNA, 22 bp, Artificial Sequence
  Synthetic: FXN 3 forward 9:69041947-69041972; SpCas9
gaacactcatcatggccaggtg

SEQ ID NO: 36489 - DNA, 21 bp, Artificial Sequence
  Synthetic: FXN 3 forward 9:69041948-69041972; SpCas9
aacactcatcatggccaggtg

SEQ ID NO: 36490 - DNA, 20 bp, Artificial Sequence
  Synthetic: FXN 3 forward 9:69041949-69041972; SpCas9
acactcatcatggccaggtg

SEQ ID NO: 36491 - DNA, 19 bp, Artificial Sequence
  Synthetic: FXN 3 forward 9:69041950-69041972; SpCas9
cactcatcatggccaggtg

SEQ ID NO: 36492 - DNA, 18 bp, Artificial Sequence
  Synthetic: FXN 3 forward 9:69041951-69041972; SpCas9
actcatcatggccaggtg

SEQ ID NO: 36493 - DNA, 25 bp, Artificial Sequence
  Synthetic: FXN 3 forward 9:69041947-69041975; SpCas9
gaacactcatcatggccaggtgcgg

SEQ ID NO: 36494 - DNA, 24 bp, Artificial Sequence
  Synthetic: FXN 3 forward 9:69041948-69041975; SpCas9
aacactcatcatggccaggtgcgg

SEQ ID NO: 36495 - DNA, 23 bp, Artificial Sequence
  Synthetic: FXN 3 forward 9:69041949-69041975; SpCas9
acactcatcatggccaggtgcgg

SEQ ID NO: 36496 - DNA, 22 bp, Artificial Sequence
  Synthetic: FXN 3 forward 9:69041950-69041975; SpCas9
cactcatcatggccaggtgcgg

SEQ ID NO: 36497 - DNA, 21 bp, Artificial Sequence
  Synthetic: FXN 3 forward 9:69041951-69041975; SpCas9
actcatcatggccaggtgcgg

SEQ ID NO: 36498 - DNA, 20 bp, Artificial Sequence
  Synthetic: FXN 3 forward 9:69041952-69041975; SpCas9
ctcatcatggccaggtgcgg

SEQ ID NO: 36499 - DNA, 19 bp, Artificial Sequence
  Synthetic: FXN 3 forward 9:69041953-69041975; SpCas9
tcatcatggccaggtgcgg

SEQ ID NO: 36500 - DNA, 18 bp, Artificial Sequence
  Synthetic: FXN 3 forward 9:69041954-69041975; SpCas9
catcatggccaggtgcgg

SEQ ID NO: 36501 - DNA, 25 bp, Artificial Sequence
  Synthetic: FXN 3 reverse 9:69041952-69041980; SpCas9
gtaagccaccgcacctggccatgat

SEQ ID NO: 36502 - DNA, 24 bp, Artificial Sequence
  Synthetic: FXN 3 reverse 9:69041953-69041980; SpCas9
taagccaccgcacctggccatgat

SEQ ID NO: 36503 - DNA, 23 bp, Artificial Sequence
  Synthetic: FXN 3 reverse 9:69041954-69041980; SpCas9
aagccaccgcacctggccatgat

SEQ ID NO: 36504 - DNA, 22 bp, Artificial Sequence
  Synthetic: FXN 3 reverse 9:69041955-69041980; SpCas9
agccaccgcacctggccatgat

SEQ ID NO: 36505 - DNA, 21 bp, Artificial Sequence
  Synthetic: FXN 3 reverse 9:69041956-69041980; SpCas9
gccaccgcacctggccatgat

SEQ ID NO: 36506 - DNA, 20 bp, Artificial Sequence
  Synthetic: FXN 3 reverse 9:69041957-69041980; SpCas9
ccaccgcacctggccatgat

SEQ ID NO: 36507 - DNA, 19 bp, Artificial Sequence
  Synthetic: FXN 3 reverse 9:69041958-69041980; SpCas9
caccgcacctggccatgat

SEQ ID NO: 36508 - DNA, 18 bp, Artificial Sequence
  Synthetic: FXN 3 reverse 9:69041959-69041980; SpCas9
accgcacctggccatgat

SEQ ID NO: 36509 - DNA, 25 bp, Artificial Sequence
  Synthetic: FXN 3 reverse 9:69041962-69041990; SpCas9
gattacaggcgtaagccaccgcacc

SEQ ID NO: 36510 - DNA, 24 bp, Artificial Sequence
  Synthetic: FXN 3 reverse 9:69041963-69041990; SpCas9
attacaggcgtaagccaccgcacc

SEQ ID NO: 36511 - DNA, 23 bp, Artificial Sequence
  Synthetic: FXN 3 reverse 9:69041964-69041990; SpCas9
ttacaggcgtaagccaccgcacc

SEQ ID NO: 36512 - DNA, 22 bp, Artificial Sequence
  Synthetic: FXN 3 reverse 9:69041965-69041990; SpCas9
tacaggcgtaagccaccgcacc

SEQ ID NO: 36513 - DNA, 21 bp, Artificial Sequence
  Synthetic: FXN 3 reverse 9:69041966-69041990; SpCas9
acaggcgtaagccaccgcacc

SEQ ID NO: 36514 - DNA, 20 bp, Artificial Sequence
  Synthetic: FXN 3 reverse 9:69041967-69041990; SpCas9
caggcgtaagccaccgcacc

SEQ ID NO: 36515 - DNA, 19 bp, Artificial Sequence
  Synthetic: FXN 3 reverse 9:69041968-69041990; SpCas9
aggcgtaagccaccgcacc

SEQ ID NO: 36516 - DNA, 18 bp, Artificial Sequence
  Synthetic: FXN 3 reverse 9:69041969-69041990; SpCas9
ggcgtaagccaccgcacc

SEQ ID NO: 36517 - DNA, 25 bp, Artificial Sequence
  Synthetic: FXN 3 forward 9:69041966-69041994; SpCas9
gtgcggtggcttacgcctgtaatcc

SEQ ID NO: 36518 - DNA, 24 bp, Artificial Sequence
  Synthetic: FXN 3 forward 9:69041967-69041994; SpCas9
tgcggtggcttacgcctgtaatcc

SEQ ID NO: 36519 - DNA, 23 bp, Artificial Sequence
  Synthetic: FXN 3 forward 9:69041968-69041994; SpCas9
gcggtggcttacgcctgtaatcc

SEQ ID NO: 36520 - DNA, 22 bp, Artificial Sequence
  Synthetic: FXN 3 forward 9:69041969-69041994; SpCas9
cggtggcttacgcctgtaatcc

SEQ ID NO: 36521 - DNA, 21 bp, Artificial Sequence
  Synthetic: FXN 3 forward 9:69041970-69041994; SpCas9
ggtggcttacgcctgtaatcc

SEQ ID NO: 36522 - DNA, 20 bp, Artificial Sequence
  Synthetic: FXN 3 forward 9:69041971-69041994; SpCas9
gtggcttacgcctgtaatcc

SEQ ID NO: 36523 - DNA, 19 bp, Artificial Sequence
  Synthetic: FXN 3 forward 9:69041972-69041994; SpCas9
tggcttacgcctgtaatcc

SEQ ID NO: 36524 - DNA, 18 bp, Artificial Sequence
  Synthetic: FXN 3 forward 9:69041973-69041994; SpCas9
ggcttacgcctgtaatcc

SEQ ID NO: 36525 - DNA, 25 bp, Artificial Sequence
  Synthetic: FXN 3 forward 9:69041974-69042002; SpCas9
gcttacgcctgtaatcccagcactt

SEQ ID NO: 36526 - DNA, 24 bp, Artificial Sequence
  Synthetic: FXN 3 forward 9:69041975-69042002; SpCas9
cttacgcctgtaatcccagcactt

SEQ ID NO: 36527 - DNA, 23 bp, Artificial Sequence
  Synthetic: FXN 3 forward 9:69041976-69042002; SpCas9
ttacgcctgtaatcccagcactt

SEQ ID NO: 36528 - DNA, 22 bp, Artificial Sequence
  Synthetic: FXN 3 forward 9:69041977-69042002; SpCas9
tacgcctgtaatcccagcactt

SEQ ID NO: 36529 - DNA, 21 bp, Artificial Sequence
  Synthetic: FXN 3 forward 9:69041978-69042002; SpCas9
acgcctgtaatcccagcactt

SEQ ID NO: 36530 - DNA, 20 bp, Artificial Sequence
  Synthetic: FXN 3 forward 9:69041979-69042002; SpCas9
cgcctgtaatcccagcactt

SEQ ID NO: 36531 - DNA, 19 bp, Artificial Sequence
  Synthetic: FXN 3 forward 9:69041980-69042002; SpCas9
gcctgtaatcccagcactt

SEQ ID NO: 36532 - DNA, 18 bp, Artificial Sequence
  Synthetic: FXN 3 forward 9:69041981-69042002; SpCas9
cctgtaatcccagcactt

SEQ ID NO: 36533 - DNA, 25 bp, Artificial Sequence
  Synthetic: FXN 3 forward 9:69041975-69042003; SpCas9
cttacgcctgtaatcccagcacttt

SEQ ID NO: 36534 - DNA, 24 bp, Artificial Sequence
  Synthetic: FXN 3 forward 9:69041976-69042003; SpCas9
ttacgcctgtaatcccagcacttt

SEQ ID NO: 36535 - DNA, 23 bp, Artificial Sequence
  Synthetic: FXN 3 forward 9:69041977-69042003; SpCas9
tacgcctgtaatcccagcacttt

SEQ ID NO: 36536 - DNA, 22 bp, Artificial Sequence
  Synthetic: FXN 3 forward 9:69041978-69042003; SpCas9
acgcctgtaatcccagcacttt

SEQ ID NO: 36537 - DNA, 21 bp, Artificial Sequence
  Synthetic: FXN 3 forward 9:69041979-69042003; SpCas9
cgcctgtaatcccagcacttt

SEQ ID NO: 36538 - DNA, 20 bp, Artificial Sequence
  Synthetic: FXN 3 forward 9:69041980-69042003; SpCas9
gcctgtaatcccagcacttt

SEQ ID NO: 36539 - DNA, 19 bp, Artificial Sequence
  Synthetic: FXN 3 forward 9:69041981-69042003; SpCas9
cctgtaatcccagcacttt

SEQ ID NO: 36540 - DNA, 18 bp, Artificial Sequence
  Synthetic: FXN 3 forward 9:69041982-69042003; SpCas9
ctgtaatcccagcacttt

SEQ ID NO: 36541 - DNA, 25 bp, Artificial Sequence
  Synthetic: FXN 3 reverse 9:69041975-69042003; SpCas9
cccaaagtgctgggattacaggcgt

SEQ ID NO: 36542 - DNA, 24 bp, Artificial Sequence
  Synthetic: FXN 3 reverse 9:69041976-69042003; SpCas9
ccaaagtgctgggattacaggcgt

SEQ ID NO: 36543 - DNA, 23 bp, Artificial Sequence
  Synthetic: FXN 3 reverse 9:69041977-69042003; SpCas9
caaagtgctgggattacaggcgt

SEQ ID NO: 36544 - DNA, 22 bp, Artificial Sequence
  Synthetic: FXN 3 reverse 9:69041978-69042003; SpCas9
aaagtgctgggattacaggcgt

SEQ ID NO: 36545 - DNA, 21 bp, Artificial Sequence
  Synthetic: FXN 3 reverse 9:69041979-69042003; SpCas9
aagtgctgggattacaggcgt

SEQ ID NO: 36546 - DNA, 20 bp, Artificial Sequence
  Synthetic: FXN 3 reverse 9:69041980-69042003; SpCas9
agtgctgggattacaggcgt

SEQ ID NO: 36547 - DNA, 19 bp, Artificial Sequence
  Synthetic: FXN 3 reverse 9:69041981-69042003; SpCas9
gtgctgggattacaggcgt

SEQ ID NO: 36548 - DNA, 18 bp, Artificial Sequence
  Synthetic: FXN 3 reverse 9:69041982-69042003; SpCas9
tgctgggattacaggcgt

SEQ ID NO: 36549 - DNA, 25 bp, Artificial Sequence
  Synthetic: FXN 3 forward 9:69041977-69042005; SpCas9
tacgcctgtaatcccagcactttgg

SEQ ID NO: 36550 - DNA, 24 bp, Artificial Sequence
  Synthetic: FXN 3 forward 9:69041978-69042005; SpCas9
acgcctgtaatcccagcactttgg

SEQ ID NO: 36551 - DNA, 23 bp, Artificial Sequence
  Synthetic: FXN 3 forward 9:69041979-69042005; SpCas9
cgcctgtaatcccagcactttgg

SEQ ID NO: 36552 - DNA, 22 bp, Artificial Sequence
  Synthetic: FXN 3 forward 9:69041980-69042005; SpCas9
gcctgtaatcccagcactttgg

SEQ ID NO: 36553 - DNA, 21 bp, Artificial Sequence
  Synthetic: FXN 3 forward 9:69041981-69042005; SpCas9
cctgtaatcccagcactttgg

SEQ ID NO: 36554 - DNA, 20 bp, Artificial Sequence
  Synthetic: FXN 3 forward 9:69041982-69042005; SpCas9
ctgtaatcccagcactttgg

SEQ ID NO: 36555 - DNA, 19 bp, Artificial Sequence
  Synthetic: FXN 3 forward 9:69041983-69042005; SpCas9
tgtaatcccagcactttgg

SEQ ID NO: 36556 - DNA, 18 bp, Artificial Sequence
  Synthetic: FXN 3 forward 9:69041984-69042005; SpCas9
gtaatcccagcactttgg

SEQ ID NO: 36557 - DNA, 25 bp, Artificial Sequence
  Synthetic: FXN 3 forward 9:69041978-69042006; SpCas9
acgcctgtaatcccagcactttggg

SEQ ID NO: 36558 - DNA, 24 bp, Artificial Sequence
  Synthetic: FXN 3 forward 9:69041979-69042006; SpCas9
cgcctgtaatcccagcactttggg

SEQ ID NO: 36559 - DNA, 23 bp, Artificial Sequence
  Synthetic: FXN 3 forward 9:69041980-69042006; SpCas9
gcctgtaatcccagcactttggg

SEQ ID NO: 36560 - DNA, 22 bp, Artificial Sequence
  Synthetic: FXN 3 forward 9:69041981-69042006; SpCas9
cctgtaatcccagcactttggg

SEQ ID NO: 36561 - DNA, 21 bp, Artificial Sequence
  Synthetic: FXN 3 forward 9:69041982-69042006; SpCas9
ctgtaatcccagcactttggg

SEQ ID NO: 36562 - DNA, 20 bp, Artificial Sequence
  Synthetic: FXN 3 forward 9:69041983-69042006; SpCas9
tgtaatcccagcactttggg

SEQ ID NO: 36563 - DNA, 19 bp, Artificial Sequence
  Synthetic: FXN 3 forward 9:69041984-69042006; SpCas9
gtaatcccagcactttggg

SEQ ID NO: 36564 - DNA, 18 bp, Artificial Sequence
  Synthetic: FXN 3 forward 9:69041985-69042006; SpCas9
taatcccagcactttggg

SEQ ID NO: 36565 - DNA, 25 bp, Artificial Sequence
  Synthetic: FXN 3 reverse 9:69041981-69042009; SpCas9
tggcctcccaaagtgctgggattac

SEQ ID NO: 36566 - DNA, 24 bp, Artificial Sequence
  Synthetic: FXN 3 reverse 9:69041982-69042009; SpCas9
ggcctcccaaagtgctgggattac

SEQ ID NO: 36567 - DNA, 23 bp, Artificial Sequence
  Synthetic: FXN 3 reverse 9:69041983-69042009; SpCas9
gcctcccaaagtgctgggattac

SEQ ID NO: 36568 - DNA, 22 bp, Artificial Sequence
  Synthetic: FXN 3 reverse 9:69041984-69042009; SpCas9
cctcccaaagtgctgggattac

SEQ ID NO: 36569 - DNA, 21 bp, Artificial Sequence
  Synthetic: FXN 3 reverse 9:69041985-69042009; SpCas9
ctcccaaagtgctgggattac

SEQ ID NO: 36570 - DNA, 20 bp, Artificial Sequence
  Synthetic: FXN 3 reverse 9:69041986-69042009; SpCas9
tcccaaagtgctgggattac

SEQ ID NO: 36571 - DNA, 19 bp, Artificial Sequence
  Synthetic: FXN 3 reverse 9:69041987-69042009; SpCas9
cccaaagtgctgggattac

SEQ ID NO: 36572 - DNA, 18 bp, Artificial Sequence
  Synthetic: FXN 3 reverse 9:69041988-69042009; SpCas9
ccaaagtgctgggattac

SEQ ID NO: 36573 - DNA, 25 bp, Artificial Sequence
  Synthetic: FXN 3 reverse 9:69041982-69042010; SpCas9
ttggcctcccaaagtgctgggatta

SEQ ID NO: 36574 - DNA, 24 bp, Artificial Sequence
  Synthetic: FXN 3 reverse 9:69041983-69042010; SpCas9
tggcctcccaaagtgctgggatta

SEQ ID NO: 36575 - DNA, 23 bp, Artificial Sequence
  Synthetic: FXN 3 reverse 9:69041984-69042010; SpCas9
ggcctcccaaagtgctgggatta

SEQ ID NO: 36576 - DNA, 22 bp, Artificial Sequence
  Synthetic: FXN 3 reverse 9:69041985-69042010; SpCas9
gcctcccaaagtgctgggatta

SEQ ID NO: 36577 - DNA, 21 bp, Artificial Sequence
  Synthetic: FXN 3 reverse 9:69041986-69042010; SpCas9
cctcccaaagtgctgggatta

SEQ ID NO: 36578 - DNA, 20 bp, Artificial Sequence
  Synthetic: FXN 3 reverse 9:69041987-69042010; SpCas9
ctcccaaagtgctgggatta

SEQ ID NO: 36579 - DNA, 19 bp, Artificial Sequence
  Synthetic: FXN 3 reverse 9:69041988-69042010; SpCas9
tcccaaagtgctgggatta

SEQ ID NO: 36580 - DNA, 18 bp, Artificial Sequence
  Synthetic: FXN 3 reverse 9:69041989-69042010; SpCas9
cccaaagtgctgggatta

SEQ ID NO: 36581 - DNA, 25 bp, Artificial Sequence
  Synthetic: FXN 3 forward 9:69041983-69042011; SpCas9
tgtaatcccagcactttgggaggcc

SEQ ID NO: 36582 - DNA, 24 bp, Artificial Sequence
  Synthetic: FXN 3 forward 9:69041984-69042011; SpCas9
gtaatcccagcactttgggaggcc

SEQ ID NO: 36583 - DNA, 23 bp, Artificial Sequence
  Synthetic: FXN 3 forward 9:69041985-69042011; SpCas9
taatcccagcactttgggaggcc

SEQ ID NO: 36584 - DNA, 22 bp, Artificial Sequence
  Synthetic: FXN 3 forward 9:69041986-69042011; SpCas9
aatcccagcactttgggaggcc

SEQ ID NO: 36585 - DNA, 21 bp, Artificial Sequence
  Synthetic: FXN 3 forward 9:69041987-69042011; SpCas9
atcccagcactttgggaggcc

SEQ ID NO: 36586 - DNA, 20 bp, Artificial Sequence
  Synthetic: FXN 3 forward 9:69041988-69042011; SpCas9
tcccagcactttgggaggcc

SEQ ID NO: 36587 - DNA, 19 bp, Artificial Sequence
  Synthetic: FXN 3 forward 9:69041989-69042011; SpCas9
cccagcactttgggaggcc

SEQ ID NO: 36588 - DNA, 18 bp, Artificial Sequence
  Synthetic: FXN 3 forward 9:69041990-69042011; SpCas9
ccagcactttgggaggcc

SEQ ID NO: 36589 - DNA, 25 bp, Artificial Sequence
  Synthetic: FXN 3 forward 9:69041984-69042012; SpCas9
gtaatcccagcactttgggaggcca

SEQ ID NO: 36590 - DNA, 24 bp, Artificial Sequence
  Synthetic: FXN 3 forward 9:69041985-69042012; SpCas9
taatcccagcactttgggaggcca

SEQ ID NO: 36591 - DNA, 23 bp, Artificial Sequence
  Synthetic: FXN 3 forward 9:69041986-69042012; SpCas9
aatcccagcactttgggaggcca

SEQ ID NO: 36592 - DNA, 22 bp, Artificial Sequence
  Synthetic: FXN 3 forward 9:69041987-69042012; SpCas9
atcccagcactttgggaggcca

SEQ ID NO: 36593 - DNA, 21 bp, Artificial Sequence
  Synthetic: FXN 3 forward 9:69041988-69042012; SpCas9
tcccagcactttgggaggcca

SEQ ID NO: 36594 - DNA, 20 bp, Artificial Sequence
  Synthetic: FXN 3 forward 9:69041989-69042012; SpCas9
cccagcactttgggaggcca

SEQ ID NO: 36595 - DNA, 19 bp, Artificial Sequence
  Synthetic: FXN 3 forward 9:69041990-69042012; SpCas9
ccagcactttgggaggcca

SEQ ID NO: 36596 - DNA, 18 bp, Artificial Sequence
  Synthetic: FXN 3 forward 9:69041991-69042012; SpCas9
cagcactttgggaggcca

SEQ ID NO: 36597 - DNA, 25 bp, Artificial Sequence
  Synthetic: FXN 3 forward 9:69041987-69042015; SpCas9
atcccagcactttgggaggccaagg

SEQ ID NO: 36598 - DNA, 24 bp, Artificial Sequence
  Synthetic: FXN 3 forward 9:69041988-69042015; SpCas9
tcccagcactttgggaggccaagg

SEQ ID NO: 36599 - DNA, 23 bp, Artificial Sequence
  Synthetic: FXN 3 forward 9:69041989-69042015; SpCas9
cccagcactttgggaggccaagg

SEQ ID NO: 36600 - DNA, 22 bp, Artificial Sequence
  Synthetic: FXN 3 forward 9:69041990-69042015; SpCas9
ccagcactttgggaggccaagg

SEQ ID NO: 36601 - DNA, 21 bp, Artificial Sequence
  Synthetic: FXN 3 forward 9:69041991-69042015; SpCas9
cagcactttgggaggccaagg

SEQ ID NO: 36602 - DNA, 20 bp, Artificial Sequence
  Synthetic: FXN 3 forward 9:69041992-69042015; SpCas9
agcactttgggaggccaagg

SEQ ID NO: 36603 - DNA, 19 bp, Artificial Sequence
  Synthetic: FXN 3 forward 9:69041993-69042015; SpCas9
gcactttgggaggccaagg

SEQ ID NO: 36604 - DNA, 18 bp, Artificial Sequence
  Synthetic: FXN 3 forward 9:69041994-69042015; SpCas9
cactttgggaggccaagg

SEQ ID NO: 36605 - DNA, 25 bp, Artificial Sequence
  Synthetic: FXN 3 forward 9:69041988-69042016; SpCas9
tcccagcactttgggaggccaaggt

SEQ ID NO: 36606 - DNA, 24 bp, Artificial Sequence
  Synthetic: FXN 3 forward 9:69041989-69042016; SpCas9
cccagcactttgggaggccaaggt

SEQ ID NO: 36607 - DNA, 23 bp, Artificial Sequence
  Synthetic: FXN 3 forward 9:69041990-69042016; SpCas9
ccagcactttgggaggccaaggt

SEQ ID NO: 36608 - DNA, 22 bp, Artificial Sequence
  Synthetic: FXN 3 forward 9:69041991-69042016; SpCas9
cagcactttgggaggccaaggt

SEQ ID NO: 36609 - DNA, 21 bp, Artificial Sequence
  Synthetic: FXN 3 forward 9:69041992-69042016; SpCas9
agcactttgggaggccaaggt

SEQ ID NO: 36610 - DNA, 20 bp, Artificial Sequence
  Synthetic: FXN 3 forward 9:69041993-69042016; SpCas9
gcactttgggaggccaaggt

SEQ ID NO: 36611 - DNA, 19 bp, Artificial Sequence
  Synthetic: FXN 3 forward 9:69041994-69042016; SpCas9
cactttgggaggccaaggt

SEQ ID NO: 36612 - DNA, 18 bp, Artificial Sequence
  Synthetic: FXN 3 forward 9:69041995-69042016; SpCas9
actttgggaggccaaggt

SEQ ID NO: 36613 - DNA, 25 bp, Artificial Sequence
  Synthetic: FXN 3 reverse 9:69041989-69042017; SpCas9
acccaccttggcctcccaaagtgct

SEQ ID NO: 36614 - DNA, 24 bp, Artificial Sequence
  Synthetic: FXN 3 reverse 9:69041990-69042017; SpCas9
cccaccttggcctcccaaagtgct

SEQ ID NO: 36615 - DNA, 23 bp, Artificial Sequence
  Synthetic: FXN 3 reverse 9:69041991-69042017; SpCas9
ccaccttggcctcccaaagtgct

SEQ ID NO: 36616 - DNA, 22 bp, Artificial Sequence
  Synthetic: FXN 3 reverse 9:69041992-69042017; SpCas9
caccttggcctcccaaagtgct

SEQ ID NO: 36617 - DNA, 21 bp, Artificial Sequence
  Synthetic: FXN 3 reverse 9:69041993-69042017; SpCas9
accttggcctcccaaagtgct

SEQ ID NO: 36618 - DNA, 20 bp, Artificial Sequence
  Synthetic: FXN 3 reverse 9:69041994-69042017; SpCas9
ccttggcctcccaaagtgct

SEQ ID NO: 36619 - DNA, 19 bp, Artificial Sequence
  Synthetic: FXN 3 reverse 9:69041995-69042017; SpCas9
cttggcctcccaaagtgct

SEQ ID NO: 36620 - DNA, 18 bp, Artificial Sequence
  Synthetic: FXN 3 reverse 9:69041996-69042017; SpCas9
ttggcctcccaaagtgct

SEQ ID NO: 36621 - DNA, 25 bp, Artificial Sequence
  Synthetic: FXN 3 reverse 9:69041990-69042018; SpCas9
cacccaccttggcctcccaaagtgc

SEQ ID NO: 36622 - DNA, 24 bp, Artificial Sequence
  Synthetic: FXN 3 reverse 9:69041991-69042018; SpCas9
acccaccttggcctcccaaagtgc

SEQ ID NO: 36623 - DNA, 23 bp, Artificial Sequence
  Synthetic: FXN 3 reverse 9:69041992-69042018; SpCas9
cccaccttggcctcccaaagtgc

SEQ ID NO: 36624 - DNA, 22 bp, Artificial Sequence
  Synthetic: FXN 3 reverse 9:69041993-69042018; SpCas9
ccaccttggcctcccaaagtgc

SEQ ID NO: 36625 - DNA, 21 bp, Artificial Sequence
  Synthetic: FXN 3 reverse 9:69041994-69042018; SpCas9
caccttggcctcccaaagtgc

SEQ ID NO: 36626 - DNA, 20 bp, Artificial Sequence
  Synthetic: FXN 3 reverse 9:69041995-69042018; SpCas9
accttggcctcccaaagtgc

SEQ ID NO: 36627 - DNA, 19 bp, Artificial Sequence
  Synthetic: FXN 3 reverse 9:69041996-69042018; SpCas9
ccttggcctcccaaagtgc

SEQ ID NO: 36628 - DNA, 18 bp, Artificial Sequence
  Synthetic: FXN 3 reverse 9:69041997-69042018; SpCas9
cttggcctcccaaagtgc

SEQ ID NO: 36629 - DNA, 25 bp, Artificial Sequence
  Synthetic: FXN 3 forward 9:69041991-69042019; SpCas9
cagcactttgggaggccaaggtggg

SEQ ID NO: 36630 - DNA, 24 bp, Artificial Sequence
  Synthetic: FXN 3 forward 9:69041992-69042019; SpCas9
agcactttgggaggccaaggtggg

SEQ ID NO: 36631 - DNA, 23 bp, Artificial Sequence
  Synthetic: FXN 3 forward 9:69041993-69042019; SpCas9
gcactttgggaggccaaggtggg

SEQ ID NO: 36632 - DNA, 22 bp, Artificial Sequence
  Synthetic: FXN 3 forward 9:69041994-69042019; SpCas9
cactttgggaggccaaggtggg

SEQ ID NO: 36633 - DNA, 21 bp, Artificial Sequence
  Synthetic: FXN 3 forward 9:69041995-69042019; SpCas9
actttgggaggccaaggtggg

SEQ ID NO: 36634 - DNA, 20 bp, Artificial Sequence
  Synthetic: FXN 3 forward 9:69041996-69042019; SpCas9
ctttgggaggccaaggtggg

SEQ ID NO: 36635 - DNA, 19 bp, Artificial Sequence
  Synthetic: FXN 3 forward 9:69041997-69042019; SpCas9
tttgggaggccaaggtggg

SEQ ID NO: 36636 - DNA, 18 bp, Artificial Sequence
  Synthetic: FXN 3 forward 9:69041998-69042019; SpCas9
ttgggaggccaaggtggg

SEQ ID NO: 36637 - DNA, 25 bp, Artificial Sequence
  Synthetic: FXN 3 reverse 9:69041996-69042024; SpCas9
atgatccacccaccttggcctccca

SEQ ID NO: 36638 - DNA, 24 bp, Artificial Sequence
  Synthetic: FXN 3 reverse 9:69041997-69042024; SpCas9
tgatccacccaccttggcctccca

SEQ ID NO: 36639 - DNA, 23 bp, Artificial Sequence
  Synthetic: FXN 3 reverse 9:69041998-69042024; SpCas9
gatccacccaccttggcctccca

SEQ ID NO: 36640 - DNA, 22 bp, Artificial Sequence
  Synthetic: FXN 3 reverse 9:69041999-69042024; SpCas9
atccacccaccttggcctccca

SEQ ID NO: 36641 - DNA, 21 bp, Artificial Sequence
  Synthetic: FXN 3 reverse 9:69042000-69042024; SpCas9
tccacccaccttggcctccca

SEQ ID NO: 36642 - DNA, 20 bp, Artificial Sequence
  Synthetic: FXN 3 reverse 9:69042001-69042024; SpCas9
ccacccaccttggcctccca

SEQ ID NO: 36643 - DNA, 19 bp, Artificial Sequence
  Synthetic: FXN 3 reverse 9:69042002-69042024; SpCas9
cacccaccttggcctccca

SEQ ID NO: 36644 - DNA, 18 bp, Artificial Sequence
  Synthetic: FXN 3 reverse 9:69042003-69042024; SpCas9
acccaccttggcctccca

SEQ ID NO: 36645 - DNA, 25 bp, Artificial Sequence
  Synthetic: FXN 3 forward 9:69041999-69042027; SpCas9
tgggaggccaaggtgggtggatcat

SEQ ID NO: 36646 - DNA, 24 bp, Artificial Sequence
  Synthetic: FXN 3 forward 9:69042000-69042027; SpCas9
gggaggccaaggtgggtggatcat

SEQ ID NO: 36647 - DNA, 23 bp, Artificial Sequence
  Synthetic: FXN 3 forward 9:69042001-69042027; SpCas9
ggaggccaaggtgggtggatcat

SEQ ID NO: 36648 - DNA, 22 bp, Artificial Sequence
  Synthetic: FXN 3 forward 9:69042002-69042027; SpCas9
gaggccaaggtgggtggatcat

SEQ ID NO: 36649 - DNA, 21 bp, Artificial Sequence
  Synthetic: FXN 3 forward 9:69042003-69042027; SpCas9
aggccaaggtgggtggatcat

SEQ ID NO: 36650 - DNA, 20 bp, Artificial Sequence
  Synthetic: FXN 3 forward 9:69042004-69042027; SpCas9
ggccaaggtgggtggatcat

SEQ ID NO: 36651 - DNA, 19 bp, Artificial Sequence
  Synthetic: FXN 3 forward 9:69042005-69042027; SpCas9
gccaaggtgggtggatcat

SEQ ID NO: 36652 - DNA, 18 bp, Artificial Sequence
  Synthetic: FXN 3 forward 9:69042006-69042027; SpCas9
ccaaggtgggtggatcat

SEQ ID NO: 36653 - DNA, 25 bp, Artificial Sequence
  Synthetic: FXN 3 forward 9:69042000-69042028; SpCas9
gggaggccaaggtgggtggatcatg

SEQ ID NO: 36654 - DNA, 24 bp, Artificial Sequence
  Synthetic: FXN 3 forward 9:69042001-69042028; SpCas9
ggaggccaaggtgggtggatcatg

SEQ ID NO: 36655 - DNA, 23 bp, Artificial Sequence
  Synthetic: FXN 3 forward 9:69042002-69042028; SpCas9
gaggccaaggtgggtggatcatg

SEQ ID NO: 36656 - DNA, 22 bp, Artificial Sequence
  Synthetic: FXN 3 forward 9:69042003-69042028; SpCas9
aggccaaggtgggtggatcatg

SEQ ID NO: 36657 - DNA, 21 bp, Artificial Sequence
  Synthetic: FXN 3 forward 9:69042004-69042028; SpCas9
ggccaaggtgggtggatcatg

SEQ ID NO: 36658 - DNA, 20 bp, Artificial Sequence
  Synthetic: FXN 3 forward 9:69042005-69042028; SpCas9
gccaaggtgggtggatcatg

SEQ ID NO: 36659 - DNA, 19 bp, Artificial Sequence
  Synthetic: FXN 3 forward 9:69042006-69042028; SpCas9
ccaaggtgggtggatcatg

SEQ ID NO: 36660 - DNA, 18 bp, Artificial Sequence
  Synthetic: FXN 3 forward 9:69042007-69042028; SpCas9
caaggtgggtggatcatg

SEQ ID NO: 36661 - DNA, 25 bp, Artificial Sequence
  Synthetic: FXN 3 forward 9:69042004-69042032; SpCas9
ggccaaggtgggtggatcatgaggt

SEQ ID NO: 36662 - DNA, 24 bp, Artificial Sequence
  Synthetic: FXN 3 forward 9:69042005-69042032; SpCas9
gccaaggtgggtggatcatgaggt

SEQ ID NO: 36663 - DNA, 23 bp, Artificial Sequence
  Synthetic: FXN 3 forward 9:69042006-69042032; SpCas9
ccaaggtgggtggatcatgaggt

SEQ ID NO: 36664 - DNA, 22 bp, Artificial Sequence
  Synthetic: FXN 3 forward 9:69042007-69042032; SpCas9
caaggtgggtggatcatgaggt

SEQ ID NO: 36665 - DNA, 21 bp, Artificial Sequence
  Synthetic: FXN 3 forward 9:69042008-69042032; SpCas9
aaggtgggtggatcatgaggt

SEQ ID NO: 36666 - DNA, 20 bp, Artificial Sequence
  Synthetic: FXN 3 forward 9:69042009-69042032; SpCas9
aggtgggtggatcatgaggt

SEQ ID NO: 36667 - DNA, 19 bp, Artificial Sequence
  Synthetic: FXN 3 forward 9:69042010-69042032; SpCas9
ggtgggtggatcatgaggt

SEQ ID NO: 36668 - DNA, 18 bp, Artificial Sequence
  Synthetic: FXN 3 forward 9:69042011-69042032; SpCas9
gtgggtggatcatgaggt

SEQ ID NO: 36669 - DNA, 25 bp, Artificial Sequence
  Synthetic: FXN 3 forward 9:69042005-69042033; SpCas9
gccaaggtgggtggatcatgaggtc

SEQ ID NO: 36670 - DNA, 24 bp, Artificial Sequence
  Synthetic: FXN 3 forward 9:69042006-69042033; SpCas9
ccaaggtgggtggatcatgaggtc

SEQ ID NO: 36671 - DNA, 23 bp, Artificial Sequence
  Synthetic: FXN 3 forward 9:69042007-69042033; SpCas9
caaggtgggtggatcatgaggtc

SEQ ID NO: 36672 - DNA, 22 bp, Artificial Sequence
  Synthetic: FXN 3 forward 9:69042008-69042033; SpCas9
aaggtgggtggatcatgaggtc

SEQ ID NO: 36673 - DNA, 21 bp, Artificial Sequence
  Synthetic: FXN 3 forward 9:69042009-69042033; SpCas9
aggtgggtggatcatgaggtc

SEQ ID NO: 36674 - DNA, 20 bp, Artificial Sequence
  Synthetic: FXN 3 forward 9:69042010-69042033; SpCas9
ggtgggtggatcatgaggtc

SEQ ID NO: 36675 - DNA, 19 bp, Artificial Sequence
  Synthetic: FXN 3 forward 9:69042011-69042033; SpCas9
gtgggtggatcatgaggtc

SEQ ID NO: 36676 - DNA, 18 bp, Artificial Sequence
  Synthetic: FXN 3 forward 9:69042012-69042033; SpCas9
tgggtggatcatgaggtc

SEQ ID NO: 36677 - DNA, 25 bp, Artificial Sequence
  Synthetic: FXN 3 reverse 9:69042006-69042034; SpCas9
tcctgacctcatgatccacccacct

SEQ ID NO: 36678 - DNA, 24 bp, Artificial Sequence
  Synthetic: FXN 3 reverse 9:69042007-69042034; SpCas9
cctgacctcatgatccacccacct

SEQ ID NO: 36679 - DNA, 23 bp, Artificial Sequence
  Synthetic: FXN 3 reverse 9:69042008-69042034; SpCas9
ctgacctcatgatccacccacct

SEQ ID NO: 36680 - DNA, 22 bp, Artificial Sequence
  Synthetic: FXN 3 reverse 9:69042009-69042034; SpCas9
tgacctcatgatccacccacct

SEQ ID NO: 36681 - DNA, 21 bp, Artificial Sequence
  Synthetic: FXN 3 reverse 9:69042010-69042034; SpCas9
gacctcatgatccacccacct

SEQ ID NO: 36682 - DNA, 20 bp, Artificial Sequence
  Synthetic: FXN 3 reverse 9:69042011-69042034; SpCas9
acctcatgatccacccacct

SEQ ID NO: 36683 - DNA, 19 bp, Artificial Sequence
  Synthetic: FXN 3 reverse 9:69042012-69042034; SpCas9
cctcatgatccacccacct

SEQ ID NO: 36684 - DNA, 18 bp, Artificial Sequence
  Synthetic: FXN 3 reverse 9:69042013-69042034; SpCas9
ctcatgatccacccacct

SEQ ID NO: 36685 - DNA, 25 bp, Artificial Sequence
  Synthetic: FXN 3 forward 9:69042007-69042035; SpCas9
caaggtgggtggatcatgaggtcag

SEQ ID NO: 36686 - DNA, 24 bp, Artificial Sequence
  Synthetic: FXN 3 forward 9:69042008-69042035; SpCas9
aaggtgggtggatcatgaggtcag

SEQ ID NO: 36687 - DNA, 23 bp, Artificial Sequence
  Synthetic: FXN 3 forward 9:69042009-69042035; SpCas9
aggtgggtggatcatgaggtcag

SEQ ID NO: 36688 - DNA, 22 bp, Artificial Sequence
  Synthetic: FXN 3 forward 9:69042010-69042035; SpCas9
ggtgggtggatcatgaggtcag

SEQ ID NO: 36689 - DNA, 21 bp, Artificial Sequence
  Synthetic: FXN 3 forward 9:69042011-69042035; SpCas9
gtgggtggatcatgaggtcag

SEQ ID NO: 36690 - DNA, 20 bp, Artificial Sequence
  Synthetic: FXN 3 forward 9:69042012-69042035; SpCas9
tgggtggatcatgaggtcag

SEQ ID NO: 36691 - DNA, 19 bp, Artificial Sequence
  Synthetic: FXN 3 forward 9:69042013-69042035; SpCas9
gggtggatcatgaggtcag

SEQ ID NO: 36692 - DNA, 18 bp, Artificial Sequence
  Synthetic: FXN 3 forward 9:69042014-69042035; SpCas9
ggtggatcatgaggtcag

SEQ ID NO: 36693 - DNA, 25 bp, Artificial Sequence
  Synthetic: FXN 3 forward 9:69042011-69042039; SpCas9
gtgggtggatcatgaggtcaggagt

SEQ ID NO: 36694 - DNA, 24 bp, Artificial Sequence
  Synthetic: FXN 3 forward 9:69042012-69042039; SpCas9
tgggtggatcatgaggtcaggagt

SEQ ID NO: 36695 - DNA, 23 bp, Artificial Sequence
  Synthetic: FXN 3 forward 9:69042013-69042039; SpCas9
gggtggatcatgaggtcaggagt

SEQ ID NO: 36696 - DNA, 22 bp, Artificial Sequence
  Synthetic: FXN 3 forward 9:69042014-69042039; SpCas9
ggtggatcatgaggtcaggagt

SEQ ID NO: 36697 - DNA, 21 bp, Artificial Sequence
  Synthetic: FXN 3 forward 9:69042015-69042039; SpCas9
gtggatcatgaggtcaggagt

SEQ ID NO: 36698 - DNA, 20 bp, Artificial Sequence
  Synthetic: FXN 3 forward 9:69042016-69042039; SpCas9
tggatcatgaggtcaggagt

SEQ ID NO: 36699 - DNA, 19 bp, Artificial Sequence
  Synthetic: FXN 3 forward 9:69042017-69042039; SpCas9
ggatcatgaggtcaggagt

SEQ ID NO: 36700 - DNA, 18 bp, Artificial Sequence
  Synthetic: FXN 3 forward 9:69042018-69042039; SpCas9
gatcatgaggtcaggagt

SEQ ID NO: 36701 - DNA, 25 bp, Artificial Sequence
  Synthetic: FXN 3 forward 9:69042016-69042044; SpCas9
tggatcatgaggtcaggagtgagac

SEQ ID NO: 36702 - DNA, 24 bp, Artificial Sequence
  Synthetic: FXN 3 forward 9:69042017-69042044; SpCas9
ggatcatgaggtcaggagtgagac

SEQ ID NO: 36703 - DNA, 23 bp, Artificial Sequence
  Synthetic: FXN 3 forward 9:69042018-69042044; SpCas9
gatcatgaggtcaggagtgagac

SEQ ID NO: 36704 - DNA, 22 bp, Artificial Sequence
  Synthetic: FXN 3 forward 9:69042019-69042044; SpCas9
atcatgaggtcaggagtgagac

SEQ ID NO: 36705 - DNA, 21 bp, Artificial Sequence
  Synthetic: FXN 3 forward 9:69042020-69042044; SpCas9
tcatgaggtcaggagtgagac

SEQ ID NO: 36706 - DNA, 20 bp, Artificial Sequence
  Synthetic: FXN 3 forward 9:69042021-69042044; SpCas9
catgaggtcaggagtgagac

SEQ ID NO: 36707 - DNA, 19 bp, Artificial Sequence
  Synthetic: FXN 3 forward 9:69042022-69042044; SpCas9
atgaggtcaggagtgagac

SEQ ID NO: 36708 - DNA, 18 bp, Artificial Sequence
  Synthetic: FXN 3 forward 9:69042023-69042044; SpCas9
tgaggtcaggagtgagac

SEQ ID NO: 36709 - DNA, 25 bp, Artificial Sequence
  Synthetic: FXN 3 reverse 9:69042040-69042068; SpCas9
acaggtttcagcatgttggtcaggc

SEQ ID NO: 36710 - DNA, 24 bp, Artificial Sequence
  Synthetic: FXN 3 reverse 9:69042041-69042068; SpCas9
caggtttcagcatgttggtcaggc

SEQ ID NO: 36711 - DNA, 23 bp, Artificial Sequence
  Synthetic: FXN 3 reverse 9:69042042-69042068; SpCas9
aggtttcagcatgttggtcaggc

SEQ ID NO: 36712 - DNA, 22 bp, Artificial Sequence
  Synthetic: FXN 3 reverse 9:69042043-69042068; SpCas9
ggtttcagcatgttggtcaggc

SEQ ID NO: 36713 - DNA, 21 bp, Artificial Sequence
  Synthetic: FXN 3 reverse 9:69042044-69042068; SpCas9
gtttcagcatgttggtcaggc

SEQ ID NO: 36714 - DNA, 20 bp, Artificial Sequence
  Synthetic: FXN 3 reverse 9:69042045-69042068; SpCas9
tttcagcatgttggtcaggc

SEQ ID NO: 36715 - DNA, 19 bp, Artificial Sequence
  Synthetic: FXN 3 reverse 9:69042046-69042068; SpCas9
ttcagcatgttggtcaggc

SEQ ID NO: 36716 - DNA, 18 bp, Artificial Sequence
  Synthetic: FXN 3 reverse 9:69042047-69042068; SpCas9
tcagcatgttggtcaggc

SEQ ID NO: 36717 - DNA, 25 bp, Artificial Sequence
  Synthetic: FXN 3 reverse 9:69042044-69042072; SpCas9
agagacaggtttcagcatgttggtc

SEQ ID NO: 36718 - DNA, 24 bp, Artificial Sequence
  Synthetic: FXN 3 reverse 9:69042045-69042072; SpCas9
gagacaggtttcagcatgttggtc

SEQ ID NO: 36719 - DNA, 23 bp, Artificial Sequence
  Synthetic: FXN 3 reverse 9:69042046-69042072; SpCas9
agacaggtttcagcatgttggtc

SEQ ID NO: 36720 - DNA, 22 bp, Artificial Sequence
  Synthetic: FXN 3 reverse 9:69042047-69042072; SpCas9
gacaggtttcagcatgttggtc

SEQ ID NO: 36721 - DNA, 21 bp, Artificial Sequence
  Synthetic: FXN 3 reverse 9:69042048-69042072; SpCas9
acaggtttcagcatgttggtc

SEQ ID NO: 36722 - DNA, 20 bp, Artificial Sequence
  Synthetic: FXN 3 reverse 9:69042049-69042072; SpCas9
caggtttcagcatgttggtc

SEQ ID NO: 36723 - DNA, 19 bp, Artificial Sequence
  Synthetic: FXN 3 reverse 9:69042050-69042072; SpCas9
aggtttcagcatgttggtc

SEQ ID NO: 36724 - DNA, 18 bp, Artificial Sequence
  Synthetic: FXN 3 reverse 9:69042051-69042072; SpCas9
ggtttcagcatgttggtc

SEQ ID NO: 36725 - DNA, 25 bp, Artificial Sequence
  Synthetic: FXN 3 reverse 9:69042045-69042073; SpCas9
gagagacaggtttcagcatgttggt

SEQ ID NO: 36726 - DNA, 24 bp, Artificial Sequence
  Synthetic: FXN 3 reverse 9:69042046-69042073; SpCas9
agagacaggtttcagcatgttggt

SEQ ID NO: 36727 - DNA, 23 bp, Artificial Sequence
  Synthetic: FXN 3 reverse 9:69042047-69042073; SpCas9
gagacaggtttcagcatgttggt

SEQ ID NO: 36728 - DNA, 22 bp, Artificial Sequence
  Synthetic: FXN 3 reverse 9:69042048-69042073; SpCas9
agacaggtttcagcatgttggt

SEQ ID NO: 36729 - DNA, 21 bp, Artificial Sequence
  Synthetic: FXN 3 reverse 9:69042049-69042073; SpCas9
gacaggtttcagcatgttggt

SEQ ID NO: 36730 - DNA, 20 bp, Artificial Sequence
  Synthetic: FXN 3 reverse 9:69042050-69042073; SpCas9
acaggtttcagcatgttggt

SEQ ID NO: 36731 - DNA, 19 bp, Artificial Sequence
  Synthetic: FXN 3 reverse 9:69042051-69042073; SpCas9
caggtttcagcatgttggt

SEQ ID NO: 36732 - DNA, 18 bp, Artificial Sequence
  Synthetic: FXN 3 reverse 9:69042052-69042073; SpCas9
aggtttcagcatgttggt

SEQ ID NO: 36733 - DNA, 25 bp, Artificial Sequence
  Synthetic: FXN 3 reverse 9:69042049-69042077; SpCas9
ttaggagagacaggtttcagcatgt

SEQ ID NO: 36734 - DNA, 24 bp, Artificial Sequence
  Synthetic: FXN 3 reverse 9:69042050-69042077; SpCas9
taggagagacaggtttcagcatgt

SEQ ID NO: 36735 - DNA, 23 bp, Artificial Sequence
  Synthetic: FXN 3 reverse 9:69042051-69042077; SpCas9
aggagagacaggtttcagcatgt

SEQ ID NO: 36736 - DNA, 22 bp, Artificial Sequence
  Synthetic: FXN 3 reverse 9:69042052-69042077; SpCas9
ggagagacaggtttcagcatgt

SEQ ID NO: 36737 - DNA, 21 bp, Artificial Sequence
  Synthetic: FXN 3 reverse 9:69042053-69042077; SpCas9
gagagacaggtttcagcatgt

SEQ ID NO: 36738 - DNA, 20 bp, Artificial Sequence
  Synthetic: FXN 3 reverse 9:69042054-69042077; SpCas9
agagacaggtttcagcatgt

SEQ ID NO: 36739 - DNA, 19 bp, Artificial Sequence
  Synthetic: FXN 3 reverse 9:69042055-69042077; SpCas9
gagacaggtttcagcatgt

SEQ ID NO: 36740 - DNA, 18 bp, Artificial Sequence
  Synthetic: FXN 3 reverse 9:69042056-69042077; SpCas9
agacaggtttcagcatgt

SEQ ID NO: 36741 - DNA, 25 bp, Artificial Sequence
  Synthetic: FXN 3 reverse 9:69042057-69042085; SpCas9
ttgtgtttttaggagagacaggttt

SEQ ID NO: 36742 - DNA, 24 bp, Artificial Sequence
  Synthetic: FXN 3 reverse 9:69042058-69042085; SpCas9
tgtgtttttaggagagacaggttt

SEQ ID NO: 36743 - DNA, 23 bp, Artificial Sequence
  Synthetic: FXN 3 reverse 9:69042059-69042085; SpCas9
gtgtttttaggagagacaggttt

SEQ ID NO: 36744 - DNA, 22 bp, Artificial Sequence
  Synthetic: FXN 3 reverse 9:69042060-69042085; SpCas9
tgtttttaggagagacaggttt

SEQ ID NO: 36745 - DNA, 21 bp, Artificial Sequence
  Synthetic: FXN 3 reverse 9:69042061-69042085; SpCas9
gtttttaggagagacaggttt

SEQ ID NO: 36746 - DNA, 20 bp, Artificial Sequence
  Synthetic: FXN 3 reverse 9:69042062-69042085; SpCas9
tttttaggagagacaggttt

SEQ ID NO: 36747 - DNA, 19 bp, Artificial Sequence
  Synthetic: FXN 3 reverse 9:69042063-69042085; SpCas9
ttttaggagagacaggttt

SEQ ID NO: 36748 - DNA, 18 bp, Artificial Sequence
  Synthetic: FXN 3 reverse 9:69042064-69042085; SpCas9
tttaggagagacaggttt

SEQ ID NO: 36749 - DNA, 25 bp, Artificial Sequence
  Synthetic: FXN 3 reverse 9:69042063-69042091; SpCas9
taatttttgtgtttttaggagagac

SEQ ID NO: 36750 - DNA, 24 bp, Artificial Sequence
  Synthetic: FXN 3 reverse 9:69042064-69042091; SpCas9
aatttttgtgtttttaggagagac

SEQ ID NO: 36751 - DNA, 23 bp, Artificial Sequence
  Synthetic: FXN 3 reverse 9:69042065-69042091; SpCas9
atttttgtgtttttaggagagac

SEQ ID NO: 36752 - DNA, 22 bp, Artificial Sequence
  Synthetic: FXN 3 reverse 9:69042066-69042091; SpCas9
tttttgtgtttttaggagagac

SEQ ID NO: 36753 - DNA, 21 bp, Artificial Sequence
  Synthetic: FXN 3 reverse 9:69042067-69042091; SpCas9
ttttgtgtttttaggagagac

SEQ ID NO: 36754 - DNA, 20 bp, Artificial Sequence
  Synthetic: FXN 3 reverse 9:69042068-69042091; SpCas9
tttgtgtttttaggagagac

SEQ ID NO: 36755 - DNA, 19 bp, Artificial Sequence
  Synthetic: FXN 3 reverse 9:69042069-69042091; SpCas9
ttgtgtttttaggagagac

SEQ ID NO: 36756 - DNA, 18 bp, Artificial Sequence
  Synthetic: FXN 3 reverse 9:69042070-69042091; SpCas9
tgtgtttttaggagagac

SEQ ID NO: 36757 - DNA, 25 bp, Artificial Sequence
  Synthetic: FXN 3 forward 9:69042064-69042092; SpCas9
ctgtctctcctaaaaacacaaaaat

SEQ ID NO: 36758 - DNA, 24 bp, Artificial Sequence
  Synthetic: FXN 3 forward 9:69042065-69042092; SpCas9
tgtctctcctaaaaacacaaaaat

SEQ ID NO: 36759 - DNA, 23 bp, Artificial Sequence
  Synthetic: FXN 3 forward 9:69042066-69042092; SpCas9
gtctctcctaaaaacacaaaaat

SEQ ID NO: 36760 - DNA, 22 bp, Artificial Sequence
  Synthetic: FXN 3 forward 9:69042067-69042092; SpCas9
tctctcctaaaaacacaaaaat

SEQ ID NO: 36761 - DNA, 21 bp, Artificial Sequence
  Synthetic: FXN 3 forward 9:69042068-69042092; SpCas9
ctctcctaaaaacacaaaaat

SEQ ID NO: 36762 - DNA, 20 bp, Artificial Sequence
  Synthetic: FXN 3 forward 9:69042069-69042092; SpCas9
tctcctaaaaacacaaaaat

SEQ ID NO: 36763 - DNA, 19 bp, Artificial Sequence
  Synthetic: FXN 3 forward 9:69042070-69042092; SpCas9
ctcctaaaaacacaaaaat

SEQ ID NO: 36764 - DNA, 18 bp, Artificial Sequence
  Synthetic: FXN 3 forward 9:69042071-69042092; SpCas9
tcctaaaaacacaaaaat

SEQ ID NO: 36765 - DNA, 25 bp, Artificial Sequence
  Synthetic: FXN 3 reverse 9:69042064-69042092; SpCas9
ctaatttttgtgtttttaggagaga

SEQ ID NO: 36766 - DNA, 24 bp, Artificial Sequence
  Synthetic: FXN 3 reverse 9:69042065-69042092; SpCas9
taatttttgtgtttttaggagaga

SEQ ID NO: 36767 - DNA, 23 bp, Artificial Sequence
  Synthetic: FXN 3 reverse 9:69042066-69042092; SpCas9
aatttttgtgtttttaggagaga

SEQ ID NO: 36768 - DNA, 22 bp, Artificial Sequence
  Synthetic: FXN 3 reverse 9:69042067-69042092; SpCas9
atttttgtgtttttaggagaga

SEQ ID NO: 36769 - DNA, 21 bp, Artificial Sequence
  Synthetic: FXN 3 reverse 9:69042068-69042092; SpCas9
tttttgtgtttttaggagaga

SEQ ID NO: 36770 - DNA, 20 bp, Artificial Sequence
  Synthetic: FXN 3 reverse 9:69042069-69042092; SpCas9
ttttgtgtttttaggagaga

SEQ ID NO: 36771 - DNA, 19 bp, Artificial Sequence
  Synthetic: FXN 3 reverse 9:69042070-69042092; SpCas9
tttgtgtttttaggagaga

SEQ ID NO: 36772 - DNA, 18 bp, Artificial Sequence
  Synthetic: FXN 3 reverse 9:69042071-69042092; SpCas9
ttgtgtttttaggagaga

SEQ ID NO: 36773 - DNA, 25 bp, Artificial Sequence
  Synthetic: FXN 3 forward 9:69042068-69042096; SpCas9
ctctcctaaaaacacaaaaattagc

SEQ ID NO: 36774 - DNA, 24 bp, Artificial Sequence
  Synthetic: FXN 3 forward 9:69042069-69042096; SpCas9
tctcctaaaaacacaaaaattagc

SEQ ID NO: 36775 - DNA, 23 bp, Artificial Sequence
  Synthetic: FXN 3 forward 9:69042070-69042096; SpCas9
ctcctaaaaacacaaaaattagc

SEQ ID NO: 36776 - DNA, 22 bp, Artificial Sequence
  Synthetic: FXN 3 forward 9:69042071-69042096; SpCas9
tcctaaaaacacaaaaattagc

SEQ ID NO: 36777 - DNA, 21 bp, Artificial Sequence
  Synthetic: FXN 3 forward 9:69042072-69042096; SpCas9
cctaaaaacacaaaaattagc

SEQ ID NO: 36778 - DNA, 20 bp, Artificial Sequence
  Synthetic: FXN 3 forward 9:69042073-69042096; SpCas9
ctaaaaacacaaaaattagc

SEQ ID NO: 36779 - DNA, 19 bp, Artificial Sequence
  Synthetic: FXN 3 forward 9:69042074-69042096; SpCas9
taaaaacacaaaaattagc

SEQ ID NO: 36780 - DNA, 18 bp, Artificial Sequence
  Synthetic: FXN 3 forward 9:69042075-69042096; SpCas9
aaaaacacaaaaattagc

SEQ ID NO: 36781 - DNA, 25 bp, Artificial Sequence
  Synthetic: FXN 3 reverse 9:69042068-69042096; SpCas9
ccagctaatttttgtgtttttagga

SEQ ID NO: 36782 - DNA, 24 bp, Artificial Sequence
  Synthetic: FXN 3 reverse 9:69042069-69042096; SpCas9
cagctaatttttgtgtttttagga

SEQ ID NO: 36783 - DNA, 23 bp, Artificial Sequence
  Synthetic: FXN 3 reverse 9:69042070-69042096; SpCas9
agctaatttttgtgtttttagga

SEQ ID NO: 36784 - DNA, 22 bp, Artificial Sequence
  Synthetic: FXN 3 reverse 9:69042071-69042096; SpCas9
gctaatttttgtgtttttagga

SEQ ID NO: 36785 - DNA, 21 bp, Artificial Sequence
  Synthetic: FXN 3 reverse 9:69042072-69042096; SpCas9
ctaatttttgtgtttttagga

SEQ ID NO: 36786 - DNA, 20 bp, Artificial Sequence
  Synthetic: FXN 3 reverse 9:69042073-69042096; SpCas9
taatttttgtgtttttagga

SEQ ID NO: 36787 - DNA, 19 bp, Artificial Sequence
  Synthetic: FXN 3 reverse 9:69042074-69042096; SpCas9
aatttttgtgtttttagga

SEQ ID NO: 36788 - DNA, 18 bp, Artificial Sequence
  Synthetic: FXN 3 reverse 9:69042075-69042096; SpCas9
atttttgtgtttttagga

SEQ ID NO: 36789 - DNA, 25 bp, Artificial Sequence
  Synthetic: FXN 3 forward 9:69042069-69042097; SpCas9
tctcctaaaaacacaaaaattagct

SEQ ID NO: 36790 - DNA, 24 bp, Artificial Sequence
  Synthetic: FXN 3 forward 9:69042070-69042097; SpCas9
ctcctaaaaacacaaaaattagct

SEQ ID NO: 36791 - DNA, 23 bp, Artificial Sequence
  Synthetic: FXN 3 forward 9:69042071-69042097; SpCas9
tcctaaaaacacaaaaattagct

SEQ ID NO: 36792 - DNA, 22 bp, Artificial Sequence
  Synthetic: FXN 3 forward 9:69042072-69042097; SpCas9
cctaaaaacacaaaaattagct

SEQ ID NO: 36793 - DNA, 21 bp, Artificial Sequence
  Synthetic: FXN 3 forward 9:69042073-69042097; SpCas9
ctaaaaacacaaaaattagct

SEQ ID NO: 36794 - DNA, 20 bp, Artificial Sequence
  Synthetic: FXN 3 forward 9:69042074-69042097; SpCas9
taaaaacacaaaaattagct

SEQ ID NO: 36795 - DNA, 19 bp, Artificial Sequence
  Synthetic: FXN 3 forward 9:69042075-69042097; SpCas9
aaaaacacaaaaattagct

SEQ ID NO: 36796 - DNA, 18 bp, Artificial Sequence
  Synthetic: FXN 3 forward 9:69042076-69042097; SpCas9
aaaacacaaaaattagct

SEQ ID NO: 36797 - DNA, 25 bp, Artificial Sequence
  Synthetic: FXN 3 reverse 9:69042070-69042098; SpCas9
gcccagctaatttttgtgtttttag

SEQ ID NO: 36798 - DNA, 24 bp, Artificial Sequence
  Synthetic: FXN 3 reverse 9:69042071-69042098; SpCas9
cccagctaatttttgtgtttttag

SEQ ID NO: 36799 - DNA, 23 bp, Artificial Sequence
  Synthetic: FXN 3 reverse 9:69042072-69042098; SpCas9
ccagctaatttttgtgtttttag

SEQ ID NO: 36800 - DNA, 22 bp, Artificial Sequence
  Synthetic: FXN 3 reverse 9:69042073-69042098; SpCas9
cagctaatttttgtgtttttag

SEQ ID NO: 36801 - DNA, 21 bp, Artificial Sequence
  Synthetic: FXN 3 reverse 9:69042074-69042098; SpCas9
agctaatttttgtgtttttag

SEQ ID NO: 36802 - DNA, 20 bp, Artificial Sequence
  Synthetic: FXN 3 reverse 9:69042075-69042098; SpCas9
gctaatttttgtgtttttag

SEQ ID NO: 36803 - DNA, 19 bp, Artificial Sequence
  Synthetic: FXN 3 reverse 9:69042076-69042098; SpCas9
ctaatttttgtgtttttag

SEQ ID NO: 36804 - DNA, 18 bp, Artificial Sequence
  Synthetic: FXN 3 reverse 9:69042077-69042098; SpCas9
taatttttgtgtttttag

SEQ ID NO: 36805 - DNA, 25 bp, Artificial Sequence
  Synthetic: FXN 3 reverse 9:69042072-69042100; SpCas9
atgcccagctaatttttgtgttttt

SEQ ID NO: 36806 - DNA, 24 bp, Artificial Sequence
  Synthetic: FXN 3 reverse 9:69042073-69042100; SpCas9
tgcccagctaatttttgtgttttt

SEQ ID NO: 36807 - DNA, 23 bp, Artificial Sequence
  Synthetic: FXN 3 reverse 9:69042074-69042100; SpCas9
gcccagctaatttttgtgttttt

SEQ ID NO: 36808 - DNA, 22 bp, Artificial Sequence
  Synthetic: FXN 3 reverse 9:69042075-69042100; SpCas9
cccagctaatttttgtgttttt

SEQ ID NO: 36809 - DNA, 21 bp, Artificial Sequence
  Synthetic: FXN 3 reverse 9:69042076-69042100; SpCas9
ccagctaatttttgtgttttt

SEQ ID NO: 36810 - DNA, 20 bp, Artificial Sequence
  Synthetic: FXN 3 reverse 9:69042077-69042100; SpCas9
cagctaatttttgtgttttt

SEQ ID NO: 36811 - DNA, 19 bp, Artificial Sequence
  Synthetic: FXN 3 reverse 9:69042078-69042100; SpCas9
agctaatttttgtgttttt

SEQ ID NO: 36812 - DNA, 18 bp, Artificial Sequence
  Synthetic: FXN 3 reverse 9:69042079-69042100; SpCas9
gctaatttttgtgttttt

SEQ ID NO: 36813 - DNA, 25 bp, Artificial Sequence
  Synthetic: FXN 3 reverse 9:69042073-69042101; SpCas9
catgcccagctaatttttgtgtttt

SEQ ID NO: 36814 - DNA, 24 bp, Artificial Sequence
  Synthetic: FXN 3 reverse 9:69042074-69042101; SpCas9
atgcccagctaatttttgtgtttt

SEQ ID NO: 36815 - DNA, 23 bp, Artificial Sequence
  Synthetic: FXN 3 reverse 9:69042075-69042101; SpCas9
tgcccagctaatttttgtgtttt

SEQ ID NO: 36816 - DNA, 22 bp, Artificial Sequence
  Synthetic: FXN 3 reverse 9:69042076-69042101; SpCas9
gcccagctaatttttgtgtttt

SEQ ID NO: 36817 - DNA, 21 bp, Artificial Sequence
  Synthetic: FXN 3 reverse 9:69042077-69042101; SpCas9
cccagctaatttttgtgtttt

SEQ ID NO: 36818 - DNA, 20 bp, Artificial Sequence
  Synthetic: FXN 3 reverse 9:69042078-69042101; SpCas9
ccagctaatttttgtgtttt

SEQ ID NO: 36819 - DNA, 19 bp, Artificial Sequence
  Synthetic: FXN 3 reverse 9:69042079-69042101; SpCas9
cagctaatttttgtgtttt

SEQ ID NO: 36820 - DNA, 18 bp, Artificial Sequence
  Synthetic: FXN 3 reverse 9:69042080-69042101; SpCas9
agctaatttttgtgtttt

SEQ ID NO: 36821 - DNA, 25 bp, Artificial Sequence
  Synthetic: FXN 3 forward 9:69042074-69042102; SpCas9
taaaaacacaaaaattagctgggca

SEQ ID NO: 36822 - DNA, 24 bp, Artificial Sequence
  Synthetic: FXN 3 forward 9:69042075-69042102; SpCas9
aaaaacacaaaaattagctgggca

SEQ ID NO: 36823 - DNA, 23 bp, Artificial Sequence
  Synthetic: FXN 3 forward 9:69042076-69042102; SpCas9
aaaacacaaaaattagctgggca

SEQ ID NO: 36824 - DNA, 22 bp, Artificial Sequence
  Synthetic: FXN 3 forward 9:69042077-69042102; SpCas9
aaacacaaaaattagctgggca

SEQ ID NO: 36825 - DNA, 21 bp, Artificial Sequence
  Synthetic: FXN 3 forward 9:69042078-69042102; SpCas9
aacacaaaaattagctgggca

SEQ ID NO: 36826 - DNA, 20 bp, Artificial Sequence
  Synthetic: FXN 3 forward 9:69042079-69042102; SpCas9
acacaaaaattagctgggca

SEQ ID NO: 36827 - DNA, 19 bp, Artificial Sequence
  Synthetic: FXN 3 forward 9:69042080-69042102; SpCas9
cacaaaaattagctgggca

SEQ ID NO: 36828 - DNA, 18 bp, Artificial Sequence
  Synthetic: FXN 3 forward 9:69042081-69042102; SpCas9
acaaaaattagctgggca

SEQ ID NO: 36829 - DNA, 25 bp, Artificial Sequence
  Synthetic: FXN 3 forward 9:69042076-69042104; SpCas9
aaaacacaaaaattagctgggcatg

SEQ ID NO: 36830 - DNA, 24 bp, Artificial Sequence
  Synthetic: FXN 3 forward 9:69042077-69042104; SpCas9
aaacacaaaaattagctgggcatg

SEQ ID NO: 36831 - DNA, 23 bp, Artificial Sequence
  Synthetic: FXN 3 forward 9:69042078-69042104; SpCas9
aacacaaaaattagctgggcatg

SEQ ID NO: 36832 - DNA, 22 bp, Artificial Sequence
  Synthetic: FXN 3 forward 9:69042079-69042104; SpCas9
acacaaaaattagctgggcatg

SEQ ID NO: 36833 - DNA, 21 bp, Artificial Sequence
  Synthetic: FXN 3 forward 9:69042080-69042104; SpCas9
cacaaaaattagctgggcatg

SEQ ID NO: 36834 - DNA, 20 bp, Artificial Sequence
  Synthetic: FXN 3 forward 9:69042081-69042104; SpCas9
acaaaaattagctgggcatg

SEQ ID NO: 36835 - DNA, 19 bp, Artificial Sequence
  Synthetic: FXN 3 forward 9:69042082-69042104; SpCas9
caaaaattagctgggcatg

SEQ ID NO: 36836 - DNA, 18 bp, Artificial Sequence
  Synthetic: FXN 3 forward 9:69042083-69042104; SpCas9
aaaaattagctgggcatg

SEQ ID NO: 36837 - DNA, 25 bp, Artificial Sequence
  Synthetic: FXN 3 forward 9:69042077-69042105; SpCas9
aaacacaaaaattagctgggcatgg

SEQ ID NO: 36838 - DNA, 24 bp, Artificial Sequence
  Synthetic: FXN 3 forward 9:69042078-69042105; SpCas9
aacacaaaaattagctgggcatgg

SEQ ID NO: 36839 - DNA, 23 bp, Artificial Sequence
  Synthetic: FXN 3 forward 9:69042079-69042105; SpCas9
acacaaaaattagctgggcatgg

SEQ ID NO: 36840 - DNA, 22 bp, Artificial Sequence
  Synthetic: FXN 3 forward 9:69042080-69042105; SpCas9
cacaaaaattagctgggcatgg

SEQ ID NO: 36841 - DNA, 21 bp, Artificial Sequence
  Synthetic: FXN 3 forward 9:69042081-69042105; SpCas9
acaaaaattagctgggcatgg

SEQ ID NO: 36842 - DNA, 20 bp, Artificial Sequence
  Synthetic: FXN 3 forward 9:69042082-69042105; SpCas9
caaaaattagctgggcatgg

SEQ ID NO: 36843 - DNA, 19 bp, Artificial Sequence
  Synthetic: FXN 3 forward 9:69042083-69042105; SpCas9
aaaaattagctgggcatgg

SEQ ID NO: 36844 - DNA, 18 bp, Artificial Sequence
  Synthetic: FXN 3 forward 9:69042084-69042105; SpCas9
aaaattagctgggcatgg

SEQ ID NO: 36845 - DNA, 25 bp, Artificial Sequence
  Synthetic: FXN 3 reverse 9:69042092-69042120; SpCas9
gattacaggcgtgcacctccatgcc

SEQ ID NO: 36846 - DNA, 24 bp, Artificial Sequence
  Synthetic: FXN 3 reverse 9:69042093-69042120; SpCas9
attacaggcgtgcacctccatgcc

SEQ ID NO: 36847 - DNA, 23 bp, Artificial Sequence
  Synthetic: FXN 3 reverse 9:69042094-69042120; SpCas9
ttacaggcgtgcacctccatgcc

SEQ ID NO: 36848 - DNA, 22 bp, Artificial Sequence
  Synthetic: FXN 3 reverse 9:69042095-69042120; SpCas9
tacaggcgtgcacctccatgcc

SEQ ID NO: 36849 - DNA, 21 bp, Artificial Sequence
  Synthetic: FXN 3 reverse 9:69042096-69042120; SpCas9
acaggcgtgcacctccatgcc

SEQ ID NO: 36850 - DNA, 20 bp, Artificial Sequence
  Synthetic: FXN 3 reverse 9:69042097-69042120; SpCas9
caggcgtgcacctccatgcc

SEQ ID NO: 36851 - DNA, 19 bp, Artificial Sequence
  Synthetic: FXN 3 reverse 9:69042098-69042120; SpCas9
aggcgtgcacctccatgcc

SEQ ID NO: 36852 - DNA, 18 bp, Artificial Sequence
  Synthetic: FXN 3 reverse 9:69042099-69042120; SpCas9
ggcgtgcacctccatgcc

SEQ ID NO: 36853 - DNA, 25 bp, Artificial Sequence
  Synthetic: FXN 3 forward 9:69042096-69042124; SpCas9
gcatggaggtgcacgcctgtaatcc

SEQ ID NO: 36854 - DNA, 24 bp, Artificial Sequence
  Synthetic: FXN 3 forward 9:69042097-69042124; SpCas9
catggaggtgcacgcctgtaatcc

SEQ ID NO: 36855 - DNA, 23 bp, Artificial Sequence
  Synthetic: FXN 3 forward 9:69042098-69042124; SpCas9
atggaggtgcacgcctgtaatcc

SEQ ID NO: 36856 - DNA, 22 bp, Artificial Sequence
  Synthetic: FXN 3 forward 9:69042099-69042124; SpCas9
tggaggtgcacgcctgtaatcc

SEQ ID NO: 36857 - DNA, 21 bp, Artificial Sequence
  Synthetic: FXN 3 forward 9:69042100-69042124; SpCas9
ggaggtgcacgcctgtaatcc

SEQ ID NO: 36858 - DNA, 20 bp, Artificial Sequence
  Synthetic: FXN 3 forward 9:69042101-69042124; SpCas9
gaggtgcacgcctgtaatcc

SEQ ID NO: 36859 - DNA, 19 bp, Artificial Sequence
  Synthetic: FXN 3 forward 9:69042102-69042124; SpCas9
aggtgcacgcctgtaatcc

SEQ ID NO: 36860 - DNA, 18 bp, Artificial Sequence
  Synthetic: FXN 3 forward 9:69042103-69042124; SpCas9
ggtgcacgcctgtaatcc

SEQ ID NO: 36861 - DNA, 25 bp, Artificial Sequence
  Synthetic: FXN 3 forward 9:69042104-69042132; SpCas9
gtgcacgcctgtaatcccagctact

SEQ ID NO: 36862 - DNA, 24 bp, Artificial Sequence
  Synthetic: FXN 3 forward 9:69042105-69042132; SpCas9
tgcacgcctgtaatcccagctact

SEQ ID NO: 36863 - DNA, 23 bp, Artificial Sequence
  Synthetic: FXN 3 forward 9:69042106-69042132; SpCas9
gcacgcctgtaatcccagctact

SEQ ID NO: 36864 - DNA, 22 bp, Artificial Sequence
  Synthetic: FXN 3 forward 9:69042107-69042132; SpCas9
cacgcctgtaatcccagctact

SEQ ID NO: 36865 - DNA, 21 bp, Artificial Sequence
  Synthetic: FXN 3 forward 9:69042108-69042132; SpCas9
acgcctgtaatcccagctact

SEQ ID NO: 36866 - DNA, 20 bp, Artificial Sequence
  Synthetic: FXN 3 forward 9:69042109-69042132; SpCas9
cgcctgtaatcccagctact

SEQ ID NO: 36867 - DNA, 19 bp, Artificial Sequence
  Synthetic: FXN 3 forward 9:69042110-69042132; SpCas9
gcctgtaatcccagctact

SEQ ID NO: 36868 - DNA, 18 bp, Artificial Sequence
  Synthetic: FXN 3 forward 9:69042111-69042132; SpCas9
cctgtaatcccagctact

SEQ ID NO: 36869 - DNA, 25 bp, Artificial Sequence
  Synthetic: FXN 3 forward 9:69042105-69042133; SpCas9
tgcacgcctgtaatcccagctactc

SEQ ID NO: 36870 - DNA, 24 bp, Artificial Sequence
  Synthetic: FXN 3 forward 9:69042106-69042133; SpCas9
gcacgcctgtaatcccagctactc

SEQ ID NO: 36871 - DNA, 23 bp, Artificial Sequence
  Synthetic: FXN 3 forward 9:69042107-69042133; SpCas9
cacgcctgtaatcccagctactc

SEQ ID NO: 36872 - DNA, 22 bp, Artificial Sequence
  Synthetic: FXN 3 forward 9:69042108-69042133; SpCas9
acgcctgtaatcccagctactc

SEQ ID NO: 36873 - DNA, 21 bp, Artificial Sequence
  Synthetic: FXN 3 forward 9:69042109-69042133; SpCas9
cgcctgtaatcccagctactc

SEQ ID NO: 36874 - DNA, 20 bp, Artificial Sequence
  Synthetic: FXN 3 forward 9:69042110-69042133; SpCas9
gcctgtaatcccagctactc

SEQ ID NO: 36875 - DNA, 19 bp, Artificial Sequence
  Synthetic: FXN 3 forward 9:69042111-69042133; SpCas9
cctgtaatcccagctactc

SEQ ID NO: 36876 - DNA, 18 bp, Artificial Sequence
  Synthetic: FXN 3 forward 9:69042112-69042133; SpCas9
ctgtaatcccagctactc

SEQ ID NO: 36877 - DNA, 25 bp, Artificial Sequence
  Synthetic: FXN 3 forward 9:69042107-69042135; SpCas9
cacgcctgtaatcccagctactcag

SEQ ID NO: 36878 - DNA, 24 bp, Artificial Sequence
  Synthetic: FXN 3 forward 9:69042108-69042135; SpCas9
acgcctgtaatcccagctactcag

SEQ ID NO: 36879 - DNA, 23 bp, Artificial Sequence
  Synthetic: FXN 3 forward 9:69042109-69042135; SpCas9
cgcctgtaatcccagctactcag

SEQ ID NO: 36880 - DNA, 22 bp, Artificial Sequence
  Synthetic: FXN 3 forward 9:69042110-69042135; SpCas9
gcctgtaatcccagctactcag

SEQ ID NO: 36881 - DNA, 21 bp, Artificial Sequence
  Synthetic: FXN 3 forward 9:69042111-69042135; SpCas9
cctgtaatcccagctactcag

SEQ ID NO: 36882 - DNA, 20 bp, Artificial Sequence
  Synthetic: FXN 3 forward 9:69042112-69042135; SpCas9
ctgtaatcccagctactcag

SEQ ID NO: 36883 - DNA, 19 bp, Artificial Sequence
  Synthetic: FXN 3 forward 9:69042113-69042135; SpCas9
tgtaatcccagctactcag

SEQ ID NO: 36884 - DNA, 18 bp, Artificial Sequence
  Synthetic: FXN 3 forward 9:69042114-69042135; SpCas9
gtaatcccagctactcag

SEQ ID NO: 36885 - DNA, 25 bp, Artificial Sequence
  Synthetic: FXN 3 forward 9:69042108-69042136; SpCas9
acgcctgtaatcccagctactcagg

SEQ ID NO: 36886 - DNA, 24 bp, Artificial Sequence
  Synthetic: FXN 3 forward 9:69042109-69042136; SpCas9
cgcctgtaatcccagctactcagg

SEQ ID NO: 36887 - DNA, 23 bp, Artificial Sequence
  Synthetic: FXN 3 forward 9:69042110-69042136; SpCas9
gcctgtaatcccagctactcagg

SEQ ID NO: 36888 - DNA, 22 bp, Artificial Sequence
  Synthetic: FXN 3 forward 9:69042111-69042136; SpCas9
cctgtaatcccagctactcagg

SEQ ID NO: 36889 - DNA, 21 bp, Artificial Sequence
  Synthetic: FXN 3 forward 9:69042112-69042136; SpCas9
ctgtaatcccagctactcagg

SEQ ID NO: 36890 - DNA, 20 bp, Artificial Sequence
  Synthetic: FXN 3 forward 9:69042113-69042136; SpCas9
tgtaatcccagctactcagg

SEQ ID NO: 36891 - DNA, 19 bp, Artificial Sequence
  Synthetic: FXN 3 forward 9:69042114-69042136; SpCas9
gtaatcccagctactcagg

SEQ ID NO: 36892 - DNA, 18 bp, Artificial Sequence
  Synthetic: FXN 3 forward 9:69042115-69042136; SpCas9
taatcccagctactcagg

SEQ ID NO: 36893 - DNA, 25 bp, Artificial Sequence
  Synthetic: FXN 3 reverse 9:69042111-69042139; SpCas9
cagcctcctgagtagctgggattac

SEQ ID NO: 36894 - DNA, 24 bp, Artificial Sequence
  Synthetic: FXN 3 reverse 9:69042112-69042139; SpCas9
agcctcctgagtagctgggattac

SEQ ID NO: 36895 - DNA, 23 bp, Artificial Sequence
  Synthetic: FXN 3 reverse 9:69042113-69042139; SpCas9
gcctcctgagtagctgggattac

SEQ ID NO: 36896 - DNA, 22 bp, Artificial Sequence
  Synthetic: FXN 3 reverse 9:69042114-69042139; SpCas9
cctcctgagtagctgggattac

SEQ ID NO: 36897 - DNA, 21 bp, Artificial Sequence
  Synthetic: FXN 3 reverse 9:69042115-69042139; SpCas9
ctcctgagtagctgggattac

SEQ ID NO: 36898 - DNA, 20 bp, Artificial Sequence
  Synthetic: FXN 3 reverse 9:69042116-69042139; SpCas9
tcctgagtagctgggattac

SEQ ID NO: 36899 - DNA, 19 bp, Artificial Sequence
  Synthetic: FXN 3 reverse 9:69042117-69042139; SpCas9
cctgagtagctgggattac

SEQ ID NO: 36900 - DNA, 18 bp, Artificial Sequence
  Synthetic: FXN 3 reverse 9:69042118-69042139; SpCas9
ctgagtagctgggattac

SEQ ID NO: 36901 - DNA, 25 bp, Artificial Sequence
  Synthetic: FXN 3 reverse 9:69042112-69042140; SpCas9
tcagcctcctgagtagctgggatta

SEQ ID NO: 36902 - DNA, 24 bp, Artificial Sequence
  Synthetic: FXN 3 reverse 9:69042113-69042140; SpCas9
cagcctcctgagtagctgggatta

SEQ ID NO: 36903 - DNA, 23 bp, Artificial Sequence
  Synthetic: FXN 3 reverse 9:69042114-69042140; SpCas9
agcctcctgagtagctgggatta

SEQ ID NO: 36904 - DNA, 22 bp, Artificial Sequence
  Synthetic: FXN 3 reverse 9:69042115-69042140; SpCas9
gcctcctgagtagctgggatta

SEQ ID NO: 36905 - DNA, 21 bp, Artificial Sequence
  Synthetic: FXN 3 reverse 9:69042116-69042140; SpCas9
cctcctgagtagctgggatta

SEQ ID NO: 36906 - DNA, 20 bp, Artificial Sequence
  Synthetic: FXN 3 reverse 9:69042117-69042140; SpCas9
ctcctgagtagctgggatta

SEQ ID NO: 36907 - DNA, 19 bp, Artificial Sequence
  Synthetic: FXN 3 reverse 9:69042118-69042140; SpCas9
tcctgagtagctgggatta

SEQ ID NO: 36908 - DNA, 18 bp, Artificial Sequence
  Synthetic: FXN 3 reverse 9:69042119-69042140; SpCas9
cctgagtagctgggatta

SEQ ID NO: 36909 - DNA, 25 bp, Artificial Sequence
  Synthetic: FXN 3 forward 9:69042113-69042141; SpCas9
tgtaatcccagctactcaggaggct

SEQ ID NO: 36910 - DNA, 24 bp, Artificial Sequence
  Synthetic: FXN 3 forward 9:69042114-69042141; SpCas9
gtaatcccagctactcaggaggct

SEQ ID NO: 36911 - DNA, 23 bp, Artificial Sequence
  Synthetic: FXN 3 forward 9:69042115-69042141; SpCas9
taatcccagctactcaggaggct

SEQ ID NO: 36912 - DNA, 22 bp, Artificial Sequence
  Synthetic: FXN 3 forward 9:69042116-69042141; SpCas9
aatcccagctactcaggaggct

SEQ ID NO: 36913 - DNA, 21 bp, Artificial Sequence
  Synthetic: FXN 3 forward 9:69042117-69042141; SpCas9
atcccagctactcaggaggct

SEQ ID NO: 36914 - DNA, 20 bp, Artificial Sequence
  Synthetic: FXN 3 forward 9:69042118-69042141; SpCas9
tcccagctactcaggaggct

SEQ ID NO: 36915 - DNA, 19 bp, Artificial Sequence
  Synthetic: FXN 3 forward 9:69042119-69042141; SpCas9
cccagctactcaggaggct

SEQ ID NO: 36916 - DNA, 18 bp, Artificial Sequence
  Synthetic: FXN 3 forward 9:69042120-69042141; SpCas9
ccagctactcaggaggct

SEQ ID NO: 36917 - DNA, 25 bp, Artificial Sequence
  Synthetic: FXN 3 forward 9:69042114-69042142; SpCas9
gtaatcccagctactcaggaggctg

SEQ ID NO: 36918 - DNA, 24 bp, Artificial Sequence
  Synthetic: FXN 3 forward 9:69042115-69042142; SpCas9
taatcccagctactcaggaggctg

SEQ ID NO: 36919 - DNA, 23 bp, Artificial Sequence
  Synthetic: FXN 3 forward 9:69042116-69042142; SpCas9
aatcccagctactcaggaggctg

SEQ ID NO: 36920 - DNA, 22 bp, Artificial Sequence
  Synthetic: FXN 3 forward 9:69042117-69042142; SpCas9
atcccagctactcaggaggctg

SEQ ID NO: 36921 - DNA, 21 bp, Artificial Sequence
  Synthetic: FXN 3 forward 9:69042118-69042142; SpCas9
tcccagctactcaggaggctg

SEQ ID NO: 36922 - DNA, 20 bp, Artificial Sequence
  Synthetic: FXN 3 forward 9:69042119-69042142; SpCas9
cccagctactcaggaggctg

SEQ ID NO: 36923 - DNA, 19 bp, Artificial Sequence
  Synthetic: FXN 3 forward 9:69042120-69042142; SpCas9
ccagctactcaggaggctg

SEQ ID NO: 36924 - DNA, 18 bp, Artificial Sequence
  Synthetic: FXN 3 forward 9:69042121-69042142; SpCas9
cagctactcaggaggctg

SEQ ID NO: 36925 - DNA, 25 bp, Artificial Sequence
  Synthetic: FXN 3 forward 9:69042117-69042145; SpCas9
atcccagctactcaggaggctgagg

SEQ ID NO: 36926 - DNA, 24 bp, Artificial Sequence
  Synthetic: FXN 3 forward 9:69042118-69042145; SpCas9
tcccagctactcaggaggctgagg

SEQ ID NO: 36927 - DNA, 23 bp, Artificial Sequence
  Synthetic: FXN 3 forward 9:69042119-69042145; SpCas9
cccagctactcaggaggctgagg

SEQ ID NO: 36928 - DNA, 22 bp, Artificial Sequence
  Synthetic: FXN 3 forward 9:69042120-69042145; SpCas9
ccagctactcaggaggctgagg

SEQ ID NO: 36929 - DNA, 21 bp, Artificial Sequence
  Synthetic: FXN 3 forward 9:69042121-69042145; SpCas9
cagctactcaggaggctgagg

SEQ ID NO: 36930 - DNA, 20 bp, Artificial Sequence
  Synthetic: FXN 3 forward 9:69042122-69042145; SpCas9
agctactcaggaggctgagg

SEQ ID NO: 36931 - DNA, 19 bp, Artificial Sequence
  Synthetic: FXN 3 forward 9:69042123-69042145; SpCas9
gctactcaggaggctgagg

SEQ ID NO: 36932 - DNA, 18 bp, Artificial Sequence
  Synthetic: FXN 3 forward 9:69042124-69042145; SpCas9
ctactcaggaggctgagg

SEQ ID NO: 36933 - DNA, 25 bp, Artificial Sequence
  Synthetic: FXN 3 forward 9:69042118-69042146; SpCas9
tcccagctactcaggaggctgaggc

SEQ ID NO: 36934 - DNA, 24 bp, Artificial Sequence
  Synthetic: FXN 3 forward 9:69042119-69042146; SpCas9
cccagctactcaggaggctgaggc

SEQ ID NO: 36935 - DNA, 23 bp, Artificial Sequence
  Synthetic: FXN 3 forward 9:69042120-69042146; SpCas9
ccagctactcaggaggctgaggc

SEQ ID NO: 36936 - DNA, 22 bp, Artificial Sequence
  Synthetic: FXN 3 forward 9:69042121-69042146; SpCas9
cagctactcaggaggctgaggc

SEQ ID NO: 36937 - DNA, 21 bp, Artificial Sequence
  Synthetic: FXN 3 forward 9:69042122-69042146; SpCas9
agctactcaggaggctgaggc

SEQ ID NO: 36938 - DNA, 20 bp, Artificial Sequence
  Synthetic: FXN 3 forward 9:69042123-69042146; SpCas9
gctactcaggaggctgaggc

SEQ ID NO: 36939 - DNA, 19 bp, Artificial Sequence
  Synthetic: FXN 3 forward 9:69042124-69042146; SpCas9
ctactcaggaggctgaggc

SEQ ID NO: 36940 - DNA, 18 bp, Artificial Sequence
  Synthetic: FXN 3 forward 9:69042125-69042146; SpCas9
tactcaggaggctgaggc

SEQ ID NO: 36941 - DNA, 25 bp, Artificial Sequence
  Synthetic: FXN 3 reverse 9:69042119-69042147; SpCas9
tcctgcctcagcctcctgagtagct

SEQ ID NO: 36942 - DNA, 24 bp, Artificial Sequence
  Synthetic: FXN 3 reverse 9:69042120-69042147; SpCas9
cctgcctcagcctcctgagtagct

SEQ ID NO: 36943 - DNA, 23 bp, Artificial Sequence
  Synthetic: FXN 3 reverse 9:69042121-69042147; SpCas9
ctgcctcagcctcctgagtagct

SEQ ID NO: 36944 - DNA, 22 bp, Artificial Sequence
  Synthetic: FXN 3 reverse 9:69042122-69042147; SpCas9
tgcctcagcctcctgagtagct

SEQ ID NO: 36945 - DNA, 21 bp, Artificial Sequence
  Synthetic: FXN 3 reverse 9:69042123-69042147; SpCas9
gcctcagcctcctgagtagct

SEQ ID NO: 36946 - DNA, 20 bp, Artificial Sequence
  Synthetic: FXN 3 reverse 9:69042124-69042147; SpCas9
cctcagcctcctgagtagct

SEQ ID NO: 36947 - DNA, 19 bp, Artificial Sequence
  Synthetic: FXN 3 reverse 9:69042125-69042147; SpCas9
ctcagcctcctgagtagct

SEQ ID NO: 36948 - DNA, 18 bp, Artificial Sequence
  Synthetic: FXN 3 reverse 9:69042126-69042147; SpCas9
tcagcctcctgagtagct

SEQ ID NO: 36949 - DNA, 25 bp, Artificial Sequence
  Synthetic: FXN 3 forward 9:69042120-69042148; SpCas9
ccagctactcaggaggctgaggcag

SEQ ID NO: 36950 - DNA, 24 bp, Artificial Sequence
  Synthetic: FXN 3 forward 9:69042121-69042148; SpCas9
cagctactcaggaggctgaggcag

SEQ ID NO: 36951 - DNA, 23 bp, Artificial Sequence
  Synthetic: FXN 3 forward 9:69042122-69042148; SpCas9
agctactcaggaggctgaggcag

SEQ ID NO: 36952 - DNA, 22 bp, Artificial Sequence
  Synthetic: FXN 3 forward 9:69042123-69042148; SpCas9
gctactcaggaggctgaggcag

SEQ ID NO: 36953 - DNA, 21 bp, Artificial Sequence
  Synthetic: FXN 3 forward 9:69042124-69042148; SpCas9
ctactcaggaggctgaggcag

SEQ ID NO: 36954 - DNA, 20 bp, Artificial Sequence
  Synthetic: FXN 3 forward 9:69042125-69042148; SpCas9
tactcaggaggctgaggcag

SEQ ID NO: 36955 - DNA, 19 bp, Artificial Sequence
  Synthetic: FXN 3 forward 9:69042126-69042148; SpCas9
actcaggaggctgaggcag

SEQ ID NO: 36956 - DNA, 18 bp, Artificial Sequence
  Synthetic: FXN 3 forward 9:69042127-69042148; SpCas9
ctcaggaggctgaggcag

SEQ ID NO: 36957 - DNA, 25 bp, Artificial Sequence
  Synthetic: FXN 3 reverse 9:69042120-69042148; SpCas9
ctcctgcctcagcctcctgagtagc

SEQ ID NO: 36958 - DNA, 24 bp, Artificial Sequence
  Synthetic: FXN 3 reverse 9:69042121-69042148; SpCas9
tcctgcctcagcctcctgagtagc

SEQ ID NO: 36959 - DNA, 23 bp, Artificial Sequence
  Synthetic: FXN 3 reverse 9:69042122-69042148; SpCas9
cctgcctcagcctcctgagtagc

SEQ ID NO: 36960 - DNA, 22 bp, Artificial Sequence
  Synthetic: FXN 3 reverse 9:69042123-69042148; SpCas9
ctgcctcagcctcctgagtagc

SEQ ID NO: 36961 - DNA, 21 bp, Artificial Sequence
  Synthetic: FXN 3 reverse 9:69042124-69042148; SpCas9
tgcctcagcctcctgagtagc

SEQ ID NO: 36962 - DNA, 20 bp, Artificial Sequence
  Synthetic: FXN 3 reverse 9:69042125-69042148; SpCas9
gcctcagcctcctgagtagc

SEQ ID NO: 36963 - DNA, 19 bp, Artificial Sequence
  Synthetic: FXN 3 reverse 9:69042126-69042148; SpCas9
cctcagcctcctgagtagc

SEQ ID NO: 36964 - DNA, 18 bp, Artificial Sequence
  Synthetic: FXN 3 reverse 9:69042127-69042148; SpCas9
ctcagcctcctgagtagc

SEQ ID NO: 36965 - DNA, 25 bp, Artificial Sequence
  Synthetic: FXN 3 reverse 9:69042124-69042152; SpCas9
gattctcctgcctcagcctcctgag

SEQ ID NO: 36966 - DNA, 24 bp, Artificial Sequence
  Synthetic: FXN 3 reverse 9:69042125-69042152; SpCas9
attctcctgcctcagcctcctgag

SEQ ID NO: 36967 - DNA, 23 bp, Artificial Sequence
  Synthetic: FXN 3 reverse 9:69042126-69042152; SpCas9
ttctcctgcctcagcctcctgag

SEQ ID NO: 36968 - DNA, 22 bp, Artificial Sequence
  Synthetic: FXN 3 reverse 9:69042127-69042152; SpCas9
tctcctgcctcagcctcctgag

SEQ ID NO: 36969 - DNA, 21 bp, Artificial Sequence
  Synthetic: FXN 3 reverse 9:69042128-69042152; SpCas9
ctcctgcctcagcctcctgag

SEQ ID NO: 36970 - DNA, 20 bp, Artificial Sequence
  Synthetic: FXN 3 reverse 9:69042129-69042152; SpCas9
tcctgcctcagcctcctgag

SEQ ID NO: 36971 - DNA, 19 bp, Artificial Sequence
  Synthetic: FXN 3 reverse 9:69042130-69042152; SpCas9
cctgcctcagcctcctgag

SEQ ID NO: 36972 - DNA, 18 bp, Artificial Sequence
  Synthetic: FXN 3 reverse 9:69042131-69042152; SpCas9
ctgcctcagcctcctgag

SEQ ID NO: 36973 - DNA, 25 bp, Artificial Sequence
  Synthetic: FXN 3 reverse 9:69042127-69042155; SpCas9
agtgattctcctgcctcagcctcct

SEQ ID NO: 36974 - DNA, 24 bp, Artificial Sequence
  Synthetic: FXN 3 reverse 9:69042128-69042155; SpCas9
gtgattctcctgcctcagcctcct

SEQ ID NO: 36975 - DNA, 23 bp, Artificial Sequence
  Synthetic: FXN 3 reverse 9:69042129-69042155; SpCas9
tgattctcctgcctcagcctcct

SEQ ID NO: 36976 - DNA, 22 bp, Artificial Sequence
  Synthetic: FXN 3 reverse 9:69042130-69042155; SpCas9
gattctcctgcctcagcctcct

SEQ ID NO: 36977 - DNA, 21 bp, Artificial Sequence
  Synthetic: FXN 3 reverse 9:69042131-69042155; SpCas9
attctcctgcctcagcctcct

SEQ ID NO: 36978 - DNA, 20 bp, Artificial Sequence
  Synthetic: FXN 3 reverse 9:69042132-69042155; SpCas9
ttctcctgcctcagcctcct

SEQ ID NO: 36979 - DNA, 19 bp, Artificial Sequence
  Synthetic: FXN 3 reverse 9:69042133-69042155; SpCas9
tctcctgcctcagcctcct

SEQ ID NO: 36980 - DNA, 18 bp, Artificial Sequence
  Synthetic: FXN 3 reverse 9:69042134-69042155; SpCas9
ctcctgcctcagcctcct

SEQ ID NO: 36981 - DNA, 25 bp, Artificial Sequence
  Synthetic: FXN 3 forward 9:69042136-69042164; SpCas9
ctgaggcaggagaatcacttgaacc

SEQ ID NO: 36982 - DNA, 24 bp, Artificial Sequence
  Synthetic: FXN 3 forward 9:69042137-69042164; SpCas9
tgaggcaggagaatcacttgaacc

SEQ ID NO: 36983 - DNA, 23 bp, Artificial Sequence
  Synthetic: FXN 3 forward 9:69042138-69042164; SpCas9
gaggcaggagaatcacttgaacc

SEQ ID NO: 36984 - DNA, 22 bp, Artificial Sequence
  Synthetic: FXN 3 forward 9:69042139-69042164; SpCas9
aggcaggagaatcacttgaacc

SEQ ID NO: 36985 - DNA, 21 bp, Artificial Sequence
  Synthetic: FXN 3 forward 9:69042140-69042164; SpCas9
ggcaggagaatcacttgaacc

SEQ ID NO: 36986 - DNA, 20 bp, Artificial Sequence
  Synthetic: FXN 3 forward 9:69042141-69042164; SpCas9
gcaggagaatcacttgaacc

SEQ ID NO: 36987 - DNA, 19 bp, Artificial Sequence
  Synthetic: FXN 3 forward 9:69042142-69042164; SpCas9
caggagaatcacttgaacc

SEQ ID NO: 36988 - DNA, 18 bp, Artificial Sequence
  Synthetic: FXN 3 forward 9:69042143-69042164; SpCas9
aggagaatcacttgaacc

SEQ ID NO: 36989 - DNA, 25 bp, Artificial Sequence
  Synthetic: FXN 3 reverse 9:69042136-69042164; SpCas9
ccgggttcaagtgattctcctgcct

SEQ ID NO: 36990 - DNA, 24 bp, Artificial Sequence
  Synthetic: FXN 3 reverse 9:69042137-69042164; SpCas9
cgggttcaagtgattctcctgcct

SEQ ID NO: 36991 - DNA, 23 bp, Artificial Sequence
  Synthetic: FXN 3 reverse 9:69042138-69042164; SpCas9
gggttcaagtgattctcctgcct

SEQ ID NO: 36992 - DNA, 22 bp, Artificial Sequence
  Synthetic: FXN 3 reverse 9:69042139-69042164; SpCas9
ggttcaagtgattctcctgcct

SEQ ID NO: 36993 - DNA, 21 bp, Artificial Sequence
  Synthetic: FXN 3 reverse 9:69042140-69042164; SpCas9
gttcaagtgattctcctgcct

SEQ ID NO: 36994 - DNA, 20 bp, Artificial Sequence
  Synthetic: FXN 3 reverse 9:69042141-69042164; SpCas9
ttcaagtgattctcctgcct

SEQ ID NO: 36995 - DNA, 19 bp, Artificial Sequence
  Synthetic: FXN 3 reverse 9:69042142-69042164; SpCas9
tcaagtgattctcctgcct

SEQ ID NO: 36996 - DNA, 18 bp, Artificial Sequence
  Synthetic: FXN 3 reverse 9:69042143-69042164; SpCas9
caagtgattctcctgcct

SEQ ID NO: 36997 - DNA, 25 bp, Artificial Sequence
  Synthetic: FXN 3 forward 9:69042137-69042165; SpCas9
tgaggcaggagaatcacttgaaccc

SEQ ID NO: 36998 - DNA, 24 bp, Artificial Sequence
  Synthetic: FXN 3 forward 9:69042138-69042165; SpCas9
gaggcaggagaatcacttgaaccc

SEQ ID NO: 36999 - DNA, 23 bp, Artificial Sequence
  Synthetic: FXN 3 forward 9:69042139-69042165; SpCas9
aggcaggagaatcacttgaaccc

SEQ ID NO: 37000 - DNA, 22 bp, Artificial Sequence
  Synthetic: FXN 3 forward 9:69042140-69042165; SpCas9
ggcaggagaatcacttgaaccc

SEQ ID NO: 37001 - DNA, 21 bp, Artificial Sequence
  Synthetic: FXN 3 forward 9:69042141-69042165; SpCas9
gcaggagaatcacttgaaccc

SEQ ID NO: 37002 - DNA, 20 bp, Artificial Sequence
  Synthetic: FXN 3 forward 9:69042142-69042165; SpCas9
caggagaatcacttgaaccc

SEQ ID NO: 37003 - DNA, 19 bp, Artificial Sequence
  Synthetic: FXN 3 forward 9:69042143-69042165; SpCas9
aggagaatcacttgaaccc

SEQ ID NO: 37004 - DNA, 18 bp, Artificial Sequence
  Synthetic: FXN 3 forward 9:69042144-69042165; SpCas9
ggagaatcacttgaaccc

SEQ ID NO: 37005 - DNA, 25 bp, Artificial Sequence
  Synthetic: FXN 3 forward 9:69042139-69042167; SpCas9
aggcaggagaatcacttgaacccgg

SEQ ID NO: 37006 - DNA, 24 bp, Artificial Sequence
  Synthetic: FXN 3 forward 9:69042140-69042167; SpCas9
ggcaggagaatcacttgaacccgg

SEQ ID NO: 37007 - DNA, 23 bp, Artificial Sequence
  Synthetic: FXN 3 forward 9:69042141-69042167; SpCas9
gcaggagaatcacttgaacccgg

SEQ ID NO: 37008 - DNA, 22 bp, Artificial Sequence
  Synthetic: FXN 3 forward 9:69042142-69042167; SpCas9
caggagaatcacttgaacccgg

SEQ ID NO: 37009 - DNA, 21 bp, Artificial Sequence
  Synthetic: FXN 3 forward 9:69042143-69042167; SpCas9
aggagaatcacttgaacccgg

SEQ ID NO: 37010 - DNA, 20 bp, Artificial Sequence
  Synthetic: FXN 3 forward 9:69042144-69042167; SpCas9
ggagaatcacttgaacccgg

SEQ ID NO: 37011 - DNA, 19 bp, Artificial Sequence
  Synthetic: FXN 3 forward 9:69042145-69042167; SpCas9
gagaatcacttgaacccgg

SEQ ID NO: 37012 - DNA, 18 bp, Artificial Sequence
  Synthetic: FXN 3 forward 9:69042146-69042167; SpCas9
agaatcacttgaacccgg

SEQ ID NO: 37013 - DNA, 25 bp, Artificial Sequence
  Synthetic: FXN 3 forward 9:69042140-69042168; SpCas9
ggcaggagaatcacttgaacccggg

SEQ ID NO: 37014 - DNA, 24 bp, Artificial Sequence
  Synthetic: FXN 3 forward 9:69042141-69042168; SpCas9
gcaggagaatcacttgaacccggg

SEQ ID NO: 37015 - DNA, 23 bp, Artificial Sequence
  Synthetic: FXN 3 forward 9:69042142-69042168; SpCas9
caggagaatcacttgaacccggg

SEQ ID NO: 37016 - DNA, 22 bp, Artificial Sequence
  Synthetic: FXN 3 forward 9:69042143-69042168; SpCas9
aggagaatcacttgaacccggg

SEQ ID NO: 37017 - DNA, 21 bp, Artificial Sequence
  Synthetic: FXN 3 forward 9:69042144-69042168; SpCas9
ggagaatcacttgaacccggg

SEQ ID NO: 37018 - DNA, 20 bp, Artificial Sequence
  Synthetic: FXN 3 forward 9:69042145-69042168; SpCas9
gagaatcacttgaacccggg

SEQ ID NO: 37019 - DNA, 19 bp, Artificial Sequence
  Synthetic: FXN 3 forward 9:69042146-69042168; SpCas9
agaatcacttgaacccggg

SEQ ID NO: 37020 - DNA, 18 bp, Artificial Sequence
  Synthetic: FXN 3 forward 9:69042147-69042168; SpCas9
gaatcacttgaacccggg

SEQ ID NO: 37021 - DNA, 25 bp, Artificial Sequence
  Synthetic: FXN 3 forward 9:69042143-69042171; SpCas9
aggagaatcacttgaacccgggagg

SEQ ID NO: 37022 - DNA, 24 bp, Artificial Sequence
  Synthetic: FXN 3 forward 9:69042144-69042171; SpCas9
ggagaatcacttgaacccgggagg

SEQ ID NO: 37023 - DNA, 23 bp, Artificial Sequence
  Synthetic: FXN 3 forward 9:69042145-69042171; SpCas9
gagaatcacttgaacccgggagg

SEQ ID NO: 37024 - DNA, 22 bp, Artificial Sequence
  Synthetic: FXN 3 forward 9:69042146-69042171; SpCas9
agaatcacttgaacccgggagg

SEQ ID NO: 37025 - DNA, 21 bp, Artificial Sequence
  Synthetic: FXN 3 forward 9:69042147-69042171; SpCas9
gaatcacttgaacccgggagg

SEQ ID NO: 37026 - DNA, 20 bp, Artificial Sequence
  Synthetic: FXN 3 forward 9:69042148-69042171; SpCas9
aatcacttgaacccgggagg

SEQ ID NO: 37027 - DNA, 19 bp, Artificial Sequence
  Synthetic: FXN 3 forward 9:69042149-69042171; SpCas9
atcacttgaacccgggagg

SEQ ID NO: 37028 - DNA, 18 bp, Artificial Sequence
  Synthetic: FXN 3 forward 9:69042150-69042171; SpCas9
tcacttgaacccgggagg

SEQ ID NO: 37029 - DNA, 25 bp, Artificial Sequence
  Synthetic: FXN 3 forward 9:69042145-69042173; SpCas9
gagaatcacttgaacccgggaggcg

SEQ ID NO: 37030 - DNA, 24 bp, Artificial Sequence
  Synthetic: FXN 3 forward 9:69042146-69042173; SpCas9
agaatcacttgaacccgggaggcg

SEQ ID NO: 37031 - DNA, 23 bp, Artificial Sequence
  Synthetic: FXN 3 forward 9:69042147-69042173; SpCas9
gaatcacttgaacccgggaggcg

SEQ ID NO: 37032 - DNA, 22 bp, Artificial Sequence
  Synthetic: FXN 3 forward 9:69042148-69042173; SpCas9
aatcacttgaacccgggaggcg

SEQ ID NO: 37033 - DNA, 21 bp, Artificial Sequence
  Synthetic: FXN 3 forward 9:69042149-69042173; SpCas9
atcacttgaacccgggaggcg

SEQ ID NO: 37034 - DNA, 20 bp, Artificial Sequence
  Synthetic: FXN 3 forward 9:69042150-69042173; SpCas9
tcacttgaacccgggaggcg

SEQ ID NO: 37035 - DNA, 19 bp, Artificial Sequence
  Synthetic: FXN 3 forward 9:69042151-69042173; SpCas9
cacttgaacccgggaggcg

SEQ ID NO: 37036 - DNA, 18 bp, Artificial Sequence
  Synthetic: FXN 3 forward 9:69042152-69042173; SpCas9
acttgaacccgggaggcg

SEQ ID NO: 37037 - DNA, 25 bp, Artificial Sequence
  Synthetic: FXN 3 forward 9:69042146-69042174; SpCas9
agaatcacttgaacccgggaggcgg

SEQ ID NO: 37038 - DNA, 24 bp, Artificial Sequence
  Synthetic: FXN 3 forward 9:69042147-69042174; SpCas9
gaatcacttgaacccgggaggcgg

SEQ ID NO: 37039 - DNA, 23 bp, Artificial Sequence
  Synthetic: FXN 3 forward 9:69042148-69042174; SpCas9
aatcacttgaacccgggaggcgg

SEQ ID NO: 37040 - DNA, 22 bp, Artificial Sequence
  Synthetic: FXN 3 forward 9:69042149-69042174; SpCas9
atcacttgaacccgggaggcgg

SEQ ID NO: 37041 - DNA, 21 bp, Artificial Sequence
  Synthetic: FXN 3 forward 9:69042150-69042174; SpCas9
tcacttgaacccgggaggcgg

SEQ ID NO: 37042 - DNA, 20 bp, Artificial Sequence
  Synthetic: FXN 3 forward 9:69042151-69042174; SpCas9
cacttgaacccgggaggcgg

SEQ ID NO: 37043 - DNA, 19 bp, Artificial Sequence
  Synthetic: FXN 3 forward 9:69042152-69042174; SpCas9
acttgaacccgggaggcgg

SEQ ID NO: 37044 - DNA, 18 bp, Artificial Sequence
  Synthetic: FXN 3 forward 9:69042153-69042174; SpCas9
cttgaacccgggaggcgg

SEQ ID NO: 37045 - DNA, 25 bp, Artificial Sequence
  Synthetic: FXN 3 reverse 9:69042153-69042181; SpCas9
attgcaacctccgcctcccgggttc

SEQ ID NO: 37046 - DNA, 24 bp, Artificial Sequence
  Synthetic: FXN 3 reverse 9:69042154-69042181; SpCas9
ttgcaacctccgcctcccgggttc

SEQ ID NO: 37047 - DNA, 23 bp, Artificial Sequence
  Synthetic: FXN 3 reverse 9:69042155-69042181; SpCas9
tgcaacctccgcctcccgggttc

SEQ ID NO: 37048 - DNA, 22 bp, Artificial Sequence
  Synthetic: FXN 3 reverse 9:69042156-69042181; SpCas9
gcaacctccgcctcccgggttc

SEQ ID NO: 37049 - DNA, 21 bp, Artificial Sequence
  Synthetic: FXN 3 reverse 9:69042157-69042181; SpCas9
caacctccgcctcccgggttc

SEQ ID NO: 37050 - DNA, 20 bp, Artificial Sequence
  Synthetic: FXN 3 reverse 9:69042158-69042181; SpCas9
aacctccgcctcccgggttc

SEQ ID NO: 37051 - DNA, 19 bp, Artificial Sequence
  Synthetic: FXN 3 reverse 9:69042159-69042181; SpCas9
acctccgcctcccgggttc

SEQ ID NO: 37052 - DNA, 18 bp, Artificial Sequence
  Synthetic: FXN 3 reverse 9:69042160-69042181; SpCas9
cctccgcctcccgggttc

SEQ ID NO: 37053 - DNA, 25 bp, Artificial Sequence
  Synthetic: FXN 3 forward 9:69042156-69042184; SpCas9
gaacccgggaggcggaggttgcaat

SEQ ID NO: 37054 - DNA, 24 bp, Artificial Sequence
  Synthetic: FXN 3 forward 9:69042157-69042184; SpCas9
aacccgggaggcggaggttgcaat

SEQ ID NO: 37055 - DNA, 23 bp, Artificial Sequence
  Synthetic: FXN 3 forward 9:69042158-69042184; SpCas9
acccgggaggcggaggttgcaat

SEQ ID NO: 37056 - DNA, 22 bp, Artificial Sequence
  Synthetic: FXN 3 forward 9:69042159-69042184; SpCas9
cccgggaggcggaggttgcaat

SEQ ID NO: 37057 - DNA, 21 bp, Artificial Sequence
  Synthetic: FXN 3 forward 9:69042160-69042184; SpCas9
ccgggaggcggaggttgcaat

SEQ ID NO: 37058 - DNA, 20 bp, Artificial Sequence
  Synthetic: FXN 3 forward 9:69042161-69042184; SpCas9
cgggaggcggaggttgcaat

SEQ ID NO: 37059 - DNA, 19 bp, Artificial Sequence
  Synthetic: FXN 3 forward 9:69042162-69042184; SpCas9
gggaggcggaggttgcaat

SEQ ID NO: 37060 - DNA, 18 bp, Artificial Sequence
  Synthetic: FXN 3 forward 9:69042163-69042184; SpCas9
ggaggcggaggttgcaat

SEQ ID NO: 37061 - DNA, 25 bp, Artificial Sequence
  Synthetic: FXN 3 reverse 9:69042159-69042187; SpCas9
aggcttattgcaacctccgcctccc

SEQ ID NO: 37062 - DNA, 24 bp, Artificial Sequence
  Synthetic: FXN 3 reverse 9:69042160-69042187; SpCas9
ggcttattgcaacctccgcctccc

SEQ ID NO: 37063 - DNA, 23 bp, Artificial Sequence
  Synthetic: FXN 3 reverse 9:69042161-69042187; SpCas9
gcttattgcaacctccgcctccc

SEQ ID NO: 37064 - DNA, 22 bp, Artificial Sequence
  Synthetic: FXN 3 reverse 9:69042162-69042187; SpCas9
cttattgcaacctccgcctccc

SEQ ID NO: 37065 - DNA, 21 bp, Artificial Sequence
  Synthetic: FXN 3 reverse 9:69042163-69042187; SpCas9
ttattgcaacctccgcctccc

SEQ ID NO: 37066 - DNA, 20 bp, Artificial Sequence
  Synthetic: FXN 3 reverse 9:69042164-69042187; SpCas9
tattgcaacctccgcctccc

SEQ ID NO: 37067 - DNA, 19 bp, Artificial Sequence
  Synthetic: FXN 3 reverse 9:69042165-69042187; SpCas9
attgcaacctccgcctccc

SEQ ID NO: 37068 - DNA, 18 bp, Artificial Sequence
  Synthetic: FXN 3 reverse 9:69042166-69042187; SpCas9
ttgcaacctccgcctccc

SEQ ID NO: 37069 - DNA, 25 bp, Artificial Sequence
  Synthetic: FXN 3 reverse 9:69042160-69042188; SpCas9
taggcttattgcaacctccgcctcc

SEQ ID NO: 37070 - DNA, 24 bp, Artificial Sequence
  Synthetic: FXN 3 reverse 9:69042161-69042188; SpCas9
aggcttattgcaacctccgcctcc

SEQ ID NO: 37071 - DNA, 23 bp, Artificial Sequence
  Synthetic: FXN 3 reverse 9:69042162-69042188; SpCas9
ggcttattgcaacctccgcctcc

SEQ ID NO: 37072 - DNA, 22 bp, Artificial Sequence
  Synthetic: FXN 3 reverse 9:69042163-69042188; SpCas9
gcttattgcaacctccgcctcc

SEQ ID NO: 37073 - DNA, 21 bp, Artificial Sequence
  Synthetic: FXN 3 reverse 9:69042164-69042188; SpCas9
cttattgcaacctccgcctcc

SEQ ID NO: 37074 - DNA, 20 bp, Artificial Sequence
  Synthetic: FXN 3 reverse 9:69042165-69042188; SpCas9
ttattgcaacctccgcctcc

SEQ ID NO: 37075 - DNA, 19 bp, Artificial Sequence
  Synthetic: FXN 3 reverse 9:69042166-69042188; SpCas9
tattgcaacctccgcctcc

SEQ ID NO: 37076 - DNA, 18 bp, Artificial Sequence
  Synthetic: FXN 3 reverse 9:69042167-69042188; SpCas9
attgcaacctccgcctcc

SEQ ID NO: 37077 - DNA, 25 bp, Artificial Sequence
  Synthetic: FXN 3 forward 9:69042161-69042189; SpCas9
cgggaggcggaggttgcaataagcc

SEQ ID NO: 37078 - DNA, 24 bp, Artificial Sequence
  Synthetic: FXN 3 forward 9:69042162-69042189; SpCas9
gggaggcggaggttgcaataagcc

SEQ ID NO: 37079 - DNA, 23 bp, Artificial Sequence
  Synthetic: FXN 3 forward 9:69042163-69042189; SpCas9
ggaggcggaggttgcaataagcc

SEQ ID NO: 37080 - DNA, 22 bp, Artificial Sequence
  Synthetic: FXN 3 forward 9:69042164-69042189; SpCas9
gaggcggaggttgcaataagcc

SEQ ID NO: 37081 - DNA, 21 bp, Artificial Sequence
  Synthetic: FXN 3 forward 9:69042165-69042189; SpCas9
aggcggaggttgcaataagcc

SEQ ID NO: 37082 - DNA, 20 bp, Artificial Sequence
  Synthetic: FXN 3 forward 9:69042166-69042189; SpCas9
ggcggaggttgcaataagcc

SEQ ID NO: 37083 - DNA, 19 bp, Artificial Sequence
  Synthetic: FXN 3 forward 9:69042167-69042189; SpCas9
gcggaggttgcaataagcc

SEQ ID NO: 37084 - DNA, 18 bp, Artificial Sequence
  Synthetic: FXN 3 forward 9:69042168-69042189; SpCas9
cggaggttgcaataagcc

SEQ ID NO: 37085 - DNA, 25 bp, Artificial Sequence
  Synthetic: FXN 3 forward 9:69042181-69042209; SpCas9
aagcctagattgtgccactgcattc

SEQ ID NO: 37086 - DNA, 24 bp, Artificial Sequence
  Synthetic: FXN 3 forward 9:69042182-69042209; SpCas9
agcctagattgtgccactgcattc

SEQ ID NO: 37087 - DNA, 23 bp, Artificial Sequence
  Synthetic: FXN 3 forward 9:69042183-69042209; SpCas9
gcctagattgtgccactgcattc

SEQ ID NO: 37088 - DNA, 22 bp, Artificial Sequence
  Synthetic: FXN 3 forward 9:69042184-69042209; SpCas9
cctagattgtgccactgcattc

SEQ ID NO: 37089 - DNA, 21 bp, Artificial Sequence
  Synthetic: FXN 3 forward 9:69042185-69042209; SpCas9
ctagattgtgccactgcattc

SEQ ID NO: 37090 - DNA, 20 bp, Artificial Sequence
  Synthetic: FXN 3 forward 9:69042186-69042209; SpCas9
tagattgtgccactgcattc

SEQ ID NO: 37091 - DNA, 19 bp, Artificial Sequence
  Synthetic: FXN 3 forward 9:69042187-69042209; SpCas9
agattgtgccactgcattc

SEQ ID NO: 37092 - DNA, 18 bp, Artificial Sequence
  Synthetic: FXN 3 forward 9:69042188-69042209; SpCas9
gattgtgccactgcattc

SEQ ID NO: 37093 - DNA, 25 bp, Artificial Sequence
  Synthetic: FXN 3 reverse 9:69042184-69042212; SpCas9
aggctggaatgcagtggcacaatct

SEQ ID NO: 37094 - DNA, 24 bp, Artificial Sequence
  Synthetic: FXN 3 reverse 9:69042185-69042212; SpCas9
ggctggaatgcagtggcacaatct

SEQ ID NO: 37095 - DNA, 23 bp, Artificial Sequence
  Synthetic: FXN 3 reverse 9:69042186-69042212; SpCas9
gctggaatgcagtggcacaatct

SEQ ID NO: 37096 - DNA, 22 bp, Artificial Sequence
  Synthetic: FXN 3 reverse 9:69042187-69042212; SpCas9
ctggaatgcagtggcacaatct

SEQ ID NO: 37097 - DNA, 21 bp, Artificial Sequence
  Synthetic: FXN 3 reverse 9:69042188-69042212; SpCas9
tggaatgcagtggcacaatct

SEQ ID NO: 37098 - DNA, 20 bp, Artificial Sequence
  Synthetic: FXN 3 reverse 9:69042189-69042212; SpCas9
ggaatgcagtggcacaatct

SEQ ID NO: 37099 - DNA, 19 bp, Artificial Sequence
  Synthetic: FXN 3 reverse 9:69042190-69042212; SpCas9
gaatgcagtggcacaatct

SEQ ID NO: 37100 - DNA, 18 bp, Artificial Sequence
  Synthetic: FXN 3 reverse 9:69042191-69042212; SpCas9
aatgcagtggcacaatct

SEQ ID NO: 37101 - DNA, 25 bp, Artificial Sequence
  Synthetic: FXN 3 reverse 9:69042185-69042213; SpCas9
caggctggaatgcagtggcacaatc

SEQ ID NO: 37102 - DNA, 24 bp, Artificial Sequence
  Synthetic: FXN 3 reverse 9:69042186-69042213; SpCas9
aggctggaatgcagtggcacaatc

SEQ ID NO: 37103 - DNA, 23 bp, Artificial Sequence
  Synthetic: FXN 3 reverse 9:69042187-69042213; SpCas9
ggctggaatgcagtggcacaatc

SEQ ID NO: 37104 - DNA, 22 bp, Artificial Sequence
  Synthetic: FXN 3 reverse 9:69042188-69042213; SpCas9
gctggaatgcagtggcacaatc

SEQ ID NO: 37105 - DNA, 21 bp, Artificial Sequence
  Synthetic: FXN 3 reverse 9:69042189-69042213; SpCas9
ctggaatgcagtggcacaatc

SEQ ID NO: 37106 - DNA, 20 bp, Artificial Sequence
  Synthetic: FXN 3 reverse 9:69042190-69042213; SpCas9
tggaatgcagtggcacaatc

SEQ ID NO: 37107 - DNA, 19 bp, Artificial Sequence
  Synthetic: FXN 3 reverse 9:69042191-69042213; SpCas9
ggaatgcagtggcacaatc

SEQ ID NO: 37108 - DNA, 18 bp, Artificial Sequence
  Synthetic: FXN 3 reverse 9:69042192-69042213; SpCas9
gaatgcagtggcacaatc

SEQ ID NO: 37109 - DNA, 25 bp, Artificial Sequence
  Synthetic: FXN 3 forward 9:69042186-69042214; SpCas9
tagattgtgccactgcattccagcc

SEQ ID NO: 37110 - DNA, 24 bp, Artificial Sequence
  Synthetic: FXN 3 forward 9:69042187-69042214; SpCas9
agattgtgccactgcattccagcc

SEQ ID NO: 37111 - DNA, 23 bp, Artificial Sequence
  Synthetic: FXN 3 forward 9:69042188-69042214; SpCas9
gattgtgccactgcattccagcc

SEQ ID NO: 37112 - DNA, 22 bp, Artificial Sequence
  Synthetic: FXN 3 forward 9:69042189-69042214; SpCas9
attgtgccactgcattccagcc

SEQ ID NO: 37113 - DNA, 21 bp, Artificial Sequence
  Synthetic: FXN 3 forward 9:69042190-69042214; SpCas9
ttgtgccactgcattccagcc

SEQ ID NO: 37114 - DNA, 20 bp, Artificial Sequence
  Synthetic: FXN 3 forward 9:69042191-69042214; SpCas9
tgtgccactgcattccagcc

SEQ ID NO: 37115 - DNA, 19 bp, Artificial Sequence
  Synthetic: FXN 3 forward 9:69042192-69042214; SpCas9
gtgccactgcattccagcc

SEQ ID NO: 37116 - DNA, 18 bp, Artificial Sequence
  Synthetic: FXN 3 forward 9:69042193-69042214; SpCas9
tgccactgcattccagcc

SEQ ID NO: 37117 - DNA, 25 bp, Artificial Sequence
  Synthetic: FXN 3 forward 9:69042187-69042215; SpCas9
agattgtgccactgcattccagcct

SEQ ID NO: 37118 - DNA, 24 bp, Artificial Sequence
  Synthetic: FXN 3 forward 9:69042188-69042215; SpCas9
gattgtgccactgcattccagcct

SEQ ID NO: 37119 - DNA, 23 bp, Artificial Sequence
  Synthetic: FXN 3 forward 9:69042189-69042215; SpCas9
attgtgccactgcattccagcct

SEQ ID NO: 37120 - DNA, 22 bp, Artificial Sequence
  Synthetic: FXN 3 forward 9:69042190-69042215; SpCas9
ttgtgccactgcattccagcct

SEQ ID NO: 37121 - DNA, 21 bp, Artificial Sequence
  Synthetic: FXN 3 forward 9:69042191-69042215; SpCas9
tgtgccactgcattccagcct

SEQ ID NO: 37122 - DNA, 20 bp, Artificial Sequence
  Synthetic: FXN 3 forward 9:69042192-69042215; SpCas9
gtgccactgcattccagcct

SEQ ID NO: 37123 - DNA, 19 bp, Artificial Sequence
  Synthetic: FXN 3 forward 9:69042193-69042215; SpCas9
tgccactgcattccagcct

SEQ ID NO: 37124 - DNA, 18 bp, Artificial Sequence
  Synthetic: FXN 3 forward 9:69042194-69042215; SpCas9
gccactgcattccagcct

SEQ ID NO: 37125 - DNA, 25 bp, Artificial Sequence
  Synthetic: FXN 3 forward 9:69042193-69042221; SpCas9
tgccactgcattccagcctgggcaa

SEQ ID NO: 37126 - DNA, 24 bp, Artificial Sequence
  Synthetic: FXN 3 forward 9:69042194-69042221; SpCas9
gccactgcattccagcctgggcaa

SEQ ID NO: 37127 - DNA, 23 bp, Artificial Sequence
  Synthetic: FXN 3 forward 9:69042195-69042221; SpCas9
ccactgcattccagcctgggcaa

SEQ ID NO: 37128 - DNA, 22 bp, Artificial Sequence
  Synthetic: FXN 3 forward 9:69042196-69042221; SpCas9
cactgcattccagcctgggcaa

SEQ ID NO: 37129 - DNA, 21 bp, Artificial Sequence
  Synthetic: FXN 3 forward 9:69042197-69042221; SpCas9
actgcattccagcctgggcaa

SEQ ID NO: 37130 - DNA, 20 bp, Artificial Sequence
  Synthetic: FXN 3 forward 9:69042198-69042221; SpCas9
ctgcattccagcctgggcaa

SEQ ID NO: 37131 - DNA, 19 bp, Artificial Sequence
  Synthetic: FXN 3 forward 9:69042199-69042221; SpCas9
tgcattccagcctgggcaa

SEQ ID NO: 37132 - DNA, 18 bp, Artificial Sequence
  Synthetic: FXN 3 forward 9:69042200-69042221; SpCas9
gcattccagcctgggcaa

SEQ ID NO: 37133 - DNA, 25 bp, Artificial Sequence
  Synthetic: FXN 3 forward 9:69042195-69042223; SpCas9
ccactgcattccagcctgggcaaca

SEQ ID NO: 37134 - DNA, 24 bp, Artificial Sequence
  Synthetic: FXN 3 forward 9:69042196-69042223; SpCas9
cactgcattccagcctgggcaaca

SEQ ID NO: 37135 - DNA, 23 bp, Artificial Sequence
  Synthetic: FXN 3 forward 9:69042197-69042223; SpCas9
actgcattccagcctgggcaaca

SEQ ID NO: 37136 - DNA, 22 bp, Artificial Sequence
  Synthetic: FXN 3 forward 9:69042198-69042223; SpCas9
ctgcattccagcctgggcaaca

SEQ ID NO: 37137 - DNA, 21 bp, Artificial Sequence
  Synthetic: FXN 3 forward 9:69042199-69042223; SpCas9
tgcattccagcctgggcaaca

SEQ ID NO: 37138 - DNA, 20 bp, Artificial Sequence
  Synthetic: FXN 3 forward 9:69042200-69042223; SpCas9
gcattccagcctgggcaaca

SEQ ID NO: 37139 - DNA, 19 bp, Artificial Sequence
  Synthetic: FXN 3 forward 9:69042201-69042223; SpCas9
cattccagcctgggcaaca

SEQ ID NO: 37140 - DNA, 18 bp, Artificial Sequence
  Synthetic: FXN 3 forward 9:69042202-69042223; SpCas9
attccagcctgggcaaca

SEQ ID NO: 37141 - DNA, 25 bp, Artificial Sequence
  Synthetic: FXN 3 reverse 9:69042195-69042223; SpCas9
ctctgttgcccaggctggaatgcag

SEQ ID NO: 37142 - DNA, 24 bp, Artificial Sequence
  Synthetic: FXN 3 reverse 9:69042196-69042223; SpCas9
tctgttgcccaggctggaatgcag

SEQ ID NO: 37143 - DNA, 23 bp, Artificial Sequence
  Synthetic: FXN 3 reverse 9:69042197-69042223; SpCas9
ctgttgcccaggctggaatgcag

SEQ ID NO: 37144 - DNA, 22 bp, Artificial Sequence
  Synthetic: FXN 3 reverse 9:69042198-69042223; SpCas9
tgttgcccaggctggaatgcag

SEQ ID NO: 37145 - DNA, 21 bp, Artificial Sequence
  Synthetic: FXN 3 reverse 9:69042199-69042223; SpCas9
gttgcccaggctggaatgcag

SEQ ID NO: 37146 - DNA, 20 bp, Artificial Sequence
  Synthetic: FXN 3 reverse 9:69042200-69042223; SpCas9
ttgcccaggctggaatgcag

SEQ ID NO: 37147 - DNA, 19 bp, Artificial Sequence
  Synthetic: FXN 3 reverse 9:69042201-69042223; SpCas9
tgcccaggctggaatgcag

SEQ ID NO: 37148 - DNA, 18 bp, Artificial Sequence
  Synthetic: FXN 3 reverse 9:69042202-69042223; SpCas9
gcccaggctggaatgcag

SEQ ID NO: 37149 - DNA, 25 bp, Artificial Sequence
  Synthetic: FXN 3 reverse 9:69042198-69042226; SpCas9
ttgctctgttgcccaggctggaatg

SEQ ID NO: 37150 - DNA, 24 bp, Artificial Sequence
  Synthetic: FXN 3 reverse 9:69042199-69042226; SpCas9
tgctctgttgcccaggctggaatg

SEQ ID NO: 37151 - DNA, 23 bp, Artificial Sequence
  Synthetic: FXN 3 reverse 9:69042200-69042226; SpCas9
gctctgttgcccaggctggaatg

SEQ ID NO: 37152 - DNA, 22 bp, Artificial Sequence
  Synthetic: FXN 3 reverse 9:69042201-69042226; SpCas9
ctctgttgcccaggctggaatg

SEQ ID NO: 37153 - DNA, 21 bp, Artificial Sequence
  Synthetic: FXN 3 reverse 9:69042202-69042226; SpCas9
tctgttgcccaggctggaatg

SEQ ID NO: 37154 - DNA, 20 bp, Artificial Sequence
  Synthetic: FXN 3 reverse 9:69042203-69042226; SpCas9
ctgttgcccaggctggaatg

SEQ ID NO: 37155 - DNA, 19 bp, Artificial Sequence
  Synthetic: FXN 3 reverse 9:69042204-69042226; SpCas9
tgttgcccaggctggaatg

SEQ ID NO: 37156 - DNA, 18 bp, Artificial Sequence
  Synthetic: FXN 3 reverse 9:69042205-69042226; SpCas9
gttgcccaggctggaatg

SEQ ID NO: 37157 - DNA, 25 bp, Artificial Sequence
  Synthetic: FXN 3 forward 9:69042199-69042227; SpCas9
tgcattccagcctgggcaacagagc

SEQ ID NO: 37158 - DNA, 24 bp, Artificial Sequence
  Synthetic: FXN 3 forward 9:69042200-69042227; SpCas9
gcattccagcctgggcaacagagc

SEQ ID NO: 37159 - DNA, 23 bp, Artificial Sequence
  Synthetic: FXN 3 forward 9:69042201-69042227; SpCas9
cattccagcctgggcaacagagc

SEQ ID NO: 37160 - DNA, 22 bp, Artificial Sequence
  Synthetic: FXN 3 forward 9:69042202-69042227; SpCas9
attccagcctgggcaacagagc

SEQ ID NO: 37161 - DNA, 21 bp, Artificial Sequence
  Synthetic: FXN 3 forward 9:69042203-69042227; SpCas9
ttccagcctgggcaacagagc

SEQ ID NO: 37162 - DNA, 20 bp, Artificial Sequence
  Synthetic: FXN 3 forward 9:69042204-69042227; SpCas9
tccagcctgggcaacagagc

SEQ ID NO: 37163 - DNA, 19 bp, Artificial Sequence
  Synthetic: FXN 3 forward 9:69042205-69042227; SpCas9
ccagcctgggcaacagagc

SEQ ID NO: 37164 - DNA, 18 bp, Artificial Sequence
  Synthetic: FXN 3 forward 9:69042206-69042227; SpCas9
cagcctgggcaacagagc

SEQ ID NO: 37165 - DNA, 25 bp, Artificial Sequence
  Synthetic: FXN 3 reverse 9:69042205-69042233; SpCas9
cggagtcttgctctgttgcccaggc

SEQ ID NO: 37166 - DNA, 24 bp, Artificial Sequence
  Synthetic: FXN 3 reverse 9:69042206-69042233; SpCas9
ggagtcttgctctgttgcccaggc

SEQ ID NO: 37167 - DNA, 23 bp, Artificial Sequence
  Synthetic: FXN 3 reverse 9:69042207-69042233; SpCas9
gagtcttgctctgttgcccaggc

SEQ ID NO: 37168 - DNA, 22 bp, Artificial Sequence
  Synthetic: FXN 3 reverse 9:69042208-69042233; SpCas9
agtcttgctctgttgcccaggc

SEQ ID NO: 37169 - DNA, 21 bp, Artificial Sequence
  Synthetic: FXN 3 reverse 9:69042209-69042233; SpCas9
gtcttgctctgttgcccaggc

SEQ ID NO: 37170 - DNA, 20 bp, Artificial Sequence
  Synthetic: FXN 3 reverse 9:69042210-69042233; SpCas9
tcttgctctgttgcccaggc

SEQ ID NO: 37171 - DNA, 19 bp, Artificial Sequence
  Synthetic: FXN 3 reverse 9:69042211-69042233; SpCas9
cttgctctgttgcccaggc

SEQ ID NO: 37172 - DNA, 18 bp, Artificial Sequence
  Synthetic: FXN 3 reverse 9:69042212-69042233; SpCas9
ttgctctgttgcccaggc

SEQ ID NO: 37173 - DNA, 25 bp, Artificial Sequence
  Synthetic: FXN 3 reverse 9:69042209-69042237; SpCas9
gagacggagtcttgctctgttgccc

SEQ ID NO: 37174 - DNA, 24 bp, Artificial Sequence
  Synthetic: FXN 3 reverse 9:69042210-69042237; SpCas9
agacggagtcttgctctgttgccc

SEQ ID NO: 37175 - DNA, 23 bp, Artificial Sequence
  Synthetic: FXN 3 reverse 9:69042211-69042237; SpCas9
gacggagtcttgctctgttgccc

SEQ ID NO: 37176 - DNA, 22 bp, Artificial Sequence
  Synthetic: FXN 3 reverse 9:69042212-69042237; SpCas9
acggagtcttgctctgttgccc

SEQ ID NO: 37177 - DNA, 21 bp, Artificial Sequence
  Synthetic: FXN 3 reverse 9:69042213-69042237; SpCas9
cggagtcttgctctgttgccc

SEQ ID NO: 37178 - DNA, 20 bp, Artificial Sequence
  Synthetic: FXN 3 reverse 9:69042214-69042237; SpCas9
ggagtcttgctctgttgccc

SEQ ID NO: 37179 - DNA, 19 bp, Artificial Sequence
  Synthetic: FXN 3 reverse 9:69042215-69042237; SpCas9
gagtcttgctctgttgccc

SEQ ID NO: 37180 - DNA, 18 bp, Artificial Sequence
  Synthetic: FXN 3 reverse 9:69042216-69042237; SpCas9
agtcttgctctgttgccc

SEQ ID NO: 37181 - DNA, 25 bp, Artificial Sequence
  Synthetic: FXN 3 reverse 9:69042210-69042238; SpCas9
tgagacggagtcttgctctgttgcc

SEQ ID NO: 37182 - DNA, 24 bp, Artificial Sequence
  Synthetic: FXN 3 reverse 9:69042211-69042238; SpCas9
gagacggagtcttgctctgttgcc

SEQ ID NO: 37183 - DNA, 23 bp, Artificial Sequence
  Synthetic: FXN 3 reverse 9:69042212-69042238; SpCas9
agacggagtcttgctctgttgcc

SEQ ID NO: 37184 - DNA, 22 bp, Artificial Sequence
  Synthetic: FXN 3 reverse 9:69042213-69042238; SpCas9
gacggagtcttgctctgttgcc

SEQ ID NO: 37185 - DNA, 21 bp, Artificial Sequence
  Synthetic: FXN 3 reverse 9:69042214-69042238; SpCas9
acggagtcttgctctgttgcc

SEQ ID NO: 37186 - DNA, 20 bp, Artificial Sequence
  Synthetic: FXN 3 reverse 9:69042215-69042238; SpCas9
cggagtcttgctctgttgcc

SEQ ID NO: 37187 - DNA, 19 bp, Artificial Sequence
  Synthetic: FXN 3 reverse 9:69042216-69042238; SpCas9
ggagtcttgctctgttgcc

SEQ ID NO: 37188 - DNA, 18 bp, Artificial Sequence
  Synthetic: FXN 3 reverse 9:69042217-69042238; SpCas9
gagtcttgctctgttgcc

SEQ ID NO: 37189 - DNA, 25 bp, Artificial Sequence
  Synthetic: FXN 3 forward 9:69042211-69042239; SpCas9
tgggcaacagagcaagactccgtct

SEQ ID NO: 37190 - DNA, 24 bp, Artificial Sequence
  Synthetic: FXN 3 forward 9:69042212-69042239; SpCas9
gggcaacagagcaagactccgtct

SEQ ID NO: 37191 - DNA, 23 bp, Artificial Sequence
  Synthetic: FXN 3 forward 9:69042213-69042239; SpCas9
ggcaacagagcaagactccgtct

SEQ ID NO: 37192 - DNA, 22 bp, Artificial Sequence
  Synthetic: FXN 3 forward 9:69042214-69042239; SpCas9
gcaacagagcaagactccgtct

SEQ ID NO: 37193 - DNA, 21 bp, Artificial Sequence
  Synthetic: FXN 3 forward 9:69042215-69042239; SpCas9
caacagagcaagactccgtct

SEQ ID NO: 37194 - DNA, 20 bp, Artificial Sequence
  Synthetic: FXN 3 forward 9:69042216-69042239; SpCas9
aacagagcaagactccgtct

SEQ ID NO: 37195 - DNA, 19 bp, Artificial Sequence
  Synthetic: FXN 3 forward 9:69042217-69042239; SpCas9
acagagcaagactccgtct

SEQ ID NO: 37196 - DNA, 18 bp, Artificial Sequence
  Synthetic: FXN 3 forward 9:69042218-69042239; SpCas9
cagagcaagactccgtct

SEQ ID NO: 37197 - DNA, 25 bp, Artificial Sequence
  Synthetic: FXN 3 forward 9:69042227-69042255; SpCas9
actccgtctcagaaaaaaaaaaaaa

SEQ ID NO: 37198 - DNA, 24 bp, Artificial Sequence
  Synthetic: FXN 3 forward 9:69042228-69042255; SpCas9
ctccgtctcagaaaaaaaaaaaaa

SEQ ID NO: 37199 - DNA, 23 bp, Artificial Sequence
  Synthetic: FXN 3 forward 9:69042229-69042255; SpCas9
tccgtctcagaaaaaaaaaaaaa

SEQ ID NO: 37200 - DNA, 22 bp, Artificial Sequence
  Synthetic: FXN 3 forward 9:69042230-69042255; SpCas9
ccgtctcagaaaaaaaaaaaaa

SEQ ID NO: 37201 - DNA, 21 bp, Artificial Sequence
  Synthetic: FXN 3 forward 9:69042231-69042255; SpCas9
cgtctcagaaaaaaaaaaaaa

SEQ ID NO: 37202 - DNA, 20 bp, Artificial Sequence
  Synthetic: FXN 3 forward 9:69042232-69042255; SpCas9
gtctcagaaaaaaaaaaaaa

SEQ ID NO: 37203 - DNA, 19 bp, Artificial Sequence
  Synthetic: FXN 3 forward 9:69042233-69042255; SpCas9
tctcagaaaaaaaaaaaaa

SEQ ID NO: 37204 - DNA, 18 bp, Artificial Sequence
  Synthetic: FXN 3 forward 9:69042234-69042255; SpCas9
ctcagaaaaaaaaaaaaa

SEQ ID NO: 37205 - DNA, 25 bp, Artificial Sequence
  Synthetic: FXN 3 forward 9:69042228-69042256; SpCas9
ctccgtctcagaaaaaaaaaaaaaa

SEQ ID NO: 37206 - DNA, 24 bp, Artificial Sequence
  Synthetic: FXN 3 forward 9:69042229-69042256; SpCas9
tccgtctcagaaaaaaaaaaaaaa

SEQ ID NO: 37207 - DNA, 23 bp, Artificial Sequence
  Synthetic: FXN 3 forward 9:69042230-69042256; SpCas9
ccgtctcagaaaaaaaaaaaaaa

SEQ ID NO: 37208 - DNA, 22 bp, Artificial Sequence
  Synthetic: FXN 3 forward 9:69042231-69042256; SpCas9
cgtctcagaaaaaaaaaaaaaa

SEQ ID NO: 37209 - DNA, 21 bp, Artificial Sequence
  Synthetic: FXN 3 forward 9:69042232-69042256; SpCas9
gtctcagaaaaaaaaaaaaaa

SEQ ID NO: 37210 - DNA, 20 bp, Artificial Sequence
  Synthetic: FXN 3 forward 9:69042233-69042256; SpCas9
tctcagaaaaaaaaaaaaaa

SEQ ID NO: 37211 - DNA, 19 bp, Artificial Sequence
  Synthetic: FXN 3 forward 9:69042234-69042256; SpCas9
ctcagaaaaaaaaaaaaaa

SEQ ID NO: 37212 - DNA, 18 bp, Artificial Sequence
  Synthetic: FXN 3 forward 9:69042235-69042256; SpCas9
tcagaaaaaaaaaaaaaa

SEQ ID NO: 37213 - DNA, 25 bp, Artificial Sequence
  Synthetic: FXN 3 reverse 9:69042228-69042256; SpCas9
cctttttttttttttttctgagacg

SEQ ID NO: 37214 - DNA, 24 bp, Artificial Sequence
  Synthetic: FXN 3 reverse 9:69042229-69042256; SpCas9
ctttttttttttttttctgagacg

SEQ ID NO: 37215 - DNA, 23 bp, Artificial Sequence
  Synthetic: FXN 3 reverse 9:69042230-69042256; SpCas9
tttttttttttttttctgagacg

SEQ ID NO: 37216 - DNA, 22 bp, Artificial Sequence
  Synthetic: FXN 3 reverse 9:69042231-69042256; SpCas9
ttttttttttttttctgagacg

SEQ ID NO: 37217 - DNA, 21 bp, Artificial Sequence
  Synthetic: FXN 3 reverse 9:69042232-69042256; SpCas9
tttttttttttttctgagacg

SEQ ID NO: 37218 - DNA, 20 bp, Artificial Sequence
  Synthetic: FXN 3 reverse 9:69042233-69042256; SpCas9
ttttttttttttctgagacg

SEQ ID NO: 37219 - DNA, 19 bp, Artificial Sequence
  Synthetic: FXN 3 reverse 9:69042234-69042256; SpCas9
tttttttttttctgagacg

SEQ ID NO: 37220 - DNA, 18 bp, Artificial Sequence
  Synthetic: FXN 3 reverse 9:69042235-69042256; SpCas9
ttttttttttctgagacg

SEQ ID NO: 37221 - DNA, 25 bp, Artificial Sequence
  Synthetic: FXN 3 reverse 9:69042230-69042258; SpCas9
ttcctttttttttttttttctgaga

SEQ ID NO: 37222 - DNA, 24 bp, Artificial Sequence
  Synthetic: FXN 3 reverse 9:69042231-69042258; SpCas9
tcctttttttttttttttctgaga

SEQ ID NO: 37223 - DNA, 23 bp, Artificial Sequence
  Synthetic: FXN 3 reverse 9:69042232-69042258; SpCas9
cctttttttttttttttctgaga

SEQ ID NO: 37224 - DNA, 22 bp, Artificial Sequence
  Synthetic: FXN 3 reverse 9:69042233-69042258; SpCas9
ctttttttttttttttctgaga

SEQ ID NO: 37225 - DNA, 21 bp, Artificial Sequence
  Synthetic: FXN 3 reverse 9:69042234-69042258; SpCas9
tttttttttttttttctgaga

SEQ ID NO: 37226 - DNA, 20 bp, Artificial Sequence
  Synthetic: FXN 3 reverse 9:69042235-69042258; SpCas9
ttttttttttttttctgaga

SEQ ID NO: 37227 - DNA, 19 bp, Artificial Sequence
  Synthetic: FXN 3 reverse 9:69042236-69042258; SpCas9
tttttttttttttctgaga

SEQ ID NO: 37228 - DNA, 18 bp, Artificial Sequence
  Synthetic: FXN 3 reverse 9:69042237-69042258; SpCas9
ttttttttttttctgaga

SEQ ID NO: 37229 - DNA, 25 bp, Artificial Sequence
  Synthetic: FXN 3 forward 9:69042231-69042259; SpCas9
cgtctcagaaaaaaaaaaaaaaagg

SEQ ID NO: 37230 - DNA, 24 bp, Artificial Sequence
  Synthetic: FXN 3 forward 9:69042232-69042259; SpCas9
gtctcagaaaaaaaaaaaaaaagg

SEQ ID NO: 37231 - DNA, 23 bp, Artificial Sequence
  Synthetic: FXN 3 forward 9:69042233-69042259; SpCas9
tctcagaaaaaaaaaaaaaaagg

SEQ ID NO: 37232 - DNA, 22 bp, Artificial Sequence
  Synthetic: FXN 3 forward 9:69042234-69042259; SpCas9
ctcagaaaaaaaaaaaaaaagg

SEQ ID NO: 37233 - DNA, 21 bp, Artificial Sequence
  Synthetic: FXN 3 forward 9:69042235-69042259; SpCas9
tcagaaaaaaaaaaaaaaagg

SEQ ID NO: 37234 - DNA, 20 bp, Artificial Sequence
  Synthetic: FXN 3 forward 9:69042236-69042259; SpCas9
cagaaaaaaaaaaaaaaagg

SEQ ID NO: 37235 - DNA, 19 bp, Artificial Sequence
  Synthetic: FXN 3 forward 9:69042237-69042259; SpCas9
agaaaaaaaaaaaaaaagg

SEQ ID NO: 37236 - DNA, 18 bp, Artificial Sequence
  Synthetic: FXN 3 forward 9:69042238-69042259; SpCas9
gaaaaaaaaaaaaaaagg

SEQ ID NO: 37237 - DNA, 25 bp, Artificial Sequence
  Synthetic: FXN 3 reverse 9:69042234-69042262; SpCas9
gttcttcctttttttttttttttct

SEQ ID NO: 37238 - DNA, 24 bp, Artificial Sequence
  Synthetic: FXN 3 reverse 9:69042235-69042262; SpCas9
ttcttcctttttttttttttttct

SEQ ID NO: 37239 - DNA, 23 bp, Artificial Sequence
  Synthetic: FXN 3 reverse 9:69042236-69042262; SpCas9
tcttcctttttttttttttttct

SEQ ID NO: 37240 - DNA, 22 bp, Artificial Sequence
  Synthetic: FXN 3 reverse 9:69042237-69042262; SpCas9
cttcctttttttttttttttct

SEQ ID NO: 37241 - DNA, 21 bp, Artificial Sequence
  Synthetic: FXN 3 reverse 9:69042238-69042262; SpCas9
ttcctttttttttttttttct

SEQ ID NO: 37242 - DNA, 20 bp, Artificial Sequence
  Synthetic: FXN 3 reverse 9:69042239-69042262; SpCas9
tcctttttttttttttttct

SEQ ID NO: 37243 - DNA, 19 bp, Artificial Sequence
  Synthetic: FXN 3 reverse 9:69042240-69042262; SpCas9
cctttttttttttttttct

SEQ ID NO: 37244 - DNA, 18 bp, Artificial Sequence
  Synthetic: FXN 3 reverse 9:69042241-69042262; SpCas9
ctttttttttttttttct

SEQ ID NO: 37245 - DNA, 25 bp, Artificial Sequence
  Synthetic: FXN 3 forward 9:69042261-69042289; SpCas9
cactcatcctatgaccttgacctcc

SEQ ID NO: 37246 - DNA, 24 bp, Artificial Sequence
  Synthetic: FXN 3 forward 9:69042262-69042289; SpCas9
actcatcctatgaccttgacctcc

SEQ ID NO: 37247 - DNA, 23 bp, Artificial Sequence
  Synthetic: FXN 3 forward 9:69042263-69042289; SpCas9
ctcatcctatgaccttgacctcc

SEQ ID NO: 37248 - DNA, 22 bp, Artificial Sequence
  Synthetic: FXN 3 forward 9:69042264-69042289; SpCas9
tcatcctatgaccttgacctcc

SEQ ID NO: 37249 - DNA, 21 bp, Artificial Sequence
  Synthetic: FXN 3 forward 9:69042265-69042289; SpCas9
catcctatgaccttgacctcc

SEQ ID NO: 37250 - DNA, 20 bp, Artificial Sequence
  Synthetic: FXN 3 forward 9:69042266-69042289; SpCas9
atcctatgaccttgacctcc

SEQ ID NO: 37251 - DNA, 19 bp, Artificial Sequence
  Synthetic: FXN 3 forward 9:69042267-69042289; SpCas9
tcctatgaccttgacctcc

SEQ ID NO: 37252 - DNA, 18 bp, Artificial Sequence
  Synthetic: FXN 3 forward 9:69042268-69042289; SpCas9
cctatgaccttgacctcc

SEQ ID NO: 37253 - DNA, 25 bp, Artificial Sequence
  Synthetic: FXN 3 reverse 9:69042263-69042291; SpCas9
agcttggaggtcaaggtcataggat

SEQ ID NO: 37254 - DNA, 24 bp, Artificial Sequence
  Synthetic: FXN 3 reverse 9:69042264-69042291; SpCas9
gcttggaggtcaaggtcataggat

SEQ ID NO: 37255 - DNA, 23 bp, Artificial Sequence
  Synthetic: FXN 3 reverse 9:69042265-69042291; SpCas9
cttggaggtcaaggtcataggat

SEQ ID NO: 37256 - DNA, 22 bp, Artificial Sequence
  Synthetic: FXN 3 reverse 9:69042266-69042291; SpCas9
ttggaggtcaaggtcataggat

SEQ ID NO: 37257 - DNA, 21 bp, Artificial Sequence
  Synthetic: FXN 3 reverse 9:69042267-69042291; SpCas9
tggaggtcaaggtcataggat

SEQ ID NO: 37258 - DNA, 20 bp, Artificial Sequence
  Synthetic: FXN 3 reverse 9:69042268-69042291; SpCas9
ggaggtcaaggtcataggat

SEQ ID NO: 37259 - DNA, 19 bp, Artificial Sequence
  Synthetic: FXN 3 reverse 9:69042269-69042291; SpCas9
gaggtcaaggtcataggat

SEQ ID NO: 37260 - DNA, 18 bp, Artificial Sequence
  Synthetic: FXN 3 reverse 9:69042270-69042291; SpCas9
aggtcaaggtcataggat

SEQ ID NO: 37261 - DNA, 25 bp, Artificial Sequence
  Synthetic: FXN 3 reverse 9:69042268-69042296; SpCas9
ggcaaagcttggaggtcaaggtcat

SEQ ID NO: 37262 - DNA, 24 bp, Artificial Sequence
  Synthetic: FXN 3 reverse 9:69042269-69042296; SpCas9
gcaaagcttggaggtcaaggtcat

SEQ ID NO: 37263 - DNA, 23 bp, Artificial Sequence
  Synthetic: FXN 3 reverse 9:69042270-69042296; SpCas9
caaagcttggaggtcaaggtcat

SEQ ID NO: 37264 - DNA, 22 bp, Artificial Sequence
  Synthetic: FXN 3 reverse 9:69042271-69042296; SpCas9
aaagcttggaggtcaaggtcat

SEQ ID NO: 37265 - DNA, 21 bp, Artificial Sequence
  Synthetic: FXN 3 reverse 9:69042272-69042296; SpCas9
aagcttggaggtcaaggtcat

SEQ ID NO: 37266 - DNA, 20 bp, Artificial Sequence
  Synthetic: FXN 3 reverse 9:69042273-69042296; SpCas9
agcttggaggtcaaggtcat

SEQ ID NO: 37267 - DNA, 19 bp, Artificial Sequence
  Synthetic: FXN 3 reverse 9:69042274-69042296; SpCas9
gcttggaggtcaaggtcat

SEQ ID NO: 37268 - DNA, 18 bp, Artificial Sequence
  Synthetic: FXN 3 reverse 9:69042275-69042296; SpCas9
cttggaggtcaaggtcat

SEQ ID NO: 37269 - DNA, 25 bp, Artificial Sequence
  Synthetic: FXN 3 reverse 9:69042269-69042297; SpCas9
aggcaaagcttggaggtcaaggtca

SEQ ID NO: 37270 - DNA, 24 bp, Artificial Sequence
  Synthetic: FXN 3 reverse 9:69042270-69042297; SpCas9
ggcaaagcttggaggtcaaggtca

SEQ ID NO: 37271 - DNA, 23 bp, Artificial Sequence
  Synthetic: FXN 3 reverse 9:69042271-69042297; SpCas9
gcaaagcttggaggtcaaggtca

SEQ ID NO: 37272 - DNA, 22 bp, Artificial Sequence
  Synthetic: FXN 3 reverse 9:69042272-69042297; SpCas9
caaagcttggaggtcaaggtca

SEQ ID NO: 37273 - DNA, 21 bp, Artificial Sequence
  Synthetic: FXN 3 reverse 9:69042273-69042297; SpCas9
aaagcttggaggtcaaggtca

SEQ ID NO: 37274 - DNA, 20 bp, Artificial Sequence
  Synthetic: FXN 3 reverse 9:69042274-69042297; SpCas9
aagcttggaggtcaaggtca

SEQ ID NO: 37275 - DNA, 19 bp, Artificial Sequence
  Synthetic: FXN 3 reverse 9:69042275-69042297; SpCas9
agcttggaggtcaaggtca

SEQ ID NO: 37276 - DNA, 18 bp, Artificial Sequence
  Synthetic: FXN 3 reverse 9:69042276-69042297; SpCas9
gcttggaggtcaaggtca

SEQ ID NO: 37277 - DNA, 25 bp, Artificial Sequence
  Synthetic: FXN 3 reverse 9:69042275-69042303; SpCas9
tgagggaggcaaagcttggaggtca

SEQ ID NO: 37278 - DNA, 24 bp, Artificial Sequence
  Synthetic: FXN 3 reverse 9:69042276-69042303; SpCas9
gagggaggcaaagcttggaggtca

SEQ ID NO: 37279 - DNA, 23 bp, Artificial Sequence
  Synthetic: FXN 3 reverse 9:69042277-69042303; SpCas9
agggaggcaaagcttggaggtca

SEQ ID NO: 37280 - DNA, 22 bp, Artificial Sequence
  Synthetic: FXN 3 reverse 9:69042278-69042303; SpCas9
gggaggcaaagcttggaggtca

SEQ ID NO: 37281 - DNA, 21 bp, Artificial Sequence
  Synthetic: FXN 3 reverse 9:69042279-69042303; SpCas9
ggaggcaaagcttggaggtca

SEQ ID NO: 37282 - DNA, 20 bp, Artificial Sequence
  Synthetic: FXN 3 reverse 9:69042280-69042303; SpCas9
gaggcaaagcttggaggtca

SEQ ID NO: 37283 - DNA, 19 bp, Artificial Sequence
  Synthetic: FXN 3 reverse 9:69042281-69042303; SpCas9
aggcaaagcttggaggtca

SEQ ID NO: 37284 - DNA, 18 bp, Artificial Sequence
  Synthetic: FXN 3 reverse 9:69042282-69042303; SpCas9
ggcaaagcttggaggtca

SEQ ID NO: 37285 - DNA, 25 bp, Artificial Sequence
  Synthetic: FXN 3 reverse 9:69042276-69042304; SpCas9
ttgagggaggcaaagcttggaggtc

SEQ ID NO: 37286 - DNA, 24 bp, Artificial Sequence
  Synthetic: FXN 3 reverse 9:69042277-69042304; SpCas9
tgagggaggcaaagcttggaggtc

SEQ ID NO: 37287 - DNA, 23 bp, Artificial Sequence
  Synthetic: FXN 3 reverse 9:69042278-69042304; SpCas9
gagggaggcaaagcttggaggtc

SEQ ID NO: 37288 - DNA, 22 bp, Artificial Sequence
  Synthetic: FXN 3 reverse 9:69042279-69042304; SpCas9
agggaggcaaagcttggaggtc

SEQ ID NO: 37289 - DNA, 21 bp, Artificial Sequence
  Synthetic: FXN 3 reverse 9:69042280-69042304; SpCas9
gggaggcaaagcttggaggtc

SEQ ID NO: 37290 - DNA, 20 bp, Artificial Sequence
  Synthetic: FXN 3 reverse 9:69042281-69042304; SpCas9
ggaggcaaagcttggaggtc

SEQ ID NO: 37291 - DNA, 19 bp, Artificial Sequence
  Synthetic: FXN 3 reverse 9:69042282-69042304; SpCas9
gaggcaaagcttggaggtc

SEQ ID NO: 37292 - DNA, 18 bp, Artificial Sequence
  Synthetic: FXN 3 reverse 9:69042283-69042304; SpCas9
aggcaaagcttggaggtc

SEQ ID NO: 37293 - DNA, 25 bp, Artificial Sequence
  Synthetic: FXN 3 forward 9:69042277-69042305; SpCas9
ttgacctccaagctttgcctccctc

SEQ ID NO: 37294 - DNA, 24 bp, Artificial Sequence
  Synthetic: FXN 3 forward 9:69042278-69042305; SpCas9
tgacctccaagctttgcctccctc

SEQ ID NO: 37295 - DNA, 23 bp, Artificial Sequence
  Synthetic: FXN 3 forward 9:69042279-69042305; SpCas9
gacctccaagctttgcctccctc

SEQ ID NO: 37296 - DNA, 22 bp, Artificial Sequence
  Synthetic: FXN 3 forward 9:69042280-69042305; SpCas9
acctccaagctttgcctccctc

SEQ ID NO: 37297 - DNA, 21 bp, Artificial Sequence
  Synthetic: FXN 3 forward 9:69042281-69042305; SpCas9
cctccaagctttgcctccctc

SEQ ID NO: 37298 - DNA, 20 bp, Artificial Sequence
  Synthetic: FXN 3 forward 9:69042282-69042305; SpCas9
ctccaagctttgcctccctc

SEQ ID NO: 37299 - DNA, 19 bp, Artificial Sequence
  Synthetic: FXN 3 forward 9:69042283-69042305; SpCas9
tccaagctttgcctccctc

SEQ ID NO: 37300 - DNA, 18 bp, Artificial Sequence
  Synthetic: FXN 3 forward 9:69042284-69042305; SpCas9
ccaagctttgcctccctc

SEQ ID NO: 37301 - DNA, 25 bp, Artificial Sequence
  Synthetic: FXN 3 forward 9:69042280-69042308; SpCas9
acctccaagctttgcctccctcaag

SEQ ID NO: 37302 - DNA, 24 bp, Artificial Sequence
  Synthetic: FXN 3 forward 9:69042281-69042308; SpCas9
cctccaagctttgcctccctcaag

SEQ ID NO: 37303 - DNA, 23 bp, Artificial Sequence
  Synthetic: FXN 3 forward 9:69042282-69042308; SpCas9
ctccaagctttgcctccctcaag

SEQ ID NO: 37304 - DNA, 22 bp, Artificial Sequence
  Synthetic: FXN 3 forward 9:69042283-69042308; SpCas9
tccaagctttgcctccctcaag

SEQ ID NO: 37305 - DNA, 21 bp, Artificial Sequence
  Synthetic: FXN 3 forward 9:69042284-69042308; SpCas9
ccaagctttgcctccctcaag

SEQ ID NO: 37306 - DNA, 20 bp, Artificial Sequence
  Synthetic: FXN 3 forward 9:69042285-69042308; SpCas9
caagctttgcctccctcaag

SEQ ID NO: 37307 - DNA, 19 bp, Artificial Sequence
  Synthetic: FXN 3 forward 9:69042286-69042308; SpCas9
aagctttgcctccctcaag

SEQ ID NO: 37308 - DNA, 18 bp, Artificial Sequence
  Synthetic: FXN 3 forward 9:69042287-69042308; SpCas9
agctttgcctccctcaag

SEQ ID NO: 37309 - DNA, 25 bp, Artificial Sequence
  Synthetic: FXN 3 reverse 9:69042281-69042309; SpCas9
tctgcttgagggaggcaaagcttgg

SEQ ID NO: 37310 - DNA, 24 bp, Artificial Sequence
  Synthetic: FXN 3 reverse 9:69042282-69042309; SpCas9
ctgcttgagggaggcaaagcttgg

SEQ ID NO: 37311 - DNA, 23 bp, Artificial Sequence
  Synthetic: FXN 3 reverse 9:69042283-69042309; SpCas9
tgcttgagggaggcaaagcttgg

SEQ ID NO: 37312 - DNA, 22 bp, Artificial Sequence
  Synthetic: FXN 3 reverse 9:69042284-69042309; SpCas9
gcttgagggaggcaaagcttgg

SEQ ID NO: 37313 - DNA, 21 bp, Artificial Sequence
  Synthetic: FXN 3 reverse 9:69042285-69042309; SpCas9
cttgagggaggcaaagcttgg

SEQ ID NO: 37314 - DNA, 20 bp, Artificial Sequence
  Synthetic: FXN 3 reverse 9:69042286-69042309; SpCas9
ttgagggaggcaaagcttgg

SEQ ID NO: 37315 - DNA, 19 bp, Artificial Sequence
  Synthetic: FXN 3 reverse 9:69042287-69042309; SpCas9
tgagggaggcaaagcttgg

SEQ ID NO: 37316 - DNA, 18 bp, Artificial Sequence
  Synthetic: FXN 3 reverse 9:69042288-69042309; SpCas9
gagggaggcaaagcttgg

SEQ ID NO: 37317 - DNA, 25 bp, Artificial Sequence
  Synthetic: FXN 3 reverse 9:69042282-69042310; SpCas9
ttctgcttgagggaggcaaagcttg

SEQ ID NO: 37318 - DNA, 24 bp, Artificial Sequence
  Synthetic: FXN 3 reverse 9:69042283-69042310; SpCas9
tctgcttgagggaggcaaagcttg

SEQ ID NO: 37319 - DNA, 23 bp, Artificial Sequence
  Synthetic: FXN 3 reverse 9:69042284-69042310; SpCas9
ctgcttgagggaggcaaagcttg

SEQ ID NO: 37320 - DNA, 22 bp, Artificial Sequence
  Synthetic: FXN 3 reverse 9:69042285-69042310; SpCas9
tgcttgagggaggcaaagcttg

SEQ ID NO: 37321 - DNA, 21 bp, Artificial Sequence
  Synthetic: FXN 3 reverse 9:69042286-69042310; SpCas9
gcttgagggaggcaaagcttg

SEQ ID NO: 37322 - DNA, 20 bp, Artificial Sequence
  Synthetic: FXN 3 reverse 9:69042287-69042310; SpCas9
cttgagggaggcaaagcttg

SEQ ID NO: 37323 - DNA, 19 bp, Artificial Sequence
  Synthetic: FXN 3 reverse 9:69042288-69042310; SpCas9
ttgagggaggcaaagcttg

SEQ ID NO: 37324 - DNA, 18 bp, Artificial Sequence
  Synthetic: FXN 3 reverse 9:69042289-69042310; SpCas9
tgagggaggcaaagcttg

SEQ ID NO: 37325 - DNA, 25 bp, Artificial Sequence
  Synthetic: FXN 3 reverse 9:69042284-69042312; SpCas9
tgttctgcttgagggaggcaaagct

SEQ ID NO: 37326 - DNA, 24 bp, Artificial Sequence
  Synthetic: FXN 3 reverse 9:69042285-69042312; SpCas9
gttctgcttgagggaggcaaagct

SEQ ID NO: 37327 - DNA, 23 bp, Artificial Sequence
  Synthetic: FXN 3 reverse 9:69042286-69042312; SpCas9
ttctgcttgagggaggcaaagct

SEQ ID NO: 37328 - DNA, 22 bp, Artificial Sequence
  Synthetic: FXN 3 reverse 9:69042287-69042312; SpCas9
tctgcttgagggaggcaaagct

SEQ ID NO: 37329 - DNA, 21 bp, Artificial Sequence
  Synthetic: FXN 3 reverse 9:69042288-69042312; SpCas9
ctgcttgagggaggcaaagct

SEQ ID NO: 37330 - DNA, 20 bp, Artificial Sequence
  Synthetic: FXN 3 reverse 9:69042289-69042312; SpCas9
tgcttgagggaggcaaagct

SEQ ID NO: 37331 - DNA, 19 bp, Artificial Sequence
  Synthetic: FXN 3 reverse 9:69042290-69042312; SpCas9
gcttgagggaggcaaagct

SEQ ID NO: 37332 - DNA, 18 bp, Artificial Sequence
  Synthetic: FXN 3 reverse 9:69042291-69042312; SpCas9
cttgagggaggcaaagct

SEQ ID NO: 37333 - DNA, 25 bp, Artificial Sequence
  Synthetic: FXN 3 forward 9:69042285-69042313; SpCas9
caagctttgcctccctcaagcagaa

SEQ ID NO: 37334 - DNA, 24 bp, Artificial Sequence
  Synthetic: FXN 3 forward 9:69042286-69042313; SpCas9
aagctttgcctccctcaagcagaa

SEQ ID NO: 37335 - DNA, 23 bp, Artificial Sequence
  Synthetic: FXN 3 forward 9:69042287-69042313; SpCas9
agctttgcctccctcaagcagaa

SEQ ID NO: 37336 - DNA, 22 bp, Artificial Sequence
  Synthetic: FXN 3 forward 9:69042288-69042313; SpCas9
gctttgcctccctcaagcagaa

SEQ ID NO: 37337 - DNA, 21 bp, Artificial Sequence
  Synthetic: FXN 3 forward 9:69042289-69042313; SpCas9
ctttgcctccctcaagcagaa

SEQ ID NO: 37338 - DNA, 20 bp, Artificial Sequence
  Synthetic: FXN 3 forward 9:69042290-69042313; SpCas9
tttgcctccctcaagcagaa

SEQ ID NO: 37339 - DNA, 19 bp, Artificial Sequence
  Synthetic: FXN 3 forward 9:69042291-69042313; SpCas9
ttgcctccctcaagcagaa

SEQ ID NO: 37340 - DNA, 18 bp, Artificial Sequence
  Synthetic: FXN 3 forward 9:69042292-69042313; SpCas9
tgcctccctcaagcagaa

SEQ ID NO: 37341 - DNA, 25 bp, Artificial Sequence
  Synthetic: FXN 3 reverse 9:69042289-69042317; SpCas9
cattctgttctgcttgagggaggca

SEQ ID NO: 37342 - DNA, 24 bp, Artificial Sequence
  Synthetic: FXN 3 reverse 9:69042290-69042317; SpCas9
attctgttctgcttgagggaggca

SEQ ID NO: 37343 - DNA, 23 bp, Artificial Sequence
  Synthetic: FXN 3 reverse 9:69042291-69042317; SpCas9
ttctgttctgcttgagggaggca

SEQ ID NO: 37344 - DNA, 22 bp, Artificial Sequence
  Synthetic: FXN 3 reverse 9:69042292-69042317; SpCas9
tctgttctgcttgagggaggca

SEQ ID NO: 37345 - DNA, 21 bp, Artificial Sequence
  Synthetic: FXN 3 reverse 9:69042293-69042317; SpCas9
ctgttctgcttgagggaggca

SEQ ID NO: 37346 - DNA, 20 bp, Artificial Sequence
  Synthetic: FXN 3 reverse 9:69042294-69042317; SpCas9
tgttctgcttgagggaggca

SEQ ID NO: 37347 - DNA, 19 bp, Artificial Sequence
  Synthetic: FXN 3 reverse 9:69042295-69042317; SpCas9
gttctgcttgagggaggca

SEQ ID NO: 37348 - DNA, 18 bp, Artificial Sequence
  Synthetic: FXN 3 reverse 9:69042296-69042317; SpCas9
ttctgcttgagggaggca

SEQ ID NO: 37349 - DNA, 25 bp, Artificial Sequence
  Synthetic: FXN 3 forward 9:69042290-69042318; SpCas9
tttgcctccctcaagcagaacagaa

SEQ ID NO: 37350 - DNA, 24 bp, Artificial Sequence
  Synthetic: FXN 3 forward 9:69042291-69042318; SpCas9
ttgcctccctcaagcagaacagaa

SEQ ID NO: 37351 - DNA, 23 bp, Artificial Sequence
  Synthetic: FXN 3 forward 9:69042292-69042318; SpCas9
tgcctccctcaagcagaacagaa

SEQ ID NO: 37352 - DNA, 22 bp, Artificial Sequence
  Synthetic: FXN 3 forward 9:69042293-69042318; SpCas9
gcctccctcaagcagaacagaa

SEQ ID NO: 37353 - DNA, 21 bp, Artificial Sequence
  Synthetic: FXN 3 forward 9:69042294-69042318; SpCas9
cctccctcaagcagaacagaa

SEQ ID NO: 37354 - DNA, 20 bp, Artificial Sequence
  Synthetic: FXN 3 forward 9:69042295-69042318; SpCas9
ctccctcaagcagaacagaa

SEQ ID NO: 37355 - DNA, 19 bp, Artificial Sequence
  Synthetic: FXN 3 forward 9:69042296-69042318; SpCas9
tccctcaagcagaacagaa

SEQ ID NO: 37356 - DNA, 18 bp, Artificial Sequence
  Synthetic: FXN 3 forward 9:69042297-69042318; SpCas9
ccctcaagcagaacagaa

SEQ ID NO: 37357 - DNA, 25 bp, Artificial Sequence
  Synthetic: FXN 3 forward 9:69042292-69042320; SpCas9
tgcctccctcaagcagaacagaatg

SEQ ID NO: 37358 - DNA, 24 bp, Artificial Sequence
  Synthetic: FXN 3 forward 9:69042293-69042320; SpCas9
gcctccctcaagcagaacagaatg

SEQ ID NO: 37359 - DNA, 23 bp, Artificial Sequence
  Synthetic: FXN 3 forward 9:69042294-69042320; SpCas9
cctccctcaagcagaacagaatg

SEQ ID NO: 37360 - DNA, 22 bp, Artificial Sequence
  Synthetic: FXN 3 forward 9:69042295-69042320; SpCas9
ctccctcaagcagaacagaatg

SEQ ID NO: 37361 - DNA, 21 bp, Artificial Sequence
  Synthetic: FXN 3 forward 9:69042296-69042320; SpCas9
tccctcaagcagaacagaatg

SEQ ID NO: 37362 - DNA, 20 bp, Artificial Sequence
  Synthetic: FXN 3 forward 9:69042297-69042320; SpCas9
ccctcaagcagaacagaatg

SEQ ID NO: 37363 - DNA, 19 bp, Artificial Sequence
  Synthetic: FXN 3 forward 9:69042298-69042320; SpCas9
cctcaagcagaacagaatg

SEQ ID NO: 37364 - DNA, 18 bp, Artificial Sequence
  Synthetic: FXN 3 forward 9:69042299-69042320; SpCas9
ctcaagcagaacagaatg

SEQ ID NO: 37365 - DNA, 25 bp, Artificial Sequence
  Synthetic: FXN 3 reverse 9:69042294-69042322; SpCas9
ggctccattctgttctgcttgaggg

SEQ ID NO: 37366 - DNA, 24 bp, Artificial Sequence
  Synthetic: FXN 3 reverse 9:69042295-69042322; SpCas9
gctccattctgttctgcttgaggg

SEQ ID NO: 37367 - DNA, 23 bp, Artificial Sequence
  Synthetic: FXN 3 reverse 9:69042296-69042322; SpCas9
ctccattctgttctgcttgaggg

SEQ ID NO: 37368 - DNA, 22 bp, Artificial Sequence
  Synthetic: FXN 3 reverse 9:69042297-69042322; SpCas9
tccattctgttctgcttgaggg

SEQ ID NO: 37369 - DNA, 21 bp, Artificial Sequence
  Synthetic: FXN 3 reverse 9:69042298-69042322; SpCas9
ccattctgttctgcttgaggg

SEQ ID NO: 37370 - DNA, 20 bp, Artificial Sequence
  Synthetic: FXN 3 reverse 9:69042299-69042322; SpCas9
cattctgttctgcttgaggg

SEQ ID NO: 37371 - DNA, 19 bp, Artificial Sequence
  Synthetic: FXN 3 reverse 9:69042300-69042322; SpCas9
attctgttctgcttgaggg

SEQ ID NO: 37372 - DNA, 18 bp, Artificial Sequence
  Synthetic: FXN 3 reverse 9:69042301-69042322; SpCas9
ttctgttctgcttgaggg

SEQ ID NO: 37373 - DNA, 25 bp, Artificial Sequence
  Synthetic: FXN 3 reverse 9:69042295-69042323; SpCas9
aggctccattctgttctgcttgagg

SEQ ID NO: 37374 - DNA, 24 bp, Artificial Sequence
  Synthetic: FXN 3 reverse 9:69042296-69042323; SpCas9
ggctccattctgttctgcttgagg

SEQ ID NO: 37375 - DNA, 23 bp, Artificial Sequence
  Synthetic: FXN 3 reverse 9:69042297-69042323; SpCas9
gctccattctgttctgcttgagg

SEQ ID NO: 37376 - DNA, 22 bp, Artificial Sequence
  Synthetic: FXN 3 reverse 9:69042298-69042323; SpCas9
ctccattctgttctgcttgagg

SEQ ID NO: 37377 - DNA, 21 bp, Artificial Sequence
  Synthetic: FXN 3 reverse 9:69042299-69042323; SpCas9
tccattctgttctgcttgagg

SEQ ID NO: 37378 - DNA, 20 bp, Artificial Sequence
  Synthetic: FXN 3 reverse 9:69042300-69042323; SpCas9
ccattctgttctgcttgagg

SEQ ID NO: 37379 - DNA, 19 bp, Artificial Sequence
  Synthetic: FXN 3 reverse 9:69042301-69042323; SpCas9
cattctgttctgcttgagg

SEQ ID NO: 37380 - DNA, 18 bp, Artificial Sequence
  Synthetic: FXN 3 reverse 9:69042302-69042323; SpCas9
attctgttctgcttgagg

SEQ ID NO: 37381 - DNA, 25 bp, Artificial Sequence
  Synthetic: FXN 3 reverse 9:69042297-69042325; SpCas9
ggaggctccattctgttctgcttga

SEQ ID NO: 37382 - DNA, 24 bp, Artificial Sequence
  Synthetic: FXN 3 reverse 9:69042298-69042325; SpCas9
gaggctccattctgttctgcttga

SEQ ID NO: 37383 - DNA, 23 bp, Artificial Sequence
  Synthetic: FXN 3 reverse 9:69042299-69042325; SpCas9
aggctccattctgttctgcttga

SEQ ID NO: 37384 - DNA, 22 bp, Artificial Sequence
  Synthetic: FXN 3 reverse 9:69042300-69042325; SpCas9
ggctccattctgttctgcttga

SEQ ID NO: 37385 - DNA, 21 bp, Artificial Sequence
  Synthetic: FXN 3 reverse 9:69042301-69042325; SpCas9
gctccattctgttctgcttga

SEQ ID NO: 37386 - DNA, 20 bp, Artificial Sequence
  Synthetic: FXN 3 reverse 9:69042302-69042325; SpCas9
ctccattctgttctgcttga

SEQ ID NO: 37387 - DNA, 19 bp, Artificial Sequence
  Synthetic: FXN 3 reverse 9:69042303-69042325; SpCas9
tccattctgttctgcttga

SEQ ID NO: 37388 - DNA, 18 bp, Artificial Sequence
  Synthetic: FXN 3 reverse 9:69042304-69042325; SpCas9
ccattctgttctgcttga

SEQ ID NO: 37389 - DNA, 25 bp, Artificial Sequence
  Synthetic: FXN 3 reverse 9:69042298-69042326; SpCas9
gggaggctccattctgttctgcttg

SEQ ID NO: 37390 - DNA, 24 bp, Artificial Sequence
  Synthetic: FXN 3 reverse 9:69042299-69042326; SpCas9
ggaggctccattctgttctgcttg

SEQ ID NO: 37391 - DNA, 23 bp, Artificial Sequence
  Synthetic: FXN 3 reverse 9:69042300-69042326; SpCas9
gaggctccattctgttctgcttg

SEQ ID NO: 37392 - DNA, 22 bp, Artificial Sequence
  Synthetic: FXN 3 reverse 9:69042301-69042326; SpCas9
aggctccattctgttctgcttg

SEQ ID NO: 37393 - DNA, 21 bp, Artificial Sequence
  Synthetic: FXN 3 reverse 9:69042302-69042326; SpCas9
ggctccattctgttctgcttg

SEQ ID NO: 37394 - DNA, 20 bp, Artificial Sequence
  Synthetic: FXN 3 reverse 9:69042303-69042326; SpCas9
gctccattctgttctgcttg

SEQ ID NO: 37395 - DNA, 19 bp, Artificial Sequence
  Synthetic: FXN 3 reverse 9:69042304-69042326; SpCas9
ctccattctgttctgcttg

SEQ ID NO: 37396 - DNA, 18 bp, Artificial Sequence
  Synthetic: FXN 3 reverse 9:69042305-69042326; SpCas9
tccattctgttctgcttg

SEQ ID NO: 37397 - DNA, 25 bp, Artificial Sequence
  Synthetic: FXN 3 reverse 9:69042299-69042327; SpCas9
agggaggctccattctgttctgctt

SEQ ID NO: 37398 - DNA, 24 bp, Artificial Sequence
  Synthetic: FXN 3 reverse 9:69042300-69042327; SpCas9
gggaggctccattctgttctgctt

SEQ ID NO: 37399 - DNA, 23 bp, Artificial Sequence
  Synthetic: FXN 3 reverse 9:69042301-69042327; SpCas9
ggaggctccattctgttctgctt

SEQ ID NO: 37400 - DNA, 22 bp, Artificial Sequence
  Synthetic: FXN 3 reverse 9:69042302-69042327; SpCas9
gaggctccattctgttctgctt

SEQ ID NO: 37401 - DNA, 21 bp, Artificial Sequence
  Synthetic: FXN 3 reverse 9:69042303-69042327; SpCas9
aggctccattctgttctgctt

SEQ ID NO: 37402 - DNA, 20 bp, Artificial Sequence
  Synthetic: FXN 3 reverse 9:69042304-69042327; SpCas9
ggctccattctgttctgctt

SEQ ID NO: 37403 - DNA, 19 bp, Artificial Sequence
  Synthetic: FXN 3 reverse 9:69042305-69042327; SpCas9
gctccattctgttctgctt

SEQ ID NO: 37404 - DNA, 18 bp, Artificial Sequence
  Synthetic: FXN 3 reverse 9:69042306-69042327; SpCas9
ctccattctgttctgctt

SEQ ID NO: 37405 - DNA, 25 bp, Artificial Sequence
  Synthetic: FXN 3 forward 9:69042302-69042330; SpCas9
aagcagaacagaatggagcctccct

SEQ ID NO: 37406 - DNA, 24 bp, Artificial Sequence
  Synthetic: FXN 3 forward 9:69042303-69042330; SpCas9
agcagaacagaatggagcctccct

SEQ ID NO: 37407 - DNA, 23 bp, Artificial Sequence
  Synthetic: FXN 3 forward 9:69042304-69042330; SpCas9
gcagaacagaatggagcctccct

SEQ ID NO: 37408 - DNA, 22 bp, Artificial Sequence
  Synthetic: FXN 3 forward 9:69042305-69042330; SpCas9
cagaacagaatggagcctccct

SEQ ID NO: 37409 - DNA, 21 bp, Artificial Sequence
  Synthetic: FXN 3 forward 9:69042306-69042330; SpCas9
agaacagaatggagcctccct

SEQ ID NO: 37410 - DNA, 20 bp, Artificial Sequence
  Synthetic: FXN 3 forward 9:69042307-69042330; SpCas9
gaacagaatggagcctccct

SEQ ID NO: 37411 - DNA, 19 bp, Artificial Sequence
  Synthetic: FXN 3 forward 9:69042308-69042330; SpCas9
aacagaatggagcctccct

SEQ ID NO: 37412 - DNA, 18 bp, Artificial Sequence
  Synthetic: FXN 3 forward 9:69042309-69042330; SpCas9
acagaatggagcctccct

SEQ ID NO: 37413 - DNA, 25 bp, Artificial Sequence
  Synthetic: FXN 3 forward 9:69042303-69042331; SpCas9
agcagaacagaatggagcctccctt

SEQ ID NO: 37414 - DNA, 24 bp, Artificial Sequence
  Synthetic: FXN 3 forward 9:69042304-69042331; SpCas9
gcagaacagaatggagcctccctt

SEQ ID NO: 37415 - DNA, 23 bp, Artificial Sequence
  Synthetic: FXN 3 forward 9:69042305-69042331; SpCas9
cagaacagaatggagcctccctt

SEQ ID NO: 37416 - DNA, 22 bp, Artificial Sequence
  Synthetic: FXN 3 forward 9:69042306-69042331; SpCas9
agaacagaatggagcctccctt

SEQ ID NO: 37417 - DNA, 21 bp, Artificial Sequence
  Synthetic: FXN 3 forward 9:69042307-69042331; SpCas9
gaacagaatggagcctccctt

SEQ ID NO: 37418 - DNA, 20 bp, Artificial Sequence
  Synthetic: FXN 3 forward 9:69042308-69042331; SpCas9
aacagaatggagcctccctt

SEQ ID NO: 37419 - DNA, 19 bp, Artificial Sequence
  Synthetic: FXN 3 forward 9:69042309-69042331; SpCas9
acagaatggagcctccctt

SEQ ID NO: 37420 - DNA, 18 bp, Artificial Sequence
  Synthetic: FXN 3 forward 9:69042310-69042331; SpCas9
cagaatggagcctccctt

SEQ ID NO: 37421 - DNA, 25 bp, Artificial Sequence
  Synthetic: FXN 3 forward 9:69042306-69042334; SpCas9
agaacagaatggagcctcccttagg

SEQ ID NO: 37422 - DNA, 24 bp, Artificial Sequence
  Synthetic: FXN 3 forward 9:69042307-69042334; SpCas9
gaacagaatggagcctcccttagg

SEQ ID NO: 37423 - DNA, 23 bp, Artificial Sequence
  Synthetic: FXN 3 forward 9:69042308-69042334; SpCas9
aacagaatggagcctcccttagg

SEQ ID NO: 37424 - DNA, 22 bp, Artificial Sequence
  Synthetic: FXN 3 forward 9:69042309-69042334; SpCas9
acagaatggagcctcccttagg

SEQ ID NO: 37425 - DNA, 21 bp, Artificial Sequence
  Synthetic: FXN 3 forward 9:69042310-69042334; SpCas9
cagaatggagcctcccttagg

SEQ ID NO: 37426 - DNA, 20 bp, Artificial Sequence
  Synthetic: FXN 3 forward 9:69042311-69042334; SpCas9
agaatggagcctcccttagg

SEQ ID NO: 37427 - DNA, 19 bp, Artificial Sequence
  Synthetic: FXN 3 forward 9:69042312-69042334; SpCas9
gaatggagcctcccttagg

SEQ ID NO: 37428 - DNA, 18 bp, Artificial Sequence
  Synthetic: FXN 3 forward 9:69042313-69042334; SpCas9
aatggagcctcccttagg

SEQ ID NO: 37429 - DNA, 25 bp, Artificial Sequence
  Synthetic: FXN 3 forward 9:69042308-69042336; SpCas9
aacagaatggagcctcccttaggca

SEQ ID NO: 37430 - DNA, 24 bp, Artificial Sequence
  Synthetic: FXN 3 forward 9:69042309-69042336; SpCas9
acagaatggagcctcccttaggca

SEQ ID NO: 37431 - DNA, 23 bp, Artificial Sequence
  Synthetic: FXN 3 forward 9:69042310-69042336; SpCas9
cagaatggagcctcccttaggca

SEQ ID NO: 37432 - DNA, 22 bp, Artificial Sequence
  Synthetic: FXN 3 forward 9:69042311-69042336; SpCas9
agaatggagcctcccttaggca

SEQ ID NO: 37433 - DNA, 21 bp, Artificial Sequence
  Synthetic: FXN 3 forward 9:69042312-69042336; SpCas9
gaatggagcctcccttaggca

SEQ ID NO: 37434 - DNA, 20 bp, Artificial Sequence
  Synthetic: FXN 3 forward 9:69042313-69042336; SpCas9
aatggagcctcccttaggca

SEQ ID NO: 37435 - DNA, 19 bp, Artificial Sequence
  Synthetic: FXN 3 forward 9:69042314-69042336; SpCas9
atggagcctcccttaggca

SEQ ID NO: 37436 - DNA, 18 bp, Artificial Sequence
  Synthetic: FXN 3 forward 9:69042315-69042336; SpCas9
tggagcctcccttaggca

SEQ ID NO: 37437 - DNA, 25 bp, Artificial Sequence
  Synthetic: FXN 3 forward 9:69042309-69042337; SpCas9
acagaatggagcctcccttaggcag

SEQ ID NO: 37438 - DNA, 24 bp, Artificial Sequence
  Synthetic: FXN 3 forward 9:69042310-69042337; SpCas9
cagaatggagcctcccttaggcag

SEQ ID NO: 37439 - DNA, 23 bp, Artificial Sequence
  Synthetic: FXN 3 forward 9:69042311-69042337; SpCas9
agaatggagcctcccttaggcag

SEQ ID NO: 37440 - DNA, 22 bp, Artificial Sequence
  Synthetic: FXN 3 forward 9:69042312-69042337; SpCas9
gaatggagcctcccttaggcag

SEQ ID NO: 37441 - DNA, 21 bp, Artificial Sequence
  Synthetic: FXN 3 forward 9:69042313-69042337; SpCas9
aatggagcctcccttaggcag

SEQ ID NO: 37442 - DNA, 20 bp, Artificial Sequence
  Synthetic: FXN 3 forward 9:69042314-69042337; SpCas9
atggagcctcccttaggcag

SEQ ID NO: 37443 - DNA, 19 bp, Artificial Sequence
  Synthetic: FXN 3 forward 9:69042315-69042337; SpCas9
tggagcctcccttaggcag

SEQ ID NO: 37444 - DNA, 18 bp, Artificial Sequence
  Synthetic: FXN 3 forward 9:69042316-69042337; SpCas9
ggagcctcccttaggcag

SEQ ID NO: 37445 - DNA, 25 bp, Artificial Sequence
  Synthetic: FXN 3 forward 9:69042312-69042340; SpCas9
gaatggagcctcccttaggcagagg

SEQ ID NO: 37446 - DNA, 24 bp, Artificial Sequence
  Synthetic: FXN 3 forward 9:69042313-69042340; SpCas9
aatggagcctcccttaggcagagg

SEQ ID NO: 37447 - DNA, 23 bp, Artificial Sequence
  Synthetic: FXN 3 forward 9:69042314-69042340; SpCas9
atggagcctcccttaggcagagg

SEQ ID NO: 37448 - DNA, 22 bp, Artificial Sequence
  Synthetic: FXN 3 forward 9:69042315-69042340; SpCas9
tggagcctcccttaggcagagg

SEQ ID NO: 37449 - DNA, 21 bp, Artificial Sequence
  Synthetic: FXN 3 forward 9:69042316-69042340; SpCas9
ggagcctcccttaggcagagg

SEQ ID NO: 37450 - DNA, 20 bp, Artificial Sequence
  Synthetic: FXN 3 forward 9:69042317-69042340; SpCas9
gagcctcccttaggcagagg

SEQ ID NO: 37451 - DNA, 19 bp, Artificial Sequence
  Synthetic: FXN 3 forward 9:69042318-69042340; SpCas9
agcctcccttaggcagagg

SEQ ID NO: 37452 - DNA, 18 bp, Artificial Sequence
  Synthetic: FXN 3 forward 9:69042319-69042340; SpCas9
gcctcccttaggcagagg

SEQ ID NO: 37453 - DNA, 25 bp, Artificial Sequence
  Synthetic: FXN 3 forward 9:69042315-69042343; SpCas9
tggagcctcccttaggcagaggcgg

SEQ ID NO: 37454 - DNA, 24 bp, Artificial Sequence
  Synthetic: FXN 3 forward 9:69042316-69042343; SpCas9
ggagcctcccttaggcagaggcgg

SEQ ID NO: 37455 - DNA, 23 bp, Artificial Sequence
  Synthetic: FXN 3 forward 9:69042317-69042343; SpCas9
gagcctcccttaggcagaggcgg

SEQ ID NO: 37456 - DNA, 22 bp, Artificial Sequence
  Synthetic: FXN 3 forward 9:69042318-69042343; SpCas9
agcctcccttaggcagaggcgg

SEQ ID NO: 37457 - DNA, 21 bp, Artificial Sequence
  Synthetic: FXN 3 forward 9:69042319-69042343; SpCas9
gcctcccttaggcagaggcgg

SEQ ID NO: 37458 - DNA, 20 bp, Artificial Sequence
  Synthetic: FXN 3 forward 9:69042320-69042343; SpCas9
cctcccttaggcagaggcgg

SEQ ID NO: 37459 - DNA, 19 bp, Artificial Sequence
  Synthetic: FXN 3 forward 9:69042321-69042343; SpCas9
ctcccttaggcagaggcgg

SEQ ID NO: 37460 - DNA, 18 bp, Artificial Sequence
  Synthetic: FXN 3 forward 9:69042322-69042343; SpCas9
tcccttaggcagaggcgg

SEQ ID NO: 37461 - DNA, 25 bp, Artificial Sequence
  Synthetic: FXN 3 reverse 9:69042320-69042348; SpCas9
gcaaacttccgcctctgcctaaggg

SEQ ID NO: 37462 - DNA, 24 bp, Artificial Sequence
  Synthetic: FXN 3 reverse 9:69042321-69042348; SpCas9
caaacttccgcctctgcctaaggg

SEQ ID NO: 37463 - DNA, 23 bp, Artificial Sequence
  Synthetic: FXN 3 reverse 9:69042322-69042348; SpCas9
aaacttccgcctctgcctaaggg

SEQ ID NO: 37464 - DNA, 22 bp, Artificial Sequence
  Synthetic: FXN 3 reverse 9:69042323-69042348; SpCas9
aacttccgcctctgcctaaggg

SEQ ID NO: 37465 - DNA, 21 bp, Artificial Sequence
  Synthetic: FXN 3 reverse 9:69042324-69042348; SpCas9
acttccgcctctgcctaaggg

SEQ ID NO: 37466 - DNA, 20 bp, Artificial Sequence
  Synthetic: FXN 3 reverse 9:69042325-69042348; SpCas9
cttccgcctctgcctaaggg

SEQ ID NO: 37467 - DNA, 19 bp, Artificial Sequence
  Synthetic: FXN 3 reverse 9:69042326-69042348; SpCas9
ttccgcctctgcctaaggg

SEQ ID NO: 37468 - DNA, 18 bp, Artificial Sequence
  Synthetic: FXN 3 reverse 9:69042327-69042348; SpCas9
tccgcctctgcctaaggg

SEQ ID NO: 37469 - DNA, 25 bp, Artificial Sequence
  Synthetic: FXN 3 reverse 9:69042321-69042349; SpCas9
ggcaaacttccgcctctgcctaagg

SEQ ID NO: 37470 - DNA, 24 bp, Artificial Sequence
  Synthetic: FXN 3 reverse 9:69042322-69042349; SpCas9
gcaaacttccgcctctgcctaagg

SEQ ID NO: 37471 - DNA, 23 bp, Artificial Sequence
  Synthetic: FXN 3 reverse 9:69042323-69042349; SpCas9
caaacttccgcctctgcctaagg

SEQ ID NO: 37472 - DNA, 22 bp, Artificial Sequence
  Synthetic: FXN 3 reverse 9:69042324-69042349; SpCas9
aaacttccgcctctgcctaagg

SEQ ID NO: 37473 - DNA, 21 bp, Artificial Sequence
  Synthetic: FXN 3 reverse 9:69042325-69042349; SpCas9
aacttccgcctctgcctaagg

SEQ ID NO: 37474 - DNA, 20 bp, Artificial Sequence
  Synthetic: FXN 3 reverse 9:69042326-69042349; SpCas9
acttccgcctctgcctaagg

SEQ ID NO: 37475 - DNA, 19 bp, Artificial Sequence
  Synthetic: FXN 3 reverse 9:69042327-69042349; SpCas9
cttccgcctctgcctaagg

SEQ ID NO: 37476 - DNA, 18 bp, Artificial Sequence
  Synthetic: FXN 3 reverse 9:69042328-69042349; SpCas9
ttccgcctctgcctaagg

SEQ ID NO: 37477 - DNA, 25 bp, Artificial Sequence
  Synthetic: FXN 3 reverse 9:69042323-69042351; SpCas9
gaggcaaacttccgcctctgcctaa

SEQ ID NO: 37478 - DNA, 24 bp, Artificial Sequence
  Synthetic: FXN 3 reverse 9:69042324-69042351; SpCas9
aggcaaacttccgcctctgcctaa

SEQ ID NO: 37479 - DNA, 23 bp, Artificial Sequence
  Synthetic: FXN 3 reverse 9:69042325-69042351; SpCas9
ggcaaacttccgcctctgcctaa

SEQ ID NO: 37480 - DNA, 22 bp, Artificial Sequence
  Synthetic: FXN 3 reverse 9:69042326-69042351; SpCas9
gcaaacttccgcctctgcctaa

SEQ ID NO: 37481 - DNA, 21 bp, Artificial Sequence
  Synthetic: FXN 3 reverse 9:69042327-69042351; SpCas9
caaacttccgcctctgcctaa

SEQ ID NO: 37482 - DNA, 20 bp, Artificial Sequence
  Synthetic: FXN 3 reverse 9:69042328-69042351; SpCas9
aaacttccgcctctgcctaa

SEQ ID NO: 37483 - DNA, 19 bp, Artificial Sequence
  Synthetic: FXN 3 reverse 9:69042329-69042351; SpCas9
aacttccgcctctgcctaa

SEQ ID NO: 37484 - DNA, 18 bp, Artificial Sequence
  Synthetic: FXN 3 reverse 9:69042330-69042351; SpCas9
acttccgcctctgcctaa

SEQ ID NO: 37485 - DNA, 25 bp, Artificial Sequence
  Synthetic: FXN 3 reverse 9:69042324-69042352; SpCas9
agaggcaaacttccgcctctgccta

SEQ ID NO: 37486 - DNA, 24 bp, Artificial Sequence
  Synthetic: FXN 3 reverse 9:69042325-69042352; SpCas9
gaggcaaacttccgcctctgccta

SEQ ID NO: 37487 - DNA, 23 bp, Artificial Sequence
  Synthetic: FXN 3 reverse 9:69042326-69042352; SpCas9
aggcaaacttccgcctctgccta

SEQ ID NO: 37488 - DNA, 22 bp, Artificial Sequence
  Synthetic: FXN 3 reverse 9:69042327-69042352; SpCas9
ggcaaacttccgcctctgccta

SEQ ID NO: 37489 - DNA, 21 bp, Artificial Sequence
  Synthetic: FXN 3 reverse 9:69042328-69042352; SpCas9
gcaaacttccgcctctgccta

SEQ ID NO: 37490 - DNA, 20 bp, Artificial Sequence
  Synthetic: FXN 3 reverse 9:69042329-69042352; SpCas9
caaacttccgcctctgccta

SEQ ID NO: 37491 - DNA, 19 bp, Artificial Sequence
  Synthetic: FXN 3 reverse 9:69042330-69042352; SpCas9
aaacttccgcctctgccta

SEQ ID NO: 37492 - DNA, 18 bp, Artificial Sequence
  Synthetic: FXN 3 reverse 9:69042331-69042352; SpCas9
aacttccgcctctgccta

SEQ ID NO: 37493 - DNA, 25 bp, Artificial Sequence
  Synthetic: FXN 3 reverse 9:69042325-69042353; SpCas9
gagaggcaaacttccgcctctgcct

SEQ ID NO: 37494 - DNA, 24 bp, Artificial Sequence
  Synthetic: FXN 3 reverse 9:69042326-69042353; SpCas9
agaggcaaacttccgcctctgcct

SEQ ID NO: 37495 - DNA, 23 bp, Artificial Sequence
  Synthetic: FXN 3 reverse 9:69042327-69042353; SpCas9
gaggcaaacttccgcctctgcct

SEQ ID NO: 37496 - DNA, 22 bp, Artificial Sequence
  Synthetic: FXN 3 reverse 9:69042328-69042353; SpCas9
aggcaaacttccgcctctgcct

SEQ ID NO: 37497 - DNA, 21 bp, Artificial Sequence
  Synthetic: FXN 3 reverse 9:69042329-69042353; SpCas9
ggcaaacttccgcctctgcct

SEQ ID NO: 37498 - DNA, 20 bp, Artificial Sequence
  Synthetic: FXN 3 reverse 9:69042330-69042353; SpCas9
gcaaacttccgcctctgcct

SEQ ID NO: 37499 - DNA, 19 bp, Artificial Sequence
  Synthetic: FXN 3 reverse 9:69042331-69042353; SpCas9
caaacttccgcctctgcct

SEQ ID NO: 37500 - DNA, 18 bp, Artificial Sequence
  Synthetic: FXN 3 reverse 9:69042332-69042353; SpCas9
aaacttccgcctctgcct

SEQ ID NO: 37501 - DNA, 25 bp, Artificial Sequence
  Synthetic: FXN 3 forward 9:69042331-69042359; SpCas9
cagaggcggaagtttgcctctcacc

SEQ ID NO: 37502 - DNA, 24 bp, Artificial Sequence
  Synthetic: FXN 3 forward 9:69042332-69042359; SpCas9
agaggcggaagtttgcctctcacc

SEQ ID NO: 37503 - DNA, 23 bp, Artificial Sequence
  Synthetic: FXN 3 forward 9:69042333-69042359; SpCas9
gaggcggaagtttgcctctcacc

SEQ ID NO: 37504 - DNA, 22 bp, Artificial Sequence
  Synthetic: FXN 3 forward 9:69042334-69042359; SpCas9
aggcggaagtttgcctctcacc

SEQ ID NO: 37505 - DNA, 21 bp, Artificial Sequence
  Synthetic: FXN 3 forward 9:69042335-69042359; SpCas9
ggcggaagtttgcctctcacc

SEQ ID NO: 37506 - DNA, 20 bp, Artificial Sequence
  Synthetic: FXN 3 forward 9:69042336-69042359; SpCas9
gcggaagtttgcctctcacc

SEQ ID NO: 37507 - DNA, 19 bp, Artificial Sequence
  Synthetic: FXN 3 forward 9:69042337-69042359; SpCas9
cggaagtttgcctctcacc

SEQ ID NO: 37508 - DNA, 18 bp, Artificial Sequence
  Synthetic: FXN 3 forward 9:69042338-69042359; SpCas9
ggaagtttgcctctcacc

SEQ ID NO: 37509 - DNA, 25 bp, Artificial Sequence
  Synthetic: FXN 3 reverse 9:69042347-69042375; SpCas9
acaaaagaatggagaactaggtgag

SEQ ID NO: 37510 - DNA, 24 bp, Artificial Sequence
  Synthetic: FXN 3 reverse 9:69042348-69042375; SpCas9
caaaagaatggagaactaggtgag

SEQ ID NO: 37511 - DNA, 23 bp, Artificial Sequence
  Synthetic: FXN 3 reverse 9:69042349-69042375; SpCas9
aaaagaatggagaactaggtgag

SEQ ID NO: 37512 - DNA, 22 bp, Artificial Sequence
  Synthetic: FXN 3 reverse 9:69042350-69042375; SpCas9
aaagaatggagaactaggtgag

SEQ ID NO: 37513 - DNA, 21 bp, Artificial Sequence
  Synthetic: FXN 3 reverse 9:69042351-69042375; SpCas9
aagaatggagaactaggtgag

SEQ ID NO: 37514 - DNA, 20 bp, Artificial Sequence
  Synthetic: FXN 3 reverse 9:69042352-69042375; SpCas9
agaatggagaactaggtgag

SEQ ID NO: 37515 - DNA, 19 bp, Artificial Sequence
  Synthetic: FXN 3 reverse 9:69042353-69042375; SpCas9
gaatggagaactaggtgag

SEQ ID NO: 37516 - DNA, 18 bp, Artificial Sequence
  Synthetic: FXN 3 reverse 9:69042354-69042375; SpCas9
aatggagaactaggtgag

SEQ ID NO: 37517 - DNA, 25 bp, Artificial Sequence
  Synthetic: FXN 3 reverse 9:69042348-69042376; SpCas9
aacaaaagaatggagaactaggtga

SEQ ID NO: 37518 - DNA, 24 bp, Artificial Sequence
  Synthetic: FXN 3 reverse 9:69042349-69042376; SpCas9
acaaaagaatggagaactaggtga

SEQ ID NO: 37519 - DNA, 23 bp, Artificial Sequence
  Synthetic: FXN 3 reverse 9:69042350-69042376; SpCas9
caaaagaatggagaactaggtga

SEQ ID NO: 37520 - DNA, 22 bp, Artificial Sequence
  Synthetic: FXN 3 reverse 9:69042351-69042376; SpCas9
aaaagaatggagaactaggtga

SEQ ID NO: 37521 - DNA, 21 bp, Artificial Sequence
  Synthetic: FXN 3 reverse 9:69042352-69042376; SpCas9
aaagaatggagaactaggtga

SEQ ID NO: 37522 - DNA, 20 bp, Artificial Sequence
  Synthetic: FXN 3 reverse 9:69042353-69042376; SpCas9
aagaatggagaactaggtga

SEQ ID NO: 37523 - DNA, 19 bp, Artificial Sequence
  Synthetic: FXN 3 reverse 9:69042354-69042376; SpCas9
agaatggagaactaggtga

SEQ ID NO: 37524 - DNA, 18 bp, Artificial Sequence
  Synthetic: FXN 3 reverse 9:69042355-69042376; SpCas9
gaatggagaactaggtga

SEQ ID NO: 37525 - DNA, 25 bp, Artificial Sequence
  Synthetic: FXN 3 reverse 9:69042350-69042378; SpCas9
tgaacaaaagaatggagaactaggt

SEQ ID NO: 37526 - DNA, 24 bp, Artificial Sequence
  Synthetic: FXN 3 reverse 9:69042351-69042378; SpCas9
gaacaaaagaatggagaactaggt

SEQ ID NO: 37527 - DNA, 23 bp, Artificial Sequence
  Synthetic: FXN 3 reverse 9:69042352-69042378; SpCas9
aacaaaagaatggagaactaggt

SEQ ID NO: 37528 - DNA, 22 bp, Artificial Sequence
  Synthetic: FXN 3 reverse 9:69042353-69042378; SpCas9
acaaaagaatggagaactaggt

SEQ ID NO: 37529 - DNA, 21 bp, Artificial Sequence
  Synthetic: FXN 3 reverse 9:69042354-69042378; SpCas9
caaaagaatggagaactaggt

SEQ ID NO: 37530 - DNA, 20 bp, Artificial Sequence
  Synthetic: FXN 3 reverse 9:69042355-69042378; SpCas9
aaaagaatggagaactaggt

SEQ ID NO: 37531 - DNA, 19 bp, Artificial Sequence
  Synthetic: FXN 3 reverse 9:69042356-69042378; SpCas9
aaagaatggagaactaggt

SEQ ID NO: 37532 - DNA, 18 bp, Artificial Sequence
  Synthetic: FXN 3 reverse 9:69042357-69042378; SpCas9
aagaatggagaactaggt

SEQ ID NO: 37533 - DNA, 25 bp, Artificial Sequence
  Synthetic: FXN 3 forward 9:69042351-69042379; SpCas9
tcacctagttctccattcttttgtt

SEQ ID NO: 37534 - DNA, 24 bp, Artificial Sequence
  Synthetic: FXN 3 forward 9:69042352-69042379; SpCas9
cacctagttctccattcttttgtt

SEQ ID NO: 37535 - DNA, 23 bp, Artificial Sequence
  Synthetic: FXN 3 forward 9:69042353-69042379; SpCas9
acctagttctccattcttttgtt

SEQ ID NO: 37536 - DNA, 22 bp, Artificial Sequence
  Synthetic: FXN 3 forward 9:69042354-69042379; SpCas9
cctagttctccattcttttgtt

SEQ ID NO: 37537 - DNA, 21 bp, Artificial Sequence
  Synthetic: FXN 3 forward 9:69042355-69042379; SpCas9
ctagttctccattcttttgtt

SEQ ID NO: 37538 - DNA, 20 bp, Artificial Sequence
  Synthetic: FXN 3 forward 9:69042356-69042379; SpCas9
tagttctccattcttttgtt

SEQ ID NO: 37539 - DNA, 19 bp, Artificial Sequence
  Synthetic: FXN 3 forward 9:69042357-69042379; SpCas9
agttctccattcttttgtt

SEQ ID NO: 37540 - DNA, 18 bp, Artificial Sequence
  Synthetic: FXN 3 forward 9:69042358-69042379; SpCas9
gttctccattcttttgtt

SEQ ID NO: 37541 - DNA, 25 bp, Artificial Sequence
  Synthetic: FXN 3 forward 9:69042353-69042381; SpCas9
acctagttctccattcttttgttca

SEQ ID NO: 37542 - DNA, 24 bp, Artificial Sequence
  Synthetic: FXN 3 forward 9:69042354-69042381; SpCas9
cctagttctccattcttttgttca

SEQ ID NO: 37543 - DNA, 23 bp, Artificial Sequence
  Synthetic: FXN 3 forward 9:69042355-69042381; SpCas9
ctagttctccattcttttgttca

SEQ ID NO: 37544 - DNA, 22 bp, Artificial Sequence
  Synthetic: FXN 3 forward 9:69042356-69042381; SpCas9
tagttctccattcttttgttca

SEQ ID NO: 37545 - DNA, 21 bp, Artificial Sequence
  Synthetic: FXN 3 forward 9:69042357-69042381; SpCas9
agttctccattcttttgttca

SEQ ID NO: 37546 - DNA, 20 bp, Artificial Sequence
  Synthetic: FXN 3 forward 9:69042358-69042381; SpCas9
gttctccattcttttgttca

SEQ ID NO: 37547 - DNA, 19 bp, Artificial Sequence
  Synthetic: FXN 3 forward 9:69042359-69042381; SpCas9
ttctccattcttttgttca

SEQ ID NO: 37548 - DNA, 18 bp, Artificial Sequence
  Synthetic: FXN 3 forward 9:69042360-69042381; SpCas9
tctccattcttttgttca

SEQ ID NO: 37549 - DNA, 25 bp, Artificial Sequence
  Synthetic: FXN 3 reverse 9:69042354-69042382; SpCas9
gctctgaacaaaagaatggagaact

SEQ ID NO: 37550 - DNA, 24 bp, Artificial Sequence
  Synthetic: FXN 3 reverse 9:69042355-69042382; SpCas9
ctctgaacaaaagaatggagaact

SEQ ID NO: 37551 - DNA, 23 bp, Artificial Sequence
  Synthetic: FXN 3 reverse 9:69042356-69042382; SpCas9
tctgaacaaaagaatggagaact

SEQ ID NO: 37552 - DNA, 22 bp, Artificial Sequence
  Synthetic: FXN 3 reverse 9:69042357-69042382; SpCas9
ctgaacaaaagaatggagaact

SEQ ID NO: 37553 - DNA, 21 bp, Artificial Sequence
  Synthetic: FXN 3 reverse 9:69042358-69042382; SpCas9
tgaacaaaagaatggagaact

SEQ ID NO: 37554 - DNA, 20 bp, Artificial Sequence
  Synthetic: FXN 3 reverse 9:69042359-69042382; SpCas9
gaacaaaagaatggagaact

SEQ ID NO: 37555 - DNA, 19 bp, Artificial Sequence
  Synthetic: FXN 3 reverse 9:69042360-69042382; SpCas9
aacaaaagaatggagaact

SEQ ID NO: 37556 - DNA, 18 bp, Artificial Sequence
  Synthetic: FXN 3 reverse 9:69042361-69042382; SpCas9
acaaaagaatggagaact

SEQ ID NO: 37557 - DNA, 25 bp, Artificial Sequence
  Synthetic: FXN 3 reverse 9:69042355-69042383; SpCas9
ggctctgaacaaaagaatggagaac

SEQ ID NO: 37558 - DNA, 24 bp, Artificial Sequence
  Synthetic: FXN 3 reverse 9:69042356-69042383; SpCas9
gctctgaacaaaagaatggagaac

SEQ ID NO: 37559 - DNA, 23 bp, Artificial Sequence
  Synthetic: FXN 3 reverse 9:69042357-69042383; SpCas9
ctctgaacaaaagaatggagaac

SEQ ID NO: 37560 - DNA, 22 bp, Artificial Sequence
  Synthetic: FXN 3 reverse 9:69042358-69042383; SpCas9
tctgaacaaaagaatggagaac

SEQ ID NO: 37561 - DNA, 21 bp, Artificial Sequence
  Synthetic: FXN 3 reverse 9:69042359-69042383; SpCas9
ctgaacaaaagaatggagaac

SEQ ID NO: 37562 - DNA, 20 bp, Artificial Sequence
  Synthetic: FXN 3 reverse 9:69042360-69042383; SpCas9
tgaacaaaagaatggagaac

SEQ ID NO: 37563 - DNA, 19 bp, Artificial Sequence
  Synthetic: FXN 3 reverse 9:69042361-69042383; SpCas9
gaacaaaagaatggagaac

SEQ ID NO: 37564 - DNA, 18 bp, Artificial Sequence
  Synthetic: FXN 3 reverse 9:69042362-69042383; SpCas9
aacaaaagaatggagaac

SEQ ID NO: 37565 - DNA, 25 bp, Artificial Sequence
  Synthetic: FXN 3 reverse 9:69042361-69042389; SpCas9
tattcaggctctgaacaaaagaatg

SEQ ID NO: 37566 - DNA, 24 bp, Artificial Sequence
  Synthetic: FXN 3 reverse 9:69042362-69042389; SpCas9
attcaggctctgaacaaaagaatg

SEQ ID NO: 37567 - DNA, 23 bp, Artificial Sequence
  Synthetic: FXN 3 reverse 9:69042363-69042389; SpCas9
ttcaggctctgaacaaaagaatg

SEQ ID NO: 37568 - DNA, 22 bp, Artificial Sequence
  Synthetic: FXN 3 reverse 9:69042364-69042389; SpCas9
tcaggctctgaacaaaagaatg

SEQ ID NO: 37569 - DNA, 21 bp, Artificial Sequence
  Synthetic: FXN 3 reverse 9:69042365-69042389; SpCas9
caggctctgaacaaaagaatg

SEQ ID NO: 37570 - DNA, 20 bp, Artificial Sequence
  Synthetic: FXN 3 reverse 9:69042366-69042389; SpCas9
aggctctgaacaaaagaatg

SEQ ID NO: 37571 - DNA, 19 bp, Artificial Sequence
  Synthetic: FXN 3 reverse 9:69042367-69042389; SpCas9
ggctctgaacaaaagaatg

SEQ ID NO: 37572 - DNA, 18 bp, Artificial Sequence
  Synthetic: FXN 3 reverse 9:69042368-69042389; SpCas9
gctctgaacaaaagaatg

SEQ ID NO: 37573 - DNA, 25 bp, Artificial Sequence
  Synthetic: FXN 3 reverse 9:69042363-69042391; SpCas9
ggtattcaggctctgaacaaaagaa

SEQ ID NO: 37574 - DNA, 24 bp, Artificial Sequence
  Synthetic: FXN 3 reverse 9:69042364-69042391; SpCas9
gtattcaggctctgaacaaaagaa

SEQ ID NO: 37575 - DNA, 23 bp, Artificial Sequence
  Synthetic: FXN 3 reverse 9:69042365-69042391; SpCas9
tattcaggctctgaacaaaagaa

SEQ ID NO: 37576 - DNA, 22 bp, Artificial Sequence
  Synthetic: FXN 3 reverse 9:69042366-69042391; SpCas9
attcaggctctgaacaaaagaa

SEQ ID NO: 37577 - DNA, 21 bp, Artificial Sequence
  Synthetic: FXN 3 reverse 9:69042367-69042391; SpCas9
ttcaggctctgaacaaaagaa

SEQ ID NO: 37578 - DNA, 20 bp, Artificial Sequence
  Synthetic: FXN 3 reverse 9:69042368-69042391; SpCas9
tcaggctctgaacaaaagaa

SEQ ID NO: 37579 - DNA, 19 bp, Artificial Sequence
  Synthetic: FXN 3 reverse 9:69042369-69042391; SpCas9
caggctctgaacaaaagaa

SEQ ID NO: 37580 - DNA, 18 bp, Artificial Sequence
  Synthetic: FXN 3 reverse 9:69042370-69042391; SpCas9
aggctctgaacaaaagaa

SEQ ID NO: 37581 - DNA, 25 bp, Artificial Sequence
  Synthetic: FXN 3 forward 9:69042368-69042396; SpCas9
cttttgttcagagcctgaataccct

SEQ ID NO: 37582 - DNA, 24 bp, Artificial Sequence
  Synthetic: FXN 3 forward 9:69042369-69042396; SpCas9
ttttgttcagagcctgaataccct

SEQ ID NO: 37583 - DNA, 23 bp, Artificial Sequence
  Synthetic: FXN 3 forward 9:69042370-69042396; SpCas9
tttgttcagagcctgaataccct

SEQ ID NO: 37584 - DNA, 22 bp, Artificial Sequence
  Synthetic: FXN 3 forward 9:69042371-69042396; SpCas9
ttgttcagagcctgaataccct

SEQ ID NO: 37585 - DNA, 21 bp, Artificial Sequence
  Synthetic: FXN 3 forward 9:69042372-69042396; SpCas9
tgttcagagcctgaataccct

SEQ ID NO: 37586 - DNA, 20 bp, Artificial Sequence
  Synthetic: FXN 3 forward 9:69042373-69042396; SpCas9
gttcagagcctgaataccct

SEQ ID NO: 37587 - DNA, 19 bp, Artificial Sequence
  Synthetic: FXN 3 forward 9:69042374-69042396; SpCas9
ttcagagcctgaataccct

SEQ ID NO: 37588 - DNA, 18 bp, Artificial Sequence
  Synthetic: FXN 3 forward 9:69042375-69042396; SpCas9
tcagagcctgaataccct

SEQ ID NO: 37589 - DNA, 25 bp, Artificial Sequence
  Synthetic: FXN 3 reverse 9:69042368-69042396; SpCas9
ctgagggtattcaggctctgaacaa

SEQ ID NO: 37590 - DNA, 24 bp, Artificial Sequence
  Synthetic: FXN 3 reverse 9:69042369-69042396; SpCas9
tgagggtattcaggctctgaacaa

SEQ ID NO: 37591 - DNA, 23 bp, Artificial Sequence
  Synthetic: FXN 3 reverse 9:69042370-69042396; SpCas9
gagggtattcaggctctgaacaa

SEQ ID NO: 37592 - DNA, 22 bp, Artificial Sequence
  Synthetic: FXN 3 reverse 9:69042371-69042396; SpCas9
agggtattcaggctctgaacaa

SEQ ID NO: 37593 - DNA, 21 bp, Artificial Sequence
  Synthetic: FXN 3 reverse 9:69042372-69042396; SpCas9
gggtattcaggctctgaacaa

SEQ ID NO: 37594 - DNA, 20 bp, Artificial Sequence
  Synthetic: FXN 3 reverse 9:69042373-69042396; SpCas9
ggtattcaggctctgaacaa

SEQ ID NO: 37595 - DNA, 19 bp, Artificial Sequence
  Synthetic: FXN 3 reverse 9:69042374-69042396; SpCas9
gtattcaggctctgaacaa

SEQ ID NO: 37596 - DNA, 18 bp, Artificial Sequence
  Synthetic: FXN 3 reverse 9:69042375-69042396; SpCas9
tattcaggctctgaacaa

SEQ ID NO: 37597 - DNA, 25 bp, Artificial Sequence
  Synthetic: FXN 3 forward 9:69042369-69042397; SpCas9
ttttgttcagagcctgaataccctc

SEQ ID NO: 37598 - DNA, 24 bp, Artificial Sequence
  Synthetic: FXN 3 forward 9:69042370-69042397; SpCas9
tttgttcagagcctgaataccctc

SEQ ID NO: 37599 - DNA, 23 bp, Artificial Sequence
  Synthetic: FXN 3 forward 9:69042371-69042397; SpCas9
ttgttcagagcctgaataccctc

SEQ ID NO: 37600 - DNA, 22 bp, Artificial Sequence
  Synthetic: FXN 3 forward 9:69042372-69042397; SpCas9
tgttcagagcctgaataccctc

SEQ ID NO: 37601 - DNA, 21 bp, Artificial Sequence
  Synthetic: FXN 3 forward 9:69042373-69042397; SpCas9
gttcagagcctgaataccctc

SEQ ID NO: 37602 - DNA, 20 bp, Artificial Sequence
  Synthetic: FXN 3 forward 9:69042374-69042397; SpCas9
ttcagagcctgaataccctc

SEQ ID NO: 37603 - DNA, 19 bp, Artificial Sequence
  Synthetic: FXN 3 forward 9:69042375-69042397; SpCas9
tcagagcctgaataccctc

SEQ ID NO: 37604 - DNA, 18 bp, Artificial Sequence
  Synthetic: FXN 3 forward 9:69042376-69042397; SpCas9
cagagcctgaataccctc

SEQ ID NO: 37605 - DNA, 25 bp, Artificial Sequence
  Synthetic: FXN 3 forward 9:69042381-69042409; SpCas9
cctgaataccctcaggctctgtact

SEQ ID NO: 37606 - DNA, 24 bp, Artificial Sequence
  Synthetic: FXN 3 forward 9:69042382-69042409; SpCas9
ctgaataccctcaggctctgtact

SEQ ID NO: 37607 - DNA, 23 bp, Artificial Sequence
  Synthetic: FXN 3 forward 9:69042383-69042409; SpCas9
tgaataccctcaggctctgtact

SEQ ID NO: 37608 - DNA, 22 bp, Artificial Sequence
  Synthetic: FXN 3 forward 9:69042384-69042409; SpCas9
gaataccctcaggctctgtact

SEQ ID NO: 37609 - DNA, 21 bp, Artificial Sequence
  Synthetic: FXN 3 forward 9:69042385-69042409; SpCas9
aataccctcaggctctgtact

SEQ ID NO: 37610 - DNA, 20 bp, Artificial Sequence
  Synthetic: FXN 3 forward 9:69042386-69042409; SpCas9
ataccctcaggctctgtact

SEQ ID NO: 37611 - DNA, 19 bp, Artificial Sequence
  Synthetic: FXN 3 forward 9:69042387-69042409; SpCas9
taccctcaggctctgtact

SEQ ID NO: 37612 - DNA, 18 bp, Artificial Sequence
  Synthetic: FXN 3 forward 9:69042388-69042409; SpCas9
accctcaggctctgtact

SEQ ID NO: 37613 - DNA, 25 bp, Artificial Sequence
  Synthetic: FXN 3 reverse 9:69042381-69042409; SpCas9
ccaagtacagagcctgagggtattc

SEQ ID NO: 37614 - DNA, 24 bp, Artificial Sequence
  Synthetic: FXN 3 reverse 9:69042382-69042409; SpCas9
caagtacagagcctgagggtattc

SEQ ID NO: 37615 - DNA, 23 bp, Artificial Sequence
  Synthetic: FXN 3 reverse 9:69042383-69042409; SpCas9
aagtacagagcctgagggtattc

SEQ ID NO: 37616 - DNA, 22 bp, Artificial Sequence
  Synthetic: FXN 3 reverse 9:69042384-69042409; SpCas9
agtacagagcctgagggtattc

SEQ ID NO: 37617 - DNA, 21 bp, Artificial Sequence
  Synthetic: FXN 3 reverse 9:69042385-69042409; SpCas9
gtacagagcctgagggtattc

SEQ ID NO: 37618 - DNA, 20 bp, Artificial Sequence
  Synthetic: FXN 3 reverse 9:69042386-69042409; SpCas9
tacagagcctgagggtattc

SEQ ID NO: 37619 - DNA, 19 bp, Artificial Sequence
  Synthetic: FXN 3 reverse 9:69042387-69042409; SpCas9
acagagcctgagggtattc

SEQ ID NO: 37620 - DNA, 18 bp, Artificial Sequence
  Synthetic: FXN 3 reverse 9:69042388-69042409; SpCas9
cagagcctgagggtattc

SEQ ID NO: 37621 - DNA, 25 bp, Artificial Sequence
  Synthetic: FXN 3 forward 9:69042382-69042410; SpCas9
ctgaataccctcaggctctgtactt

SEQ ID NO: 37622 - DNA, 24 bp, Artificial Sequence
  Synthetic: FXN 3 forward 9:69042383-69042410; SpCas9
tgaataccctcaggctctgtactt

SEQ ID NO: 37623 - DNA, 23 bp, Artificial Sequence
  Synthetic: FXN 3 forward 9:69042384-69042410; SpCas9
gaataccctcaggctctgtactt

SEQ ID NO: 37624 - DNA, 22 bp, Artificial Sequence
  Synthetic: FXN 3 forward 9:69042385-69042410; SpCas9
aataccctcaggctctgtactt

SEQ ID NO: 37625 - DNA, 21 bp, Artificial Sequence
  Synthetic: FXN 3 forward 9:69042386-69042410; SpCas9
ataccctcaggctctgtactt

SEQ ID NO: 37626 - DNA, 20 bp, Artificial Sequence
  Synthetic: FXN 3 forward 9:69042387-69042410; SpCas9
taccctcaggctctgtactt

SEQ ID NO: 37627 - DNA, 19 bp, Artificial Sequence
  Synthetic: FXN 3 forward 9:69042388-69042410; SpCas9
accctcaggctctgtactt

SEQ ID NO: 37628 - DNA, 18 bp, Artificial Sequence
  Synthetic: FXN 3 forward 9:69042389-69042410; SpCas9
ccctcaggctctgtactt

SEQ ID NO: 37629 - DNA, 25 bp, Artificial Sequence
  Synthetic: FXN 3 reverse 9:69042382-69042410; SpCas9
cccaagtacagagcctgagggtatt

SEQ ID NO: 37630 - DNA, 24 bp, Artificial Sequence
  Synthetic: FXN 3 reverse 9:69042383-69042410; SpCas9
ccaagtacagagcctgagggtatt

SEQ ID NO: 37631 - DNA, 23 bp, Artificial Sequence
  Synthetic: FXN 3 reverse 9:69042384-69042410; SpCas9
caagtacagagcctgagggtatt

SEQ ID NO: 37632 - DNA, 22 bp, Artificial Sequence
  Synthetic: FXN 3 reverse 9:69042385-69042410; SpCas9
aagtacagagcctgagggtatt

SEQ ID NO: 37633 - DNA, 21 bp, Artificial Sequence
  Synthetic: FXN 3 reverse 9:69042386-69042410; SpCas9
agtacagagcctgagggtatt

SEQ ID NO: 37634 - DNA, 20 bp, Artificial Sequence
  Synthetic: FXN 3 reverse 9:69042387-69042410; SpCas9
gtacagagcctgagggtatt

SEQ ID NO: 37635 - DNA, 19 bp, Artificial Sequence
  Synthetic: FXN 3 reverse 9:69042388-69042410; SpCas9
tacagagcctgagggtatt

SEQ ID NO: 37636 - DNA, 18 bp, Artificial Sequence
  Synthetic: FXN 3 reverse 9:69042389-69042410; SpCas9
acagagcctgagggtatt

SEQ ID NO: 37637 - DNA, 25 bp, Artificial Sequence
  Synthetic: FXN 3 forward 9:69042383-69042411; SpCas9
tgaataccctcaggctctgtacttg

SEQ ID NO: 37638 - DNA, 24 bp, Artificial Sequence
  Synthetic: FXN 3 forward 9:69042384-69042411; SpCas9
gaataccctcaggctctgtacttg

SEQ ID NO: 37639 - DNA, 23 bp, Artificial Sequence
  Synthetic: FXN 3 forward 9:69042385-69042411; SpCas9
aataccctcaggctctgtacttg

SEQ ID NO: 37640 - DNA, 22 bp, Artificial Sequence
  Synthetic: FXN 3 forward 9:69042386-69042411; SpCas9
ataccctcaggctctgtacttg

SEQ ID NO: 37641 - DNA, 21 bp, Artificial Sequence
  Synthetic: FXN 3 forward 9:69042387-69042411; SpCas9
taccctcaggctctgtacttg

SEQ ID NO: 37642 - DNA, 20 bp, Artificial Sequence
  Synthetic: FXN 3 forward 9:69042388-69042411; SpCas9
accctcaggctctgtacttg

SEQ ID NO: 37643 - DNA, 19 bp, Artificial Sequence
  Synthetic: FXN 3 forward 9:69042389-69042411; SpCas9
ccctcaggctctgtacttg

SEQ ID NO: 37644 - DNA, 18 bp, Artificial Sequence
  Synthetic: FXN 3 forward 9:69042390-69042411; SpCas9
cctcaggctctgtacttg

SEQ ID NO: 37645 - DNA, 25 bp, Artificial Sequence
  Synthetic: FXN 3 reverse 9:69042389-69042417; SpCas9
gaaataccccaagtacagagcctga

SEQ ID NO: 37646 - DNA, 24 bp, Artificial Sequence
  Synthetic: FXN 3 reverse 9:69042390-69042417; SpCas9
aaataccccaagtacagagcctga

SEQ ID NO: 37647 - DNA, 23 bp, Artificial Sequence
  Synthetic: FXN 3 reverse 9:69042391-69042417; SpCas9
aataccccaagtacagagcctga

SEQ ID NO: 37648 - DNA, 22 bp, Artificial Sequence
  Synthetic: FXN 3 reverse 9:69042392-69042417; SpCas9
ataccccaagtacagagcctga

SEQ ID NO: 37649 - DNA, 21 bp, Artificial Sequence
  Synthetic: FXN 3 reverse 9:69042393-69042417; SpCas9
taccccaagtacagagcctga

SEQ ID NO: 37650 - DNA, 20 bp, Artificial Sequence
  Synthetic: FXN 3 reverse 9:69042394-69042417; SpCas9
accccaagtacagagcctga

SEQ ID NO: 37651 - DNA, 19 bp, Artificial Sequence
  Synthetic: FXN 3 reverse 9:69042395-69042417; SpCas9
ccccaagtacagagcctga

SEQ ID NO: 37652 - DNA, 18 bp, Artificial Sequence
  Synthetic: FXN 3 reverse 9:69042396-69042417; SpCas9
cccaagtacagagcctga

SEQ ID NO: 37653 - DNA, 25 bp, Artificial Sequence
  Synthetic: FXN 3 reverse 9:69042390-69042418; SpCas9
agaaataccccaagtacagagcctg

SEQ ID NO: 37654 - DNA, 24 bp, Artificial Sequence
  Synthetic: FXN 3 reverse 9:69042391-69042418; SpCas9
gaaataccccaagtacagagcctg

SEQ ID NO: 37655 - DNA, 23 bp, Artificial Sequence
  Synthetic: FXN 3 reverse 9:69042392-69042418; SpCas9
aaataccccaagtacagagcctg

SEQ ID NO: 37656 - DNA, 22 bp, Artificial Sequence
  Synthetic: FXN 3 reverse 9:69042393-69042418; SpCas9
aataccccaagtacagagcctg

SEQ ID NO: 37657 - DNA, 21 bp, Artificial Sequence
  Synthetic: FXN 3 reverse 9:69042394-69042418; SpCas9
ataccccaagtacagagcctg

SEQ ID NO: 37658 - DNA, 20 bp, Artificial Sequence
  Synthetic: FXN 3 reverse 9:69042395-69042418; SpCas9
taccccaagtacagagcctg

SEQ ID NO: 37659 - DNA, 19 bp, Artificial Sequence
  Synthetic: FXN 3 reverse 9:69042396-69042418; SpCas9
accccaagtacagagcctg

SEQ ID NO: 37660 - DNA, 18 bp, Artificial Sequence
  Synthetic: FXN 3 reverse 9:69042397-69042418; SpCas9
ccccaagtacagagcctg

SEQ ID NO: 37661 - DNA, 25 bp, Artificial Sequence
  Synthetic: FXN 3 reverse 9:69042391-69042419; SpCas9
cagaaataccccaagtacagagcct

SEQ ID NO: 37662 - DNA, 24 bp, Artificial Sequence
  Synthetic: FXN 3 reverse 9:69042392-69042419; SpCas9
agaaataccccaagtacagagcct

SEQ ID NO: 37663 - DNA, 23 bp, Artificial Sequence
  Synthetic: FXN 3 reverse 9:69042393-69042419; SpCas9
gaaataccccaagtacagagcct

SEQ ID NO: 37664 - DNA, 22 bp, Artificial Sequence
  Synthetic: FXN 3 reverse 9:69042394-69042419; SpCas9
aaataccccaagtacagagcct

SEQ ID NO: 37665 - DNA, 21 bp, Artificial Sequence
  Synthetic: FXN 3 reverse 9:69042395-69042419; SpCas9
aataccccaagtacagagcct

SEQ ID NO: 37666 - DNA, 20 bp, Artificial Sequence
  Synthetic: FXN 3 reverse 9:69042396-69042419; SpCas9
ataccccaagtacagagcct

SEQ ID NO: 37667 - DNA, 19 bp, Artificial Sequence
  Synthetic: FXN 3 reverse 9:69042397-69042419; SpCas9
taccccaagtacagagcct

SEQ ID NO: 37668 - DNA, 18 bp, Artificial Sequence
  Synthetic: FXN 3 reverse 9:69042398-69042419; SpCas9
accccaagtacagagcct

SEQ ID NO: 37669 - DNA, 25 bp, Artificial Sequence
  Synthetic: FXN 3 reverse 9:69042397-69042425; SpCas9
agagaacagaaataccccaagtaca

SEQ ID NO: 37670 - DNA, 24 bp, Artificial Sequence
  Synthetic: FXN 3 reverse 9:69042398-69042425; SpCas9
gagaacagaaataccccaagtaca

SEQ ID NO: 37671 - DNA, 23 bp, Artificial Sequence
  Synthetic: FXN 3 reverse 9:69042399-69042425; SpCas9
agaacagaaataccccaagtaca

SEQ ID NO: 37672 - DNA, 22 bp, Artificial Sequence
  Synthetic: FXN 3 reverse 9:69042400-69042425; SpCas9
gaacagaaataccccaagtaca

SEQ ID NO: 37673 - DNA, 21 bp, Artificial Sequence
  Synthetic: FXN 3 reverse 9:69042401-69042425; SpCas9
aacagaaataccccaagtaca

SEQ ID NO: 37674 - DNA, 20 bp, Artificial Sequence
  Synthetic: FXN 3 reverse 9:69042402-69042425; SpCas9
acagaaataccccaagtaca

SEQ ID NO: 37675 - DNA, 19 bp, Artificial Sequence
  Synthetic: FXN 3 reverse 9:69042403-69042425; SpCas9
cagaaataccccaagtaca

SEQ ID NO: 37676 - DNA, 18 bp, Artificial Sequence
  Synthetic: FXN 3 reverse 9:69042404-69042425; SpCas9
agaaataccccaagtaca

SEQ ID NO: 37677 - DNA, 25 bp, Artificial Sequence
  Synthetic: FXN 3 reverse 9:69042399-69042427; SpCas9
caagagaacagaaataccccaagta

SEQ ID NO: 37678 - DNA, 24 bp, Artificial Sequence
  Synthetic: FXN 3 reverse 9:69042400-69042427; SpCas9
aagagaacagaaataccccaagta

SEQ ID NO: 37679 - DNA, 23 bp, Artificial Sequence
  Synthetic: FXN 3 reverse 9:69042401-69042427; SpCas9
agagaacagaaataccccaagta

SEQ ID NO: 37680 - DNA, 22 bp, Artificial Sequence
  Synthetic: FXN 3 reverse 9:69042402-69042427; SpCas9
gagaacagaaataccccaagta

SEQ ID NO: 37681 - DNA, 21 bp, Artificial Sequence
  Synthetic: FXN 3 reverse 9:69042403-69042427; SpCas9
agaacagaaataccccaagta

SEQ ID NO: 37682 - DNA, 20 bp, Artificial Sequence
  Synthetic: FXN 3 reverse 9:69042404-69042427; SpCas9
gaacagaaataccccaagta

SEQ ID NO: 37683 - DNA, 19 bp, Artificial Sequence
  Synthetic: FXN 3 reverse 9:69042405-69042427; SpCas9
aacagaaataccccaagta

SEQ ID NO: 37684 - DNA, 18 bp, Artificial Sequence
  Synthetic: FXN 3 reverse 9:69042406-69042427; SpCas9
acagaaataccccaagta

SEQ ID NO: 37685 - DNA, 25 bp, Artificial Sequence
  Synthetic: FXN 3 reverse 9:69042404-69042432; SpCas9
taaaacaagagaacagaaatacccc

SEQ ID NO: 37686 - DNA, 24 bp, Artificial Sequence
  Synthetic: FXN 3 reverse 9:69042405-69042432; SpCas9
aaaacaagagaacagaaatacccc

SEQ ID NO: 37687 - DNA, 23 bp, Artificial Sequence
  Synthetic: FXN 3 reverse 9:69042406-69042432; SpCas9
aaacaagagaacagaaatacccc

SEQ ID NO: 37688 - DNA, 22 bp, Artificial Sequence
  Synthetic: FXN 3 reverse 9:69042407-69042432; SpCas9
aacaagagaacagaaatacccc

SEQ ID NO: 37689 - DNA, 21 bp, Artificial Sequence
  Synthetic: FXN 3 reverse 9:69042408-69042432; SpCas9
acaagagaacagaaatacccc

SEQ ID NO: 37690 - DNA, 20 bp, Artificial Sequence
  Synthetic: FXN 3 reverse 9:69042409-69042432; SpCas9
caagagaacagaaatacccc

SEQ ID NO: 37691 - DNA, 19 bp, Artificial Sequence
  Synthetic: FXN 3 reverse 9:69042410-69042432; SpCas9
aagagaacagaaatacccc

SEQ ID NO: 37692 - DNA, 18 bp, Artificial Sequence
  Synthetic: FXN 3 reverse 9:69042411-69042432; SpCas9
agagaacagaaatacccc

SEQ ID NO: 37693 - DNA, 25 bp, Artificial Sequence
  Synthetic: FXN 3 forward 9:69042413-69042441; SpCas9
tttctgttctcttgttttatgctca

SEQ ID NO: 37694 - DNA, 24 bp, Artificial Sequence
  Synthetic: FXN 3 forward 9:69042414-69042441; SpCas9
ttctgttctcttgttttatgctca

SEQ ID NO: 37695 - DNA, 23 bp, Artificial Sequence
  Synthetic: FXN 3 forward 9:69042415-69042441; SpCas9
tctgttctcttgttttatgctca

SEQ ID NO: 37696 - DNA, 22 bp, Artificial Sequence
  Synthetic: FXN 3 forward 9:69042416-69042441; SpCas9
ctgttctcttgttttatgctca

SEQ ID NO: 37697 - DNA, 21 bp, Artificial Sequence
  Synthetic: FXN 3 forward 9:69042417-69042441; SpCas9
tgttctcttgttttatgctca

SEQ ID NO: 37698 - DNA, 20 bp, Artificial Sequence
  Synthetic: FXN 3 forward 9:69042418-69042441; SpCas9
gttctcttgttttatgctca

SEQ ID NO: 37699 - DNA, 19 bp, Artificial Sequence
  Synthetic: FXN 3 forward 9:69042419-69042441; SpCas9
ttctcttgttttatgctca

SEQ ID NO: 37700 - DNA, 18 bp, Artificial Sequence
  Synthetic: FXN 3 forward 9:69042420-69042441; SpCas9
tctcttgttttatgctca

SEQ ID NO: 37701 - DNA, 25 bp, Artificial Sequence
  Synthetic: FXN 3 reverse 9:69042416-69042444; SpCas9
caaccgtgagcataaaacaagagaa

SEQ ID NO: 37702 - DNA, 24 bp, Artificial Sequence
  Synthetic: FXN 3 reverse 9:69042417-69042444; SpCas9
aaccgtgagcataaaacaagagaa

SEQ ID NO: 37703 - DNA, 23 bp, Artificial Sequence
  Synthetic: FXN 3 reverse 9:69042418-69042444; SpCas9
accgtgagcataaaacaagagaa

SEQ ID NO: 37704 - DNA, 22 bp, Artificial Sequence
  Synthetic: FXN 3 reverse 9:69042419-69042444; SpCas9
ccgtgagcataaaacaagagaa

SEQ ID NO: 37705 - DNA, 21 bp, Artificial Sequence
  Synthetic: FXN 3 reverse 9:69042420-69042444; SpCas9
cgtgagcataaaacaagagaa

SEQ ID NO: 37706 - DNA, 20 bp, Artificial Sequence
  Synthetic: FXN 3 reverse 9:69042421-69042444; SpCas9
gtgagcataaaacaagagaa

SEQ ID NO: 37707 - DNA, 19 bp, Artificial Sequence
  Synthetic: FXN 3 reverse 9:69042422-69042444; SpCas9
tgagcataaaacaagagaa

SEQ ID NO: 37708 - DNA, 18 bp, Artificial Sequence
  Synthetic: FXN 3 reverse 9:69042423-69042444; SpCas9
gagcataaaacaagagaa

SEQ ID NO: 37709 - DNA, 25 bp, Artificial Sequence
  Synthetic: FXN 3 forward 9:69042420-69042448; SpCas9
tctcttgttttatgctcacggttgt

SEQ ID NO: 37710 - DNA, 24 bp, Artificial Sequence
  Synthetic: FXN 3 forward 9:69042421-69042448; SpCas9
ctcttgttttatgctcacggttgt

SEQ ID NO: 37711 - DNA, 23 bp, Artificial Sequence
  Synthetic: FXN 3 forward 9:69042422-69042448; SpCas9
tcttgttttatgctcacggttgt

SEQ ID NO: 37712 - DNA, 22 bp, Artificial Sequence
  Synthetic: FXN 3 forward 9:69042423-69042448; SpCas9
cttgttttatgctcacggttgt

SEQ ID NO: 37713 - DNA, 21 bp, Artificial Sequence
  Synthetic: FXN 3 forward 9:69042424-69042448; SpCas9
ttgttttatgctcacggttgt

SEQ ID NO: 37714 - DNA, 20 bp, Artificial Sequence
  Synthetic: FXN 3 forward 9:69042425-69042448; SpCas9
tgttttatgctcacggttgt

SEQ ID NO: 37715 - DNA, 19 bp, Artificial Sequence
  Synthetic: FXN 3 forward 9:69042426-69042448; SpCas9
gttttatgctcacggttgt

SEQ ID NO: 37716 - DNA, 18 bp, Artificial Sequence
  Synthetic: FXN 3 forward 9:69042427-69042448; SpCas9
ttttatgctcacggttgt

SEQ ID NO: 37717 - DNA, 25 bp, Artificial Sequence
  Synthetic: FXN 3 forward 9:69042421-69042449; SpCas9
ctcttgttttatgctcacggttgtg

SEQ ID NO: 37718 - DNA, 24 bp, Artificial Sequence
  Synthetic: FXN 3 forward 9:69042422-69042449; SpCas9
tcttgttttatgctcacggttgtg

SEQ ID NO: 37719 - DNA, 23 bp, Artificial Sequence
  Synthetic: FXN 3 forward 9:69042423-69042449; SpCas9
cttgttttatgctcacggttgtg

SEQ ID NO: 37720 - DNA, 22 bp, Artificial Sequence
  Synthetic: FXN 3 forward 9:69042424-69042449; SpCas9
ttgttttatgctcacggttgtg

SEQ ID NO: 37721 - DNA, 21 bp, Artificial Sequence
  Synthetic: FXN 3 forward 9:69042425-69042449; SpCas9
tgttttatgctcacggttgtg

SEQ ID NO: 37722 - DNA, 20 bp, Artificial Sequence
  Synthetic: FXN 3 forward 9:69042426-69042449; SpCas9
gttttatgctcacggttgtg

SEQ ID NO: 37723 - DNA, 19 bp, Artificial Sequence
  Synthetic: FXN 3 forward 9:69042427-69042449; SpCas9
ttttatgctcacggttgtg

SEQ ID NO: 37724 - DNA, 18 bp, Artificial Sequence
  Synthetic: FXN 3 forward 9:69042428-69042449; SpCas9
tttatgctcacggttgtg

SEQ ID NO: 37725 - DNA, 25 bp, Artificial Sequence
  Synthetic: FXN 3 reverse 9:69042421-69042449; SpCas9
cctcacaaccgtgagcataaaacaa

SEQ ID NO: 37726 - DNA, 24 bp, Artificial Sequence
  Synthetic: FXN 3 reverse 9:69042422-69042449; SpCas9
ctcacaaccgtgagcataaaacaa

SEQ ID NO: 37727 - DNA, 23 bp, Artificial Sequence
  Synthetic: FXN 3 reverse 9:69042423-69042449; SpCas9
tcacaaccgtgagcataaaacaa

SEQ ID NO: 37728 - DNA, 22 bp, Artificial Sequence
  Synthetic: FXN 3 reverse 9:69042424-69042449; SpCas9
cacaaccgtgagcataaaacaa

SEQ ID NO: 37729 - DNA, 21 bp, Artificial Sequence
  Synthetic: FXN 3 reverse 9:69042425-69042449; SpCas9
acaaccgtgagcataaaacaa

SEQ ID NO: 37730 - DNA, 20 bp, Artificial Sequence
  Synthetic: FXN 3 reverse 9:69042426-69042449; SpCas9
caaccgtgagcataaaacaa

SEQ ID NO: 37731 - DNA, 19 bp, Artificial Sequence
  Synthetic: FXN 3 reverse 9:69042427-69042449; SpCas9
aaccgtgagcataaaacaa

SEQ ID NO: 37732 - DNA, 18 bp, Artificial Sequence
  Synthetic: FXN 3 reverse 9:69042428-69042449; SpCas9
accgtgagcataaaacaa

SEQ ID NO: 37733 - DNA, 25 bp, Artificial Sequence
  Synthetic: FXN 3 reverse 9:69042423-69042451; SpCas9
aacctcacaaccgtgagcataaaac

SEQ ID NO: 37734 - DNA, 24 bp, Artificial Sequence
  Synthetic: FXN 3 reverse 9:69042424-69042451; SpCas9
acctcacaaccgtgagcataaaac

SEQ ID NO: 37735 - DNA, 23 bp, Artificial Sequence
  Synthetic: FXN 3 reverse 9:69042425-69042451; SpCas9
cctcacaaccgtgagcataaaac

SEQ ID NO: 37736 - DNA, 22 bp, Artificial Sequence
  Synthetic: FXN 3 reverse 9:69042426-69042451; SpCas9
ctcacaaccgtgagcataaaac

SEQ ID NO: 37737 - DNA, 21 bp, Artificial Sequence
  Synthetic: FXN 3 reverse 9:69042427-69042451; SpCas9
tcacaaccgtgagcataaaac

SEQ ID NO: 37738 - DNA, 20 bp, Artificial Sequence
  Synthetic: FXN 3 reverse 9:69042428-69042451; SpCas9
cacaaccgtgagcataaaac

SEQ ID NO: 37739 - DNA, 19 bp, Artificial Sequence
  Synthetic: FXN 3 reverse 9:69042429-69042451; SpCas9
acaaccgtgagcataaaac

SEQ ID NO: 37740 - DNA, 18 bp, Artificial Sequence
  Synthetic: FXN 3 reverse 9:69042430-69042451; SpCas9
caaccgtgagcataaaac

SEQ ID NO: 37741 - DNA, 25 bp, Artificial Sequence
  Synthetic: FXN 3 forward 9:69042432-69042460; SpCas9
tgctcacggttgtgaggtttgttgt

SEQ ID NO: 37742 - DNA, 24 bp, Artificial Sequence
  Synthetic: FXN 3 forward 9:69042433-69042460; SpCas9
gctcacggttgtgaggtttgttgt

SEQ ID NO: 37743 - DNA, 23 bp, Artificial Sequence
  Synthetic: FXN 3 forward 9:69042434-69042460; SpCas9
ctcacggttgtgaggtttgttgt

SEQ ID NO: 37744 - DNA, 22 bp, Artificial Sequence
  Synthetic: FXN 3 forward 9:69042435-69042460; SpCas9
tcacggttgtgaggtttgttgt

SEQ ID NO: 37745 - DNA, 21 bp, Artificial Sequence
  Synthetic: FXN 3 forward 9:69042436-69042460; SpCas9
cacggttgtgaggtttgttgt

SEQ ID NO: 37746 - DNA, 20 bp, Artificial Sequence
  Synthetic: FXN 3 forward 9:69042437-69042460; SpCas9
acggttgtgaggtttgttgt

SEQ ID NO: 37747 - DNA, 19 bp, Artificial Sequence
  Synthetic: FXN 3 forward 9:69042438-69042460; SpCas9
cggttgtgaggtttgttgt

SEQ ID NO: 37748 - DNA, 18 bp, Artificial Sequence
  Synthetic: FXN 3 forward 9:69042439-69042460; SpCas9
ggttgtgaggtttgttgt

SEQ ID NO: 37749 - DNA, 25 bp, Artificial Sequence
  Synthetic: FXN 3 reverse 9:69042434-69042462; SpCas9
tactcacaacaaacctcacaaccgt

SEQ ID NO: 37750 - DNA, 24 bp, Artificial Sequence
  Synthetic: FXN 3 reverse 9:69042435-69042462; SpCas9
actcacaacaaacctcacaaccgt

SEQ ID NO: 37751 - DNA, 23 bp, Artificial Sequence
  Synthetic: FXN 3 reverse 9:69042436-69042462; SpCas9
ctcacaacaaacctcacaaccgt

SEQ ID NO: 37752 - DNA, 22 bp, Artificial Sequence
  Synthetic: FXN 3 reverse 9:69042437-69042462; SpCas9
tcacaacaaacctcacaaccgt

SEQ ID NO: 37753 - DNA, 21 bp, Artificial Sequence
  Synthetic: FXN 3 reverse 9:69042438-69042462; SpCas9
cacaacaaacctcacaaccgt

SEQ ID NO: 37754 - DNA, 20 bp, Artificial Sequence
  Synthetic: FXN 3 reverse 9:69042439-69042462; SpCas9
acaacaaacctcacaaccgt

SEQ ID NO: 37755 - DNA, 19 bp, Artificial Sequence
  Synthetic: FXN 3 reverse 9:69042440-69042462; SpCas9
caacaaacctcacaaccgt

SEQ ID NO: 37756 - DNA, 18 bp, Artificial Sequence
  Synthetic: FXN 3 reverse 9:69042441-69042462; SpCas9
aacaaacctcacaaccgt

SEQ ID NO: 37757 - DNA, 25 bp, Artificial Sequence
  Synthetic: FXN 3 forward 9:69042453-69042481; SpCas9
ttgtgagtaccacgatcccttcctt

SEQ ID NO: 37758 - DNA, 24 bp, Artificial Sequence
  Synthetic: FXN 3 forward 9:69042454-69042481; SpCas9
tgtgagtaccacgatcccttcctt

SEQ ID NO: 37759 - DNA, 23 bp, Artificial Sequence
  Synthetic: FXN 3 forward 9:69042455-69042481; SpCas9
gtgagtaccacgatcccttcctt

SEQ ID NO: 37760 - DNA, 22 bp, Artificial Sequence
  Synthetic: FXN 3 forward 9:69042456-69042481; SpCas9
tgagtaccacgatcccttcctt

SEQ ID NO: 37761 - DNA, 21 bp, Artificial Sequence
  Synthetic: FXN 3 forward 9:69042457-69042481; SpCas9
gagtaccacgatcccttcctt

SEQ ID NO: 37762 - DNA, 20 bp, Artificial Sequence
  Synthetic: FXN 3 forward 9:69042458-69042481; SpCas9
agtaccacgatcccttcctt

SEQ ID NO: 37763 - DNA, 19 bp, Artificial Sequence
  Synthetic: FXN 3 forward 9:69042459-69042481; SpCas9
gtaccacgatcccttcctt

SEQ ID NO: 37764 - DNA, 18 bp, Artificial Sequence
  Synthetic: FXN 3 forward 9:69042460-69042481; SpCas9
taccacgatcccttcctt

SEQ ID NO: 37765 - DNA, 25 bp, Artificial Sequence
  Synthetic: FXN 3 forward 9:69042455-69042483; SpCas9
gtgagtaccacgatcccttccttca

SEQ ID NO: 37766 - DNA, 24 bp, Artificial Sequence
  Synthetic: FXN 3 forward 9:69042456-69042483; SpCas9
tgagtaccacgatcccttccttca

SEQ ID NO: 37767 - DNA, 23 bp, Artificial Sequence
  Synthetic: FXN 3 forward 9:69042457-69042483; SpCas9
gagtaccacgatcccttccttca

SEQ ID NO: 37768 - DNA, 22 bp, Artificial Sequence
  Synthetic: FXN 3 forward 9:69042458-69042483; SpCas9
agtaccacgatcccttccttca

SEQ ID NO: 37769 - DNA, 21 bp, Artificial Sequence
  Synthetic: FXN 3 forward 9:69042459-69042483; SpCas9
gtaccacgatcccttccttca

SEQ ID NO: 37770 - DNA, 20 bp, Artificial Sequence
  Synthetic: FXN 3 forward 9:69042460-69042483; SpCas9
taccacgatcccttccttca

SEQ ID NO: 37771 - DNA, 19 bp, Artificial Sequence
  Synthetic: FXN 3 forward 9:69042461-69042483; SpCas9
accacgatcccttccttca

SEQ ID NO: 37772 - DNA, 18 bp, Artificial Sequence
  Synthetic: FXN 3 forward 9:69042462-69042483; SpCas9
ccacgatcccttccttca

SEQ ID NO: 37773 - DNA, 25 bp, Artificial Sequence
  Synthetic: FXN 3 forward 9:69042456-69042484; SpCas9
tgagtaccacgatcccttccttcag

SEQ ID NO: 37774 - DNA, 24 bp, Artificial Sequence
  Synthetic: FXN 3 forward 9:69042457-69042484; SpCas9
gagtaccacgatcccttccttcag

SEQ ID NO: 37775 - DNA, 23 bp, Artificial Sequence
  Synthetic: FXN 3 forward 9:69042458-69042484; SpCas9
agtaccacgatcccttccttcag

SEQ ID NO: 37776 - DNA, 22 bp, Artificial Sequence
  Synthetic: FXN 3 forward 9:69042459-69042484; SpCas9
gtaccacgatcccttccttcag

SEQ ID NO: 37777 - DNA, 21 bp, Artificial Sequence
  Synthetic: FXN 3 forward 9:69042460-69042484; SpCas9
taccacgatcccttccttcag

SEQ ID NO: 37778 - DNA, 20 bp, Artificial Sequence
  Synthetic: FXN 3 forward 9:69042461-69042484; SpCas9
accacgatcccttccttcag

SEQ ID NO: 37779 - DNA, 19 bp, Artificial Sequence
  Synthetic: FXN 3 forward 9:69042462-69042484; SpCas9
ccacgatcccttccttcag

SEQ ID NO: 37780 - DNA, 18 bp, Artificial Sequence
  Synthetic: FXN 3 forward 9:69042463-69042484; SpCas9
cacgatcccttccttcag

SEQ ID NO: 37781 - DNA, 25 bp, Artificial Sequence
  Synthetic: FXN 3 forward 9:69042458-69042486; SpCas9
agtaccacgatcccttccttcagag

SEQ ID NO: 37782 - DNA, 24 bp, Artificial Sequence
  Synthetic: FXN 3 forward 9:69042459-69042486; SpCas9
gtaccacgatcccttccttcagag

SEQ ID NO: 37783 - DNA, 23 bp, Artificial Sequence
  Synthetic: FXN 3 forward 9:69042460-69042486; SpCas9
taccacgatcccttccttcagag

SEQ ID NO: 37784 - DNA, 22 bp, Artificial Sequence
  Synthetic: FXN 3 forward 9:69042461-69042486; SpCas9
accacgatcccttccttcagag

SEQ ID NO: 37785 - DNA, 21 bp, Artificial Sequence
  Synthetic: FXN 3 forward 9:69042462-69042486; SpCas9
ccacgatcccttccttcagag

SEQ ID NO: 37786 - DNA, 20 bp, Artificial Sequence
  Synthetic: FXN 3 forward 9:69042463-69042486; SpCas9
cacgatcccttccttcagag

SEQ ID NO: 37787 - DNA, 19 bp, Artificial Sequence
  Synthetic: FXN 3 forward 9:69042464-69042486; SpCas9
acgatcccttccttcagag

SEQ ID NO: 37788 - DNA, 18 bp, Artificial Sequence
  Synthetic: FXN 3 forward 9:69042465-69042486; SpCas9
cgatcccttccttcagag

SEQ ID NO: 37789 - DNA, 25 bp, Artificial Sequence
  Synthetic: FXN 3 reverse 9:69042462-69042490; SpCas9
tttactcctctgaaggaagggatcg

SEQ ID NO: 37790 - DNA, 24 bp, Artificial Sequence
  Synthetic: FXN 3 reverse 9:69042463-69042490; SpCas9
ttactcctctgaaggaagggatcg

SEQ ID NO: 37791 - DNA, 23 bp, Artificial Sequence
  Synthetic: FXN 3 reverse 9:69042464-69042490; SpCas9
tactcctctgaaggaagggatcg

SEQ ID NO: 37792 - DNA, 22 bp, Artificial Sequence
  Synthetic: FXN 3 reverse 9:69042465-69042490; SpCas9
actcctctgaaggaagggatcg

SEQ ID NO: 37793 - DNA, 21 bp, Artificial Sequence
  Synthetic: FXN 3 reverse 9:69042466-69042490; SpCas9
ctcctctgaaggaagggatcg

SEQ ID NO: 37794 - DNA, 20 bp, Artificial Sequence
  Synthetic: FXN 3 reverse 9:69042467-69042490; SpCas9
tcctctgaaggaagggatcg

SEQ ID NO: 37795 - DNA, 19 bp, Artificial Sequence
  Synthetic: FXN 3 reverse 9:69042468-69042490; SpCas9
cctctgaaggaagggatcg

SEQ ID NO: 37796 - DNA, 18 bp, Artificial Sequence
  Synthetic: FXN 3 reverse 9:69042469-69042490; SpCas9
ctctgaaggaagggatcg

SEQ ID NO: 37797 - DNA, 25 bp, Artificial Sequence
  Synthetic: FXN 3 forward 9:69042467-69042495; SpCas9
atcccttccttcagaggagtaaact

SEQ ID NO: 37798 - DNA, 24 bp, Artificial Sequence
  Synthetic: FXN 3 forward 9:69042468-69042495; SpCas9
tcccttccttcagaggagtaaact

SEQ ID NO: 37799 - DNA, 23 bp, Artificial Sequence
  Synthetic: FXN 3 forward 9:69042469-69042495; SpCas9
cccttccttcagaggagtaaact

SEQ ID NO: 37800 - DNA, 22 bp, Artificial Sequence
  Synthetic: FXN 3 forward 9:69042470-69042495; SpCas9
ccttccttcagaggagtaaact

SEQ ID NO: 37801 - DNA, 21 bp, Artificial Sequence
  Synthetic: FXN 3 forward 9:69042471-69042495; SpCas9
cttccttcagaggagtaaact

SEQ ID NO: 37802 - DNA, 20 bp, Artificial Sequence
  Synthetic: FXN 3 forward 9:69042472-69042495; SpCas9
ttccttcagaggagtaaact

SEQ ID NO: 37803 - DNA, 19 bp, Artificial Sequence
  Synthetic: FXN 3 forward 9:69042473-69042495; SpCas9
tccttcagaggagtaaact

SEQ ID NO: 37804 - DNA, 18 bp, Artificial Sequence
  Synthetic: FXN 3 forward 9:69042474-69042495; SpCas9
ccttcagaggagtaaact

SEQ ID NO: 37805 - DNA, 25 bp, Artificial Sequence
  Synthetic: FXN 3 forward 9:69042468-69042496; SpCas9
tcccttccttcagaggagtaaactg

SEQ ID NO: 37806 - DNA, 24 bp, Artificial Sequence
  Synthetic: FXN 3 forward 9:69042469-69042496; SpCas9
cccttccttcagaggagtaaactg

SEQ ID NO: 37807 - DNA, 23 bp, Artificial Sequence
  Synthetic: FXN 3 forward 9:69042470-69042496; SpCas9
ccttccttcagaggagtaaactg

SEQ ID NO: 37808 - DNA, 22 bp, Artificial Sequence
  Synthetic: FXN 3 forward 9:69042471-69042496; SpCas9
cttccttcagaggagtaaactg

SEQ ID NO: 37809 - DNA, 21 bp, Artificial Sequence
  Synthetic: FXN 3 forward 9:69042472-69042496; SpCas9
ttccttcagaggagtaaactg

SEQ ID NO: 37810 - DNA, 20 bp, Artificial Sequence
  Synthetic: FXN 3 forward 9:69042473-69042496; SpCas9
tccttcagaggagtaaactg

SEQ ID NO: 37811 - DNA, 19 bp, Artificial Sequence
  Synthetic: FXN 3 forward 9:69042474-69042496; SpCas9
ccttcagaggagtaaactg

SEQ ID NO: 37812 - DNA, 18 bp, Artificial Sequence
  Synthetic: FXN 3 forward 9:69042475-69042496; SpCas9
cttcagaggagtaaactg

SEQ ID NO: 37813 - DNA, 25 bp, Artificial Sequence
  Synthetic: FXN 3 reverse 9:69042469-69042497; SpCas9
acctcagtttactcctctgaaggaa

SEQ ID NO: 37814 - DNA, 24 bp, Artificial Sequence
  Synthetic: FXN 3 reverse 9:69042470-69042497; SpCas9
cctcagtttactcctctgaaggaa

SEQ ID NO: 37815 - DNA, 23 bp, Artificial Sequence
  Synthetic: FXN 3 reverse 9:69042471-69042497; SpCas9
ctcagtttactcctctgaaggaa

SEQ ID NO: 37816 - DNA, 22 bp, Artificial Sequence
  Synthetic: FXN 3 reverse 9:69042472-69042497; SpCas9
tcagtttactcctctgaaggaa

SEQ ID NO: 37817 - DNA, 21 bp, Artificial Sequence
  Synthetic: FXN 3 reverse 9:69042473-69042497; SpCas9
cagtttactcctctgaaggaa

SEQ ID NO: 37818 - DNA, 20 bp, Artificial Sequence
  Synthetic: FXN 3 reverse 9:69042474-69042497; SpCas9
agtttactcctctgaaggaa

SEQ ID NO: 37819 - DNA, 19 bp, Artificial Sequence
  Synthetic: FXN 3 reverse 9:69042475-69042497; SpCas9
gtttactcctctgaaggaa

SEQ ID NO: 37820 - DNA, 18 bp, Artificial Sequence
  Synthetic: FXN 3 reverse 9:69042476-69042497; SpCas9
tttactcctctgaaggaa

SEQ ID NO: 37821 - DNA, 25 bp, Artificial Sequence
  Synthetic: FXN 3 reverse 9:69042470-69042498; SpCas9
aacctcagtttactcctctgaagga

SEQ ID NO: 37822 - DNA, 24 bp, Artificial Sequence
  Synthetic: FXN 3 reverse 9:69042471-69042498; SpCas9
acctcagtttactcctctgaagga

SEQ ID NO: 37823 - DNA, 23 bp, Artificial Sequence
  Synthetic: FXN 3 reverse 9:69042472-69042498; SpCas9
cctcagtttactcctctgaagga

SEQ ID NO: 37824 - DNA, 22 bp, Artificial Sequence
  Synthetic: FXN 3 reverse 9:69042473-69042498; SpCas9
ctcagtttactcctctgaagga

SEQ ID NO: 37825 - DNA, 21 bp, Artificial Sequence
  Synthetic: FXN 3 reverse 9:69042474-69042498; SpCas9
tcagtttactcctctgaagga

SEQ ID NO: 37826 - DNA, 20 bp, Artificial Sequence
  Synthetic: FXN 3 reverse 9:69042475-69042498; SpCas9
cagtttactcctctgaagga

SEQ ID NO: 37827 - DNA, 19 bp, Artificial Sequence
  Synthetic: FXN 3 reverse 9:69042476-69042498; SpCas9
agtttactcctctgaagga

SEQ ID NO: 37828 - DNA, 18 bp, Artificial Sequence
  Synthetic: FXN 3 reverse 9:69042477-69042498; SpCas9
gtttactcctctgaagga

SEQ ID NO: 37829 - DNA, 25 bp, Artificial Sequence
  Synthetic: FXN 3 reverse 9:69042471-69042499; SpCas9
gaacctcagtttactcctctgaagg

SEQ ID NO: 37830 - DNA, 24 bp, Artificial Sequence
  Synthetic: FXN 3 reverse 9:69042472-69042499; SpCas9
aacctcagtttactcctctgaagg

SEQ ID NO: 37831 - DNA, 23 bp, Artificial Sequence
  Synthetic: FXN 3 reverse 9:69042473-69042499; SpCas9
acctcagtttactcctctgaagg

SEQ ID NO: 37832 - DNA, 22 bp, Artificial Sequence
  Synthetic: FXN 3 reverse 9:69042474-69042499; SpCas9
cctcagtttactcctctgaagg

SEQ ID NO: 37833 - DNA, 21 bp, Artificial Sequence
  Synthetic: FXN 3 reverse 9:69042475-69042499; SpCas9
ctcagtttactcctctgaagg

SEQ ID NO: 37834 - DNA, 20 bp, Artificial Sequence
  Synthetic: FXN 3 reverse 9:69042476-69042499; SpCas9
tcagtttactcctctgaagg

SEQ ID NO: 37835 - DNA, 19 bp, Artificial Sequence
  Synthetic: FXN 3 reverse 9:69042477-69042499; SpCas9
cagtttactcctctgaagg

SEQ ID NO: 37836 - DNA, 18 bp, Artificial Sequence
  Synthetic: FXN 3 reverse 9:69042478-69042499; SpCas9
agtttactcctctgaagg

SEQ ID NO: 37837 - DNA, 25 bp, Artificial Sequence
  Synthetic: FXN 3 reverse 9:69042474-69042502; SpCas9
ttggaacctcagtttactcctctga

SEQ ID NO: 37838 - DNA, 24 bp, Artificial Sequence
  Synthetic: FXN 3 reverse 9:69042475-69042502; SpCas9
tggaacctcagtttactcctctga

SEQ ID NO: 37839 - DNA, 23 bp, Artificial Sequence
  Synthetic: FXN 3 reverse 9:69042476-69042502; SpCas9
ggaacctcagtttactcctctga

SEQ ID NO: 37840 - DNA, 22 bp, Artificial Sequence
  Synthetic: FXN 3 reverse 9:69042477-69042502; SpCas9
gaacctcagtttactcctctga

SEQ ID NO: 37841 - DNA, 21 bp, Artificial Sequence
  Synthetic: FXN 3 reverse 9:69042478-69042502; SpCas9
aacctcagtttactcctctga

SEQ ID NO: 37842 - DNA, 20 bp, Artificial Sequence
  Synthetic: FXN 3 reverse 9:69042479-69042502; SpCas9
acctcagtttactcctctga

SEQ ID NO: 37843 - DNA, 19 bp, Artificial Sequence
  Synthetic: FXN 3 reverse 9:69042480-69042502; SpCas9
cctcagtttactcctctga

SEQ ID NO: 37844 - DNA, 18 bp, Artificial Sequence
  Synthetic: FXN 3 reverse 9:69042481-69042502; SpCas9
ctcagtttactcctctga

SEQ ID NO: 37845 - DNA, 25 bp, Artificial Sequence
  Synthetic: FXN 3 reverse 9:69042475-69042503; SpCas9
tttggaacctcagtttactcctctg

SEQ ID NO: 37846 - DNA, 24 bp, Artificial Sequence
  Synthetic: FXN 3 reverse 9:69042476-69042503; SpCas9
ttggaacctcagtttactcctctg

SEQ ID NO: 37847 - DNA, 23 bp, Artificial Sequence
  Synthetic: FXN 3 reverse 9:69042477-69042503; SpCas9
tggaacctcagtttactcctctg

SEQ ID NO: 37848 - DNA, 22 bp, Artificial Sequence
  Synthetic: FXN 3 reverse 9:69042478-69042503; SpCas9
ggaacctcagtttactcctctg

SEQ ID NO: 37849 - DNA, 21 bp, Artificial Sequence
  Synthetic: FXN 3 reverse 9:69042479-69042503; SpCas9
gaacctcagtttactcctctg

SEQ ID NO: 37850 - DNA, 20 bp, Artificial Sequence
  Synthetic: FXN 3 reverse 9:69042480-69042503; SpCas9
aacctcagtttactcctctg

SEQ ID NO: 37851 - DNA, 19 bp, Artificial Sequence
  Synthetic: FXN 3 reverse 9:69042481-69042503; SpCas9
acctcagtttactcctctg

SEQ ID NO: 37852 - DNA, 18 bp, Artificial Sequence
  Synthetic: FXN 3 reverse 9:69042482-69042503; SpCas9
cctcagtttactcctctg

SEQ ID NO: 37853 - DNA, 25 bp, Artificial Sequence
  Synthetic: FXN 3 forward 9:69042477-69042505; SpCas9
tcagaggagtaaactgaggttccaa

SEQ ID NO: 37854 - DNA, 24 bp, Artificial Sequence
  Synthetic: FXN 3 forward 9:69042478-69042505; SpCas9
cagaggagtaaactgaggttccaa

SEQ ID NO: 37855 - DNA, 23 bp, Artificial Sequence
  Synthetic: FXN 3 forward 9:69042479-69042505; SpCas9
agaggagtaaactgaggttccaa

SEQ ID NO: 37856 - DNA, 22 bp, Artificial Sequence
  Synthetic: FXN 3 forward 9:69042480-69042505; SpCas9
gaggagtaaactgaggttccaa

SEQ ID NO: 37857 - DNA, 21 bp, Artificial Sequence
  Synthetic: FXN 3 forward 9:69042481-69042505; SpCas9
aggagtaaactgaggttccaa

SEQ ID NO: 37858 - DNA, 20 bp, Artificial Sequence
  Synthetic: FXN 3 forward 9:69042482-69042505; SpCas9
ggagtaaactgaggttccaa

SEQ ID NO: 37859 - DNA, 19 bp, Artificial Sequence
  Synthetic: FXN 3 forward 9:69042483-69042505; SpCas9
gagtaaactgaggttccaa

SEQ ID NO: 37860 - DNA, 18 bp, Artificial Sequence
  Synthetic: FXN 3 forward 9:69042484-69042505; SpCas9
agtaaactgaggttccaa

SEQ ID NO: 37861 - DNA, 25 bp, Artificial Sequence
  Synthetic: FXN 3 forward 9:69042478-69042506; SpCas9
cagaggagtaaactgaggttccaaa

SEQ ID NO: 37862 - DNA, 24 bp, Artificial Sequence
  Synthetic: FXN 3 forward 9:69042479-69042506; SpCas9
agaggagtaaactgaggttccaaa

SEQ ID NO: 37863 - DNA, 23 bp, Artificial Sequence
  Synthetic: FXN 3 forward 9:69042480-69042506; SpCas9
gaggagtaaactgaggttccaaa

SEQ ID NO: 37864 - DNA, 22 bp, Artificial Sequence
  Synthetic: FXN 3 forward 9:69042481-69042506; SpCas9
aggagtaaactgaggttccaaa

SEQ ID NO: 37865 - DNA, 21 bp, Artificial Sequence
  Synthetic: FXN 3 forward 9:69042482-69042506; SpCas9
ggagtaaactgaggttccaaa

SEQ ID NO: 37866 - DNA, 20 bp, Artificial Sequence
  Synthetic: FXN 3 forward 9:69042483-69042506; SpCas9
gagtaaactgaggttccaaa

SEQ ID NO: 37867 - DNA, 19 bp, Artificial Sequence
  Synthetic: FXN 3 forward 9:69042484-69042506; SpCas9
agtaaactgaggttccaaa

SEQ ID NO: 37868 - DNA, 18 bp, Artificial Sequence
  Synthetic: FXN 3 forward 9:69042485-69042506; SpCas9
gtaaactgaggttccaaa

SEQ ID NO: 37869 - DNA, 25 bp, Artificial Sequence
  Synthetic: FXN 3 forward 9:69042483-69042511; SpCas9
gagtaaactgaggttccaaaaggtt

SEQ ID NO: 37870 - DNA, 24 bp, Artificial Sequence
  Synthetic: FXN 3 forward 9:69042484-69042511; SpCas9
agtaaactgaggttccaaaaggtt

SEQ ID NO: 37871 - DNA, 23 bp, Artificial Sequence
  Synthetic: FXN 3 forward 9:69042485-69042511; SpCas9
gtaaactgaggttccaaaaggtt

SEQ ID NO: 37872 - DNA, 22 bp, Artificial Sequence
  Synthetic: FXN 3 forward 9:69042486-69042511; SpCas9
taaactgaggttccaaaaggtt

SEQ ID NO: 37873 - DNA, 21 bp, Artificial Sequence
  Synthetic: FXN 3 forward 9:69042487-69042511; SpCas9
aaactgaggttccaaaaggtt

SEQ ID NO: 37874 - DNA, 20 bp, Artificial Sequence
  Synthetic: FXN 3 forward 9:69042488-69042511; SpCas9
aactgaggttccaaaaggtt

SEQ ID NO: 37875 - DNA, 19 bp, Artificial Sequence
  Synthetic: FXN 3 forward 9:69042489-69042511; SpCas9
actgaggttccaaaaggtt

SEQ ID NO: 37876 - DNA, 18 bp, Artificial Sequence
  Synthetic: FXN 3 forward 9:69042490-69042511; SpCas9
ctgaggttccaaaaggtt

SEQ ID NO: 37877 - DNA, 25 bp, Artificial Sequence
  Synthetic: FXN 3 forward 9:69042486-69042514; SpCas9
taaactgaggttccaaaaggtttag

SEQ ID NO: 37878 - DNA, 24 bp, Artificial Sequence
  Synthetic: FXN 3 forward 9:69042487-69042514; SpCas9
aaactgaggttccaaaaggtttag

SEQ ID NO: 37879 - DNA, 23 bp, Artificial Sequence
  Synthetic: FXN 3 forward 9:69042488-69042514; SpCas9
aactgaggttccaaaaggtttag

SEQ ID NO: 37880 - DNA, 22 bp, Artificial Sequence
  Synthetic: FXN 3 forward 9:69042489-69042514; SpCas9
actgaggttccaaaaggtttag

SEQ ID NO: 37881 - DNA, 21 bp, Artificial Sequence
  Synthetic: FXN 3 forward 9:69042490-69042514; SpCas9
ctgaggttccaaaaggtttag

SEQ ID NO: 37882 - DNA, 20 bp, Artificial Sequence
  Synthetic: FXN 3 forward 9:69042491-69042514; SpCas9
tgaggttccaaaaggtttag

SEQ ID NO: 37883 - DNA, 19 bp, Artificial Sequence
  Synthetic: FXN 3 forward 9:69042492-69042514; SpCas9
gaggttccaaaaggtttag

SEQ ID NO: 37884 - DNA, 18 bp, Artificial Sequence
  Synthetic: FXN 3 forward 9:69042493-69042514; SpCas9
aggttccaaaaggtttag

SEQ ID NO: 37885 - DNA, 25 bp, Artificial Sequence
  Synthetic: FXN 3 reverse 9:69042490-69042518; SpCas9
gcaactgctaaaccttttggaacct

SEQ ID NO: 37886 - DNA, 24 bp, Artificial Sequence
  Synthetic: FXN 3 reverse 9:69042491-69042518; SpCas9
caactgctaaaccttttggaacct

SEQ ID NO: 37887 - DNA, 23 bp, Artificial Sequence
  Synthetic: FXN 3 reverse 9:69042492-69042518; SpCas9
aactgctaaaccttttggaacct

SEQ ID NO: 37888 - DNA, 22 bp, Artificial Sequence
  Synthetic: FXN 3 reverse 9:69042493-69042518; SpCas9
actgctaaaccttttggaacct

SEQ ID NO: 37889 - DNA, 21 bp, Artificial Sequence
  Synthetic: FXN 3 reverse 9:69042494-69042518; SpCas9
ctgctaaaccttttggaacct

SEQ ID NO: 37890 - DNA, 20 bp, Artificial Sequence
  Synthetic: FXN 3 reverse 9:69042495-69042518; SpCas9
tgctaaaccttttggaacct

SEQ ID NO: 37891 - DNA, 19 bp, Artificial Sequence
  Synthetic: FXN 3 reverse 9:69042496-69042518; SpCas9
gctaaaccttttggaacct

SEQ ID NO: 37892 - DNA, 18 bp, Artificial Sequence
  Synthetic: FXN 3 reverse 9:69042497-69042518; SpCas9
ctaaaccttttggaacct

SEQ ID NO: 37893 - DNA, 25 bp, Artificial Sequence
  Synthetic: FXN 3 forward 9:69042495-69042523; SpCas9
gttccaaaaggtttagcagttgccc

SEQ ID NO: 37894 - DNA, 24 bp, Artificial Sequence
  Synthetic: FXN 3 forward 9:69042496-69042523; SpCas9
ttccaaaaggtttagcagttgccc

SEQ ID NO: 37895 - DNA, 23 bp, Artificial Sequence
  Synthetic: FXN 3 forward 9:69042497-69042523; SpCas9
tccaaaaggtttagcagttgccc

SEQ ID NO: 37896 - DNA, 22 bp, Artificial Sequence
  Synthetic: FXN 3 forward 9:69042498-69042523; SpCas9
ccaaaaggtttagcagttgccc

SEQ ID NO: 37897 - DNA, 21 bp, Artificial Sequence
  Synthetic: FXN 3 forward 9:69042499-69042523; SpCas9
caaaaggtttagcagttgccc

SEQ ID NO: 37898 - DNA, 20 bp, Artificial Sequence
  Synthetic: FXN 3 forward 9:69042500-69042523; SpCas9
aaaaggtttagcagttgccc

SEQ ID NO: 37899 - DNA, 19 bp, Artificial Sequence
  Synthetic: FXN 3 forward 9:69042501-69042523; SpCas9
aaaggtttagcagttgccc

SEQ ID NO: 37900 - DNA, 18 bp, Artificial Sequence
  Synthetic: FXN 3 forward 9:69042502-69042523; SpCas9
aaggtttagcagttgccc

SEQ ID NO: 37901 - DNA, 25 bp, Artificial Sequence
  Synthetic: FXN 3 forward 9:69042496-69042524; SpCas9
ttccaaaaggtttagcagttgcccg

SEQ ID NO: 37902 - DNA, 24 bp, Artificial Sequence
  Synthetic: FXN 3 forward 9:69042497-69042524; SpCas9
tccaaaaggtttagcagttgcccg

SEQ ID NO: 37903 - DNA, 23 bp, Artificial Sequence
  Synthetic: FXN 3 forward 9:69042498-69042524; SpCas9
ccaaaaggtttagcagttgcccg

SEQ ID NO: 37904 - DNA, 22 bp, Artificial Sequence
  Synthetic: FXN 3 forward 9:69042499-69042524; SpCas9
caaaaggtttagcagttgcccg

SEQ ID NO: 37905 - DNA, 21 bp, Artificial Sequence
  Synthetic: FXN 3 forward 9:69042500-69042524; SpCas9
aaaaggtttagcagttgcccg

SEQ ID NO: 37906 - DNA, 20 bp, Artificial Sequence
  Synthetic: FXN 3 forward 9:69042501-69042524; SpCas9
aaaggtttagcagttgcccg

SEQ ID NO: 37907 - DNA, 19 bp, Artificial Sequence
  Synthetic: FXN 3 forward 9:69042502-69042524; SpCas9
aaggtttagcagttgcccg

SEQ ID NO: 37908 - DNA, 18 bp, Artificial Sequence
  Synthetic: FXN 3 forward 9:69042503-69042524; SpCas9
aggtttagcagttgcccg

SEQ ID NO: 37909 - DNA, 25 bp, Artificial Sequence
  Synthetic: FXN 3 reverse 9:69042498-69042526; SpCas9
ttcctcgggcaactgctaaaccttt

SEQ ID NO: 37910 - DNA, 24 bp, Artificial Sequence
  Synthetic: FXN 3 reverse 9:69042499-69042526; SpCas9
tcctcgggcaactgctaaaccttt

SEQ ID NO: 37911 - DNA, 23 bp, Artificial Sequence
  Synthetic: FXN 3 reverse 9:69042500-69042526; SpCas9
cctcgggcaactgctaaaccttt

SEQ ID NO: 37912 - DNA, 22 bp, Artificial Sequence
  Synthetic: FXN 3 reverse 9:69042501-69042526; SpCas9
ctcgggcaactgctaaaccttt

SEQ ID NO: 37913 - DNA, 21 bp, Artificial Sequence
  Synthetic: FXN 3 reverse 9:69042502-69042526; SpCas9
tcgggcaactgctaaaccttt

SEQ ID NO: 37914 - DNA, 20 bp, Artificial Sequence
  Synthetic: FXN 3 reverse 9:69042503-69042526; SpCas9
cgggcaactgctaaaccttt

SEQ ID NO: 37915 - DNA, 19 bp, Artificial Sequence
  Synthetic: FXN 3 reverse 9:69042504-69042526; SpCas9
gggcaactgctaaaccttt

SEQ ID NO: 37916 - DNA, 18 bp, Artificial Sequence
  Synthetic: FXN 3 reverse 9:69042505-69042526; SpCas9
ggcaactgctaaaccttt

SEQ ID NO: 37917 - DNA, 25 bp, Artificial Sequence
  Synthetic: FXN 3 forward 9:69042509-69042537; SpCas9
agcagttgcccgaggaatattaaat

SEQ ID NO: 37918 - DNA, 24 bp, Artificial Sequence
  Synthetic: FXN 3 forward 9:69042510-69042537; SpCas9
gcagttgcccgaggaatattaaat

SEQ ID NO: 37919 - DNA, 23 bp, Artificial Sequence
  Synthetic: FXN 3 forward 9:69042511-69042537; SpCas9
cagttgcccgaggaatattaaat

SEQ ID NO: 37920 - DNA, 22 bp, Artificial Sequence
  Synthetic: FXN 3 forward 9:69042512-69042537; SpCas9
agttgcccgaggaatattaaat

SEQ ID NO: 37921 - DNA, 21 bp, Artificial Sequence
  Synthetic: FXN 3 forward 9:69042513-69042537; SpCas9
gttgcccgaggaatattaaat

SEQ ID NO: 37922 - DNA, 20 bp, Artificial Sequence
  Synthetic: FXN 3 forward 9:69042514-69042537; SpCas9
ttgcccgaggaatattaaat

SEQ ID NO: 37923 - DNA, 19 bp, Artificial Sequence
  Synthetic: FXN 3 forward 9:69042515-69042537; SpCas9
tgcccgaggaatattaaat

SEQ ID NO: 37924 - DNA, 18 bp, Artificial Sequence
  Synthetic: FXN 3 forward 9:69042516-69042537; SpCas9
gcccgaggaatattaaat

SEQ ID NO: 37925 - DNA, 25 bp, Artificial Sequence
  Synthetic: FXN 3 forward 9:69042515-69042543; SpCas9
tgcccgaggaatattaaattggcaa

SEQ ID NO: 37926 - DNA, 24 bp, Artificial Sequence
  Synthetic: FXN 3 forward 9:69042516-69042543; SpCas9
gcccgaggaatattaaattggcaa

SEQ ID NO: 37927 - DNA, 23 bp, Artificial Sequence
  Synthetic: FXN 3 forward 9:69042517-69042543; SpCas9
cccgaggaatattaaattggcaa

SEQ ID NO: 37928 - DNA, 22 bp, Artificial Sequence
  Synthetic: FXN 3 forward 9:69042518-69042543; SpCas9
ccgaggaatattaaattggcaa

SEQ ID NO: 37929 - DNA, 21 bp, Artificial Sequence
  Synthetic: FXN 3 forward 9:69042519-69042543; SpCas9
cgaggaatattaaattggcaa

SEQ ID NO: 37930 - DNA, 20 bp, Artificial Sequence
  Synthetic: FXN 3 forward 9:69042520-69042543; SpCas9
gaggaatattaaattggcaa

SEQ ID NO: 37931 - DNA, 19 bp, Artificial Sequence
  Synthetic: FXN 3 forward 9:69042521-69042543; SpCas9
aggaatattaaattggcaa

SEQ ID NO: 37932 - DNA, 18 bp, Artificial Sequence
  Synthetic: FXN 3 forward 9:69042522-69042543; SpCas9
ggaatattaaattggcaa

SEQ ID NO: 37933 - DNA, 25 bp, Artificial Sequence
  Synthetic: FXN 3 reverse 9:69042517-69042545; SpCas9
tgcttttgccaatttaatattcctc

SEQ ID NO: 37934 - DNA, 24 bp, Artificial Sequence
  Synthetic: FXN 3 reverse 9:69042518-69042545; SpCas9
gcttttgccaatttaatattcctc

SEQ ID NO: 37935 - DNA, 23 bp, Artificial Sequence
  Synthetic: FXN 3 reverse 9:69042519-69042545; SpCas9
cttttgccaatttaatattcctc

SEQ ID NO: 37936 - DNA, 22 bp, Artificial Sequence
  Synthetic: FXN 3 reverse 9:69042520-69042545; SpCas9
ttttgccaatttaatattcctc

SEQ ID NO: 37937 - DNA, 21 bp, Artificial Sequence
  Synthetic: FXN 3 reverse 9:69042521-69042545; SpCas9
tttgccaatttaatattcctc

SEQ ID NO: 37938 - DNA, 20 bp, Artificial Sequence
  Synthetic: FXN 3 reverse 9:69042522-69042545; SpCas9
ttgccaatttaatattcctc

SEQ ID NO: 37939 - DNA, 19 bp, Artificial Sequence
  Synthetic: FXN 3 reverse 9:69042523-69042545; SpCas9
tgccaatttaatattcctc

SEQ ID NO: 37940 - DNA, 18 bp, Artificial Sequence
  Synthetic: FXN 3 reverse 9:69042524-69042545; SpCas9
gccaatttaatattcctc

SEQ ID NO: 37941 - DNA, 25 bp, Artificial Sequence
  Synthetic: FXN 3 forward 9:69042518-69042546; SpCas9
ccgaggaatattaaattggcaaaag

SEQ ID NO: 37942 - DNA, 24 bp, Artificial Sequence
  Synthetic: FXN 3 forward 9:69042519-69042546; SpCas9
cgaggaatattaaattggcaaaag

SEQ ID NO: 37943 - DNA, 23 bp, Artificial Sequence
  Synthetic: FXN 3 forward 9:69042520-69042546; SpCas9
gaggaatattaaattggcaaaag

SEQ ID NO: 37944 - DNA, 22 bp, Artificial Sequence
  Synthetic: FXN 3 forward 9:69042521-69042546; SpCas9
aggaatattaaattggcaaaag

SEQ ID NO: 37945 - DNA, 21 bp, Artificial Sequence
  Synthetic: FXN 3 forward 9:69042522-69042546; SpCas9
ggaatattaaattggcaaaag

SEQ ID NO: 37946 - DNA, 20 bp, Artificial Sequence
  Synthetic: FXN 3 forward 9:69042523-69042546; SpCas9
gaatattaaattggcaaaag

SEQ ID NO: 37947 - DNA, 19 bp, Artificial Sequence
  Synthetic: FXN 3 forward 9:69042524-69042546; SpCas9
aatattaaattggcaaaag

SEQ ID NO: 37948 - DNA, 18 bp, Artificial Sequence
  Synthetic: FXN 3 forward 9:69042525-69042546; SpCas9
atattaaattggcaaaag

SEQ ID NO: 37949 - DNA, 25 bp, Artificial Sequence
  Synthetic: FXN 3 reverse 9:69042518-69042546; SpCas9
ctgcttttgccaatttaatattcct

SEQ ID NO: 37950 - DNA, 24 bp, Artificial Sequence
  Synthetic: FXN 3 reverse 9:69042519-69042546; SpCas9
tgcttttgccaatttaatattcct

SEQ ID NO: 37951 - DNA, 23 bp, Artificial Sequence
  Synthetic: FXN 3 reverse 9:69042520-69042546; SpCas9
gcttttgccaatttaatattcct

SEQ ID NO: 37952 - DNA, 22 bp, Artificial Sequence
  Synthetic: FXN 3 reverse 9:69042521-69042546; SpCas9
cttttgccaatttaatattcct

SEQ ID NO: 37953 - DNA, 21 bp, Artificial Sequence
  Synthetic: FXN 3 reverse 9:69042522-69042546; SpCas9
ttttgccaatttaatattcct

SEQ ID NO: 37954 - DNA, 20 bp, Artificial Sequence
  Synthetic: FXN 3 reverse 9:69042523-69042546; SpCas9
tttgccaatttaatattcct

SEQ ID NO: 37955 - DNA, 19 bp, Artificial Sequence
  Synthetic: FXN 3 reverse 9:69042524-69042546; SpCas9
ttgccaatttaatattcct

SEQ ID NO: 37956 - DNA, 18 bp, Artificial Sequence
  Synthetic: FXN 3 reverse 9:69042525-69042546; SpCas9
tgccaatttaatattcct

SEQ ID NO: 37957 - DNA, 25 bp, Artificial Sequence
  Synthetic: FXN 3 forward 9:69042519-69042547; SpCas9
cgaggaatattaaattggcaaaagc

SEQ ID NO: 37958 - DNA, 24 bp, Artificial Sequence
  Synthetic: FXN 3 forward 9:69042520-69042547; SpCas9
gaggaatattaaattggcaaaagc

SEQ ID NO: 37959 - DNA, 23 bp, Artificial Sequence
  Synthetic: FXN 3 forward 9:69042521-69042547; SpCas9
aggaatattaaattggcaaaagc

SEQ ID NO: 37960 - DNA, 22 bp, Artificial Sequence
  Synthetic: FXN 3 forward 9:69042522-69042547; SpCas9
ggaatattaaattggcaaaagc

SEQ ID NO: 37961 - DNA, 21 bp, Artificial Sequence
  Synthetic: FXN 3 forward 9:69042523-69042547; SpCas9
gaatattaaattggcaaaagc

SEQ ID NO: 37962 - DNA, 20 bp, Artificial Sequence
  Synthetic: FXN 3 forward 9:69042524-69042547; SpCas9
aatattaaattggcaaaagc

SEQ ID NO: 37963 - DNA, 19 bp, Artificial Sequence
  Synthetic: FXN 3 forward 9:69042525-69042547; SpCas9
atattaaattggcaaaagc

SEQ ID NO: 37964 - DNA, 18 bp, Artificial Sequence
  Synthetic: FXN 3 forward 9:69042526-69042547; SpCas9
tattaaattggcaaaagc

SEQ ID NO: 37965 - DNA, 25 bp, Artificial Sequence
  Synthetic: FXN 3 forward 9:69042522-69042550; SpCas9
ggaatattaaattggcaaaagcagg

SEQ ID NO: 37966 - DNA, 24 bp, Artificial Sequence
  Synthetic: FXN 3 forward 9:69042523-69042550; SpCas9
gaatattaaattggcaaaagcagg

SEQ ID NO: 37967 - DNA, 23 bp, Artificial Sequence
  Synthetic: FXN 3 forward 9:69042524-69042550; SpCas9
aatattaaattggcaaaagcagg

SEQ ID NO: 37968 - DNA, 22 bp, Artificial Sequence
  Synthetic: FXN 3 forward 9:69042525-69042550; SpCas9
atattaaattggcaaaagcagg

SEQ ID NO: 37969 - DNA, 21 bp, Artificial Sequence
  Synthetic: FXN 3 forward 9:69042526-69042550; SpCas9
tattaaattggcaaaagcagg

SEQ ID NO: 37970 - DNA, 20 bp, Artificial Sequence
  Synthetic: FXN 3 forward 9:69042527-69042550; SpCas9
attaaattggcaaaagcagg

SEQ ID NO: 37971 - DNA, 19 bp, Artificial Sequence
  Synthetic: FXN 3 forward 9:69042528-69042550; SpCas9
ttaaattggcaaaagcagg

SEQ ID NO: 37972 - DNA, 18 bp, Artificial Sequence
  Synthetic: FXN 3 forward 9:69042529-69042550; SpCas9
taaattggcaaaagcagg

SEQ ID NO: 37973 - DNA, 25 bp, Artificial Sequence
  Synthetic: FXN 3 forward 9:69042531-69042559; SpCas9
aattggcaaaagcaggtagaatata

SEQ ID NO: 37974 - DNA, 24 bp, Artificial Sequence
  Synthetic: FXN 3 forward 9:69042532-69042559; SpCas9
attggcaaaagcaggtagaatata

SEQ ID NO: 37975 - DNA, 23 bp, Artificial Sequence
  Synthetic: FXN 3 forward 9:69042533-69042559; SpCas9
ttggcaaaagcaggtagaatata

SEQ ID NO: 37976 - DNA, 22 bp, Artificial Sequence
  Synthetic: FXN 3 forward 9:69042534-69042559; SpCas9
tggcaaaagcaggtagaatata

SEQ ID NO: 37977 - DNA, 21 bp, Artificial Sequence
  Synthetic: FXN 3 forward 9:69042535-69042559; SpCas9
ggcaaaagcaggtagaatata

SEQ ID NO: 37978 - DNA, 20 bp, Artificial Sequence
  Synthetic: FXN 3 forward 9:69042536-69042559; SpCas9
gcaaaagcaggtagaatata

SEQ ID NO: 37979 - DNA, 19 bp, Artificial Sequence
  Synthetic: FXN 3 forward 9:69042537-69042559; SpCas9
caaaagcaggtagaatata

SEQ ID NO: 37980 - DNA, 18 bp, Artificial Sequence
  Synthetic: FXN 3 forward 9:69042538-69042559; SpCas9
aaaagcaggtagaatata

SEQ ID NO: 37981 - DNA, 25 bp, Artificial Sequence
  Synthetic: FXN 3 forward 9:69042535-69042563; SpCas9
ggcaaaagcaggtagaatataaagc

SEQ ID NO: 37982 - DNA, 24 bp, Artificial Sequence
  Synthetic: FXN 3 forward 9:69042536-69042563; SpCas9
gcaaaagcaggtagaatataaagc

SEQ ID NO: 37983 - DNA, 23 bp, Artificial Sequence
  Synthetic: FXN 3 forward 9:69042537-69042563; SpCas9
caaaagcaggtagaatataaagc

SEQ ID NO: 37984 - DNA, 22 bp, Artificial Sequence
  Synthetic: FXN 3 forward 9:69042538-69042563; SpCas9
aaaagcaggtagaatataaagc

SEQ ID NO: 37985 - DNA, 21 bp, Artificial Sequence
  Synthetic: FXN 3 forward 9:69042539-69042563; SpCas9
aaagcaggtagaatataaagc

SEQ ID NO: 37986 - DNA, 20 bp, Artificial Sequence
  Synthetic: FXN 3 forward 9:69042540-69042563; SpCas9
aagcaggtagaatataaagc

SEQ ID NO: 37987 - DNA, 19 bp, Artificial Sequence
  Synthetic: FXN 3 forward 9:69042541-69042563; SpCas9
agcaggtagaatataaagc

SEQ ID NO: 37988 - DNA, 18 bp, Artificial Sequence
  Synthetic: FXN 3 forward 9:69042542-69042563; SpCas9
gcaggtagaatataaagc

SEQ ID NO: 37989 - DNA, 25 bp, Artificial Sequence
  Synthetic: FXN 3 forward 9:69042536-69042564; SpCas9
gcaaaagcaggtagaatataaagca

SEQ ID NO: 37990 - DNA, 24 bp, Artificial Sequence
  Synthetic: FXN 3 forward 9:69042537-69042564; SpCas9
caaaagcaggtagaatataaagca

SEQ ID NO: 37991 - DNA, 23 bp, Artificial Sequence
  Synthetic: FXN 3 forward 9:69042538-69042564; SpCas9
aaaagcaggtagaatataaagca

SEQ ID NO: 37992 - DNA, 22 bp, Artificial Sequence
  Synthetic: FXN 3 forward 9:69042539-69042564; SpCas9
aaagcaggtagaatataaagca

SEQ ID NO: 37993 - DNA, 21 bp, Artificial Sequence
  Synthetic: FXN 3 forward 9:69042540-69042564; SpCas9
aagcaggtagaatataaagca

SEQ ID NO: 37994 - DNA, 20 bp, Artificial Sequence
  Synthetic: FXN 3 forward 9:69042541-69042564; SpCas9
agcaggtagaatataaagca

SEQ ID NO: 37995 - DNA, 19 bp, Artificial Sequence
  Synthetic: FXN 3 forward 9:69042542-69042564; SpCas9
gcaggtagaatataaagca

SEQ ID NO: 37996 - DNA, 18 bp, Artificial Sequence
  Synthetic: FXN 3 forward 9:69042543-69042564; SpCas9
caggtagaatataaagca

SEQ ID NO: 37997 - DNA, 25 bp, Artificial Sequence
  Synthetic: FXN 3 forward 9:69042538-69042566; SpCas9
aaaagcaggtagaatataaagcaag

SEQ ID NO: 37998 - DNA, 24 bp, Artificial Sequence
  Synthetic: FXN 3 forward 9:69042539-69042566; SpCas9
aaagcaggtagaatataaagcaag

SEQ ID NO: 37999 - DNA, 23 bp, Artificial Sequence
  Synthetic: FXN 3 forward 9:69042540-69042566; SpCas9
aagcaggtagaatataaagcaag

SEQ ID NO: 38000 - DNA, 22 bp, Artificial Sequence
  Synthetic: FXN 3 forward 9:69042541-69042566; SpCas9
agcaggtagaatataaagcaag

SEQ ID NO: 38001 - DNA, 21 bp, Artificial Sequence
  Synthetic: FXN 3 forward 9:69042542-69042566; SpCas9
gcaggtagaatataaagcaag

SEQ ID NO: 38002 - DNA, 20 bp, Artificial Sequence
  Synthetic: FXN 3 forward 9:69042543-69042566; SpCas9
caggtagaatataaagcaag

SEQ ID NO: 38003 - DNA, 19 bp, Artificial Sequence
  Synthetic: FXN 3 forward 9:69042544-69042566; SpCas9
aggtagaatataaagcaag

SEQ ID NO: 38004 - DNA, 18 bp, Artificial Sequence
  Synthetic: FXN 3 forward 9:69042545-69042566; SpCas9
ggtagaatataaagcaag

SEQ ID NO: 38005 - DNA, 25 bp, Artificial Sequence
  Synthetic: FXN 3 forward 9:69042545-69042573; SpCas9
ggtagaatataaagcaaggagtatt

SEQ ID NO: 38006 - DNA, 24 bp, Artificial Sequence
  Synthetic: FXN 3 forward 9:69042546-69042573; SpCas9
gtagaatataaagcaaggagtatt

SEQ ID NO: 38007 - DNA, 23 bp, Artificial Sequence
  Synthetic: FXN 3 forward 9:69042547-69042573; SpCas9
tagaatataaagcaaggagtatt

SEQ ID NO: 38008 - DNA, 22 bp, Artificial Sequence
  Synthetic: FXN 3 forward 9:69042548-69042573; SpCas9
agaatataaagcaaggagtatt

SEQ ID NO: 38009 - DNA, 21 bp, Artificial Sequence
  Synthetic: FXN 3 forward 9:69042549-69042573; SpCas9
gaatataaagcaaggagtatt

SEQ ID NO: 38010 - DNA, 20 bp, Artificial Sequence
  Synthetic: FXN 3 forward 9:69042550-69042573; SpCas9
aatataaagcaaggagtatt

SEQ ID NO: 38011 - DNA, 19 bp, Artificial Sequence
  Synthetic: FXN 3 forward 9:69042551-69042573; SpCas9
atataaagcaaggagtatt

SEQ ID NO: 38012 - DNA, 18 bp, Artificial Sequence
  Synthetic: FXN 3 forward 9:69042552-69042573; SpCas9
tataaagcaaggagtatt

SEQ ID NO: 38013 - DNA, 25 bp, Artificial Sequence
  Synthetic: FXN 3 forward 9:69042551-69042579; SpCas9
atataaagcaaggagtatttggcaa

SEQ ID NO: 38014 - DNA, 24 bp, Artificial Sequence
  Synthetic: FXN 3 forward 9:69042552-69042579; SpCas9
tataaagcaaggagtatttggcaa

SEQ ID NO: 38015 - DNA, 23 bp, Artificial Sequence
  Synthetic: FXN 3 forward 9:69042553-69042579; SpCas9
ataaagcaaggagtatttggcaa

SEQ ID NO: 38016 - DNA, 22 bp, Artificial Sequence
  Synthetic: FXN 3 forward 9:69042554-69042579; SpCas9
taaagcaaggagtatttggcaa

SEQ ID NO: 38017 - DNA, 21 bp, Artificial Sequence
  Synthetic: FXN 3 forward 9:69042555-69042579; SpCas9
aaagcaaggagtatttggcaa

SEQ ID NO: 38018 - DNA, 20 bp, Artificial Sequence
  Synthetic: FXN 3 forward 9:69042556-69042579; SpCas9
aagcaaggagtatttggcaa

SEQ ID NO: 38019 - DNA, 19 bp, Artificial Sequence
  Synthetic: FXN 3 forward 9:69042557-69042579; SpCas9
agcaaggagtatttggcaa

SEQ ID NO: 38020 - DNA, 18 bp, Artificial Sequence
  Synthetic: FXN 3 forward 9:69042558-69042579; SpCas9
gcaaggagtatttggcaa

SEQ ID NO: 38021 - DNA, 25 bp, Artificial Sequence
  Synthetic: FXN 3 forward 9:69042574-69042602; SpCas9
aacggttcttttttatgattaaaaa

SEQ ID NO: 38022 - DNA, 24 bp, Artificial Sequence
  Synthetic: FXN 3 forward 9:69042575-69042602; SpCas9
acggttcttttttatgattaaaaa

SEQ ID NO: 38023 - DNA, 23 bp, Artificial Sequence
  Synthetic: FXN 3 forward 9:69042576-69042602; SpCas9
cggttcttttttatgattaaaaa

SEQ ID NO: 38024 - DNA, 22 bp, Artificial Sequence
  Synthetic: FXN 3 forward 9:69042577-69042602; SpCas9
ggttcttttttatgattaaaaa

SEQ ID NO: 38025 - DNA, 21 bp, Artificial Sequence
  Synthetic: FXN 3 forward 9:69042578-69042602; SpCas9
gttcttttttatgattaaaaa

SEQ ID NO: 38026 - DNA, 20 bp, Artificial Sequence
  Synthetic: FXN 3 forward 9:69042579-69042602; SpCas9
ttcttttttatgattaaaaa

SEQ ID NO: 38027 - DNA, 19 bp, Artificial Sequence
  Synthetic: FXN 3 forward 9:69042580-69042602; SpCas9
tcttttttatgattaaaaa

SEQ ID NO: 38028 - DNA, 18 bp, Artificial Sequence
  Synthetic: FXN 3 forward 9:69042581-69042602; SpCas9
cttttttatgattaaaaa

SEQ ID NO: 38029 - DNA, 25 bp, Artificial Sequence
  Synthetic: FXN 3 forward 9:69042580-69042608; SpCas9
tcttttttatgattaaaaacagccg

SEQ ID NO: 38030 - DNA, 24 bp, Artificial Sequence
  Synthetic: FXN 3 forward 9:69042581-69042608; SpCas9
cttttttatgattaaaaacagccg

SEQ ID NO: 38031 - DNA, 23 bp, Artificial Sequence
  Synthetic: FXN 3 forward 9:69042582-69042608; SpCas9
ttttttatgattaaaaacagccg

SEQ ID NO: 38032 - DNA, 22 bp, Artificial Sequence
  Synthetic: FXN 3 forward 9:69042583-69042608; SpCas9
tttttatgattaaaaacagccg

SEQ ID NO: 38033 - DNA, 21 bp, Artificial Sequence
  Synthetic: FXN 3 forward 9:69042584-69042608; SpCas9
ttttatgattaaaaacagccg

SEQ ID NO: 38034 - DNA, 20 bp, Artificial Sequence
  Synthetic: FXN 3 forward 9:69042585-69042608; SpCas9
tttatgattaaaaacagccg

SEQ ID NO: 38035 - DNA, 19 bp, Artificial Sequence
  Synthetic: FXN 3 forward 9:69042586-69042608; SpCas9
ttatgattaaaaacagccg

SEQ ID NO: 38036 - DNA, 18 bp, Artificial Sequence
  Synthetic: FXN 3 forward 9:69042587-69042608; SpCas9
tatgattaaaaacagccg

SEQ ID NO: 38037 - DNA, 25 bp, Artificial Sequence
  Synthetic: FXN 3 reverse 9:69042581-69042609; SpCas9
tcttcggctgtttttaatcataaaa

SEQ ID NO: 38038 - DNA, 24 bp, Artificial Sequence
  Synthetic: FXN 3 reverse 9:69042582-69042609; SpCas9
cttcggctgtttttaatcataaaa

SEQ ID NO: 38039 - DNA, 23 bp, Artificial Sequence
  Synthetic: FXN 3 reverse 9:69042583-69042609; SpCas9
ttcggctgtttttaatcataaaa

SEQ ID NO: 38040 - DNA, 22 bp, Artificial Sequence
  Synthetic: FXN 3 reverse 9:69042584-69042609; SpCas9
tcggctgtttttaatcataaaa

SEQ ID NO: 38041 - DNA, 21 bp, Artificial Sequence
  Synthetic: FXN 3 reverse 9:69042585-69042609; SpCas9
cggctgtttttaatcataaaa

SEQ ID NO: 38042 - DNA, 20 bp, Artificial Sequence
  Synthetic: FXN 3 reverse 9:69042586-69042609; SpCas9
ggctgtttttaatcataaaa

SEQ ID NO: 38043 - DNA, 19 bp, Artificial Sequence
  Synthetic: FXN 3 reverse 9:69042587-69042609; SpCas9
gctgtttttaatcataaaa

SEQ ID NO: 38044 - DNA, 18 bp, Artificial Sequence
  Synthetic: FXN 3 reverse 9:69042588-69042609; SpCas9
ctgtttttaatcataaaa

SEQ ID NO: 38045 - DNA, 25 bp, Artificial Sequence
  Synthetic: FXN 3 forward 9:69042584-69042612; SpCas9
ttttatgattaaaaacagccgaaga

SEQ ID NO: 38046 - DNA, 24 bp, Artificial Sequence
  Synthetic: FXN 3 forward 9:69042585-69042612; SpCas9
tttatgattaaaaacagccgaaga

SEQ ID NO: 38047 - DNA, 23 bp, Artificial Sequence
  Synthetic: FXN 3 forward 9:69042586-69042612; SpCas9
ttatgattaaaaacagccgaaga

SEQ ID NO: 38048 - DNA, 22 bp, Artificial Sequence
  Synthetic: FXN 3 forward 9:69042587-69042612; SpCas9
tatgattaaaaacagccgaaga

SEQ ID NO: 38049 - DNA, 21 bp, Artificial Sequence
  Synthetic: FXN 3 forward 9:69042588-69042612; SpCas9
atgattaaaaacagccgaaga

SEQ ID NO: 38050 - DNA, 20 bp, Artificial Sequence
  Synthetic: FXN 3 forward 9:69042589-69042612; SpCas9
tgattaaaaacagccgaaga

SEQ ID NO: 38051 - DNA, 19 bp, Artificial Sequence
  Synthetic: FXN 3 forward 9:69042590-69042612; SpCas9
gattaaaaacagccgaaga

SEQ ID NO: 38052 - DNA, 18 bp, Artificial Sequence
  Synthetic: FXN 3 forward 9:69042591-69042612; SpCas9
attaaaaacagccgaaga

SEQ ID NO: 38053 - DNA, 25 bp, Artificial Sequence
  Synthetic: FXN 3 reverse 9:69042602-69042630; SpCas9
aaaggcacaagtagaagtctttctt

SEQ ID NO: 38054 - DNA, 24 bp, Artificial Sequence
  Synthetic: FXN 3 reverse 9:69042603-69042630; SpCas9
aaggcacaagtagaagtctttctt

SEQ ID NO: 38055 - DNA, 23 bp, Artificial Sequence
  Synthetic: FXN 3 reverse 9:69042604-69042630; SpCas9
aggcacaagtagaagtctttctt

SEQ ID NO: 38056 - DNA, 22 bp, Artificial Sequence
  Synthetic: FXN 3 reverse 9:69042605-69042630; SpCas9
ggcacaagtagaagtctttctt

SEQ ID NO: 38057 - DNA, 21 bp, Artificial Sequence
  Synthetic: FXN 3 reverse 9:69042606-69042630; SpCas9
gcacaagtagaagtctttctt

SEQ ID NO: 38058 - DNA, 20 bp, Artificial Sequence
  Synthetic: FXN 3 reverse 9:69042607-69042630; SpCas9
cacaagtagaagtctttctt

SEQ ID NO: 38059 - DNA, 19 bp, Artificial Sequence
  Synthetic: FXN 3 reverse 9:69042608-69042630; SpCas9
acaagtagaagtctttctt

SEQ ID NO: 38060 - DNA, 18 bp, Artificial Sequence
  Synthetic: FXN 3 reverse 9:69042609-69042630; SpCas9
caagtagaagtctttctt

SEQ ID NO: 38061 - DNA, 25 bp, Artificial Sequence
  Synthetic: FXN 3 forward 9:69042606-69042634; SpCas9
agaaagacttctacttgtgcctttg

SEQ ID NO: 38062 - DNA, 24 bp, Artificial Sequence
  Synthetic: FXN 3 forward 9:69042607-69042634; SpCas9
gaaagacttctacttgtgcctttg

SEQ ID NO: 38063 - DNA, 23 bp, Artificial Sequence
  Synthetic: FXN 3 forward 9:69042608-69042634; SpCas9
aaagacttctacttgtgcctttg

SEQ ID NO: 38064 - DNA, 22 bp, Artificial Sequence
  Synthetic: FXN 3 forward 9:69042609-69042634; SpCas9
aagacttctacttgtgcctttg

SEQ ID NO: 38065 - DNA, 21 bp, Artificial Sequence
  Synthetic: FXN 3 forward 9:69042610-69042634; SpCas9
agacttctacttgtgcctttg

SEQ ID NO: 38066 - DNA, 20 bp, Artificial Sequence
  Synthetic: FXN 3 forward 9:69042611-69042634; SpCas9
gacttctacttgtgcctttg

SEQ ID NO: 38067 - DNA, 19 bp, Artificial Sequence
  Synthetic: FXN 3 forward 9:69042612-69042634; SpCas9
acttctacttgtgcctttg

SEQ ID NO: 38068 - DNA, 18 bp, Artificial Sequence
  Synthetic: FXN 3 forward 9:69042613-69042634; SpCas9
cttctacttgtgcctttg

SEQ ID NO: 38069 - DNA, 25 bp, Artificial Sequence
  Synthetic: FXN 3 forward 9:69042607-69042635; SpCas9
gaaagacttctacttgtgcctttga

SEQ ID NO: 38070 - DNA, 24 bp, Artificial Sequence
  Synthetic: FXN 3 forward 9:69042608-69042635; SpCas9
aaagacttctacttgtgcctttga

SEQ ID NO: 38071 - DNA, 23 bp, Artificial Sequence
  Synthetic: FXN 3 forward 9:69042609-69042635; SpCas9
aagacttctacttgtgcctttga

SEQ ID NO: 38072 - DNA, 22 bp, Artificial Sequence
  Synthetic: FXN 3 forward 9:69042610-69042635; SpCas9
agacttctacttgtgcctttga

SEQ ID NO: 38073 - DNA, 21 bp, Artificial Sequence
  Synthetic: FXN 3 forward 9:69042611-69042635; SpCas9
gacttctacttgtgcctttga

SEQ ID NO: 38074 - DNA, 20 bp, Artificial Sequence
  Synthetic: FXN 3 forward 9:69042612-69042635; SpCas9
acttctacttgtgcctttga

SEQ ID NO: 38075 - DNA, 19 bp, Artificial Sequence
  Synthetic: FXN 3 forward 9:69042613-69042635; SpCas9
cttctacttgtgcctttga

SEQ ID NO: 38076 - DNA, 18 bp, Artificial Sequence
  Synthetic: FXN 3 forward 9:69042614-69042635; SpCas9
ttctacttgtgcctttga

SEQ ID NO: 38077 - DNA, 25 bp, Artificial Sequence
  Synthetic: FXN 3 forward 9:69042609-69042637; SpCas9
aagacttctacttgtgcctttgaag

SEQ ID NO: 38078 - DNA, 24 bp, Artificial Sequence
  Synthetic: FXN 3 forward 9:69042610-69042637; SpCas9
agacttctacttgtgcctttgaag

SEQ ID NO: 38079 - DNA, 23 bp, Artificial Sequence
  Synthetic: FXN 3 forward 9:69042611-69042637; SpCas9
gacttctacttgtgcctttgaag

SEQ ID NO: 38080 - DNA, 22 bp, Artificial Sequence
  Synthetic: FXN 3 forward 9:69042612-69042637; SpCas9
acttctacttgtgcctttgaag

SEQ ID NO: 38081 - DNA, 21 bp, Artificial Sequence
  Synthetic: FXN 3 forward 9:69042613-69042637; SpCas9
cttctacttgtgcctttgaag

SEQ ID NO: 38082 - DNA, 20 bp, Artificial Sequence
  Synthetic: FXN 3 forward 9:69042614-69042637; SpCas9
ttctacttgtgcctttgaag

SEQ ID NO: 38083 - DNA, 19 bp, Artificial Sequence
  Synthetic: FXN 3 forward 9:69042615-69042637; SpCas9
tctacttgtgcctttgaag

SEQ ID NO: 38084 - DNA, 18 bp, Artificial Sequence
  Synthetic: FXN 3 forward 9:69042616-69042637; SpCas9
ctacttgtgcctttgaag

SEQ ID NO: 38085 - DNA, 25 bp, Artificial Sequence
  Synthetic: FXN 3 reverse 9:69042613-69042641; SpCas9
gttactccttcaaaggcacaagtag

SEQ ID NO: 38086 - DNA, 24 bp, Artificial Sequence
  Synthetic: FXN 3 reverse 9:69042614-69042641; SpCas9
ttactccttcaaaggcacaagtag

SEQ ID NO: 38087 - DNA, 23 bp, Artificial Sequence
  Synthetic: FXN 3 reverse 9:69042615-69042641; SpCas9
tactccttcaaaggcacaagtag

SEQ ID NO: 38088 - DNA, 22 bp, Artificial Sequence
  Synthetic: FXN 3 reverse 9:69042616-69042641; SpCas9
actccttcaaaggcacaagtag

SEQ ID NO: 38089 - DNA, 21 bp, Artificial Sequence
  Synthetic: FXN 3 reverse 9:69042617-69042641; SpCas9
ctccttcaaaggcacaagtag

SEQ ID NO: 38090 - DNA, 20 bp, Artificial Sequence
  Synthetic: FXN 3 reverse 9:69042618-69042641; SpCas9
tccttcaaaggcacaagtag

SEQ ID NO: 38091 - DNA, 19 bp, Artificial Sequence
  Synthetic: FXN 3 reverse 9:69042619-69042641; SpCas9
ccttcaaaggcacaagtag

SEQ ID NO: 38092 - DNA, 18 bp, Artificial Sequence
  Synthetic: FXN 3 reverse 9:69042620-69042641; SpCas9
cttcaaaggcacaagtag

SEQ ID NO: 38093 - DNA, 25 bp, Artificial Sequence
  Synthetic: FXN 3 reverse 9:69042616-69042644; SpCas9
gcagttactccttcaaaggcacaag

SEQ ID NO: 38094 - DNA, 24 bp, Artificial Sequence
  Synthetic: FXN 3 reverse 9:69042617-69042644; SpCas9
cagttactccttcaaaggcacaag

SEQ ID NO: 38095 - DNA, 23 bp, Artificial Sequence
  Synthetic: FXN 3 reverse 9:69042618-69042644; SpCas9
agttactccttcaaaggcacaag

SEQ ID NO: 38096 - DNA, 22 bp, Artificial Sequence
  Synthetic: FXN 3 reverse 9:69042619-69042644; SpCas9
gttactccttcaaaggcacaag

SEQ ID NO: 38097 - DNA, 21 bp, Artificial Sequence
  Synthetic: FXN 3 reverse 9:69042620-69042644; SpCas9
ttactccttcaaaggcacaag

SEQ ID NO: 38098 - DNA, 20 bp, Artificial Sequence
  Synthetic: FXN 3 reverse 9:69042621-69042644; SpCas9
tactccttcaaaggcacaag

SEQ ID NO: 38099 - DNA, 19 bp, Artificial Sequence
  Synthetic: FXN 3 reverse 9:69042622-69042644; SpCas9
actccttcaaaggcacaag

SEQ ID NO: 38100 - DNA, 18 bp, Artificial Sequence
  Synthetic: FXN 3 reverse 9:69042623-69042644; SpCas9
ctccttcaaaggcacaag

SEQ ID NO: 38101 - DNA, 25 bp, Artificial Sequence
  Synthetic: FXN 3 reverse 9:69042619-69042647; SpCas9
aatgcagttactccttcaaaggcac

SEQ ID NO: 38102 - DNA, 24 bp, Artificial Sequence
  Synthetic: FXN 3 reverse 9:69042620-69042647; SpCas9
atgcagttactccttcaaaggcac

SEQ ID NO: 38103 - DNA, 23 bp, Artificial Sequence
  Synthetic: FXN 3 reverse 9:69042621-69042647; SpCas9
tgcagttactccttcaaaggcac

SEQ ID NO: 38104 - DNA, 22 bp, Artificial Sequence
  Synthetic: FXN 3 reverse 9:69042622-69042647; SpCas9
gcagttactccttcaaaggcac

SEQ ID NO: 38105 - DNA, 21 bp, Artificial Sequence
  Synthetic: FXN 3 reverse 9:69042623-69042647; SpCas9
cagttactccttcaaaggcac

SEQ ID NO: 38106 - DNA, 20 bp, Artificial Sequence
  Synthetic: FXN 3 reverse 9:69042624-69042647; SpCas9
agttactccttcaaaggcac

SEQ ID NO: 38107 - DNA, 19 bp, Artificial Sequence
  Synthetic: FXN 3 reverse 9:69042625-69042647; SpCas9
gttactccttcaaaggcac

SEQ ID NO: 38108 - DNA, 18 bp, Artificial Sequence
  Synthetic: FXN 3 reverse 9:69042626-69042647; SpCas9
ttactccttcaaaggcac

SEQ ID NO: 38109 - DNA, 25 bp, Artificial Sequence
  Synthetic: FXN 3 reverse 9:69042625-69042653; SpCas9
aggtcaaatgcagttactccttcaa

SEQ ID NO: 38110 - DNA, 24 bp, Artificial Sequence
  Synthetic: FXN 3 reverse 9:69042626-69042653; SpCas9
ggtcaaatgcagttactccttcaa

SEQ ID NO: 38111 - DNA, 23 bp, Artificial Sequence
  Synthetic: FXN 3 reverse 9:69042627-69042653; SpCas9
gtcaaatgcagttactccttcaa

SEQ ID NO: 38112 - DNA, 22 bp, Artificial Sequence
  Synthetic: FXN 3 reverse 9:69042628-69042653; SpCas9
tcaaatgcagttactccttcaa

SEQ ID NO: 38113 - DNA, 21 bp, Artificial Sequence
  Synthetic: FXN 3 reverse 9:69042629-69042653; SpCas9
caaatgcagttactccttcaa

SEQ ID NO: 38114 - DNA, 20 bp, Artificial Sequence
  Synthetic: FXN 3 reverse 9:69042630-69042653; SpCas9
aaatgcagttactccttcaa

SEQ ID NO: 38115 - DNA, 19 bp, Artificial Sequence
  Synthetic: FXN 3 reverse 9:69042631-69042653; SpCas9
aatgcagttactccttcaa

SEQ ID NO: 38116 - DNA, 18 bp, Artificial Sequence
  Synthetic: FXN 3 reverse 9:69042632-69042653; SpCas9
atgcagttactccttcaa

SEQ ID NO: 38117 - DNA, 25 bp, Artificial Sequence
  Synthetic: FXN 3 reverse 9:69042626-69042654; SpCas9
aaggtcaaatgcagttactccttca

SEQ ID NO: 38118 - DNA, 24 bp, Artificial Sequence
  Synthetic: FXN 3 reverse 9:69042627-69042654; SpCas9
aggtcaaatgcagttactccttca

SEQ ID NO: 38119 - DNA, 23 bp, Artificial Sequence
  Synthetic: FXN 3 reverse 9:69042628-69042654; SpCas9
ggtcaaatgcagttactccttca

SEQ ID NO: 38120 - DNA, 22 bp, Artificial Sequence
  Synthetic: FXN 3 reverse 9:69042629-69042654; SpCas9
gtcaaatgcagttactccttca

SEQ ID NO: 38121 - DNA, 21 bp, Artificial Sequence
  Synthetic: FXN 3 reverse 9:69042630-69042654; SpCas9
tcaaatgcagttactccttca

SEQ ID NO: 38122 - DNA, 20 bp, Artificial Sequence
  Synthetic: FXN 3 reverse 9:69042631-69042654; SpCas9
caaatgcagttactccttca

SEQ ID NO: 38123 - DNA, 19 bp, Artificial Sequence
  Synthetic: FXN 3 reverse 9:69042632-69042654; SpCas9
aaatgcagttactccttca

SEQ ID NO: 38124 - DNA, 18 bp, Artificial Sequence
  Synthetic: FXN 3 reverse 9:69042633-69042654; SpCas9
aatgcagttactccttca

SEQ ID NO: 38125 - DNA, 25 bp, Artificial Sequence
  Synthetic: FXN 3 forward 9:69042634-69042662; SpCas9
gagtaactgcatttgaccttcccac

SEQ ID NO: 38126 - DNA, 24 bp, Artificial Sequence
  Synthetic: FXN 3 forward 9:69042635-69042662; SpCas9
agtaactgcatttgaccttcccac

SEQ ID NO: 38127 - DNA, 23 bp, Artificial Sequence
  Synthetic: FXN 3 forward 9:69042636-69042662; SpCas9
gtaactgcatttgaccttcccac

SEQ ID NO: 38128 - DNA, 22 bp, Artificial Sequence
  Synthetic: FXN 3 forward 9:69042637-69042662; SpCas9
taactgcatttgaccttcccac

SEQ ID NO: 38129 - DNA, 21 bp, Artificial Sequence
  Synthetic: FXN 3 forward 9:69042638-69042662; SpCas9
aactgcatttgaccttcccac

SEQ ID NO: 38130 - DNA, 20 bp, Artificial Sequence
  Synthetic: FXN 3 forward 9:69042639-69042662; SpCas9
actgcatttgaccttcccac

SEQ ID NO: 38131 - DNA, 19 bp, Artificial Sequence
  Synthetic: FXN 3 forward 9:69042640-69042662; SpCas9
ctgcatttgaccttcccac

SEQ ID NO: 38132 - DNA, 18 bp, Artificial Sequence
  Synthetic: FXN 3 forward 9:69042641-69042662; SpCas9
tgcatttgaccttcccac

SEQ ID NO: 38133 - DNA, 25 bp, Artificial Sequence
  Synthetic: FXN 3 reverse 9:69042640-69042668; SpCas9
ttgttactggtgggaaggtcaaatg

SEQ ID NO: 38134 - DNA, 24 bp, Artificial Sequence
  Synthetic: FXN 3 reverse 9:69042641-69042668; SpCas9
tgttactggtgggaaggtcaaatg

SEQ ID NO: 38135 - DNA, 23 bp, Artificial Sequence
  Synthetic: FXN 3 reverse 9:69042642-69042668; SpCas9
gttactggtgggaaggtcaaatg

SEQ ID NO: 38136 - DNA, 22 bp, Artificial Sequence
  Synthetic: FXN 3 reverse 9:69042643-69042668; SpCas9
ttactggtgggaaggtcaaatg

SEQ ID NO: 38137 - DNA, 21 bp, Artificial Sequence
  Synthetic: FXN 3 reverse 9:69042644-69042668; SpCas9
tactggtgggaaggtcaaatg

SEQ ID NO: 38138 - DNA, 20 bp, Artificial Sequence
  Synthetic: FXN 3 reverse 9:69042645-69042668; SpCas9
actggtgggaaggtcaaatg

SEQ ID NO: 38139 - DNA, 19 bp, Artificial Sequence
  Synthetic: FXN 3 reverse 9:69042646-69042668; SpCas9
ctggtgggaaggtcaaatg

SEQ ID NO: 38140 - DNA, 18 bp, Artificial Sequence
  Synthetic: FXN 3 reverse 9:69042647-69042668; SpCas9
tggtgggaaggtcaaatg

SEQ ID NO: 38141 - DNA, 25 bp, Artificial Sequence
  Synthetic: FXN 3 reverse 9:69042650-69042678; SpCas9
gatttgatggttgttactggtggga

SEQ ID NO: 38142 - DNA, 24 bp, Artificial Sequence
  Synthetic: FXN 3 reverse 9:69042651-69042678; SpCas9
atttgatggttgttactggtggga

SEQ ID NO: 38143 - DNA, 23 bp, Artificial Sequence
  Synthetic: FXN 3 reverse 9:69042652-69042678; SpCas9
tttgatggttgttactggtggga

SEQ ID NO: 38144 - DNA, 22 bp, Artificial Sequence
  Synthetic: FXN 3 reverse 9:69042653-69042678; SpCas9
ttgatggttgttactggtggga

SEQ ID NO: 38145 - DNA, 21 bp, Artificial Sequence
  Synthetic: FXN 3 reverse 9:69042654-69042678; SpCas9
tgatggttgttactggtggga

SEQ ID NO: 38146 - DNA, 20 bp, Artificial Sequence
  Synthetic: FXN 3 reverse 9:69042655-69042678; SpCas9
gatggttgttactggtggga

SEQ ID NO: 38147 - DNA, 19 bp, Artificial Sequence
  Synthetic: FXN 3 reverse 9:69042656-69042678; SpCas9
atggttgttactggtggga

SEQ ID NO: 38148 - DNA, 18 bp, Artificial Sequence
  Synthetic: FXN 3 reverse 9:69042657-69042678; SpCas9
tggttgttactggtggga

SEQ ID NO: 38149 - DNA, 25 bp, Artificial Sequence
  Synthetic: FXN 3 reverse 9:69042651-69042679; SpCas9
agatttgatggttgttactggtggg

SEQ ID NO: 38150 - DNA, 24 bp, Artificial Sequence
  Synthetic: FXN 3 reverse 9:69042652-69042679; SpCas9
gatttgatggttgttactggtggg

SEQ ID NO: 38151 - DNA, 23 bp, Artificial Sequence
  Synthetic: FXN 3 reverse 9:69042653-69042679; SpCas9
atttgatggttgttactggtggg

SEQ ID NO: 38152 - DNA, 22 bp, Artificial Sequence
  Synthetic: FXN 3 reverse 9:69042654-69042679; SpCas9
tttgatggttgttactggtggg

SEQ ID NO: 38153 - DNA, 21 bp, Artificial Sequence
  Synthetic: FXN 3 reverse 9:69042655-69042679; SpCas9
ttgatggttgttactggtggg

SEQ ID NO: 38154 - DNA, 20 bp, Artificial Sequence
  Synthetic: FXN 3 reverse 9:69042656-69042679; SpCas9
tgatggttgttactggtggg

SEQ ID NO: 38155 - DNA, 19 bp, Artificial Sequence
  Synthetic: FXN 3 reverse 9:69042657-69042679; SpCas9
gatggttgttactggtggg

SEQ ID NO: 38156 - DNA, 18 bp, Artificial Sequence
  Synthetic: FXN 3 reverse 9:69042658-69042679; SpCas9
atggttgttactggtggg

SEQ ID NO: 38157 - DNA, 25 bp, Artificial Sequence
  Synthetic: FXN 3 reverse 9:69042654-69042682; SpCas9
tagagatttgatggttgttactggt

SEQ ID NO: 38158 - DNA, 24 bp, Artificial Sequence
  Synthetic: FXN 3 reverse 9:69042655-69042682; SpCas9
agagatttgatggttgttactggt

SEQ ID NO: 38159 - DNA, 23 bp, Artificial Sequence
  Synthetic: FXN 3 reverse 9:69042656-69042682; SpCas9
gagatttgatggttgttactggt

SEQ ID NO: 38160 - DNA, 22 bp, Artificial Sequence
  Synthetic: FXN 3 reverse 9:69042657-69042682; SpCas9
agatttgatggttgttactggt

SEQ ID NO: 38161 - DNA, 21 bp, Artificial Sequence
  Synthetic: FXN 3 reverse 9:69042658-69042682; SpCas9
gatttgatggttgttactggt

SEQ ID NO: 38162 - DNA, 20 bp, Artificial Sequence
  Synthetic: FXN 3 reverse 9:69042659-69042682; SpCas9
atttgatggttgttactggt

SEQ ID NO: 38163 - DNA, 19 bp, Artificial Sequence
  Synthetic: FXN 3 reverse 9:69042660-69042682; SpCas9
tttgatggttgttactggt

SEQ ID NO: 38164 - DNA, 18 bp, Artificial Sequence
  Synthetic: FXN 3 reverse 9:69042661-69042682; SpCas9
ttgatggttgttactggt

SEQ ID NO: 38165 - DNA, 25 bp, Artificial Sequence
  Synthetic: FXN 3 reverse 9:69042655-69042683; SpCas9
atagagatttgatggttgttactgg

SEQ ID NO: 38166 - DNA, 24 bp, Artificial Sequence
  Synthetic: FXN 3 reverse 9:69042656-69042683; SpCas9
tagagatttgatggttgttactgg

SEQ ID NO: 38167 - DNA, 23 bp, Artificial Sequence
  Synthetic: FXN 3 reverse 9:69042657-69042683; SpCas9
agagatttgatggttgttactgg

SEQ ID NO: 38168 - DNA, 22 bp, Artificial Sequence
  Synthetic: FXN 3 reverse 9:69042658-69042683; SpCas9
gagatttgatggttgttactgg

SEQ ID NO: 38169 - DNA, 21 bp, Artificial Sequence
  Synthetic: FXN 3 reverse 9:69042659-69042683; SpCas9
agatttgatggttgttactgg

SEQ ID NO: 38170 - DNA, 20 bp, Artificial Sequence
  Synthetic: FXN 3 reverse 9:69042660-69042683; SpCas9
gatttgatggttgttactgg

SEQ ID NO: 38171 - DNA, 19 bp, Artificial Sequence
  Synthetic: FXN 3 reverse 9:69042661-69042683; SpCas9
atttgatggttgttactgg

SEQ ID NO: 38172 - DNA, 18 bp, Artificial Sequence
  Synthetic: FXN 3 reverse 9:69042662-69042683; SpCas9
tttgatggttgttactgg

SEQ ID NO: 38173 - DNA, 25 bp, Artificial Sequence
  Synthetic: FXN 3 reverse 9:69042658-69042686; SpCas9
ttaatagagatttgatggttgttac

SEQ ID NO: 38174 - DNA, 24 bp, Artificial Sequence
  Synthetic: FXN 3 reverse 9:69042659-69042686; SpCas9
taatagagatttgatggttgttac

SEQ ID NO: 38175 - DNA, 23 bp, Artificial Sequence
  Synthetic: FXN 3 reverse 9:69042660-69042686; SpCas9
aatagagatttgatggttgttac

SEQ ID NO: 38176 - DNA, 22 bp, Artificial Sequence
  Synthetic: FXN 3 reverse 9:69042661-69042686; SpCas9
atagagatttgatggttgttac

SEQ ID NO: 38177 - DNA, 21 bp, Artificial Sequence
  Synthetic: FXN 3 reverse 9:69042662-69042686; SpCas9
tagagatttgatggttgttac

SEQ ID NO: 38178 - DNA, 20 bp, Artificial Sequence
  Synthetic: FXN 3 reverse 9:69042663-69042686; SpCas9
agagatttgatggttgttac

SEQ ID NO: 38179 - DNA, 19 bp, Artificial Sequence
  Synthetic: FXN 3 reverse 9:69042664-69042686; SpCas9
gagatttgatggttgttac

SEQ ID NO: 38180 - DNA, 18 bp, Artificial Sequence
  Synthetic: FXN 3 reverse 9:69042665-69042686; SpCas9
agatttgatggttgttac

SEQ ID NO: 38181 - DNA, 25 bp, Artificial Sequence
  Synthetic: FXN 3 reverse 9:69042668-69042696; SpCas9
tgtgtttaatttaatagagatttga

SEQ ID NO: 38182 - DNA, 24 bp, Artificial Sequence
  Synthetic: FXN 3 reverse 9:69042669-69042696; SpCas9
gtgtttaatttaatagagatttga

SEQ ID NO: 38183 - DNA, 23 bp, Artificial Sequence
  Synthetic: FXN 3 reverse 9:69042670-69042696; SpCas9
tgtttaatttaatagagatttga

SEQ ID NO: 38184 - DNA, 22 bp, Artificial Sequence
  Synthetic: FXN 3 reverse 9:69042671-69042696; SpCas9
gtttaatttaatagagatttga

SEQ ID NO: 38185 - DNA, 21 bp, Artificial Sequence
  Synthetic: FXN 3 reverse 9:69042672-69042696; SpCas9
tttaatttaatagagatttga

SEQ ID NO: 38186 - DNA, 20 bp, Artificial Sequence
  Synthetic: FXN 3 reverse 9:69042673-69042696; SpCas9
ttaatttaatagagatttga

SEQ ID NO: 38187 - DNA, 19 bp, Artificial Sequence
  Synthetic: FXN 3 reverse 9:69042674-69042696; SpCas9
taatttaatagagatttga

SEQ ID NO: 38188 - DNA, 18 bp, Artificial Sequence
  Synthetic: FXN 3 reverse 9:69042675-69042696; SpCas9
aatttaatagagatttga

SEQ ID NO: 38189 - DNA, 25 bp, Artificial Sequence
  Synthetic: FXN 3 reverse 9:69042677-69042705; SpCas9
gtgtgtgtgtgtgtttaatttaata

SEQ ID NO: 38190 - DNA, 24 bp, Artificial Sequence
  Synthetic: FXN 3 reverse 9:69042678-69042705; SpCas9
tgtgtgtgtgtgtttaatttaata

SEQ ID NO: 38191 - DNA, 23 bp, Artificial Sequence
  Synthetic: FXN 3 reverse 9:69042679-69042705; SpCas9
gtgtgtgtgtgtttaatttaata

SEQ ID NO: 38192 - DNA, 22 bp, Artificial Sequence
  Synthetic: FXN 3 reverse 9:69042680-69042705; SpCas9
tgtgtgtgtgtttaatttaata

SEQ ID NO: 38193 - DNA, 21 bp, Artificial Sequence
  Synthetic: FXN 3 reverse 9:69042681-69042705; SpCas9
gtgtgtgtgtttaatttaata

SEQ ID NO: 38194 - DNA, 20 bp, Artificial Sequence
  Synthetic: FXN 3 reverse 9:69042682-69042705; SpCas9
tgtgtgtgtttaatttaata

SEQ ID NO: 38195 - DNA, 19 bp, Artificial Sequence
  Synthetic: FXN 3 reverse 9:69042683-69042705; SpCas9
gtgtgtgtttaatttaata

SEQ ID NO: 38196 - DNA, 18 bp, Artificial Sequence
  Synthetic: FXN 3 reverse 9:69042684-69042705; SpCas9
tgtgtgtttaatttaata

SEQ ID NO: 38197 - DNA, 25 bp, Artificial Sequence
  Synthetic: FXN 3 reverse 9:69042679-69042707; SpCas9
ttgtgtgtgtgtgtgtttaatttaa

SEQ ID NO: 38198 - DNA, 24 bp, Artificial Sequence
  Synthetic: FXN 3 reverse 9:69042680-69042707; SpCas9
tgtgtgtgtgtgtgtttaatttaa

SEQ ID NO: 38199 - DNA, 23 bp, Artificial Sequence
  Synthetic: FXN 3 reverse 9:69042681-69042707; SpCas9
gtgtgtgtgtgtgtttaatttaa

SEQ ID NO: 38200 - DNA, 22 bp, Artificial Sequence
  Synthetic: FXN 3 reverse 9:69042682-69042707; SpCas9
tgtgtgtgtgtgtttaatttaa

SEQ ID NO: 38201 - DNA, 21 bp, Artificial Sequence
  Synthetic: FXN 3 reverse 9:69042683-69042707; SpCas9
gtgtgtgtgtgtttaatttaa

SEQ ID NO: 38202 - DNA, 20 bp, Artificial Sequence
  Synthetic: FXN 3 reverse 9:69042684-69042707; SpCas9
tgtgtgtgtgtttaatttaa

SEQ ID NO: 38203 - DNA, 19 bp, Artificial Sequence
  Synthetic: FXN 3 reverse 9:69042685-69042707; SpCas9
gtgtgtgtgtttaatttaa

SEQ ID NO: 38204 - DNA, 18 bp, Artificial Sequence
  Synthetic: FXN 3 reverse 9:69042686-69042707; SpCas9
tgtgtgtgtttaatttaa

SEQ ID NO: 38205 - DNA, 25 bp, Artificial Sequence
  Synthetic: FXN 3 forward 9:69042689-69042717; SpCas9
aaacacacacacacacaaacaaaaa

SEQ ID NO: 38206 - DNA, 24 bp, Artificial Sequence
  Synthetic: FXN 3 forward 9:69042690-69042717; SpCas9
aacacacacacacacaaacaaaaa

SEQ ID NO: 38207 - DNA, 23 bp, Artificial Sequence
  Synthetic: FXN 3 forward 9:69042691-69042717; SpCas9
acacacacacacacaaacaaaaa

SEQ ID NO: 38208 - DNA, 22 bp, Artificial Sequence
  Synthetic: FXN 3 forward 9:69042692-69042717; SpCas9
cacacacacacacaaacaaaaa

SEQ ID NO: 38209 - DNA, 21 bp, Artificial Sequence
  Synthetic: FXN 3 forward 9:69042693-69042717; SpCas9
acacacacacacaaacaaaaa

SEQ ID NO: 38210 - DNA, 20 bp, Artificial Sequence
  Synthetic: FXN 3 forward 9:69042694-69042717; SpCas9
cacacacacacaaacaaaaa

SEQ ID NO: 38211 - DNA, 19 bp, Artificial Sequence
  Synthetic: FXN 3 forward 9:69042695-69042717; SpCas9
acacacacacaaacaaaaa

SEQ ID NO: 38212 - DNA, 18 bp, Artificial Sequence
  Synthetic: FXN 3 forward 9:69042696-69042717; SpCas9
cacacacacaaacaaaaa

SEQ ID NO: 38213 - DNA, 25 bp, Artificial Sequence
  Synthetic: FXN 3 forward 9:69042700-69042728; SpCas9
cacacaaacaaaaacagctattgtg

SEQ ID NO: 38214 - DNA, 24 bp, Artificial Sequence
  Synthetic: FXN 3 forward 9:69042701-69042728; SpCas9
acacaaacaaaaacagctattgtg

SEQ ID NO: 38215 - DNA, 23 bp, Artificial Sequence
  Synthetic: FXN 3 forward 9:69042702-69042728; SpCas9
cacaaacaaaaacagctattgtg

SEQ ID NO: 38216 - DNA, 22 bp, Artificial Sequence
  Synthetic: FXN 3 forward 9:69042703-69042728; SpCas9
acaaacaaaaacagctattgtg

SEQ ID NO: 38217 - DNA, 21 bp, Artificial Sequence
  Synthetic: FXN 3 forward 9:69042704-69042728; SpCas9
caaacaaaaacagctattgtg

SEQ ID NO: 38218 - DNA, 20 bp, Artificial Sequence
  Synthetic: FXN 3 forward 9:69042705-69042728; SpCas9
aaacaaaaacagctattgtg

SEQ ID NO: 38219 - DNA, 19 bp, Artificial Sequence
  Synthetic: FXN 3 forward 9:69042706-69042728; SpCas9
aacaaaaacagctattgtg

SEQ ID NO: 38220 - DNA, 18 bp, Artificial Sequence
  Synthetic: FXN 3 forward 9:69042707-69042728; SpCas9
acaaaaacagctattgtg

SEQ ID NO: 38221 - DNA, 25 bp, Artificial Sequence
  Synthetic: FXN 3 forward 9:69042701-69042729; SpCas9
acacaaacaaaaacagctattgtga

SEQ ID NO: 38222 - DNA, 24 bp, Artificial Sequence
  Synthetic: FXN 3 forward 9:69042702-69042729; SpCas9
cacaaacaaaaacagctattgtga

SEQ ID NO: 38223 - DNA, 23 bp, Artificial Sequence
  Synthetic: FXN 3 forward 9:69042703-69042729; SpCas9
acaaacaaaaacagctattgtga

SEQ ID NO: 38224 - DNA, 22 bp, Artificial Sequence
  Synthetic: FXN 3 forward 9:69042704-69042729; SpCas9
caaacaaaaacagctattgtga

SEQ ID NO: 38225 - DNA, 21 bp, Artificial Sequence
  Synthetic: FXN 3 forward 9:69042705-69042729; SpCas9
aaacaaaaacagctattgtga

SEQ ID NO: 38226 - DNA, 20 bp, Artificial Sequence
  Synthetic: FXN 3 forward 9:69042706-69042729; SpCas9
aacaaaaacagctattgtga

SEQ ID NO: 38227 - DNA, 19 bp, Artificial Sequence
  Synthetic: FXN 3 forward 9:69042707-69042729; SpCas9
acaaaaacagctattgtga

SEQ ID NO: 38228 - DNA, 18 bp, Artificial Sequence
  Synthetic: FXN 3 forward 9:69042708-69042729; SpCas9
caaaaacagctattgtga

SEQ ID NO: 38229 - DNA, 25 bp, Artificial Sequence
  Synthetic: FXN 3 forward 9:69042707-69042735; SpCas9
acaaaaacagctattgtgaaggtat

SEQ ID NO: 38230 - DNA, 24 bp, Artificial Sequence
  Synthetic: FXN 3 forward 9:69042708-69042735; SpCas9
caaaaacagctattgtgaaggtat

SEQ ID NO: 38231 - DNA, 23 bp, Artificial Sequence
  Synthetic: FXN 3 forward 9:69042709-69042735; SpCas9
aaaaacagctattgtgaaggtat

SEQ ID NO: 38232 - DNA, 22 bp, Artificial Sequence
  Synthetic: FXN 3 forward 9:69042710-69042735; SpCas9
aaaacagctattgtgaaggtat

SEQ ID NO: 38233 - DNA, 21 bp, Artificial Sequence
  Synthetic: FXN 3 forward 9:69042711-69042735; SpCas9
aaacagctattgtgaaggtat

SEQ ID NO: 38234 - DNA, 20 bp, Artificial Sequence
  Synthetic: FXN 3 forward 9:69042712-69042735; SpCas9
aacagctattgtgaaggtat

SEQ ID NO: 38235 - DNA, 19 bp, Artificial Sequence
  Synthetic: FXN 3 forward 9:69042713-69042735; SpCas9
acagctattgtgaaggtat

SEQ ID NO: 38236 - DNA, 18 bp, Artificial Sequence
  Synthetic: FXN 3 forward 9:69042714-69042735; SpCas9
cagctattgtgaaggtat

SEQ ID NO: 38237 - DNA, 25 bp, Artificial Sequence
  Synthetic: FXN 3 forward 9:69042715-69042743; SpCas9
agctattgtgaaggtatcagcgact

SEQ ID NO: 38238 - DNA, 24 bp, Artificial Sequence
  Synthetic: FXN 3 forward 9:69042716-69042743; SpCas9
gctattgtgaaggtatcagcgact

SEQ ID NO: 38239 - DNA, 23 bp, Artificial Sequence
  Synthetic: FXN 3 forward 9:69042717-69042743; SpCas9
ctattgtgaaggtatcagcgact

SEQ ID NO: 38240 - DNA, 22 bp, Artificial Sequence
  Synthetic: FXN 3 forward 9:69042718-69042743; SpCas9
tattgtgaaggtatcagcgact

SEQ ID NO: 38241 - DNA, 21 bp, Artificial Sequence
  Synthetic: FXN 3 forward 9:69042719-69042743; SpCas9
attgtgaaggtatcagcgact

SEQ ID NO: 38242 - DNA, 20 bp, Artificial Sequence
  Synthetic: FXN 3 forward 9:69042720-69042743; SpCas9
ttgtgaaggtatcagcgact

SEQ ID NO: 38243 - DNA, 19 bp, Artificial Sequence
  Synthetic: FXN 3 forward 9:69042721-69042743; SpCas9
tgtgaaggtatcagcgact

SEQ ID NO: 38244 - DNA, 18 bp, Artificial Sequence
  Synthetic: FXN 3 forward 9:69042722-69042743; SpCas9
gtgaaggtatcagcgact

SEQ ID NO: 38245 - DNA, 25 bp, Artificial Sequence
  Synthetic: FXN 3 reverse 9:69042717-69042745; SpCas9
gtcttagtcgctgataccttcacaa

SEQ ID NO: 38246 - DNA, 24 bp, Artificial Sequence
  Synthetic: FXN 3 reverse 9:69042718-69042745; SpCas9
tcttagtcgctgataccttcacaa

SEQ ID NO: 38247 - DNA, 23 bp, Artificial Sequence
  Synthetic: FXN 3 reverse 9:69042719-69042745; SpCas9
cttagtcgctgataccttcacaa

SEQ ID NO: 38248 - DNA, 22 bp, Artificial Sequence
  Synthetic: FXN 3 reverse 9:69042720-69042745; SpCas9
ttagtcgctgataccttcacaa

SEQ ID NO: 38249 - DNA, 21 bp, Artificial Sequence
  Synthetic: FXN 3 reverse 9:69042721-69042745; SpCas9
tagtcgctgataccttcacaa

SEQ ID NO: 38250 - DNA, 20 bp, Artificial Sequence
  Synthetic: FXN 3 reverse 9:69042722-69042745; SpCas9
agtcgctgataccttcacaa

SEQ ID NO: 38251 - DNA, 19 bp, Artificial Sequence
  Synthetic: FXN 3 reverse 9:69042723-69042745; SpCas9
gtcgctgataccttcacaa

SEQ ID NO: 38252 - DNA, 18 bp, Artificial Sequence
  Synthetic: FXN 3 reverse 9:69042724-69042745; SpCas9
tcgctgataccttcacaa

SEQ ID NO: 38253 - DNA, 25 bp, Artificial Sequence
  Synthetic: FXN 3 forward 9:69042724-69042752; SpCas9
gaaggtatcagcgactaagacaact

SEQ ID NO: 38254 - DNA, 24 bp, Artificial Sequence
  Synthetic: FXN 3 forward 9:69042725-69042752; SpCas9
aaggtatcagcgactaagacaact

SEQ ID NO: 38255 - DNA, 23 bp, Artificial Sequence
  Synthetic: FXN 3 forward 9:69042726-69042752; SpCas9
aggtatcagcgactaagacaact

SEQ ID NO: 38256 - DNA, 22 bp, Artificial Sequence
  Synthetic: FXN 3 forward 9:69042727-69042752; SpCas9
ggtatcagcgactaagacaact

SEQ ID NO: 38257 - DNA, 21 bp, Artificial Sequence
  Synthetic: FXN 3 forward 9:69042728-69042752; SpCas9
gtatcagcgactaagacaact

SEQ ID NO: 38258 - DNA, 20 bp, Artificial Sequence
  Synthetic: FXN 3 forward 9:69042729-69042752; SpCas9
tatcagcgactaagacaact

SEQ ID NO: 38259 - DNA, 19 bp, Artificial Sequence
  Synthetic: FXN 3 forward 9:69042730-69042752; SpCas9
atcagcgactaagacaact

SEQ ID NO: 38260 - DNA, 18 bp, Artificial Sequence
  Synthetic: FXN 3 forward 9:69042731-69042752; SpCas9
tcagcgactaagacaact

SEQ ID NO: 38261 - DNA, 25 bp, Artificial Sequence
  Synthetic: FXN 3 forward 9:69042725-69042753; SpCas9
aaggtatcagcgactaagacaacta

SEQ ID NO: 38262 - DNA, 24 bp, Artificial Sequence
  Synthetic: FXN 3 forward 9:69042726-69042753; SpCas9
aggtatcagcgactaagacaacta

SEQ ID NO: 38263 - DNA, 23 bp, Artificial Sequence
  Synthetic: FXN 3 forward 9:69042727-69042753; SpCas9
ggtatcagcgactaagacaacta

SEQ ID NO: 38264 - DNA, 22 bp, Artificial Sequence
  Synthetic: FXN 3 forward 9:69042728-69042753; SpCas9
gtatcagcgactaagacaacta

SEQ ID NO: 38265 - DNA, 21 bp, Artificial Sequence
  Synthetic: FXN 3 forward 9:69042729-69042753; SpCas9
tatcagcgactaagacaacta

SEQ ID NO: 38266 - DNA, 20 bp, Artificial Sequence
  Synthetic: FXN 3 forward 9:69042730-69042753; SpCas9
atcagcgactaagacaacta

SEQ ID NO: 38267 - DNA, 19 bp, Artificial Sequence
  Synthetic: FXN 3 forward 9:69042731-69042753; SpCas9
tcagcgactaagacaacta

SEQ ID NO: 38268 - DNA, 18 bp, Artificial Sequence
  Synthetic: FXN 3 forward 9:69042732-69042753; SpCas9
cagcgactaagacaacta

SEQ ID NO: 38269 - DNA, 25 bp, Artificial Sequence
  Synthetic: FXN 3 forward 9:69042731-69042759; SpCas9
tcagcgactaagacaactaaggttt

SEQ ID NO: 38270 - DNA, 24 bp, Artificial Sequence
  Synthetic: FXN 3 forward 9:69042732-69042759; SpCas9
cagcgactaagacaactaaggttt

SEQ ID NO: 38271 - DNA, 23 bp, Artificial Sequence
  Synthetic: FXN 3 forward 9:69042733-69042759; SpCas9
agcgactaagacaactaaggttt

SEQ ID NO: 38272 - DNA, 22 bp, Artificial Sequence
  Synthetic: FXN 3 forward 9:69042734-69042759; SpCas9
gcgactaagacaactaaggttt

SEQ ID NO: 38273 - DNA, 21 bp, Artificial Sequence
  Synthetic: FXN 3 forward 9:69042735-69042759; SpCas9
cgactaagacaactaaggttt

SEQ ID NO: 38274 - DNA, 20 bp, Artificial Sequence
  Synthetic: FXN 3 forward 9:69042736-69042759; SpCas9
gactaagacaactaaggttt

SEQ ID NO: 38275 - DNA, 19 bp, Artificial Sequence
  Synthetic: FXN 3 forward 9:69042737-69042759; SpCas9
actaagacaactaaggttt

SEQ ID NO: 38276 - DNA, 18 bp, Artificial Sequence
  Synthetic: FXN 3 forward 9:69042738-69042759; SpCas9
ctaagacaactaaggttt

SEQ ID NO: 38277 - DNA, 25 bp, Artificial Sequence
  Synthetic: FXN 3 forward 9:69042732-69042760; SpCas9
cagcgactaagacaactaaggtttg

SEQ ID NO: 38278 - DNA, 24 bp, Artificial Sequence
  Synthetic: FXN 3 forward 9:69042733-69042760; SpCas9
agcgactaagacaactaaggtttg

SEQ ID NO: 38279 - DNA, 23 bp, Artificial Sequence
  Synthetic: FXN 3 forward 9:69042734-69042760; SpCas9
gcgactaagacaactaaggtttg

SEQ ID NO: 38280 - DNA, 22 bp, Artificial Sequence
  Synthetic: FXN 3 forward 9:69042735-69042760; SpCas9
cgactaagacaactaaggtttg

SEQ ID NO: 38281 - DNA, 21 bp, Artificial Sequence
  Synthetic: FXN 3 forward 9:69042736-69042760; SpCas9
gactaagacaactaaggtttg

SEQ ID NO: 38282 - DNA, 20 bp, Artificial Sequence
  Synthetic: FXN 3 forward 9:69042737-69042760; SpCas9
actaagacaactaaggtttg

SEQ ID NO: 38283 - DNA, 19 bp, Artificial Sequence
  Synthetic: FXN 3 forward 9:69042738-69042760; SpCas9
ctaagacaactaaggtttg

SEQ ID NO: 38284 - DNA, 18 bp, Artificial Sequence
  Synthetic: FXN 3 forward 9:69042739-69042760; SpCas9
taagacaactaaggtttg

SEQ ID NO: 38285 - DNA, 25 bp, Artificial Sequence
  Synthetic: FXN 3 forward 9:69042733-69042761; SpCas9
agcgactaagacaactaaggtttga

SEQ ID NO: 38286 - DNA, 24 bp, Artificial Sequence
  Synthetic: FXN 3 forward 9:69042734-69042761; SpCas9
gcgactaagacaactaaggtttga

SEQ ID NO: 38287 - DNA, 23 bp, Artificial Sequence
  Synthetic: FXN 3 forward 9:69042735-69042761; SpCas9
cgactaagacaactaaggtttga

SEQ ID NO: 38288 - DNA, 22 bp, Artificial Sequence
  Synthetic: FXN 3 forward 9:69042736-69042761; SpCas9
gactaagacaactaaggtttga

SEQ ID NO: 38289 - DNA, 21 bp, Artificial Sequence
  Synthetic: FXN 3 forward 9:69042737-69042761; SpCas9
actaagacaactaaggtttga

SEQ ID NO: 38290 - DNA, 20 bp, Artificial Sequence
  Synthetic: FXN 3 forward 9:69042738-69042761; SpCas9
ctaagacaactaaggtttga

SEQ ID NO: 38291 - DNA, 19 bp, Artificial Sequence
  Synthetic: FXN 3 forward 9:69042739-69042761; SpCas9
taagacaactaaggtttga

SEQ ID NO: 38292 - DNA, 18 bp, Artificial Sequence
  Synthetic: FXN 3 forward 9:69042740-69042761; SpCas9
aagacaactaaggtttga

SEQ ID NO: 38293 - DNA, 25 bp, Artificial Sequence
  Synthetic: FXN 3 forward 9:69042734-69042762; SpCas9
gcgactaagacaactaaggtttgag

SEQ ID NO: 38294 - DNA, 24 bp, Artificial Sequence
  Synthetic: FXN 3 forward 9:69042735-69042762; SpCas9
cgactaagacaactaaggtttgag

SEQ ID NO: 38295 - DNA, 23 bp, Artificial Sequence
  Synthetic: FXN 3 forward 9:69042736-69042762; SpCas9
gactaagacaactaaggtttgag

SEQ ID NO: 38296 - DNA, 22 bp, Artificial Sequence
  Synthetic: FXN 3 forward 9:69042737-69042762; SpCas9
actaagacaactaaggtttgag

SEQ ID NO: 38297 - DNA, 21 bp, Artificial Sequence
  Synthetic: FXN 3 forward 9:69042738-69042762; SpCas9
ctaagacaactaaggtttgag

SEQ ID NO: 38298 - DNA, 20 bp, Artificial Sequence
  Synthetic: FXN 3 forward 9:69042739-69042762; SpCas9
taagacaactaaggtttgag

SEQ ID NO: 38299 - DNA, 19 bp, Artificial Sequence
  Synthetic: FXN 3 forward 9:69042740-69042762; SpCas9
aagacaactaaggtttgag

SEQ ID NO: 38300 - DNA, 18 bp, Artificial Sequence
  Synthetic: FXN 3 forward 9:69042741-69042762; SpCas9
agacaactaaggtttgag

SEQ ID NO: 38301 - DNA, 25 bp, Artificial Sequence
  Synthetic: FXN 3 forward 9:69042738-69042766; SpCas9
ctaagacaactaaggtttgaggggc

SEQ ID NO: 38302 - DNA, 24 bp, Artificial Sequence
  Synthetic: FXN 3 forward 9:69042739-69042766; SpCas9
taagacaactaaggtttgaggggc

SEQ ID NO: 38303 - DNA, 23 bp, Artificial Sequence
  Synthetic: FXN 3 forward 9:69042740-69042766; SpCas9
aagacaactaaggtttgaggggc

SEQ ID NO: 38304 - DNA, 22 bp, Artificial Sequence
  Synthetic: FXN 3 forward 9:69042741-69042766; SpCas9
agacaactaaggtttgaggggc

SEQ ID NO: 38305 - DNA, 21 bp, Artificial Sequence
  Synthetic: FXN 3 forward 9:69042742-69042766; SpCas9
gacaactaaggtttgaggggc

SEQ ID NO: 38306 - DNA, 20 bp, Artificial Sequence
  Synthetic: FXN 3 forward 9:69042743-69042766; SpCas9
acaactaaggtttgaggggc

SEQ ID NO: 38307 - DNA, 19 bp, Artificial Sequence
  Synthetic: FXN 3 forward 9:69042744-69042766; SpCas9
caactaaggtttgaggggc

SEQ ID NO: 38308 - DNA, 18 bp, Artificial Sequence
  Synthetic: FXN 3 forward 9:69042745-69042766; SpCas9
aactaaggtttgaggggc

SEQ ID NO: 38309 - DNA, 25 bp, Artificial Sequence
  Synthetic: FXN 3 reverse 9:69042738-69042766; SpCas9
ctggcccctcaaaccttagttgtct

SEQ ID NO: 38310 - DNA, 24 bp, Artificial Sequence
  Synthetic: FXN 3 reverse 9:69042739-69042766; SpCas9
tggcccctcaaaccttagttgtct

SEQ ID NO: 38311 - DNA, 23 bp, Artificial Sequence
  Synthetic: FXN 3 reverse 9:69042740-69042766; SpCas9
ggcccctcaaaccttagttgtct

SEQ ID NO: 38312 - DNA, 22 bp, Artificial Sequence
  Synthetic: FXN 3 reverse 9:69042741-69042766; SpCas9
gcccctcaaaccttagttgtct

SEQ ID NO: 38313 - DNA, 21 bp, Artificial Sequence
  Synthetic: FXN 3 reverse 9:69042742-69042766; SpCas9
cccctcaaaccttagttgtct

SEQ ID NO: 38314 - DNA, 20 bp, Artificial Sequence
  Synthetic: FXN 3 reverse 9:69042743-69042766; SpCas9
ccctcaaaccttagttgtct

SEQ ID NO: 38315 - DNA, 19 bp, Artificial Sequence
  Synthetic: FXN 3 reverse 9:69042744-69042766; SpCas9
cctcaaaccttagttgtct

SEQ ID NO: 38316 - DNA, 18 bp, Artificial Sequence
  Synthetic: FXN 3 reverse 9:69042745-69042766; SpCas9
ctcaaaccttagttgtct

SEQ ID NO: 38317 - DNA, 25 bp, Artificial Sequence
  Synthetic: FXN 3 forward 9:69042739-69042767; SpCas9
taagacaactaaggtttgaggggcc

SEQ ID NO: 38318 - DNA, 24 bp, Artificial Sequence
  Synthetic: FXN 3 forward 9:69042740-69042767; SpCas9
aagacaactaaggtttgaggggcc

SEQ ID NO: 38319 - DNA, 23 bp, Artificial Sequence
  Synthetic: FXN 3 forward 9:69042741-69042767; SpCas9
agacaactaaggtttgaggggcc

SEQ ID NO: 38320 - DNA, 22 bp, Artificial Sequence
  Synthetic: FXN 3 forward 9:69042742-69042767; SpCas9
gacaactaaggtttgaggggcc

SEQ ID NO: 38321 - DNA, 21 bp, Artificial Sequence
  Synthetic: FXN 3 forward 9:69042743-69042767; SpCas9
acaactaaggtttgaggggcc

SEQ ID NO: 38322 - DNA, 20 bp, Artificial Sequence
  Synthetic: FXN 3 forward 9:69042744-69042767; SpCas9
caactaaggtttgaggggcc

SEQ ID NO: 38323 - DNA, 19 bp, Artificial Sequence
  Synthetic: FXN 3 forward 9:69042745-69042767; SpCas9
aactaaggtttgaggggcc

SEQ ID NO: 38324 - DNA, 18 bp, Artificial Sequence
  Synthetic: FXN 3 forward 9:69042746-69042767; SpCas9
actaaggtttgaggggcc

SEQ ID NO: 38325 - DNA, 25 bp, Artificial Sequence
  Synthetic: FXN 3 forward 9:69042746-69042774; SpCas9
actaaggtttgaggggccaggatcc

SEQ ID NO: 38326 - DNA, 24 bp, Artificial Sequence
  Synthetic: FXN 3 forward 9:69042747-69042774; SpCas9
ctaaggtttgaggggccaggatcc

SEQ ID NO: 38327 - DNA, 23 bp, Artificial Sequence
  Synthetic: FXN 3 forward 9:69042748-69042774; SpCas9
taaggtttgaggggccaggatcc

SEQ ID NO: 38328 - DNA, 22 bp, Artificial Sequence
  Synthetic: FXN 3 forward 9:69042749-69042774; SpCas9
aaggtttgaggggccaggatcc

SEQ ID NO: 38329 - DNA, 21 bp, Artificial Sequence
  Synthetic: FXN 3 forward 9:69042750-69042774; SpCas9
aggtttgaggggccaggatcc

SEQ ID NO: 38330 - DNA, 20 bp, Artificial Sequence
  Synthetic: FXN 3 forward 9:69042751-69042774; SpCas9
ggtttgaggggccaggatcc

SEQ ID NO: 38331 - DNA, 19 bp, Artificial Sequence
  Synthetic: FXN 3 forward 9:69042752-69042774; SpCas9
gtttgaggggccaggatcc

SEQ ID NO: 38332 - DNA, 18 bp, Artificial Sequence
  Synthetic: FXN 3 forward 9:69042753-69042774; SpCas9
tttgaggggccaggatcc

SEQ ID NO: 38333 - DNA, 25 bp, Artificial Sequence
  Synthetic: FXN 3 reverse 9:69042747-69042775; SpCas9
tccaggatcctggcccctcaaacct

SEQ ID NO: 38334 - DNA, 24 bp, Artificial Sequence
  Synthetic: FXN 3 reverse 9:69042748-69042775; SpCas9
ccaggatcctggcccctcaaacct

SEQ ID NO: 38335 - DNA, 23 bp, Artificial Sequence
  Synthetic: FXN 3 reverse 9:69042749-69042775; SpCas9
caggatcctggcccctcaaacct

SEQ ID NO: 38336 - DNA, 22 bp, Artificial Sequence
  Synthetic: FXN 3 reverse 9:69042750-69042775; SpCas9
aggatcctggcccctcaaacct

SEQ ID NO: 38337 - DNA, 21 bp, Artificial Sequence
  Synthetic: FXN 3 reverse 9:69042751-69042775; SpCas9
ggatcctggcccctcaaacct

SEQ ID NO: 38338 - DNA, 20 bp, Artificial Sequence
  Synthetic: FXN 3 reverse 9:69042752-69042775; SpCas9
gatcctggcccctcaaacct

SEQ ID NO: 38339 - DNA, 19 bp, Artificial Sequence
  Synthetic: FXN 3 reverse 9:69042753-69042775; SpCas9
atcctggcccctcaaacct

SEQ ID NO: 38340 - DNA, 18 bp, Artificial Sequence
  Synthetic: FXN 3 reverse 9:69042754-69042775; SpCas9
tcctggcccctcaaacct

SEQ ID NO: 38341 - DNA, 25 bp, Artificial Sequence
  Synthetic: FXN 3 forward 9:69042748-69042776; SpCas9
taaggtttgaggggccaggatcctg

SEQ ID NO: 38342 - DNA, 24 bp, Artificial Sequence
  Synthetic: FXN 3 forward 9:69042749-69042776; SpCas9
aaggtttgaggggccaggatcctg

SEQ ID NO: 38343 - DNA, 23 bp, Artificial Sequence
  Synthetic: FXN 3 forward 9:69042750-69042776; SpCas9
aggtttgaggggccaggatcctg

SEQ ID NO: 38344 - DNA, 22 bp, Artificial Sequence
  Synthetic: FXN 3 forward 9:69042751-69042776; SpCas9
ggtttgaggggccaggatcctg

SEQ ID NO: 38345 - DNA, 21 bp, Artificial Sequence
  Synthetic: FXN 3 forward 9:69042752-69042776; SpCas9
gtttgaggggccaggatcctg

SEQ ID NO: 38346 - DNA, 20 bp, Artificial Sequence
  Synthetic: FXN 3 forward 9:69042753-69042776; SpCas9
tttgaggggccaggatcctg

SEQ ID NO: 38347 - DNA, 19 bp, Artificial Sequence
  Synthetic: FXN 3 forward 9:69042754-69042776; SpCas9
ttgaggggccaggatcctg

SEQ ID NO: 38348 - DNA, 18 bp, Artificial Sequence
  Synthetic: FXN 3 forward 9:69042755-69042776; SpCas9
tgaggggccaggatcctg

SEQ ID NO: 38349 - DNA, 25 bp, Artificial Sequence
  Synthetic: FXN 3 forward 9:69042750-69042778; SpCas9
aggtttgaggggccaggatcctgga

SEQ ID NO: 38350 - DNA, 24 bp, Artificial Sequence
  Synthetic: FXN 3 forward 9:69042751-69042778; SpCas9
ggtttgaggggccaggatcctgga

SEQ ID NO: 38351 - DNA, 23 bp, Artificial Sequence
  Synthetic: FXN 3 forward 9:69042752-69042778; SpCas9
gtttgaggggccaggatcctgga

SEQ ID NO: 38352 - DNA, 22 bp, Artificial Sequence
  Synthetic: FXN 3 forward 9:69042753-69042778; SpCas9
tttgaggggccaggatcctgga

SEQ ID NO: 38353 - DNA, 21 bp, Artificial Sequence
  Synthetic: FXN 3 forward 9:69042754-69042778; SpCas9
ttgaggggccaggatcctgga

SEQ ID NO: 38354 - DNA, 20 bp, Artificial Sequence
  Synthetic: FXN 3 forward 9:69042755-69042778; SpCas9
tgaggggccaggatcctgga

SEQ ID NO: 38355 - DNA, 19 bp, Artificial Sequence
  Synthetic: FXN 3 forward 9:69042756-69042778; SpCas9
gaggggccaggatcctgga

SEQ ID NO: 38356 - DNA, 18 bp, Artificial Sequence
  Synthetic: FXN 3 forward 9:69042757-69042778; SpCas9
aggggccaggatcctgga

SEQ ID NO: 38357 - DNA, 25 bp, Artificial Sequence
  Synthetic: FXN 3 forward 9:69042754-69042782; SpCas9
ttgaggggccaggatcctggagaga

SEQ ID NO: 38358 - DNA, 24 bp, Artificial Sequence
  Synthetic: FXN 3 forward 9:69042755-69042782; SpCas9
tgaggggccaggatcctggagaga

SEQ ID NO: 38359 - DNA, 23 bp, Artificial Sequence
  Synthetic: FXN 3 forward 9:69042756-69042782; SpCas9
gaggggccaggatcctggagaga

SEQ ID NO: 38360 - DNA, 22 bp, Artificial Sequence
  Synthetic: FXN 3 forward 9:69042757-69042782; SpCas9
aggggccaggatcctggagaga

SEQ ID NO: 38361 - DNA, 21 bp, Artificial Sequence
  Synthetic: FXN 3 forward 9:69042758-69042782; SpCas9
ggggccaggatcctggagaga

SEQ ID NO: 38362 - DNA, 20 bp, Artificial Sequence
  Synthetic: FXN 3 forward 9:69042759-69042782; SpCas9
gggccaggatcctggagaga

SEQ ID NO: 38363 - DNA, 19 bp, Artificial Sequence
  Synthetic: FXN 3 forward 9:69042760-69042782; SpCas9
ggccaggatcctggagaga

SEQ ID NO: 38364 - DNA, 18 bp, Artificial Sequence
  Synthetic: FXN 3 forward 9:69042761-69042782; SpCas9
gccaggatcctggagaga

SEQ ID NO: 38365 - DNA, 25 bp, Artificial Sequence
  Synthetic: FXN 3 reverse 9:69042762-69042790; SpCas9
ggaagtttccatctctccaggatcc

SEQ ID NO: 38366 - DNA, 24 bp, Artificial Sequence
  Synthetic: FXN 3 reverse 9:69042763-69042790; SpCas9
gaagtttccatctctccaggatcc

SEQ ID NO: 38367 - DNA, 23 bp, Artificial Sequence
  Synthetic: FXN 3 reverse 9:69042764-69042790; SpCas9
aagtttccatctctccaggatcc

SEQ ID NO: 38368 - DNA, 22 bp, Artificial Sequence
  Synthetic: FXN 3 reverse 9:69042765-69042790; SpCas9
agtttccatctctccaggatcc

SEQ ID NO: 38369 - DNA, 21 bp, Artificial Sequence
  Synthetic: FXN 3 reverse 9:69042766-69042790; SpCas9
gtttccatctctccaggatcc

SEQ ID NO: 38370 - DNA, 20 bp, Artificial Sequence
  Synthetic: FXN 3 reverse 9:69042767-69042790; SpCas9
tttccatctctccaggatcc

SEQ ID NO: 38371 - DNA, 19 bp, Artificial Sequence
  Synthetic: FXN 3 reverse 9:69042768-69042790; SpCas9
ttccatctctccaggatcc

SEQ ID NO: 38372 - DNA, 18 bp, Artificial Sequence
  Synthetic: FXN 3 reverse 9:69042769-69042790; SpCas9
tccatctctccaggatcc

SEQ ID NO: 38373 - DNA, 25 bp, Artificial Sequence
  Synthetic: FXN 3 forward 9:69042767-69042795; SpCas9
atcctggagagatggaaacttccct

SEQ ID NO: 38374 - DNA, 24 bp, Artificial Sequence
  Synthetic: FXN 3 forward 9:69042768-69042795; SpCas9
tcctggagagatggaaacttccct

SEQ ID NO: 38375 - DNA, 23 bp, Artificial Sequence
  Synthetic: FXN 3 forward 9:69042769-69042795; SpCas9
cctggagagatggaaacttccct

SEQ ID NO: 38376 - DNA, 22 bp, Artificial Sequence
  Synthetic: FXN 3 forward 9:69042770-69042795; SpCas9
ctggagagatggaaacttccct

SEQ ID NO: 38377 - DNA, 21 bp, Artificial Sequence
  Synthetic: FXN 3 forward 9:69042771-69042795; SpCas9
tggagagatggaaacttccct

SEQ ID NO: 38378 - DNA, 20 bp, Artificial Sequence
  Synthetic: FXN 3 forward 9:69042772-69042795; SpCas9
ggagagatggaaacttccct

SEQ ID NO: 38379 - DNA, 19 bp, Artificial Sequence
  Synthetic: FXN 3 forward 9:69042773-69042795; SpCas9
gagagatggaaacttccct

SEQ ID NO: 38380 - DNA, 18 bp, Artificial Sequence
  Synthetic: FXN 3 forward 9:69042774-69042795; SpCas9
agagatggaaacttccct

SEQ ID NO: 38381 - DNA, 25 bp, Artificial Sequence
  Synthetic: FXN 3 forward 9:69042768-69042796; SpCas9
tcctggagagatggaaacttccctg

SEQ ID NO: 38382 - DNA, 24 bp, Artificial Sequence
  Synthetic: FXN 3 forward 9:69042769-69042796; SpCas9
cctggagagatggaaacttccctg

SEQ ID NO: 38383 - DNA, 23 bp, Artificial Sequence
  Synthetic: FXN 3 forward 9:69042770-69042796; SpCas9
ctggagagatggaaacttccctg

SEQ ID NO: 38384 - DNA, 22 bp, Artificial Sequence
  Synthetic: FXN 3 forward 9:69042771-69042796; SpCas9
tggagagatggaaacttccctg

SEQ ID NO: 38385 - DNA, 21 bp, Artificial Sequence
  Synthetic: FXN 3 forward 9:69042772-69042796; SpCas9
ggagagatggaaacttccctg

SEQ ID NO: 38386 - DNA, 20 bp, Artificial Sequence
  Synthetic: FXN 3 forward 9:69042773-69042796; SpCas9
gagagatggaaacttccctg

SEQ ID NO: 38387 - DNA, 19 bp, Artificial Sequence
  Synthetic: FXN 3 forward 9:69042774-69042796; SpCas9
agagatggaaacttccctg

SEQ ID NO: 38388 - DNA, 18 bp, Artificial Sequence
  Synthetic: FXN 3 forward 9:69042775-69042796; SpCas9
gagatggaaacttccctg

SEQ ID NO: 38389 - DNA, 25 bp, Artificial Sequence
  Synthetic: FXN 3 reverse 9:69042769-69042797; SpCas9
acctcagggaagtttccatctctcc

SEQ ID NO: 38390 - DNA, 24 bp, Artificial Sequence
  Synthetic: FXN 3 reverse 9:69042770-69042797; SpCas9
cctcagggaagtttccatctctcc

SEQ ID NO: 38391 - DNA, 23 bp, Artificial Sequence
  Synthetic: FXN 3 reverse 9:69042771-69042797; SpCas9
ctcagggaagtttccatctctcc

SEQ ID NO: 38392 - DNA, 22 bp, Artificial Sequence
  Synthetic: FXN 3 reverse 9:69042772-69042797; SpCas9
tcagggaagtttccatctctcc

SEQ ID NO: 38393 - DNA, 21 bp, Artificial Sequence
  Synthetic: FXN 3 reverse 9:69042773-69042797; SpCas9
cagggaagtttccatctctcc

SEQ ID NO: 38394 - DNA, 20 bp, Artificial Sequence
  Synthetic: FXN 3 reverse 9:69042774-69042797; SpCas9
agggaagtttccatctctcc

SEQ ID NO: 38395 - DNA, 19 bp, Artificial Sequence
  Synthetic: FXN 3 reverse 9:69042775-69042797; SpCas9
gggaagtttccatctctcc

SEQ ID NO: 38396 - DNA, 18 bp, Artificial Sequence
  Synthetic: FXN 3 reverse 9:69042776-69042797; SpCas9
ggaagtttccatctctcc

SEQ ID NO: 38397 - DNA, 25 bp, Artificial Sequence
  Synthetic: FXN 3 reverse 9:69042770-69042798; SpCas9
cacctcagggaagtttccatctctc

SEQ ID NO: 38398 - DNA, 24 bp, Artificial Sequence
  Synthetic: FXN 3 reverse 9:69042771-69042798; SpCas9
acctcagggaagtttccatctctc

SEQ ID NO: 38399 - DNA, 23 bp, Artificial Sequence
  Synthetic: FXN 3 reverse 9:69042772-69042798; SpCas9
cctcagggaagtttccatctctc

SEQ ID NO: 38400 - DNA, 22 bp, Artificial Sequence
  Synthetic: FXN 3 reverse 9:69042773-69042798; SpCas9
ctcagggaagtttccatctctc

SEQ ID NO: 38401 - DNA, 21 bp, Artificial Sequence
  Synthetic: FXN 3 reverse 9:69042774-69042798; SpCas9
tcagggaagtttccatctctc

SEQ ID NO: 38402 - DNA, 20 bp, Artificial Sequence
  Synthetic: FXN 3 reverse 9:69042775-69042798; SpCas9
cagggaagtttccatctctc

SEQ ID NO: 38403 - DNA, 19 bp, Artificial Sequence
  Synthetic: FXN 3 reverse 9:69042776-69042798; SpCas9
agggaagtttccatctctc

SEQ ID NO: 38404 - DNA, 18 bp, Artificial Sequence
  Synthetic: FXN 3 reverse 9:69042777-69042798; SpCas9
gggaagtttccatctctc

SEQ ID NO: 38405 - DNA, 25 bp, Artificial Sequence
  Synthetic: FXN 3 forward 9:69042772-69042800; SpCas9
ggagagatggaaacttccctgaggt

SEQ ID NO: 38406 - DNA, 24 bp, Artificial Sequence
  Synthetic: FXN 3 forward 9:69042773-69042800; SpCas9
gagagatggaaacttccctgaggt

SEQ ID NO: 38407 - DNA, 23 bp, Artificial Sequence
  Synthetic: FXN 3 forward 9:69042774-69042800; SpCas9
agagatggaaacttccctgaggt

SEQ ID NO: 38408 - DNA, 22 bp, Artificial Sequence
  Synthetic: FXN 3 forward 9:69042775-69042800; SpCas9
gagatggaaacttccctgaggt

SEQ ID NO: 38409 - DNA, 21 bp, Artificial Sequence
  Synthetic: FXN 3 forward 9:69042776-69042800; SpCas9
agatggaaacttccctgaggt

SEQ ID NO: 38410 - DNA, 20 bp, Artificial Sequence
  Synthetic: FXN 3 forward 9:69042777-69042800; SpCas9
gatggaaacttccctgaggt

SEQ ID NO: 38411 - DNA, 19 bp, Artificial Sequence
  Synthetic: FXN 3 forward 9:69042778-69042800; SpCas9
atggaaacttccctgaggt

SEQ ID NO: 38412 - DNA, 18 bp, Artificial Sequence
  Synthetic: FXN 3 forward 9:69042779-69042800; SpCas9
tggaaacttccctgaggt

SEQ ID NO: 38413 - DNA, 25 bp, Artificial Sequence
  Synthetic: FXN 3 reverse 9:69042785-69042813; SpCas9
tgagaatgtggggctcacctcaggg

SEQ ID NO: 38414 - DNA, 24 bp, Artificial Sequence
  Synthetic: FXN 3 reverse 9:69042786-69042813; SpCas9
gagaatgtggggctcacctcaggg

SEQ ID NO: 38415 - DNA, 23 bp, Artificial Sequence
  Synthetic: FXN 3 reverse 9:69042787-69042813; SpCas9
agaatgtggggctcacctcaggg

SEQ ID NO: 38416 - DNA, 22 bp, Artificial Sequence
  Synthetic: FXN 3 reverse 9:69042788-69042813; SpCas9
gaatgtggggctcacctcaggg

SEQ ID NO: 38417 - DNA, 21 bp, Artificial Sequence
  Synthetic: FXN 3 reverse 9:69042789-69042813; SpCas9
aatgtggggctcacctcaggg

SEQ ID NO: 38418 - DNA, 20 bp, Artificial Sequence
  Synthetic: FXN 3 reverse 9:69042790-69042813; SpCas9
atgtggggctcacctcaggg

SEQ ID NO: 38419 - DNA, 19 bp, Artificial Sequence
  Synthetic: FXN 3 reverse 9:69042791-69042813; SpCas9
tgtggggctcacctcaggg

SEQ ID NO: 38420 - DNA, 18 bp, Artificial Sequence
  Synthetic: FXN 3 reverse 9:69042792-69042813; SpCas9
gtggggctcacctcaggg

SEQ ID NO: 38421 - DNA, 25 bp, Artificial Sequence
  Synthetic: FXN 3 forward 9:69042786-69042814; SpCas9
ttccctgaggtgagccccacattct

SEQ ID NO: 38422 - DNA, 24 bp, Artificial Sequence
  Synthetic: FXN 3 forward 9:69042787-69042814; SpCas9
tccctgaggtgagccccacattct

SEQ ID NO: 38423 - DNA, 23 bp, Artificial Sequence
  Synthetic: FXN 3 forward 9:69042788-69042814; SpCas9
ccctgaggtgagccccacattct

SEQ ID NO: 38424 - DNA, 22 bp, Artificial Sequence
  Synthetic: FXN 3 forward 9:69042789-69042814; SpCas9
cctgaggtgagccccacattct

SEQ ID NO: 38425 - DNA, 21 bp, Artificial Sequence
  Synthetic: FXN 3 forward 9:69042790-69042814; SpCas9
ctgaggtgagccccacattct

SEQ ID NO: 38426 - DNA, 20 bp, Artificial Sequence
  Synthetic: FXN 3 forward 9:69042791-69042814; SpCas9
tgaggtgagccccacattct

SEQ ID NO: 38427 - DNA, 19 bp, Artificial Sequence
  Synthetic: FXN 3 forward 9:69042792-69042814; SpCas9
gaggtgagccccacattct

SEQ ID NO: 38428 - DNA, 18 bp, Artificial Sequence
  Synthetic: FXN 3 forward 9:69042793-69042814; SpCas9
aggtgagccccacattct

SEQ ID NO: 38429 - DNA, 25 bp, Artificial Sequence
  Synthetic: FXN 3 reverse 9:69042788-69042816; SpCas9
gtctgagaatgtggggctcacctca

SEQ ID NO: 38430 - DNA, 24 bp, Artificial Sequence
  Synthetic: FXN 3 reverse 9:69042789-69042816; SpCas9
tctgagaatgtggggctcacctca

SEQ ID NO: 38431 - DNA, 23 bp, Artificial Sequence
  Synthetic: FXN 3 reverse 9:69042790-69042816; SpCas9
ctgagaatgtggggctcacctca

SEQ ID NO: 38432 - DNA, 22 bp, Artificial Sequence
  Synthetic: FXN 3 reverse 9:69042791-69042816; SpCas9
tgagaatgtggggctcacctca

SEQ ID NO: 38433 - DNA, 21 bp, Artificial Sequence
  Synthetic: FXN 3 reverse 9:69042792-69042816; SpCas9
gagaatgtggggctcacctca

SEQ ID NO: 38434 - DNA, 20 bp, Artificial Sequence
  Synthetic: FXN 3 reverse 9:69042793-69042816; SpCas9
agaatgtggggctcacctca

SEQ ID NO: 38435 - DNA, 19 bp, Artificial Sequence
  Synthetic: FXN 3 reverse 9:69042794-69042816; SpCas9
gaatgtggggctcacctca

SEQ ID NO: 38436 - DNA, 18 bp, Artificial Sequence
  Synthetic: FXN 3 reverse 9:69042795-69042816; SpCas9
aatgtggggctcacctca

SEQ ID NO: 38437 - DNA, 25 bp, Artificial Sequence
  Synthetic: FXN 3 reverse 9:69042789-69042817; SpCas9
tgtctgagaatgtggggctcacctc

SEQ ID NO: 38438 - DNA, 24 bp, Artificial Sequence
  Synthetic: FXN 3 reverse 9:69042790-69042817; SpCas9
gtctgagaatgtggggctcacctc

SEQ ID NO: 38439 - DNA, 23 bp, Artificial Sequence
  Synthetic: FXN 3 reverse 9:69042791-69042817; SpCas9
tctgagaatgtggggctcacctc

SEQ ID NO: 38440 - DNA, 22 bp, Artificial Sequence
  Synthetic: FXN 3 reverse 9:69042792-69042817; SpCas9
ctgagaatgtggggctcacctc

SEQ ID NO: 38441 - DNA, 21 bp, Artificial Sequence
  Synthetic: FXN 3 reverse 9:69042793-69042817; SpCas9
tgagaatgtggggctcacctc

SEQ ID NO: 38442 - DNA, 20 bp, Artificial Sequence
  Synthetic: FXN 3 reverse 9:69042794-69042817; SpCas9
gagaatgtggggctcacctc

SEQ ID NO: 38443 - DNA, 19 bp, Artificial Sequence
  Synthetic: FXN 3 reverse 9:69042795-69042817; SpCas9
agaatgtggggctcacctc

SEQ ID NO: 38444 - DNA, 18 bp, Artificial Sequence
  Synthetic: FXN 3 reverse 9:69042796-69042817; SpCas9
gaatgtggggctcacctc

SEQ ID NO: 38445 - DNA, 25 bp, Artificial Sequence
  Synthetic: FXN 3 reverse 9:69042790-69042818; SpCas9
gtgtctgagaatgtggggctcacct

SEQ ID NO: 38446 - DNA, 24 bp, Artificial Sequence
  Synthetic: FXN 3 reverse 9:69042791-69042818; SpCas9
tgtctgagaatgtggggctcacct

SEQ ID NO: 38447 - DNA, 23 bp, Artificial Sequence
  Synthetic: FXN 3 reverse 9:69042792-69042818; SpCas9
gtctgagaatgtggggctcacct

SEQ ID NO: 38448 - DNA, 22 bp, Artificial Sequence
  Synthetic: FXN 3 reverse 9:69042793-69042818; SpCas9
tctgagaatgtggggctcacct

SEQ ID NO: 38449 - DNA, 21 bp, Artificial Sequence
  Synthetic: FXN 3 reverse 9:69042794-69042818; SpCas9
ctgagaatgtggggctcacct

SEQ ID NO: 38450 - DNA, 20 bp, Artificial Sequence
  Synthetic: FXN 3 reverse 9:69042795-69042818; SpCas9
tgagaatgtggggctcacct

SEQ ID NO: 38451 - DNA, 19 bp, Artificial Sequence
  Synthetic: FXN 3 reverse 9:69042796-69042818; SpCas9
gagaatgtggggctcacct

SEQ ID NO: 38452 - DNA, 18 bp, Artificial Sequence
  Synthetic: FXN 3 reverse 9:69042797-69042818; SpCas9
agaatgtggggctcacct

SEQ ID NO: 38453 - DNA, 25 bp, Artificial Sequence
  Synthetic: FXN 3 forward 9:69042800-69042828; SpCas9
ccccacattctcagacacttttcct

SEQ ID NO: 38454 - DNA, 24 bp, Artificial Sequence
  Synthetic: FXN 3 forward 9:69042801-69042828; SpCas9
cccacattctcagacacttttcct

SEQ ID NO: 38455 - DNA, 23 bp, Artificial Sequence
  Synthetic: FXN 3 forward 9:69042802-69042828; SpCas9
ccacattctcagacacttttcct

SEQ ID NO: 38456 - DNA, 22 bp, Artificial Sequence
  Synthetic: FXN 3 forward 9:69042803-69042828; SpCas9
cacattctcagacacttttcct

SEQ ID NO: 38457 - DNA, 21 bp, Artificial Sequence
  Synthetic: FXN 3 forward 9:69042804-69042828; SpCas9
acattctcagacacttttcct

SEQ ID NO: 38458 - DNA, 20 bp, Artificial Sequence
  Synthetic: FXN 3 forward 9:69042805-69042828; SpCas9
cattctcagacacttttcct

SEQ ID NO: 38459 - DNA, 19 bp, Artificial Sequence
  Synthetic: FXN 3 forward 9:69042806-69042828; SpCas9
attctcagacacttttcct

SEQ ID NO: 38460 - DNA, 18 bp, Artificial Sequence
  Synthetic: FXN 3 forward 9:69042807-69042828; SpCas9
ttctcagacacttttcct

SEQ ID NO: 38461 - DNA, 25 bp, Artificial Sequence
  Synthetic: FXN 3 reverse 9:69042800-69042828; SpCas9
ccaaggaaaagtgtctgagaatgtg

SEQ ID NO: 38462 - DNA, 24 bp, Artificial Sequence
  Synthetic: FXN 3 reverse 9:69042801-69042828; SpCas9
caaggaaaagtgtctgagaatgtg

SEQ ID NO: 38463 - DNA, 23 bp, Artificial Sequence
  Synthetic: FXN 3 reverse 9:69042802-69042828; SpCas9
aaggaaaagtgtctgagaatgtg

SEQ ID NO: 38464 - DNA, 22 bp, Artificial Sequence
  Synthetic: FXN 3 reverse 9:69042803-69042828; SpCas9
aggaaaagtgtctgagaatgtg

SEQ ID NO: 38465 - DNA, 21 bp, Artificial Sequence
  Synthetic: FXN 3 reverse 9:69042804-69042828; SpCas9
ggaaaagtgtctgagaatgtg

SEQ ID NO: 38466 - DNA, 20 bp, Artificial Sequence
  Synthetic: FXN 3 reverse 9:69042805-69042828; SpCas9
gaaaagtgtctgagaatgtg

SEQ ID NO: 38467 - DNA, 19 bp, Artificial Sequence
  Synthetic: FXN 3 reverse 9:69042806-69042828; SpCas9
aaaagtgtctgagaatgtg

SEQ ID NO: 38468 - DNA, 18 bp, Artificial Sequence
  Synthetic: FXN 3 reverse 9:69042807-69042828; SpCas9
aaagtgtctgagaatgtg

SEQ ID NO: 38469 - DNA, 25 bp, Artificial Sequence
  Synthetic: FXN 3 reverse 9:69042801-69042829; SpCas9
tccaaggaaaagtgtctgagaatgt

SEQ ID NO: 38470 - DNA, 24 bp, Artificial Sequence
  Synthetic: FXN 3 reverse 9:69042802-69042829; SpCas9
ccaaggaaaagtgtctgagaatgt

SEQ ID NO: 38471 - DNA, 23 bp, Artificial Sequence
  Synthetic: FXN 3 reverse 9:69042803-69042829; SpCas9
caaggaaaagtgtctgagaatgt

SEQ ID NO: 38472 - DNA, 22 bp, Artificial Sequence
  Synthetic: FXN 3 reverse 9:69042804-69042829; SpCas9
aaggaaaagtgtctgagaatgt

SEQ ID NO: 38473 - DNA, 21 bp, Artificial Sequence
  Synthetic: FXN 3 reverse 9:69042805-69042829; SpCas9
aggaaaagtgtctgagaatgt

SEQ ID NO: 38474 - DNA, 20 bp, Artificial Sequence
  Synthetic: FXN 3 reverse 9:69042806-69042829; SpCas9
ggaaaagtgtctgagaatgt

SEQ ID NO: 38475 - DNA, 19 bp, Artificial Sequence
  Synthetic: FXN 3 reverse 9:69042807-69042829; SpCas9
gaaaagtgtctgagaatgt

SEQ ID NO: 38476 - DNA, 18 bp, Artificial Sequence
  Synthetic: FXN 3 reverse 9:69042808-69042829; SpCas9
aaaagtgtctgagaatgt

SEQ ID NO: 38477 - DNA, 25 bp, Artificial Sequence
  Synthetic: FXN 3 reverse 9:69042802-69042830; SpCas9
atccaaggaaaagtgtctgagaatg

SEQ ID NO: 38478 - DNA, 24 bp, Artificial Sequence
  Synthetic: FXN 3 reverse 9:69042803-69042830; SpCas9
tccaaggaaaagtgtctgagaatg

SEQ ID NO: 38479 - DNA, 23 bp, Artificial Sequence
  Synthetic: FXN 3 reverse 9:69042804-69042830; SpCas9
ccaaggaaaagtgtctgagaatg

SEQ ID NO: 38480 - DNA, 22 bp, Artificial Sequence
  Synthetic: FXN 3 reverse 9:69042805-69042830; SpCas9
caaggaaaagtgtctgagaatg

SEQ ID NO: 38481 - DNA, 21 bp, Artificial Sequence
  Synthetic: FXN 3 reverse 9:69042806-69042830; SpCas9
aaggaaaagtgtctgagaatg

SEQ ID NO: 38482 - DNA, 20 bp, Artificial Sequence
  Synthetic: FXN 3 reverse 9:69042807-69042830; SpCas9
aggaaaagtgtctgagaatg

SEQ ID NO: 38483 - DNA, 19 bp, Artificial Sequence
  Synthetic: FXN 3 reverse 9:69042808-69042830; SpCas9
ggaaaagtgtctgagaatg

SEQ ID NO: 38484 - DNA, 18 bp, Artificial Sequence
  Synthetic: FXN 3 reverse 9:69042809-69042830; SpCas9
gaaaagtgtctgagaatg

SEQ ID NO: 38485 - DNA, 25 bp, Artificial Sequence
  Synthetic: FXN 3 reverse 9:69042809-69042837; SpCas9
tcaaaacatccaaggaaaagtgtct

SEQ ID NO: 38486 - DNA, 24 bp, Artificial Sequence
  Synthetic: FXN 3 reverse 9:69042810-69042837; SpCas9
caaaacatccaaggaaaagtgtct

SEQ ID NO: 38487 - DNA, 23 bp, Artificial Sequence
  Synthetic: FXN 3 reverse 9:69042811-69042837; SpCas9
aaaacatccaaggaaaagtgtct

SEQ ID NO: 38488 - DNA, 22 bp, Artificial Sequence
  Synthetic: FXN 3 reverse 9:69042812-69042837; SpCas9
aaacatccaaggaaaagtgtct

SEQ ID NO: 38489 - DNA, 21 bp, Artificial Sequence
  Synthetic: FXN 3 reverse 9:69042813-69042837; SpCas9
aacatccaaggaaaagtgtct

SEQ ID NO: 38490 - DNA, 20 bp, Artificial Sequence
  Synthetic: FXN 3 reverse 9:69042814-69042837; SpCas9
acatccaaggaaaagtgtct

SEQ ID NO: 38491 - DNA, 19 bp, Artificial Sequence
  Synthetic: FXN 3 reverse 9:69042815-69042837; SpCas9
catccaaggaaaagtgtct

SEQ ID NO: 38492 - DNA, 18 bp, Artificial Sequence
  Synthetic: FXN 3 reverse 9:69042816-69042837; SpCas9
atccaaggaaaagtgtct

SEQ ID NO: 38493 - DNA, 25 bp, Artificial Sequence
  Synthetic: FXN 3 forward 9:69042810-69042838; SpCas9
tcagacacttttccttggatgtttt

SEQ ID NO: 38494 - DNA, 24 bp, Artificial Sequence
  Synthetic: FXN 3 forward 9:69042811-69042838; SpCas9
cagacacttttccttggatgtttt

SEQ ID NO: 38495 - DNA, 23 bp, Artificial Sequence
  Synthetic: FXN 3 forward 9:69042812-69042838; SpCas9
agacacttttccttggatgtttt

SEQ ID NO: 38496 - DNA, 22 bp, Artificial Sequence
  Synthetic: FXN 3 forward 9:69042813-69042838; SpCas9
gacacttttccttggatgtttt

SEQ ID NO: 38497 - DNA, 21 bp, Artificial Sequence
  Synthetic: FXN 3 forward 9:69042814-69042838; SpCas9
acacttttccttggatgtttt

SEQ ID NO: 38498 - DNA, 20 bp, Artificial Sequence
  Synthetic: FXN 3 forward 9:69042815-69042838; SpCas9
cacttttccttggatgtttt

SEQ ID NO: 38499 - DNA, 19 bp, Artificial Sequence
  Synthetic: FXN 3 forward 9:69042816-69042838; SpCas9
acttttccttggatgtttt

SEQ ID NO: 38500 - DNA, 18 bp, Artificial Sequence
  Synthetic: FXN 3 forward 9:69042817-69042838; SpCas9
cttttccttggatgtttt

SEQ ID NO: 38501 - DNA, 25 bp, Artificial Sequence
  Synthetic: FXN 3 reverse 9:69042817-69042845; SpCas9
agcagtgctcaaaacatccaaggaa

SEQ ID NO: 38502 - DNA, 24 bp, Artificial Sequence
  Synthetic: FXN 3 reverse 9:69042818-69042845; SpCas9
gcagtgctcaaaacatccaaggaa

SEQ ID NO: 38503 - DNA, 23 bp, Artificial Sequence
  Synthetic: FXN 3 reverse 9:69042819-69042845; SpCas9
cagtgctcaaaacatccaaggaa

SEQ ID NO: 38504 - DNA, 22 bp, Artificial Sequence
  Synthetic: FXN 3 reverse 9:69042820-69042845; SpCas9
agtgctcaaaacatccaaggaa

SEQ ID NO: 38505 - DNA, 21 bp, Artificial Sequence
  Synthetic: FXN 3 reverse 9:69042821-69042845; SpCas9
gtgctcaaaacatccaaggaa

SEQ ID NO: 38506 - DNA, 20 bp, Artificial Sequence
  Synthetic: FXN 3 reverse 9:69042822-69042845; SpCas9
tgctcaaaacatccaaggaa

SEQ ID NO: 38507 - DNA, 19 bp, Artificial Sequence
  Synthetic: FXN 3 reverse 9:69042823-69042845; SpCas9
gctcaaaacatccaaggaa

SEQ ID NO: 38508 - DNA, 18 bp, Artificial Sequence
  Synthetic: FXN 3 reverse 9:69042824-69042845; SpCas9
ctcaaaacatccaaggaa

SEQ ID NO: 38509 - DNA, 25 bp, Artificial Sequence
  Synthetic: FXN 3 reverse 9:69042822-69042850; SpCas9
attaaagcagtgctcaaaacatcca

SEQ ID NO: 38510 - DNA, 24 bp, Artificial Sequence
  Synthetic: FXN 3 reverse 9:69042823-69042850; SpCas9
ttaaagcagtgctcaaaacatcca

SEQ ID NO: 38511 - DNA, 23 bp, Artificial Sequence
  Synthetic: FXN 3 reverse 9:69042824-69042850; SpCas9
taaagcagtgctcaaaacatcca

SEQ ID NO: 38512 - DNA, 22 bp, Artificial Sequence
  Synthetic: FXN 3 reverse 9:69042825-69042850; SpCas9
aaagcagtgctcaaaacatcca

SEQ ID NO: 38513 - DNA, 21 bp, Artificial Sequence
  Synthetic: FXN 3 reverse 9:69042826-69042850; SpCas9
aagcagtgctcaaaacatcca

SEQ ID NO: 38514 - DNA, 20 bp, Artificial Sequence
  Synthetic: FXN 3 reverse 9:69042827-69042850; SpCas9
agcagtgctcaaaacatcca

SEQ ID NO: 38515 - DNA, 19 bp, Artificial Sequence
  Synthetic: FXN 3 reverse 9:69042828-69042850; SpCas9
gcagtgctcaaaacatcca

SEQ ID NO: 38516 - DNA, 18 bp, Artificial Sequence
  Synthetic: FXN 3 reverse 9:69042829-69042850; SpCas9
cagtgctcaaaacatcca

SEQ ID NO: 38517 - DNA, 25 bp, Artificial Sequence
  Synthetic: FXN 3 reverse 9:69042823-69042851; SpCas9
aattaaagcagtgctcaaaacatcc

SEQ ID NO: 38518 - DNA, 24 bp, Artificial Sequence
  Synthetic: FXN 3 reverse 9:69042824-69042851; SpCas9
attaaagcagtgctcaaaacatcc

SEQ ID NO: 38519 - DNA, 23 bp, Artificial Sequence
  Synthetic: FXN 3 reverse 9:69042825-69042851; SpCas9
ttaaagcagtgctcaaaacatcc

SEQ ID NO: 38520 - DNA, 22 bp, Artificial Sequence
  Synthetic: FXN 3 reverse 9:69042826-69042851; SpCas9
taaagcagtgctcaaaacatcc

SEQ ID NO: 38521 - DNA, 21 bp, Artificial Sequence
  Synthetic: FXN 3 reverse 9:69042827-69042851; SpCas9
aaagcagtgctcaaaacatcc

SEQ ID NO: 38522 - DNA, 20 bp, Artificial Sequence
  Synthetic: FXN 3 reverse 9:69042828-69042851; SpCas9
aagcagtgctcaaaacatcc

SEQ ID NO: 38523 - DNA, 19 bp, Artificial Sequence
  Synthetic: FXN 3 reverse 9:69042829-69042851; SpCas9
agcagtgctcaaaacatcc

SEQ ID NO: 38524 - DNA, 18 bp, Artificial Sequence
  Synthetic: FXN 3 reverse 9:69042830-69042851; SpCas9
gcagtgctcaaaacatcc

SEQ ID NO: 38525 - DNA, 25 bp, Artificial Sequence
  Synthetic: FXN 3 forward 9:69042828-69042856; SpCas9
atgttttgagcactgctttaattcc

SEQ ID NO: 38526 - DNA, 24 bp, Artificial Sequence
  Synthetic: FXN 3 forward 9:69042829-69042856; SpCas9
tgttttgagcactgctttaattcc

SEQ ID NO: 38527 - DNA, 23 bp, Artificial Sequence
  Synthetic: FXN 3 forward 9:69042830-69042856; SpCas9
gttttgagcactgctttaattcc

SEQ ID NO: 38528 - DNA, 22 bp, Artificial Sequence
  Synthetic: FXN 3 forward 9:69042831-69042856; SpCas9
ttttgagcactgctttaattcc

SEQ ID NO: 38529 - DNA, 21 bp, Artificial Sequence
  Synthetic: FXN 3 forward 9:69042832-69042856; SpCas9
tttgagcactgctttaattcc

SEQ ID NO: 38530 - DNA, 20 bp, Artificial Sequence
  Synthetic: FXN 3 forward 9:69042833-69042856; SpCas9
ttgagcactgctttaattcc

SEQ ID NO: 38531 - DNA, 19 bp, Artificial Sequence
  Synthetic: FXN 3 forward 9:69042834-69042856; SpCas9
tgagcactgctttaattcc

SEQ ID NO: 38532 - DNA, 18 bp, Artificial Sequence
  Synthetic: FXN 3 forward 9:69042835-69042856; SpCas9
gagcactgctttaattcc

SEQ ID NO: 38533 - DNA, 25 bp, Artificial Sequence
  Synthetic: FXN 3 forward 9:69042829-69042857; SpCas9
tgttttgagcactgctttaattcct

SEQ ID NO: 38534 - DNA, 24 bp, Artificial Sequence
  Synthetic: FXN 3 forward 9:69042830-69042857; SpCas9
gttttgagcactgctttaattcct

SEQ ID NO: 38535 - DNA, 23 bp, Artificial Sequence
  Synthetic: FXN 3 forward 9:69042831-69042857; SpCas9
ttttgagcactgctttaattcct

SEQ ID NO: 38536 - DNA, 22 bp, Artificial Sequence
  Synthetic: FXN 3 forward 9:69042832-69042857; SpCas9
tttgagcactgctttaattcct

SEQ ID NO: 38537 - DNA, 21 bp, Artificial Sequence
  Synthetic: FXN 3 forward 9:69042833-69042857; SpCas9
ttgagcactgctttaattcct

SEQ ID NO: 38538 - DNA, 20 bp, Artificial Sequence
  Synthetic: FXN 3 forward 9:69042834-69042857; SpCas9
tgagcactgctttaattcct

SEQ ID NO: 38539 - DNA, 19 bp, Artificial Sequence
  Synthetic: FXN 3 forward 9:69042835-69042857; SpCas9
gagcactgctttaattcct

SEQ ID NO: 38540 - DNA, 18 bp, Artificial Sequence
  Synthetic: FXN 3 forward 9:69042836-69042857; SpCas9
agcactgctttaattcct

SEQ ID NO: 38541 - DNA, 25 bp, Artificial Sequence
  Synthetic: FXN 3 reverse 9:69042840-69042868; SpCas9
ggaattgttttcccaggaattaaag

SEQ ID NO: 38542 - DNA, 24 bp, Artificial Sequence
  Synthetic: FXN 3 reverse 9:69042841-69042868; SpCas9
gaattgttttcccaggaattaaag

SEQ ID NO: 38543 - DNA, 23 bp, Artificial Sequence
  Synthetic: FXN 3 reverse 9:69042842-69042868; SpCas9
aattgttttcccaggaattaaag

SEQ ID NO: 38544 - DNA, 22 bp, Artificial Sequence
  Synthetic: FXN 3 reverse 9:69042843-69042868; SpCas9
attgttttcccaggaattaaag

SEQ ID NO: 38545 - DNA, 21 bp, Artificial Sequence
  Synthetic: FXN 3 reverse 9:69042844-69042868; SpCas9
ttgttttcccaggaattaaag

SEQ ID NO: 38546 - DNA, 20 bp, Artificial Sequence
  Synthetic: FXN 3 reverse 9:69042845-69042868; SpCas9
tgttttcccaggaattaaag

SEQ ID NO: 38547 - DNA, 19 bp, Artificial Sequence
  Synthetic: FXN 3 reverse 9:69042846-69042868; SpCas9
gttttcccaggaattaaag

SEQ ID NO: 38548 - DNA, 18 bp, Artificial Sequence
  Synthetic: FXN 3 reverse 9:69042847-69042868; SpCas9
ttttcccaggaattaaag

SEQ ID NO: 38549 - DNA, 25 bp, Artificial Sequence
  Synthetic: FXN 3 reverse 9:69042843-69042871; SpCas9
gaaggaattgttttcccaggaatta

SEQ ID NO: 38550 - DNA, 24 bp, Artificial Sequence
  Synthetic: FXN 3 reverse 9:69042844-69042871; SpCas9
aaggaattgttttcccaggaatta

SEQ ID NO: 38551 - DNA, 23 bp, Artificial Sequence
  Synthetic: FXN 3 reverse 9:69042845-69042871; SpCas9
aggaattgttttcccaggaatta

SEQ ID NO: 38552 - DNA, 22 bp, Artificial Sequence
  Synthetic: FXN 3 reverse 9:69042846-69042871; SpCas9
ggaattgttttcccaggaatta

SEQ ID NO: 38553 - DNA, 21 bp, Artificial Sequence
  Synthetic: FXN 3 reverse 9:69042847-69042871; SpCas9
gaattgttttcccaggaatta

SEQ ID NO: 38554 - DNA, 20 bp, Artificial Sequence
  Synthetic: FXN 3 reverse 9:69042848-69042871; SpCas9
aattgttttcccaggaatta

SEQ ID NO: 38555 - DNA, 19 bp, Artificial Sequence
  Synthetic: FXN 3 reverse 9:69042849-69042871; SpCas9
attgttttcccaggaatta

SEQ ID NO: 38556 - DNA, 18 bp, Artificial Sequence
  Synthetic: FXN 3 reverse 9:69042850-69042871; SpCas9
ttgttttcccaggaatta

SEQ ID NO: 38557 - DNA, 25 bp, Artificial Sequence
  Synthetic: FXN 3 reverse 9:69042851-69042879; SpCas9
gcacagtggaaggaattgttttccc

SEQ ID NO: 38558 - DNA, 24 bp, Artificial Sequence
  Synthetic: FXN 3 reverse 9:69042852-69042879; SpCas9
cacagtggaaggaattgttttccc

SEQ ID NO: 38559 - DNA, 23 bp, Artificial Sequence
  Synthetic: FXN 3 reverse 9:69042853-69042879; SpCas9
acagtggaaggaattgttttccc

SEQ ID NO: 38560 - DNA, 22 bp, Artificial Sequence
  Synthetic: FXN 3 reverse 9:69042854-69042879; SpCas9
cagtggaaggaattgttttccc

SEQ ID NO: 38561 - DNA, 21 bp, Artificial Sequence
  Synthetic: FXN 3 reverse 9:69042855-69042879; SpCas9
agtggaaggaattgttttccc

SEQ ID NO: 38562 - DNA, 20 bp, Artificial Sequence
  Synthetic: FXN 3 reverse 9:69042856-69042879; SpCas9
gtggaaggaattgttttccc

SEQ ID NO: 38563 - DNA, 19 bp, Artificial Sequence
  Synthetic: FXN 3 reverse 9:69042857-69042879; SpCas9
tggaaggaattgttttccc

SEQ ID NO: 38564 - DNA, 18 bp, Artificial Sequence
  Synthetic: FXN 3 reverse 9:69042858-69042879; SpCas9
ggaaggaattgttttccc

SEQ ID NO: 38565 - DNA, 25 bp, Artificial Sequence
  Synthetic: FXN 3 reverse 9:69042852-69042880; SpCas9
tgcacagtggaaggaattgttttcc

SEQ ID NO: 38566 - DNA, 24 bp, Artificial Sequence
  Synthetic: FXN 3 reverse 9:69042853-69042880; SpCas9
gcacagtggaaggaattgttttcc

SEQ ID NO: 38567 - DNA, 23 bp, Artificial Sequence
  Synthetic: FXN 3 reverse 9:69042854-69042880; SpCas9
cacagtggaaggaattgttttcc

SEQ ID NO: 38568 - DNA, 22 bp, Artificial Sequence
  Synthetic: FXN 3 reverse 9:69042855-69042880; SpCas9
acagtggaaggaattgttttcc

SEQ ID NO: 38569 - DNA, 21 bp, Artificial Sequence
  Synthetic: FXN 3 reverse 9:69042856-69042880; SpCas9
cagtggaaggaattgttttcc

SEQ ID NO: 38570 - DNA, 20 bp, Artificial Sequence
  Synthetic: FXN 3 reverse 9:69042857-69042880; SpCas9
agtggaaggaattgttttcc

SEQ ID NO: 38571 - DNA, 19 bp, Artificial Sequence
  Synthetic: FXN 3 reverse 9:69042858-69042880; SpCas9
gtggaaggaattgttttcc

SEQ ID NO: 38572 - DNA, 18 bp, Artificial Sequence
  Synthetic: FXN 3 reverse 9:69042859-69042880; SpCas9
tggaaggaattgttttcc

SEQ ID NO: 38573 - DNA, 25 bp, Artificial Sequence
  Synthetic: FXN 3 forward 9:69042855-69042883; SpCas9
ggaaaacaattccttccactgtgca

SEQ ID NO: 38574 - DNA, 24 bp, Artificial Sequence
  Synthetic: FXN 3 forward 9:69042856-69042883; SpCas9
gaaaacaattccttccactgtgca

SEQ ID NO: 38575 - DNA, 23 bp, Artificial Sequence
  Synthetic: FXN 3 forward 9:69042857-69042883; SpCas9
aaaacaattccttccactgtgca

SEQ ID NO: 38576 - DNA, 22 bp, Artificial Sequence
  Synthetic: FXN 3 forward 9:69042858-69042883; SpCas9
aaacaattccttccactgtgca

SEQ ID NO: 38577 - DNA, 21 bp, Artificial Sequence
  Synthetic: FXN 3 forward 9:69042859-69042883; SpCas9
aacaattccttccactgtgca

SEQ ID NO: 38578 - DNA, 20 bp, Artificial Sequence
  Synthetic: FXN 3 forward 9:69042860-69042883; SpCas9
acaattccttccactgtgca

SEQ ID NO: 38579 - DNA, 19 bp, Artificial Sequence
  Synthetic: FXN 3 forward 9:69042861-69042883; SpCas9
caattccttccactgtgca

SEQ ID NO: 38580 - DNA, 18 bp, Artificial Sequence
  Synthetic: FXN 3 forward 9:69042862-69042883; SpCas9
aattccttccactgtgca

SEQ ID NO: 38581 - DNA, 25 bp, Artificial Sequence
  Synthetic: FXN 3 forward 9:69042862-69042890; SpCas9
aattccttccactgtgcacagactc

SEQ ID NO: 38582 - DNA, 24 bp, Artificial Sequence
  Synthetic: FXN 3 forward 9:69042863-69042890; SpCas9
attccttccactgtgcacagactc

SEQ ID NO: 38583 - DNA, 23 bp, Artificial Sequence
  Synthetic: FXN 3 forward 9:69042864-69042890; SpCas9
ttccttccactgtgcacagactc

SEQ ID NO: 38584 - DNA, 22 bp, Artificial Sequence
  Synthetic: FXN 3 forward 9:69042865-69042890; SpCas9
tccttccactgtgcacagactc

SEQ ID NO: 38585 - DNA, 21 bp, Artificial Sequence
  Synthetic: FXN 3 forward 9:69042866-69042890; SpCas9
ccttccactgtgcacagactc

SEQ ID NO: 38586 - DNA, 20 bp, Artificial Sequence
  Synthetic: FXN 3 forward 9:69042867-69042890; SpCas9
cttccactgtgcacagactc

SEQ ID NO: 38587 - DNA, 19 bp, Artificial Sequence
  Synthetic: FXN 3 forward 9:69042868-69042890; SpCas9
ttccactgtgcacagactc

SEQ ID NO: 38588 - DNA, 18 bp, Artificial Sequence
  Synthetic: FXN 3 forward 9:69042869-69042890; SpCas9
tccactgtgcacagactc

SEQ ID NO: 38589 - DNA, 25 bp, Artificial Sequence
  Synthetic: FXN 3 forward 9:69042863-69042891; SpCas9
attccttccactgtgcacagactct

SEQ ID NO: 38590 - DNA, 24 bp, Artificial Sequence
  Synthetic: FXN 3 forward 9:69042864-69042891; SpCas9
ttccttccactgtgcacagactct

SEQ ID NO: 38591 - DNA, 23 bp, Artificial Sequence
  Synthetic: FXN 3 forward 9:69042865-69042891; SpCas9
tccttccactgtgcacagactct

SEQ ID NO: 38592 - DNA, 22 bp, Artificial Sequence
  Synthetic: FXN 3 forward 9:69042866-69042891; SpCas9
ccttccactgtgcacagactct

SEQ ID NO: 38593 - DNA, 21 bp, Artificial Sequence
  Synthetic: FXN 3 forward 9:69042867-69042891; SpCas9
cttccactgtgcacagactct

SEQ ID NO: 38594 - DNA, 20 bp, Artificial Sequence
  Synthetic: FXN 3 forward 9:69042868-69042891; SpCas9
ttccactgtgcacagactct

SEQ ID NO: 38595 - DNA, 19 bp, Artificial Sequence
  Synthetic: FXN 3 forward 9:69042869-69042891; SpCas9
tccactgtgcacagactct

SEQ ID NO: 38596 - DNA, 18 bp, Artificial Sequence
  Synthetic: FXN 3 forward 9:69042870-69042891; SpCas9
ccactgtgcacagactct

SEQ ID NO: 38597 - DNA, 25 bp, Artificial Sequence
  Synthetic: FXN 3 forward 9:69042864-69042892; SpCas9
ttccttccactgtgcacagactctg

SEQ ID NO: 38598 - DNA, 24 bp, Artificial Sequence
  Synthetic: FXN 3 forward 9:69042865-69042892; SpCas9
tccttccactgtgcacagactctg

SEQ ID NO: 38599 - DNA, 23 bp, Artificial Sequence
  Synthetic: FXN 3 forward 9:69042866-69042892; SpCas9
ccttccactgtgcacagactctg

SEQ ID NO: 38600 - DNA, 22 bp, Artificial Sequence
  Synthetic: FXN 3 forward 9:69042867-69042892; SpCas9
cttccactgtgcacagactctg

SEQ ID NO: 38601 - DNA, 21 bp, Artificial Sequence
  Synthetic: FXN 3 forward 9:69042868-69042892; SpCas9
ttccactgtgcacagactctg

SEQ ID NO: 38602 - DNA, 20 bp, Artificial Sequence
  Synthetic: FXN 3 forward 9:69042869-69042892; SpCas9
tccactgtgcacagactctg

SEQ ID NO: 38603 - DNA, 19 bp, Artificial Sequence
  Synthetic: FXN 3 forward 9:69042870-69042892; SpCas9
ccactgtgcacagactctg

SEQ ID NO: 38604 - DNA, 18 bp, Artificial Sequence
  Synthetic: FXN 3 forward 9:69042871-69042892; SpCas9
cactgtgcacagactctg

SEQ ID NO: 38605 - DNA, 25 bp, Artificial Sequence
  Synthetic: FXN 3 reverse 9:69042866-69042894; SpCas9
ggccccagagtctgtgcacagtgga

SEQ ID NO: 38606 - DNA, 24 bp, Artificial Sequence
  Synthetic: FXN 3 reverse 9:69042867-69042894; SpCas9
gccccagagtctgtgcacagtgga

SEQ ID NO: 38607 - DNA, 23 bp, Artificial Sequence
  Synthetic: FXN 3 reverse 9:69042868-69042894; SpCas9
ccccagagtctgtgcacagtgga

SEQ ID NO: 38608 - DNA, 22 bp, Artificial Sequence
  Synthetic: FXN 3 reverse 9:69042869-69042894; SpCas9
cccagagtctgtgcacagtgga

SEQ ID NO: 38609 - DNA, 21 bp, Artificial Sequence
  Synthetic: FXN 3 reverse 9:69042870-69042894; SpCas9
ccagagtctgtgcacagtgga

SEQ ID NO: 38610 - DNA, 20 bp, Artificial Sequence
  Synthetic: FXN 3 reverse 9:69042871-69042894; SpCas9
cagagtctgtgcacagtgga

SEQ ID NO: 38611 - DNA, 19 bp, Artificial Sequence
  Synthetic: FXN 3 reverse 9:69042872-69042894; SpCas9
agagtctgtgcacagtgga

SEQ ID NO: 38612 - DNA, 18 bp, Artificial Sequence
  Synthetic: FXN 3 reverse 9:69042873-69042894; SpCas9
gagtctgtgcacagtgga

SEQ ID NO: 38613 - DNA, 25 bp, Artificial Sequence
  Synthetic: FXN 3 reverse 9:69042867-69042895; SpCas9
tggccccagagtctgtgcacagtgg

SEQ ID NO: 38614 - DNA, 24 bp, Artificial Sequence
  Synthetic: FXN 3 reverse 9:69042868-69042895; SpCas9
ggccccagagtctgtgcacagtgg

SEQ ID NO: 38615 - DNA, 23 bp, Artificial Sequence
  Synthetic: FXN 3 reverse 9:69042869-69042895; SpCas9
gccccagagtctgtgcacagtgg

SEQ ID NO: 38616 - DNA, 22 bp, Artificial Sequence
  Synthetic: FXN 3 reverse 9:69042870-69042895; SpCas9
ccccagagtctgtgcacagtgg

SEQ ID NO: 38617 - DNA, 21 bp, Artificial Sequence
  Synthetic: FXN 3 reverse 9:69042871-69042895; SpCas9
cccagagtctgtgcacagtgg

SEQ ID NO: 38618 - DNA, 20 bp, Artificial Sequence
  Synthetic: FXN 3 reverse 9:69042872-69042895; SpCas9
ccagagtctgtgcacagtgg

SEQ ID NO: 38619 - DNA, 19 bp, Artificial Sequence
  Synthetic: FXN 3 reverse 9:69042873-69042895; SpCas9
cagagtctgtgcacagtgg

SEQ ID NO: 38620 - DNA, 18 bp, Artificial Sequence
  Synthetic: FXN 3 reverse 9:69042874-69042895; SpCas9
agagtctgtgcacagtgg

SEQ ID NO: 38621 - DNA, 25 bp, Artificial Sequence
  Synthetic: FXN 3 forward 9:69042868-69042896; SpCas9
ttccactgtgcacagactctggggc

SEQ ID NO: 38622 - DNA, 24 bp, Artificial Sequence
  Synthetic: FXN 3 forward 9:69042869-69042896; SpCas9
tccactgtgcacagactctggggc

SEQ ID NO: 38623 - DNA, 23 bp, Artificial Sequence
  Synthetic: FXN 3 forward 9:69042870-69042896; SpCas9
ccactgtgcacagactctggggc

SEQ ID NO: 38624 - DNA, 22 bp, Artificial Sequence
  Synthetic: FXN 3 forward 9:69042871-69042896; SpCas9
cactgtgcacagactctggggc

SEQ ID NO: 38625 - DNA, 21 bp, Artificial Sequence
  Synthetic: FXN 3 forward 9:69042872-69042896; SpCas9
actgtgcacagactctggggc

SEQ ID NO: 38626 - DNA, 20 bp, Artificial Sequence
  Synthetic: FXN 3 forward 9:69042873-69042896; SpCas9
ctgtgcacagactctggggc

SEQ ID NO: 38627 - DNA, 19 bp, Artificial Sequence
  Synthetic: FXN 3 forward 9:69042874-69042896; SpCas9
tgtgcacagactctggggc

SEQ ID NO: 38628 - DNA, 18 bp, Artificial Sequence
  Synthetic: FXN 3 forward 9:69042875-69042896; SpCas9
gtgcacagactctggggc

SEQ ID NO: 38629 - DNA, 25 bp, Artificial Sequence
  Synthetic: FXN 3 reverse 9:69042870-69042898; SpCas9
gtctggccccagagtctgtgcacag

SEQ ID NO: 38630 - DNA, 24 bp, Artificial Sequence
  Synthetic: FXN 3 reverse 9:69042871-69042898; SpCas9
tctggccccagagtctgtgcacag

SEQ ID NO: 38631 - DNA, 23 bp, Artificial Sequence
  Synthetic: FXN 3 reverse 9:69042872-69042898; SpCas9
ctggccccagagtctgtgcacag

SEQ ID NO: 38632 - DNA, 22 bp, Artificial Sequence
  Synthetic: FXN 3 reverse 9:69042873-69042898; SpCas9
tggccccagagtctgtgcacag

SEQ ID NO: 38633 - DNA, 21 bp, Artificial Sequence
  Synthetic: FXN 3 reverse 9:69042874-69042898; SpCas9
ggccccagagtctgtgcacag

SEQ ID NO: 38634 - DNA, 20 bp, Artificial Sequence
  Synthetic: FXN 3 reverse 9:69042875-69042898; SpCas9
gccccagagtctgtgcacag

SEQ ID NO: 38635 - DNA, 19 bp, Artificial Sequence
  Synthetic: FXN 3 reverse 9:69042876-69042898; SpCas9
ccccagagtctgtgcacag

SEQ ID NO: 38636 - DNA, 18 bp, Artificial Sequence
  Synthetic: FXN 3 reverse 9:69042877-69042898; SpCas9
cccagagtctgtgcacag

SEQ ID NO: 38637 - DNA, 25 bp, Artificial Sequence
  Synthetic: FXN 3 forward 9:69042872-69042900; SpCas9
actgtgcacagactctggggccaga

SEQ ID NO: 38638 - DNA, 24 bp, Artificial Sequence
  Synthetic: FXN 3 forward 9:69042873-69042900; SpCas9
ctgtgcacagactctggggccaga

SEQ ID NO: 38639 - DNA, 23 bp, Artificial Sequence
  Synthetic: FXN 3 forward 9:69042874-69042900; SpCas9
tgtgcacagactctggggccaga

SEQ ID NO: 38640 - DNA, 22 bp, Artificial Sequence
  Synthetic: FXN 3 forward 9:69042875-69042900; SpCas9
gtgcacagactctggggccaga

SEQ ID NO: 38641 - DNA, 21 bp, Artificial Sequence
  Synthetic: FXN 3 forward 9:69042876-69042900; SpCas9
tgcacagactctggggccaga

SEQ ID NO: 38642 - DNA, 20 bp, Artificial Sequence
  Synthetic: FXN 3 forward 9:69042877-69042900; SpCas9
gcacagactctggggccaga

SEQ ID NO: 38643 - DNA, 19 bp, Artificial Sequence
  Synthetic: FXN 3 forward 9:69042878-69042900; SpCas9
cacagactctggggccaga

SEQ ID NO: 38644 - DNA, 18 bp, Artificial Sequence
  Synthetic: FXN 3 forward 9:69042879-69042900; SpCas9
acagactctggggccaga

SEQ ID NO: 38645 - DNA, 25 bp, Artificial Sequence
  Synthetic: FXN 3 reverse 9:69042873-69042901; SpCas9
gctgtctggccccagagtctgtgca

SEQ ID NO: 38646 - DNA, 24 bp, Artificial Sequence
  Synthetic: FXN 3 reverse 9:69042874-69042901; SpCas9
ctgtctggccccagagtctgtgca

SEQ ID NO: 38647 - DNA, 23 bp, Artificial Sequence
  Synthetic: FXN 3 reverse 9:69042875-69042901; SpCas9
tgtctggccccagagtctgtgca

SEQ ID NO: 38648 - DNA, 22 bp, Artificial Sequence
  Synthetic: FXN 3 reverse 9:69042876-69042901; SpCas9
gtctggccccagagtctgtgca

SEQ ID NO: 38649 - DNA, 21 bp, Artificial Sequence
  Synthetic: FXN 3 reverse 9:69042877-69042901; SpCas9
tctggccccagagtctgtgca

SEQ ID NO: 38650 - DNA, 20 bp, Artificial Sequence
  Synthetic: FXN 3 reverse 9:69042878-69042901; SpCas9
ctggccccagagtctgtgca

SEQ ID NO: 38651 - DNA, 19 bp, Artificial Sequence
  Synthetic: FXN 3 reverse 9:69042879-69042901; SpCas9
tggccccagagtctgtgca

SEQ ID NO: 38652 - DNA, 18 bp, Artificial Sequence
  Synthetic: FXN 3 reverse 9:69042880-69042901; SpCas9
ggccccagagtctgtgca

SEQ ID NO: 38653 - DNA, 25 bp, Artificial Sequence
  Synthetic: FXN 3 forward 9:69042877-69042905; SpCas9
gcacagactctggggccagacagct

SEQ ID NO: 38654 - DNA, 24 bp, Artificial Sequence
  Synthetic: FXN 3 forward 9:69042878-69042905; SpCas9
cacagactctggggccagacagct

SEQ ID NO: 38655 - DNA, 23 bp, Artificial Sequence
  Synthetic: FXN 3 forward 9:69042879-69042905; SpCas9
acagactctggggccagacagct

SEQ ID NO: 38656 - DNA, 22 bp, Artificial Sequence
  Synthetic: FXN 3 forward 9:69042880-69042905; SpCas9
cagactctggggccagacagct

SEQ ID NO: 38657 - DNA, 21 bp, Artificial Sequence
  Synthetic: FXN 3 forward 9:69042881-69042905; SpCas9
agactctggggccagacagct

SEQ ID NO: 38658 - DNA, 20 bp, Artificial Sequence
  Synthetic: FXN 3 forward 9:69042882-69042905; SpCas9
gactctggggccagacagct

SEQ ID NO: 38659 - DNA, 19 bp, Artificial Sequence
  Synthetic: FXN 3 forward 9:69042883-69042905; SpCas9
actctggggccagacagct

SEQ ID NO: 38660 - DNA, 18 bp, Artificial Sequence
  Synthetic: FXN 3 forward 9:69042884-69042905; SpCas9
ctctggggccagacagct

SEQ ID NO: 38661 - DNA, 25 bp, Artificial Sequence
  Synthetic: FXN 3 forward 9:69042878-69042906; SpCas9
cacagactctggggccagacagctt

SEQ ID NO: 38662 - DNA, 24 bp, Artificial Sequence
  Synthetic: FXN 3 forward 9:69042879-69042906; SpCas9
acagactctggggccagacagctt

SEQ ID NO: 38663 - DNA, 23 bp, Artificial Sequence
  Synthetic: FXN 3 forward 9:69042880-69042906; SpCas9
cagactctggggccagacagctt

SEQ ID NO: 38664 - DNA, 22 bp, Artificial Sequence
  Synthetic: FXN 3 forward 9:69042881-69042906; SpCas9
agactctggggccagacagctt

SEQ ID NO: 38665 - DNA, 21 bp, Artificial Sequence
  Synthetic: FXN 3 forward 9:69042882-69042906; SpCas9
gactctggggccagacagctt

SEQ ID NO: 38666 - DNA, 20 bp, Artificial Sequence
  Synthetic: FXN 3 forward 9:69042883-69042906; SpCas9
actctggggccagacagctt

SEQ ID NO: 38667 - DNA, 19 bp, Artificial Sequence
  Synthetic: FXN 3 forward 9:69042884-69042906; SpCas9
ctctggggccagacagctt

SEQ ID NO: 38668 - DNA, 18 bp, Artificial Sequence
  Synthetic: FXN 3 forward 9:69042885-69042906; SpCas9
tctggggccagacagctt

SEQ ID NO: 38669 - DNA, 25 bp, Artificial Sequence
  Synthetic: FXN 3 reverse 9:69042884-69042912; SpCas9
attgaacccaagctgtctggcccca

SEQ ID NO: 38670 - DNA, 24 bp, Artificial Sequence
  Synthetic: FXN 3 reverse 9:69042885-69042912; SpCas9
ttgaacccaagctgtctggcccca

SEQ ID NO: 38671 - DNA, 23 bp, Artificial Sequence
  Synthetic: FXN 3 reverse 9:69042886-69042912; SpCas9
tgaacccaagctgtctggcccca

SEQ ID NO: 38672 - DNA, 22 bp, Artificial Sequence
  Synthetic: FXN 3 reverse 9:69042887-69042912; SpCas9
gaacccaagctgtctggcccca

SEQ ID NO: 38673 - DNA, 21 bp, Artificial Sequence
  Synthetic: FXN 3 reverse 9:69042888-69042912; SpCas9
aacccaagctgtctggcccca

SEQ ID NO: 38674 - DNA, 20 bp, Artificial Sequence
  Synthetic: FXN 3 reverse 9:69042889-69042912; SpCas9
acccaagctgtctggcccca

SEQ ID NO: 38675 - DNA, 19 bp, Artificial Sequence
  Synthetic: FXN 3 reverse 9:69042890-69042912; SpCas9
cccaagctgtctggcccca

SEQ ID NO: 38676 - DNA, 18 bp, Artificial Sequence
  Synthetic: FXN 3 reverse 9:69042891-69042912; SpCas9
ccaagctgtctggcccca

SEQ ID NO: 38677 - DNA, 25 bp, Artificial Sequence
  Synthetic: FXN 3 reverse 9:69042886-69042914; SpCas9
ggattgaacccaagctgtctggccc

SEQ ID NO: 38678 - DNA, 24 bp, Artificial Sequence
  Synthetic: FXN 3 reverse 9:69042887-69042914; SpCas9
gattgaacccaagctgtctggccc

SEQ ID NO: 38679 - DNA, 23 bp, Artificial Sequence
  Synthetic: FXN 3 reverse 9:69042888-69042914; SpCas9
attgaacccaagctgtctggccc

SEQ ID NO: 38680 - DNA, 22 bp, Artificial Sequence
  Synthetic: FXN 3 reverse 9:69042889-69042914; SpCas9
ttgaacccaagctgtctggccc

SEQ ID NO: 38681 - DNA, 21 bp, Artificial Sequence
  Synthetic: FXN 3 reverse 9:69042890-69042914; SpCas9
tgaacccaagctgtctggccc

SEQ ID NO: 38682 - DNA, 20 bp, Artificial Sequence
  Synthetic: FXN 3 reverse 9:69042891-69042914; SpCas9
gaacccaagctgtctggccc

SEQ ID NO: 38683 - DNA, 19 bp, Artificial Sequence
  Synthetic: FXN 3 reverse 9:69042892-69042914; SpCas9
aacccaagctgtctggccc

SEQ ID NO: 38684 - DNA, 18 bp, Artificial Sequence
  Synthetic: FXN 3 reverse 9:69042893-69042914; SpCas9
acccaagctgtctggccc

SEQ ID NO: 38685 - DNA, 25 bp, Artificial Sequence
  Synthetic: FXN 3 forward 9:69042889-69042917; SpCas9
gggccagacagcttgggttcaatcc

SEQ ID NO: 38686 - DNA, 24 bp, Artificial Sequence
  Synthetic: FXN 3 forward 9:69042890-69042917; SpCas9
ggccagacagcttgggttcaatcc

SEQ ID NO: 38687 - DNA, 23 bp, Artificial Sequence
  Synthetic: FXN 3 forward 9:69042891-69042917; SpCas9
gccagacagcttgggttcaatcc

SEQ ID NO: 38688 - DNA, 22 bp, Artificial Sequence
  Synthetic: FXN 3 forward 9:69042892-69042917; SpCas9
ccagacagcttgggttcaatcc

SEQ ID NO: 38689 - DNA, 21 bp, Artificial Sequence
  Synthetic: FXN 3 forward 9:69042893-69042917; SpCas9
cagacagcttgggttcaatcc

SEQ ID NO: 38690 - DNA, 20 bp, Artificial Sequence
  Synthetic: FXN 3 forward 9:69042894-69042917; SpCas9
agacagcttgggttcaatcc

SEQ ID NO: 38691 - DNA, 19 bp, Artificial Sequence
  Synthetic: FXN 3 forward 9:69042895-69042917; SpCas9
gacagcttgggttcaatcc

SEQ ID NO: 38692 - DNA, 18 bp, Artificial Sequence
  Synthetic: FXN 3 forward 9:69042896-69042917; SpCas9
acagcttgggttcaatcc

SEQ ID NO: 38693 - DNA, 25 bp, Artificial Sequence
  Synthetic: FXN 3 reverse 9:69042892-69042920; SpCas9
gagctgggattgaacccaagctgtc

SEQ ID NO: 38694 - DNA, 24 bp, Artificial Sequence
  Synthetic: FXN 3 reverse 9:69042893-69042920; SpCas9
agctgggattgaacccaagctgtc

SEQ ID NO: 38695 - DNA, 23 bp, Artificial Sequence
  Synthetic: FXN 3 reverse 9:69042894-69042920; SpCas9
gctgggattgaacccaagctgtc

SEQ ID NO: 38696 - DNA, 22 bp, Artificial Sequence
  Synthetic: FXN 3 reverse 9:69042895-69042920; SpCas9
ctgggattgaacccaagctgtc

SEQ ID NO: 38697 - DNA, 21 bp, Artificial Sequence
  Synthetic: FXN 3 reverse 9:69042896-69042920; SpCas9
tgggattgaacccaagctgtc

SEQ ID NO: 38698 - DNA, 20 bp, Artificial Sequence
  Synthetic: FXN 3 reverse 9:69042897-69042920; SpCas9
gggattgaacccaagctgtc

SEQ ID NO: 38699 - DNA, 19 bp, Artificial Sequence
  Synthetic: FXN 3 reverse 9:69042898-69042920; SpCas9
ggattgaacccaagctgtc

SEQ ID NO: 38700 - DNA, 18 bp, Artificial Sequence
  Synthetic: FXN 3 reverse 9:69042899-69042920; SpCas9
gattgaacccaagctgtc

SEQ ID NO: 38701 - DNA, 25 bp, Artificial Sequence
  Synthetic: FXN 3 reverse 9:69042900-69042928; SpCas9
aagtggcagagctgggattgaaccc

SEQ ID NO: 38702 - DNA, 24 bp, Artificial Sequence
  Synthetic: FXN 3 reverse 9:69042901-69042928; SpCas9
agtggcagagctgggattgaaccc

SEQ ID NO: 38703 - DNA, 23 bp, Artificial Sequence
  Synthetic: FXN 3 reverse 9:69042902-69042928; SpCas9
gtggcagagctgggattgaaccc

SEQ ID NO: 38704 - DNA, 22 bp, Artificial Sequence
  Synthetic: FXN 3 reverse 9:69042903-69042928; SpCas9
tggcagagctgggattgaaccc

SEQ ID NO: 38705 - DNA, 21 bp, Artificial Sequence
  Synthetic: FXN 3 reverse 9:69042904-69042928; SpCas9
ggcagagctgggattgaaccc

SEQ ID NO: 38706 - DNA, 20 bp, Artificial Sequence
  Synthetic: FXN 3 reverse 9:69042905-69042928; SpCas9
gcagagctgggattgaaccc

SEQ ID NO: 38707 - DNA, 19 bp, Artificial Sequence
  Synthetic: FXN 3 reverse 9:69042906-69042928; SpCas9
cagagctgggattgaaccc

SEQ ID NO: 38708 - DNA, 18 bp, Artificial Sequence
  Synthetic: FXN 3 reverse 9:69042907-69042928; SpCas9
agagctgggattgaaccc

SEQ ID NO: 38709 - DNA, 25 bp, Artificial Sequence
  Synthetic: FXN 3 reverse 9:69042912-69042940; SpCas9
tacacagacattaagtggcagagct

SEQ ID NO: 38710 - DNA, 24 bp, Artificial Sequence
  Synthetic: FXN 3 reverse 9:69042913-69042940; SpCas9
acacagacattaagtggcagagct

SEQ ID NO: 38711 - DNA, 23 bp, Artificial Sequence
  Synthetic: FXN 3 reverse 9:69042914-69042940; SpCas9
cacagacattaagtggcagagct

SEQ ID NO: 38712 - DNA, 22 bp, Artificial Sequence
  Synthetic: FXN 3 reverse 9:69042915-69042940; SpCas9
acagacattaagtggcagagct

SEQ ID NO: 38713 - DNA, 21 bp, Artificial Sequence
  Synthetic: FXN 3 reverse 9:69042916-69042940; SpCas9
cagacattaagtggcagagct

SEQ ID NO: 38714 - DNA, 20 bp, Artificial Sequence
  Synthetic: FXN 3 reverse 9:69042917-69042940; SpCas9
agacattaagtggcagagct

SEQ ID NO: 38715 - DNA, 19 bp, Artificial Sequence
  Synthetic: FXN 3 reverse 9:69042918-69042940; SpCas9
gacattaagtggcagagct

SEQ ID NO: 38716 - DNA, 18 bp, Artificial Sequence
  Synthetic: FXN 3 reverse 9:69042919-69042940; SpCas9
acattaagtggcagagct

SEQ ID NO: 38717 - DNA, 25 bp, Artificial Sequence
  Synthetic: FXN 3 reverse 9:69042913-69042941; SpCas9
atacacagacattaagtggcagagc

SEQ ID NO: 38718 - DNA, 24 bp, Artificial Sequence
  Synthetic: FXN 3 reverse 9:69042914-69042941; SpCas9
tacacagacattaagtggcagagc

SEQ ID NO: 38719 - DNA, 23 bp, Artificial Sequence
  Synthetic: FXN 3 reverse 9:69042915-69042941; SpCas9
acacagacattaagtggcagagc

SEQ ID NO: 38720 - DNA, 22 bp, Artificial Sequence
  Synthetic: FXN 3 reverse 9:69042916-69042941; SpCas9
cacagacattaagtggcagagc

SEQ ID NO: 38721 - DNA, 21 bp, Artificial Sequence
  Synthetic: FXN 3 reverse 9:69042917-69042941; SpCas9
acagacattaagtggcagagc

SEQ ID NO: 38722 - DNA, 20 bp, Artificial Sequence
  Synthetic: FXN 3 reverse 9:69042918-69042941; SpCas9
cagacattaagtggcagagc

SEQ ID NO: 38723 - DNA, 19 bp, Artificial Sequence
  Synthetic: FXN 3 reverse 9:69042919-69042941; SpCas9
agacattaagtggcagagc

SEQ ID NO: 38724 - DNA, 18 bp, Artificial Sequence
  Synthetic: FXN 3 reverse 9:69042920-69042941; SpCas9
gacattaagtggcagagc

SEQ ID NO: 38725 - DNA, 25 bp, Artificial Sequence
  Synthetic: FXN 3 reverse 9:69042917-69042945; SpCas9
acagatacacagacattaagtggca

SEQ ID NO: 38726 - DNA, 24 bp, Artificial Sequence
  Synthetic: FXN 3 reverse 9:69042918-69042945; SpCas9
cagatacacagacattaagtggca

SEQ ID NO: 38727 - DNA, 23 bp, Artificial Sequence
  Synthetic: FXN 3 reverse 9:69042919-69042945; SpCas9
agatacacagacattaagtggca

SEQ ID NO: 38728 - DNA, 22 bp, Artificial Sequence
  Synthetic: FXN 3 reverse 9:69042920-69042945; SpCas9
gatacacagacattaagtggca

SEQ ID NO: 38729 - DNA, 21 bp, Artificial Sequence
  Synthetic: FXN 3 reverse 9:69042921-69042945; SpCas9
atacacagacattaagtggca

SEQ ID NO: 38730 - DNA, 20 bp, Artificial Sequence
  Synthetic: FXN 3 reverse 9:69042922-69042945; SpCas9
tacacagacattaagtggca

SEQ ID NO: 38731 - DNA, 19 bp, Artificial Sequence
  Synthetic: FXN 3 reverse 9:69042923-69042945; SpCas9
acacagacattaagtggca

SEQ ID NO: 38732 - DNA, 18 bp, Artificial Sequence
  Synthetic: FXN 3 reverse 9:69042924-69042945; SpCas9
cacagacattaagtggca

SEQ ID NO: 38733 - DNA, 25 bp, Artificial Sequence
  Synthetic: FXN 3 reverse 9:69042919-69042947; SpCas9
acacagatacacagacattaagtgg

SEQ ID NO: 38734 - DNA, 24 bp, Artificial Sequence
  Synthetic: FXN 3 reverse 9:69042920-69042947; SpCas9
cacagatacacagacattaagtgg

SEQ ID NO: 38735 - DNA, 23 bp, Artificial Sequence
  Synthetic: FXN 3 reverse 9:69042921-69042947; SpCas9
acagatacacagacattaagtgg

SEQ ID NO: 38736 - DNA, 22 bp, Artificial Sequence
  Synthetic: FXN 3 reverse 9:69042922-69042947; SpCas9
cagatacacagacattaagtgg

SEQ ID NO: 38737 - DNA, 21 bp, Artificial Sequence
  Synthetic: FXN 3 reverse 9:69042923-69042947; SpCas9
agatacacagacattaagtgg

SEQ ID NO: 38738 - DNA, 20 bp, Artificial Sequence
  Synthetic: FXN 3 reverse 9:69042924-69042947; SpCas9
gatacacagacattaagtgg

SEQ ID NO: 38739 - DNA, 19 bp, Artificial Sequence
  Synthetic: FXN 3 reverse 9:69042925-69042947; SpCas9
atacacagacattaagtgg

SEQ ID NO: 38740 - DNA, 18 bp, Artificial Sequence
  Synthetic: FXN 3 reverse 9:69042926-69042947; SpCas9
tacacagacattaagtgg

SEQ ID NO: 38741 - DNA, 25 bp, Artificial Sequence
  Synthetic: FXN 3 forward 9:69042921-69042949; SpCas9
gccacttaatgtctgtgtatctgtg

SEQ ID NO: 38742 - DNA, 24 bp, Artificial Sequence
  Synthetic: FXN 3 forward 9:69042922-69042949; SpCas9
ccacttaatgtctgtgtatctgtg

SEQ ID NO: 38743 - DNA, 23 bp, Artificial Sequence
  Synthetic: FXN 3 forward 9:69042923-69042949; SpCas9
cacttaatgtctgtgtatctgtg

SEQ ID NO: 38744 - DNA, 22 bp, Artificial Sequence
  Synthetic: FXN 3 forward 9:69042924-69042949; SpCas9
acttaatgtctgtgtatctgtg

SEQ ID NO: 38745 - DNA, 21 bp, Artificial Sequence
  Synthetic: FXN 3 forward 9:69042925-69042949; SpCas9
cttaatgtctgtgtatctgtg

SEQ ID NO: 38746 - DNA, 20 bp, Artificial Sequence
  Synthetic: FXN 3 forward 9:69042926-69042949; SpCas9
ttaatgtctgtgtatctgtg

SEQ ID NO: 38747 - DNA, 19 bp, Artificial Sequence
  Synthetic: FXN 3 forward 9:69042927-69042949; SpCas9
taatgtctgtgtatctgtg

SEQ ID NO: 38748 - DNA, 18 bp, Artificial Sequence
  Synthetic: FXN 3 forward 9:69042928-69042949; SpCas9
aatgtctgtgtatctgtg

SEQ ID NO: 38749 - DNA, 25 bp, Artificial Sequence
  Synthetic: FXN 3 forward 9:69042922-69042950; SpCas9
ccacttaatgtctgtgtatctgtgt

SEQ ID NO: 38750 - DNA, 24 bp, Artificial Sequence
  Synthetic: FXN 3 forward 9:69042923-69042950; SpCas9
cacttaatgtctgtgtatctgtgt

SEQ ID NO: 38751 - DNA, 23 bp, Artificial Sequence
  Synthetic: FXN 3 forward 9:69042924-69042950; SpCas9
acttaatgtctgtgtatctgtgt

SEQ ID NO: 38752 - DNA, 22 bp, Artificial Sequence
  Synthetic: FXN 3 forward 9:69042925-69042950; SpCas9
cttaatgtctgtgtatctgtgt

SEQ ID NO: 38753 - DNA, 21 bp, Artificial Sequence
  Synthetic: FXN 3 forward 9:69042926-69042950; SpCas9
ttaatgtctgtgtatctgtgt

SEQ ID NO: 38754 - DNA, 20 bp, Artificial Sequence
  Synthetic: FXN 3 forward 9:69042927-69042950; SpCas9
taatgtctgtgtatctgtgt

SEQ ID NO: 38755 - DNA, 19 bp, Artificial Sequence
  Synthetic: FXN 3 forward 9:69042928-69042950; SpCas9
aatgtctgtgtatctgtgt

SEQ ID NO: 38756 - DNA, 18 bp, Artificial Sequence
  Synthetic: FXN 3 forward 9:69042929-69042950; SpCas9
atgtctgtgtatctgtgt

SEQ ID NO: 38757 - DNA, 25 bp, Artificial Sequence
  Synthetic: FXN 3 reverse 9:69042922-69042950; SpCas9
cctacacagatacacagacattaag

SEQ ID NO: 38758 - DNA, 24 bp, Artificial Sequence
  Synthetic: FXN 3 reverse 9:69042923-69042950; SpCas9
ctacacagatacacagacattaag

SEQ ID NO: 38759 - DNA, 23 bp, Artificial Sequence
  Synthetic: FXN 3 reverse 9:69042924-69042950; SpCas9
tacacagatacacagacattaag

SEQ ID NO: 38760 - DNA, 22 bp, Artificial Sequence
  Synthetic: FXN 3 reverse 9:69042925-69042950; SpCas9
acacagatacacagacattaag

SEQ ID NO: 38761 - DNA, 21 bp, Artificial Sequence
  Synthetic: FXN 3 reverse 9:69042926-69042950; SpCas9
cacagatacacagacattaag

SEQ ID NO: 38762 - DNA, 20 bp, Artificial Sequence
  Synthetic: FXN 3 reverse 9:69042927-69042950; SpCas9
acagatacacagacattaag

SEQ ID NO: 38763 - DNA, 19 bp, Artificial Sequence
  Synthetic: FXN 3 reverse 9:69042928-69042950; SpCas9
cagatacacagacattaag

SEQ ID NO: 38764 - DNA, 18 bp, Artificial Sequence
  Synthetic: FXN 3 reverse 9:69042929-69042950; SpCas9
agatacacagacattaag

SEQ ID NO: 38765 - DNA, 25 bp, Artificial Sequence
  Synthetic: FXN 3 reverse 9:69042925-69042953; SpCas9
ttgcctacacagatacacagacatt

SEQ ID NO: 38766 - DNA, 24 bp, Artificial Sequence
  Synthetic: FXN 3 reverse 9:69042926-69042953; SpCas9
tgcctacacagatacacagacatt

SEQ ID NO: 38767 - DNA, 23 bp, Artificial Sequence
  Synthetic: FXN 3 reverse 9:69042927-69042953; SpCas9
gcctacacagatacacagacatt

SEQ ID NO: 38768 - DNA, 22 bp, Artificial Sequence
  Synthetic: FXN 3 reverse 9:69042928-69042953; SpCas9
cctacacagatacacagacatt

SEQ ID NO: 38769 - DNA, 21 bp, Artificial Sequence
  Synthetic: FXN 3 reverse 9:69042929-69042953; SpCas9
ctacacagatacacagacatt

SEQ ID NO: 38770 - DNA, 20 bp, Artificial Sequence
  Synthetic: FXN 3 reverse 9:69042930-69042953; SpCas9
tacacagatacacagacatt

SEQ ID NO: 38771 - DNA, 19 bp, Artificial Sequence
  Synthetic: FXN 3 reverse 9:69042931-69042953; SpCas9
acacagatacacagacatt

SEQ ID NO: 38772 - DNA, 18 bp, Artificial Sequence
  Synthetic: FXN 3 reverse 9:69042932-69042953; SpCas9
cacagatacacagacatt

SEQ ID NO: 38773 - DNA, 25 bp, Artificial Sequence
  Synthetic: FXN 3 forward 9:69042926-69042954; SpCas9
ttaatgtctgtgtatctgtgtaggc

SEQ ID NO: 38774 - DNA, 24 bp, Artificial Sequence
  Synthetic: FXN 3 forward 9:69042927-69042954; SpCas9
taatgtctgtgtatctgtgtaggc

SEQ ID NO: 38775 - DNA, 23 bp, Artificial Sequence
  Synthetic: FXN 3 forward 9:69042928-69042954; SpCas9
aatgtctgtgtatctgtgtaggc

SEQ ID NO: 38776 - DNA, 22 bp, Artificial Sequence
  Synthetic: FXN 3 forward 9:69042929-69042954; SpCas9
atgtctgtgtatctgtgtaggc

SEQ ID NO: 38777 - DNA, 21 bp, Artificial Sequence
  Synthetic: FXN 3 forward 9:69042930-69042954; SpCas9
tgtctgtgtatctgtgtaggc

SEQ ID NO: 38778 - DNA, 20 bp, Artificial Sequence
  Synthetic: FXN 3 forward 9:69042931-69042954; SpCas9
gtctgtgtatctgtgtaggc

SEQ ID NO: 38779 - DNA, 19 bp, Artificial Sequence
  Synthetic: FXN 3 forward 9:69042932-69042954; SpCas9
tctgtgtatctgtgtaggc

SEQ ID NO: 38780 - DNA, 18 bp, Artificial Sequence
  Synthetic: FXN 3 forward 9:69042933-69042954; SpCas9
ctgtgtatctgtgtaggc

SEQ ID NO: 38781 - DNA, 25 bp, Artificial Sequence
  Synthetic: FXN 3 reverse 9:69042933-69042961; SpCas9
agggtaacttgcctacacagataca

SEQ ID NO: 38782 - DNA, 24 bp, Artificial Sequence
  Synthetic: FXN 3 reverse 9:69042934-69042961; SpCas9
gggtaacttgcctacacagataca

SEQ ID NO: 38783 - DNA, 23 bp, Artificial Sequence
  Synthetic: FXN 3 reverse 9:69042935-69042961; SpCas9
ggtaacttgcctacacagataca

SEQ ID NO: 38784 - DNA, 22 bp, Artificial Sequence
  Synthetic: FXN 3 reverse 9:69042936-69042961; SpCas9
gtaacttgcctacacagataca

SEQ ID NO: 38785 - DNA, 21 bp, Artificial Sequence
  Synthetic: FXN 3 reverse 9:69042937-69042961; SpCas9
taacttgcctacacagataca

SEQ ID NO: 38786 - DNA, 20 bp, Artificial Sequence
  Synthetic: FXN 3 reverse 9:69042938-69042961; SpCas9
aacttgcctacacagataca

SEQ ID NO: 38787 - DNA, 19 bp, Artificial Sequence
  Synthetic: FXN 3 reverse 9:69042939-69042961; SpCas9
acttgcctacacagataca

SEQ ID NO: 38788 - DNA, 18 bp, Artificial Sequence
  Synthetic: FXN 3 reverse 9:69042940-69042961; SpCas9
cttgcctacacagataca

SEQ ID NO: 38789 - DNA, 25 bp, Artificial Sequence
  Synthetic: FXN 3 forward 9:69042937-69042965; SpCas9
gtatctgtgtaggcaagttaccctt

SEQ ID NO: 38790 - DNA, 24 bp, Artificial Sequence
  Synthetic: FXN 3 forward 9:69042938-69042965; SpCas9
tatctgtgtaggcaagttaccctt

SEQ ID NO: 38791 - DNA, 23 bp, Artificial Sequence
  Synthetic: FXN 3 forward 9:69042939-69042965; SpCas9
atctgtgtaggcaagttaccctt

SEQ ID NO: 38792 - DNA, 22 bp, Artificial Sequence
  Synthetic: FXN 3 forward 9:69042940-69042965; SpCas9
tctgtgtaggcaagttaccctt

SEQ ID NO: 38793 - DNA, 21 bp, Artificial Sequence
  Synthetic: FXN 3 forward 9:69042941-69042965; SpCas9
ctgtgtaggcaagttaccctt

SEQ ID NO: 38794 - DNA, 20 bp, Artificial Sequence
  Synthetic: FXN 3 forward 9:69042942-69042965; SpCas9
tgtgtaggcaagttaccctt

SEQ ID NO: 38795 - DNA, 19 bp, Artificial Sequence
  Synthetic: FXN 3 forward 9:69042943-69042965; SpCas9
gtgtaggcaagttaccctt

SEQ ID NO: 38796 - DNA, 18 bp, Artificial Sequence
  Synthetic: FXN 3 forward 9:69042944-69042965; SpCas9
tgtaggcaagttaccctt

SEQ ID NO: 38797 - DNA, 25 bp, Artificial Sequence
  Synthetic: FXN 3 reverse 9:69042941-69042969; SpCas9
cgcaccaaagggtaacttgcctaca

SEQ ID NO: 38798 - DNA, 24 bp, Artificial Sequence
  Synthetic: FXN 3 reverse 9:69042942-69042969; SpCas9
gcaccaaagggtaacttgcctaca

SEQ ID NO: 38799 - DNA, 23 bp, Artificial Sequence
  Synthetic: FXN 3 reverse 9:69042943-69042969; SpCas9
caccaaagggtaacttgcctaca

SEQ ID NO: 38800 - DNA, 22 bp, Artificial Sequence
  Synthetic: FXN 3 reverse 9:69042944-69042969; SpCas9
accaaagggtaacttgcctaca

SEQ ID NO: 38801 - DNA, 21 bp, Artificial Sequence
  Synthetic: FXN 3 reverse 9:69042945-69042969; SpCas9
ccaaagggtaacttgcctaca

SEQ ID NO: 38802 - DNA, 20 bp, Artificial Sequence
  Synthetic: FXN 3 reverse 9:69042946-69042969; SpCas9
caaagggtaacttgcctaca

SEQ ID NO: 38803 - DNA, 19 bp, Artificial Sequence
  Synthetic: FXN 3 reverse 9:69042947-69042969; SpCas9
aaagggtaacttgcctaca

SEQ ID NO: 38804 - DNA, 18 bp, Artificial Sequence
  Synthetic: FXN 3 reverse 9:69042948-69042969; SpCas9
aagggtaacttgcctaca

SEQ ID NO: 38805 - DNA, 25 bp, Artificial Sequence
  Synthetic: FXN 3 forward 9:69042945-69042973; SpCas9
gtaggcaagttaccctttggtgcgt

SEQ ID NO: 38806 - DNA, 24 bp, Artificial Sequence
  Synthetic: FXN 3 forward 9:69042946-69042973; SpCas9
taggcaagttaccctttggtgcgt

SEQ ID NO: 38807 - DNA, 23 bp, Artificial Sequence
  Synthetic: FXN 3 forward 9:69042947-69042973; SpCas9
aggcaagttaccctttggtgcgt

SEQ ID NO: 38808 - DNA, 22 bp, Artificial Sequence
  Synthetic: FXN 3 forward 9:69042948-69042973; SpCas9
ggcaagttaccctttggtgcgt

SEQ ID NO: 38809 - DNA, 21 bp, Artificial Sequence
  Synthetic: FXN 3 forward 9:69042949-69042973; SpCas9
gcaagttaccctttggtgcgt

SEQ ID NO: 38810 - DNA, 20 bp, Artificial Sequence
  Synthetic: FXN 3 forward 9:69042950-69042973; SpCas9
caagttaccctttggtgcgt

SEQ ID NO: 38811 - DNA, 19 bp, Artificial Sequence
  Synthetic: FXN 3 forward 9:69042951-69042973; SpCas9
aagttaccctttggtgcgt

SEQ ID NO: 38812 - DNA, 18 bp, Artificial Sequence
  Synthetic: FXN 3 forward 9:69042952-69042973; SpCas9
agttaccctttggtgcgt

SEQ ID NO: 38813 - DNA, 25 bp, Artificial Sequence
  Synthetic: FXN 3 reverse 9:69042957-69042985; SpCas9
cagatgaggaaactgacgcaccaaa

SEQ ID NO: 38814 - DNA, 24 bp, Artificial Sequence
  Synthetic: FXN 3 reverse 9:69042958-69042985; SpCas9
agatgaggaaactgacgcaccaaa

SEQ ID NO: 38815 - DNA, 23 bp, Artificial Sequence
  Synthetic: FXN 3 reverse 9:69042959-69042985; SpCas9
gatgaggaaactgacgcaccaaa

SEQ ID NO: 38816 - DNA, 22 bp, Artificial Sequence
  Synthetic: FXN 3 reverse 9:69042960-69042985; SpCas9
atgaggaaactgacgcaccaaa

SEQ ID NO: 38817 - DNA, 21 bp, Artificial Sequence
  Synthetic: FXN 3 reverse 9:69042961-69042985; SpCas9
tgaggaaactgacgcaccaaa

SEQ ID NO: 38818 - DNA, 20 bp, Artificial Sequence
  Synthetic: FXN 3 reverse 9:69042962-69042985; SpCas9
gaggaaactgacgcaccaaa

SEQ ID NO: 38819 - DNA, 19 bp, Artificial Sequence
  Synthetic: FXN 3 reverse 9:69042963-69042985; SpCas9
aggaaactgacgcaccaaa

SEQ ID NO: 38820 - DNA, 18 bp, Artificial Sequence
  Synthetic: FXN 3 reverse 9:69042964-69042985; SpCas9
ggaaactgacgcaccaaa

SEQ ID NO: 38821 - DNA, 25 bp, Artificial Sequence
  Synthetic: FXN 3 reverse 9:69042958-69042986; SpCas9
acagatgaggaaactgacgcaccaa

SEQ ID NO: 38822 - DNA, 24 bp, Artificial Sequence
  Synthetic: FXN 3 reverse 9:69042959-69042986; SpCas9
cagatgaggaaactgacgcaccaa

SEQ ID NO: 38823 - DNA, 23 bp, Artificial Sequence
  Synthetic: FXN 3 reverse 9:69042960-69042986; SpCas9
agatgaggaaactgacgcaccaa

SEQ ID NO: 38824 - DNA, 22 bp, Artificial Sequence
  Synthetic: FXN 3 reverse 9:69042961-69042986; SpCas9
gatgaggaaactgacgcaccaa

SEQ ID NO: 38825 - DNA, 21 bp, Artificial Sequence
  Synthetic: FXN 3 reverse 9:69042962-69042986; SpCas9
atgaggaaactgacgcaccaa

SEQ ID NO: 38826 - DNA, 20 bp, Artificial Sequence
  Synthetic: FXN 3 reverse 9:69042963-69042986; SpCas9
tgaggaaactgacgcaccaa

SEQ ID NO: 38827 - DNA, 19 bp, Artificial Sequence
  Synthetic: FXN 3 reverse 9:69042964-69042986; SpCas9
gaggaaactgacgcaccaa

SEQ ID NO: 38828 - DNA, 18 bp, Artificial Sequence
  Synthetic: FXN 3 reverse 9:69042965-69042986; SpCas9
aggaaactgacgcaccaa

SEQ ID NO: 38829 - DNA, 25 bp, Artificial Sequence
  Synthetic: FXN 3 reverse 9:69042959-69042987; SpCas9
tacagatgaggaaactgacgcacca

SEQ ID NO: 38830 - DNA, 24 bp, Artificial Sequence
  Synthetic: FXN 3 reverse 9:69042960-69042987; SpCas9
acagatgaggaaactgacgcacca

SEQ ID NO: 38831 - DNA, 23 bp, Artificial Sequence
  Synthetic: FXN 3 reverse 9:69042961-69042987; SpCas9
cagatgaggaaactgacgcacca

SEQ ID NO: 38832 - DNA, 22 bp, Artificial Sequence
  Synthetic: FXN 3 reverse 9:69042962-69042987; SpCas9
agatgaggaaactgacgcacca

SEQ ID NO: 38833 - DNA, 21 bp, Artificial Sequence
  Synthetic: FXN 3 reverse 9:69042963-69042987; SpCas9
gatgaggaaactgacgcacca

SEQ ID NO: 38834 - DNA, 20 bp, Artificial Sequence
  Synthetic: FXN 3 reverse 9:69042964-69042987; SpCas9
atgaggaaactgacgcacca

SEQ ID NO: 38835 - DNA, 19 bp, Artificial Sequence
  Synthetic: FXN 3 reverse 9:69042965-69042987; SpCas9
tgaggaaactgacgcacca

SEQ ID NO: 38836 - DNA, 18 bp, Artificial Sequence
  Synthetic: FXN 3 reverse 9:69042966-69042987; SpCas9
gaggaaactgacgcacca

SEQ ID NO: 38837 - DNA, 25 bp, Artificial Sequence
  Synthetic: FXN 3 forward 9:69042973-69043001; SpCas9
tttcctcatctgtaaaacacaacta

SEQ ID NO: 38838 - DNA, 24 bp, Artificial Sequence
  Synthetic: FXN 3 forward 9:69042974-69043001; SpCas9
ttcctcatctgtaaaacacaacta

SEQ ID NO: 38839 - DNA, 23 bp, Artificial Sequence
  Synthetic: FXN 3 forward 9:69042975-69043001; SpCas9
tcctcatctgtaaaacacaacta

SEQ ID NO: 38840 - DNA, 22 bp, Artificial Sequence
  Synthetic: FXN 3 forward 9:69042976-69043001; SpCas9
cctcatctgtaaaacacaacta

SEQ ID NO: 38841 - DNA, 21 bp, Artificial Sequence
  Synthetic: FXN 3 forward 9:69042977-69043001; SpCas9
ctcatctgtaaaacacaacta

SEQ ID NO: 38842 - DNA, 20 bp, Artificial Sequence
  Synthetic: FXN 3 forward 9:69042978-69043001; SpCas9
tcatctgtaaaacacaacta

SEQ ID NO: 38843 - DNA, 19 bp, Artificial Sequence
  Synthetic: FXN 3 forward 9:69042979-69043001; SpCas9
catctgtaaaacacaacta

SEQ ID NO: 38844 - DNA, 18 bp, Artificial Sequence
  Synthetic: FXN 3 forward 9:69042980-69043001; SpCas9
atctgtaaaacacaacta

SEQ ID NO: 38845 - DNA, 25 bp, Artificial Sequence
  Synthetic: FXN 3 reverse 9:69042976-69043004; SpCas9
caactatagttgtgttttacagatg

SEQ ID NO: 38846 - DNA, 24 bp, Artificial Sequence
  Synthetic: FXN 3 reverse 9:69042977-69043004; SpCas9
aactatagttgtgttttacagatg

SEQ ID NO: 38847 - DNA, 23 bp, Artificial Sequence
  Synthetic: FXN 3 reverse 9:69042978-69043004; SpCas9
actatagttgtgttttacagatg

SEQ ID NO: 38848 - DNA, 22 bp, Artificial Sequence
  Synthetic: FXN 3 reverse 9:69042979-69043004; SpCas9
ctatagttgtgttttacagatg

SEQ ID NO: 38849 - DNA, 21 bp, Artificial Sequence
  Synthetic: FXN 3 reverse 9:69042980-69043004; SpCas9
tatagttgtgttttacagatg

SEQ ID NO: 38850 - DNA, 20 bp, Artificial Sequence
  Synthetic: FXN 3 reverse 9:69042981-69043004; SpCas9
atagttgtgttttacagatg

SEQ ID NO: 38851 - DNA, 19 bp, Artificial Sequence
  Synthetic: FXN 3 reverse 9:69042982-69043004; SpCas9
tagttgtgttttacagatg

SEQ ID NO: 38852 - DNA, 18 bp, Artificial Sequence
  Synthetic: FXN 3 reverse 9:69042983-69043004; SpCas9
agttgtgttttacagatg

SEQ ID NO: 38853 - DNA, 25 bp, Artificial Sequence
  Synthetic: FXN 3 reverse 9:69042977-69043005; SpCas9
tcaactatagttgtgttttacagat

SEQ ID NO: 38854 - DNA, 24 bp, Artificial Sequence
  Synthetic: FXN 3 reverse 9:69042978-69043005; SpCas9
caactatagttgtgttttacagat

SEQ ID NO: 38855 - DNA, 23 bp, Artificial Sequence
  Synthetic: FXN 3 reverse 9:69042979-69043005; SpCas9
aactatagttgtgttttacagat

SEQ ID NO: 38856 - DNA, 22 bp, Artificial Sequence
  Synthetic: FXN 3 reverse 9:69042980-69043005; SpCas9
actatagttgtgttttacagat

SEQ ID NO: 38857 - DNA, 21 bp, Artificial Sequence
  Synthetic: FXN 3 reverse 9:69042981-69043005; SpCas9
ctatagttgtgttttacagat

SEQ ID NO: 38858 - DNA, 20 bp, Artificial Sequence
  Synthetic: FXN 3 reverse 9:69042982-69043005; SpCas9
tatagttgtgttttacagat

SEQ ID NO: 38859 - DNA, 19 bp, Artificial Sequence
  Synthetic: FXN 3 reverse 9:69042983-69043005; SpCas9
atagttgtgttttacagat

SEQ ID NO: 38860 - DNA, 18 bp, Artificial Sequence
  Synthetic: FXN 3 reverse 9:69042984-69043005; SpCas9
tagttgtgttttacagat

SEQ ID NO: 38861 - DNA, 25 bp, Artificial Sequence
  Synthetic: FXN 3 reverse 9:69042982-69043010; SpCas9
gaggatcaactatagttgtgtttta

SEQ ID NO: 38862 - DNA, 24 bp, Artificial Sequence
  Synthetic: FXN 3 reverse 9:69042983-69043010; SpCas9
aggatcaactatagttgtgtttta

SEQ ID NO: 38863 - DNA, 23 bp, Artificial Sequence
  Synthetic: FXN 3 reverse 9:69042984-69043010; SpCas9
ggatcaactatagttgtgtttta

SEQ ID NO: 38864 - DNA, 22 bp, Artificial Sequence
  Synthetic: FXN 3 reverse 9:69042985-69043010; SpCas9
gatcaactatagttgtgtttta

SEQ ID NO: 38865 - DNA, 21 bp, Artificial Sequence
  Synthetic: FXN 3 reverse 9:69042986-69043010; SpCas9
atcaactatagttgtgtttta

SEQ ID NO: 38866 - DNA, 20 bp, Artificial Sequence
  Synthetic: FXN 3 reverse 9:69042987-69043010; SpCas9
tcaactatagttgtgtttta

SEQ ID NO: 38867 - DNA, 19 bp, Artificial Sequence
  Synthetic: FXN 3 reverse 9:69042988-69043010; SpCas9
caactatagttgtgtttta

SEQ ID NO: 38868 - DNA, 18 bp, Artificial Sequence
  Synthetic: FXN 3 reverse 9:69042989-69043010; SpCas9
aactatagttgtgtttta

SEQ ID NO: 38869 - DNA, 25 bp, Artificial Sequence
  Synthetic: FXN 3 forward 9:69042992-69043020; SpCas9
caactatagttgatcctcattcgtt

SEQ ID NO: 38870 - DNA, 24 bp, Artificial Sequence
  Synthetic: FXN 3 forward 9:69042993-69043020; SpCas9
aactatagttgatcctcattcgtt

SEQ ID NO: 38871 - DNA, 23 bp, Artificial Sequence
  Synthetic: FXN 3 forward 9:69042994-69043020; SpCas9
actatagttgatcctcattcgtt

SEQ ID NO: 38872 - DNA, 22 bp, Artificial Sequence
  Synthetic: FXN 3 forward 9:69042995-69043020; SpCas9
ctatagttgatcctcattcgtt

SEQ ID NO: 38873 - DNA, 21 bp, Artificial Sequence
  Synthetic: FXN 3 forward 9:69042996-69043020; SpCas9
tatagttgatcctcattcgtt

SEQ ID NO: 38874 - DNA, 20 bp, Artificial Sequence
  Synthetic: FXN 3 forward 9:69042997-69043020; SpCas9
atagttgatcctcattcgtt

SEQ ID NO: 38875 - DNA, 19 bp, Artificial Sequence
  Synthetic: FXN 3 forward 9:69042998-69043020; SpCas9
tagttgatcctcattcgtt

SEQ ID NO: 38876 - DNA, 18 bp, Artificial Sequence
  Synthetic: FXN 3 forward 9:69042999-69043020; SpCas9
agttgatcctcattcgtt

SEQ ID NO: 38877 - DNA, 25 bp, Artificial Sequence
  Synthetic: FXN 3 forward 9:69042994-69043022; SpCas9
actatagttgatcctcattcgttaa

SEQ ID NO: 38878 - DNA, 24 bp, Artificial Sequence
  Synthetic: FXN 3 forward 9:69042995-69043022; SpCas9
ctatagttgatcctcattcgttaa

SEQ ID NO: 38879 - DNA, 23 bp, Artificial Sequence
  Synthetic: FXN 3 forward 9:69042996-69043022; SpCas9
tatagttgatcctcattcgttaa

SEQ ID NO: 38880 - DNA, 22 bp, Artificial Sequence
  Synthetic: FXN 3 forward 9:69042997-69043022; SpCas9
atagttgatcctcattcgttaa

SEQ ID NO: 38881 - DNA, 21 bp, Artificial Sequence
  Synthetic: FXN 3 forward 9:69042998-69043022; SpCas9
tagttgatcctcattcgttaa

SEQ ID NO: 38882 - DNA, 20 bp, Artificial Sequence
  Synthetic: FXN 3 forward 9:69042999-69043022; SpCas9
agttgatcctcattcgttaa

SEQ ID NO: 38883 - DNA, 19 bp, Artificial Sequence
  Synthetic: FXN 3 forward 9:69043000-69043022; SpCas9
gttgatcctcattcgttaa

SEQ ID NO: 38884 - DNA, 18 bp, Artificial Sequence
  Synthetic: FXN 3 forward 9:69043001-69043022; SpCas9
ttgatcctcattcgttaa

SEQ ID NO: 38885 - DNA, 25 bp, Artificial Sequence
  Synthetic: FXN 3 reverse 9:69042995-69043023; SpCas9
actcttaacgaatgaggatcaacta

SEQ ID NO: 38886 - DNA, 24 bp, Artificial Sequence
  Synthetic: FXN 3 reverse 9:69042996-69043023; SpCas9
ctcttaacgaatgaggatcaacta

SEQ ID NO: 38887 - DNA, 23 bp, Artificial Sequence
  Synthetic: FXN 3 reverse 9:69042997-69043023; SpCas9
tcttaacgaatgaggatcaacta

SEQ ID NO: 38888 - DNA, 22 bp, Artificial Sequence
  Synthetic: FXN 3 reverse 9:69042998-69043023; SpCas9
cttaacgaatgaggatcaacta

SEQ ID NO: 38889 - DNA, 21 bp, Artificial Sequence
  Synthetic: FXN 3 reverse 9:69042999-69043023; SpCas9
ttaacgaatgaggatcaacta

SEQ ID NO: 38890 - DNA, 20 bp, Artificial Sequence
  Synthetic: FXN 3 reverse 9:69043000-69043023; SpCas9
taacgaatgaggatcaacta

SEQ ID NO: 38891 - DNA, 19 bp, Artificial Sequence
  Synthetic: FXN 3 reverse 9:69043001-69043023; SpCas9
aacgaatgaggatcaacta

SEQ ID NO: 38892 - DNA, 18 bp, Artificial Sequence
  Synthetic: FXN 3 reverse 9:69043002-69043023; SpCas9
acgaatgaggatcaacta

SEQ ID NO: 38893 - DNA, 25 bp, Artificial Sequence
  Synthetic: FXN 3 reverse 9:69043006-69043034; SpCas9
aacaagtacagactcttaacgaatg

SEQ ID NO: 38894 - DNA, 24 bp, Artificial Sequence
  Synthetic: FXN 3 reverse 9:69043007-69043034; SpCas9
acaagtacagactcttaacgaatg

SEQ ID NO: 38895 - DNA, 23 bp, Artificial Sequence
  Synthetic: FXN 3 reverse 9:69043008-69043034; SpCas9
caagtacagactcttaacgaatg

SEQ ID NO: 38896 - DNA, 22 bp, Artificial Sequence
  Synthetic: FXN 3 reverse 9:69043009-69043034; SpCas9
aagtacagactcttaacgaatg

SEQ ID NO: 38897 - DNA, 21 bp, Artificial Sequence
  Synthetic: FXN 3 reverse 9:69043010-69043034; SpCas9
agtacagactcttaacgaatg

SEQ ID NO: 38898 - DNA, 20 bp, Artificial Sequence
  Synthetic: FXN 3 reverse 9:69043011-69043034; SpCas9
gtacagactcttaacgaatg

SEQ ID NO: 38899 - DNA, 19 bp, Artificial Sequence
  Synthetic: FXN 3 reverse 9:69043012-69043034; SpCas9
tacagactcttaacgaatg

SEQ ID NO: 38900 - DNA, 18 bp, Artificial Sequence
  Synthetic: FXN 3 reverse 9:69043013-69043034; SpCas9
acagactcttaacgaatg

SEQ ID NO: 38901 - DNA, 25 bp, Artificial Sequence
  Synthetic: FXN 3 reverse 9:69043007-69043035; SpCas9
taacaagtacagactcttaacgaat

SEQ ID NO: 38902 - DNA, 24 bp, Artificial Sequence
  Synthetic: FXN 3 reverse 9:69043008-69043035; SpCas9
aacaagtacagactcttaacgaat

SEQ ID NO: 38903 - DNA, 23 bp, Artificial Sequence
  Synthetic: FXN 3 reverse 9:69043009-69043035; SpCas9
acaagtacagactcttaacgaat

SEQ ID NO: 38904 - DNA, 22 bp, Artificial Sequence
  Synthetic: FXN 3 reverse 9:69043010-69043035; SpCas9
caagtacagactcttaacgaat

SEQ ID NO: 38905 - DNA, 21 bp, Artificial Sequence
  Synthetic: FXN 3 reverse 9:69043011-69043035; SpCas9
aagtacagactcttaacgaat

SEQ ID NO: 38906 - DNA, 20 bp, Artificial Sequence
  Synthetic: FXN 3 reverse 9:69043012-69043035; SpCas9
agtacagactcttaacgaat

SEQ ID NO: 38907 - DNA, 19 bp, Artificial Sequence
  Synthetic: FXN 3 reverse 9:69043013-69043035; SpCas9
gtacagactcttaacgaat

SEQ ID NO: 38908 - DNA, 18 bp, Artificial Sequence
  Synthetic: FXN 3 reverse 9:69043014-69043035; SpCas9
tacagactcttaacgaat

SEQ ID NO: 38909 - DNA, 25 bp, Artificial Sequence
  Synthetic: FXN 3 reverse 9:69043023-69043051; SpCas9
tagcaagtgagcaaattaacaagta

SEQ ID NO: 38910 - DNA, 24 bp, Artificial Sequence
  Synthetic: FXN 3 reverse 9:69043024-69043051; SpCas9
agcaagtgagcaaattaacaagta

SEQ ID NO: 38911 - DNA, 23 bp, Artificial Sequence
  Synthetic: FXN 3 reverse 9:69043025-69043051; SpCas9
gcaagtgagcaaattaacaagta

SEQ ID NO: 38912 - DNA, 22 bp, Artificial Sequence
  Synthetic: FXN 3 reverse 9:69043026-69043051; SpCas9
caagtgagcaaattaacaagta

SEQ ID NO: 38913 - DNA, 21 bp, Artificial Sequence
  Synthetic: FXN 3 reverse 9:69043027-69043051; SpCas9
aagtgagcaaattaacaagta

SEQ ID NO: 38914 - DNA, 20 bp, Artificial Sequence
  Synthetic: FXN 3 reverse 9:69043028-69043051; SpCas9
agtgagcaaattaacaagta

SEQ ID NO: 38915 - DNA, 19 bp, Artificial Sequence
  Synthetic: FXN 3 reverse 9:69043029-69043051; SpCas9
gtgagcaaattaacaagta

SEQ ID NO: 38916 - DNA, 18 bp, Artificial Sequence
  Synthetic: FXN 3 reverse 9:69043030-69043051; SpCas9
tgagcaaattaacaagta

SEQ ID NO: 38917 - DNA, 25 bp, Artificial Sequence
  Synthetic: FXN 3 reverse 9:69043028-69043056; SpCas9
aattttagcaagtgagcaaattaac

SEQ ID NO: 38918 - DNA, 24 bp, Artificial Sequence
  Synthetic: FXN 3 reverse 9:69043029-69043056; SpCas9
attttagcaagtgagcaaattaac

SEQ ID NO: 38919 - DNA, 23 bp, Artificial Sequence
  Synthetic: FXN 3 reverse 9:69043030-69043056; SpCas9
ttttagcaagtgagcaaattaac

SEQ ID NO: 38920 - DNA, 22 bp, Artificial Sequence
  Synthetic: FXN 3 reverse 9:69043031-69043056; SpCas9
tttagcaagtgagcaaattaac

SEQ ID NO: 38921 - DNA, 21 bp, Artificial Sequence
  Synthetic: FXN 3 reverse 9:69043032-69043056; SpCas9
ttagcaagtgagcaaattaac

SEQ ID NO: 38922 - DNA, 20 bp, Artificial Sequence
  Synthetic: FXN 3 reverse 9:69043033-69043056; SpCas9
tagcaagtgagcaaattaac

SEQ ID NO: 38923 - DNA, 19 bp, Artificial Sequence
  Synthetic: FXN 3 reverse 9:69043034-69043056; SpCas9
agcaagtgagcaaattaac

SEQ ID NO: 38924 - DNA, 18 bp, Artificial Sequence
  Synthetic: FXN 3 reverse 9:69043035-69043056; SpCas9
gcaagtgagcaaattaac

SEQ ID NO: 38925 - DNA, 25 bp, Artificial Sequence
  Synthetic: FXN 3 reverse 9:69043040-69043068; SpCas9
tttggggtaacaaattttagcaagt

SEQ ID NO: 38926 - DNA, 24 bp, Artificial Sequence
  Synthetic: FXN 3 reverse 9:69043041-69043068; SpCas9
ttggggtaacaaattttagcaagt

SEQ ID NO: 38927 - DNA, 23 bp, Artificial Sequence
  Synthetic: FXN 3 reverse 9:69043042-69043068; SpCas9
tggggtaacaaattttagcaagt

SEQ ID NO: 38928 - DNA, 22 bp, Artificial Sequence
  Synthetic: FXN 3 reverse 9:69043043-69043068; SpCas9
ggggtaacaaattttagcaagt

SEQ ID NO: 38929 - DNA, 21 bp, Artificial Sequence
  Synthetic: FXN 3 reverse 9:69043044-69043068; SpCas9
gggtaacaaattttagcaagt

SEQ ID NO: 38930 - DNA, 20 bp, Artificial Sequence
  Synthetic: FXN 3 reverse 9:69043045-69043068; SpCas9
ggtaacaaattttagcaagt

SEQ ID NO: 38931 - DNA, 19 bp, Artificial Sequence
  Synthetic: FXN 3 reverse 9:69043046-69043068; SpCas9
gtaacaaattttagcaagt

SEQ ID NO: 38932 - DNA, 18 bp, Artificial Sequence
  Synthetic: FXN 3 reverse 9:69043047-69043068; SpCas9
taacaaattttagcaagt

SEQ ID NO: 38933 - DNA, 25 bp, Artificial Sequence
  Synthetic: FXN 3 reverse 9:69043044-69043072; SpCas9
tgattttggggtaacaaattttagc

SEQ ID NO: 38934 - DNA, 24 bp, Artificial Sequence
  Synthetic: FXN 3 reverse 9:69043045-69043072; SpCas9
gattttggggtaacaaattttagc

SEQ ID NO: 38935 - DNA, 23 bp, Artificial Sequence
  Synthetic: FXN 3 reverse 9:69043046-69043072; SpCas9
attttggggtaacaaattttagc

SEQ ID NO: 38936 - DNA, 22 bp, Artificial Sequence
  Synthetic: FXN 3 reverse 9:69043047-69043072; SpCas9
ttttggggtaacaaattttagc

SEQ ID NO: 38937 - DNA, 21 bp, Artificial Sequence
  Synthetic: FXN 3 reverse 9:69043048-69043072; SpCas9
tttggggtaacaaattttagc

SEQ ID NO: 38938 - DNA, 20 bp, Artificial Sequence
  Synthetic: FXN 3 reverse 9:69043049-69043072; SpCas9
ttggggtaacaaattttagc

SEQ ID NO: 38939 - DNA, 19 bp, Artificial Sequence
  Synthetic: FXN 3 reverse 9:69043050-69043072; SpCas9
tggggtaacaaattttagc

SEQ ID NO: 38940 - DNA, 18 bp, Artificial Sequence
  Synthetic: FXN 3 reverse 9:69043051-69043072; SpCas9
ggggtaacaaattttagc

SEQ ID NO: 38941 - DNA, 25 bp, Artificial Sequence
  Synthetic: FXN 3 forward 9:69043045-69043073; SpCas9
ttgctaaaatttgttaccccaaaat

SEQ ID NO: 38942 - DNA, 24 bp, Artificial Sequence
  Synthetic: FXN 3 forward 9:69043046-69043073; SpCas9
tgctaaaatttgttaccccaaaat

SEQ ID NO: 38943 - DNA, 23 bp, Artificial Sequence
  Synthetic: FXN 3 forward 9:69043047-69043073; SpCas9
gctaaaatttgttaccccaaaat

SEQ ID NO: 38944 - DNA, 22 bp, Artificial Sequence
  Synthetic: FXN 3 forward 9:69043048-69043073; SpCas9
ctaaaatttgttaccccaaaat

SEQ ID NO: 38945 - DNA, 21 bp, Artificial Sequence
  Synthetic: FXN 3 forward 9:69043049-69043073; SpCas9
taaaatttgttaccccaaaat

SEQ ID NO: 38946 - DNA, 20 bp, Artificial Sequence
  Synthetic: FXN 3 forward 9:69043050-69043073; SpCas9
aaaatttgttaccccaaaat

SEQ ID NO: 38947 - DNA, 19 bp, Artificial Sequence
  Synthetic: FXN 3 forward 9:69043051-69043073; SpCas9
aaatttgttaccccaaaat

SEQ ID NO: 38948 - DNA, 18 bp, Artificial Sequence
  Synthetic: FXN 3 forward 9:69043052-69043073; SpCas9
aatttgttaccccaaaat

SEQ ID NO: 38949 - DNA, 25 bp, Artificial Sequence
  Synthetic: FXN 3 reverse 9:69043048-69043076; SpCas9
gtactgattttggggtaacaaattt

SEQ ID NO: 38950 - DNA, 24 bp, Artificial Sequence
  Synthetic: FXN 3 reverse 9:69043049-69043076; SpCas9
tactgattttggggtaacaaattt

SEQ ID NO: 38951 - DNA, 23 bp, Artificial Sequence
  Synthetic: FXN 3 reverse 9:69043050-69043076; SpCas9
actgattttggggtaacaaattt

SEQ ID NO: 38952 - DNA, 22 bp, Artificial Sequence
  Synthetic: FXN 3 reverse 9:69043051-69043076; SpCas9
ctgattttggggtaacaaattt

SEQ ID NO: 38953 - DNA, 21 bp, Artificial Sequence
  Synthetic: FXN 3 reverse 9:69043052-69043076; SpCas9
tgattttggggtaacaaattt

SEQ ID NO: 38954 - DNA, 20 bp, Artificial Sequence
  Synthetic: FXN 3 reverse 9:69043053-69043076; SpCas9
gattttggggtaacaaattt

SEQ ID NO: 38955 - DNA, 19 bp, Artificial Sequence
  Synthetic: FXN 3 reverse 9:69043054-69043076; SpCas9
attttggggtaacaaattt

SEQ ID NO: 38956 - DNA, 18 bp, Artificial Sequence
  Synthetic: FXN 3 reverse 9:69043055-69043076; SpCas9
ttttggggtaacaaattt

SEQ ID NO: 38957 - DNA, 25 bp, Artificial Sequence
  Synthetic: FXN 3 forward 9:69043054-69043082; SpCas9
tttgttaccccaaaatcagtacccc

SEQ ID NO: 38958 - DNA, 24 bp, Artificial Sequence
  Synthetic: FXN 3 forward 9:69043055-69043082; SpCas9
ttgttaccccaaaatcagtacccc

SEQ ID NO: 38959 - DNA, 23 bp, Artificial Sequence
  Synthetic: FXN 3 forward 9:69043056-69043082; SpCas9
tgttaccccaaaatcagtacccc

SEQ ID NO: 38960 - DNA, 22 bp, Artificial Sequence
  Synthetic: FXN 3 forward 9:69043057-69043082; SpCas9
gttaccccaaaatcagtacccc

SEQ ID NO: 38961 - DNA, 21 bp, Artificial Sequence
  Synthetic: FXN 3 forward 9:69043058-69043082; SpCas9
ttaccccaaaatcagtacccc

SEQ ID NO: 38962 - DNA, 20 bp, Artificial Sequence
  Synthetic: FXN 3 forward 9:69043059-69043082; SpCas9
taccccaaaatcagtacccc

SEQ ID NO: 38963 - DNA, 19 bp, Artificial Sequence
  Synthetic: FXN 3 forward 9:69043060-69043082; SpCas9
accccaaaatcagtacccc

SEQ ID NO: 38964 - DNA, 18 bp, Artificial Sequence
  Synthetic: FXN 3 forward 9:69043061-69043082; SpCas9
ccccaaaatcagtacccc

SEQ ID NO: 38965 - DNA, 25 bp, Artificial Sequence
  Synthetic: FXN 3 reverse 9:69043061-69043089; SpCas9
caaaaggctaggggtactgattttg

SEQ ID NO: 38966 - DNA, 24 bp, Artificial Sequence
  Synthetic: FXN 3 reverse 9:69043062-69043089; SpCas9
aaaaggctaggggtactgattttg

SEQ ID NO: 38967 - DNA, 23 bp, Artificial Sequence
  Synthetic: FXN 3 reverse 9:69043063-69043089; SpCas9
aaaggctaggggtactgattttg

SEQ ID NO: 38968 - DNA, 22 bp, Artificial Sequence
  Synthetic: FXN 3 reverse 9:69043064-69043089; SpCas9
aaggctaggggtactgattttg

SEQ ID NO: 38969 - DNA, 21 bp, Artificial Sequence
  Synthetic: FXN 3 reverse 9:69043065-69043089; SpCas9
aggctaggggtactgattttg

SEQ ID NO: 38970 - DNA, 20 bp, Artificial Sequence
  Synthetic: FXN 3 reverse 9:69043066-69043089; SpCas9
ggctaggggtactgattttg

SEQ ID NO: 38971 - DNA, 19 bp, Artificial Sequence
  Synthetic: FXN 3 reverse 9:69043067-69043089; SpCas9
gctaggggtactgattttg

SEQ ID NO: 38972 - DNA, 18 bp, Artificial Sequence
  Synthetic: FXN 3 reverse 9:69043068-69043089; SpCas9
ctaggggtactgattttg

SEQ ID NO: 38973 - DNA, 25 bp, Artificial Sequence
  Synthetic: FXN 3 forward 9:69043062-69043090; SpCas9
cccaaaatcagtacccctagccttt

SEQ ID NO: 38974 - DNA, 24 bp, Artificial Sequence
  Synthetic: FXN 3 forward 9:69043063-69043090; SpCas9
ccaaaatcagtacccctagccttt

SEQ ID NO: 38975 - DNA, 23 bp, Artificial Sequence
  Synthetic: FXN 3 forward 9:69043064-69043090; SpCas9
caaaatcagtacccctagccttt

SEQ ID NO: 38976 - DNA, 22 bp, Artificial Sequence
  Synthetic: FXN 3 forward 9:69043065-69043090; SpCas9
aaaatcagtacccctagccttt

SEQ ID NO: 38977 - DNA, 21 bp, Artificial Sequence
  Synthetic: FXN 3 forward 9:69043066-69043090; SpCas9
aaatcagtacccctagccttt

SEQ ID NO: 38978 - DNA, 20 bp, Artificial Sequence
  Synthetic: FXN 3 forward 9:69043067-69043090; SpCas9
aatcagtacccctagccttt

SEQ ID NO: 38979 - DNA, 19 bp, Artificial Sequence
  Synthetic: FXN 3 forward 9:69043068-69043090; SpCas9
atcagtacccctagccttt

SEQ ID NO: 38980 - DNA, 18 bp, Artificial Sequence
  Synthetic: FXN 3 forward 9:69043069-69043090; SpCas9
tcagtacccctagccttt

SEQ ID NO: 38981 - DNA, 25 bp, Artificial Sequence
  Synthetic: FXN 3 reverse 9:69043062-69043090; SpCas9
ccaaaaggctaggggtactgatttt

SEQ ID NO: 38982 - DNA, 24 bp, Artificial Sequence
  Synthetic: FXN 3 reverse 9:69043063-69043090; SpCas9
caaaaggctaggggtactgatttt

SEQ ID NO: 38983 - DNA, 23 bp, Artificial Sequence
  Synthetic: FXN 3 reverse 9:69043064-69043090; SpCas9
aaaaggctaggggtactgatttt

SEQ ID NO: 38984 - DNA, 22 bp, Artificial Sequence
  Synthetic: FXN 3 reverse 9:69043065-69043090; SpCas9
aaaggctaggggtactgatttt

SEQ ID NO: 38985 - DNA, 21 bp, Artificial Sequence
  Synthetic: FXN 3 reverse 9:69043066-69043090; SpCas9
aaggctaggggtactgatttt

SEQ ID NO: 38986 - DNA, 20 bp, Artificial Sequence
  Synthetic: FXN 3 reverse 9:69043067-69043090; SpCas9
aggctaggggtactgatttt

SEQ ID NO: 38987 - DNA, 19 bp, Artificial Sequence
  Synthetic: FXN 3 reverse 9:69043068-69043090; SpCas9
ggctaggggtactgatttt

SEQ ID NO: 38988 - DNA, 18 bp, Artificial Sequence
  Synthetic: FXN 3 reverse 9:69043069-69043090; SpCas9
gctaggggtactgatttt

SEQ ID NO: 38989 - DNA, 25 bp, Artificial Sequence
  Synthetic: FXN 3 forward 9:69043063-69043091; SpCas9
ccaaaatcagtacccctagcctttt

SEQ ID NO: 38990 - DNA, 24 bp, Artificial Sequence
  Synthetic: FXN 3 forward 9:69043064-69043091; SpCas9
caaaatcagtacccctagcctttt

SEQ ID NO: 38991 - DNA, 23 bp, Artificial Sequence
  Synthetic: FXN 3 forward 9:69043065-69043091; SpCas9
aaaatcagtacccctagcctttt

SEQ ID NO: 38992 - DNA, 22 bp, Artificial Sequence
  Synthetic: FXN 3 forward 9:69043066-69043091; SpCas9
aaatcagtacccctagcctttt

SEQ ID NO: 38993 - DNA, 21 bp, Artificial Sequence
  Synthetic: FXN 3 forward 9:69043067-69043091; SpCas9
aatcagtacccctagcctttt

SEQ ID NO: 38994 - DNA, 20 bp, Artificial Sequence
  Synthetic: FXN 3 forward 9:69043068-69043091; SpCas9
atcagtacccctagcctttt

SEQ ID NO: 38995 - DNA, 19 bp, Artificial Sequence
  Synthetic: FXN 3 forward 9:69043069-69043091; SpCas9
tcagtacccctagcctttt

SEQ ID NO: 38996 - DNA, 18 bp, Artificial Sequence
  Synthetic: FXN 3 forward 9:69043070-69043091; SpCas9
cagtacccctagcctttt

SEQ ID NO: 38997 - DNA, 25 bp, Artificial Sequence
  Synthetic: FXN 3 reverse 9:69043063-69043091; SpCas9
cccaaaaggctaggggtactgattt

SEQ ID NO: 38998 - DNA, 24 bp, Artificial Sequence
  Synthetic: FXN 3 reverse 9:69043064-69043091; SpCas9
ccaaaaggctaggggtactgattt

SEQ ID NO: 38999 - DNA, 23 bp, Artificial Sequence
  Synthetic: FXN 3 reverse 9:69043065-69043091; SpCas9
caaaaggctaggggtactgattt

SEQ ID NO: 39000 - DNA, 22 bp, Artificial Sequence
  Synthetic: FXN 3 reverse 9:69043066-69043091; SpCas9
aaaaggctaggggtactgattt

SEQ ID NO: 39001 - DNA, 21 bp, Artificial Sequence
  Synthetic: FXN 3 reverse 9:69043067-69043091; SpCas9
aaaggctaggggtactgattt

SEQ ID NO: 39002 - DNA, 20 bp, Artificial Sequence
  Synthetic: FXN 3 reverse 9:69043068-69043091; SpCas9
aaggctaggggtactgattt

SEQ ID NO: 39003 - DNA, 19 bp, Artificial Sequence
  Synthetic: FXN 3 reverse 9:69043069-69043091; SpCas9
aggctaggggtactgattt

SEQ ID NO: 39004 - DNA, 18 bp, Artificial Sequence
  Synthetic: FXN 3 reverse 9:69043070-69043091; SpCas9
ggctaggggtactgattt

SEQ ID NO: 39005 - DNA, 25 bp, Artificial Sequence
  Synthetic: FXN 3 forward 9:69043064-69043092; SpCas9
caaaatcagtacccctagccttttg

SEQ ID NO: 39006 - DNA, 24 bp, Artificial Sequence
  Synthetic: FXN 3 forward 9:69043065-69043092; SpCas9
aaaatcagtacccctagccttttg

SEQ ID NO: 39007 - DNA, 23 bp, Artificial Sequence
  Synthetic: FXN 3 forward 9:69043066-69043092; SpCas9
aaatcagtacccctagccttttg

SEQ ID NO: 39008 - DNA, 22 bp, Artificial Sequence
  Synthetic: FXN 3 forward 9:69043067-69043092; SpCas9
aatcagtacccctagccttttg

SEQ ID NO: 39009 - DNA, 21 bp, Artificial Sequence
  Synthetic: FXN 3 forward 9:69043068-69043092; SpCas9
atcagtacccctagccttttg

SEQ ID NO: 39010 - DNA, 20 bp, Artificial Sequence
  Synthetic: FXN 3 forward 9:69043069-69043092; SpCas9
tcagtacccctagccttttg

SEQ ID NO: 39011 - DNA, 19 bp, Artificial Sequence
  Synthetic: FXN 3 forward 9:69043070-69043092; SpCas9
cagtacccctagccttttg

SEQ ID NO: 39012 - DNA, 18 bp, Artificial Sequence
  Synthetic: FXN 3 forward 9:69043071-69043092; SpCas9
agtacccctagccttttg

SEQ ID NO: 39013 - DNA, 25 bp, Artificial Sequence
  Synthetic: FXN 3 forward 9:69043075-69043103; SpCas9
cccctagccttttggggtcgtttca

SEQ ID NO: 39014 - DNA, 24 bp, Artificial Sequence
  Synthetic: FXN 3 forward 9:69043076-69043103; SpCas9
ccctagccttttggggtcgtttca

SEQ ID NO: 39015 - DNA, 23 bp, Artificial Sequence
  Synthetic: FXN 3 forward 9:69043077-69043103; SpCas9
cctagccttttggggtcgtttca

SEQ ID NO: 39016 - DNA, 22 bp, Artificial Sequence
  Synthetic: FXN 3 forward 9:69043078-69043103; SpCas9
ctagccttttggggtcgtttca

SEQ ID NO: 39017 - DNA, 21 bp, Artificial Sequence
  Synthetic: FXN 3 forward 9:69043079-69043103; SpCas9
tagccttttggggtcgtttca

SEQ ID NO: 39018 - DNA, 20 bp, Artificial Sequence
  Synthetic: FXN 3 forward 9:69043080-69043103; SpCas9
agccttttggggtcgtttca

SEQ ID NO: 39019 - DNA, 19 bp, Artificial Sequence
  Synthetic: FXN 3 forward 9:69043081-69043103; SpCas9
gccttttggggtcgtttca

SEQ ID NO: 39020 - DNA, 18 bp, Artificial Sequence
  Synthetic: FXN 3 forward 9:69043082-69043103; SpCas9
ccttttggggtcgtttca

SEQ ID NO: 39021 - DNA, 25 bp, Artificial Sequence
  Synthetic: FXN 3 reverse 9:69043075-69043103; SpCas9
ctttgaaacgaccccaaaaggctag

SEQ ID NO: 39022 - DNA, 24 bp, Artificial Sequence
  Synthetic: FXN 3 reverse 9:69043076-69043103; SpCas9
tttgaaacgaccccaaaaggctag

SEQ ID NO: 39023 - DNA, 23 bp, Artificial Sequence
  Synthetic: FXN 3 reverse 9:69043077-69043103; SpCas9
ttgaaacgaccccaaaaggctag

SEQ ID NO: 39024 - DNA, 22 bp, Artificial Sequence
  Synthetic: FXN 3 reverse 9:69043078-69043103; SpCas9
tgaaacgaccccaaaaggctag

SEQ ID NO: 39025 - DNA, 21 bp, Artificial Sequence
  Synthetic: FXN 3 reverse 9:69043079-69043103; SpCas9
gaaacgaccccaaaaggctag

SEQ ID NO: 39026 - DNA, 20 bp, Artificial Sequence
  Synthetic: FXN 3 reverse 9:69043080-69043103; SpCas9
aaacgaccccaaaaggctag

SEQ ID NO: 39027 - DNA, 19 bp, Artificial Sequence
  Synthetic: FXN 3 reverse 9:69043081-69043103; SpCas9
aacgaccccaaaaggctag

SEQ ID NO: 39028 - DNA, 18 bp, Artificial Sequence
  Synthetic: FXN 3 reverse 9:69043082-69043103; SpCas9
acgaccccaaaaggctag

SEQ ID NO: 39029 - DNA, 25 bp, Artificial Sequence
  Synthetic: FXN 3 reverse 9:69043076-69043104; SpCas9
tctttgaaacgaccccaaaaggcta

SEQ ID NO: 39030 - DNA, 24 bp, Artificial Sequence
  Synthetic: FXN 3 reverse 9:69043077-69043104; SpCas9
ctttgaaacgaccccaaaaggcta

SEQ ID NO: 39031 - DNA, 23 bp, Artificial Sequence
  Synthetic: FXN 3 reverse 9:69043078-69043104; SpCas9
tttgaaacgaccccaaaaggcta

SEQ ID NO: 39032 - DNA, 22 bp, Artificial Sequence
  Synthetic: FXN 3 reverse 9:69043079-69043104; SpCas9
ttgaaacgaccccaaaaggcta

SEQ ID NO: 39033 - DNA, 21 bp, Artificial Sequence
  Synthetic: FXN 3 reverse 9:69043080-69043104; SpCas9
tgaaacgaccccaaaaggcta

SEQ ID NO: 39034 - DNA, 20 bp, Artificial Sequence
  Synthetic: FXN 3 reverse 9:69043081-69043104; SpCas9
gaaacgaccccaaaaggcta

SEQ ID NO: 39035 - DNA, 19 bp, Artificial Sequence
  Synthetic: FXN 3 reverse 9:69043082-69043104; SpCas9
aaacgaccccaaaaggcta

SEQ ID NO: 39036 - DNA, 18 bp, Artificial Sequence
  Synthetic: FXN 3 reverse 9:69043083-69043104; SpCas9
aacgaccccaaaaggcta

SEQ ID NO: 39037 - DNA, 25 bp, Artificial Sequence
  Synthetic: FXN 3 reverse 9:69043077-69043105; SpCas9
atctttgaaacgaccccaaaaggct

SEQ ID NO: 39038 - DNA, 24 bp, Artificial Sequence
  Synthetic: FXN 3 reverse 9:69043078-69043105; SpCas9
tctttgaaacgaccccaaaaggct

SEQ ID NO: 39039 - DNA, 23 bp, Artificial Sequence
  Synthetic: FXN 3 reverse 9:69043079-69043105; SpCas9
ctttgaaacgaccccaaaaggct

SEQ ID NO: 39040 - DNA, 22 bp, Artificial Sequence
  Synthetic: FXN 3 reverse 9:69043080-69043105; SpCas9
tttgaaacgaccccaaaaggct

SEQ ID NO: 39041 - DNA, 21 bp, Artificial Sequence
  Synthetic: FXN 3 reverse 9:69043081-69043105; SpCas9
ttgaaacgaccccaaaaggct

SEQ ID NO: 39042 - DNA, 20 bp, Artificial Sequence
  Synthetic: FXN 3 reverse 9:69043082-69043105; SpCas9
tgaaacgaccccaaaaggct

SEQ ID NO: 39043 - DNA, 19 bp, Artificial Sequence
  Synthetic: FXN 3 reverse 9:69043083-69043105; SpCas9
gaaacgaccccaaaaggct

SEQ ID NO: 39044 - DNA, 18 bp, Artificial Sequence
  Synthetic: FXN 3 reverse 9:69043084-69043105; SpCas9
aaacgaccccaaaaggct

SEQ ID NO: 39045 - DNA, 25 bp, Artificial Sequence
  Synthetic: FXN 3 reverse 9:69043078-69043106; SpCas9
catctttgaaacgaccccaaaaggc

SEQ ID NO: 39046 - DNA, 24 bp, Artificial Sequence
  Synthetic: FXN 3 reverse 9:69043079-69043106; SpCas9
atctttgaaacgaccccaaaaggc

SEQ ID NO: 39047 - DNA, 23 bp, Artificial Sequence
  Synthetic: FXN 3 reverse 9:69043080-69043106; SpCas9
tctttgaaacgaccccaaaaggc

SEQ ID NO: 39048 - DNA, 22 bp, Artificial Sequence
  Synthetic: FXN 3 reverse 9:69043081-69043106; SpCas9
ctttgaaacgaccccaaaaggc

SEQ ID NO: 39049 - DNA, 21 bp, Artificial Sequence
  Synthetic: FXN 3 reverse 9:69043082-69043106; SpCas9
tttgaaacgaccccaaaaggc

SEQ ID NO: 39050 - DNA, 20 bp, Artificial Sequence
  Synthetic: FXN 3 reverse 9:69043083-69043106; SpCas9
ttgaaacgaccccaaaaggc

SEQ ID NO: 39051 - DNA, 19 bp, Artificial Sequence
  Synthetic: FXN 3 reverse 9:69043084-69043106; SpCas9
tgaaacgaccccaaaaggc

SEQ ID NO: 39052 - DNA, 18 bp, Artificial Sequence
  Synthetic: FXN 3 reverse 9:69043085-69043106; SpCas9
gaaacgaccccaaaaggc

SEQ ID NO: 39053 - DNA, 25 bp, Artificial Sequence
  Synthetic: FXN 3 reverse 9:69043082-69043110; SpCas9
cacacatctttgaaacgaccccaaa

SEQ ID NO: 39054 - DNA, 24 bp, Artificial Sequence
  Synthetic: FXN 3 reverse 9:69043083-69043110; SpCas9
acacatctttgaaacgaccccaaa

SEQ ID NO: 39055 - DNA, 23 bp, Artificial Sequence
  Synthetic: FXN 3 reverse 9:69043084-69043110; SpCas9
cacatctttgaaacgaccccaaa

SEQ ID NO: 39056 - DNA, 22 bp, Artificial Sequence
  Synthetic: FXN 3 reverse 9:69043085-69043110; SpCas9
acatctttgaaacgaccccaaa

SEQ ID NO: 39057 - DNA, 21 bp, Artificial Sequence
  Synthetic: FXN 3 reverse 9:69043086-69043110; SpCas9
catctttgaaacgaccccaaa

SEQ ID NO: 39058 - DNA, 20 bp, Artificial Sequence
  Synthetic: FXN 3 reverse 9:69043087-69043110; SpCas9
atctttgaaacgaccccaaa

SEQ ID NO: 39059 - DNA, 19 bp, Artificial Sequence
  Synthetic: FXN 3 reverse 9:69043088-69043110; SpCas9
tctttgaaacgaccccaaa

SEQ ID NO: 39060 - DNA, 18 bp, Artificial Sequence
  Synthetic: FXN 3 reverse 9:69043089-69043110; SpCas9
ctttgaaacgaccccaaa

SEQ ID NO: 39061 - DNA, 25 bp, Artificial Sequence
  Synthetic: FXN 3 reverse 9:69043083-69043111; SpCas9
gcacacatctttgaaacgaccccaa

SEQ ID NO: 39062 - DNA, 24 bp, Artificial Sequence
  Synthetic: FXN 3 reverse 9:69043084-69043111; SpCas9
cacacatctttgaaacgaccccaa

SEQ ID NO: 39063 - DNA, 23 bp, Artificial Sequence
  Synthetic: FXN 3 reverse 9:69043085-69043111; SpCas9
acacatctttgaaacgaccccaa

SEQ ID NO: 39064 - DNA, 22 bp, Artificial Sequence
  Synthetic: FXN 3 reverse 9:69043086-69043111; SpCas9
cacatctttgaaacgaccccaa

SEQ ID NO: 39065 - DNA, 21 bp, Artificial Sequence
  Synthetic: FXN 3 reverse 9:69043087-69043111; SpCas9
acatctttgaaacgaccccaa

SEQ ID NO: 39066 - DNA, 20 bp, Artificial Sequence
  Synthetic: FXN 3 reverse 9:69043088-69043111; SpCas9
catctttgaaacgaccccaa

SEQ ID NO: 39067 - DNA, 19 bp, Artificial Sequence
  Synthetic: FXN 3 reverse 9:69043089-69043111; SpCas9
atctttgaaacgaccccaa

SEQ ID NO: 39068 - DNA, 18 bp, Artificial Sequence
  Synthetic: FXN 3 reverse 9:69043090-69043111; SpCas9
tctttgaaacgaccccaa

SEQ ID NO: 39069 - DNA, 25 bp, Artificial Sequence
  Synthetic: FXN 3 forward 9:69043085-69043113; SpCas9
tttggggtcgtttcaaagatgtgtg

SEQ ID NO: 39070 - DNA, 24 bp, Artificial Sequence
  Synthetic: FXN 3 forward 9:69043086-69043113; SpCas9
ttggggtcgtttcaaagatgtgtg

SEQ ID NO: 39071 - DNA, 23 bp, Artificial Sequence
  Synthetic: FXN 3 forward 9:69043087-69043113; SpCas9
tggggtcgtttcaaagatgtgtg

SEQ ID NO: 39072 - DNA, 22 bp, Artificial Sequence
  Synthetic: FXN 3 forward 9:69043088-69043113; SpCas9
ggggtcgtttcaaagatgtgtg

SEQ ID NO: 39073 - DNA, 21 bp, Artificial Sequence
  Synthetic: FXN 3 forward 9:69043089-69043113; SpCas9
gggtcgtttcaaagatgtgtg

SEQ ID NO: 39074 - DNA, 20 bp, Artificial Sequence
  Synthetic: FXN 3 forward 9:69043090-69043113; SpCas9
ggtcgtttcaaagatgtgtg

SEQ ID NO: 39075 - DNA, 19 bp, Artificial Sequence
  Synthetic: FXN 3 forward 9:69043091-69043113; SpCas9
gtcgtttcaaagatgtgtg

SEQ ID NO: 39076 - DNA, 18 bp, Artificial Sequence
  Synthetic: FXN 3 forward 9:69043092-69043113; SpCas9
tcgtttcaaagatgtgtg

SEQ ID NO: 39077 - DNA, 25 bp, Artificial Sequence
  Synthetic: FXN 3 forward 9:69043087-69043115; SpCas9
tggggtcgtttcaaagatgtgtgca

SEQ ID NO: 39078 - DNA, 24 bp, Artificial Sequence
  Synthetic: FXN 3 forward 9:69043088-69043115; SpCas9
ggggtcgtttcaaagatgtgtgca

SEQ ID NO: 39079 - DNA, 23 bp, Artificial Sequence
  Synthetic: FXN 3 forward 9:69043089-69043115; SpCas9
gggtcgtttcaaagatgtgtgca

SEQ ID NO: 39080 - DNA, 22 bp, Artificial Sequence
  Synthetic: FXN 3 forward 9:69043090-69043115; SpCas9
ggtcgtttcaaagatgtgtgca

SEQ ID NO: 39081 - DNA, 21 bp, Artificial Sequence
  Synthetic: FXN 3 forward 9:69043091-69043115; SpCas9
gtcgtttcaaagatgtgtgca

SEQ ID NO: 39082 - DNA, 20 bp, Artificial Sequence
  Synthetic: FXN 3 forward 9:69043092-69043115; SpCas9
tcgtttcaaagatgtgtgca

SEQ ID NO: 39083 - DNA, 19 bp, Artificial Sequence
  Synthetic: FXN 3 forward 9:69043093-69043115; SpCas9
cgtttcaaagatgtgtgca

SEQ ID NO: 39084 - DNA, 18 bp, Artificial Sequence
  Synthetic: FXN 3 forward 9:69043094-69043115; SpCas9
gtttcaaagatgtgtgca

SEQ ID NO: 39085 - DNA, 25 bp, Artificial Sequence
  Synthetic: FXN 3 forward 9:69043090-69043118; SpCas9
ggtcgtttcaaagatgtgtgcagag

SEQ ID NO: 39086 - DNA, 24 bp, Artificial Sequence
  Synthetic: FXN 3 forward 9:69043091-69043118; SpCas9
gtcgtttcaaagatgtgtgcagag

SEQ ID NO: 39087 - DNA, 23 bp, Artificial Sequence
  Synthetic: FXN 3 forward 9:69043092-69043118; SpCas9
tcgtttcaaagatgtgtgcagag

SEQ ID NO: 39088 - DNA, 22 bp, Artificial Sequence
  Synthetic: FXN 3 forward 9:69043093-69043118; SpCas9
cgtttcaaagatgtgtgcagag

SEQ ID NO: 39089 - DNA, 21 bp, Artificial Sequence
  Synthetic: FXN 3 forward 9:69043094-69043118; SpCas9
gtttcaaagatgtgtgcagag

SEQ ID NO: 39090 - DNA, 20 bp, Artificial Sequence
  Synthetic: FXN 3 forward 9:69043095-69043118; SpCas9
tttcaaagatgtgtgcagag

SEQ ID NO: 39091 - DNA, 19 bp, Artificial Sequence
  Synthetic: FXN 3 forward 9:69043096-69043118; SpCas9
ttcaaagatgtgtgcagag

SEQ ID NO: 39092 - DNA, 18 bp, Artificial Sequence
  Synthetic: FXN 3 forward 9:69043097-69043118; SpCas9
tcaaagatgtgtgcagag

SEQ ID NO: 39093 - DNA, 25 bp, Artificial Sequence
  Synthetic: FXN 3 forward 9:69043104-69043132; SpCas9
tgtgtgcagagcggcaaaaaaatgt

SEQ ID NO: 39094 - DNA, 24 bp, Artificial Sequence
  Synthetic: FXN 3 forward 9:69043105-69043132; SpCas9
gtgtgcagagcggcaaaaaaatgt

SEQ ID NO: 39095 - DNA, 23 bp, Artificial Sequence
  Synthetic: FXN 3 forward 9:69043106-69043132; SpCas9
tgtgcagagcggcaaaaaaatgt

SEQ ID NO: 39096 - DNA, 22 bp, Artificial Sequence
  Synthetic: FXN 3 forward 9:69043107-69043132; SpCas9
gtgcagagcggcaaaaaaatgt

SEQ ID NO: 39097 - DNA, 21 bp, Artificial Sequence
  Synthetic: FXN 3 forward 9:69043108-69043132; SpCas9
tgcagagcggcaaaaaaatgt

SEQ ID NO: 39098 - DNA, 20 bp, Artificial Sequence
  Synthetic: FXN 3 forward 9:69043109-69043132; SpCas9
gcagagcggcaaaaaaatgt

SEQ ID NO: 39099 - DNA, 19 bp, Artificial Sequence
  Synthetic: FXN 3 forward 9:69043110-69043132; SpCas9
cagagcggcaaaaaaatgt

SEQ ID NO: 39100 - DNA, 18 bp, Artificial Sequence
  Synthetic: FXN 3 forward 9:69043111-69043132; SpCas9
agagcggcaaaaaaatgt

SEQ ID NO: 39101 - DNA, 25 bp, Artificial Sequence
  Synthetic: FXN 3 forward 9:69043113-69043141; SpCas9
agcggcaaaaaaatgtgagctcctc

SEQ ID NO: 39102 - DNA, 24 bp, Artificial Sequence
  Synthetic: FXN 3 forward 9:69043114-69043141; SpCas9
gcggcaaaaaaatgtgagctcctc

SEQ ID NO: 39103 - DNA, 23 bp, Artificial Sequence
  Synthetic: FXN 3 forward 9:69043115-69043141; SpCas9
cggcaaaaaaatgtgagctcctc

SEQ ID NO: 39104 - DNA, 22 bp, Artificial Sequence
  Synthetic: FXN 3 forward 9:69043116-69043141; SpCas9
ggcaaaaaaatgtgagctcctc

SEQ ID NO: 39105 - DNA, 21 bp, Artificial Sequence
  Synthetic: FXN 3 forward 9:69043117-69043141; SpCas9
gcaaaaaaatgtgagctcctc

SEQ ID NO: 39106 - DNA, 20 bp, Artificial Sequence
  Synthetic: FXN 3 forward 9:69043118-69043141; SpCas9
caaaaaaatgtgagctcctc

SEQ ID NO: 39107 - DNA, 19 bp, Artificial Sequence
  Synthetic: FXN 3 forward 9:69043119-69043141; SpCas9
aaaaaaatgtgagctcctc

SEQ ID NO: 39108 - DNA, 18 bp, Artificial Sequence
  Synthetic: FXN 3 forward 9:69043120-69043141; SpCas9
aaaaaatgtgagctcctc

SEQ ID NO: 39109 - DNA, 25 bp, Artificial Sequence
  Synthetic: FXN 3 forward 9:69043114-69043142; SpCas9
gcggcaaaaaaatgtgagctcctcc

SEQ ID NO: 39110 - DNA, 24 bp, Artificial Sequence
  Synthetic: FXN 3 forward 9:69043115-69043142; SpCas9
cggcaaaaaaatgtgagctcctcc

SEQ ID NO: 39111 - DNA, 23 bp, Artificial Sequence
  Synthetic: FXN 3 forward 9:69043116-69043142; SpCas9
ggcaaaaaaatgtgagctcctcc

SEQ ID NO: 39112 - DNA, 22 bp, Artificial Sequence
  Synthetic: FXN 3 forward 9:69043117-69043142; SpCas9
gcaaaaaaatgtgagctcctcc

SEQ ID NO: 39113 - DNA, 21 bp, Artificial Sequence
  Synthetic: FXN 3 forward 9:69043118-69043142; SpCas9
caaaaaaatgtgagctcctcc

SEQ ID NO: 39114 - DNA, 20 bp, Artificial Sequence
  Synthetic: FXN 3 forward 9:69043119-69043142; SpCas9
aaaaaaatgtgagctcctcc

SEQ ID NO: 39115 - DNA, 19 bp, Artificial Sequence
  Synthetic: FXN 3 forward 9:69043120-69043142; SpCas9
aaaaaatgtgagctcctcc

SEQ ID NO: 39116 - DNA, 18 bp, Artificial Sequence
  Synthetic: FXN 3 forward 9:69043121-69043142; SpCas9
aaaaatgtgagctcctcc

SEQ ID NO: 39117 - DNA, 25 bp, Artificial Sequence
  Synthetic: FXN 3 forward 9:69043127-69043155; SpCas9
gtgagctcctccaggctcatgttcc

SEQ ID NO: 39118 - DNA, 24 bp, Artificial Sequence
  Synthetic: FXN 3 forward 9:69043128-69043155; SpCas9
tgagctcctccaggctcatgttcc

SEQ ID NO: 39119 - DNA, 23 bp, Artificial Sequence
  Synthetic: FXN 3 forward 9:69043129-69043155; SpCas9
gagctcctccaggctcatgttcc

SEQ ID NO: 39120 - DNA, 22 bp, Artificial Sequence
  Synthetic: FXN 3 forward 9:69043130-69043155; SpCas9
agctcctccaggctcatgttcc

SEQ ID NO: 39121 - DNA, 21 bp, Artificial Sequence
  Synthetic: FXN 3 forward 9:69043131-69043155; SpCas9
gctcctccaggctcatgttcc

SEQ ID NO: 39122 - DNA, 20 bp, Artificial Sequence
  Synthetic: FXN 3 forward 9:69043132-69043155; SpCas9
ctcctccaggctcatgttcc

SEQ ID NO: 39123 - DNA, 19 bp, Artificial Sequence
  Synthetic: FXN 3 forward 9:69043133-69043155; SpCas9
tcctccaggctcatgttcc

SEQ ID NO: 39124 - DNA, 18 bp, Artificial Sequence
  Synthetic: FXN 3 forward 9:69043134-69043155; SpCas9
cctccaggctcatgttcc

SEQ ID NO: 39125 - DNA, 25 bp, Artificial Sequence
  Synthetic: FXN 3 forward 9:69043132-69043160; SpCas9
ctcctccaggctcatgttcccagcc

SEQ ID NO: 39126 - DNA, 24 bp, Artificial Sequence
  Synthetic: FXN 3 forward 9:69043133-69043160; SpCas9
tcctccaggctcatgttcccagcc

SEQ ID NO: 39127 - DNA, 23 bp, Artificial Sequence
  Synthetic: FXN 3 forward 9:69043134-69043160; SpCas9
cctccaggctcatgttcccagcc

SEQ ID NO: 39128 - DNA, 22 bp, Artificial Sequence
  Synthetic: FXN 3 forward 9:69043135-69043160; SpCas9
ctccaggctcatgttcccagcc

SEQ ID NO: 39129 - DNA, 21 bp, Artificial Sequence
  Synthetic: FXN 3 forward 9:69043136-69043160; SpCas9
tccaggctcatgttcccagcc

SEQ ID NO: 39130 - DNA, 20 bp, Artificial Sequence
  Synthetic: FXN 3 forward 9:69043137-69043160; SpCas9
ccaggctcatgttcccagcc

SEQ ID NO: 39131 - DNA, 19 bp, Artificial Sequence
  Synthetic: FXN 3 forward 9:69043138-69043160; SpCas9
caggctcatgttcccagcc

SEQ ID NO: 39132 - DNA, 18 bp, Artificial Sequence
  Synthetic: FXN 3 forward 9:69043139-69043160; SpCas9
aggctcatgttcccagcc

SEQ ID NO: 39133 - DNA, 25 bp, Artificial Sequence
  Synthetic: FXN 3 reverse 9:69043132-69043160; SpCas9
cttggctgggaacatgagcctggag

SEQ ID NO: 39134 - DNA, 24 bp, Artificial Sequence
  Synthetic: FXN 3 reverse 9:69043133-69043160; SpCas9
ttggctgggaacatgagcctggag

SEQ ID NO: 39135 - DNA, 23 bp, Artificial Sequence
  Synthetic: FXN 3 reverse 9:69043134-69043160; SpCas9
tggctgggaacatgagcctggag

SEQ ID NO: 39136 - DNA, 22 bp, Artificial Sequence
  Synthetic: FXN 3 reverse 9:69043135-69043160; SpCas9
ggctgggaacatgagcctggag

SEQ ID NO: 39137 - DNA, 21 bp, Artificial Sequence
  Synthetic: FXN 3 reverse 9:69043136-69043160; SpCas9
gctgggaacatgagcctggag

SEQ ID NO: 39138 - DNA, 20 bp, Artificial Sequence
  Synthetic: FXN 3 reverse 9:69043137-69043160; SpCas9
ctgggaacatgagcctggag

SEQ ID NO: 39139 - DNA, 19 bp, Artificial Sequence
  Synthetic: FXN 3 reverse 9:69043138-69043160; SpCas9
tgggaacatgagcctggag

SEQ ID NO: 39140 - DNA, 18 bp, Artificial Sequence
  Synthetic: FXN 3 reverse 9:69043139-69043160; SpCas9
gggaacatgagcctggag

SEQ ID NO: 39141 - DNA, 25 bp, Artificial Sequence
  Synthetic: FXN 3 forward 9:69043133-69043161; SpCas9
tcctccaggctcatgttcccagcca

SEQ ID NO: 39142 - DNA, 24 bp, Artificial Sequence
  Synthetic: FXN 3 forward 9:69043134-69043161; SpCas9
cctccaggctcatgttcccagcca

SEQ ID NO: 39143 - DNA, 23 bp, Artificial Sequence
  Synthetic: FXN 3 forward 9:69043135-69043161; SpCas9
ctccaggctcatgttcccagcca

SEQ ID NO: 39144 - DNA, 22 bp, Artificial Sequence
  Synthetic: FXN 3 forward 9:69043136-69043161; SpCas9
tccaggctcatgttcccagcca

SEQ ID NO: 39145 - DNA, 21 bp, Artificial Sequence
  Synthetic: FXN 3 forward 9:69043137-69043161; SpCas9
ccaggctcatgttcccagcca

SEQ ID NO: 39146 - DNA, 20 bp, Artificial Sequence
  Synthetic: FXN 3 forward 9:69043138-69043161; SpCas9
caggctcatgttcccagcca

SEQ ID NO: 39147 - DNA, 19 bp, Artificial Sequence
  Synthetic: FXN 3 forward 9:69043139-69043161; SpCas9
aggctcatgttcccagcca

SEQ ID NO: 39148 - DNA, 18 bp, Artificial Sequence
  Synthetic: FXN 3 forward 9:69043140-69043161; SpCas9
ggctcatgttcccagcca

SEQ ID NO: 39149 - DNA, 25 bp, Artificial Sequence
  Synthetic: FXN 3 reverse 9:69043134-69043162; SpCas9
accttggctgggaacatgagcctgg

SEQ ID NO: 39150 - DNA, 24 bp, Artificial Sequence
  Synthetic: FXN 3 reverse 9:69043135-69043162; SpCas9
ccttggctgggaacatgagcctgg

SEQ ID NO: 39151 - DNA, 23 bp, Artificial Sequence
  Synthetic: FXN 3 reverse 9:69043136-69043162; SpCas9
cttggctgggaacatgagcctgg

SEQ ID NO: 39152 - DNA, 22 bp, Artificial Sequence
  Synthetic: FXN 3 reverse 9:69043137-69043162; SpCas9
ttggctgggaacatgagcctgg

SEQ ID NO: 39153 - DNA, 21 bp, Artificial Sequence
  Synthetic: FXN 3 reverse 9:69043138-69043162; SpCas9
tggctgggaacatgagcctgg

SEQ ID NO: 39154 - DNA, 20 bp, Artificial Sequence
  Synthetic: FXN 3 reverse 9:69043139-69043162; SpCas9
ggctgggaacatgagcctgg

SEQ ID NO: 39155 - DNA, 19 bp, Artificial Sequence
  Synthetic: FXN 3 reverse 9:69043140-69043162; SpCas9
gctgggaacatgagcctgg

SEQ ID NO: 39156 - DNA, 18 bp, Artificial Sequence
  Synthetic: FXN 3 reverse 9:69043141-69043162; SpCas9
ctgggaacatgagcctgg

SEQ ID NO: 39157 - DNA, 25 bp, Artificial Sequence
  Synthetic: FXN 3 reverse 9:69043135-69043163; SpCas9
gaccttggctgggaacatgagcctg

SEQ ID NO: 39158 - DNA, 24 bp, Artificial Sequence
  Synthetic: FXN 3 reverse 9:69043136-69043163; SpCas9
accttggctgggaacatgagcctg

SEQ ID NO: 39159 - DNA, 23 bp, Artificial Sequence
  Synthetic: FXN 3 reverse 9:69043137-69043163; SpCas9
ccttggctgggaacatgagcctg

SEQ ID NO: 39160 - DNA, 22 bp, Artificial Sequence
  Synthetic: FXN 3 reverse 9:69043138-69043163; SpCas9
cttggctgggaacatgagcctg

SEQ ID NO: 39161 - DNA, 21 bp, Artificial Sequence
  Synthetic: FXN 3 reverse 9:69043139-69043163; SpCas9
ttggctgggaacatgagcctg

SEQ ID NO: 39162 - DNA, 20 bp, Artificial Sequence
  Synthetic: FXN 3 reverse 9:69043140-69043163; SpCas9
tggctgggaacatgagcctg

SEQ ID NO: 39163 - DNA, 19 bp, Artificial Sequence
  Synthetic: FXN 3 reverse 9:69043141-69043163; SpCas9
ggctgggaacatgagcctg

SEQ ID NO: 39164 - DNA, 18 bp, Artificial Sequence
  Synthetic: FXN 3 reverse 9:69043142-69043163; SpCas9
gctgggaacatgagcctg

SEQ ID NO: 39165 - DNA, 25 bp, Artificial Sequence
  Synthetic: FXN 3 reverse 9:69043137-69043165; SpCas9
tggaccttggctgggaacatgagcc

SEQ ID NO: 39166 - DNA, 24 bp, Artificial Sequence
  Synthetic: FXN 3 reverse 9:69043138-69043165; SpCas9
ggaccttggctgggaacatgagcc

SEQ ID NO: 39167 - DNA, 23 bp, Artificial Sequence
  Synthetic: FXN 3 reverse 9:69043139-69043165; SpCas9
gaccttggctgggaacatgagcc

SEQ ID NO: 39168 - DNA, 22 bp, Artificial Sequence
  Synthetic: FXN 3 reverse 9:69043140-69043165; SpCas9
accttggctgggaacatgagcc

SEQ ID NO: 39169 - DNA, 21 bp, Artificial Sequence
  Synthetic: FXN 3 reverse 9:69043141-69043165; SpCas9
ccttggctgggaacatgagcc

SEQ ID NO: 39170 - DNA, 20 bp, Artificial Sequence
  Synthetic: FXN 3 reverse 9:69043142-69043165; SpCas9
cttggctgggaacatgagcc

SEQ ID NO: 39171 - DNA, 19 bp, Artificial Sequence
  Synthetic: FXN 3 reverse 9:69043143-69043165; SpCas9
ttggctgggaacatgagcc

SEQ ID NO: 39172 - DNA, 18 bp, Artificial Sequence
  Synthetic: FXN 3 reverse 9:69043144-69043165; SpCas9
tggctgggaacatgagcc

SEQ ID NO: 39173 - DNA, 25 bp, Artificial Sequence
  Synthetic: FXN 3 reverse 9:69043142-69043170; SpCas9
tttgttggaccttggctgggaacat

SEQ ID NO: 39174 - DNA, 24 bp, Artificial Sequence
  Synthetic: FXN 3 reverse 9:69043143-69043170; SpCas9
ttgttggaccttggctgggaacat

SEQ ID NO: 39175 - DNA, 23 bp, Artificial Sequence
  Synthetic: FXN 3 reverse 9:69043144-69043170; SpCas9
tgttggaccttggctgggaacat

SEQ ID NO: 39176 - DNA, 22 bp, Artificial Sequence
  Synthetic: FXN 3 reverse 9:69043145-69043170; SpCas9
gttggaccttggctgggaacat

SEQ ID NO: 39177 - DNA, 21 bp, Artificial Sequence
  Synthetic: FXN 3 reverse 9:69043146-69043170; SpCas9
ttggaccttggctgggaacat

SEQ ID NO: 39178 - DNA, 20 bp, Artificial Sequence
  Synthetic: FXN 3 reverse 9:69043147-69043170; SpCas9
tggaccttggctgggaacat

SEQ ID NO: 39179 - DNA, 19 bp, Artificial Sequence
  Synthetic: FXN 3 reverse 9:69043148-69043170; SpCas9
ggaccttggctgggaacat

SEQ ID NO: 39180 - DNA, 18 bp, Artificial Sequence
  Synthetic: FXN 3 reverse 9:69043149-69043170; SpCas9
gaccttggctgggaacat

SEQ ID NO: 39181 - DNA, 25 bp, Artificial Sequence
  Synthetic: FXN 3 forward 9:69043143-69043171; SpCas9
tcatgttcccagccaaggtccaaca

SEQ ID NO: 39182 - DNA, 24 bp, Artificial Sequence
  Synthetic: FXN 3 forward 9:69043144-69043171; SpCas9
catgttcccagccaaggtccaaca

SEQ ID NO: 39183 - DNA, 23 bp, Artificial Sequence
  Synthetic: FXN 3 forward 9:69043145-69043171; SpCas9
atgttcccagccaaggtccaaca

SEQ ID NO: 39184 - DNA, 22 bp, Artificial Sequence
  Synthetic: FXN 3 forward 9:69043146-69043171; SpCas9
tgttcccagccaaggtccaaca

SEQ ID NO: 39185 - DNA, 21 bp, Artificial Sequence
  Synthetic: FXN 3 forward 9:69043147-69043171; SpCas9
gttcccagccaaggtccaaca

SEQ ID NO: 39186 - DNA, 20 bp, Artificial Sequence
  Synthetic: FXN 3 forward 9:69043148-69043171; SpCas9
ttcccagccaaggtccaaca

SEQ ID NO: 39187 - DNA, 19 bp, Artificial Sequence
  Synthetic: FXN 3 forward 9:69043149-69043171; SpCas9
tcccagccaaggtccaaca

SEQ ID NO: 39188 - DNA, 18 bp, Artificial Sequence
  Synthetic: FXN 3 forward 9:69043150-69043171; SpCas9
cccagccaaggtccaaca

SEQ ID NO: 39189 - DNA, 25 bp, Artificial Sequence
  Synthetic: FXN 3 reverse 9:69043150-69043178; SpCas9
ggcagcactttgttggaccttggct

SEQ ID NO: 39190 - DNA, 24 bp, Artificial Sequence
  Synthetic: FXN 3 reverse 9:69043151-69043178; SpCas9
gcagcactttgttggaccttggct

SEQ ID NO: 39191 - DNA, 23 bp, Artificial Sequence
  Synthetic: FXN 3 reverse 9:69043152-69043178; SpCas9
cagcactttgttggaccttggct

SEQ ID NO: 39192 - DNA, 22 bp, Artificial Sequence
  Synthetic: FXN 3 reverse 9:69043153-69043178; SpCas9
agcactttgttggaccttggct

SEQ ID NO: 39193 - DNA, 21 bp, Artificial Sequence
  Synthetic: FXN 3 reverse 9:69043154-69043178; SpCas9
gcactttgttggaccttggct

SEQ ID NO: 39194 - DNA, 20 bp, Artificial Sequence
  Synthetic: FXN 3 reverse 9:69043155-69043178; SpCas9
cactttgttggaccttggct

SEQ ID NO: 39195 - DNA, 19 bp, Artificial Sequence
  Synthetic: FXN 3 reverse 9:69043156-69043178; SpCas9
actttgttggaccttggct

SEQ ID NO: 39196 - DNA, 18 bp, Artificial Sequence
  Synthetic: FXN 3 reverse 9:69043157-69043178; SpCas9
ctttgttggaccttggct

SEQ ID NO: 39197 - DNA, 25 bp, Artificial Sequence
  Synthetic: FXN 3 reverse 9:69043151-69043179; SpCas9
gggcagcactttgttggaccttggc

SEQ ID NO: 39198 - DNA, 24 bp, Artificial Sequence
  Synthetic: FXN 3 reverse 9:69043152-69043179; SpCas9
ggcagcactttgttggaccttggc

SEQ ID NO: 39199 - DNA, 23 bp, Artificial Sequence
  Synthetic: FXN 3 reverse 9:69043153-69043179; SpCas9
gcagcactttgttggaccttggc

SEQ ID NO: 39200 - DNA, 22 bp, Artificial Sequence
  Synthetic: FXN 3 reverse 9:69043154-69043179; SpCas9
cagcactttgttggaccttggc

SEQ ID NO: 39201 - DNA, 21 bp, Artificial Sequence
  Synthetic: FXN 3 reverse 9:69043155-69043179; SpCas9
agcactttgttggaccttggc

SEQ ID NO: 39202 - DNA, 20 bp, Artificial Sequence
  Synthetic: FXN 3 reverse 9:69043156-69043179; SpCas9
gcactttgttggaccttggc

SEQ ID NO: 39203 - DNA, 19 bp, Artificial Sequence
  Synthetic: FXN 3 reverse 9:69043157-69043179; SpCas9
cactttgttggaccttggc

SEQ ID NO: 39204 - DNA, 18 bp, Artificial Sequence
  Synthetic: FXN 3 reverse 9:69043158-69043179; SpCas9
actttgttggaccttggc

SEQ ID NO: 39205 - DNA, 25 bp, Artificial Sequence
  Synthetic: FXN 3 reverse 9:69043155-69043183; SpCas9
ggcagggcagcactttgttggacct

SEQ ID NO: 39206 - DNA, 24 bp, Artificial Sequence
  Synthetic: FXN 3 reverse 9:69043156-69043183; SpCas9
gcagggcagcactttgttggacct

SEQ ID NO: 39207 - DNA, 23 bp, Artificial Sequence
  Synthetic: FXN 3 reverse 9:69043157-69043183; SpCas9
cagggcagcactttgttggacct

SEQ ID NO: 39208 - DNA, 22 bp, Artificial Sequence
  Synthetic: FXN 3 reverse 9:69043158-69043183; SpCas9
agggcagcactttgttggacct

SEQ ID NO: 39209 - DNA, 21 bp, Artificial Sequence
  Synthetic: FXN 3 reverse 9:69043159-69043183; SpCas9
gggcagcactttgttggacct

SEQ ID NO: 39210 - DNA, 20 bp, Artificial Sequence
  Synthetic: FXN 3 reverse 9:69043160-69043183; SpCas9
ggcagcactttgttggacct

SEQ ID NO: 39211 - DNA, 19 bp, Artificial Sequence
  Synthetic: FXN 3 reverse 9:69043161-69043183; SpCas9
gcagcactttgttggacct

SEQ ID NO: 39212 - DNA, 18 bp, Artificial Sequence
  Synthetic: FXN 3 reverse 9:69043162-69043183; SpCas9
cagcactttgttggacct

SEQ ID NO: 39213 - DNA, 25 bp, Artificial Sequence
  Synthetic: FXN 3 reverse 9:69043162-69043190; SpCas9
ataagaaggcagggcagcactttgt

SEQ ID NO: 39214 - DNA, 24 bp, Artificial Sequence
  Synthetic: FXN 3 reverse 9:69043163-69043190; SpCas9
taagaaggcagggcagcactttgt

SEQ ID NO: 39215 - DNA, 23 bp, Artificial Sequence
  Synthetic: FXN 3 reverse 9:69043164-69043190; SpCas9
aagaaggcagggcagcactttgt

SEQ ID NO: 39216 - DNA, 22 bp, Artificial Sequence
  Synthetic: FXN 3 reverse 9:69043165-69043190; SpCas9
agaaggcagggcagcactttgt

SEQ ID NO: 39217 - DNA, 21 bp, Artificial Sequence
  Synthetic: FXN 3 reverse 9:69043166-69043190; SpCas9
gaaggcagggcagcactttgt

SEQ ID NO: 39218 - DNA, 20 bp, Artificial Sequence
  Synthetic: FXN 3 reverse 9:69043167-69043190; SpCas9
aaggcagggcagcactttgt

SEQ ID NO: 39219 - DNA, 19 bp, Artificial Sequence
  Synthetic: FXN 3 reverse 9:69043168-69043190; SpCas9
aggcagggcagcactttgt

SEQ ID NO: 39220 - DNA, 18 bp, Artificial Sequence
  Synthetic: FXN 3 reverse 9:69043169-69043190; SpCas9
ggcagggcagcactttgt

SEQ ID NO: 39221 - DNA, 25 bp, Artificial Sequence
  Synthetic: FXN 3 forward 9:69043167-69043195; SpCas9
aaagtgctgccctgccttcttattt

SEQ ID NO: 39222 - DNA, 24 bp, Artificial Sequence
  Synthetic: FXN 3 forward 9:69043168-69043195; SpCas9
aagtgctgccctgccttcttattt

SEQ ID NO: 39223 - DNA, 23 bp, Artificial Sequence
  Synthetic: FXN 3 forward 9:69043169-69043195; SpCas9
agtgctgccctgccttcttattt

SEQ ID NO: 39224 - DNA, 22 bp, Artificial Sequence
  Synthetic: FXN 3 forward 9:69043170-69043195; SpCas9
gtgctgccctgccttcttattt

SEQ ID NO: 39225 - DNA, 21 bp, Artificial Sequence
  Synthetic: FXN 3 forward 9:69043171-69043195; SpCas9
tgctgccctgccttcttattt

SEQ ID NO: 39226 - DNA, 20 bp, Artificial Sequence
  Synthetic: FXN 3 forward 9:69043172-69043195; SpCas9
gctgccctgccttcttattt

SEQ ID NO: 39227 - DNA, 19 bp, Artificial Sequence
  Synthetic: FXN 3 forward 9:69043173-69043195; SpCas9
ctgccctgccttcttattt

SEQ ID NO: 39228 - DNA, 18 bp, Artificial Sequence
  Synthetic: FXN 3 forward 9:69043174-69043195; SpCas9
tgccctgccttcttattt

SEQ ID NO: 39229 - DNA, 25 bp, Artificial Sequence
  Synthetic: FXN 3 reverse 9:69043173-69043201; SpCas9
tgacagctgaaataagaaggcaggg

SEQ ID NO: 39230 - DNA, 24 bp, Artificial Sequence
  Synthetic: FXN 3 reverse 9:69043174-69043201; SpCas9
gacagctgaaataagaaggcaggg

SEQ ID NO: 39231 - DNA, 23 bp, Artificial Sequence
  Synthetic: FXN 3 reverse 9:69043175-69043201; SpCas9
acagctgaaataagaaggcaggg

SEQ ID NO: 39232 - DNA, 22 bp, Artificial Sequence
  Synthetic: FXN 3 reverse 9:69043176-69043201; SpCas9
cagctgaaataagaaggcaggg

SEQ ID NO: 39233 - DNA, 21 bp, Artificial Sequence
  Synthetic: FXN 3 reverse 9:69043177-69043201; SpCas9
agctgaaataagaaggcaggg

SEQ ID NO: 39234 - DNA, 20 bp, Artificial Sequence
  Synthetic: FXN 3 reverse 9:69043178-69043201; SpCas9
gctgaaataagaaggcaggg

SEQ ID NO: 39235 - DNA, 19 bp, Artificial Sequence
  Synthetic: FXN 3 reverse 9:69043179-69043201; SpCas9
ctgaaataagaaggcaggg

SEQ ID NO: 39236 - DNA, 18 bp, Artificial Sequence
  Synthetic: FXN 3 reverse 9:69043180-69043201; SpCas9
tgaaataagaaggcaggg

SEQ ID NO: 39237 - DNA, 25 bp, Artificial Sequence
  Synthetic: FXN 3 forward 9:69043176-69043204; SpCas9
ccctgccttcttatttcagctgtca

SEQ ID NO: 39238 - DNA, 24 bp, Artificial Sequence
  Synthetic: FXN 3 forward 9:69043177-69043204; SpCas9
cctgccttcttatttcagctgtca

SEQ ID NO: 39239 - DNA, 23 bp, Artificial Sequence
  Synthetic: FXN 3 forward 9:69043178-69043204; SpCas9
ctgccttcttatttcagctgtca

SEQ ID NO: 39240 - DNA, 22 bp, Artificial Sequence
  Synthetic: FXN 3 forward 9:69043179-69043204; SpCas9
tgccttcttatttcagctgtca

SEQ ID NO: 39241 - DNA, 21 bp, Artificial Sequence
  Synthetic: FXN 3 forward 9:69043180-69043204; SpCas9
gccttcttatttcagctgtca

SEQ ID NO: 39242 - DNA, 20 bp, Artificial Sequence
  Synthetic: FXN 3 forward 9:69043181-69043204; SpCas9
ccttcttatttcagctgtca

SEQ ID NO: 39243 - DNA, 19 bp, Artificial Sequence
  Synthetic: FXN 3 forward 9:69043182-69043204; SpCas9
cttcttatttcagctgtca

SEQ ID NO: 39244 - DNA, 18 bp, Artificial Sequence
  Synthetic: FXN 3 forward 9:69043183-69043204; SpCas9
ttcttatttcagctgtca

SEQ ID NO: 39245 - DNA, 25 bp, Artificial Sequence
  Synthetic: FXN 3 reverse 9:69043176-69043204; SpCas9
ctatgacagctgaaataagaaggca

SEQ ID NO: 39246 - DNA, 24 bp, Artificial Sequence
  Synthetic: FXN 3 reverse 9:69043177-69043204; SpCas9
tatgacagctgaaataagaaggca

SEQ ID NO: 39247 - DNA, 23 bp, Artificial Sequence
  Synthetic: FXN 3 reverse 9:69043178-69043204; SpCas9
atgacagctgaaataagaaggca

SEQ ID NO: 39248 - DNA, 22 bp, Artificial Sequence
  Synthetic: FXN 3 reverse 9:69043179-69043204; SpCas9
tgacagctgaaataagaaggca

SEQ ID NO: 39249 - DNA, 21 bp, Artificial Sequence
  Synthetic: FXN 3 reverse 9:69043180-69043204; SpCas9
gacagctgaaataagaaggca

SEQ ID NO: 39250 - DNA, 20 bp, Artificial Sequence
  Synthetic: FXN 3 reverse 9:69043181-69043204; SpCas9
acagctgaaataagaaggca

SEQ ID NO: 39251 - DNA, 19 bp, Artificial Sequence
  Synthetic: FXN 3 reverse 9:69043182-69043204; SpCas9
cagctgaaataagaaggca

SEQ ID NO: 39252 - DNA, 18 bp, Artificial Sequence
  Synthetic: FXN 3 reverse 9:69043183-69043204; SpCas9
agctgaaataagaaggca

SEQ ID NO: 39253 - DNA, 25 bp, Artificial Sequence
  Synthetic: FXN 3 reverse 9:69043177-69043205; SpCas9
actatgacagctgaaataagaaggc

SEQ ID NO: 39254 - DNA, 24 bp, Artificial Sequence
  Synthetic: FXN 3 reverse 9:69043178-69043205; SpCas9
ctatgacagctgaaataagaaggc

SEQ ID NO: 39255 - DNA, 23 bp, Artificial Sequence
  Synthetic: FXN 3 reverse 9:69043179-69043205; SpCas9
tatgacagctgaaataagaaggc

SEQ ID NO: 39256 - DNA, 22 bp, Artificial Sequence
  Synthetic: FXN 3 reverse 9:69043180-69043205; SpCas9
atgacagctgaaataagaaggc

SEQ ID NO: 39257 - DNA, 21 bp, Artificial Sequence
  Synthetic: FXN 3 reverse 9:69043181-69043205; SpCas9
tgacagctgaaataagaaggc

SEQ ID NO: 39258 - DNA, 20 bp, Artificial Sequence
  Synthetic: FXN 3 reverse 9:69043182-69043205; SpCas9
gacagctgaaataagaaggc

SEQ ID NO: 39259 - DNA, 19 bp, Artificial Sequence
  Synthetic: FXN 3 reverse 9:69043183-69043205; SpCas9
acagctgaaataagaaggc

SEQ ID NO: 39260 - DNA, 18 bp, Artificial Sequence
  Synthetic: FXN 3 reverse 9:69043184-69043205; SpCas9
cagctgaaataagaaggc

SEQ ID NO: 39261 - DNA, 25 bp, Artificial Sequence
  Synthetic: FXN 3 reverse 9:69043178-69043206; SpCas9
cactatgacagctgaaataagaagg

SEQ ID NO: 39262 - DNA, 24 bp, Artificial Sequence
  Synthetic: FXN 3 reverse 9:69043179-69043206; SpCas9
actatgacagctgaaataagaagg

SEQ ID NO: 39263 - DNA, 23 bp, Artificial Sequence
  Synthetic: FXN 3 reverse 9:69043180-69043206; SpCas9
ctatgacagctgaaataagaagg

SEQ ID NO: 39264 - DNA, 22 bp, Artificial Sequence
  Synthetic: FXN 3 reverse 9:69043181-69043206; SpCas9
tatgacagctgaaataagaagg

SEQ ID NO: 39265 - DNA, 21 bp, Artificial Sequence
  Synthetic: FXN 3 reverse 9:69043182-69043206; SpCas9
atgacagctgaaataagaagg

SEQ ID NO: 39266 - DNA, 20 bp, Artificial Sequence
  Synthetic: FXN 3 reverse 9:69043183-69043206; SpCas9
tgacagctgaaataagaagg

SEQ ID NO: 39267 - DNA, 19 bp, Artificial Sequence
  Synthetic: FXN 3 reverse 9:69043184-69043206; SpCas9
gacagctgaaataagaagg
